United States Patent Application Publication US 2021/0199660 A1 - sequence listing, part 52

SEQ ID NO: 744600 - DNA, 120 bp, Artificial Sequence
  ENSG00000204764_15 (sequence is synthesized)
tgttacaaaccttaaatactggggaagatatgagcctgtaatttcaaggactcttcagttcctaaatgacctttctgttggttatatccttttaaaaaaacttgtgaagatagatgctgt

SEQ ID NO: 744601 - DNA, 120 bp, Artificial Sequence
  ENSG00000204764_16 (sequence is synthesized)
gaaattcatgctaaaaaaccacacgagtgaacacttcccttttcttggcatcagtgacaatcatagtctcagcgacttcaggtgtcgaacaaccttctacacagcgctcactcgccttct

SEQ ID NO: 744602 - DNA, 120 bp, Artificial Sequence
  ENSG00000204764_17 (sequence is synthesized)
gatggtagatctgggtgaagatgaggatgaatttgagaatttcatgctgcctcttacagttgcttttgaaacagtattacaaatattcaacaacaactttaaacaagaagatgtaaagcg

SEQ ID NO: 744603 - DNA, 120 bp, Artificial Sequence
  ENSG00000204764_18 (sequence is synthesized)
tatgttgatcgggctggcaagagatcttcgagggattgcctttgcactgaacacaaagaccagctacaccatgctgtttgactggatgtacccaacgtaccttccccttcttcagaatgc

SEQ ID NO: 744604 - DNA, 120 bp, Artificial Sequence
  ENSG00000204764_19 (sequence is synthesized)
tgttgaacggtggtatggagagccaacatgtacaactcccatcttgaaacttatggcagaacttatgcaaaacagatcccagcgtttgaattttgatgtatcatctcctaatggaattct

SEQ ID NO: 744605 - DNA, 120 bp, Artificial Sequence
  ENSG00000204764_20 (sequence is synthesized)
tctcttcagagaagctagtaaaatggtttgcacttatggtaatcagatcctgtcccttgggagcctctcaaaagatcagatttatccaatgaaactcaagggcatctccatctgctattc

SEQ ID NO: 744606 - DNA, 120 bp, Artificial Sequence
  ENSG00000204764_21 (sequence is synthesized)
agctctcaagtctgccttgtgtggaaattatgtcagctttggcgtcttcaagttgtatggggacaaccattttgacaatgtactccaggcttttgtcaaaatgctgctgtcagtgtccca

SEQ ID NO: 744607 - DNA, 120 bp, Artificial Sequence
  ENSG00000204764_22 (sequence is synthesized)
cagtgacttgctacaataccggaaactgagccagtcttattatccactcctggaatgtctcactcaggaccatatgagcttcatcatcaacttagagcctcctgtactcatgtatgttct

SEQ ID NO: 744608 - DNA, 120 bp, Artificial Sequence
  ENSG00000204764_23 (sequence is synthesized)
cacatctatctcagagggactcactactcttgatacagttgtctcctccagctgctgtaccagtttagactacatcgtcacctacctcttcaagcacatagcaaaagagggcaagaagcc

SEQ ID NO: 744609 - DNA, 120 bp, Artificial Sequence
  ENSG00000204764_24 (sequence is synthesized)
acttcgatgcagagaggctacccaggctggtcagagactattacattttatgcagcaaaacccagatgtcctgcagcagatgatgtctgtcctcatgaacaccattgtctttgaagactg

SEQ ID NO: 744610 - DNA, 120 bp, Artificial Sequence
  ENSG00000204764_25 (sequence is synthesized)
tcggaaccagtggtcagtatccaggcctctcctggggctcatcctgctcaatgagaagtatttcagtgaactgagagcaagtttgataaacagccagcccctccccaagcaggaggtcct

SEQ ID NO: 744611 - DNA, 120 bp, Artificial Sequence
  ENSG00000204764_26 (sequence is synthesized)
tgcccagtgcttcagaaacctaatggaaggagtggagcagaacctgtccgtcaagaacagagacaggttcacccaaaatctgtctgtattcagaagagatgtggcagaggcgttgcgcag

SEQ ID NO: 744612 - DNA, 120 bp, Artificial Sequence
  ENSG00000204764_27 (sequence is synthesized)
tgatggcaacactgaaccatgcagtctcgacatgatgagctgacccgacttttctgaccatgtgcggagcagcctttatcaagagactcctgaaggtctgggtctcaggacagtgatgtt

SEQ ID NO: 744613 - DNA, 120 bp, Artificial Sequence
  ENSG00000204764_28 (sequence is synthesized)
ggctagcccaggggaatgtatttttcaaaacatacaagcaacagcaaaagccctaacttcttatacgtctagcctaattataagaatttctaacagtaccagtgtaaattcagtcttttc

SEQ ID NO: 744614 - DNA, 120 bp, Artificial Sequence
  ENSG00000204764_29 (sequence is synthesized)
tctgaaaagcaaaggatgtgttttcagtctttctatcaaatattatctttgttctcctaatgctctgaaaggatgtagaaacaatatttaaccaaagaacgtaataaaccaggtttgcac

SEQ ID NO: 744615 - DNA, 120 bp, Artificial Sequence
  ENSG00000204764_30 (sequence is synthesized)
ctaagtgtgtactagtttatggttctgcagtcaaggttgtcaatttgttggagatgcagccttcaccatggatcctggattgagacgaatgccattggaacctgttaaatgagtagtttg

SEQ ID NO: 744616 - DNA, 120 bp, Artificial Sequence
  ENSG00000204764_31 (sequence is synthesized)
ttatgtgtctggaagaagcagcgttagggactttgggctgtgagcatttagaacgagcctggaagcactacagagcatcccacaggaccacacgcaggcctccctgcctcagctgcatct

SEQ ID NO: 744617 - DNA, 120 bp, Artificial Sequence
  ENSG00000204764_32 (sequence is synthesized)
gataaagttgagagacagtaacacaattaaatgacttagaaacaatgtttgcttttcactggcataaatctgaagtggttcagtctagaagaattaagctgtgcaattactgcctgcaga

SEQ ID NO: 744618 - DNA, 120 bp, Artificial Sequence
  ENSG00000204764_33 (sequence is synthesized)
gatatttcttcaggaggagtcatgtagccccagtcagaagttctgggtggtgccagcacccagtcctctgcctccatttaatttttaagagaaggtgaaggtaactattagaatataata

SEQ ID NO: 744619 - DNA, 120 bp, Artificial Sequence
  ENSG00000204764_34 (sequence is synthesized)
tttgaagcagctctgccttcttagggctacccaaaacagttctaggtgctaaaattcagattttcagaggatgagaaatagctggtttccaactctccacaaaaactcttattactgttg

SEQ ID NO: 744620 - DNA, 120 bp, Artificial Sequence
  ENSG00000204764_35 (sequence is synthesized)
ggacttgggattctgactcaccccaaacccagaacatgaagaagacctttacagtttgtgctctactgttactaggctattaatttgagatcgtccactgtcaagtgttttactatctca

SEQ ID NO: 744621 - DNA, 120 bp, Artificial Sequence
  ENSG00000204764_36 (sequence is synthesized)
ctgctgtttttatgattcaggcttataacaaatattgtatcctttatttctgataagacatgaaaggttggccttactgttgaacaataagtaaatccacaggctcctgttgtaatctca

SEQ ID NO: 744622 - DNA, 120 bp, Artificial Sequence
  ENSG00000204764_37 (sequence is synthesized)
tgttggtgatcaacttcaaagaacctcaaagaagacagacatcttcctgtgaagggcttgtggcaaacctatccaactcgggtttcttcttccttgagaacgatctgattcatcatcatc

SEQ ID NO: 744623 - DNA, 120 bp, Artificial Sequence
  ENSG00000204764_38 (sequence is synthesized)
tgaaccagggatcacagtctaaggtccaggccttgcgtggctccccagcgccagtatcccttgctttactgaatagatgtgtttaagcaagttggctttgaaacaagtttctcctatgtg

SEQ ID NO: 744624 - DNA, 120 bp, Artificial Sequence
  ENSG00000204764_39 (sequence is synthesized)
aattgcattttctggttgacacccattacaaaattggaaatgcatttccatggaaaatctcctatgcccagttgtacgcctgaggagtgatgtacccagagttccagagaaggcttggaa

SEQ ID NO: 744625 - DNA, 120 bp, Artificial Sequence
  ENSG00000204764_40 (sequence is synthesized)
ggatcatagaggacattgtttccataggaaaaacttgattatgggcttttaatgtatgtgattattgagactatcatcctacaaagggggaaaagatattgtgaacccaaactgaaagat

SEQ ID NO: 744626 - DNA, 120 bp, Artificial Sequence
  ENSG00000204764_41 (sequence is synthesized)
tataattattacttgcaagtgggaaaaatgtatttcttcatattttgatacatagtcagttatgttttaatcagctttactgaggtataatttacatacaataaaattcagtgactttaa

SEQ ID NO: 744627 - DNA, 120 bp, Artificial Sequence
  ENSG00000204764_42 (sequence is synthesized)
aagaggtaagttatttgataattcaacttcctagttagaatatttgggaaattttaagagtttcaaaagaatttcagttgaattttccccccagttttgccttttaaagaattattgtgg

SEQ ID NO: 744628 - DNA, 120 bp, Artificial Sequence
  ENSG00000204764_43 (sequence is synthesized)
acagacttaagtatagtaaatttgcataagtctgtaagcagttccaaaaaattcacttttactcactgggcatatgataaggtgaaatccaaagggaatctaataacttatcttcaggta

SEQ ID NO: 744629 - DNA, 120 bp, Artificial Sequence
  ENSG00000204764_44 (sequence is synthesized)
gtagtttcattgccttcccagtgtagattctttaattatagaagctacttgagtattagtttctttatctgcttgcttatattttgataggatgcagatgaaaaatgaaatgacaatatt

SEQ ID NO: 744630 - DNA, 120 bp, Artificial Sequence
  ENSG00000204764_45 (sequence is synthesized)
ttcctgattcatcaactatcaaaatttattcatagtttagccaagatcgttgactttaacaacttctttgggaaatagtatttccccatttgctacttagtgccctattgaatattagtg

SEQ ID NO: 744631 - DNA, 120 bp, Artificial Sequence
  ENSG00000204764_46 (sequence is synthesized)
tgtattctcttgtataatatagggactccatcatgctattcaagcctgataattggtgtaatatagcattgctgaaagtatgcttcaataagcactagtttccatttatttcaattcttt

SEQ ID NO: 744632 - DNA, 120 bp, Artificial Sequence
  ENSG00000204764_47 (sequence is synthesized)
ggtttagtaacatgacaactgccacactatgtcagacccaaagaccttctattatcttaaaatttttcttttaacacagaaaattttaacatacacaaaagtagatagaatagtataacc

SEQ ID NO: 744633 - DNA, 120 bp, Artificial Sequence
  ENSG00000204764_48 (sequence is synthesized)
agttaacctgtcagccagttaaacagtagcaactcatggccaatcttgttttctctctattcctgcctacccacttctttttatattattcttcaagcagaatcccaaatttcatataat

SEQ ID NO: 744634 - DNA, 120 bp, Artificial Sequence
  ENSG00000204764_49 (sequence is synthesized)
ttcctctataaatatttcacaatatatctaaaaggtataattgtttttggtttgtgtgagaatgggcattatcttggaaataggattgttctccagaagctttgtgagtgtcctccaaca

SEQ ID NO: 744635 - DNA, 120 bp, Artificial Sequence
  ENSG00000204764_50 (sequence is synthesized)
ttcagagttctgattgcctttattagctgaatgtgattcttttatgcatgaagttaacccagtttttcttgaagaaggtaacattacttccttatatatggaacagtataactttgtaaa

SEQ ID NO: 744636 - DNA, 120 bp, Artificial Sequence
  ENSG00000204764_51 (sequence is synthesized)
cacggtgcagattccaacaacttggagaacaagtaagaaaaaactttggtatgaagggtcatcaacataaaggcacagtattaagcaatatagtttctgtatgtatagttatctttttgc

SEQ ID NO: 744637 - DNA, 120 bp, Artificial Sequence
  ENSG00000204764_52 (sequence is synthesized)
caggaattaaaaaaatagctcaaatggatttgtaacctgaagtagctgctgatagctaatattgaaatgttttctgtaattcatattatagtaacttctatattttgatttaggaaaaaa

SEQ ID NO: 744638 - DNA, 120 bp, Artificial Sequence
  ENSG00000204764_53 (sequence is synthesized)
tacattgcagtaatttgtttgaatgactgtctagagacatggagagacacggagttgcttgagggtacagtgcctgtagatactcaataaatatttgtttaattaagaaaatttctgtta

SEQ ID NO: 744639 - DNA, 120 bp, Artificial Sequence
  ENSG00000204764_54 (sequence is synthesized)
ataacatcatggaatcagaatacttgaactggaagagatcatataatatatagtctagtagtttttctgtttgctccgtggttggggcagggaggggaggaggaggagcttggcaagtta

SEQ ID NO: 744640 - DNA, 120 bp, Artificial Sequence
  ENSG00000204764_55 (sequence is synthesized)
tcctgcagcagagctgtcaggagctataaaaatcatacttcagtagggacttaagctgaaagaacattcacccttttcctcaatcagtcagtcagtcaatgaaaattgcttttgtatagt

SEQ ID NO: 744641 - DNA, 120 bp, Artificial Sequence
  ENSG00000204764_56 (sequence is synthesized)
gctcttcatgacatgcatcccaaagtgaattacagcaaaagggaaatcatctgctcttttttcatttctgtgtttagactgaaatgatattgctcaacattttgacatactaaccaagac

SEQ ID NO: 744642 - DNA, 120 bp, Artificial Sequence
  ENSG00000204764_57 (sequence is synthesized)
atctttcatacttaagattccattccataatactgagtaggagaaaatgcagtcgcatatttaactgatgttgagattttggcctacaggaaccttagcaagactattacagtcaaaaac

SEQ ID NO: 744643 - DNA, 120 bp, Artificial Sequence
  ENSG00000204764_58 (sequence is synthesized)
acttaagcagatgaaatacagtcatatctcttgtcctcttaaaaagaatagtcagattttctaatgttaataaagacatttccagtgatccttaaataaaaaatatgctctttatgtaac

SEQ ID NO: 744644 - DNA, 120 bp, Artificial Sequence
  ENSG00000204764_59 (sequence is synthesized)
gtttcgtaaaacatatgttggtgatcaacttcaaagaacctcaaaggaagttgctggagactgtatactactcaattaaaaaagtaaaccaagaaaagaggaagaagggagagatgggat

SEQ ID NO: 744645 - DNA, 120 bp, Artificial Sequence
  ENSG00000204764_60 (sequence is synthesized)
ctgagaatcagaggatcaaacacaggagagaggctaagggaagctctcggataacagctgtgcctcaggccttgagagcaaccagttcaaactggagcagatggaagaagacagacatct

SEQ ID NO: 744646 - DNA, 120 bp, Artificial Sequence
  ENSG00000204764_61 (sequence is synthesized)
agcgagcctttccatctaacaggagcctgagtttgcttaagtaatgctgtttcttttctgcttttatttgtggcaaaatagacagccttcattttgtggcataaaactctgaataatcaa

SEQ ID NO: 744647 - DNA, 120 bp, Artificial Sequence
  ENSG00000204764_62 (sequence is synthesized)
tactagagagtttaaaacatgttattggggatgaagaaagatgtacatatataactgaatgatatatttgggaaatttctacataagacgtgtaattgattaatgaattgatgaattggt

SEQ ID NO: 744648 - DNA, 120 bp, Artificial Sequence
  ENSG00000204764_63 (sequence is synthesized)
acactgtgacaataccagctctgtgcacagagggatgccaggcccctcgctttcgtttaatagtatggcacagtagggaagaggaaacaaagctaaatgaactaatgtgtaatcagctaa

SEQ ID NO: 744649 - DNA, 120 bp, Artificial Sequence
  ENSG00000204764_64 (sequence is synthesized)
aaattacagcacagtggcagcagagcagataactgagcacagtatttggagacccagctcagagaagtcacttttttggtgccgttaaatattgataacttaaaaatgacttcccccaaa

SEQ ID NO: 744650 - DNA, 120 bp, Artificial Sequence
  ENSG00000204764_65 (sequence is synthesized)
tgattgtttatgttggagttgaagggataatctggctaacatctttagggatcaatgaatcctaccatttgacatttttgaggggagatttgaatctccatctcaattagcaaggctggg

SEQ ID NO: 744651 - DNA, 120 bp, Artificial Sequence
  ENSG00000204764_66 (sequence is synthesized)
aagatcattttatctcttcaaggcctaacccatcatgccacagtttttcattatcatgaagataatgaatggacatggaaagggaaaaataaataagtcaaggtttgtcatttggtgtaa

SEQ ID NO: 744652 - DNA, 120 bp, Artificial Sequence
  ENSG00000204764_67 (sequence is synthesized)
aatttgaattgacctttgccaagggttagtacagacaggaaaaaaaaaaaaaaccccccacagaaatgccttatcatgtaagagttaaaagagcatagactttggtgatagacagacccg

SEQ ID NO: 744653 - DNA, 120 bp, Artificial Sequence
  ENSG00000204764_68 (sequence is synthesized)
gcttaaaatcccagctcttcatttactgtgttgtgaaccttggcaagtcatttcacctgtctgagtcttggttttctcatttgaaaacagatacaattcagtatcatggtatattgtaac

SEQ ID NO: 744654 - DNA, 120 bp, Artificial Sequence
  ENSG00000204764_69 (sequence is synthesized)
cattaaaataggtaaagtgtactctgtataatgtctggcacatttttggtagttgtaaatggtcgttaatattgttctaatagtgttgtatgacttatgtttgatcccagcaggaagtga

SEQ ID NO: 744655 - DNA, 120 bp, Artificial Sequence
  ENSG00000204764_70 (sequence is synthesized)
tattgtatgcaagtcatctaagtgttatataatgctttcatgtcttttatgcatgaaaccatcagagcatgtgaaaaaaattatataatctgaaagctaatttactttttaatctaaact

SEQ ID NO: 744656 - DNA, 120 bp, Artificial Sequence
  ENSG00000204764_71 (sequence is synthesized)
atttctcagttactttttttaaaccctccttatccaaagtttcctgtaaattaaattgcaatagaaacttcttaaaggtaactgtcaactactatgccacagttatggccaaaaatataa

SEQ ID NO: 744657 - DNA, 120 bp, Artificial Sequence
  ENSG00000204764_72 (sequence is synthesized)
ctaataggggatctaggcatgttttagggagaactctacatattataaaaatttttaaacattaatttgatactgacatatctttaattattattaaaatatacttcatcagatttatgt

SEQ ID NO: 744658 - DNA, 120 bp, Artificial Sequence
  ENSG00000204764_73 (sequence is synthesized)
acccagagaagggttacagataaaatttttatgtcattgagtaatcatgcacatggtttttatctacatataatatgtacagagattatgaaatttcaacatggaaagtcttaaaattct

SEQ ID NO: 744659 - DNA, 120 bp, Artificial Sequence
  ENSG00000204764_74 (sequence is synthesized)
cttaacagtgacagttaaactggaattatatatgacccttttatttctgccttttttttaatttttaagatacggggtcttgtatgttgctcaggctggactcaaactcctgggctcaag

SEQ ID NO: 744660 - DNA, 120 bp, Artificial Sequence
  ENSG00000204764_75 (sequence is synthesized)
cgatcctcccacctcagcctcctgactagctgggactgtggtgctacaggtgtgctccactgcacccagcttgactcttttatttctctaaacataaagagcaactctcaaaatcaaaat

SEQ ID NO: 744661 - DNA, 120 bp, Artificial Sequence
  ENSG00000204764_76 (sequence is synthesized)
tttcattatttgaaaaataataaaagtctactttgggcactgtaatatcgatggtgatcttgaaaccagtctacaactctaggctatctagtgattaacatttcatgtttttctcttcaa

SEQ ID NO: 744662 - DNA, 120 bp, Artificial Sequence
  ENSG00000204764_77 (sequence is synthesized)
cagtttcaaccaagagtcaaggtcagaaaccttcccctcagtgtcaaagaagaactatctgccgtaattgatactgcccaaaatttagagaagatactgtattgttttccatttccttat

SEQ ID NO: 744663 - DNA, 120 bp, Artificial Sequence
  ENSG00000204764_78 (sequence is synthesized)
ttagctcctttgggggtagcgggggaacctttctgaaatgaaacttttgtccagcagatggcagaaaatagcaaacggaaaatcttgggacttaatgttttcttgtgaactagaaacctt

SEQ ID NO: 744664 - DNA, 120 bp, Artificial Sequence
  ENSG00000204764_79 (sequence is synthesized)
tgtctcctccatttgaccatagatgttgaagttatcagggtcaggggcggagagaagtgtcagttatgccagaagctgtgttagattgccaaatggggtggtttggtactggcgttgctt

SEQ ID NO: 744665 - DNA, 120 bp, Artificial Sequence
  ENSG00000204764_80 (sequence is synthesized)
ataataattgagtttcagtagcaaatcagcttccttgggaaaaggccaagggcttttcataattgtattgacaacaaaatgaatatgataaatggtgttcattcagttgagacaagattt

SEQ ID NO: 744666 - DNA, 120 bp, Artificial Sequence
  ENSG00000204764_81 (sequence is synthesized)
gagacaagatttatagttttcctttgggcgagggatgaagagcaaatatttataataatagtaaaatttgtttaaaagttatattatttgataattcaaaaagctttattaaaatatttt

SEQ ID NO: 744667 - DNA, 120 bp, Artificial Sequence
  ENSG00000204764_82 (sequence is synthesized)
ctccagcgcttcgaatgcggacgcgaagcctggctgaggctgcgaaggacgagcggcgcagggaccccgcgggcgtctggggcttccgcggcgcccgcctctgctccctcccctcgggcg

SEQ ID NO: 744668 - DNA, 120 bp, Artificial Sequence
  ENSG00000204764_83 (sequence is synthesized)
atgtagtaagcccgacacattaccttttgacttcatgccatttctaagggtcctcaggtcaaaataatgtattaccactttagtaaatatgccctctgggaaattttcacaggaagaatc

SEQ ID NO: 744669 - DNA, 75 bp, Artificial Sequence
  ENSG00000204764_84 (sequence is synthesized)
caatctgcgcccagcctgaggccatgttcctaaagctctgaatttatccacagcttcagtatgtttctaagatga

SEQ ID NO: 744670 - DNA, 120 bp, Artificial Sequence
  ENSG00000204764_85 (sequence is synthesized)
ataatggcccttgagcagatagtttatgaacataactatcttaactggttgtgttttcttctttgctatacttgattgcaaactcagaacccaatttcagccaataaaaagtatataata

SEQ ID NO: 744671 - DNA, 120 bp, Artificial Sequence
  ENSG00000204767_0 (sequence is synthesized)
gtcttttcttttcacatggtagctgccgagcagtttgttcggctttttatttattcctacgtgagcagacccactacacttcttgcatataaacagtgaaaattacaatatgaaggactt

SEQ ID NO: 744672 - DNA, 120 bp, Artificial Sequence
  ENSG00000204767_1 (sequence is synthesized)
attattccttcttttggagtaattttgctgctggtcaaagcctggctcattgtgcaaggaagggggaccatcctctgcaggtaattccactgcttcaaggtgctcctcgcctgcttgcag

SEQ ID NO: 744673 - DNA, 120 bp, Artificial Sequence
  ENSG00000204767_2 (sequence is synthesized)
atatcagaccccagctcatctcagacctcagcccctgaggccaagcaaacatacatcatcatggaggctgcagacgtagctcaccgtgcccacatgtgaacttcggccaacacaccacaa

SEQ ID NO: 744674 - DNA, 120 bp, Artificial Sequence
  ENSG00000204767_3 (sequence is synthesized)
cagggactctgcccactgaatcccctgtgattcctcaatcctgtcctggtcataccccactgggttttgtgaggctatttaggaagataagtttccctcactgaagaaaagagagacagc

SEQ ID NO: 744675 - DNA, 120 bp, Artificial Sequence
  ENSG00000204767_4 (sequence is synthesized)
atgaaagaaaacaatggccccaaaggaggaatttgtgattgacataaatgggaatgttcccttgggagcatcatgtatcatcaaacaagcaaacctccaggtcatttatttctccacctg

SEQ ID NO: 744676 - DNA, 120 bp, Artificial Sequence
  ENSG00000204767_5 (sequence is synthesized)
tttacctgctatggaaagaagatgcatttaagtttcctgcagtttcaccctggaaattaatgctctgggaaacaaaaagctgtatgttctagacgtagcaggtttcttttggaattcact

SEQ ID NO: 744677 - DNA, 120 bp, Artificial Sequence
  ENSG00000204767_6 (sequence is synthesized)
cattgggagtctggcactaccccctaaatggtacttttgttgtctttttgttcaagacagccagcttcttccaagatcagaaccgcgtgccagcctcccttgataaaccgcctaccagct

SEQ ID NO: 744678 - DNA, 120 bp, Artificial Sequence
  ENSG00000204767_7 (sequence is synthesized)
ctcttggtagatcagatgtttaatagttagcctaactcatttgtttttccaaggagcaattatgactacaatgaattaatattttaactgcagggaaagcattacagatagttcctacgt

SEQ ID NO: 744679 - DNA, 120 bp, Artificial Sequence
  ENSG00000204767_8 (sequence is synthesized)
agactctagaggctgggaatggccaacaggatttcccatactaagaggagaggaccactccatcctggccagcagttctctatgattgaaatactatcattagatactgctccaaagacc

SEQ ID NO: 744680 - DNA, 120 bp, Artificial Sequence
  ENSG00000204767_9 (sequence is synthesized)
taaggggagatgtgcctaggagaagtgtatggtcctgatccttcccactgaggctcaatggcccagcaaaatatgaaagtgagacctgtgcttctaaagcgtaacagtctagaatcagtg

SEQ ID NO: 744681 - DNA, 120 bp, Artificial Sequence
  ENSG00000204767_10 (sequence is synthesized)
gagtttgtgaaacaacctcaccaccgcaggagcaaatcccagcaggtgagattcaaggaagatgggaccactaagaatccaactggcctagctgaggttgacgtccaaactccagaagac

SEQ ID NO: 744682 - DNA, 120 bp, Artificial Sequence
  ENSG00000204767_11 (sequence is synthesized)
ccggctgtgatggggaagactcaagcaaccaggcaccatcttccccccacctactcgctctccttccccaggtcccagaaggcagggggctttcgcaacattgcaatccaaacttccccc

SEQ ID NO: 744683 - DNA, 120 bp, Artificial Sequence
  ENSG00000204767_12 (sequence is synthesized)
agtctcaggaagcatttcccagttttcaaaaggaagagactcacagccagtaagtccctggtggaaatgccaacagcctcccaaagtgccatccaggtcaacggtaacctctctgaacag

SEQ ID NO: 744684 - DNA, 120 bp, Artificial Sequence
  ENSG00000204767_13 (sequence is synthesized)
gacattgtgtcttctgaccttgcctacttaaggttggctcagcatcttgaggatgggcctcgaagggtcaaggtgtcccatgcattcctcccaagggtccccaaggtgcaaagcaatggt

SEQ ID NO: 744685 - DNA, 120 bp, Artificial Sequence
  ENSG00000204767_14 (sequence is synthesized)
cctgttagcatatgcttggaagcaggaacttggaggtccttagagaaagccacagctgccattcaggttccagatgatatttatcacagtccttcctgggaagctagagagtctgctctc

SEQ ID NO: 744686 - DNA, 120 bp, Artificial Sequence
  ENSG00000204767_15 (sequence is synthesized)
agcccagacaggtcagctgaagtaagtaactccatacaccctttggatgacacacgtccaggtgatgggagaagggtgactccactagattcagaaaaatccacctcctgcttaaatgcc

SEQ ID NO: 744687 - DNA, 120 bp, Artificial Sequence
  ENSG00000204767_16 (sequence is synthesized)
accagcgttgccagccacacaccaggcacagaggaacttaaacctgaattgcttttgcccaaagacaactcagatgacaaagaccttggctcactgtcatctcagtcaaaggaaacgtgt

SEQ ID NO: 744688 - DNA, 120 bp, Artificial Sequence
  ENSG00000204767_17 (sequence is synthesized)
gttccttcatctccacggactcacagttccccctcacaaggctcccacagccagccagcccacccaggaagagcctcagactgtccttcatcaagtaacaatcaccagaatctggtgtca

SEQ ID NO: 744689 - DNA, 120 bp, Artificial Sequence
  ENSG00000204767_18 (sequence is synthesized)
ctcaaaactaacagtgcatcgaaatctgcccctgggtgtcaggagcagacggcaaacaaccccaccgagtcagacacactggagtttccaaattgtccaggaagtaatcatctcccatcc

SEQ ID NO: 744690 - DNA, 120 bp, Artificial Sequence
  ENSG00000204767_19 (sequence is synthesized)
tctctttcaaggagtgagaccaaacttcagagcaacagggagattagtgacattaatcaaattcacctggcacggggtgaactctgcgacctccaaggccgactgcaatctgtggaggaa

SEQ ID NO: 744691 - DNA, 120 bp, Artificial Sequence
  ENSG00000204767_20 (sequence is synthesized)
tctctgcactcgaaccaagagaaaattaaagtccttttgaatgtaattcaagacttggagaaagctcgagctctcactgaagggcgcaacttttatcgaactggccaagatctcaacaat

SEQ ID NO: 744692 - DNA, 120 bp, Artificial Sequence
  ENSG00000204767_21 (sequence is synthesized)
tgcagtacctgccagaacacggcgtgcatcatatacagtgtagagtatgattttcggcagcaggaaggcaggttccatgaagttttgcagagtctggaggaagcagagccagttgaggag

SEQ ID NO: 744693 - DNA, 120 bp, Artificial Sequence
  ENSG00000204767_22 (sequence is synthesized)
gcatcgcccccaccaaagtccccagcagaacccccagccccggaaaagcaggacttaaggcggaaaaccaagaaggtgaaaaagaaatgcttctggtggatctgagctggttgggaccat

SEQ ID NO: 744694 - DNA, 120 bp, Artificial Sequence
  ENSG00000204767_23 (sequence is synthesized)
caaaggccctgggctgtgagccccttggcctgtgaaacagaagagccttggagctgatgtagccgctgctggacacctgaccacgatccttacctgagtgcgtgcgactgcttgctgagg

SEQ ID NO: 744695 - DNA, 120 bp, Artificial Sequence
  ENSG00000204767_24 (sequence is synthesized)
gcttcacggacactagagtgaccgcttgccaagttccctgtcacactcagccagaactcatgctgagttttaagaccagattcccaccacgagcaaaaccccacactacaccttccaaca

SEQ ID NO: 744696 - DNA, 120 bp, Artificial Sequence
  ENSG00000204767_25 (sequence is synthesized)
cctccaagatgccaagcacttccttcccatcctgggttcataaacccaaaagaaaaaaatagtgttgtgcagacccggaaggtagagggaggttataggttataagcaggtaccatagaa

SEQ ID NO: 744697 - DNA, 120 bp, Artificial Sequence
  ENSG00000204767_26 (sequence is synthesized)
aaaaatgagataaactggcagttttctaagatatcagcatacataataagcacaagagaagtgggcagggcataaaatgcttatgcaagatcaccctggtgtgttgggttgttttccttt

SEQ ID NO: 744698 - DNA, 120 bp, Artificial Sequence
  ENSG00000204767_27 (sequence is synthesized)
ttaattagccccttgatcccaaattaaggctctgtcatctcatggtgcatgcacctttctgcctgtggcagagtcaggccaccccagggtataaacttgttggtgtggctgtgctggata

SEQ ID NO: 744699 - DNA, 120 bp, Artificial Sequence
  ENSG00000204767_28 (sequence is synthesized)
agtgtaattcaaagaggatttcagcagctgtagctgttccagggcccaccctaaaccatcatgcttcttctctgcctagggcctgagaccacctggcaaatgggtggaatctgtttttgg

SEQ ID NO: 744700 - DNA, 120 bp, Artificial Sequence
  ENSG00000204767_29 (sequence is synthesized)
tgtgaactttaagactccatagttaacttacctgcaatatttaaaatcatgagatccagcaacctgtccatcagttacatcttatgagtaacatagataaggctaagataaaacacaaca

SEQ ID NO: 744701 - DNA, 120 bp, Artificial Sequence
  ENSG00000204767_30 (sequence is synthesized)
ctgtttctcatcccttcatcccagaaacagccgtgtagataggttcaaacatatattaatcgacacagtctcccttcctggtgaccagacaatggtcacctgattgaaaaactagcagga

SEQ ID NO: 744702 - DNA, 120 bp, Artificial Sequence
  ENSG00000204767_31 (sequence is synthesized)
ctatggatgaggatatagttttttctatttgaggtttaaatatctttccatcccaaagtctgagttattcaaggtctggctcattctgttgacaagacctacatacatgtggatccagtc

SEQ ID NO: 744703 - DNA, 120 bp, Artificial Sequence
  ENSG00000204767_32 (sequence is synthesized)
aaacttgcatggctgaacaaactactaaagtaatataattaagtaattgctatatactcttgtggatgaggggtaggatggaaaggctcagattccttctggttgaattaaaatctctat

SEQ ID NO: 744704 - DNA, 120 bp, Artificial Sequence
  ENSG00000204767_33 (sequence is synthesized)
cagcatgtggttagattgacattgctagaaagggagcctgaaactaaacatacattaaacgaagaaggtattttgtaattcccttggctgaagatccagtgtctaagctagaatctttgc

SEQ ID NO: 744705 - DNA, 120 bp, Artificial Sequence
  ENSG00000204767_34 (sequence is synthesized)
agagcacagaatcctgtgtgttcgtgggatgtacctaccccactgcaaattgagcctaattgagcaaaccactccgatggtttcaccttcccctgtcatagtgatgcagtgaacaaagct

SEQ ID NO: 744706 - DNA, 120 bp, Artificial Sequence
  ENSG00000204767_35 (sequence is synthesized)
atttcagtgagaatgaaagggaaatttggcaaggaatatcagcttgcactatttaagtcttggaatgtcattcaagatgttcttgttctgtttctagtgtaatgtttaagcccacagaat

SEQ ID NO: 744707 - DNA, 120 bp, Artificial Sequence
  ENSG00000204767_36 (sequence is synthesized)
cagaccggaatatataacgtcatgttagaattaagataaatacacttgtcatacttaagaagccacatttcaataagatatgctaccactggctaaaagccacagattttttttttcctg

SEQ ID NO: 744708 - DNA, 120 bp, Artificial Sequence
  ENSG00000204767_37 (sequence is synthesized)
tatccatacgatcaactgtcagttggccccagcaatggaaaagaacagaatagaggataatccaataaagtgaaatcatttgggacctcttatgtaattttatcttgtagtagagcttcc

SEQ ID NO: 744709 - DNA, 120 bp, Artificial Sequence
  ENSG00000204767_38 (sequence is synthesized)
atcttaatttgctttgcttacgctaatttcatgtgaatttatattctcgggcatcatgctagaatgtaaataaccctgttcccagaattaagagatccaggcaaccaagcagtctatacc

SEQ ID NO: 744710 - DNA, 120 bp, Artificial Sequence
  ENSG00000204767_39 (sequence is synthesized)
actagcctttggcaaatggcttaaatttcccggcctgtttgtccattcttgaatacagataagaacatatgctttcctactttataaactcttagcacgttccacattatgtgagctgag

SEQ ID NO: 744711 - DNA, 120 bp, Artificial Sequence
  ENSG00000204767_40 (sequence is synthesized)
tgactcagagctgagctggattactggccaaagttagcctgggaagataaagagatgtttgaggtacctcacacaaaattaataagctgatgtggtcatagatatgtttccagttgaggc

SEQ ID NO: 744712 - DNA, 120 bp, Artificial Sequence
  ENSG00000204767_41 (sequence is synthesized)
gatatgtttccagttgaggccctcacatgaacccttaactgaattaaataaaactgggactagaaaatgttgacattttctgcacttccccaacaaaaaaaaaagaaaagaaaagaaaag

SEQ ID NO: 744713 - DNA, 120 bp, Artificial Sequence
  ENSG00000204767_42 (sequence is synthesized)
gacatttctagaaatacagccaaacaaggctgtactgattctacaccaaagcacaacaccgcattgcttgggccactgacctgaaactgggaaggagttctcttctgaaaaattgatatt

SEQ ID NO: 744714 - DNA, 120 bp, Artificial Sequence
  ENSG00000204767_43 (sequence is synthesized)
taaaatcattatgaggaaataggattccataaacattttcctgatgaacaaaaatggtcgtctctatgtttaaaacaccacacacacatataccaaaactgcatactcacttattcatgt

SEQ ID NO: 744715 - DNA, 120 bp, Artificial Sequence
  ENSG00000204767_44 (sequence is synthesized)
gaaaatcactgcttctttgtaaaatattacgtaacatctaccatgatattctacagaaatgctgtacttgaggttatctggtttgctggagagatattaacttagcaaaaattactttta

SEQ ID NO: 744716 - DNA, 120 bp, Artificial Sequence
  ENSG00000204767_45 (sequence is synthesized)
taaaattgaaaggaaaaagaccaatacatcaacttaaattgcaggagtttatgtagctgctttctctgtagtttaaaaagcaatgcataaatgcatactcactatccttggaacttaata

SEQ ID NO: 744717 - DNA, 120 bp, Artificial Sequence
  ENSG00000204767_46 (sequence is synthesized)
ccagctcatctatagagcaccttcttaaagacgatgtactgatgtaaggttttgtaaatttctaaactgttttaaacgggatattatcttttgcaataaacttacatattttttctaggt

SEQ ID NO: 744718 - DNA, 120 bp, Artificial Sequence
  ENSG00000204779_0 (sequence is synthesized)
ctctcctgccttccctgaataaacttacacaatttagtgctgggacatttggaccttttctgaaaatttgagtcagggagagcatcttggggaggtgggaaggaaggtagaaggagcaaa

SEQ ID NO: 744719 - DNA, 120 bp, Artificial Sequence
  ENSG00000204779_1 (sequence is synthesized)
gcaacacccccctgaagcctgggaatattgtcagaaccttaaatataattcagctcaccattctgggtaaggacagactctaccaatgaaaatgggtgattaccagctgtgaaacacaaa

SEQ ID NO: 744720 - DNA, 120 bp, Artificial Sequence
  ENSG00000204779_2 (sequence is synthesized)
aacatacttttacggttacacattcctttacaaacaaccgtgtacatttcagcctcctgccccaccatttcttttctccaggagggaaggctgcatgtcgaggtggtcatagaatgttga

SEQ ID NO: 744721 - DNA, 120 bp, Artificial Sequence
  ENSG00000204779_3 (sequence is synthesized)
gtatcatactttcctacctcgcttttatttgcgcgggtttaaatgcgccttaacagaacccgtgcaaaggcttgccaactgtctggctgcaccggatgagtagagcatcttccttggtgg

SEQ ID NO: 744722 - DNA, 120 bp, Artificial Sequence
  ENSG00000204779_4 (sequence is synthesized)
caggtgggtgcgaggaggaggggcctgggcttttctccggacagtgtttgcccagaagaccatcatccctggactacgttaggagtaagtggcaccgctccgaggtgggggaagaagggt

SEQ ID NO: 744723 - DNA, 120 bp, Artificial Sequence
  ENSG00000204779_5 (sequence is synthesized)
tataaaggggggagtccaccacacatggtcttgaagaagcttttataaaaggcaaaggcatctttgccggacgttgttgcaaaggagtagaaacaagcagacgaaaacatcccaaagggt

SEQ ID NO: 744724 - DNA, 120 bp, Artificial Sequence
  ENSG00000204779_6 (sequence is synthesized)
aaccactagcattgctgcttcttgcaacattcatcccaggcttccagctcagcccgccccaggccaggtgatcggccgccacatcccctgcgactgaagcacctgctcctccatgaacct

SEQ ID NO: 744725 - DNA, 120 bp, Artificial Sequence; identical to SEQ ID NO: 662101
  ENSG00000204779_7 (sequence is synthesized)

SEQ ID NO: 744726 - DNA, 120 bp, Artificial Sequence
  ENSG00000204779_8 (sequence is synthesized)
ggaggaggcgagacagcagttcctagagcagtcactccagccggggctgcaggtggcccggtggggcggggttgcgcttccccgagagcacatcgagggcggcggcggcccgagtgaccc

SEQ ID NO: 744727 - DNA, 120 bp, Artificial Sequence
  ENSG00000204779_9 (sequence is synthesized)
ctcagagtttggcaccaagttcagggcaccgccaaggtctgcggcggcctctgaagatgcccggcagccggcaaagcccccctactcgtacatcgcgctcatcaccatggccatcctgca

SEQ ID NO: 744728 - DNA, 120 bp, Artificial Sequence
  ENSG00000204779_10 (sequence is synthesized)
aaacccgcacaagcgcctcacgctcagcggcatctgcgccttcattagtggccgcttcccatactaccgccgcaagttccccgcctggcagaacagcatccgccacaacctctcgctgaa

SEQ ID NO: 744729 - DNA, 120 bp, Artificial Sequence
  ENSG00000204779_11 (sequence is synthesized)
cgactgcttcgttaagatcccccgcgagccgggccacccaggcaagggcaactactggagcctggaccccgcctcccaggacatgttcgacaatggcagctttctccggcgtaggaagcg

SEQ ID NO: 744730 - DNA, 120 bp, Artificial Sequence
  ENSG00000204779_12 (sequence is synthesized)
cctgccccgccgcagccagtcccgggggcctaccccaacaccgcccccgggagatgcccttacgctctgctgcacccgcatcctcttcgctacctactgctctcggcccccgtctatgcc

SEQ ID NO: 744731 - DNA, 120 bp, Artificial Sequence
  ENSG00000204779_13 (sequence is synthesized)
ggggcaccgaagaaagcagaaggcgcggacctggcgaccccggcacccttcccgtgctgcagccctcacttggtcctcagccttgggaggagggcaagggtctggcgtcgccaccgggag

SEQ ID NO: 744732 - DNA, 120 bp, Artificial Sequence
  ENSG00000204779_14 (sequence is synthesized)
gcggatgcatctctttcagcattgagagtattatgcaaggggtcaggggagcgggtacaggggctgcgcagagtttgtccccgaccgcgtggagctactgccacctgctccagcgaccat

SEQ ID NO: 744733 - DNA, 120 bp, Artificial Sequence
  ENSG00000204779_15 (sequence is synthesized)
caagcctgttgcatccccaaaccgctgcccctttgctgcaagtgtccgccgccgctgctgctcggacaattttgcagcaatagcagcagcatcaggaggactgcgccaacggctgcgctc

SEQ ID NO: 744734 - DNA, 120 bp, Artificial Sequence
  ENSG00000204779_16 (sequence is synthesized)
ccaccaagggcgcggtgctgggcgggcacctgtcggcctcgtcggcgctgctgaggtatcaggcagtggcggagggctctaggctgacatcgctggctgcccctttgggcggagagggga

SEQ ID NO: 744735 - DNA, 120 bp, Artificial Sequence
  ENSG00000204779_17 (sequence is synthesized)
cctcaccagtttttttagtatcgcccacgcccagttccctggccaactccgcagggccctcctagagccaggtgggagtggggagcgacccgcagctgctcactccaccttgcgcggccc

SEQ ID NO: 744736 - DNA, 120 bp, Artificial Sequence
  ENSG00000204779_18 (sequence is synthesized)
atactgggcgtgtgcatctgaatcccgctggagagcaaacacgaacttctgttcgttcgctgcaaaatggttagaaagattacattcctctaagctggattacgttcctctaaaaaccac

SEQ ID NO: 744737 - DNA, 120 bp, Artificial Sequence
  ENSG00000204779_19 (sequence is synthesized)
tctaaaaaccacctgaacgtaaccttcgcagggcgtcaagtcatcttttcttgccttcggttgtggcttctatggctgtcccgatttgcacattgtcatctttgaaggttagtgacatag

SEQ ID NO: 744738 - DNA, 73 bp, Artificial Sequence
  ENSG00000204805_0 (sequence is synthesized)
ttctctgacgtgggtccgctggtctccggcgggacaaagagctcctgtggggctcgtgtcctcgtctgcagtg

SEQ ID NO: 744739 - DNA, 120 bp, Artificial Sequence
  ENSG00000204805_1 (sequence is synthesized)
acaaagagctcctgtggggctcgtgtcctcgtctgcagtgtgttcatcttgatcctagaaaagagaccgctcaggatggggatatttcaattgctccgggaccgaagaatctcctcacgt

SEQ ID NO: 744740 - DNA, 120 bp, Artificial Sequence
  ENSG00000204805_2 (sequence is synthesized)
gggccaggccttcacacacccaaagcggaaacgcgtcggcgaaaaggattgacaaccggtctcatgacccaggcagagaggcagaaacaggctcaccaaagacaggccgccatgcgagaa

SEQ ID NO: 744741 - DNA, 120 bp, Artificial Sequence
  ENSG00000204805_3 (sequence is synthesized)
caaagacaggccgccatgcgagaaacagctttgtggtgcacagggcacattcggccaaggacacacacgcacacgggcacacacacacaaactgacagagagagggaaagaaacacacag

SEQ ID NO: 744742 - DNA, 120 bp, Artificial Sequence
  ENSG00000204805_4 (sequence is synthesized)
gagaatgggagacacacacacacatacacacacagacacacacacagagtcttatagcaaaggcattgaaagacacacacccaggcaacccctgaggctgtggggttctgctttcgacga

SEQ ID NO: 744743 - DNA, 120 bp, Artificial Sequence
  ENSG00000204805_5 (sequence is synthesized)
agactcacccccaccaacaccgtccagagaggcctgagggagggattccatgctgccttctccggactctgcgtcgggtttcctcaccctgttcggccctttgtgactcttggcatccgg

SEQ ID NO: 744744 - DNA, 120 bp, Artificial Sequence
  ENSG00000204805_6 (sequence is synthesized)
cttggcatccggagactttcccctcgacccagtggagccgtcaggccggagcctcagagccttgacacccaagcactgccacggaagtctccccctttgccaagcctcggggactggttt

SEQ ID NO: 744745 - DNA, 120 bp, Artificial Sequence
  ENSG00000204805_7 (sequence is synthesized)
aaccactgtgacgggagaaaccgcttgtgcttcgcgcatgcgcattggctgggccgactcgttctcccctcctggcagtcaggctgcgtcccctttaaagaacgccaccgctgagaactg

SEQ ID NO: 744746 - DNA, 120 bp, Artificial Sequence
  ENSG00000204805_8 (sequence is synthesized)
actgaccctcacatctcccttcctgaatttctttagggaaagcaacaaccatccctgtaagccatgggttttcatgcggaggaaggagagggctagttgtctgagagggtaactgcttaa

SEQ ID NO: 744747 - DNA, 120 bp, Artificial Sequence
  ENSG00000204805_9 (sequence is synthesized)
ggctgcagactaggaaatgggattccaggtttaagatagctcctttctggacctcagtccttcacctagtcacctagtcacagggtggattgcctctaaggatacttaggggaaaaggaa

SEQ ID NO: 744748 - DNA, 120 bp, Artificial Sequence
  ENSG00000204805_10 (sequence is synthesized)
ctaaatttgggatggttctccttgctttaagccttgataggagacggggaggccaacccttctctgcagaccgtgatcctcactagacagaggagctccaaacctgcccatctcatccca

SEQ ID NO: 744749 - DNA, 120 bp, Artificial Sequence
  ENSG00000204815_0 (sequence is synthesized)
gctgtacatctcatggttgctaagaaacggagcttccacaaaccagatagaggttctccagcttttctttgattgtctctgctttagcgtctctaaatccggtcaccatgtcggaccccg

SEQ ID NO: 744750 - DNA, 120 bp, Artificial Sequence
  ENSG00000204815_1 (sequence is synthesized)
aaggcgagaccttgcgaagcacctttccctcttatatggccgaaggcgagcggctctacctgtgcggggaattttctaaagccgcgcagagcttcagcaacgctctttaccttcaggatg

SEQ ID NO: 744751 - DNA, 120 bp, Artificial Sequence
  ENSG00000204815_2 (sequence is synthesized)
gagacaagaactgcctggttgctcgctcaaagtgcttcctgaagatgggagacttggagagatccctgaaggatgctgaggcttcgctccagagtgacccagctttctgtaaggggattt

SEQ ID NO: 744752 - DNA, 120 bp, Artificial Sequence
  ENSG00000204815_3 (sequence is synthesized)
tgcaaaaggctgagacactgtacaccatgggagactttgagtttgccttggtattctatcatcgaggctacaagctgaggcctgatcgggaattcagagttggcattcagaaagcccagg

SEQ ID NO: 744753 - DNA, 120 bp, Artificial Sequence
  ENSG00000204815_4 (sequence is synthesized)
aagccatcaacaactcagtgggaagtccttcttccattaagctggagaacaaaggggacctctccttcttaagcaagcaggctgagaatataaaagcccagcagaagcctcagcccatga

SEQ ID NO: 744754 - DNA, 120 bp, Artificial Sequence
  ENSG00000204815_5 (sequence is synthesized)
aacacctcttacaccccaccaagggagagcccaagtggaaggcctcgctcaagagtgagaagactgtccgccagcttctgggggagctctacgtggacaaagagtatttggagaagctcc

SEQ ID NO: 744755 - DNA, 120 bp, Artificial Sequence
  ENSG00000204815_6 (sequence is synthesized)
tattggatgaagacctgatcaaaggcaccatgaagggcggcctgactgtggaggacctcatcatgacgggcatcaactacctggatactcacagcaacttctggaggcagcagaagccga

SEQ ID NO: 744756 - DNA, 120 bp, Artificial Sequence
  ENSG00000204815_7 (sequence is synthesized)
tctacgccagggagcgggaccggaagctgatgcaagagaaatggctgcgggaccacaaacgccgtccctcacagacagcccattacatcctcaagagcctggaggacattgatatgttgc

SEQ ID NO: 744757 - DNA, 120 bp, Artificial Sequence
  ENSG00000204815_8 (sequence is synthesized)
tcacaagtggcagtgctgaagggagtcttcagaaagctgagaaagtgctgaagaaggtactggaatggaacaaggaagaggtacccaacaaggatgaactggttggaaacttgtatagct

SEQ ID NO: 744758 - DNA, 120 bp, Artificial Sequence
  ENSG00000204815_9 (sequence is synthesized)
gcatagggaatgcccagattgagctggggcagatggaggcagccctgcagagccacagaaaggacctggagatcgccaaggaatatgaccttcctgatgcaaaatcgagagcccttgaca

SEQ ID NO: 744759 - DNA, 120 bp, Artificial Sequence
  ENSG00000204815_10 (sequence is synthesized)
acattggcagagtttttgccagagttgggaaattccagcaagccattgacacgtgggaagaaaagatccctctggcaaaaaccaccctggagaagacctggctgttccacgagatcggcc

SEQ ID NO: 744760 - DNA, 120 bp, Artificial Sequence
  ENSG00000204815_11 (sequence is synthesized)
gctgctacttggagctggaccaggcctggcaggcccagaattatggcgagaagtcccagcagtgtgccgaggaggaaggggacattgagtggcaactgaatgccagtgttctggtggccc

SEQ ID NO: 744761 - DNA, 120 bp, Artificial Sequence
  ENSG00000204815_12 (sequence is synthesized)
aggcacaagtgaagctgagagacttcgagtcagccgtgaacaattttgagaaggccctggagagagcaaagcttgtgcataacaacgaggcgcagcaggccatcatcagtgccttggacg

SEQ ID NO: 744762 - DNA, 120 bp, Artificial Sequence
  ENSG00000204815_13 (sequence is synthesized)
ctgaggaaaaccaactacgtggagaatctcaaagaaaaaagcgagggagaagcttcactgtatgaagatagaataataacaagagagaaggacatgaggagagtgagagatgagcccgag

SEQ ID NO: 744763 - DNA, 120 bp, Artificial Sequence
  ENSG00000204815_14 (sequence is synthesized)
aaggtggtgaagcagtgggaccatagtgaggatgagaaagagacagatgaggacgatgaggcttttggggaagctctgcagagcccagcaagcggaaagcagagtgtggaagcaggaaaa

SEQ ID NO: 744764 - DNA, 120 bp, Artificial Sequence
  ENSG00000204815_15 (sequence is synthesized)
gccagaagcgatttgggagcagttgccaagggcctgtcaggagaattaggcacaagatcaggagaaacaggcaggaagctactagaagctggcagaagagagtcaagagaaatttatagg

SEQ ID NO: 744765 - DNA, 120 bp, Artificial Sequence
  ENSG00000204815_16 (sequence is synthesized)
aggccttcgggagaattagagcaaagactctcaggagaattcagcagacaggaaccagaagaactaaagaaactttcagaagtgggcagaagagagccagaagaactgggaaaaacacaa

SEQ ID NO: 744766 - DNA, 120 bp, Artificial Sequence
  ENSG00000204815_17 (sequence is synthesized)
tttggagaaataggagaaacgaaaaaaacaggaaatgagatggaaaaggaatatgaatgaagccatcggtagagatgaggatcaggaagctggtgttcagagggatcatgggattttatt

SEQ ID NO: 744767 - DNA, 120 bp, Artificial Sequence
  ENSG00000204815_18 (sequence is synthesized)
aaactggattttcaagcgatttgtctgttataggaaaaatgagggttttacttctgctgctttccatcactattttgccattaaataggtgtctttcactcttgcaaaccctgagtctgt

SEQ ID NO: 744768 - DNA, 120 bp, Artificial Sequence
  ENSG00000204815_19 (sequence is synthesized)
cactttgcctcttcacccctgcccattcttggaagagcatcgtggaagaaatgagaaaggtgccaagaagaaagggtttcaggagggtgaagatacgggcgctacagggaacaagaagtc

SEQ ID NO: 744769 - DNA, 120 bp, Artificial Sequence
  ENSG00000204815_20 (sequence is synthesized)
acagggaggagaggggaaggcctgggaggagaggtgcttcccacacaccggtgactgactgagtccctccagtgcgcaggacagcggggaggctttatggatggaacagtggtggggcgg

SEQ ID NO: 744770 - DNA, 120 bp, Artificial Sequence
  ENSG00000204815_21 (sequence is synthesized)
ccccagctgtcacaggtaggagaatgccgcaagccagaaccaagcgaatgctgggagtgaggccaaagataggggagtggcctgggagtcgggagggcagacagactccgcctctgacac

SEQ ID NO: 744771 - DNA, 120 bp, Artificial Sequence
  ENSG00000204815_22 (sequence is synthesized)
ctctgggtggcataatcaggtaaatcaggctctccaagctggcttctcctctgaacaatgggatacctgcctcaggggttgctgcgaggactgagtgcttagcacagcacttggacagga

SEQ ID NO: 744772 - DNA, 120 bp, Artificial Sequence
  ENSG00000204815_23 (sequence is synthesized)
aactcaaaaatccaacggagctctcagtggtttcacagaggaggtggcagctgaggatctggcctcagaggatgttaggatttcactccgttactcatctgtccctttggccattgccat

SEQ ID NO: 744773 - DNA, 120 bp, Artificial Sequence
  ENSG00000204815_24 (sequence is synthesized)
cctggtctgtctccacagctcctagaaggaaaggtcggggctgagactgactttcggctggcacagggcctggacgaatgaggccagtgaggcatttcagatgcagagtttaccggaatg

SEQ ID NO: 744774 - DNA, 120 bp, Artificial Sequence
  ENSG00000204815_25 (sequence is synthesized)
ccagcaaattgcatgataatattttaatccaatgtggtaaaaaaaaaagtttttaattaatgcaaaagtccatgatgaataaaatatcaaaaattaaagacaggatccgactttgcacga

SEQ ID NO: 744775 - DNA, 120 bp, Artificial Sequence
  ENSG00000204815_26 (sequence is synthesized)
atgaaggtttcggacactttgttggcacggggccttgggggaaaggaaatctgggtggatgcttcatgcatgagctgaaggcagaacctgtcatataatattagctgacgtgtacctgtg

SEQ ID NO: 744776 - DNA, 120 bp, Artificial Sequence
  ENSG00000204822_0 (sequence is synthesized)
cttccggggcggaggtcaccatggcagctgccttggctcggcttggtctgcggcctgtcaaacaggttcgggttcagttctgtcccttcgagaaaaacgtggaatcgacgaggaccttcc

SEQ ID NO: 744777 - DNA, 120 bp, Artificial Sequence
  ENSG00000204822_1 (sequence is synthesized)
tgcagacggtgagcagtgagaaggtccgctccactaatctcaactgctcagtgattgcggacgtgaggcatgacggctccgagccctgcgtggacgtgctgttcggagacgggcatcgcc

SEQ ID NO: 744778 - DNA, 120 bp, Artificial Sequence
  ENSG00000204822_2 (sequence is synthesized)
tcatctcaccgctctggaaatgctcaccgccttcgcctcccacatccgggccagggacgcggcgggcagcggggacaagccgggcgctgatactggtcgctgacagcgccaaagagacca

SEQ ID NO: 744779 - DNA, 120 bp, Artificial Sequence
  ENSG00000204822_3 (sequence is synthesized)
acaagatgattttagcgtggactaggacacttaacctaagaagagtttcacttaatcattcaaatcactatctgaagggtcacggagcgcaaaataaagtttaaaaccctgctaccacaa

SEQ ID NO: 744780 - DNA, 120 bp, Artificial Sequence
  ENSG00000204822_4 (sequence is synthesized)
acgagttcttccggggcggaggtcaccatggcagctgccttggctcggcttggtctgcggcctgtcaaacaggttcgggttcagttctgtcccttcgagaaaaacgtggaatcgacgagg

SEQ ID NO: 744781 - DNA, 120 bp, Artificial Sequence
  ENSG00000204839_0 (sequence is synthesized)
agtcctgggcacaacttcgcaggaggagcagcggcaggtgctgcaggcaagggccgccatggctgggggtgtgtggggccggagccgggcccgggaggctcccgtgggggctctaaccct

SEQ ID NO: 744782 - DNA, 120 bp, Artificial Sequence
  ENSG00000204839_1 (sequence is synthesized)
gacagcactgactgaaggaatccgggccaggcaggggcagccccagggacccccttccgcaggccctcagcccaagtcctgggaggtcaaacctgaggctgagccacagacccaggcact

SEQ ID NO: 744783 - DNA, 120 bp, Artificial Sequence
  ENSG00000204839_2 (sequence is synthesized)
caccgccccctctgaggcagagcctggacgtggggccaccgtccctgaagctggcagcgagccctgctccctcaacagtgccctggaaccagcccctgaggggccccaccaggttcccca

SEQ ID NO: 744784 - DNA, 120 bp, Artificial Sequence
  ENSG00000204839_3 (sequence is synthesized)
gagttcctgggaggagggagttcttgccgacctcgcgttgtacacggctgcctgcctggaggaggctggctttgcagggacccaggcgacagtgctcaccctgtcctcagccctggaggc

SEQ ID NO: 744785 - DNA, 120 bp, Artificial Sequence
  ENSG00000204839_4 (sequence is synthesized)
ccggggcgagcggttggaggaccaggtgcatgctctggtgcgtgggctgctggcgcaggtgcccagcctagcggaggggaggccctggagggcggccctgcgagtgctgagcgcactggc

SEQ ID NO: 744786 - DNA, 120 bp, Artificial Sequence
  ENSG00000204839_5 (sequence is synthesized)
cctggagcatgcgcgggacgtggtgtgtgcgctgctaccccgctctctgcccgccgatcgggtagcagccgagctctggcgcagcctaagccgtaaccagcgtgtaaatgggcaggtgct

SEQ ID NO: 744787 - DNA, 120 bp, Artificial Sequence
  ENSG00000204839_6 (sequence is synthesized)
ggtgcaactgctgtgggcgctgaagggtgcttcggggccggagccccaggcactggcggccacacgtgctcttggggagatgctggctgtttcgggctgcgtgggagccacgaggggctt

SEQ ID NO: 744788 - DNA, 120 bp, Artificial Sequence
  ENSG00000204839_7 (sequence is synthesized)
ctacccacatctgctgcttgcgctggtcacacagctgcacaagctggcccgcagcccgtgctcccccgacatgcccaagatttgggttctgtcccaccgagggccaccacatagccatgc

SEQ ID NO: 744789 - DNA, 120 bp, Artificial Sequence
  ENSG00000204839_8 (sequence is synthesized)
cagctgtgctgtggaggccttgaaggcgctgctcaccggggatggaggccgcatggtggtcacgtgcatggagcaggcaggaggctggaggaggctggtgggagcccacacccacctgga

SEQ ID NO: 744790 - DNA, 120 bp, Artificial Sequence
  ENSG00000204839_9 (sequence is synthesized)
gggcgtcctgctgctggccagtgctatggtggcacatgccgaccaccacctgcgaggcctcttcgcagacttgctccctcggcttcgcagcgcggacgacccgcagcgtctcacggctat

SEQ ID NO: 744791 - DNA, 120 bp, Artificial Sequence
  ENSG00000204839_10 (sequence is synthesized)
ggccttcttcacagggctgttgcagagccggcccaccgcacggctcctgcgggaggaggtcatcctggagcgactcctcacctggcagggagaccccgaacccactgtgcgctggttggg

SEQ ID NO: 744792 - DNA, 120 bp, Artificial Sequence
  ENSG00000204839_11 (sequence is synthesized)
cctgctgggcctgggccacctcgcgctgaatcgcaggaaggtgcggcacgtgagcacgctgctgccggcgctcctgggcgcactgggcgaaggcgacgcgcggctcgtgggtgcagcgct

SEQ ID NO: 744793 - DNA, 120 bp, Artificial Sequence
  ENSG00000204839_12 (sequence is synthesized)
gggcgccctgaggaggctcctgctgcggccccgggcgcctgtgcggctcctgagcgcggagctgggaccgcgcctccctccgctactggacgacacacgggactcaatccgcgcctcggc

SEQ ID NO: 744794 - DNA, 120 bp, Artificial Sequence
  ENSG00000204839_13 (sequence is synthesized)
cgccggggccggggcgggctccggctggggctccgcggccccctgcggaagctggtgctgcagagtctcgtgccgctgctgctgcgcctgcatgaccccagcagggacgctgctgagagc

SEQ ID NO: 744795 - DNA, 120 bp, Artificial Sequence
  ENSG00000204839_14 (sequence is synthesized)
tcagagtggaccctggcccgctgtgaccacgccttttgctggggcctgctggaggagttggtcaccgtggcccactatgacagccccgaggccctgagccacctctgctgccgcctggtt

SEQ ID NO: 744796 - DNA, 120 bp, Artificial Sequence
  ENSG00000204839_15 (sequence is synthesized)
cagcgatacccaggccacgtgcccaacttcctgagccagacccagggctacctgcggagtccacaggaccccctgcgccgggcagccgccgtgcttataggcttccttgtccaccacgcc

SEQ ID NO: 744797 - DNA, 120 bp, Artificial Sequence
  ENSG00000204839_16 (sequence is synthesized)
agccccggctgtgtcaaccaggacctgctggactccctgttccaggacctagggcgactgcagagcgaccccaagccggctgtggccgcggcagcgcacgtgtccgctcagcaggtggcg

SEQ ID NO: 744798 - DNA, 80 bp, Artificial Sequence
  ENSG00000204839_17 (sequence is synthesized)
ttctccgcatcgccccgcgccccgcccggcccccaccagtcttcgccgacagccccttccagcgccggagcgtcgcgggc

SEQ ID NO: 744799 - DNA, 120 bp, Artificial Sequence
  ENSG00000204839_18 (sequence is synthesized)
gaccccgccgagcctgaggctcggggctggggcccgagggccagggtccgactcgggcaccccacgcgcatagcagcctgtccccgccctgacggaggggctccctgggcctggtgctgg

SEQ ID NO: 744800 - DNA, 120 bp, Artificial Sequence
  ENSG00000204839_19 (sequence is synthesized)
ctgggcctggtgctggacgccaatgccctcccccaccccccacccccgtgacccctcttcaggcacccaccaccctgatggtgacagagggggacagccagcacccatctgtccccgtca

SEQ ID NO: 744801 - DNA, 120 bp, Artificial Sequence
  ENSG00000204839_20 (sequence is synthesized)
gggctcttgttctcacagccccctggagcatgccccatgccccaaccttgggcctggctcctggcccagatggcacctggcctcttgagtctgctgggggaccccaaagttggtggtccc

SEQ ID NO: 744802 - DNA, 120 bp, Artificial Sequence
  ENSG00000204839_21 (sequence is synthesized)
atagcctgccctcctgggtctccacctcatgcctggacaggacgctgtggcctgtccgggccttggccagccctgcagctgcacccccgatcctcatccctcaccccattccctgccagc

SEQ ID NO: 744803 - DNA, 120 bp, Artificial Sequence
  ENSG00000204839_22 (sequence is synthesized)
atcctaaggctcctggcgggcatcctctctgctcaaaattattgacctgtctcccggccacacctgctgtgccctctcagccaggccatcatcaccccctgttcattatgtcaggcctca

SEQ ID NO: 744804 - DNA, 120 bp, Artificial Sequence
  ENSG00000204839_23 (sequence is synthesized)
tgggagcctggccttctccagaagctggccccggcgtcctcccaagctggaccacgtaggccccagatcacacctgggggtccagatgtaggggtcctgtgtgcacgcccaatcagaccg

SEQ ID NO: 744805 - DNA, 120 bp, Artificial Sequence
  ENSG00000204839_24 (sequence is synthesized)
agcacttgtgacactaccccaacacctctcccagggctgaatgaggaacgcgccactggacacatgaggaagaggctgctctgggagctactgatgctgtgacctcacctctctggcttt

SEQ ID NO: 744806 - DNA, 120 bp, Artificial Sequence
  ENSG00000204839_25 (sequence is synthesized)
gggcggcaggtccctgcacctaggatgcctgcctggaaatgtccttgcattcgtggcctccttcacagcctcctcctcagagaagcctctgcgagtgcacagggagtgtgtgcagccttg

SEQ ID NO: 744807 - DNA, 120 bp, Artificial Sequence
  ENSG00000204839_26 (sequence is synthesized)
tgaagggctgggaccacttgcccagactggggcccctcaggcacaggcgtggggtcctactgacctgtctccccagctcccacacagaaagcatctaaaataaacacacgtggatggaaa

SEQ ID NO: 744808 - DNA, 120 bp, Artificial Sequence
  ENSG00000204839_27 (sequence is synthesized)
ttccctgtccccagatcacaccgagtcagcagccttccctagacccgccgcttcctcgctccgcgctggccgccccctcccacccttgcagcccctctctgtctccgcctgccctgactg

SEQ ID NO: 744809 - DNA, 120 bp, Artificial Sequence
  ENSG00000204839_28 (sequence is synthesized)
gtgcgctggttgggcctgctgggcctgggccacctcgcgctgaatcgcaggaaggtgtgagagaaggggaggggtggagaggggcttggcccggtcgcggcgaggtctgcaagaggctga

SEQ ID NO: 744810 - DNA, 120 bp, Artificial Sequence
  ENSG00000204839_29 (sequence is synthesized)
tcagcgatacccaggccacgtgcccaacttcctgagccagacccagggctacctgcggagtccacaggaccccctgcgccgggcagccgccgtgcttatagggctgaatgaggaacgcgc

SEQ ID NO: 744811 - DNA, 120 bp, Artificial Sequence
  ENSG00000204839_30 (sequence is synthesized)
gacaattacagagctcagagtggaccctggcccgctgtgaccacgccttttgctggggcctgctggaggagttggtcaccgtggcccactatgacagccccgaggccctgagccacctct

SEQ ID NO: 744812 - DNA, 120 bp, Artificial Sequence
  ENSG00000204839_31 (sequence is synthesized)
catccaacactcaccactcccaccgtgcctcccctccgacaattacaggtcagggactcacccatcccaaggacctcagtggcaggtgtgacgggcggccaggttactactgctcttccc

SEQ ID NO: 744813 - DNA, 120 bp, Artificial Sequence
  ENSG00000204839_32 (sequence is synthesized)
ttgagcagaatcaatccagtctcctgccctgggctcttctgcccctcacccgatgcccttgctccccctcttcccaccccaccttttgcctttctacttcctggacccctgacccggctc

SEQ ID NO: 744814 - DNA, 120 bp, Artificial Sequence
  ENSG00000204839_33 (sequence is synthesized)
aggctactggtggggcaagtccaaggtctccgaccatgccacctgccctgggggctcccctggaaccccggcccctggattcagctctgcagcctcctccgcactcaggatcagccctcc

SEQ ID NO: 744815 - DNA, 120 bp, Artificial Sequence
  ENSG00000204842_0 (sequence is synthesized)
acccccgagaaagcaacccagcgcgccgcccgctcctcacgtgtccctcccggccccggggccacctcacgttctgcttccgtctgacccctccgacttccggtaaagagtccctatccg

SEQ ID NO: 744816 - DNA, 120 bp, Artificial Sequence
  ENSG00000204842_1 (sequence is synthesized)
cctatccgcacctccgctcccacccggcgcctcggcgcgcccgccctccgatgcgctcagcggccgcagctcctcggagtcccgcggtggccaccgagtctcgccgcttcgccgcagcca

SEQ ID NO: 744817 - DNA, 80 bp, Artificial Sequence
  ENSG00000204842_2 (sequence is synthesized)
gaccgtatccctccgccgcccctcccccgcccggccccggcccccctccctcccggcagagctcgcctccctccgcctca

SEQ ID NO: 744818 - DNA, 120 bp, Artificial Sequence
  ENSG00000204842_3 (sequence is synthesized)
cagagctcgcctccctccgcctcagactgttttggtagcaacggcaacggcggcggcgcgtttcggcccggctcccggcggctccttggtctcggcgggcctccccgccccttcgtcgtc

SEQ ID NO: 744819 - DNA, 80 bp, Artificial Sequence
  ENSG00000204842_4 (sequence is synthesized)
cccttcgtcgtcctccttctccccctcgccagcccgggcgcccctccggccgcgccaacccgcgcctccccgctcggcgc

SEQ ID NO: 744820 - DNA, 120 bp, Artificial Sequence
  ENSG00000204842_5 (sequence is synthesized)
cgttccggcgtctccttggcgcgcccggctcccggctgtccccgcccggcgtgcgagccggtgtatgggcccctcaccatgtcgctgaagccccagcagcagcagcagcagcagcagcag

SEQ ID NO: 744821 - DNA, 120 bp, Artificial Sequence
  ENSG00000204842_6 (sequence is synthesized)
cagcagccgccgcccgcggctgccaatgtccgcaagcccggcggcagcggccttctagcgtcgcccgccgccgcgccttcgccgtcctcgtcctcggtctcctcgtcctcggccacggct

SEQ ID NO: 744822 - DNA, 120 bp, Artificial Sequence
  ENSG00000204842_7 (sequence is synthesized)
ccctcctcggtggtcgcggcgacctccggcggcgggaggcccggcctgggcagaggtcgaaacagtaacaaaggactgcctcagtctacgatttcttttgatggaatctatgcaaatatg

SEQ ID NO: 744823 - DNA, 120 bp, Artificial Sequence
  ENSG00000204842_8 (sequence is synthesized)
aggatggttcatatacttacatcagttgttggctccaaatgtgaagtacaagtgaaaaatggaggtatatatgaaggagtttttaaaacttacagtccgaagtgtgatttggtacttgat

SEQ ID NO: 744824 - DNA, 120 bp, Artificial Sequence
  ENSG00000204842_9 (sequence is synthesized)
gccgcacatgagaaaagtacagaatccagttcggggccgaaacgtgaagaaataatggagagtattttgttcaaatgttcagactttgttgtggtacagtttaaagatatggactccagt

SEQ ID NO: 744825 - DNA, 120 bp, Artificial Sequence
  ENSG00000204842_10 (sequence is synthesized)
tatgcaaaaagagatgcttttactgactctgctatcagtgctaaagtgaatggcgaacacaaagagaaggacctggagccctgggatgcaggtgaactcacagccaatgaggaacttgag

SEQ ID NO: 744826 - DNA, 120 bp, Artificial Sequence
  ENSG00000204842_11 (sequence is synthesized)
gctttggaaaatgacgtatctaatggatgggatcccaatgatatgtttcgatataatgaagaaaattatggtgtagtgtctacgtatgatagcagtttatcttcgtatacagtgccctta

SEQ ID NO: 744827 - DNA, 120 bp, Artificial Sequence
  ENSG00000204842_12 (sequence is synthesized)
gaaagagataactcagaagaatttttaaaacgggaagcaagggcaaaccagttagcagaagaaattgagtcaagtgcccagtacaaagctcgagtggccctggaaaatgatgataggagt

SEQ ID NO: 744828 - DNA, 120 bp, Artificial Sequence
  ENSG00000204842_13 (sequence is synthesized)
gaggaagaaaaatacacagcagttcagagaaattccagtgaacgtgaggggcacagcataaacactagggaaaataaatatattcctcctggacaaagaaatagagaagtcatatcctgg

SEQ ID NO: 744829 - DNA, 120 bp, Artificial Sequence
  ENSG00000204842_14 (sequence is synthesized)
ggaagtgggagacagaattcaccgcgtatgggccagcctggatcgggctccatgccatcaagatccacttctcacacttcagatttcaacccgaattctggttcagaccaaagagtagtt

SEQ ID NO: 744830 - DNA, 120 bp, Artificial Sequence
  ENSG00000204842_15 (sequence is synthesized)
aatggaggtgttccctggccatcgccttgcccatctccttcctctcgcccaccttctcgctaccagtcaggtcccaactctcttccacctcgggcagccacccctacacggccgccctcc

SEQ ID NO: 744831 - DNA, 120 bp, Artificial Sequence
  ENSG00000204842_16 (sequence is synthesized)
aggcccccctcgcggccatccagacccccgtctcacccctctgctcatggttctccagctcctgtctctactatgcctaaacgcatgtcttcagaagggcctccaaggatgtccccaaag

SEQ ID NO: 744832 - DNA, 120 bp, Artificial Sequence
  ENSG00000204842_17 (sequence is synthesized)
gcccagcgacatcctcgaaatcacagagtttctgctgggaggggttccatatccagtggcctagaatttgtatcccacaacccacccagtgaagcagctactcctccagtagcaaggacc

SEQ ID NO: 744833 - DNA, 120 bp, Artificial Sequence
  ENSG00000204842_18 (sequence is synthesized)
agtccctcggggggaacgtggtcatcagtggtcagtggggttccaagattatcccctaaaactcatagacccaggtctcccagacagaacagtattggaaatacccccagtgggccagtt

SEQ ID NO: 744834 - DNA, 120 bp, Artificial Sequence
  ENSG00000204842_19 (sequence is synthesized)
cgaacagagctgttaccccttctagtgaggctaaagattccaggcttcaagatcagaggcagaactctcctgcagggaataaagaaaatattaaacccaatgaaacatcacctagcttct

SEQ ID NO: 744835 - DNA, 120 bp, Artificial Sequence
  ENSG00000204842_20 (sequence is synthesized)
caaaagctgaaaacaaaggtatatcaccagttgtttctgaacatagaaaacagattgatgatttaaagaaatttaagaatgattttaggttacagccaagttctacttctgaatctatgg

SEQ ID NO: 744836 - DNA, 120 bp, Artificial Sequence
  ENSG00000204842_21 (sequence is synthesized)
atcaactactaaacaaaaatagagagggagaaaaatcaagagatttgatcaaagacaaaattgaaccaagtgctaaggattctttcattgaaaatagcagcagcaactgtaccagtggca

SEQ ID NO: 744837 - DNA, 120 bp, Artificial Sequence
  ENSG00000204842_22 (sequence is synthesized)
gcagcaagccgaatagccccagcatttccccttcaatacttagtaacacggagcacaagaggggacctgaggtcacttcccaaggggttcagacttccagcccagcatgtaaacaagaga

SEQ ID NO: 744838 - DNA, 120 bp, Artificial Sequence
  ENSG00000204842_23 (sequence is synthesized)
aagacgataaggaagagaagaaagacgcagctgagcaagttaggaaatcaacattgaatcccaatgcaaaggagttcaacccacgttccttctctcagccaaagccttctactaccccaa

SEQ ID NO: 744839 - DNA, 120 bp, Artificial Sequence
  ENSG00000204842_24 (sequence is synthesized)
cttcacctcggcctcaagcacaacctagcccatctatggtgggtcatcaacagccaactccagtttatactcagcctgtttgttttgcaccaaatatgatgtatccagtcccagtgagcc

SEQ ID NO: 744840 - DNA, 120 bp, Artificial Sequence
  ENSG00000204842_25 (sequence is synthesized)
caggcgtgcaacctttatacccaatacctatgacgcccatgccagtgaatcaagccaagacatatagagcagtaccaaatatgccccaacagcggcaagaccagcatcatcagagtgcca

SEQ ID NO: 744841 - DNA, 120 bp, Artificial Sequence
  ENSG00000204842_26 (sequence is synthesized)
tgatgcacccagcgtcagcagcgggcccaccgattgcagccaccccaccagcttactccacgcaatatgttgcctacagtcctcagcagttcccaaatcagccccttgttcagcatgtgc

SEQ ID NO: 744842 - DNA, 120 bp, Artificial Sequence
  ENSG00000204842_27 (sequence is synthesized)
cacattatcagtctcagcatcctcatgtctatagtcctgtaatacagggtaatgctagaatgatggcaccaccaacacacgcccagcctggtttagtatcttcttcagcaactcagtacg

SEQ ID NO: 744843 - DNA, 120 bp, Artificial Sequence
  ENSG00000204842_28 (sequence is synthesized)
gggctcatgagcagacgcatgcgatgtatgcatgtcccaaattaccatacaacaaggagacaagcccttctttctactttgccatttccacgggctcccttgctcagcagtatgcgcacc

SEQ ID NO: 744844 - DNA, 120 bp, Artificial Sequence
  ENSG00000204842_29 (sequence is synthesized)
ctaacgctaccctgcacccacatactccacaccctcagccttcagctacccccactggacagcagcaaagccaacatggtggaagtcatcctgcacccagtcctgttcagcaccatcagc

SEQ ID NO: 744845 - DNA, 120 bp, Artificial Sequence
  ENSG00000204842_30 (sequence is synthesized)
accaggccgcccaggctctccatctggccagtccacagcagcagtcagccatttaccacgcggggcttgcgccaactccaccctccatgacacctgcctccaacacgcagtcgccacaga

SEQ ID NO: 744846 - DNA, 120 bp, Artificial Sequence
  ENSG00000204842_31 (sequence is synthesized)
atagtttcccagcagcacaacagactgtctttacgatccatccttctcacgttcagccggcgtataccaacccaccccacatggcccacgtacctcaggctcatgtacagtcaggaatgg

SEQ ID NO: 744847 - DNA, 120 bp, Artificial Sequence
  ENSG00000204842_32 (sequence is synthesized)
ttccttctcatccaactgcccatgcgccaatgatgctaatgacgacacagccacccggcggtccccaggccgccctcgctcaaagtgcactacagcccattccagtctcgacaacagcgc

SEQ ID NO: 744848 - DNA, 120 bp, Artificial Sequence
  ENSG00000204842_33 (sequence is synthesized)
atttcccctatatgacgcacccttcagtacaagcccaccaccaacagcagttgtaaggctgccctggaggaaccgaaaggccaaattccctcctcccttctactgcttctaccaactgga

SEQ ID NO: 744849 - DNA, 120 bp, Artificial Sequence
  ENSG00000204842_34 (sequence is synthesized)
agcacagaaaactagaatttcatttattttgtttttaaaatatatatgttgatttcttgtaacatccaataggaatgctaacagttcacttgcagtggaagatacttggaccgagtagag

SEQ ID NO: 744850 - DNA, 120 bp, Artificial Sequence
  ENSG00000204842_35 (sequence is synthesized)
gcatttaggaacttgggggctattccataattccatatgctgtttcagagtcccgcaggtaccccagctctgcttgccgaaactggaagttatttattttttaataacccttgaaagtca

SEQ ID NO: 744851 - DNA, 120 bp, Artificial Sequence
  ENSG00000204842_36 (sequence is synthesized)
tgaacacatcagctagcaaaagaagtaacaagagtgattcttgctgctattactgctaaaaaaaaaaaaaaaaaaaaatcaagacttggaacgcccttttactaaacttgacaaagtttc

SEQ ID NO: 744852 - DNA, 120 bp, Artificial Sequence
  ENSG00000204842_37 (sequence is synthesized)
agtaaattcttaccgtcaaactgacggattattatttataaatcaagtttgatgaggtgatcactgtctacagtggttcaacttttaagttaagggaaaaacttttactttgtagataat

SEQ ID NO: 744853 - DNA, 120 bp, Artificial Sequence
  ENSG00000204842_38 (sequence is synthesized)
cccgagaaagcaacccagcgcgccgcccgctcctcacgtgtccctcccggccccggggccacctcacgttctgcttccgtctgacccctccgacttccgaggtcgaaacagtaacaaagg

SEQ ID NO: 744854 - DNA, 120 bp, Artificial Sequence
  ENSG00000204842_39 (sequence is synthesized)
ctatctaagaataacctgaccttttatgacattgagggtcaagaatctgaaggaaaagatgaacccatttctttgcctgacttgctttataacttttggcaaatagtttctacttctgta

SEQ ID NO: 744855 - DNA, 120 bp, Artificial Sequence
  ENSG00000204842_40 (sequence is synthesized)
cctggtcttcagatctctttcctgctttaactaaaatgtaatgatgtatataatggcaaagcatctttgtggagaaaggtacctttctcctcttcctcatcaatattatgctttggtata

SEQ ID NO: 744856 - DNA, 120 bp, Artificial Sequence
  ENSG00000204842_41 (sequence is synthesized)
tcctgcctacgacatgcaagagaattttataataataaaagcataaaggtgttctccagcatgaaaacattttgcttcactacttgatctgagggtcactggcattacatattttttttg

SEQ ID NO: 744857 - DNA, 120 bp, Artificial Sequence
  ENSG00000204842_42 (sequence is synthesized)
ctgtttgttataatgataatactatgtttctacatcatgctgtattttaatggttgaatattatgtcatattagatatattttagacatgagtcacactttaaatataaccaatgtgaac

SEQ ID NO: 744858 - DNA, 120 bp, Artificial Sequence
  ENSG00000204842_43 (sequence is synthesized)
agaatgctgaaatgaaaatgagaagtattttatgtaaaactaagcagtatttatatgtgagaataataagcaaaaaaacccatcttcgttttgtgactaaacagagaaatttgtgtagat

SEQ ID NO: 744859 - DNA, 120 bp, Artificial Sequence
  ENSG00000204842_44 (sequence is synthesized)
caacttagcagctgtctaaagtaccaaaataatagatttttcactgttgataatttaaaataaaatgtccatttgtatatcttatgatacagaattaatggattgcttcaaatgtttttc

SEQ ID NO: 744860 - DNA, 120 bp, Artificial Sequence
  ENSG00000204842_45 (sequence is synthesized)
agaatatgtttttaaatagtactgatttcattaagatgttttgttctgaatatttctgagaactaccgtagtgtcgtttagttttcctatttgcgtttttggttgtttggagtaggggat

SEQ ID NO: 744861 - DNA, 120 bp, Artificial Sequence
  ENSG00000204842_46 (sequence is synthesized)
aattttggtttattcatacagttgaaaagtgtactgctatgagaatgagattatggttacatgtaactacatgggcatttcatttttaaagcctctttgaactttttgaaatactaagaa

SEQ ID NO: 744862 - DNA, 120 bp, Artificial Sequence
  ENSG00000204842_47 (sequence is synthesized)
actttttgaaatactaagaatataaaatttttattttttaagtttagatgtcctgaacgagtatgtttaggcaaaattgagttatttaagaatttataggctgggcgcagtggctcacgc

SEQ ID NO: 744863 - DNA, 120 bp, Artificial Sequence
  ENSG00000204842_48 (sequence is synthesized)
aaaaaaaaaaaaaaaaagaatttacagatttctggcaaaccttcttcttgagacattactacttttcataccacctctgtcctttttgaagaataaaagttttaacattccgtaggttaa

SEQ ID NO: 744864 - DNA, 120 bp, Artificial Sequence
  ENSG00000204842_49 (sequence is synthesized)
ttaatgagaataggacttgggcagcagcaatcatccttcctgtcacctgtaacccacagcttatgctttcttcctggaggttcttgtctgccacaaaggctcactgctgataggaatttg

SEQ ID NO: 744865 - DNA, 120 bp, Artificial Sequence
  ENSG00000204842_50 (sequence is synthesized)
tatatgatcaaaggtgtttagttttataaaacagttaagtccagtcttaattttccacattatcactttcaattttgtattgtggattacgcattttaaataaaaaattgtgtgattgct

SEQ ID NO: 744866 - DNA, 120 bp, Artificial Sequence
  ENSG00000204842_51 (sequence is synthesized)
atccccgccccctcccccggcggtcaagatggagggagcgggcggcctcccctccccacgcgtgttgggaggggttctcgggtagcggcgatggtcagccccggctcccccttccgcacg

SEQ ID NO: 744867 - DNA, 120 bp, Artificial Sequence
  ENSG00000204842_52 (sequence is synthesized)
atcctccgcccgcagcgtggggatgctcgggcagctcctccactcccggtttaggtgtgaacgttggaggggtctggaggctgtggtggcgttttccggaacatgtccccctccatgggg

SEQ ID NO: 744868 - DNA, 120 bp, Artificial Sequence
  ENSG00000204842_53 (sequence is synthesized)
gacatctctggaggggagaagttagggccgcgtcccccgtgccggttaaaggggtaggcaccgggctcctccggaatcatcagggtctgtcggggctctctccccgccccctccgagtcc

SEQ ID NO: 744869 - DNA, 120 bp, Artificial Sequence
  ENSG00000204842_54 (sequence is synthesized)
tgggaaagatcggaggacggggtggagacaagtgggccttggcccccgcacccctctgcgttcgtgtccgaggcggcggcgggggctcccgaactcccctgaaatcgtggggctccatgt

SEQ ID NO: 744870 - DNA, 120 bp, Artificial Sequence
  ENSG00000204842_55 (sequence is synthesized)
ggcctccggcagcgttccaccctcccccacctggggaagggaaggggtggggagtgcccggccccgtcccggccttcctccttcccccgccagacctctccggcgcgcgggtggtggccg

SEQ ID NO: 744871 - DNA, 120 bp, Artificial Sequence
  ENSG00000204842_56 (sequence is synthesized)
cactagatataaagagggctgagctacaactctgtttgaggaagtgtaagtatgtatatgttaaaaatagtagaatcaccaggaattgggaaacccatatttttattctgggctctacca

SEQ ID NO: 744872 - DNA, 120 bp, Artificial Sequence
  ENSG00000204842_57 (sequence is synthesized)
cttattcatcatatattaaagcaagtcagacactcattctgaagttgagatttcgcagtgagtaaagtgttaataattcttgcctagtctacattatgggattgtgatgagattcctata

SEQ ID NO: 744873 - DNA, 120 bp, Artificial Sequence
  ENSG00000204842_58 (sequence is synthesized)
aggttcataaatacagatatattgtaaaactataaagttttgtaaagtacctctctaatatgaggcaaacacagtatgtaacactatttggagggaccgtatttccttatctttttagca

SEQ ID NO: 744874 - DNA, 120 bp, Artificial Sequence
  ENSG00000204842_59 (sequence is synthesized)
gctttgtttatcagtacattctataaacatttatttttggcttacattgtagtgtgtttctatagcatctgtatatggcactaattcccaactatatttccataataaggaatatcaaat

SEQ ID NO: 744875 - DNA, 120 bp, Artificial Sequence
  ENSG00000204842_60 (sequence is synthesized)
tttccataataaggaatatcaaatacaaataaagggtccaagttttatttgtgattagcataaggaatatgctgacagcagctataaaagtataaaaattaggctgggtgtggtggctca

SEQ ID NO: 744876 - DNA, 63 bp, Artificial Sequence
  ENSG00000204842_61 (sequence is synthesized)
tgacaagagcgaaactctatctcaaaaaaaagaaaaaagaaacaagatcttcaagcttaagga

SEQ ID NO: 744877 - DNA, 120 bp, Artificial Sequence
  ENSG00000204842_62 (sequence is synthesized)
aaaaaaaagaaaaaagaaacaagatcttcaagcttaaggaaacaaaaacaaaactcagctgtgttaaatctgtttttagttgctatacatttctgctcagcttcatgtgatgcacattca

SEQ ID NO: 744878 - DNA, 120 bp, Artificial Sequence
  ENSG00000204842_63 (sequence is synthesized)
tgtaattgtatcctaaattcctttgtactttttattttcttccttggtcttcaattatcttaagactaccaagaaaacaaaaattttaaaaatcttcttcagccggtcaggcgcagtggc

SEQ ID NO: 744879 - DNA, 64 bp, Artificial Sequence
  ENSG00000204842_64 (sequence is synthesized)
tagctgggcattgtggcgcgttcgggaggtgtaggttgcggtgagcggagatcgcgccactgca

SEQ ID NO: 744880 - DNA, 120 bp, Artificial Sequence
  ENSG00000204842_65 (sequence is synthesized)
actccatttcaaaaaaaaaaaaaaaaatctgcttcagctattctgttaatcttttgacattacttagatggtctggaaataaattttgagaataacatgattagaagtgagagagtataa

SEQ ID NO: 744881 - DNA, 120 bp, Artificial Sequence
  ENSG00000204842_66 (sequence is synthesized)
ttagaagtgagagagtataagcatagttttggagatacactcagaatagcattatagattttctctttttactaattggaaaaatggcagttgttgaataatagttttcttccgtgaccc

SEQ ID NO: 744882 - DNA, 120 bp, Artificial Sequence
  ENSG00000204842_67 (sequence is synthesized)
ttgtgacttaaaaaaaaaaaaacactgaaatgaaataatcgaaccattttctctaaacctttgaatctgagctctgcagttaggtttataatggtatatgaaacctattagatatatact

SEQ ID NO: 744883 - DNA, 120 bp, Artificial Sequence
  ENSG00000204842_68 (sequence is synthesized)
ccctgcttttattatcttccccttttgactaacttgggtctcaagtttccttaattactgcacagtggaccttgatgttgctataaagaatgtgtagggctgggcatggtggctcatgcc

SEQ ID NO: 744884 - DNA, 120 bp, Artificial Sequence
  ENSG00000204842_69 (sequence is synthesized)
gaggctgaggcaggagaatcacttgatacatttagttaggagagaaaatcatacttatgttagtaattgctgctgttcttcatatacttgtggttttgattgccagcaaattcctaacat

SEQ ID NO: 744885 - DNA, 120 bp, Artificial Sequence
  ENSG00000204842_70 (sequence is synthesized)
tttggaaaagaaaacagtaatgggataaagggtaagggctagagaggacagttttatttacctagatcttcagagaagcctgaagcctcttttaggaagtaacatttgaactgagaatgt

SEQ ID NO: 744886 - DNA, 120 bp, Artificial Sequence
  ENSG00000204842_71 (sequence is synthesized)
attcagggtcaaatcattcagagcctcctagaccatgtgaacacatgtattatgctgtggagatactgtttaataggcagtctgcttttttttctgcagtaccaaatatgccccaacagc

SEQ ID NO: 744887 - DNA, 120 bp, Artificial Sequence
  ENSG00000204842_72 (sequence is synthesized)
ggttatcagtaagcagctagaggctctcccagctaggaaaccctgtgtgtcatgccatttgcctgtctccctttccctctcaaatacacgtgatctggccctaagggaatgtttgtgtgg

SEQ ID NO: 744888 - DNA, 120 bp, Artificial Sequence
  ENSG00000204842_73 (sequence is synthesized)
ttttgtcatgggatcagtgaaggtgctgattggtcagtcctttagttttccaactgagaccttaaaaatatctttgactctggaatgcaacccagtccttctttcctttctgtgtctgct

SEQ ID NO: 744889 - DNA, 120 bp, Artificial Sequence
  ENSG00000204842_74 (sequence is synthesized)
ttgctatgtctatatagcctcactactatatatatgtgtacatatatattcccctacacacttaccttggaagccaggcagggatgatggccttcacagagtctcagctctccgaagtga

SEQ ID NO: 744890 - DNA, 120 bp, Artificial Sequence
  ENSG00000204842_75 (sequence is synthesized)
ctaccggggcctgtcaacttgattgttactcacatgagttccagacacatctctccaattgttttccctggttatccatatatctgctttgaccataagttgtactcttgagagggcttg

SEQ ID NO: 744891 - DNA, 120 bp, Artificial Sequence
  ENSG00000204842_76 (sequence is synthesized)
gccttggacattggtgcagtgtaactagaagctggaagcacccaggtggtcccatttttctttaagagcagccctggaagcactttggagctcacctccagtgtaagctgctacaggtga

SEQ ID NO: 744892 - DNA, 120 bp, Artificial Sequence
  ENSG00000204842_77 (sequence is synthesized)
aaggtgtgcttgccatctcagtggttgctgtctgcatcagctgctgacaaaggtccctgcactccagggcccaggggattgtcttaatgaggagaaggagctgcactgaagttgggctct

SEQ ID NO: 744893 - DNA, 120 bp, Artificial Sequence
  ENSG00000204842_78 (sequence is synthesized)
aacgctggccttgaggccctccctggggctgttacgggtgaattggctgtattagatgtctctgctactttcataacagaactctctgaggcgggtctaagtgagacctgccacaatgaa

SEQ ID NO: 744894 - DNA, 120 bp, Artificial Sequence
  ENSG00000204842_79 (sequence is synthesized)
ttccatttcctgttaaatagtgcgccagtgaggctctggcaaggtgtgggctagagatgcgactcagttggatctatctctcagaaggctaccttgtaagtagagttccacagctctggg

SEQ ID NO: 744895 - DNA, 120 bp, Artificial Sequence
  ENSG00000204842_80 (sequence is synthesized)
aagtttgggcgtcctcaccctgcaaagtttaggttctgtggtgtagcgcactgcagttgatttgctttttgatagtggggagggaagccggtttggtccgtgtgggccagcgtggtttgg

SEQ ID NO: 744896 - DNA, 120 bp, Artificial Sequence
  ENSG00000204842_81 (sequence is synthesized)
tggagtcagcttcataagagctggggtcctgtaggtgtctaccagaggctggtggctaagtaggcatgtgaacttacatgtaagtcagggatccctaaaacctcactctgtttttgtgct

SEQ ID NO: 744897 - DNA, 120 bp, Artificial Sequence
  ENSG00000204842_82 (sequence is synthesized)
gaaagggcaaaaaggttaacacagggaagctcaaatttgccatgtgcccgtttgaatatgtgagagtaaaaacggcatttcatccaaggcttatcgtagtctagaacagtgcacagtgtg

SEQ ID NO: 744898 - DNA, 120 bp, Artificial Sequence
  ENSG00000204842_83 (sequence is synthesized)
ctggaatccagctgtttgggctgactaaaatcacctttccaacttgacagtgagtgagaccaggttgaacttggtacagagacgctgggctggcccagatgacttcaggttactcctttc

SEQ ID NO: 744899 - DNA, 120 bp, Artificial Sequence
  ENSG00000204842_84 (sequence is synthesized)
catctcactggagccattaaaaactccaactcctcctcctcctcctgctccatcagcatatctctgagagagtcacgggggcctaagagtctcttttcactgcctggtgagcagaccaga

SEQ ID NO: 744900 - DNA, 120 bp, Artificial Sequence
  ENSG00000204842_85 (sequence is synthesized)
agcagagggagagaggcaaatgaacagaggtccaagtaattcacatacttgactgtgacagtctctgcttattaatgtaatctgttttcctatttgaaagggatgttatctgcaaaacta

SEQ ID NO: 744901 - DNA, 120 bp, Artificial Sequence
  ENSG00000204842_86 (sequence is synthesized)
cctcaggccccacatggcagcctgattctgaagcatcattgaatcttgtatgatattaagttgagaaagctgcccttggatccagtgtctaatctttgtgaagatcttaccccatacata

SEQ ID NO: 744902 - DNA, 120 bp, Artificial Sequence
  ENSG00000204842_87 (sequence is synthesized)
gaatacaatgatcagaaatgtcaagggttaggacagcacagccctgacttctacccaggctcacttgttgcctgctccctgacccttgcaggatctgcccaaaggtgaagcgcgtcttca

SEQ ID NO: 744903 - DNA, 120 bp, Artificial Sequence
  ENSG00000204842_88 (sequence is synthesized)
ggtcaatagataatctactagagattgtccccagagaacagaactgggccctgaggcccaccgttgccctttcctgagagtcccagcccagtgaaaggaacacagttgacatgttgttga

SEQ ID NO: 744904 - DNA, 120 bp, Artificial Sequence
  ENSG00000204842_89 (sequence is synthesized)
cggggcaccccaaagcattctgctcgcacaggtggaatggcaggcagggccagtgcttcaagccccgcatttgagaactagcaagacccgtccaggagtgtgcacaggagggactgtgac

SEQ ID NO: 744905 - DNA, 120 bp, Artificial Sequence
  ENSG00000204842_90 (sequence is synthesized)
gatcagttcagcatcagggcctgaggcttccgggagccgagtctgtgtgtgttctgatggtatacaggatttggcttgatgagaagcagcagcagcagcaacagcagcctgatgcatgcc

SEQ ID NO: 744906 - DNA, 120 bp, Artificial Sequence
  ENSG00000204842_91 (sequence is synthesized)
taggactcagttggccttccttgttatgacaggctggacagggcagtgttttccttcctgagtcccaaaagtctgacatgtggggggttattaccatggcagagtttgattgtagctctg

SEQ ID NO: 744907 - DNA, 120 bp, Artificial Sequence
  ENSG00000204842_92 (sequence is synthesized)
gagaagatactgctgagaaagcgctgtggatggactggctttgagtgtagcgttagccccagcccctgaacaggggagagcgccctgtgattgtgctctactacttgatggctgccatgg

SEQ ID NO: 744908 - DNA, 120 bp, Artificial Sequence
  ENSG00000204842_93 (sequence is synthesized)
cgatacttcacagtctgacctgttattctgaaagcaatactggtgcttggctaatatttggggagggggtttgttaaggcctttttttctaccccatgaacaagtcttctgggagtttta

SEQ ID NO: 744909 - DNA, 120 bp, Artificial Sequence
  ENSG00000204842_94 (sequence is synthesized)
tctgaagtggttttacgtctgactggtttgtttctacccacccacccaaccctccccactttggtgcagatgggagggggaaaagcgaattcaattttgagttttgttcagctagcacga

SEQ ID NO: 744910 - DNA, 120 bp, Artificial Sequence
  ENSG00000204842_95 (sequence is synthesized)
attacaagcgtgagccaccgtgcccggctccatttctcccaatttcaaattcaaggaggaaaagaattcctgattaagtttccacgggctcccttgctcagcagtatgcgcaccctaacg

SEQ ID NO: 744911 - DNA, 120 bp, Artificial Sequence
  ENSG00000204842_96 (sequence is synthesized)
catgctgcatgaattgagtaactaagtttataatgaataaatagttgtagtttagctctgactttttgatgaggctatgcattggcttttgatgaacaacattacatagatattcacatg

SEQ ID NO: 744912 - DNA, 120 bp, Artificial Sequence
  ENSG00000204842_97 (sequence is synthesized)
cccgagaaagcaacccagcgcgccgcccgctcctcacgtgtccctcccggccccggggccacctcacgttctgcttccgtctgacccctccgacttccgatttcttttgatggaatctat

SEQ ID NO: 744913 - DNA, 120 bp, Artificial Sequence
  ENSG00000204842_98 (sequence is synthesized)
aggaggaggaaggttggccagagttgggcagcactgaaattccacatcctcgggctgacaccgattctaaatgatcaaaggcagaagatttataccagataaagccatatggattgctgg

SEQ ID NO: 744914 - DNA, 120 bp, Artificial Sequence
  ENSG00000204842_99 (sequence is synthesized)
ccttggcctcccaaagtgctgggattttaggcatgagccaccacgccgggccctaccctctaggttttaagattcagccctgaccctgccacttcctatacaaccctggacaaagggttc

SEQ ID NO: 744915 - DNA, 120 bp, Artificial Sequence
  ENSG00000204842_100 (sequence is synthesized)
gttcggctctccatgccttagttgtcatctgtaattcagctcattttttcacaaggtgagctaacacaagcgaaaggcatgactcgcacagctgttaacaggccggtgagtaaagcctgc

SEQ ID NO: 744916 - DNA, 120 bp, Artificial Sequence
  ENSG00000204842_101 (sequence is synthesized)
ttggctcccactacactactgacagcatgacagtcccctctgagtagcctagccactgggtacacccccagcttctctcagccttacagaactattgccccattttgtcacatgctccct

SEQ ID NO: 744917 - DNA, 120 bp, Artificial Sequence
  ENSG00000204842_102 (sequence is synthesized)
taccatcctgcaataaattccacgtaatataaccaacatactaccctaactaattacaagacagggacaacaaaggactgtcacttagccgaaataaaacgtgcttcagtgcaactgtag

SEQ ID NO: 744918 - DNA, 120 bp, Artificial Sequence
  ENSG00000204842_103 (sequence is synthesized)
aacacatgatatctaaataatagcaccatagtatacttgactagctttttaattattttttaaatatacaggaaggtaataagtaacaaagtaataatagtgaatagtttaagctcagtt

SEQ ID NO: 744919 - DNA, 120 bp, Artificial Sequence
  ENSG00000204842_104 (sequence is synthesized)
agcataatcgggcaaactttcatttgataaaagtgataagtagttttcagtggcttttttgtttaccagaaggaggtggtttttaaatacgtgcatccaagataaaatataaaaaaatgt

SEQ ID NO: 744920 - DNA, 120 bp, Artificial Sequence
  ENSG00000204842_105 (sequence is synthesized)
tcaggtttgctttcctacatagataaaataatatgtaactagctctcccaaatttcagcaacagttagtgaatgtttagccacaaatttgcagttaattatataatcagttcttaggatt

SEQ ID NO: 744921 - DNA, 120 bp, Artificial Sequence
  ENSG00000204842_106 (sequence is synthesized)
ttatgaacaagttctatattctttgtgccttatacctagttgtaagcagtcattccacaattattttcctgaagtggcttggttaatgccacaccagaaacaggtcacagacaatagtgc

SEQ ID NO: 744922 - DNA, 120 bp, Artificial Sequence
  ENSG00000204842_107 (sequence is synthesized)
tgtaagaaatgtgtgaggaaagaggcacatgggaagtagctagctcgtgctggaggaactggaaaaaaacctcacatgggagatgacagttgagctgaattcttaactagagttgtaaca

SEQ ID NO: 744923 - DNA, 120 bp, Artificial Sequence
  ENSG00000204842_108 (sequence is synthesized)
gggcgaggcccttacatgcagaccacctgtgtggattaagataagacataaagtaatcttttaaaagaactattatttagaaacctggtatatgctacatggtgctgtgttatactgggt

SEQ ID NO: 744924 - DNA, 120 bp, Artificial Sequence
  ENSG00000204842_109 (sequence is synthesized)
ttgagaaagaatgggaagtgttacaaggattcagtggttggaaattaaggaagatagaaagttagtgttggatctgttttggctctttggtcatgcctttgtttttctcaaaatgaatgc

SEQ ID NO: 744925 - DNA, 120 bp, Artificial Sequence
  ENSG00000204842_110 (sequence is synthesized)
tatgagaagcgatttcataatgctgtgagagtctgttacagggacttgatcaagtctgagggccatgagagaaagtccctctgaggaagttgctttcaagctgacacctgaaggatgaag

SEQ ID NO: 744926 - DNA, 120 bp, Artificial Sequence
  ENSG00000204842_111 (sequence is synthesized)
cagaattatcccagctgggatttgggaactggtgtttgaggctgaggactagcatgcatgataggaaaataacccagagtggcagaagtgggagtggtatgagatggcatcagagacgca

SEQ ID NO: 744927 - DNA, 74 bp, Artificial Sequence
  ENSG00000204842_112 (sequence is synthesized)
gggcaacagagtgagtgagacttatatctcaaaaaaaaacaaaaaacaaaaaactgaaagacatgaagaaatgg

SEQ ID NO: 744928 - DNA, 120 bp, Artificial Sequence
  ENSG00000204842_113 (sequence is synthesized)
aaaaacaaaaaacaaaaaactgaaagacatgaagaaatggtttttgtaccaaggtttggcccacgctgagattcacaaagaactggctttcagttcttatctttattttgatttaaactg

SEQ ID NO: 744929 - DNA, 120 bp, Artificial Sequence
  ENSG00000204842_114 (sequence is synthesized)
gcccatcatgttgtcctttgaagttagtctagtaaatttctttccaaagggctggggcactcagaagggagtttacttttctatatttatttcataaagcaaagatgggagatcctccat

SEQ ID NO: 744930 - DNA, 120 bp, Artificial Sequence
  ENSG00000204842_115 (sequence is synthesized)
tagggcttgggaaagtaaactgagtggcagaagggctcctgtgattagctgagagagactgtggtccttcggccctgatgatagatccctggccttgccacataccatacacagtgcccg

SEQ ID NO: 744931 - DNA, 120 bp, Artificial Sequence
  ENSG00000204842_116 (sequence is synthesized)
ggcagtagcatggtgaggttagcctgatgatggccttgagctaaagagtgtgcacctaaaatgcacttgtttgagtagtttctgcctatgccttcaagttgcctttttgggaaaacctag

SEQ ID NO: 744932 - DNA, 120 bp, Artificial Sequence
  ENSG00000204842_117 (sequence is synthesized)
tgaccgttaagagtaaatgcaaactaatttgattttaatatcatatgtagagctgtattatatgaaccaaatgctagtctgttaagcaatagctacacttattttttcaagacaatggat

SEQ ID NO: 744933 - DNA, 120 bp, Artificial Sequence
  ENSG00000204842_118 (sequence is synthesized)
ggtttaaatggagtcatctatagaaattggtagtggcgtgagttatgcattgtaaccatcaagaaagttcagttgatgaagtgtagaggagcgatggaggttgtcagacatcggttgtgt

SEQ ID NO: 744934 - DNA, 120 bp, Artificial Sequence
  ENSG00000204842_119 (sequence is synthesized)
taaaatatttcaaccatttttaagcattgtgagctaatagagggatgtggtggtttgttttttcctcttaaaaattattattaatgtacttaagacaaaccatagaaacaaaaaacattt

SEQ ID NO: 744935 - DNA, 120 bp, Artificial Sequence
  ENSG00000204842_120 (sequence is synthesized)
agatatgaggatttttaaatgatggaatggataatagatcatatgcctgggaaaaagggtatgattctcttgagattatttttgtcaaaggcatataagaactggtaccttgatgagcta

SEQ ID NO: 744936 - DNA, 120 bp, Artificial Sequence
  ENSG00000204843_0 (sequence is synthesized)
agaggctagcacggttcctgacaagtctagagcagcactagcgcagagtgagactcatcagctggcaagcaggattctgtgtctctgggttcaggaatcctcaggcagcagaggggactt

SEQ ID NO: 744937 - DNA, 120 bp, Artificial Sequence
  ENSG00000204843_1 (sequence is synthesized)
gctcctcagcccccatcactgcccccacccctacccgtgtaggccaccgagtgaggcccatggactggggagggctgtgcctgacgactcctgtgtccctctatgagggcccagcgccct

SEQ ID NO: 744938 - DNA, 120 bp, Artificial Sequence
  ENSG00000204843_2 (sequence is synthesized)
gaccctcctgcctaggtttctaccttttctctctgtctttggccagctgggggagggggtagaggccgggtgagcaacatggcacagagcaagaggcacgtgtacagccggacgcccagc

SEQ ID NO: 744939 - DNA, 120 bp, Artificial Sequence
  ENSG00000204843_3 (sequence is synthesized)
ggcagcaggatgagtgcggaggcaagcgcccggcctctgcgggtgggctcccgtgtagaggtgattggaaaaggccaccgaggcactgtggcctatgttggagccacactgtttgccact

SEQ ID NO: 744940 - DNA, 120 bp, Artificial Sequence
  ENSG00000204843_4 (sequence is synthesized)
ggcaaatgggtaggcgtgattctggatgaagcaaagggcaaaaatgatggaactgttcaaggcaggaagtacttcacttgtgatgaagggcatggcatctttgtgcgccagtcccagatc

SEQ ID NO: 744941 - DNA, 120 bp, Artificial Sequence
  ENSG00000204843_5 (sequence is synthesized)
caggtatttgaagatggagcagatactacttccccagagacacctgattcttctgcttcaaaagtcctcaaaagagagggaactgatacaactgcaaagactagcaaactgcggggactg

SEQ ID NO: 744942 - DNA, 120 bp, Artificial Sequence
  ENSG00000204843_6 (sequence is synthesized)
aagcctaagaaggcaccgacagcccgaaagaccacaactcggcgacccaagcccacgcgcccagccagtactggggtggctggggccagtagctccctgggcccctctggctcagcgtca

SEQ ID NO: 744943 - DNA, 120 bp, Artificial Sequence
  ENSG00000204843_7 (sequence is synthesized)
gcaggtgagctgagcagcagtgagcccagcaccccggctcagactccgctggcagcacccatcatccccacgccggtcctcacctctcctggagcagtccccccgcttccttccccatcc

SEQ ID NO: 744944 - DNA, 120 bp, Artificial Sequence
  ENSG00000204843_8 (sequence is synthesized)
aaggaggaggagggactaagggctcaggtgcgggacctggaggagaaactagagaccctgagactgaaacgggcagaagacaaagcaaagctaaaagagctggagaaacacaaaatccag

SEQ ID NO: 744945 - DNA, 120 bp, Artificial Sequence
  ENSG00000204843_9 (sequence is synthesized)
ctggagcaggtgcaggaatggaagagcaaaatgcaggagcagcaggccgacctgcagcggcgcctcaaggaggcgagaaaggaagccaaggaggcgctggaggcaaaggaacgctatatg

SEQ ID NO: 744946 - DNA, 120 bp, Artificial Sequence
  ENSG00000204843_10 (sequence is synthesized)
gaggagatggctgatactgctgatgccattgagatggccactttggacaaggagatggctgaagagcgggctgagtccctgcagcaggaggtggaggcactgaaggagcgggtggacgag

SEQ ID NO: 744947 - DNA, 120 bp, Artificial Sequence
  ENSG00000204843_11 (sequence is synthesized)
ctcactactgacttagagatcctcaaggctgagattgaagagaagggctcagatggcgctgcatccagttatcagctcaagcagcttgaggagcagaatgcccgcctgaaggatgccctg

SEQ ID NO: 744948 - DNA, 120 bp, Artificial Sequence
  ENSG00000204843_12 (sequence is synthesized)
gtgaggatgcgggatctttcttcctcagagaagcaggagcatgtgaagctccagaagctcatggaaaagaagaaccaagagctggaagttgtgaggcaacagcgggagcgtctgcaggag

SEQ ID NO: 744949 - DNA, 120 bp, Artificial Sequence
  ENSG00000204843_13 (sequence is synthesized)
gagctaagccaggcagagagcaccattgatgagctcaaggagcaggtggatgctgctctgggtgctgaggagatggtggagatgctgacagatcggaacctgaatctggaagagaaagtg

SEQ ID NO: 744950 - DNA, 120 bp, Artificial Sequence
  ENSG00000204843_14 (sequence is synthesized)
cgcgagttgagggagactgtgggagacttggaagcgatgaatgagatgaacgatgagctgcaggagaatgcacgtgagacagaactggagctgcgggagcagctggacatggcaggcgcg

SEQ ID NO: 744951 - DNA, 120 bp, Artificial Sequence
  ENSG00000204843_15 (sequence is synthesized)
cgggttcgtgaggcccagaagcgtgtggaggcagcccaggagacggttgcagactaccagcagaccatcaagaagtaccgccagctgaccgcccatctacaggatgtgaatcgggaactg

SEQ ID NO: 744952 - DNA, 120 bp, Artificial Sequence
  ENSG00000204843_16 (sequence is synthesized)
acaaaccagcaggaagcatctgtggagaggcaacagcagccacctccagagacctttgacttcaaaatcaagtttgctgagactaaggcccatgccaaggcaattgagatggaattgagg

SEQ ID NO: 744953 - DNA, 120 bp, Artificial Sequence
  ENSG00000204843_17 (sequence is synthesized)
cagatggaggtggcccaggccaatcgacacatgtccctgctgacagccttcatgcctgacagcttccttcggccaggtggggaccatgactgcgttctggtgctgttgctcatgcctcgt

SEQ ID NO: 744954 - DNA, 120 bp, Artificial Sequence
  ENSG00000204843_18 (sequence is synthesized)
aactgttcagagcggcctgggctgcgaggagctgctggggagcaactcagctttgctgctggactggtgtactcgctgagcctgctgcaggccacgctacaccgctatgagcatgccctc

SEQ ID NO: 744955 - DNA, 120 bp, Artificial Sequence
  ENSG00000204843_19 (sequence is synthesized)
tctcagtgcagtgtggatgtgtataagaaagtgggcagcctgtaccctgagatgagtgcccatgagcgctccttggatttcctcattgaactgctgcacaaggatcagctggatgagact

SEQ ID NO: 744956 - DNA, 120 bp, Artificial Sequence
  ENSG00000204843_20 (sequence is synthesized)
gtcaatgtggagcctctcaccaaggccatcaagtactatcagcatctgtacagcatccaccttgccgaacagcctgaggactgtactatgcagctggctgaccacattaagttcacgcag

SEQ ID NO: 744957 - DNA, 120 bp, Artificial Sequence
  ENSG00000204843_21 (sequence is synthesized)
agtgctctggactgcatgagtgtggaggtaggacggctgcgtgccttcttgcagggtgggcaggaggctacagatattgccctcctgctccgggatctggaaacttcatgcagtgacatc

SEQ ID NO: 744958 - DNA, 120 bp, Artificial Sequence
  ENSG00000204843_22 (sequence is synthesized)
cgccagttctgcaagaagatccgaaggcgaatgccagggacagatgctcctgggatcccagctgcactggcctttggaccacaggtatctgacacgctcctagactgcaggaaacacttg

SEQ ID NO: 744959 - DNA, 120 bp, Artificial Sequence
  ENSG00000204843_23 (sequence is synthesized)
acgtgggtcgtggctgtgctgcaggaggtggcagctgctgctgcccagctcattgccccactggcagagaatgaggggctacttgtggctgctctggaggaactggctttcaaagcaagc

SEQ ID NO: 744960 - DNA, 120 bp, Artificial Sequence
  ENSG00000204843_24 (sequence is synthesized)
gagcagatctatgggaccccctccagcagcccctatgagtgtctgcgccagtcatgcaacatcctcatcagtaccatgaacaagctggccacagccatgcaggagggggagtatgatgca

SEQ ID NO: 744961 - DNA, 120 bp, Artificial Sequence
  ENSG00000204843_25 (sequence is synthesized)
gagcggccccccagcaagcctccaccggttgaactgcgggctgctgcccttcgtgcagagatcacagatgctgaaggcctgggtttgaagctcgaagatcgagagacagttattaaggag

SEQ ID NO: 744962 - DNA, 120 bp, Artificial Sequence
  ENSG00000204843_26 (sequence is synthesized)
ttgaagaagtcactcaagattaagggagaggagctaagtgaggccaatgtgcggctgagcctcctggagaagaagttggacagtgctgccaaggatgcagatgagcgcatcgagaaagtc

SEQ ID NO: 744963 - DNA, 120 bp, Artificial Sequence
  ENSG00000204843_27 (sequence is synthesized)
cagactcggctggaggagacccaggcactgctgcgaaagaaggagaaagagtttgaggagacaatggatgcactccaggctgacatcgaccagctggaggcagagaaggcagaactaaag

SEQ ID NO: 744964 - DNA, 120 bp, Artificial Sequence
  ENSG00000204843_28 (sequence is synthesized)
cagcgtctgaacagccagtccaaacgcacgattgagggactccggggccctcctccttcaggcattgctactctggtctctggcattgctggtgaagaacagcagcgaggagccatccct

SEQ ID NO: 744965 - DNA, 120 bp, Artificial Sequence
  ENSG00000204843_29 (sequence is synthesized)
gggcaggctccagggtctgtgccaggcccagggctggtgaaggactcaccactgctgcttcagcagatctctgccatgaggctgcacatctcccagctccagcatgagaacagcatcctc

SEQ ID NO: 744966 - DNA, 120 bp, Artificial Sequence
  ENSG00000204843_30 (sequence is synthesized)
aagggagcccagatgaaggcatccttggcatccctgccccctctgcatgttgcaaagctatcccatgagggccctggcagtgagttaccagctggagcgctgtatcgtaagaccagccag

SEQ ID NO: 744967 - DNA, 120 bp, Artificial Sequence
  ENSG00000204843_31 (sequence is synthesized)
ctgctggagacattgaatcaattgagcacacacacgcacgtagtagacatcactcgcaccagccctgctgccaagagcccgtcggcccaacttatggagcaagtggctcagcttaagtcc

SEQ ID NO: 744968 - DNA, 120 bp, Artificial Sequence
  ENSG00000204843_32 (sequence is synthesized)
ctgagtgacaccgtcgagaagctcaaggatgaggtcctcaaggagacagtatctcagcgccctggagccacagtacccactgactttgccaccttcccttcatcagccttcctcagggcc

SEQ ID NO: 744969 - DNA, 120 bp, Artificial Sequence
  ENSG00000204843_33 (sequence is synthesized)
aaggaggagcagcaggatgacacagtctacatgggcaaagtgaccttctcatgtgcggctggttttggacagcgacaccggctggtgctgacccaggagcagctgcaccagcttcacagt

SEQ ID NO: 744970 - DNA, 120 bp, Artificial Sequence
  ENSG00000204843_34 (sequence is synthesized)
cgcctcatctcctaagcactcctttcccctgctgtccccttcgaccctcagccctctggtgccgctctgcccgatgcacagccacctcagccagcccccaggtagaaacgtgggttaagc

SEQ ID NO: 744971 - DNA, 120 bp, Artificial Sequence
  ENSG00000204843_35 (sequence is synthesized)
tcttcctgccccgttcagcttcactcccaccctttcagcgtcctgccccttcaccttgacccgggttcccccactcccattccctggcctctgccataatttgttgttcaactgctccct

SEQ ID NO: 744972 - DNA, 120 bp, Artificial Sequence
  ENSG00000204843_36 (sequence is synthesized)
ccttcctgaggggcctcagggcttgtggggggtaggctgagaccccaccaccaaaggttaagtgaggtccccttgattgaggacttcaccccttgattaaagcaacttctgcttcagtgc

SEQ ID NO: 744973 - DNA, 120 bp, Artificial Sequence
  ENSG00000204843_37 (sequence is synthesized)
acagtgcgcgtgcgcttatcctgtcccaggtgtccagctttgtgcctgattgatgtaatcccggctgcggtcggtgcgcagttttcagtcagggctggactgcgggaaaagagggttcac

SEQ ID NO: 744974 - DNA, 120 bp, Artificial Sequence
  ENSG00000204843_38 (sequence is synthesized)
tcgacccagaacgcctctgggcctctgggccgaagggttctgggcggtcctggaagggtctggcggcgagtcgggcagcccacgagggcggggagggcggggccggccccgcagggtctt

SEQ ID NO: 744975 - DNA, 120 bp, Artificial Sequence
  ENSG00000204843_39 (sequence is synthesized)
cttgcagagctactgctagttgtgggaggacggggagacaggaggaaggcatctggagagcaccatcctgcctagaaggcagggttttccctgtaactggatctctctgtaaggagcaca

SEQ ID NO: 744976 - DNA, 120 bp, Artificial Sequence
  ENSG00000204843_40 (sequence is synthesized)
agtgcaggtacggaggcgcgactctgccaaccgtctgctccgccggccccctacgtgttcgtgaggttgccggcggtgggctggggaccgagcccggtgtgcggggcggggactggcagg

SEQ ID NO: 744977 - DNA, 120 bp, Artificial Sequence
  ENSG00000204843_41 (sequence is synthesized)
ggtgggcgcttgtcggggtccgggggctccgcctgagcgtttgccccgaggccggtctgacccacctcagctcttcagcctagcattgttctcctgggatcagagtgactgcgccttaga

SEQ ID NO: 744978 - DNA, 120 bp, Artificial Sequence
  ENSG00000204843_42 (sequence is synthesized)
tgtgtgctgagtttctctgggcaaaggagggcattactaaattgttaatgaggctcagaataatgatgacagttggtctctagtagatgtcctttctggctctgtaatctgacctttctg

SEQ ID NO: 744979 - DNA, 120 bp, Artificial Sequence
  ENSG00000204843_43 (sequence is synthesized)
cccagccctatatcccagagggttgtcagccagcagcaggctgggctgactctcctggggcatccagccctgcccgatacctgctcttgattgcttctctgcttggacactgtgttttct

SEQ ID NO: 744980 - DNA, 120 bp, Artificial Sequence
  ENSG00000204843_44 (sequence is synthesized)
cactgagttcatgtggcttcattttatgatgtggtcatatcttccactgctgaattatcccagtttcacttggggcttgtgttttgacctttgtctagtcactcagtatagtcagggctc

SEQ ID NO: 744981 - DNA, 120 bp, Artificial Sequence
  ENSG00000204843_45 (sequence is synthesized)
ctcacctagagtttttctggttaccagttctagcctccccagttacctgactcaggaggtggctgctgctgtctttgttctcctctgccctatagtttgttttgtttactctccagtttc

SEQ ID NO: 744982 - DNA, 120 bp, Artificial Sequence
  ENSG00000204843_46 (sequence is synthesized)
tcacttaaccttctcacctccagaagacaggctttttgccctggaattaaacccttagggcctccagactttcccagctgctcctgagtcttgtcagctgacctcacctacatagagtct

SEQ ID NO: 744983 - DNA, 120 bp, Artificial Sequence
  ENSG00000204843_47 (sequence is synthesized)
ttgacaaagtctctgttactgacaccccttgatcttgggaggtgaccaagtaccttcttgactttaggctcttgtggtacagacagctctgtgttctttggagagagtttccaggattac

SEQ ID NO: 744984 - DNA, 120 bp, Artificial Sequence
  ENSG00000204843_48 (sequence is synthesized)
tactttgtgttgtttttagcactcttgaaacaaacattagcactctttaaacaaacatagttctgaatttatgaaacttcccaccaaaaaagaaggtcttttgcctcagagcaatgggga

SEQ ID NO: 744985 - DNA, 120 bp, Artificial Sequence
  ENSG00000204843_49 (sequence is synthesized)
atccttaggagcaagggagtgtgtttgcatccccaacttaagctttgctgctggtgagcactaagggtgcagacatattggggtctctggagcattctccgtgcccttcttggagatggc

SEQ ID NO: 744986 - DNA, 120 bp, Artificial Sequence
  ENSG00000204843_50 (sequence is synthesized)
atctgagacagggaggcaggaacagcctcatgttccaagtactttgtacagtgcacactctctttgccactgttcttcacacattgtaccctgtcttgtggcctcactcctgtttggtgt

SEQ ID NO: 744987 - DNA, 120 bp, Artificial Sequence
  ENSG00000204843_51 (sequence is synthesized)
ctttctttaacacttatctgctcgtccccaaagataggtggcagagagtcttgttagagaaagtatgatgattaggaaaagggttttcctgcaggttgtgtccaggattcctctggtgtg

SEQ ID NO: 744988 - DNA, 120 bp, Artificial Sequence
  ENSG00000204843_52 (sequence is synthesized)
tgctcccccatgggctatcccgagcacagaagaacagcagcgaggtagagacccactctggccgggggttaccaggctggtgggagttggagctaagggagcagggtggagggggaagcc

SEQ ID NO: 744989 - DNA, 120 bp, Artificial Sequence
  ENSG00000204843_53 (sequence is synthesized)
aggactggagatgggtgatggggggatgaggaaaggggaagagtaggaatggagcccaattttcaaccctttccacttggggctgatgagattttttatggtccccacaggagccatccc

SEQ ID NO: 744990 - DNA, 120 bp, Artificial Sequence
  ENSG00000204843_54 (sequence is synthesized)
actctgccaaccgtctgctccgccggccccctacgtgttcgtgagtgaggagagcagcaaacccatgttgaccactggctactcagttcccaggtgatgctaatgctgctggcccatgga

SEQ ID NO: 744991 - DNA, 120 bp, Artificial Sequence
  ENSG00000204843_55 (sequence is synthesized)
acacaatctgagtagcaaaagtatagatcactggattgaaagttagagaccatgttttccagaacagatgtgctgccttgagagagtcactttatctgtccaggcctataagttgaggta

SEQ ID NO: 744992 - DNA, 120 bp, Artificial Sequence
  ENSG00000204843_56 (sequence is synthesized)
agtgccaggaacttgctggttgattcagggggaggaatcagcaggaacttcgaacagcctaagtaggacttctgataccactgagaggattgaggttcttgagtgcagggctgagtgcct

SEQ ID NO: 744993 - DNA, 120 bp, Artificial Sequence
  ENSG00000204843_57 (sequence is synthesized)
cttgccttcttgcagaagttcctatattgaagataagtgaagcatatagcatagcttttcttcttgacttttagaggtctgggcccttggaggtgggcctggaagtcactggatatttct

SEQ ID NO: 744994 - DNA, 120 bp, Artificial Sequence
  ENSG00000204843_58 (sequence is synthesized)
ggagctggagaagggaaggaagtccgttgagtgtgtaggccttatctatgaaatccgcaaggcagatactgagtaggacctaggaacaaaaagctctgtgtacgttgtcttctggggtcc

SEQ ID NO: 744995 - DNA, 120 bp, Artificial Sequence
  ENSG00000204843_59 (sequence is synthesized)
tgtgaatatctggaatccagctttccaagcttccagtctcccagcctccatttaccactcaacgcccagcggcagcaggatgagtgcggaggcaagcgcccggcctctgcgggtgggctc

SEQ ID NO: 744996 - DNA, 120 bp, Artificial Sequence
  ENSG00000204843_60 (sequence is synthesized)
aaggaagaggctgacctgggaaagtccttgggagtggtggctgggcggggcctctggctctggactggagttggagagatcgttagcaggaggactggtctcatgggaccttctcactag

SEQ ID NO: 744997 - DNA, 120 bp, Artificial Sequence
  ENSG00000204843_61 (sequence is synthesized)
tctggggtgtctgaaggggtgaggcctgcaaggattggacaaaagtgggagcaggaaccaaggggaacaggaattctgggttcctgaagtaggaatacagtgattcactgaagggagaag

SEQ ID NO: 744998 - DNA, 120 bp, Artificial Sequence
  ENSG00000204843_62 (sequence is synthesized)
tttctttcctgactacttctcttctggctcctgttgcctgtccagaccacaactcggcgacccaagcccacgcgcccagccagtactggggtggctggggccagtagctccctgggcccc

SEQ ID NO: 744999 - DNA, 120 bp, Artificial Sequence
  ENSG00000204843_63 (sequence is synthesized)
gacgtcaggtggagctggtgctgcggccactgaggctgccatcagcctaagctggtgaactgggccaggcaccgctccggtgcctgccggagcctggcgatccagctgcacgtctgcggg

SEQ ID NO: 745000 - DNA, 120 bp, Artificial Sequence
  ENSG00000204843_64 (sequence is synthesized)
ggcctctgtgtcagagcggcggccgtttgcaggctgggaagctgccgcaccgggaggctgagactgcattgttgggatttgatgcactaatctcctgtctccgccgcctttccctctgtt

SEQ ID NO: 745001 - DNA, 120 bp, Artificial Sequence
  ENSG00000204843_65 (sequence is synthesized)
cggtctcttgccctccctcccttcgtctgtccttcctccgtgtgtttgtctatcctcctctgtccctcctctttcctctccttgctttctttggttttctgcaatgatgagacaggcacc

SEQ ID NO: 745002 - DNA, 120 bp, Artificial Sequence
  ENSG00000204843_66 (sequence is synthesized)
tgtgtcttgaaaatttcctggggttggcaaagacctagaacttggatcagaaagggtgaggacatagcctatggatatcttgctactgactgagccatcctttcctttcttgcccttatg

SEQ ID NO: 745003 - DNA, 120 bp, Artificial Sequence
  ENSG00000204843_67 (sequence is synthesized)
ccctgctcaggtggttcccccaccacagaagctcttcccagcagtgttctttggcttcactgttcagtttgtttgattcacccactctctctcaagtacttgttctgttagagagtctta

SEQ ID NO: 745004 - DNA, 120 bp, Artificial Sequence
  ENSG00000204843_68 (sequence is synthesized)
ctaacccttaatccagtagaactgcctgcctgcgccttggtgggcctcaccagctttctctccccacagctgccaagagcccgtcggcccaacttatggagcaagtggctcagcttaagt

SEQ ID NO: 745005 - DNA, 120 bp, Artificial Sequence
  ENSG00000204843_69 (sequence is synthesized)
gccagagctaggaggaatgtggagtcagtgccaagcgaggagccttataatcttatgtctttctcttatcttttcctccctctctcctctgcctccatcctccccctgtcctttgtcact

SEQ ID NO: 745006 - DNA, 120 bp, Artificial Sequence
  ENSG00000204843_70 (sequence is synthesized)
atctctctctgcctctctgtatcattttccttgtccccttcattcttcttttctcactgtgctttgatactctctttctgctttttcccttttctgtctccttcccttgccatattctca

SEQ ID NO: 745007 - DNA, 120 bp, Artificial Sequence
  ENSG00000204843_71 (sequence is synthesized)
tattctgtttctgttcctcttactacccctatcctctgctttctttctggtctgcctctaccctttctgaatagcccacgcgcccagccagtactggggtggctggggccagtagctccc

SEQ ID NO: 745008 - DNA, 120 bp, Artificial Sequence
  ENSG00000204843_72 (sequence is synthesized)
cctctcagatgttcttatgccactgactgttggccaccctggggctgggtgatgtttgcacactttcttgtgttctttgcgccagctcagtgttggtggagaggaggagtgggctgtgca

SEQ ID NO: 745009 - DNA, 120 bp, Artificial Sequence
  ENSG00000204843_73 (sequence is synthesized)
agtctctgcccacaaagagtttatggtatagtggaggaacacagcaaagtcaccgattaatatatattacaaatggtgtgttttcaaggagagataggttctgtgagagagcacaattag

SEQ ID NO: 745010 - DNA, 120 bp, Artificial Sequence
  ENSG00000204843_74 (sequence is synthesized)
agatttgatttagaggtgagcagggtgtgactgagggaataacattgtctgagggccaggaggtgcctaggggttaaccttggggatgatgggcaggatagcattctaggtggagagata

SEQ ID NO: 745011 - DNA, 120 bp, Artificial Sequence
  ENSG00000204843_75 (sequence is synthesized)
gcaggagtggcagctttaagtcaggaaagaccttgattccaccggtcccactaccctttcattttcacatcctgactcctcacaacctccagtaatcacatcactaccctttccccatgc

SEQ ID NO: 745012 - DNA, 120 bp, Artificial Sequence
  ENSG00000204843_76 (sequence is synthesized)
aagattccccacccaggtaagagctatttctgctttctctcccatgtgtgtccatgctccccacatagttaagctctgagtactatattcctgagtctctgttctccatcctctgctctg

SEQ ID NO: 745013 - DNA, 120 bp, Artificial Sequence
  ENSG00000204843_77 (sequence is synthesized)
tcccagctgcactggcctttggaccacaggtttaaggctgcaactggggaagggaaggaaactgagtagaaacatgaagggtatagcacttgaagatctggatctggttaggggacaaaa

SEQ ID NO: 745014 - DNA, 120 bp, Artificial Sequence
  ENSG00000204843_78 (sequence is synthesized)
aggagacccaggcactgctgcgaaagaaggagaagtcaggcactttccctggggccttgcttcctctaatcctcccactgctggagctctctgcctcctaacccatacccctactcaggt

SEQ ID NO: 745015 - DNA, 120 bp, Artificial Sequence
  ENSG00000204843_79 (sequence is synthesized)
tctcttatagtgagactccccattttctttacccactgccaaccccattgcatcaccccagcctaagcctgtgctgctctgccctggcttctcactggcagggctattccaaggacctct

SEQ ID NO: 745016 - DNA, 120 bp, Artificial Sequence
  ENSG00000204843_80 (sequence is synthesized)
cgtgaggcccagaagcgtgtggaggcagcccaggagacggttgcagactaccagcagaccatcaagaagtaccgccagctgaccgcccatctacaggagcagctgcaccagcttcacagt

SEQ ID NO: 745017 - DNA, 120 bp, Artificial Sequence
  ENSG00000204849_0 (sequence is synthesized)
atgcccagagctcagttgcttgaaagcaacgcgcctattcacatggagaatcttccctttcctttaaaattacttagtgcctcatcgctaaacgcccccagttccacaccatgggtgttg

SEQ ID NO: 745018 - DNA, 120 bp, Artificial Sequence
  ENSG00000204849_1 (sequence is synthesized)
gatatcttcctcactttggtgtttgccctggggttcttcttcctattactcccctacttatcttacttccgttgtgatgacccaccctcaccatcgcctgggaagagaaagtgtccagta

SEQ ID NO: 745019 - DNA, 120 bp, Artificial Sequence
  ENSG00000204849_2 (sequence is synthesized)
gggcggaggcggaggcccagaggcaggatgaaaaaccacagtctgagagctggtagagagtgcccgagaggcctgcaggagacttcggacctgctttcacaactgcagagcctcctgggg

SEQ ID NO: 745020 - DNA, 120 bp, Artificial Sequence
  ENSG00000204849_3 (sequence is synthesized)
ccacaccttgacaaaggtgactttggtcagctctccggtccagaccccccaggtgaagtgggcgaaagagcacctgatggagcctcccagtcctctcatgagcctatggaagatgctgct

SEQ ID NO: 745021 - DNA, 120 bp, Artificial Sequence
  ENSG00000204849_4 (sequence is synthesized)
cccattctctccccgttagcttccccggatcctcaagccaagcatcctcaggatctggcctccaccccatcaccaggcccaatgaccacctcagtctcctccctaagtgcctcccagcca

SEQ ID NO: 745022 - DNA, 120 bp, Artificial Sequence
  ENSG00000204849_5 (sequence is synthesized)
ccagaaccttcccttcccctagaacacccctcacccgagccacctgcacttttccctcacccaccacacacccctgatcctctggcctgctctccgcctcctccaaaaggcttcactgct

SEQ ID NO: 745023 - DNA, 120 bp, Artificial Sequence
  ENSG00000204849_6 (sequence is synthesized)
cctcccctgcgggactccacactgataactccatctcactgtgactcagtggcacttccactgggcaccgtccctcaaagcttgtctccacatgaggatttggtggcttctgtcccagcc

SEQ ID NO: 745024 - DNA, 120 bp, Artificial Sequence
  ENSG00000204849_7 (sequence is synthesized)
atctcaggccttggtggctcaaacagtcatgtttctgcctcctcccggtggcaggagactgccagaacctcgtgcgcctttaactcatcagtccagcaagatcatctttcccgccaccca

SEQ ID NO: 745025 - DNA, 120 bp, Artificial Sequence
  ENSG00000204849_8 (sequence is synthesized)
ccagagacctaccagatggaagctggtagcctgtttttgctcagctctgatggccagaatgccgtggggatacaagtcacagaaacagccaaggtcaacatttgggaagaaaaagaaaat

SEQ ID NO: 745026 - DNA, 120 bp, Artificial Sequence
  ENSG00000204849_9 (sequence is synthesized)
gttggatcatttacagatcgaatgaccccagaaaagcacttaaattctttgcggaatttggctaaatcattggatgctgagcaggacaccacaaacccaaaacccttctggaacatggga

SEQ ID NO: 745027 - DNA, 120 bp, Artificial Sequence
  ENSG00000204849_10 (sequence is synthesized)
gagaactcgaaacagctgcccggacctcagaagctctcagatcctaggctctggcaggaaagtttttggaagaattatagccagcttttctggggcctcccctctctgcacagcgagtcc

SEQ ID NO: 745028 - DNA, 120 bp, Artificial Sequence
  ENSG00000204849_11 (sequence is synthesized)
ctggtggctaacgcctgggtaactgacaggtcttatactttacagtctcctcctttcttgttcaatgaaatgtccaatgtctgcccaattcaaagggagactacaatgtccccactgctt

SEQ ID NO: 745029 - DNA, 120 bp, Artificial Sequence
  ENSG00000204849_12 (sequence is synthesized)
ttccaggcccagcccccgtcccatctggggcccgagtgccaaccctttatttcatccacaccccaattccggcccacacctatggctcaggccgaggctcaggcccatcttcaatcttct

SEQ ID NO: 745030 - DNA, 120 bp, Artificial Sequence
  ENSG00000204849_13 (sequence is synthesized)
ttcccagtcctatctcctgcttttccatccctgattaagaacactggagtagcttgccctgcatcgcagaataaagtgcaagctctctccctacctgaaactcagcaccctgaatggcct

SEQ ID NO: 745031 - DNA, 120 bp, Artificial Sequence
  ENSG00000204849_14 (sequence is synthesized)
ttgttgaggagacaactagaaggtaggttggctttaccctctagggtccaaaaatctcaggacgtctttagtgtctccactcctaaccttccccaggaaagtttgacatccattctgcct

SEQ ID NO: 745032 - DNA, 120 bp, Artificial Sequence
  ENSG00000204849_15 (sequence is synthesized)
gagaactttccagtcagtcctgaactccggagacaactggagcaacacataaaaaagtggatcatccaacactggggcaacctgggaaggatccaagagtctctggatctgatgcagctt

SEQ ID NO: 745033 - DNA, 120 bp, Artificial Sequence
  ENSG00000204849_16 (sequence is synthesized)
cgggacgaatcaccagggacaagtcaggccaagggcaaacccagtccctggcagtcctccatgtccacaggtgaaagcagcaaggaggcacagaaggtgaagttccagctagagagggac

SEQ ID NO: 745034 - DNA, 120 bp, Artificial Sequence
  ENSG00000204849_17 (sequence is synthesized)
ccacatctggggcaaattctgggtgagaccccacaaaatctatccagggacatgaaaagcttcccacggaaggttctgggggtgacttctgaggagtcggaaaggaacttgaggaagccc

SEQ ID NO: 745035 - DNA, 120 bp, Artificial Sequence
  ENSG00000204849_18 (sequence is synthesized)
ttgaggagtgactcgggaagtgatttattaagatgcacagagaggactcatatagaaaacatcctgaaagcccacatgggcaggaacttgggccagaccaacgagggcttgatccccgtg

SEQ ID NO: 745036 - DNA, 120 bp, Artificial Sequence
  ENSG00000204849_19 (sequence is synthesized)
cgtgtgcgtcgatcctggcttgctgtcaaccaggctcttcccgtgtccaacacccatgtgaaaaccagcaatctagcagccccgaaaagtgggaaagcctgtgtgaacacagcccaggtg

SEQ ID NO: 745037 - DNA, 120 bp, Artificial Sequence
  ENSG00000204849_20 (sequence is synthesized)
ctttccttcctcgagccgtgtactcagcaggggttgggagcccatattgtgaggttttgggccaaacacaggtggggtctacccctcagggtcctcaagcccattcagtgctttaaactg

SEQ ID NO: 745038 - DNA, 120 bp, Artificial Sequence
  ENSG00000204849_21 (sequence is synthesized)
gaaaaggtttcatccttgtcccttacacagcttgctggtccctcctcagccacctgtgaatctggggctggctcagaagttgaggtggacatgttccttagaaagccaccaatggcaagt

SEQ ID NO: 745039 - DNA, 120 bp, Artificial Sequence
  ENSG00000204849_22 (sequence is synthesized)
ctgagaaagcaggtgctgaccaaagcatctgatcacatgccagagagtcttctggcctcctcacctgcatggaagcagttccagagggcaccgcgaggaatcccatcttggaatgatcat

SEQ ID NO: 745040 - DNA, 120 bp, Artificial Sequence
  ENSG00000204849_23 (sequence is synthesized)
gggcccttgaagcctcctccagctggacaggagggcaggtggccatctaagcccctcacgtacagcctcacaggcagcacccagcagagcaggagcttaggagcccaatcttcaaaggct

SEQ ID NO: 745041 - DNA, 120 bp, Artificial Sequence
  ENSG00000204849_24 (sequence is synthesized)
ggagagacaagggaggcagtgccacaatgcagagtccccttggaaacctgtatgctggcaaacctccaagccacaagtgaggatatgcatggtttcgaggctccagggaccagcaaaagc

SEQ ID NO: 745042 - DNA, 120 bp, Artificial Sequence
  ENSG00000204849_25 (sequence is synthesized)
tctctacaccctagagtgtctgtctcccaagatccaagaaagctgtgtcttatggaggaggttgttaatgaatttgagcctggaatggccacaaagtcagagacccagcctcaagtttgt

SEQ ID NO: 745043 - DNA, 120 bp, Artificial Sequence
  ENSG00000204849_26 (sequence is synthesized)
gccgctgttgtgctccttccagatgggcaagcatctgttgtgccccacgcttcagagaatttggtttctcaagtgccccagggccatctccagagcatgcctgctgggaacatgcgggct

SEQ ID NO: 745044 - DNA, 120 bp, Artificial Sequence
  ENSG00000204849_27 (sequence is synthesized)
tcccaggagctacatgaccttatggcagccagaaggagcaaactggtgcacgaggagcccagaaacccaaactgtcaaggctcatgcaagaaccaaaggccaatgtttccccctattcac

SEQ ID NO: 745045 - DNA, 120 bp, Artificial Sequence
  ENSG00000204849_28 (sequence is synthesized)
aagagtgagaagtctaggaagcccaacttagaaaaacatgaagaaaggcttgaaggattgaggactcctcaacttaccccagtcaggaaaacagaagacacccatcaggatgaaggcgtc

SEQ ID NO: 745046 - DNA, 120 bp, Artificial Sequence
  ENSG00000204849_29 (sequence is synthesized)
cagctactgccatcaaagaaacagcctccttcagtaagccactttggaggaaacatcaagcaattttttcagtggattttttcaaagaaaaaaagcaagccagcaccagtcactgctgag

SEQ ID NO: 745047 - DNA, 120 bp, Artificial Sequence
  ENSG00000204849_30 (sequence is synthesized)
agccaaaaaacagtgaaaaacagatcatgtgtgtacagcagcagtgctgaagctcagggtctcatgacggcagttggacaaatgctggacgagaaaatgtcactttgccatgcgcgccat

SEQ ID NO: 745048 - DNA, 120 bp, Artificial Sequence
  ENSG00000204849_31 (sequence is synthesized)
gcctcgaaggtaaatcagcacaaacagaagtttcaagccccagtctgtgggtttccctgcaaccacaggcacctcttctactcagaacacggcagaatactgagctatgcagccagcagt

SEQ ID NO: 745049 - DNA, 120 bp, Artificial Sequence
  ENSG00000204849_32 (sequence is synthesized)
caacaagccactctcaagagccagggttgtcccaacagagacaggcaaatcagaaatcaacagcccttgaaaagtgtgcggtgcaacaatgagcaatggggcctgcgacatccccaaatc

SEQ ID NO: 745050 - DNA, 120 bp, Artificial Sequence
  ENSG00000204849_33 (sequence is synthesized)
ttgcaccccaagaaagctgtatccccagtcagtccccttcagcactggccgaagacatccggtgcctctagccaccatcaccactgtccaaggcactgtcttctttgggaaggtatctga

SEQ ID NO: 745051 - DNA, 120 bp, Artificial Sequence
  ENSG00000204849_34 (sequence is synthesized)
ctggagaaaaagaagtccccaagaaaaaattcactctatgtagagaaaaaatattttctctcatgttagtacatgcagaacatttaatataccacaatatatatggttttttattcataa

SEQ ID NO: 745052 - DNA, 120 bp, Artificial Sequence; identical to SEQ ID NO: 672712
  ENSG00000204849_35 (sequence is synthesized)

SEQ ID NO: 745053 - DNA, 120 bp, Artificial Sequence
  ENSG00000204851_0 (sequence is synthesized)
agacgcggcgcgagcgccaggcaagctgcggctgctacctcccacgcctctccaggtgcactcggcgccgcccccctgcacctggctgcggtgccgagtcactcaggcctgtgtcaggga

SEQ ID NO: 745054 - DNA, 120 bp, Artificial Sequence
  ENSG00000204851_1 (sequence is synthesized)
gagagggagggagctgtcctggaaagcagacacgtaagccccccgcggatcctcagacagctctggagaggggtcccgggggaaggtcactgcgtccagccggccagcaggcagctagag

SEQ ID NO: 745055 - DNA, 120 bp, Artificial Sequence
  ENSG00000204851_2 (sequence is synthesized)
cccccgagccccgagccccactccagccttgccacattcaccggaaccgggactctaagccctgcaagtggctttctagggttgcattgacaccgtgcgctgcagcccacccctatctcg

SEQ ID NO: 745056 - DNA, 120 bp, Artificial Sequence
  ENSG00000204851_3 (sequence is synthesized)
ggctccctgctgccccaagatcagcgccaagggggctgcaccatggccatgagccttttgcaggactggtgccggagcctggacgtggacgcgcacagggccctgctggtcaccggcatc

SEQ ID NO: 745057 - DNA, 120 bp, Artificial Sequence
  ENSG00000204851_4 (sequence is synthesized)
ccggagggcctggagcaggcagacgtcgaagccgtcctgcagccgaccctcctgcccctgggcacgttcaggttgcgacacatgaaggctttgatgaacgagaaggcccaggccgccctg

SEQ ID NO: 745058 - DNA, 120 bp, Artificial Sequence
  ENSG00000204851_5 (sequence is synthesized)
gtggagtttgtggaggacgtcaatcacgctgccattcccagggagatcccaggcaaggatggggtctggagggttctgtggaaggaccgtgcgcaggacacgagggtcctgaggcagatg

SEQ ID NO: 745059 - DNA, 120 bp, Artificial Sequence
  ENSG00000204851_6 (sequence is synthesized)
agacgcctgctgctggatgacgggcccacgcaggccgcggaggctgggacccccggggaggcacccacccctcccgcttcggagacgcaggcccaggattctggggaggtaacagggcag

SEQ ID NO: 745060 - DNA, 120 bp, Artificial Sequence
  ENSG00000204851_7 (sequence is synthesized)
gctggctcgcttcttggggcagccaggaacccaaggaggggccgtcggggtcgcagaaacagaaccagacgcaacaggttgacccagaagggcaagaagagaagccgaggaggacggccg

SEQ ID NO: 745061 - DNA, 120 bp, Artificial Sequence
  ENSG00000204851_8 (sequence is synthesized)
tctgctcccgcgaggagtgaggccgaggactcttccgacgagagcctgggcatcgtgatcgaggagatcgaccagggcgacctgagcggagaagaggaccagagcgcgctgtacgccacg

SEQ ID NO: 745062 - DNA, 120 bp, Artificial Sequence
  ENSG00000204851_9 (sequence is synthesized)
ctgcaggccgctgccagggagctggttaggcagtgggcgccctgcaactccgagggggaagaagacggtccccgcgagttcttggctctggtcaccgtcaccgacaaatcgaagaaagaa

SEQ ID NO: 745063 - DNA, 120 bp, Artificial Sequence
  ENSG00000204851_10 (sequence is synthesized)
gaggcagagaaggagccagctggggccgaatccatccgcttgaacaccaaagaagacaaaaatggtgtccccgacttagtggccctgctggctgtgagagacaccccggacgaggagccg

SEQ ID NO: 745064 - DNA, 120 bp, Artificial Sequence
  ENSG00000204851_11 (sequence is synthesized)
gtggacagcgacacttcggagagcgactcgcaggaaagtggggaccaagaaacagaggagttggataatcctgagttcgtggccattgtggcctataccgacccgtcggacccctgggcc

SEQ ID NO: 745065 - DNA, 120 bp, Artificial Sequence
  ENSG00000204851_12 (sequence is synthesized)
cgggaggagatgttgaaaatcgcttctgttatcgagtcgctgggctggagcgacgagaaagacaagcgagaccccctccgacaggtcttgtccgtcatgtccaaggacactaacgggacc

SEQ ID NO: 745066 - DNA, 120 bp, Artificial Sequence
  ENSG00000204851_13 (sequence is synthesized)
cgcgtgaaggtggaagaggcgggccgcgaggtggacgccgtggtcctgcgcaaggccggggatgacggggacctccgggagtgcatttccaccttggcgcagccggatctccctccccag

SEQ ID NO: 745067 - DNA, 120 bp, Artificial Sequence
  ENSG00000204851_14 (sequence is synthesized)
gcgaagaaggctgggcgtggcctcttcgggggctggagcgagcaccgtgaggacgaagggggtcttctggagctggtggcgctcctggctgcccaggacatggcggaggtgatgaaggag

SEQ ID NO: 745068 - DNA, 120 bp, Artificial Sequence
  ENSG00000204851_15 (sequence is synthesized)
gaaaaagaaaacgcctgggaaggcgggaagtacaaataccccaaaggcaaactgggggaggtattggcgctcctggccgcccgggagaacatggggtccaacgaggggtcggaggaggct

SEQ ID NO: 745069 - DNA, 120 bp, Artificial Sequence
  ENSG00000204851_16 (sequence is synthesized)
tcggacgaacagtccgaggaggagtcggaggacaccgagagcgaggcgtcggagccggaggacagggcatccaggaagccccgggccaagagggcgcgcacggcccccaggggcctgact

SEQ ID NO: 745070 - DNA, 120 bp, Artificial Sequence
  ENSG00000204851_17 (sequence is synthesized)
cctcccaccgcttccggggcccgcaaaacccgcgcgggcggccgaggccgaggccggggcgtcactcccgagaagaaagccgggagccggggctcggcccaggacgacgccgcaggaagc

SEQ ID NO: 745071 - DNA, 120 bp, Artificial Sequence
  ENSG00000204851_18 (sequence is synthesized)
gccgcaggaagcaggaagaagaaggggagcgcgggcgccggggcccatgccagggcaggcgaggccaagggccaggcgcccactggatccaaggccgcgcgcgggaagaaggcccgtcgg

SEQ ID NO: 745072 - DNA, 120 bp, Artificial Sequence
  ENSG00000204851_19 (sequence is synthesized)
tgtcctccgcagacgcaatctcctcgcttcacagcgcgcccgggccgcgttttgccagcgtcacgttcccctctcgggccctcgcaggccgggggcgccagcgatcccgacggaggaagc

SEQ ID NO: 745073 - DNA, 120 bp, Artificial Sequence
  ENSG00000204851_20 (sequence is synthesized)
ccggatgggaggaggaaagagaagtgggcgcccgaggcagcagcgcagggccgagatggggacgcgccaagtggaccaggattgggggcccgggttgcccccggagggggtgtgtgtgtg

SEQ ID NO: 745074 - DNA, 120 bp, Artificial Sequence
  ENSG00000204851_21 (sequence is synthesized)
gacgccgggcacctgcagaggcgagcagggctcttcgtggcgctctcggggcctgcgcctggcaggtgctgtaggccgctgtcgcccctaccccagtctgactgggccctgggtctgtgg

SEQ ID NO: 745075 - DNA, 120 bp, Artificial Sequence
  ENSG00000204851_22 (sequence is synthesized)
tggaggctcagtcaccagccgcgcagcgcgtgtcagggcgcaactctcagccaggggaggccccagctcccagccaggggaagagatgattccagaaaggaaagtctgagagatagaagg

SEQ ID NO: 745076 - DNA, 120 bp, Artificial Sequence
  ENSG00000204851_23 (sequence is synthesized)
cggttgggaaggggaggaggaggaaaggggagaggaacggtgggagaagggaaagaggaggaggagggggaggggggagcagagggaagacacatgccagccctgcctactggggcgccc

SEQ ID NO: 745077 - DNA, 120 bp, Artificial Sequence
  ENSG00000204851_24 (sequence is synthesized)
ctgataacaaaggaaccagccccaggccaaggccacctgcccctgaccacaagttgaatttgtcactcagactgcagtgtttcccaacattctaattatttgcagaggtgttcaatttgg

SEQ ID NO: 745078 - DNA, 120 bp, Artificial Sequence
  ENSG00000204851_25 (sequence is synthesized)
ggtaattcacttaaaatccagttttggttcttctgggctgagtgggccctggcccctcccataggctgtggctcccctgggtgccccctctccagtggagctgacccaccgctcagcgct

SEQ ID NO: 745079 - DNA, 120 bp, Artificial Sequence
  ENSG00000204851_26 (sequence is synthesized)
ggccttgcagcccttactaaaagacttgaaagtccctgggttcaccccctgagtgaattaaaggccagaggggccccgaagggcactgtgagggacagaggctcacctgggcagtgcaga

SEQ ID NO: 745080 - DNA, 120 bp, Artificial Sequence
  ENSG00000204851_27 (sequence is synthesized)
agccggccgcgtgtccctccttacaggggatgaaatgacctggggaggaaaccccagccctgccctggaggttccagagtaggcgggccggtgctgtgaggcttcacaacctgctgtccc

SEQ ID NO: 745081 - DNA, 120 bp, Artificial Sequence
  ENSG00000204851_28 (sequence is synthesized)
aagcacgcttgagttgtatgtgagtctgtgccgtgccgtgccgtatgcttcagctcctgcaaccccggctgagctcgatttttacctaaatatcagtctccacgggaccccaccttcatt

SEQ ID NO: 745082 - DNA, 120 bp, Artificial Sequence
  ENSG00000204851_29 (sequence is synthesized)
catgccttcttgtccctggggcaatgtgtgtgcttcctcgtcccaatttccattccctggcagtgaggagcccatcgtgccagggggccctgccccacttgtccctgggaaggaatagga

SEQ ID NO: 745083 - DNA, 120 bp, Artificial Sequence
  ENSG00000204851_30 (sequence is synthesized)
gggtttgggtgtgacctcacagtccagaccagactgtcccagtcctatgtcagggacacccagatgtagaagctgactgagacctgctgcagggcgtgggtgctcccctctgcttggagg

SEQ ID NO: 745084 - DNA, 120 bp, Artificial Sequence
  ENSG00000204851_31 (sequence is synthesized)
ctgtccctggacagtgacccacccactgaggaccaggctgggtgtaccttgagctgggcacagcagcctgtggtgttgcctgtgggtggggagggccccaggtgtgcttctcccgtagca

SEQ ID NO: 745085 - DNA, 120 bp, Artificial Sequence
  ENSG00000204851_32 (sequence is synthesized)
gtcctaggcttctctccctgtgccctgtgtcacctggatcctccagtaaagtgaaattcagcactgtactctctctgtgctctgggcagtggggcaggcggggtgtgggagcgtgggcca

SEQ ID NO: 745086 - DNA, 120 bp, Artificial Sequence
  ENSG00000204851_33 (sequence is synthesized)
cagatgtccacggtcttgactgtggtttgcccagaatacctgggaactgtcctgtcactggtttacatacactgtcctttgctgcttcgggatccctgcctggctctccctaccccccag

SEQ ID NO: 745087 - DNA, 120 bp, Artificial Sequence
  ENSG00000204851_34 (sequence is synthesized)
catcatctcaccccttgcagatctgagccagcttccactcccacccctgatgcctccccacttccagcctcagctccgaagcccctggacacccatggagaccccgcccagccaatcccc

SEQ ID NO: 745088 - DNA, 120 bp, Artificial Sequence
  ENSG00000204851_35 (sequence is synthesized)
accctagcttccacccagatacactctgccaggccacagctgcaggcactctccccccagcctccacccctcacctgtgccctggacctcagactcagctttccatcctacctgagtttt

SEQ ID NO: 745089 - DNA, 120 bp, Artificial Sequence
  ENSG00000204851_36 (sequence is synthesized)
ctgcctccctccatcctgtgtccccccaccatacatggctgccagagacgtcctcttagaagtcacacctggggtctgattgcgtccctcgcctccccagatcccccaaggtctccttcc

SEQ ID NO: 745090 - DNA, 120 bp, Artificial Sequence
  ENSG00000204851_37 (sequence is synthesized)
tgtgccgtcatatctgcagttcttaggactgtctagacatgctttgttcaactaggtaatcacacggggtaaattggatttaaatgtaattaagattaaataaaaatacacatgcatgtc

SEQ ID NO: 745091 - DNA, 120 bp, Artificial Sequence
  ENSG00000204851_38 (sequence is synthesized)
accataccccagaggcatcaactggctacctcaggggaactggccctgcaggctccatttgaaacccccttgatttgaaaatattgacgcctctgttcgcatctcatctcaagttaccca

SEQ ID NO: 745092 - DNA, 120 bp, Artificial Sequence
  ENSG00000204852_0 (sequence is synthesized)
gttgccgggcaacgcgctgtccatgtcgcgggcctcgctgggactccctgggagatgaggccgcgaggtctcccgccgctcctggtggtgctcctgggctgctgggcctccgtgagcgcc

SEQ ID NO: 745093 - DNA, 120 bp, Artificial Sequence
  ENSG00000204852_1 (sequence is synthesized)
cagaccgatgccaccccggcggtgacgacagagggcctcaactccaccgaggcagccctggccaccttcggaactttcccgtcgaccaggccccccgggactcccagggctccagggccc

SEQ ID NO: 745094 - DNA, 120 bp, Artificial Sequence
  ENSG00000204852_2 (sequence is synthesized)
tcctccggccccaggcctaccccagtcacggacgttgctgttctctgtgtctgtgacttatccccagcacagtgtgacatcaactgctgctgtgatcccgactgcagctccgtggatttc

SEQ ID NO: 745095 - DNA, 120 bp, Artificial Sequence
  ENSG00000204852_3 (sequence is synthesized)
agtgtcttttctgcctgctcagttccagttgtcacgggcgacagccagttttgtagtcaaaaagcagtcatctattcattgaattttacagcaaacccacctcaaagagtatttgaactt

SEQ ID NO: 745096 - DNA, 120 bp, Artificial Sequence
  ENSG00000204852_4 (sequence is synthesized)
gttgaccagattaatccatctattttctgcattcatattacaaactataaacctgcattatcctttattaatccagaagtacctgatgaaaacaattttgatacattgatgaaaacatct

SEQ ID NO: 745097 - DNA, 120 bp, Artificial Sequence
  ENSG00000204852_5 (sequence is synthesized)
gatggttttacattgaatgctgaatcatatgtttccttcacaaccaaactggatattcctactgctgctaaatatgagtatggggttcctctgcagacttcagattcgtttctgagattt

SEQ ID NO: 745098 - DNA, 120 bp, Artificial Sequence
  ENSG00000204852_6 (sequence is synthesized)
ccttcgtccctgacatcatctctgtgcactgataataaccctgcagcgtttctggtgaaccaggctgttaagtgcaccagaaaaataaatttagaacagtgtgaagaaattgaagccctc

SEQ ID NO: 745099 - DNA, 120 bp, Artificial Sequence
  ENSG00000204852_7 (sequence is synthesized)
agcatggctttttacagcagcccggaaattctgagggtacctgattcaagaaaaaaggtccctatcactgttcagtccatcgtcattcagtctctaaataaaacgctcacccgacgggag

SEQ ID NO: 745100 - DNA, 120 bp, Artificial Sequence
  ENSG00000204852_8 (sequence is synthesized)
gacactgatgtgctgcagccgactctcgtcaacgctggacactttagcctttgcgtgaatgttgttcttgaggtaaagtacagcctcacatacacagatgcaggtgaagtcaccaaagct

SEQ ID NO: 745101 - DNA, 120 bp, Artificial Sequence
  ENSG00000204852_9 (sequence is synthesized)
aattcattttcttcaggaaaatacccagccagtccctctcagtggaaaccctggttatgtcgtggggctcccattagctgctggattccagcctcataaggggtctgggattattcagac

SEQ ID NO: 745102 - DNA, 120 bp, Artificial Sequence
  ENSG00000204852_10 (sequence is synthesized)
cacaaatagatatggacagcttactattcttcatagcacaactgagcaagactgcttagcactggagggggtccggaccccagtattatttggttacactatgcaatctggctgtaaact

SEQ ID NO: 745103 - DNA, 120 bp, Artificial Sequence
  ENSG00000204852_11 (sequence is synthesized)
aagactgactggagctctcccgtgtcagctcgtagcacagaaggtgaagagcctgctgtggggccagggcttcccagattacgtggccccttttggaaattcccaggcccaggacatgct

SEQ ID NO: 745104 - DNA, 120 bp, Artificial Sequence
  ENSG00000204852_12 (sequence is synthesized)
ggactgggtgcccatccacttcatcacccagtcattcaacaggaagcattttgttttgcaggattcctgccagctcccaggggctttggttatagaagtgaagtggactaaatacggatc

SEQ ID NO: 745105 - DNA, 120 bp, Artificial Sequence
  ENSG00000204852_13 (sequence is synthesized)
cctgctgaatccacaggccaaaatagtcaatgtaactgcaaatctaatttcatcctcctttcctgaggccaactcaggaaatgaaaggacgattcttatttccactgcggttacttttgt

SEQ ID NO: 745106 - DNA, 120 bp, Artificial Sequence
  ENSG00000204852_14 (sequence is synthesized)
ggatgtgtctgcacctgcagaggcaggcttcagagctccaccagccatcaatgccaggctgccctttaacttcttcttcccgtttgtttgacaatgctcagatgcatcagttccttaata

SEQ ID NO: 745107 - DNA, 120 bp, Artificial Sequence
  ENSG00000204852_15 (sequence is synthesized)
tacacgtgaaatttgaaaactgtacattcggtgagattaaattttatatacaactagcaattgtccagctttgttgctcattttcaattaaggctaaagtgttcaacatgagaaaatgtg

SEQ ID NO: 745108 - DNA, 120 bp, Artificial Sequence
  ENSG00000204852_16 (sequence is synthesized)
atacatttgatacagtgtggggtgggagtggatgggcagctcttggtggtactggaccttccacaaggctgtgtccacccagaatccatgctggcaggagggaggcagaggtatcaaacc

SEQ ID NO: 745109 - DNA, 120 bp, Artificial Sequence
  ENSG00000204852_17 (sequence is synthesized)
aaacctctcaccaagcggcccaggaggggcagctgttcctctcgtgacagcacaggcccatgagacagtgtcttctttttgaggggagctggtccgggtctagttcacttcaccaagaag

SEQ ID NO: 745110 - DNA, 120 bp, Artificial Sequence
  ENSG00000204852_18 (sequence is synthesized)
tagtcaatgtaactgcaaatctaatttcatcctcctttcctgaggtaggcctaacctagtttaaaggcataggttaagacagaagtctagacacaactcaagtgtggtaggtgacaggta

SEQ ID NO: 745111 - DNA, 120 bp, Artificial Sequence
  ENSG00000204852_19 (sequence is synthesized)
ttactttgtgaaaaagattataatttaaaccatgggggttcataaaatatttcagcagtcattcttagaaacactgacgatggttctacttacattagcattctggttcagattggatct

SEQ ID NO: 745112 - DNA, 120 bp, Artificial Sequence
  ENSG00000204852_20 (sequence is synthesized)
ttagtgctccaggacctatcagattcatgaactgacagtagttgggtgaggaagagaatgaaaagtgtctcattgttgtcattctgggagcacactggagggtgggccttgcatctctct

SEQ ID NO: 745113 - DNA, 120 bp, Artificial Sequence
  ENSG00000204852_21 (sequence is synthesized)
atgcaggtgaagtcaccaaagctgatctctcattcgttctggggacagttagcagcgtagtggtcccactgcagcaaaagtttgaaattcattttcttcaggattcctgccagctcccag

SEQ ID NO: 745114 - DNA, 120 bp, Artificial Sequence
  ENSG00000204852_22 (sequence is synthesized)
gcaacttgtagatatcggagcaggaggctgactgtgagtggagaactggatggaaaattgcaggtggcttcaggcagtgttggtggagaagagtgataacccttcatcttgaatctgggc

SEQ ID NO: 745115 - DNA, 120 bp, Artificial Sequence
  ENSG00000204852_23 (sequence is synthesized)
attttcaaggttaccaggaaaactgggttccttgagacagagttgatattatagactaaaaaacttaatgttcatgcctacaaatcaaagatcatgaaaattaaaactgaatatttgaag

SEQ ID NO: 745116 - DNA, 68 bp, Artificial Sequence
  ENSG00000204852_24 (sequence is synthesized)
cagataccatctcacgccagttagaatgacgattattaagaagtcaggaaacaacaggtgctggagag

SEQ ID NO: 745117 - DNA, 76 bp, Artificial Sequence
  ENSG00000204852_25 (sequence is synthesized)
ccaaatgtccatcagtgatagactgggtgaagaaaatgtggcacatacacaacatggaatgaccatcattctcagc

SEQ ID NO: 745118 - DNA, 74 bp, Artificial Sequence
  ENSG00000204852_26 (sequence is synthesized)
gaacatcacacacaggggcctgtcagagggtggtgggctaggggaagtgcagtaaaccaccatggcacgtgtat

SEQ ID NO: 745119 - DNA, 120 bp, Artificial Sequence
  ENSG00000204852_27 (sequence is synthesized)
acctacgtaacaaacctgcatgttctgcacccgttatcccagaacttaaaatataataataaaaataaaactgaatatttgaattctgaatagaggatttaaggttgtttattctgtgat

SEQ ID NO: 745120 - DNA, 120 bp, Artificial Sequence
  ENSG00000204852_28 (sequence is synthesized)
ttaaaaaacaaaaaactgctggtgggctgggtgtggtggctcactcctgtagtcccagcactctgggaggattgcatgagcccaggagtttgaggctgcagggagctatgatggtgccac

SEQ ID NO: 745121 - DNA, 120 bp, Artificial Sequence
  ENSG00000204852_29 (sequence is synthesized)
tgcactccagcttgggcatcagagtgagaccttatctcaaaaataaataaacaaagggaaggaaaggaagaagaaaatgaaaaactgctggtggatgaacaacagcctcattcagttgac

SEQ ID NO: 745122 - DNA, 120 bp, Artificial Sequence
  ENSG00000204852_30 (sequence is synthesized)
gtaactgcaaatctaatttcatcctcctttcctgagaatgctcagatgcatcagttccttaatatacacgtgaaatttgaaaactgtacattcggtgagattaaattttatatacaacta

SEQ ID NO: 745123 - DNA, 120 bp, Artificial Sequence
  ENSG00000204852_31 (sequence is synthesized)
tgtcaggttctctgtcgtaacaccagcccagtgaacatgccagcctgcttccttctctctcttctgtacacagcacattttactccaggactttcacggtggctgtgtgagagtagaagt

SEQ ID NO: 745124 - DNA, 120 bp, Artificial Sequence
  ENSG00000204852_32 (sequence is synthesized)
cggattctttcattcccatagccatccggagagagcttctccttacaggttgatacagcaaactcatcagtccaggggctagagaaatagacggattattattggcttctgttgtgctgt

SEQ ID NO: 745125 - DNA, 120 bp, Artificial Sequence
  ENSG00000204852_33 (sequence is synthesized)
tgaagcctttaataagatgaatatactcttcaactcgagatctgaaaaagcaatgaaaatacttctttttgttgtacttaacacaattttttgtggtttctttttatctaggtacctgat

SEQ ID NO: 745126 - DNA, 120 bp, Artificial Sequence
  ENSG00000204852_34 (sequence is synthesized)
ttgacatttaaatgtttttaatttcacatttaaacagacactcctaaacagatgtagtgattttgaaaatttagaatttcaaagggccagtttctgagaatttttcttctgagaatccat

SEQ ID NO: 745127 - DNA, 120 bp, Artificial Sequence
  ENSG00000204852_35 (sequence is synthesized)
ttattaaggaaaatagaactgtttttttgcctgctcctgggaaatagctgtcaaaatcccagaggcccagaaaaagtgtatttgggtctccctcatgtcacacaagtgacactgtcttct

SEQ ID NO: 745128 - DNA, 77 bp, Artificial Sequence
  ENSG00000204852_36 (sequence is synthesized)
atgtaagacctaaaaccataacatgggcaaagacatcatgagtaaaacaaccaaaagcaatggcaacaaaagccaaa

SEQ ID NO: 745129 - DNA, 120 bp, Artificial Sequence
  ENSG00000204852_37 (sequence is synthesized)
tatgtacataatgtaaaatatcaaacagcgctgcgcagcttgttataaaaatagttcttaccctcatttgccccaccttggaggcaaccactttcaactcttgtagctgtttttttcaaa

SEQ ID NO: 745130 - DNA, 120 bp, Artificial Sequence
  ENSG00000204852_38 (sequence is synthesized)
ttctacccccaaatcttgaaataacctgcatataatgctacttcttgatttttttggttttatgaattttttattgtttccattaaggaagacaaaggtttggctctttccccttcatcc

SEQ ID NO: 745131 - DNA, 120 bp, Artificial Sequence
  ENSG00000204852_39 (sequence is synthesized)
cctacctcatgacccacacacttcccacatcttcccagggtcattggatcattattttggttagaccaatatttaccatttacttatattattttttgagacagggtctccccctgttgc

SEQ ID NO: 745132 - DNA, 88 bp, Artificial Sequence
  ENSG00000204852_40 (sequence is synthesized)
cttggcctacaatagctgggaccacatgcgggtaccatcacacctggctaatttttaaaattttggtagagacagggtctccctttgt

SEQ ID NO: 745133 - DNA, 85 bp, Artificial Sequence
  ENSG00000204852_41 (sequence is synthesized)
ctcctcttgcttcagcctcccaacatgttgggattacaggtgtgagccagcacatccagccaccatttacattattagttctgat

SEQ ID NO: 745134 - DNA, 120 bp, Artificial Sequence
  ENSG00000204852_42 (sequence is synthesized)
gccagcacatccagccaccatttacattattagttctgatccatttagaccagcatttctcaaagggagagggttccatggaatacatttccacaagacatcagtaggggtaggtctgtg

SEQ ID NO: 745135 - DNA, 120 bp, Artificial Sequence
  ENSG00000204852_43 (sequence is synthesized)
gtccaatacgtttgggaaacaccaaattaaagttaaaacaatggttccttcctgtattactcatcagagcctttaataggcaaatgtgcctcaggagggacatggggatgtggaggttca

SEQ ID NO: 745136 - DNA, 120 bp, Artificial Sequence
  ENSG00000204852_44 (sequence is synthesized)
atgcttccccaactttggccatgaaacccttcttgtacagatcttcagtggaacacagtttgggaaacactgttttagactcatcatctcacaggtaaagattttgcaaagttagagact

SEQ ID NO: 745137 - DNA, 120 bp, Artificial Sequence
  ENSG00000204852_45 (sequence is synthesized)
tagagactctttagcttctgtcagataatccctcatttggagaatgagaagataatgaaactgggaaggaatggaactgctcgtggggctgagagcagtggctcacgcctgtaatcccag

SEQ ID NO: 745138 - DNA, 120 bp, Artificial Sequence
  ENSG00000204852_46 (sequence is synthesized)
tgctagtggtctctgtcttccaggtggtgtgatgaaggcagccggggaagccagctgttaaggaggcaggatggccctgagtgggagcgcgggctgaatcttggatactgatttttgccc

SEQ ID NO: 745139 - DNA, 120 bp, Artificial Sequence
  ENSG00000204852_47 (sequence is synthesized)
cttgttagcaatgttgcctctggccagcagttttatggctttgagcctctgttttcatctgtgaaatgggaacgctagtcaatagtgagtgaatggcctcatggggcattgagagggtta

SEQ ID NO: 745140 - DNA, 120 bp, Artificial Sequence
  ENSG00000204852_48 (sequence is synthesized)
acatttatgtggccctgggcatggtgcctagtggtccataaatgggaacctctgtgatcctcatcctgttgctaccatcattgtgattgctggtgtcccccgagccctctccaggcatct

SEQ ID NO: 745141 - DNA, 120 bp, Artificial Sequence
  ENSG00000204852_49 (sequence is synthesized)
catgacacgatagacgaatgttgagtcctgtatcaaagactgagactgacttccgtgcatgtggctctcccacccattgtcccctgttctacacaggcagcccacacctgagagttttca

SEQ ID NO: 745142 - DNA, 120 bp, Artificial Sequence
  ENSG00000204852_50 (sequence is synthesized)
ctgccacagttcctcacagagttgaatggaagttgacaatcctacagataggttcccggtcacacatgatgcttctgcccacctttttcttttgtcttagcagtcagcgtgtgggccggc

SEQ ID NO: 745143 - DNA, 120 bp, Artificial Sequence
  ENSG00000204852_51 (sequence is synthesized)
cctggcccaggggcgtgctctccatcttagcctgtaattgcccagcttgttcttgtcacgctttcttcagacctctcattatccgctccgaatatttctagcatgggcataacgggggtg

SEQ ID NO: 745144 - DNA, 120 bp, Artificial Sequence
  ENSG00000204852_52 (sequence is synthesized)
aggactgctcacttctctgatccgccctcccaccgaggccagcagagacccgggattactcagtccctgccgttccactgcgaagtcttgactcaactctcccaccagaaccaggcacat

SEQ ID NO: 745145 - DNA, 120 bp, Artificial Sequence
  ENSG00000204852_53 (sequence is synthesized)
cgcttctggcttcttggccatgggtgaagatgtgcagttattactcctcctcagaagggaagacatgggttgggaggagaggcagcagtgcgcacatggcaccgtcagggtctgtgctga

SEQ ID NO: 745146 - DNA, 120 bp, Artificial Sequence
  ENSG00000204852_54 (sequence is synthesized)
tcctgggtgctcagagggcctgcagcagcaggttttgtaccaactctgccggcaacccaggtagaggcaggcacgagcacctgctaaactcagtttccaccagctgcatgctgcattgtc

SEQ ID NO: 745147 - DNA, 120 bp, Artificial Sequence
  ENSG00000204852_55 (sequence is synthesized)
tcctaagaacagggtattcgagaggattgttcagtctgcatggtttttaaaggcggttccaagctaaggaattccatcagtgcttttttcgcagccaccaaatttagcaggcctgtgagg

SEQ ID NO: 745148 - DNA, 120 bp, Artificial Sequence
  ENSG00000204852_56 (sequence is synthesized)
ttttcatatcctgaagagatgtattttaaagctttttttttttaatgaaaaaatgtcagacacacacaaaagtagaatagtaccatggagtccccacgtacccagcctgcagcttcaaca

SEQ ID NO: 745149 - DNA, 120 bp, Artificial Sequence
  ENSG00000204852_57 (sequence is synthesized)
gttaccacatttgccaaccggagagactgccaaggcaggaaaaagccctggaaagcccacggcccctttttcccttgggtcagaggccttagagctggctgccaaagcagccaaccaaag

SEQ ID NO: 745150 - DNA, 120 bp, Artificial Sequence
  ENSG00000204852_58 (sequence is synthesized)
gggcagctcagctccttcgtggcaccagcagtgttcctgatgcagttgaagagttgatgtctttgacaacatacggacactgcctggattacctagatgtcacatcttaattgccaattg

SEQ ID NO: 745151 - DNA, 120 bp, Artificial Sequence
  ENSG00000204852_59 (sequence is synthesized)
atgaaattaggtaaatgaaaagaaagcacttaaatttccccttagagcattttaacatgacatgcaatcaggttttgtctgctaataattatttctccccctccatccctcccaccagtt

SEQ ID NO: 745152 - DNA, 120 bp, Artificial Sequence
  ENSG00000204852_60 (sequence is synthesized)
tctttcctgaagtctgtgaggccgctataaacaggtagatgaagttagagcagttatggccctaaatggtccacagttgggtattggcactaccgcagtttcaggtgatgtcggcatttt

SEQ ID NO: 745153 - DNA, 120 bp, Artificial Sequence
  ENSG00000204852_61 (sequence is synthesized)
tagaaataggaggagatggaaaaattacgcttcagctgttaaaaatatttttggggcattgagttactttaaaacacgtatattctctaagctgtttttatctgaacttgtagagtctat

SEQ ID NO: 745154 - DNA, 120 bp, Artificial Sequence
  ENSG00000204852_62 (sequence is synthesized)
tcattttcttgttcagaacattttgtaatatgtgaaaccttttataattaaaactctgaactgcagattaagtctgacttgcagttttgtaagattctaatggattaacagcattttgtt

SEQ ID NO: 745155 - DNA, 120 bp, Artificial Sequence
  ENSG00000204852_63 (sequence is synthesized)
cgccagaaacatacgattattgtcaaaggggtccccttcccaatttcctttttatgaggggtacaggggtagggtggttcatggcaccattatttatctggacctcagtttttaggatca

SEQ ID NO: 745156 - DNA, 120 bp, Artificial Sequence
  ENSG00000204852_64 (sequence is synthesized)
aatttaacctttccctctcccctcattttctctctccctctcttgtgtaagtcagccatctaggcttgtgaattcttctagttagcttgagctcacagttgtcttgaagcaattccttgg

SEQ ID NO: 745157 - DNA, 120 bp, Artificial Sequence
  ENSG00000204852_65 (sequence is synthesized)
gcatccaggtacagttctctttcagcacaggtctctccaaacaggtctatttgtctccctccccacgtttctcagtgggcccttcagaaagaaagctgcagctctactggggaggcaaga

SEQ ID NO: 745158 - DNA, 120 bp, Artificial Sequence
  ENSG00000204852_66 (sequence is synthesized)
gcttgtcattgaggaggcttgggccagaggcaggaagaccagttaggagtctgtggaaatcgcctgggcaagcaatggtggccttccagcaaggacaggtgcagtgagagtgaccaggag

SEQ ID NO: 745159 - DNA, 120 bp, Artificial Sequence
  ENSG00000204852_67 (sequence is synthesized)
tgaccctggagcatggagccttcctgagactagcttggtgagcttctacctggaggaaatgaagatagaaggaaaacgcaatgtgacctctttgattaggacatagattcaaacacatgc

SEQ ID NO: 745160 - DNA, 78 bp, Artificial Sequence
  ENSG00000204852_68 (sequence is synthesized)
ttcagattcgtttctgagatttccttcgtccctgacatcatctctgtgcactgataataaccctgcaggccaggcgta

SEQ ID NO: 745161 - DNA, 120 bp, Artificial Sequence
  ENSG00000204856_0 (sequence is synthesized)
agcctgacgcacgcgtgctgtcgggggagggatgctgggacagctgctcccgcacacggctcgcggtctcggcgccgcggagatgcccggccagggtccggggtccgactggacggagcg

SEQ ID NO: 745162 - DNA, 120 bp, Artificial Sequence
  ENSG00000204856_1 (sequence is synthesized)
tagctcttctgcagagccgcccgctgtggccgggaccgagggtggcggcggcggatcagctggatactcttgttaccagaattccaaaggttctgatagaatcaaagatggatacaaagt

SEQ ID NO: 745163 - DNA, 120 bp, Artificial Sequence
  ENSG00000204856_2 (sequence is synthesized)
gaactcacacatagctaagctgcaagagttatggaaaactccccaaaatcaaacaatccacctctctaaatcaatgatggaggcgtcctttttcaagcatccagacctcaccacaggcca

SEQ ID NO: 745164 - DNA, 120 bp, Artificial Sequence
  ENSG00000204856_3 (sequence is synthesized)
gaagcgttacctgtgcagcattgctaaaatctataatgcaaactatctgaagatgttaatgaagaggcagtacatgcacgtacttcagcacagctcacaaaagccaggtgtcctcactca

SEQ ID NO: 745165 - DNA, 120 bp, Artificial Sequence
  ENSG00000204856_4 (sequence is synthesized)
ccgttactcacagaaacagcattacccttgcactacatggcgacatcaactggagagagaggactcggggtcttctgatatcgcagctgcatctgcacctgaaatgctcatacagcattc

SEQ ID NO: 745166 - DNA, 120 bp, Artificial Sequence
  ENSG00000204856_5 (sequence is synthesized)
cctttggcggccagtgagaaacaaagaagggataaaaactggatatgcatctaaaacaagatgtaagtcactgaagatttttagaagaccaaggaaactgttcatgcaaacagtttcttc

SEQ ID NO: 745167 - DNA, 120 bp, Artificial Sequence
  ENSG00000204856_6 (sequence is synthesized)
agatgattctgaatcacacatgagtgaagaaaaaaaggaagaagatttactaaataattttatgcaatcaatgtcaattgaagaacagggagaacatctgatgttaacttgacagtcttg

SEQ ID NO: 745168 - DNA, 120 bp, Artificial Sequence
  ENSG00000204856_7 (sequence is synthesized)
tctcgtgtattgaattcgtgccaaaggtgagggtaaggggttgtgagttgtgtcctgtatgtttaggatggtattgttatttattaaatcattaagtaattttggtttgttcagaaactt

SEQ ID NO: 745169 - DNA, 120 bp, Artificial Sequence
  ENSG00000204856_8 (sequence is synthesized)
aaaacaatgtaattggtctgatgtagttccatgtaccaatgatagttatgtaagaaaatttacatgtaacatatacttgtacttctagctagatacaattaaaacttttcttgcattcaa

SEQ ID NO: 745170 - DNA, 120 bp, Artificial Sequence
  ENSG00000204856_9 (sequence is synthesized)
gcggccagtgagaaacaaagaagggtctgtttcttagtgtaaaaggggggaaatgcatctcagtttaatttttttttttctcagacagggttttgttctctcacccaggctggagtgtag

SEQ ID NO: 745171 - DNA, 120 bp, Artificial Sequence
  ENSG00000204856_10 (sequence is synthesized)
tggtgtgatacagtttactgtattctcaaactcctgggctcaagcaatgctcctgcctcagactcccaagtagctagggctaaaggcacaaaccaccatgccctgctagttaaaaaaaat

SEQ ID NO: 745172 - DNA, 90 bp, Artificial Sequence
  ENSG00000204856_11 (sequence is synthesized)
taaaggcacaaaccaccatgccctgctagttaaaaaaaattgtttgtacagaaagcatctcactatgttggccaaggtactctcacctcc

SEQ ID NO: 745173 - DNA, 120 bp, Artificial Sequence
  ENSG00000204856_12 (sequence is synthesized)
agtagttgatggaaatcggccgttgggatgctgtctaagcttggatacctgagtaataacggacaacagataaagctccgcatccttgcgccacgtgcttcgatcagctggatactcttg

SEQ ID NO: 745174 - DNA, 120 bp, Artificial Sequence
  ENSG00000204856_13 (sequence is synthesized)
aagggtagctaagtgatattaatggttgtgttccctaatatattcactttgctaaattcagaataggctggacttttaaaaagcagagatactttttttttttttgagaccgagtttcgc

SEQ ID NO: 745175 - DNA, 120 bp, Artificial Sequence
  ENSG00000204856_14 (sequence is synthesized)
gtgcgcaaaagtagttgatggaaatcggccgttgggatgctgtctaagcttggatacctgagtaataacggacaacagataaagctccgcatccttgcgccacgtgcttcggtccgtggt

SEQ ID NO: 745176 - DNA, 120 bp, Artificial Sequence
  ENSG00000204856_15 (sequence is synthesized)
ttgcgtgcagacgtttgacctgtatggtgaccctcgcgatttgcaaatgtgctgaggatctggaatactgaagtggaaggcacctcttgttttggggagcatgtatatttccctcctgtg

SEQ ID NO: 745177 - DNA, 120 bp, Artificial Sequence
  ENSG00000204856_16 (sequence is synthesized)
acgcactgcttccacagagaggtgcaaacgtgcaaacgctcagcgaccgcagcgctcctgcccctcccccaccgtaactccggggtcgcggatctgcccgccccgctctcccgaagctgt

SEQ ID NO: 745178 - DNA, 120 bp, Artificial Sequence
  ENSG00000204856_17 (sequence is synthesized)
ttacaggcatgagccaccatgcctagccgagagatattttcatactttttctttactgcactgataagaatatgccacttcttttagaatatattttgtggaattataaaaatttcttta

SEQ ID NO: 745179 - DNA, 120 bp, Artificial Sequence
  ENSG00000204856_18 (sequence is synthesized)
ttcaatataattcccactcaacctcaaaataatgcaaatactttcaaaaggagaagaatatggttggttatgcacaggggaatactatataacagggagaggaaaaagattaagcagcat

SEQ ID NO: 745180 - DNA, 120 bp, Artificial Sequence
  ENSG00000204856_19 (sequence is synthesized)
gagtattgaaattgcactgcagcagctttacatgtcagggttaagaaattacaggagaatctgggtgctgaaagggtctttttggtgatgttggcagctaataaaacaaatttgtgtggt

SEQ ID NO: 745181 - DNA, 120 bp, Artificial Sequence
  ENSG00000204859_0 (sequence is synthesized)
acgctttgacgtcacgtccggcgcggagacggtggagtctccgcactgtcggcggggtacgcatagccgggcactaggttcgtgggctgtggaggcgacggagcagggggccagtggggc

SEQ ID NO: 745182 - DNA, 120 bp, Artificial Sequence
  ENSG00000204859_1 (sequence is synthesized)
cagctcagggaggacctgcctgggagctttctcttgcataccctcgcttaggctggccggggtgtcacttctgcctccctgccctccagaccatggacggctccttcgtccagcacagtg

SEQ ID NO: 745183 - DNA, 120 bp, Artificial Sequence
  ENSG00000204859_2 (sequence is synthesized)
tgagggttctgcaggagctcaacaagcagcgggagaagggccagtactgcgacgccactctggacgtggggggcctggtgtttaaggcacactggagtgtccttgcctgctgcagtcact

SEQ ID NO: 745184 - DNA, 120 bp, Artificial Sequence
  ENSG00000204859_3 (sequence is synthesized)
ttttccagagcctctacggggatggctcagggggcagtgtcgtcctccctgctggcttcgctgagatctttggcctcttgttggactttttctacactggtcacctcgctctcacctcag

SEQ ID NO: 745185 - DNA, 120 bp, Artificial Sequence
  ENSG00000204859_4 (sequence is synthesized)
ggaaccgggatcaggtgctcctggcagccagggagttgcgagtgccagaggccgtagagctgtgccagagcttcaagcccaaaacttcagtgggacaggcagcaggtggccagagtgggc

SEQ ID NO: 745186 - DNA, 120 bp, Artificial Sequence
  ENSG00000204859_5 (sequence is synthesized)
tggggccccctgcctcccagaatgtgaacagccacgtcaaggagccggcaggcttggaagaagaggaagtttcgaggactctgggtctagtccccagggatcaggagcccagaggcagtc

SEQ ID NO: 745187 - DNA, 120 bp, Artificial Sequence
  ENSG00000204859_6 (sequence is synthesized)
atagtcctcagaggccccagctccattccccagctcagagtgagggcccctcctccctctgtgggaaactgaagcaggccttgaagccttgtccccttgaggacaagaaacccgaggact

SEQ ID NO: 745188 - DNA, 120 bp, Artificial Sequence
  ENSG00000204859_7 (sequence is synthesized)
gcaaagtgcccccaaggcccttagaggctgaaggtgcccagctgcagggcggcagtaatgagtgggaagtggtggttcaagtggaggatgatggggatggcgattacatgtctgagcctg

SEQ ID NO: 745189 - DNA, 120 bp, Artificial Sequence
  ENSG00000204859_8 (sequence is synthesized)
aggctgtgctgaccaggaggaagtcaaatgtaatccgaaagccctgtgcagctgagccagccctgagcgcgggctccctagcagctgagcctgctgagaacagaaaaggtacagcggtgc

SEQ ID NO: 745190 - DNA, 120 bp, Artificial Sequence
  ENSG00000204859_9 (sequence is synthesized)
acatactggggagaaaccctttgagtgtcccaaatgtgggaagtgttactttcggaaggagaacctcctggagcatgaagcccggaattgcatgaaccgctcggaacaggtcttcacgtg

SEQ ID NO: 745191 - DNA, 120 bp, Artificial Sequence
  ENSG00000204859_10 (sequence is synthesized)
ctctgtgtgccaggagacattccgccgaaggatggagctgcgggtgcacatggtgtctcacacaggggagatgccctacaagtgttcctcctgctcccagcagttcatgcagaagaagga

SEQ ID NO: 745192 - DNA, 120 bp, Artificial Sequence
  ENSG00000204859_11 (sequence is synthesized)
cttgcagagccacatgatcaaacttcatggagcccccaagccccatgcatgccccacctgtgccaagtgcttcctgtctcggacagagctgcagctgcatgaagctttcaagcaccgtgg

SEQ ID NO: 745193 - DNA, 120 bp, Artificial Sequence
  ENSG00000204859_12 (sequence is synthesized)
tgagaagctgtttgtgtgtgaggagtgtgggcaccgggcctcgagccggaatggcctgcagatgcacatcaaggccaagcacaggaatgagaggccacacgtatgtgagttctgcagcca

SEQ ID NO: 745194 - DNA, 120 bp, Artificial Sequence
  ENSG00000204859_13 (sequence is synthesized)
cgccttcacccaaaaggccaatctcaacatgcacctgcgcacacacacgggtgagaagcccttccagtgccacctctgtggcaagaccttccgaacccaagccagcctggacaagcacaa

SEQ ID NO: 745195 - DNA, 120 bp, Artificial Sequence
  ENSG00000204859_14 (sequence is synthesized)
ccgcacccacaccggggaaaggcccttcagttgcgagttctgtgaacagcgcttcactgagaaggggcccctcctgaggcacgtggccagccgccatcaggagggccggccccacttctg

SEQ ID NO: 745196 - DNA, 120 bp, Artificial Sequence
  ENSG00000204859_15 (sequence is synthesized)
ccagatatgcggcaagaccttcaaagccgtggagcaactgcgtgtgcacgtcagacggcacaagggggtgaggaagtttgagtgcaccgagtgtggctacaagtttacccgacaggccca

SEQ ID NO: 745197 - DNA, 120 bp, Artificial Sequence
  ENSG00000204859_16 (sequence is synthesized)
cctgcggaggcacatggagatccacgaccgggtagagaactacaacccgcggcagcgcaagctccgcaacctgatcatcgaggacgagaagatggtggtggtggcgctgcagccgcctgc

SEQ ID NO: 745198 - DNA, 120 bp, Artificial Sequence
  ENSG00000204859_17 (sequence is synthesized)
agagctggaggtgggctcggcggaggtcattgtggagtccctggcccagggcggcctggcctcccagctccccggccagagactgtgtgcagaggagagcttcaccggcccaggtgtcct

SEQ ID NO: 745199 - DNA, 120 bp, Artificial Sequence
  ENSG00000204859_18 (sequence is synthesized)
ggagccctccctcatcatcacagctgctgtccccgaggactgtgacacatagcccattctggccaccagagcccacttggccccacccctcaataaaccgtgtggctttggactctcgta

SEQ ID NO: 745200 - DNA, 120 bp, Artificial Sequence
  ENSG00000204859_19 (sequence is synthesized)
tgagggcggaagggacaggcataggagggactctgtgggaggcatttggggttggctttcctaggcccctggcccacctccaccttggctttggagaaggggagccgctacaggggatgg

SEQ ID NO: 745201 - DNA, 120 bp, Artificial Sequence
  ENSG00000204859_20 (sequence is synthesized)
cagctgggaaaggccccctggccacccccagcaaccccactgctggcttctgtgtcagggcccgccgaaacccaggcccactcttcctagaggcctgtcagcagccactagggccaggga

SEQ ID NO: 745202 - DNA, 120 bp, Artificial Sequence
  ENSG00000204859_21 (sequence is synthesized)
ctgtgggtgaggccactcggaccctgcccccagtctgtctgggcctgagaagggcctggtgtgcggtgggcttgcagcactcagtgatggtcaggccaggcaggttatgtgttgccctct

SEQ ID NO: 745203 - DNA, 120 bp, Artificial Sequence
  ENSG00000204859_22 (sequence is synthesized)
cccaccctagcgtccccaccctccccaggcagactcttcccagcagcaagcggaagcccgggcagaggctgctgtcataggcagaggcccccgctgatgccggccctgcttgcccctcac

SEQ ID NO: 745204 - DNA, 120 bp, Artificial Sequence
  ENSG00000204859_23 (sequence is synthesized)
cagggccagggttgggtggccccaggatccttcctgctgagccctttacgtggggtgctgtcaggcacctccctcacagtagctgtcagggagcctgccttccctgccttccctgccttt

SEQ ID NO: 745205 - DNA, 120 bp, Artificial Sequence
  ENSG00000204859_24 (sequence is synthesized)
ccagtgcccccttatctaggcagggctactgtctgcagcctcacctccaaggtccttattaggcccttgtttctttccatggaggacaggcttggcatcctctgggcagctgagccctga

SEQ ID NO: 745206 - DNA, 120 bp, Artificial Sequence
  ENSG00000204859_25 (sequence is synthesized)
gggccctcctttgcaccatccttcacaccagatcaggggtcctcccagaatcatctcaccggggcctccctctagttcctgccctatagcccaagggtgggtggcagggtttcatgggtg

SEQ ID NO: 745207 - DNA, 120 bp, Artificial Sequence
  ENSG00000204859_26 (sequence is synthesized)
aggtacctgggcggccctgggagagccatttcctgctcatccgagttggagggtctctgaggaggaaacgctcctttcttgcctgtgaacctcttttgtgccccacatggttagagttga

SEQ ID NO: 745208 - DNA, 120 bp, Artificial Sequence
  ENSG00000204859_27 (sequence is synthesized)
gagtggacctgctttgaaggcaggggtgtcctgtgcagtagtgaccctgggtggcactggagagcctggcagggcctgtgcagcacttgtaaaccactggtcccctcccttgctgcctgt

SEQ ID NO: 745209 - DNA, 120 bp, Artificial Sequence
  ENSG00000204859_28 (sequence is synthesized)
ggaagtttgagtgcaccgagtgtggctacaagtttacccgacaggtaggccagggcctgggccccttcccctaccctaggatcccccaaagttctgagctcaccctccccgccaggccca

SEQ ID NO: 745210 - DNA, 120 bp, Artificial Sequence
  ENSG00000204859_29 (sequence is synthesized)
ggccagacgacaccctgggagagaagcaggcaaggggagggctgcctgcgccttgataggcctcccgggccctttctctgaatggggaagcactggggatacgtgagccaagaggtactg

SEQ ID NO: 745211 - DNA, 120 bp, Artificial Sequence
  ENSG00000204859_30 (sequence is synthesized)
aggtctgacttaaaggtccttctggctcctgaactgaaacctgtgggggaggcagtcacggagcggggagaccagatgggcagctcccctggctacctgggagaagctgttgccagcctt

SEQ ID NO: 745212 - DNA, 120 bp, Artificial Sequence
  ENSG00000204859_31 (sequence is synthesized)
ggtgggccagtggagtcaggtgaggatctggccatgggtttgaagctctgggaagactgagttgcttctccaatagtcaggacccaagatctgtttctgccttcagacagaatgcggtca

SEQ ID NO: 745213 - DNA, 120 bp, Artificial Sequence
  ENSG00000204859_32 (sequence is synthesized)
gctgggcctccctgtcggcctctgtgctggccagatccatggcagcctcttaggacctgtgtgagcttcttgccactgcactctcccttgcagagtctccatgctgggggaggcttctgg

SEQ ID NO: 745214 - DNA, 120 bp, Artificial Sequence
  ENSG00000204859_33 (sequence is synthesized)
gcttgtccctgcaccttaaccagccggtgtcacctgagaacacttgttccccttagaagggacccagagggggccctgggtgagggagagatgggaaaccctctcagcccccccacccct

SEQ ID NO: 745215 - DNA, 120 bp, Artificial Sequence
  ENSG00000204859_34 (sequence is synthesized)
gtggcttctcctggcaggaaacatactggggagaaaccctttgagtgtcccaaatgtgggaagtgttactttcggaaggagaacctcctggagcatgaagcccggaattgcatgaaccgc

SEQ ID NO: 745216 - DNA, 120 bp, Artificial Sequence
  ENSG00000204859_35 (sequence is synthesized)
tcggaacaggtacttgggagctggcccaggtacttgtgggcagggcacactggcctctctgtcttcgtgccatccgggaagggccccaggagactgtctgagaggggtactgtaaactca

SEQ ID NO: 745217 - DNA, 120 bp, Artificial Sequence
  ENSG00000204866_0 (sequence is synthesized)
tttgggtttggacgggtgcgtttgtttctcatagtgcaggtctggagccggactgagatggggagtagagggaccccttgaaacttcagggtggatgaatatgaagtttcatcaccagct

SEQ ID NO: 745218 - DNA, 120 bp, Artificial Sequence
  ENSG00000204866_1 (sequence is synthesized)
gtgatgtttgatattggactgtggttgtgccagttgacactcaggagtggagactagatctgcaatctgttgggactgtgatgaggggatcatcctgccctcgaaccagacccagccctg

SEQ ID NO: 745219 - DNA, 120 bp, Artificial Sequence
  ENSG00000204866_2 (sequence is synthesized)
tagcccaggcactattgcctggagttcctgggctctcagcgccaggaaatcatgaggttcagtgtctcaggcatgaggaccgactaccccaggagtgtgctggctcctgcttatgtgtca

SEQ ID NO: 745220 - DNA, 120 bp, Artificial Sequence
  ENSG00000204866_3 (sequence is synthesized)
ggctcagaaccatggctgtgccagccggcacccaggtgtggagacaagatctacaaccccttggagcagtgctgttacaatgacgccatcgtgtccctgagcgagacccgccaatgtggt

SEQ ID NO: 745221 - DNA, 120 bp, Artificial Sequence
  ENSG00000204866_4 (sequence is synthesized)
cccccctgcaccttctggccctgctttgagctctgctgtcttgattcctttggcctcacaaacgattttgttgtgaagctgaaggttcagggtgtgaattcccagtgccactcatctccc

SEQ ID NO: 745222 - DNA, 120 bp, Artificial Sequence
  ENSG00000204866_5 (sequence is synthesized)
atctccagtaaatgtgaaagcagaagacgttttccctgagaagacatagaaagaaaatcaactttcactaaggcatctcagaaacataggctaaggtaatatgtgtaccagtagagaagc

SEQ ID NO: 745223 - DNA, 120 bp, Artificial Sequence
  ENSG00000204866_6 (sequence is synthesized)
ctgaggaatttacaaaatgatgcagctccaagccattgtatggcccatgtgggagactgatgggacatggagaatgacagtagattatcaggaaataaataaagtggtttttccaatgta

SEQ ID NO: 745224 - DNA, 120 bp, Artificial Sequence
  ENSG00000204866_7 (sequence is synthesized)
attattacaatctgcactctagaaccacatgccctttggatcctcacaacaactccatgaaaaaatcgcagctgtcactcttctctggttctcttttggagtttatggtgcctgtgcact

SEQ ID NO: 745225 - DNA, 120 bp, Artificial Sequence
  ENSG00000204866_8 (sequence is synthesized)
tctgctagatcacgtgaaaactgtggatatgactccaaatagttctccagggagtaaacaaagtggtttggggcatcatcttttgaaacttctaaggatacagtgcctgggaaatataga

SEQ ID NO: 745226 - DNA, 120 bp, Artificial Sequence
  ENSG00000204866_9 (sequence is synthesized)
attagaaggtgtttagtagaagggggattaaaatagatgggaagagccaccttctctagtttcatgttcattggtaatggccggtggtactggaggccatgagcttcctcaagccacaac

SEQ ID NO: 745227 - DNA, 120 bp, Artificial Sequence
  ENSG00000204866_10 (sequence is synthesized)
atggagtaggacttggctgcattcactctctgatatggagtagcccaggagaggaaaaaggttatagtataaggggaacatttttcatttgcaagtacagaagacaaaaacgaacaccct

SEQ ID NO: 745228 - DNA, 120 bp, Artificial Sequence
  ENSG00000204866_11 (sequence is synthesized)
tcctcttattttgctcacataatctcattgtcacctgcctgtacatgctttcaaaagctgcctgtacatgttttcacctgcctgtacatgctttcaaccatggaatatttgaacttggat

SEQ ID NO: 745229 - DNA, 120 bp, Artificial Sequence
  ENSG00000204866_12 (sequence is synthesized)
cactatgttagtcaggtgattgcatccataaaaaaaccttcatattccatcatttttttccatttcctttatctctcaaccttcacccacagtcatggtgtcagaaactgcaaaacaaat

SEQ ID NO: 745230 - DNA, 120 bp, Artificial Sequence
  ENSG00000204866_13 (sequence is synthesized)
gaggagagccccaaattttagacctactgtccgtctctacagaaaatagaaaattacctgggcatggtggcacatgtctgtagtctcacctactcaggaagctgaagtgagaggatcgtt

SEQ ID NO: 745231 - DNA, 72 bp, Artificial Sequence
  ENSG00000204866_14 (sequence is synthesized)
caaaaagcaaacaaacaaaaaaagacctactcaagcccaatcctatctccaagacaatcctgcaccccagtt

SEQ ID NO: 745232 - DNA, 120 bp, Artificial Sequence
  ENSG00000204866_15 (sequence is synthesized)
aagcccaatcctatctccaagacaatcctgcaccccagttctccacttgccaatcttactcagcttccttcctccttccttatcaccttaatcttaaccatggttaatctttaacagctg

SEQ ID NO: 745233 - DNA, 120 bp, Artificial Sequence
  ENSG00000204866_16 (sequence is synthesized)
ctccctcctttttccaactggtaaacttcagcatattcttagaatcataaacgaagatattccaagagttttccctgcattctctttcctagaagggtccatgcttctctggccctgctg

SEQ ID NO: 745234 - DNA, 120 bp, Artificial Sequence
  ENSG00000204866_17 (sequence is synthesized)
tctggactcttaactgtgtcagttagatcctatgcaaagatagttccaaacccaagcctttagagctaatctggaactaagccttccccaccctggcctgccctccctgagatcaaccta

SEQ ID NO: 745235 - DNA, 82 bp, Artificial Sequence
  ENSG00000204866_18 (sequence is synthesized)
atcaccctcatcagtgtgaagaacacatactcctgcttatgtgtcagtctgtctcctcctcttgtgtccaagggaagtcatc

SEQ ID NO: 745236 - DNA, 120 bp, Artificial Sequence
  ENSG00000204869_0 (sequence is synthesized)
tcactgacccatttccactgctgctccctcgtccgctgctctgaagcctaacccatggtgcccagaatttctgctgccatcttcatttttgaacttttgggttcaaactcagaaggagtc

SEQ ID NO: 745237 - DNA, 120 bp, Artificial Sequence
  ENSG00000204869_1 (sequence is synthesized)
acagatcttagactgtggctatgccagccagcgcccaggtgcggggagtggacctacaaccccttggagcagtgctgtgatgacggtgtcatcctagacttgaaccagacccggctctgc

SEQ ID NO: 745238 - DNA, 120 bp, Artificial Sequence
  ENSG00000204869_2 (sequence is synthesized)
ggcatgaagccagattgcaagtcctcccctatcaccaggatctgtgcccaggaataccacccaaaaagccctgtgtcaagatctgacctcatctagactgttctggggtagcagagtcac

SEQ ID NO: 745239 - DNA, 120 bp, Artificial Sequence
  ENSG00000204869_3 (sequence is synthesized)
agatcactctagaatctaatacttggtaattatactgcattgattttgttgttgttgtgacagagtttcactctgtcccccaggctggagtgcaaataagcaacttcagcaaagtctcag

SEQ ID NO: 745240 - DNA, 120 bp, Artificial Sequence
  ENSG00000204869_4 (sequence is synthesized)
gggtgacaggattaggcatgtacaggatcatgggacaataggacatggggaacttttcttctccccaaagggggaaacttgagagctgatgggactgctggaaaagattccttcgcaacc

SEQ ID NO: 745241 - DNA, 120 bp, Artificial Sequence
  ENSG00000204869_5 (sequence is synthesized)
tccttcgcaaccaagaaggggcggcctaaacttttgattcagtgtggctgcaatggagtcaaggaaacttttcttttgagctactgacagcttaactcctgtgaacaaaatttggagcat

SEQ ID NO: 745242 - DNA, 120 bp, Artificial Sequence
  ENSG00000204869_6 (sequence is synthesized)
cacctccctaaatggcgaagcttaacttttcccagagccctccctgcctttcctcacctgccaagcccagtccccaggacctgcacccacagccagtcccaaaatccactctgagctgtt

SEQ ID NO: 745243 - DNA, 120 bp, Artificial Sequence
  ENSG00000204869_7 (sequence is synthesized)
aacagcaaccagagaagctcagagacatcatcctgtgccccgtggtcaagacctagtgacctcagaatcattctcgctctccttctgcttctcagctgccatcttcatttttgaactttt

SEQ ID NO: 745244 - DNA, 120 bp, Artificial Sequence
  ENSG00000204869_8 (sequence is synthesized)
gctgcatcctgactctgggttggaaacttcgtggtggatgatgcctgtaactacccagatgaaatcaagacgcaacagccctcatcgagggatgctcagagtcaaggaaacttttctttt

SEQ ID NO: 745245 - DNA, 120 bp, Artificial Sequence
  ENSG00000204869_9 (sequence is synthesized)
tttgcataagtacaataaggatctgttttcttttgcaaacagacacaattggagaaactggtgattttaccaaagctttgattggaatggtatgttttcctttaaggaatcaaacttgac

SEQ ID NO: 745246 - DNA, 120 bp, Artificial Sequence
  ENSG00000204869_10 (sequence is synthesized)
tttaaggaatcaaacttgacttataaagccaataaaagccccttgggaaacctggcctcatgccttgtctacacagtccctgtacagggttcccgacctgtggtaagtaaagaatgtcac

SEQ ID NO: 745247 - DNA, 120 bp, Artificial Sequence
  ENSG00000204869_11 (sequence is synthesized)
caagaggagaggaatttacccaactcaggtatttgagggtgcaaactcacggctgggctcagcttttaaaaagtcttatctgagattcattttatgaaacacagttccatcaaagtcaat

SEQ ID NO: 745248 - DNA, 120 bp, Artificial Sequence
  ENSG00000204869_12 (sequence is synthesized)
acagttccatcaaagtcaattttaaaagcctctgtgaaaaataattattattgctgcactttatacaaataattaggccaagtataataaagcaaattggttttgccatgatttgtcttt

SEQ ID NO: 745249 - DNA, 120 bp, Artificial Sequence
  ENSG00000204869_13 (sequence is synthesized)
agtaaaaaatgggagactggagagagaaaaattatgtttcaagaactatggtacacctgttattagattctaatctcatcagttgtttttgagggttttcttctgcaatttagactgact

SEQ ID NO: 745250 - DNA, 120 bp, Artificial Sequence
  ENSG00000204869_14 (sequence is synthesized)
gcttattcctgtgagccaaccagtgatctctggttgcagttcagaataaacaagacagataccaccttttgtcagaactcggagttacaagtgaccctcaccataattatgctttctgag

SEQ ID NO: 745251 - DNA, 120 bp, Artificial Sequence
  ENSG00000204869_15 (sequence is synthesized)
ctcctctctaccctgaatacaagagaccctaacagttaggcaggaaagcattgcccctattcagcctgaagaagttacagaatatggatcttcatccttccacaacccttaggattaaga

SEQ ID NO: 745252 - DNA, 120 bp, Artificial Sequence
  ENSG00000204869_16 (sequence is synthesized)
gttgccttgtaaaagggaggggggaaatgtcagagacatttgaatcagaacaactccaccttgaatagggtctgggtaaaacaaggctgagaactgctgggttgcattcccagatggtta

SEQ ID NO: 745253 - DNA, 120 bp, Artificial Sequence
  ENSG00000204869_17 (sequence is synthesized)
aggcattctaactcaccggatgagataggaggtcagaacaagatacagcttataaagaccttgccgataaaacaggttgtagtaagaaaagccggccaaaaccaagatagcaacaaaagt

SEQ ID NO: 745254 - DNA, 120 bp, Artificial Sequence
  ENSG00000204869_18 (sequence is synthesized)
aaacagtttacaaattccatagcaacatcagaaaattaccctatatagtctaaaaaggggaggaacccccagttctgggaattgcccactcttcctggaaaattcatgaataatccaccc

SEQ ID NO: 745255 - DNA, 120 bp, Artificial Sequence
  ENSG00000204869_19 (sequence is synthesized)
cttgtgatatgatttggctgtgtgtagcctagggacttgatatcctgcatcccagttgctctagccatggataaaaggggccaaggtacagctggggccatggcttgaaagggtgcaagc

SEQ ID NO: 745256 - DNA, 89 bp, Artificial Sequence
  ENSG00000204869_20 (sequence is synthesized)
ccaaggtacagctggggccatggcttgaaagggtgcaagctccaagcctaggcagcatccacatggtgttgagcctgcgggtgcacaga

SEQ ID NO: 745257 - DNA, 120 bp, Artificial Sequence
  ENSG00000204869_21 (sequence is synthesized)
cagaagtttgcttcaggaacagcgccctcatggagaacctttgctagggcaatgaagaagggaaatgtgggcttgaaaccccacacagagtccccactgaggcaccgcctagtggggctg

SEQ ID NO: 745258 - DNA, 90 bp, Artificial Sequence
  ENSG00000204869_22 (sequence is synthesized)
ccagaatggtagatccaccaacagcttacactgtgcacctggaagagccatagacactcaacaccaggagtgaaagcagccacaaagaca

SEQ ID NO: 745259 - DNA, 120 bp, Artificial Sequence
  ENSG00000204869_23 (sequence is synthesized)
cccaagaccatgggaacccacctcttgcagcataacttggatgtgagaaatggtgtccatggagataatttcagagctttaagatttggctgccctgctggatttctaacttgcatgggg

SEQ ID NO: 745260 - DNA, 120 bp, Artificial Sequence
  ENSG00000204869_24 (sequence is synthesized)
gctgccctgctggatttctaacttgcatggggcctgtagcccctccatcttggccagtctgtcacatttggaatgggtgtatttacccgatacctgtacccccattgtatctgggaagta

SEQ ID NO: 745261 - DNA, 120 bp, Artificial Sequence
  ENSG00000204869_25 (sequence is synthesized)
acaggctcctaggtggaaggaactcaccttgtcttaaatgagactttggactatggacttttaagtttatgctgaaatgagttaagaatttgggggactgtggggaaggtatgattggtt

SEQ ID NO: 745262 - DNA, 75 bp, Artificial Sequence
  ENSG00000204869_26 (sequence is synthesized)
gttaagaatttgggggactgtggggaaggtatgattggttttaaaatgtgagaacatgaaatttgggaggggttg

SEQ ID NO: 745263 - DNA, 120 bp, Artificial Sequence
  ENSG00000204869_27 (sequence is synthesized)
ggatgcagtgggaggtaattaaatcatggggacgggtctttcccatgctgttctcatggtagtgaataaatctcaagagttctgatggttttataaatgagagttcccttgcacaagctc

SEQ ID NO: 745264 - DNA, 120 bp, Artificial Sequence
  ENSG00000204869_28 (sequence is synthesized)
ttgcacaagctctctctttgcctgccactatgtaagatgtggctttgctcctccttgccttcctccatgattgtgaggcctcctcaaccaggtgaaactgtgagtcaattaaacctcttt

SEQ ID NO: 745265 - DNA, 120 bp, Artificial Sequence
  ENSG00000204873_0 (sequence is synthesized)
agattttgggaaactcacctcttaacagaagcccaccctccatccctgacaccatgacccactgttgctccccttgctgtcagcctacctgctgcaggaccacctgctggcagcccacca

SEQ ID NO: 745266 - DNA, 120 bp, Artificial Sequence
  ENSG00000204873_1 (sequence is synthesized)
ctgtgaccacctgcagcagcacaccctgctgtcagccctcctgctgtgtttccagctgctgccagccttgctgccacccaacttgctgtcaaaacacctgctgtaggaccacctgctgcc

SEQ ID NO: 745267 - DNA, 120 bp, Artificial Sequence
  ENSG00000204873_2 (sequence is synthesized)
agcccatctgtgtgaccagctgctgccagccttcctgctgtagcacaccctgctgccagcccacatgctgtgggtccagctgtggtcagagcagctcctgtgcacctgtgtactgcagaa

SEQ ID NO: 745268 - DNA, 120 bp, Artificial Sequence
  ENSG00000204873_3 (sequence is synthesized)
gaacctgctaccaccccacaagtgtttgtctgcctggttgcctaaaccagagctgtggctccaactgctgccagccctgctgccgcccagcctgctgtgagaccacctgctgcaggacca

SEQ ID NO: 745269 - DNA, 120 bp, Artificial Sequence
  ENSG00000204873_4 (sequence is synthesized)
ctgctaatcaactcccaagagaactaccatcctcacacaacaaccttcagctcaactgacttgtcttttgagggactaatttactttgctgctgacagccaccatgctctcacccaaatt

SEQ ID NO: 745270 - DNA, 120 bp, Artificial Sequence
  ENSG00000204873_5 (sequence is synthesized)
tttatgaattctctacatgtttaaaatcttgggaatctgcttgagggagggcagaatacttcatcctcattccctctttccttacaccttgtggatcatgtgccagcttcgtctgttctt

SEQ ID NO: 745271 - DNA, 120 bp, Artificial Sequence
  ENSG00000204873_6 (sequence is synthesized)
aatttggagtcatgatctcagctttgtctcaaaaatcaagagcttcattctttgcttctaaggaatttaggtttctgcaactgatcaatcatctttgcaattatattttcattttaaata

SEQ ID NO: 745272 - DNA, 120 bp, Artificial Sequence
  ENSG00000204873_7 (sequence is synthesized)
tccttctcatggttcttgtatccttctttcttcttttcacgataactttgggttatgtctctggtagcagagattcttacctatatgtttctgaataaactctgaaccatcttcatctca

SEQ ID NO: 745273 - DNA, 120 bp, Artificial Sequence
  ENSG00000204880_0 (sequence is synthesized)
atggtcaactcctgttgtggctccgtgtgctctgaccaaggctgtggccaagacctctgccaggagacctgctgctgccccagctgctgtcagaccacctgctgcaggaccacctgctac

SEQ ID NO: 745274 - DNA, 120 bp, Artificial Sequence
  ENSG00000204880_1 (sequence is synthesized)
gccccagctgctgtgtgcccacctgctgccaccctagctgctgcatctccagctgctgccgccccagctgctgtgtgtccagctgctgcaagccccagtgctgccagtctgtgtgctgcc

SEQ ID NO: 745275 - DNA, 120 bp, Artificial Sequence
  ENSG00000204880_2 (sequence is synthesized)
ccctgctgctgcctgcgtccagtctgtggccgagtctcctgccacaccacttgctatcgcccagcctgtgtcatctccacctgcccccgccccgtgtgctgcgcctcctcttgctgctga

SEQ ID NO: 745276 - DNA, 120 bp, Artificial Sequence
  ENSG00000204880_3 (sequence is synthesized)
gaatattaggacacatggagtgggatttatgtcattcagcagggtggacctcatgtatccaatgagcccatcaccatcccgctgactctgtgagaacattctggttcattttaaactccc

SEQ ID NO: 745277 - DNA, 120 bp, Artificial Sequence
  ENSG00000204880_4 (sequence is synthesized)
tcccttgctttctttttcttccagtcatggcaccaaatacgaattaatttgtaatccactagctaagaaattattccaatcctctaaattcctcattttttaaaatcattttgagcctac

SEQ ID NO: 745278 - DNA, 120 bp, Artificial Sequence
  ENSG00000204880_5 (sequence is synthesized)
agaatatccttcccaattaggtacacattatctccctttcaaacatactatttgtctgtcagcctttcagtcattcttttcttttggaaaggtaggaggctgcccctcccgtgctctccc

SEQ ID NO: 745279 - DNA, 120 bp, Artificial Sequence
  ENSG00000204880_6 (sequence is synthesized)
gctttctccctgctctctctttctctcactgttcaagtttgtcagaatttttctattttattagttctttatctttattgtgttcacaaaatatattgtattaaacttttcatttagaaa

SEQ ID NO: 745280 - DNA, 120 bp, Artificial Sequence
  ENSG00000204882_0 (sequence is synthesized)
gtcaggccgtaggaaggcgaggtccgggctgcatgcagagctgagagctgaggactcccatctccagcctgcccgggtgaagcgcggcctggggtgtgctggctgccgtcatgccctctg

SEQ ID NO: 745281 - DNA, 120 bp, Artificial Sequence
  ENSG00000204882_1 (sequence is synthesized)
tgtctccagcggggccctcggccggggcagtccccaatgccaccgcagtgacaacagtgcggaccaatgccagcgggctggaggtgcccctgttccacctgtttgcccggctggacgagg

SEQ ID NO: 745282 - DNA, 120 bp, Artificial Sequence
  ENSG00000204882_2 (sequence is synthesized)
agctgcatggcaccttcccaggcctgtggctggcgctgatggcggtgcacggagccatcttcctggcagggctggtgctcaacgggctggcgctgtacgtcttctgctgccgcacccggg

SEQ ID NO: 745283 - DNA, 120 bp, Artificial Sequence
  ENSG00000204882_3 (sequence is synthesized)
ccaagacaccctcagtcatctacaccatcaacctggtggtgaccgatctactggtagggctgtccctgcccacgcgcttcgctgtgtactacggcgccaggggctgcctgcgctgtgcct

SEQ ID NO: 745284 - DNA, 120 bp, Artificial Sequence
  ENSG00000204882_4 (sequence is synthesized)
tcccgcacgtcctcggttacttcctcaacatgcactgctccatcctcttcctcacctgcatctgcgtggaccgctacctggccatcgtgcggcccgaaggctcccgccgctgccgccagc

SEQ ID NO: 745285 - DNA, 120 bp, Artificial Sequence
  ENSG00000204882_5 (sequence is synthesized)
ctgcctgtgccagggccgtgtgcgccttcgtgtggctggccgccggtgccgtcaccctgtcggtgctgggcgtgacaggcagccggccctgctgccgtgtctttgcgctgactgtcctgg

SEQ ID NO: 745286 - DNA, 120 bp, Artificial Sequence
  ENSG00000204882_6 (sequence is synthesized)
cctgctgcccctgctggtcatcagcgtgtttaccggccgcatcatgtgtgcactgtcgcggccgggtctgctccaccagggtcgccagcgccgcgtgcgggccatgcagctcctgctcac

SEQ ID NO: 745287 - DNA, 120 bp, Artificial Sequence
  ENSG00000204882_7 (sequence is synthesized)
ggtgctcatcatctttctcgtctgcttcacgcccttccacgcccgccaagtggccgtggcgctgtggcccgacatgccacaccacacgagcctcgtggtctaccacgtggccgtgaccct

SEQ ID NO: 745288 - DNA, 120 bp, Artificial Sequence
  ENSG00000204882_8 (sequence is synthesized)
cagcagcctcaacagctgcatggaccccatcgtctactgcttcgtcaccagtggcttccaggccaccgtccgaggcctcttcggccagcacggagagcgtgagcccagcagcggtgacgt

SEQ ID NO: 745289 - DNA, 120 bp, Artificial Sequence
  ENSG00000204882_9 (sequence is synthesized)
ggtcagcatgcacaggagctccaagggctcaggccgtcatcacatcctcagtgccggccctcacgccctcacccaggccctggctaatgggcccgaggcttagtcagcagggctctgcca

SEQ ID NO: 745290 - DNA, 120 bp, Artificial Sequence
  ENSG00000204882_10 (sequence is synthesized)
ggggccgaaggtcaggactcatctgggcatgccagcgtggacacccaccatgccaggggtggcaatcggttccatctcgattgattggtgatggctacccagagcaccgcattgagcgtc

SEQ ID NO: 745291 - DNA, 120 bp, Artificial Sequence
  ENSG00000204882_11 (sequence is synthesized)
taaggccactgtgctgtggttgattagcaatgtctgccactggctccgatgggatgtggtggcctgaatgccggtgatttgctgttcctggggtatagcacgtccactgaaaactcacag

SEQ ID NO: 745292 - DNA, 120 bp, Artificial Sequence
  ENSG00000204882_12 (sequence is synthesized)
gggtagccgggagctgctcctcactttggccagtttgtctccagaaggagttcctcagaaaaaagggcacagtggattccattgattagaaggatgagatgaaaaagaaaaaagaaaaaa

SEQ ID NO: 745293 - DNA, 120 bp, Artificial Sequence
  ENSG00000204887_0 (sequence is synthesized)
cagctctcaacccaactcctgacaccatggccagctgttccaccagtgggacctgtggctccagctgctgccagccaagctgctgtgaaactagctgctgccagccaagctgctgccaga

SEQ ID NO: 745294 - DNA, 120 bp, Artificial Sequence
  ENSG00000204887_1 (sequence is synthesized)
gccaggagggcagcggtggatctgtgagcacccgtatcaggtggtgccacccagattgccacgtggagggcacctgcctgcccccctgctacctggtaagctgcacacccccatcctgct

SEQ ID NO: 745295 - DNA, 120 bp, Artificial Sequence
  ENSG00000204887_2 (sequence is synthesized)
gccagctgcaccacgccgaggcctcctgctgccgcccgtcctactgtggacagtcctgctgccgcccagcctgctgctgccactgctgtgagcccacctgctaaaagccaggttgctgat

SEQ ID NO: 745296 - DNA, 120 bp, Artificial Sequence
  ENSG00000204889_0 (sequence is synthesized)
ttttgcagccagtctctgtctttgcttctggaaggatgacttctgactgctcctccacacactgctctcctgagtcctgtggcacggcttccggttgtgcacctgcctcaagctgctccg

SEQ ID NO: 745297 - DNA, 120 bp, Artificial Sequence
  ENSG00000204889_1 (sequence is synthesized)
tggaaacagcttgtctccccggtacctgtgctacatcccgatgtcagactccaagcttcctatccaggtctcgcgggctgactggttgcctcctgccatgctactttactgggagttgta

SEQ ID NO: 745298 - DNA, 120 bp, Artificial Sequence
  ENSG00000204889_2 (sequence is synthesized)
atagtccctgcttggtggggaactgtgcctggtgtgaggatggggtgttcactagcaatgagaaggagacgatgcagttcctgaatgacagactcgccagctatctggagaaggtgcgca

SEQ ID NO: 745299 - DNA, 120 bp, Artificial Sequence
  ENSG00000204889_3 (sequence is synthesized)
gcctggaggagaccaacgcagagctggaatccaggatccaagaacaatgtgaacaggatatcccaatggtgtgcccggattatcagcgttacttcaacaccattgaagatctccaacaaa

SEQ ID NO: 745300 - DNA, 120 bp, Artificial Sequence
  ENSG00000204889_4 (sequence is synthesized)
agatcttatgcacgaaagcagagaattctagacttgctgtacagcttgacaactgcaaactggccactgatgactttaagtcaaagtacgagagtgaactgtcccttcgccagctgttag

SEQ ID NO: 745301 - DNA, 120 bp, Artificial Sequence
  ENSG00000204889_5 (sequence is synthesized)
aggctgacatcagcagcctgcatgggatcctggaggaactgaccctgtgcaaatctgatctggaggcccatgtggagtctctgaaggaagatctcctttgccttaagaaaaaccatgaag

SEQ ID NO: 745302 - DNA, 120 bp, Artificial Sequence
  ENSG00000204889_6 (sequence is synthesized)
aggaagtcaacttgcttcgtgaacagcttggcgaccgcctcagtgtggagctggacactgcccccacccttgacctcaacagggtcctggatgagatgcgctgtcagtgtgaaacggtgc

SEQ ID NO: 745303 - DNA, 120 bp, Artificial Sequence
  ENSG00000204889_7 (sequence is synthesized)
gcagagaagctgaagaatggttggctgttcagacagaagagctgaatcagcagcaactgtccagcgcggagcagctgcagggctgccagatggagatcttggaactgaaacgcacagcca

SEQ ID NO: 745304 - DNA, 120 bp, Artificial Sequence
  ENSG00000204889_8 (sequence is synthesized)
gtgctctggaaattgagctccaagcacagcaaagcctgacagaatctctggaatgcaccgtggcagaaaccgaggcccagtacagctcccagctggcccaaattcagtgtctgatcgata

SEQ ID NO: 745305 - DNA, 120 bp, Artificial Sequence
  ENSG00000204889_9 (sequence is synthesized)
acctggagaaccagctggccgagatccgctgcgacctggagcgacagaaccaggagtaccaggtgctcctggacgtgaaggcccggctggagggtgagatcaacacgtactggggcctgc

SEQ ID NO: 745306 - DNA, 120 bp, Artificial Sequence
  ENSG00000204889_10 (sequence is synthesized)
tggacagcgaggacagcaggctttcctgtagcccatgttcgaccacatgcacctcgagcaacacttgtgagccatgctcagcctatgtcatctgcactgttgaaaactgctgcttgtgaa

SEQ ID NO: 745307 - DNA, 120 bp, Artificial Sequence
  ENSG00000204889_11 (sequence is synthesized)
tgttaaggacagcaggtagaggaatcaaagccagcagcatcctagaaaggagatggggcttcaaccagggacatccaaaccggaagcacaaatccaggaggctctcatatcctggaattg

SEQ ID NO: 745308 - DNA, 120 bp, Artificial Sequence
  ENSG00000204889_12 (sequence is synthesized)
ccctccaggtatcctcagtctttctgctttactatttcctctccttccggcttatttgtggtatactggaagcccataaagcattcttgctcatctccaaataaaacgtgttttattcct

SEQ ID NO: 745309 - DNA, 120 bp, Artificial Sequence
  ENSG00000204889_13 (sequence is synthesized)
ttagcgtggtaaatatagctctatggctgattactgttgatagaatattcattttatggcaaggaaatcatctaaacccataaccatagtttcaatgtacataaacccaggctgaaaata

SEQ ID NO: 745310 - DNA, 120 bp, Artificial Sequence
  ENSG00000204889_14 (sequence is synthesized)
ttttttaactcctcaaatacaaataaattaatgaacccatgagaaatgtcatatatcttagaaaatagttgtgtgtatctttctgaggaaaaatattaggaataaaatatgataaaatgt

SEQ ID NO: 745311 - DNA, 120 bp, Artificial Sequence
  ENSG00000204889_15 (sequence is synthesized)
gctatagcagagatgcgtgcaaagtgctctgggaggagccacatctccacatgaggcagttgaacgacgtttcagctgagtcttgacatctgaaggtctggtgatagctgggtgcaggaa

SEQ ID NO: 745312 - DNA, 120 bp, Artificial Sequence
  ENSG00000204889_16 (sequence is synthesized)
aaaatagtacctacgaagcttgaaggatggctggagcttagggtttgtgagacagaacatcaggaagtgagcccagaaagctgaaggtctggtgatagctgggtgcaggaatattgtgca

SEQ ID NO: 745313 - DNA, 120 bp, Artificial Sequence
  ENSG00000204889_17 (sequence is synthesized)
cgaagaaactgaggcccttctaagtggtgaaaagagattcagcccaggcaatctgaatcaaaatctcacacttttacccactgctccaaaaaacagaagtagaatgccattggatgtcaa

SEQ ID NO: 745314 - DNA, 120 bp, Artificial Sequence
  ENSG00000204897_0 (sequence is synthesized)
agaaggcactccattctggctttcacaaatacagctctgcaacgcgtttgccctgataccatgtctcttcgactttccagtgcatccaggaggtcctgtcctcgtcccaccactggatca

SEQ ID NO: 745315 - DNA, 120 bp, Artificial Sequence
  ENSG00000204897_1 (sequence is synthesized)
ctcagactctatggtgggggaaccagctttggtactggaaattcttgtggcatttcagggattggaagtggcttctctagtgccttcggaggcagctcatcgggaggaaacacaggggga

SEQ ID NO: 745316 - DNA, 120 bp, Artificial Sequence
  ENSG00000204897_2 (sequence is synthesized)
ggtaatccctgtgctggcttcactgtgaatgagcgggggctcctttctggcaatgagaaggtgaccatgcagaacctcaatgaccgcctggcatcctacctggacagtgtgcatgctctg

SEQ ID NO: 745317 - DNA, 120 bp, Artificial Sequence
  ENSG00000204897_3 (sequence is synthesized)
gaggaggccaacgctgacctggagcagaagatcaagggctggtatgagaaatttgggcctggctcttgccgtggtcttgatcatgactatagcagatatttcccaataattgatgacctt

SEQ ID NO: 745318 - DNA, 120 bp, Artificial Sequence
  ENSG00000204897_4 (sequence is synthesized)
aaaaatcagatcatcgcatccaccaccagcaatgctaatgctgttctgcagatcgataatgccaggcttacagctgatgatttcagactcaagtatgaaaatgagctggctcttcaccag

SEQ ID NO: 745319 - DNA, 120 bp, Artificial Sequence
  ENSG00000204897_5 (sequence is synthesized)
agtgtagaggctgatgtcaatgggttacgaagagttttggatgaaataaccctgtgcagaacagatctggagattcagtatgaaaccctgagtgaggagatgacttacctcaaaaagaac

SEQ ID NO: 745320 - DNA, 120 bp, Artificial Sequence
  ENSG00000204897_6 (sequence is synthesized)
ctgagtacgaagcccttgcagagcagaaccgcagggacgcggaggcctggttcaacgagaagagcgcctccctgcagcagcagatctctgaggatgtcggagccacaacctcagcccgga

SEQ ID NO: 745321 - DNA, 120 bp, Artificial Sequence
  ENSG00000204897_7 (sequence is synthesized)
atgagctgactgaaatgaagcgcactcttcaaaccctggaaattgaacttcagtctctcctagccacgaaacactccctggagtgctccttgacagagaccgagagcaactactgtgcgc

SEQ ID NO: 745322 - DNA, 120 bp, Artificial Sequence
  ENSG00000204897_8 (sequence is synthesized)
agctggcgcagatccaggctcagatcggggccctggaggagcagctgcaccaggtcagaaccgagaccgagggccagaagctggagtatgagcagctcctggacatcaagctccacctgg

SEQ ID NO: 745323 - DNA, 120 bp, Artificial Sequence
  ENSG00000204897_9 (sequence is synthesized)
aaaaagaaattgagacctactgtctccttataggaggagatgatggagcctgtaagtctgggggttacaagtctaaagattatggatctggaaatgtgggaagtcaagtcaaagacccag

SEQ ID NO: 745324 - DNA, 120 bp, Artificial Sequence
  ENSG00000204897_10 (sequence is synthesized)
ccaaagccatagtggttaagaaagttcttgaggaggtagaccaacgcagcaaaatacttaccaccaggctccactccctggaagagaaatctcaaagcaattaatttgagatgcaacaga

SEQ ID NO: 745325 - DNA, 120 bp, Artificial Sequence
  ENSG00000204897_11 (sequence is synthesized)
gaacgtatgccacatagcccctgcgaagaaaaggcattatgtatctgtccagaaaaatgtgcatgtctaagaaaaatgtctaacctgttgtctttctgttactttctttctgggcaatca

SEQ ID NO: 745326 - DNA, 120 bp, Artificial Sequence
  ENSG00000204897_12 (sequence is synthesized)
atgacagcatctccccattcatctagaagaatgccacacacaaatatgactcatttgattatcctacagaaatctgttgtcaattctttgtattcaataaacctcttctttagcaagtta

SEQ ID NO: 745327 - DNA, 120 bp, Artificial Sequence
  ENSG00000204899_0 (sequence is synthesized)
cttctcccgcctccctcggccttagccatggcgagtagcagcggtgctggggcggcggcggcggccgcggcggcgaatctgaatgcggtgcgggagaccatggacgttctgcttgagatt

SEQ ID NO: 745328 - DNA, 120 bp, Artificial Sequence
  ENSG00000204899_1 (sequence is synthesized)
tcaagaattttgaatactggcttagatatggaaactctgtctatttgtgtacggctttgtgaacaaggaattaacccagaagctttatcatcggttattaaggagcttcgcaaggctact

SEQ ID NO: 745329 - DNA, 120 bp, Artificial Sequence
  ENSG00000204899_2 (sequence is synthesized)
gaagcactgaaggctgctgaaaatatgacaagctgactttctggagaaattctgatgagatatgtcaagctctgcaagagggtttgaagattgcattgtagttgagaatgtacaatgaaa

SEQ ID NO: 745330 - DNA, 120 bp, Artificial Sequence
  ENSG00000204899_3 (sequence is synthesized)
ttactgcatgcagcagtgtagaaaaattttactttttaaaagaattataaaaccatagctttataaatcagtggaaagtggcttacagagagaactatcagatgtgtttacatcacatct

SEQ ID NO: 745331 - DNA, 120 bp, Artificial Sequence
  ENSG00000204899_4 (sequence is synthesized)
tattcactttttttaacagctctaatgctttggcattgctatgttcatatttatgtattccttatttatagctctgatagctttaattttctaagcagtctgtctatcagatgtgcacat

SEQ ID NO: 745332 - DNA, 120 bp, Artificial Sequence
  ENSG00000204899_5 (sequence is synthesized)
ctgctgtgccaggttgaagtatagtggaacccatcagtagtaatgtgtagtagttatgacttgttgacatttccattataaactttaattttgaattgtttatgcattataactgtggat

SEQ ID NO: 745333 - DNA, 120 bp, Artificial Sequence
  ENSG00000204899_6 (sequence is synthesized)
ttatattgtattgggctgaaagttgacaggatttcagccaccacttgtgaatttttatttagattcattatgtatatcagaatcttgttttttgaaataagagcatggaaaacatttctt

SEQ ID NO: 745334 - DNA, 120 bp, Artificial Sequence
  ENSG00000204899_7 (sequence is synthesized)
gtaatctactcttgaacaaagaatatttagtttttcaaacagtttgttgggcagctaatagtgtgaaccaggtcatttttgtattgagtaaaaaaatcaaactttgagaaacttggattt

SEQ ID NO: 745335 - DNA, 120 bp, Artificial Sequence
  ENSG00000204899_8 (sequence is synthesized)
taaaagtaatgacaatgcttaggttagtattatttgtaatttgaatcatttacatctaatgagaatgttagttgagaatgttttcttaaagttttatatcctataaataacggaataaaa

SEQ ID NO: 745336 - DNA, 120 bp, Artificial Sequence
  ENSG00000204899_9 (sequence is synthesized)
cttacctaataaatcttgaatggttatttaataaattattagatgggtgatgtgtttcaaaagatacttgctattttttgaagaaataaggatttccagtcattaaacaaaactaaacaa

SEQ ID NO: 745337 - DNA, 120 bp, Artificial Sequence
  ENSG00000204899_10 (sequence is synthesized)
tcttattagatgggtgatgtgtttcaaaggatacttgctattttttgaagaaataaggatttccagtcattaaacaaaactaaacaatcaaatgttctatattaggaatctcaagtatgg

SEQ ID NO: 745338 - DNA, 120 bp, Artificial Sequence
  ENSG00000204899_11 (sequence is synthesized)
ctttttttaaaaaacctttttaacatcttgatgtcaaggattataagtatggcttttcagaattgttttgtttgtcattattcttgcctttaaaattttaactcatcaaagtgaagatta

SEQ ID NO: 745339 - DNA, 120 bp, Artificial Sequence
  ENSG00000204899_12 (sequence is synthesized)
gaaataaattttagaaaatgtagaatagtattgattctgttcctgtaatagaatctcagtggagtttttttgcaaaactaatatggatttcatctgattttattatttcttaaattttag

SEQ ID NO: 745340 - DNA, 120 bp, Artificial Sequence
  ENSG00000204899_13 (sequence is synthesized)
attttattgagtaccatttatatgattgtacaagcattcactctttactagcattttttgtttttcagacaagctgaagtggttttattaagatttggtaatatttaaatagcaaccttc

SEQ ID NO: 745341 - DNA, 120 bp, Artificial Sequence
  ENSG00000204899_14 (sequence is synthesized)
tctgcctttttttttttttaatatagaattttgaccattttgactttttaaatgcctggcatctttaccaaccaagtaaactggaagatctgttactggtagaacaggttgaggagacag

SEQ ID NO: 745342 - DNA, 120 bp, Artificial Sequence
  ENSG00000204899_15 (sequence is synthesized)
taggaatttgtaaaaagtcatttgatttataatcaacactacaaatactatgtgttatttataaaatcataaagaacacttttgtcagactccaaaatttgtatatacttccaggccata

SEQ ID NO: 745343 - DNA, 120 bp, Artificial Sequence
  ENSG00000204899_16 (sequence is synthesized)
agagttgatagtattatttatgactttgtagattaagttatttatgtatgaaacaaagcaggaaaatatattgagaagggatcgtgtttacagaggacttctttaaagtgtcacattttt

SEQ ID NO: 745344 - DNA, 120 bp, Artificial Sequence
  ENSG00000204899_17 (sequence is synthesized)
aaaatgtaaacatatttttaatgcatacttaagtaatatttaagaaactaaacaaaataatgatacaattgcagtgttgtgcttgttgtcaatgacaaaaataaaaccattttggtggta

SEQ ID NO: 745345 - DNA, 120 bp, Artificial Sequence
  ENSG00000204909_0 (sequence is synthesized)
ggacaccaggtcacttcttttccctacatctgactgccttggccacttcagtactatgagagcaacagccatagtcctactcttggctctgacacttgcaaccatgttcagtatagaatg

SEQ ID NO: 745346 - DNA, 120 bp, Artificial Sequence
  ENSG00000204909_1 (sequence is synthesized)
tggatctgatggcaaaacttataaaaatgattgcttcttctgttctaaagttaagaaaactgacggcacacttaaatttgtacattttggaaaatgttaaatctatcttgtgagtccaaa

SEQ ID NO: 745347 - DNA, 120 bp, Artificial Sequence
  ENSG00000204909_2 (sequence is synthesized)
atatcttttaatgcatctattcacaagagtcacatttctgttcccatattatctatgccacattgcctactcatcaccatatgtagatttctttgtagaataaagcagatataagggaaa

SEQ ID NO: 745348 - DNA, 80 bp, Artificial Sequence
  ENSG00000204909_3 (sequence is synthesized)
aaggtattggagaagaagtgatttcattgagatttgtctctctgtgtgatcaatcagcatttgcatctttatggtcttta

SEQ ID NO: 745349 - DNA, 120 bp, Artificial Sequence
  ENSG00000204909_4 (sequence is synthesized)
tgtgatcaatcagcatttgcatctttatggtctttatgaatccttctcatcattgttttcattataaaactccaccaagcagctcaggagaacacaatgaacccaggagactcatgggct

SEQ ID NO: 745350 - DNA, 120 bp, Artificial Sequence
  ENSG00000204909_5 (sequence is synthesized)
taacgcaacctgaacatttacaaggtatagaatgtgccaaacagacgaaacagatggttgactgcagtcattataaaaagttaccaccaggacaacagagattttgtcatcatatgtatg

SEQ ID NO: 745351 - DNA, 120 bp, Artificial Sequence
  ENSG00000204913_0 (sequence is synthesized)
catagtcttccaaaatccagcaagaaaaatccttctcagaaaggtctccaatgcgtatgacctcatcttccttcgtatcctactgcactccaggactatgccaatttatggccatgctcc

SEQ ID NO: 745352 - DNA, 120 bp, Artificial Sequence
  ENSG00000204913_1 (sequence is synthesized)
caacagcaggtcacctcctgcccctcctgctggtgataggcacagggggtactgtgcccagcccccaggtgcctccccggggctgttatgtggcaaaggaagcaggtgaacggacgttcc

SEQ ID NO: 745353 - DNA, 120 bp, Artificial Sequence
  ENSG00000204913_2 (sequence is synthesized)
gctgcagccaggcaggcctcagtgctgtgccctccggcatccccaatgacacccgcaagctctacctggatgccaaccagctggcatcggtgcctgctggtgccttccagcacctgcctg

SEQ ID NO: 745354 - DNA, 120 bp, Artificial Sequence
  ENSG00000204913_3 (sequence is synthesized)
cacctctcaggggcggctttccagggcctggagggcacattgcgccacctcgacctctctgccaaccagctggcctcagtgcccgtggaggcctttgtggggctacagatccaagtgaac

SEQ ID NO: 745355 - DNA, 120 bp, Artificial Sequence
  ENSG00000204913_4 (sequence is synthesized)
ctatccgcaaacccatggcactgtgactgcgccctccaggaagtgctccggcaggtgaggctggtgccgggcactgggacaggcatcgtgtgtggctcaggagcccgaccggacctcgtg

SEQ ID NO: 745356 - DNA, 120 bp, Artificial Sequence
  ENSG00000204913_5 (sequence is synthesized)
gggcaggagttcctgctgctggcaggggaggaagagctgtgtgggtcggggtggggtggggcccggaggagcaccgatgtggccctgctggtcaccatggggggctggctgacactcatg

SEQ ID NO: 745357 - DNA, 120 bp, Artificial Sequence
  ENSG00000204913_6 (sequence is synthesized)
gtggcttatctggtgcattatgtgtggcagaaccgagatgagaccaggcgctccctcaagcgggccccagtgctgcccgtgcgttccgaggactcctccatcctcagcacagtggtctga

SEQ ID NO: 745358 - DNA, 120 bp, Artificial Sequence
  ENSG00000204918_0 (sequence is synthesized)
atataagagggacggcgctcggcctccagcagtcggctttctgctgggctcggagccagaacctgctgcgtgctccctccagactccctggctgcgggtggactacctcagagctacagc

SEQ ID NO: 745359 - DNA, 120 bp, Artificial Sequence
  ENSG00000204918_1 (sequence is synthesized)
ggtgaacctgtggacacctccgactcctcgggcctctcttcgtcgaagagtctcctaattttcagatctccggagccagctgtgggaagatcagcccctcccgccgattgctcatggagg

SEQ ID NO: 745360 - DNA, 120 bp, Artificial Sequence
  ENSG00000204918_2 (sequence is synthesized)
aaccaaggccttcgaagcgacttcgctccatggcccctaatcaagcctcaggtgggcctcctccagagccaggctgctgtgttgcggaccctgaaggctccgtggaagcagatgggcccg

SEQ ID NO: 745361 - DNA, 120 bp, Artificial Sequence
  ENSG00000204918_3 (sequence is synthesized)
cacagccagcccaacccgcaaaacccatcgcttacgtgaaacccttcagacggcagcccccagctcgcccagagtcaccccctcctgcagagagaggccggcgccggggaggaagccggc

SEQ ID NO: 745362 - DNA, 120 bp, Artificial Sequence
  ENSG00000204918_4 (sequence is synthesized)
ggccagggcgaggccgtggcagaagggctgggccccgcggggacgctggccagagacagggggcagaaggcttgatggcaccggacgtgcacatccaactggaccaccatggagagccag

SEQ ID NO: 745363 - DNA, 120 bp, Artificial Sequence
  ENSG00000204918_5 (sequence is synthesized)
gccaccagggggaaccggaaatcacggagaccgcagccttctccctttctgaaacaggtcctccgcctggaactgtgcaggaaggccctggccccgacgtggcgcaacctgagctggggt

SEQ ID NO: 745364 - DNA, 120 bp, Artificial Sequence
  ENSG00000204918_6 (sequence is synthesized)
ttcaggagccgcccgctgctcctgggcctcaggctgttgactggcaacccgtcttgaccctctatccctgcatcgggtttagggctctgggtgactcagcggttttacaagtcattcaaa

SEQ ID NO: 745365 - DNA, 120 bp, Artificial Sequence
  ENSG00000204918_7 (sequence is synthesized)
attgcgtattgaccactatctgccacccacgttgttcccagcctcccttccttccacctggacgttccccccagccccacttctgctccactcctcccccgactggacctgaagcctgag

SEQ ID NO: 745366 - DNA, 120 bp, Artificial Sequence
  ENSG00000204918_8 (sequence is synthesized)
cttcccctgaacttggagtacgcaacttacaacatgcaagctgccaaacaccctttctgtacaaggcgattggaatggaactgtcatgtacagtgaaagtacacgtcacgtttttcagcc

SEQ ID NO: 745367 - DNA, 120 bp, Artificial Sequence
  ENSG00000204918_9 (sequence is synthesized)
aagaagaagccaacccagacaacctggaagaagtgggatgcaacaaggatcactaagcatggaaattaggaaactgtattcttaagtccagagaagtacgattctggaaaaaggattgat

SEQ ID NO: 745368 - DNA, 120 bp, Artificial Sequence
  ENSG00000204918_10 (sequence is synthesized)
gacctagaattaaaattccagaagacactcatatagacatgtgggacatgcgaaaactcagaaggagctagaagttactaaagtgcttctctagtgcctggagacgatagactggctgaa

SEQ ID NO: 745369 - DNA, 120 bp, Artificial Sequence
  ENSG00000204918_11 (sequence is synthesized)
tataagagcaataaaaatctagactgacacatttttaagtctcaacgtgggtaccctttgggaaccactaaatgaattggaatagaaggtaaaatttcaaacagattgaggaaaaagggg

SEQ ID NO: 745370 - DNA, 120 bp, Artificial Sequence
  ENSG00000204918_12 (sequence is synthesized)
atcaaaggacatgtgacgaatcagacaaaaggtgttggggtgggggggggggcggttaacggaagcaaggagagtgcatgactcactggaaccgctaaaccaggaatcagtaatttgacg

SEQ ID NO: 745371 - DNA, 120 bp, Artificial Sequence
  ENSG00000204918_13 (sequence is synthesized)
gcagtgtccttggcttcctcctggctttaatgggaatattttgaatgtttcaccattaaccaagatgttggctgtaggtgtctcttagatgtttaagttgagttagttcccatcttttca

SEQ ID NO: 745372 - DNA, 120 bp, Artificial Sequence
  ENSG00000204918_14 (sequence is synthesized)
gagtttgataaatgttgtattatgaacttttgtattttgtattttattaggtaggctgttgttggctggttttcactcctttgtaaacgtccaaataaaatacagataactttttacatc

SEQ ID NO: 745373 - DNA, 120 bp, Artificial Sequence; identical to SEQ ID NO: 745358
  ENSG00000204919_0 (sequence is synthesized)

SEQ ID NO: 745374 - DNA, 120 bp, Artificial Sequence; identical to SEQ ID NO: 745359
  ENSG00000204919_1 (sequence is synthesized)

SEQ ID NO: 745375 - DNA, 120 bp, Artificial Sequence; identical to SEQ ID NO: 745360
  ENSG00000204919_2 (sequence is synthesized)

SEQ ID NO: 745376 - DNA, 120 bp, Artificial Sequence; identical to SEQ ID NO: 745361
  ENSG00000204919_3 (sequence is synthesized)

SEQ ID NO: 745377 - DNA, 120 bp, Artificial Sequence; identical to SEQ ID NO: 745362
  ENSG00000204919_4 (sequence is synthesized)

SEQ ID NO: 745378 - DNA, 120 bp, Artificial Sequence; identical to SEQ ID NO: 745363
  ENSG00000204919_5 (sequence is synthesized)

SEQ ID NO: 745379 - DNA, 120 bp, Artificial Sequence; identical to SEQ ID NO: 745364
  ENSG00000204919_6 (sequence is synthesized)

SEQ ID NO: 745380 - DNA, 120 bp, Artificial Sequence; identical to SEQ ID NO: 745365
  ENSG00000204919_7 (sequence is synthesized)

SEQ ID NO: 745381 - DNA, 120 bp, Artificial Sequence; identical to SEQ ID NO: 745366
  ENSG00000204919_8 (sequence is synthesized)

SEQ ID NO: 745382 - DNA, 120 bp, Artificial Sequence; identical to SEQ ID NO: 745367
  ENSG00000204919_9 (sequence is synthesized)

SEQ ID NO: 745383 - DNA, 120 bp, Artificial Sequence; identical to SEQ ID NO: 745368
  ENSG00000204919_10 (sequence is synthesized)

SEQ ID NO: 745384 - DNA, 120 bp, Artificial Sequence; identical to SEQ ID NO: 745369
  ENSG00000204919_11 (sequence is synthesized)

SEQ ID NO: 745385 - DNA, 120 bp, Artificial Sequence; identical to SEQ ID NO: 745370
  ENSG00000204919_12 (sequence is synthesized)

SEQ ID NO: 745386 - DNA, 120 bp, Artificial Sequence; identical to SEQ ID NO: 745371
  ENSG00000204919_13 (sequence is synthesized)

SEQ ID NO: 745387 - DNA, 120 bp, Artificial Sequence; identical to SEQ ID NO: 745372
  ENSG00000204919_14 (sequence is synthesized)

SEQ ID NO: 745388 - DNA, 120 bp, Artificial Sequence
  ENSG00000204920_0 (sequence is synthesized)
atcgacacttccggtctccgagcaggacactgctacttaacaaggtggtttgagccaaactgtggcacgtttcaggcaggattcctccttcattcaaactgcatcacccaggagtctgca

SEQ ID NO: 745389 - DNA, 120 bp, Artificial Sequence
  ENSG00000204920_1 (sequence is synthesized)
aattccccaaagtaggaggaaaaatgaccacattcaaggaggcagtgaccttcaaggatgtggctgtggtcttcactgaggaggagctggggctgctggaccctgcccagaggaagctgt

SEQ ID NO: 745390 - DNA, 120 bp, Artificial Sequence
  ENSG00000204920_2 (sequence is synthesized)
accgagatgtgatgctggagaacttcaggaacctgctctcagtggggcatcaaccgttccaccaagatacttgccacttcctaagggaagaaaagttttggatgatggggacagcaaccc

SEQ ID NO: 745391 - DNA, 120 bp, Artificial Sequence
  ENSG00000204920_3 (sequence is synthesized)
aaagagaagggaattcaggaggcaagatccaaactgagttggagtctgttccagaagcaggagcacatgaagagtggtcctgccagcaaatctgggaacaaattgcaaaagacttaacca

SEQ ID NO: 745392 - DNA, 120 bp, Artificial Sequence
  ENSG00000204920_4 (sequence is synthesized)
ggtctcaggactctatcataaataactctcagttctttgaaaatggtgatgtcccctcccaggttgaagcaggactacccacaattcatacaggacagaaaccttcccagggtgggaagt

SEQ ID NO: 745393 - DNA, 120 bp, Artificial Sequence
  ENSG00000204920_5 (sequence is synthesized)
gtaaacagtccatcagtgatgttcccatctttgatcttcctcagcagttatactcagaagagaagtcttatacatgtgatgagtgtggaaaaagcatctgttacatctcagctcttcatg

SEQ ID NO: 745394 - DNA, 120 bp, Artificial Sequence
  ENSG00000204920_6 (sequence is synthesized)
ttcatcagagagtccacgtgggagagaaactctttatgtgtgatgtgtgtggcaaggaatttagtcaaagctcacatctgcaaactcatcagagagtccacactggagagaaaccattca

SEQ ID NO: 745395 - DNA, 120 bp, Artificial Sequence
  ENSG00000204920_7 (sequence is synthesized)
aatgtgagcaatgtgggaaaggtttcagtcgtagatcagcacttaatgttcatcgtaaattacacacaggagagaaaccttacatttgtgaggcatgtgggaaggccttcattcatgatt

SEQ ID NO: 745396 - DNA, 120 bp, Artificial Sequence
  ENSG00000204920_8 (sequence is synthesized)
cccagcttaaggaacataagagaatccatactggggagaaaccattcaaatgtgatatatgtggtaagaccttctattttaggtcaagacttaagagccattccatggttcacacaggag

SEQ ID NO: 745397 - DNA, 120 bp, Artificial Sequence
  ENSG00000204920_9 (sequence is synthesized)
aaaaaccatttaggtgtgatacatgtgataagagctttcatcagagatcagcacttaataggcattgcatggtccacacaggagagaaaccgtacagatgtgagcagtgtggaaaaggct

SEQ ID NO: 745398 - DNA, 120 bp, Artificial Sequence
  ENSG00000204920_10 (sequence is synthesized)
tcctcatgccttttgaaccatcagcgagtccacagtggagaaaaaagcttcaaatgtgaagaatgtggaaagggattttatacaaattcacaactgtcttcccatcagagatcccacagt

SEQ ID NO: 745399 - DNA, 120 bp, Artificial Sequence
  ENSG00000204920_11 (sequence is synthesized)
ggtgaaaagccatataaatgtgaggagtgtgggaagggctatgttactaagtttaatcttgacttgcaccagagggtccacacgggagagagaccttataattgtaaggaatgtgggaag

SEQ ID NO: 745400 - DNA, 120 bp, Artificial Sequence
  ENSG00000204920_12 (sequence is synthesized)
aactttagccgggcctcaagtattttgaatcataagagactccactgccagaaaaaaccattcaaatgtgaggactgtggaaagaggcttgtacacaggacataccgtaaagaccagccg

SEQ ID NO: 745401 - DNA, 120 bp, Artificial Sequence
  ENSG00000204920_13 (sequence is synthesized)
agagactatagtggggaaaacccatccaaatgtgaggattgtgggagacgctacaagaggcgcttgaatctggatatacttttatcattatttctaaatgacacataattgttcatattt

SEQ ID NO: 745402 - DNA, 120 bp, Artificial Sequence
  ENSG00000204920_14 (sequence is synthesized)
atggggtacaacgtgctattttaatgtgtgcatacaatttatagtgatccaatcagtgtaattggtgtatctgttacctcaaacatttaccatttctttgtgttggaaaattcaaaatcc

SEQ ID NO: 745403 - DNA, 120 bp, Artificial Sequence
  ENSG00000204920_15 (sequence is synthesized)
atttgagaggagttggtagacagcaagggaagggtccctggagacccccagccaaacgggtcagtgtctcatccccacataacacaaaaagcagcctggggaagacaatcaagctacagg

SEQ ID NO: 745404 - DNA, 120 bp, Artificial Sequence
  ENSG00000204920_16 (sequence is synthesized)
cactgataagggaactagcacaggggattgtgcctggagacatgcccatggctgcacagatagaagaacctccagcccattcaggtaaaaactcgcacaaacctccggctcactcagtta

SEQ ID NO: 745405 - DNA, 120 bp, Artificial Sequence
  ENSG00000204920_17 (sequence is synthesized)
agggaacaagaccagacacagaaatgcctttgtcctttgtataatcagcaggctccgaggaaaaagtttcttcttttgtgggcatgaacacagtgggcttcagtaggttcaggttggcac

SEQ ID NO: 745406 - DNA, 120 bp, Artificial Sequence
  ENSG00000204920_18 (sequence is synthesized)
tttcttttgtggaaaaggaaaagcccagcctctgtaaatcatcacttcagctcctgattggtcccaggccaagctgaatagcccttaggaataatcacttcaactcctgattggtcccgg

SEQ ID NO: 745407 - DNA, 120 bp, Artificial Sequence
  ENSG00000204920_19 (sequence is synthesized)
gccaagctgaatagcccttatgaatcatcacttcggttcctgattggtcccgggccaaggtcccagaccaagctgaatcacgctttctccaagacagcccgcaggctaagtgcattcctt

SEQ ID NO: 745408 - DNA, 120 bp, Artificial Sequence
  ENSG00000204920_20 (sequence is synthesized)
ccccttcccagtccataaaaaccccggaccccagcctcatactgggcaacttatttggatccccatctccactgtggagagcttttttctttcacttattaaacttttactccaatttca

SEQ ID NO: 745409 - DNA, 120 bp, Artificial Sequence
  ENSG00000204920_21 (sequence is synthesized)
ctgctacttaacaaggtggtttgagccaagtatgtgtcttgcgggtctttgcgaaagtgaaccagttattaggggcgcctaacgacctggggggtcaactaaggggactgtggcacgttt

SEQ ID NO: 745410 - DNA, 120 bp, Artificial Sequence
  ENSG00000204920_22 (sequence is synthesized)
ccagacgcctgtggcatcatcgacacttccggtctccgagcaggacactgctacttaacaaggtggtttgagccaagtatgtgtcttgcgggtctttgcgaaagtgaaccagttattagg

SEQ ID NO: 745411 - DNA, 120 bp, Artificial Sequence
  ENSG00000204920_23 (sequence is synthesized)
ggcgcctaacgacctggggggtcaactaagggggtaagaagccctggagaagacctgagactgtggcacgtttcaggcaggattcctccttcattcaaactgcatcacccaggagtctgc

SEQ ID NO: 745412 - DNA, 120 bp, Artificial Sequence
  ENSG00000204920_24 (sequence is synthesized)
ccaaagtaggaggaaaaatgaccacattcaagattaccaagactgtgggaatacttataacctgctcttggtcatgataaagagaagcaaagtacttgtattctgttcaaagattatgga

SEQ ID NO: 745413 - DNA, 120 bp, Artificial Sequence
  ENSG00000204920_25 (sequence is synthesized)
gttgactgcatttggtttttggttttgctttgttttgttttgttaccattatttattttatggagtatgaaaattagtagaaatgaacagtgctcccacttccttacctcccctctctca

SEQ ID NO: 745414 - DNA, 120 bp, Artificial Sequence
  ENSG00000204920_26 (sequence is synthesized)
aattatctgtttttatcttctctgctgttcgtcatgtacatttgtaactgtatttgtattgatgatatacatctaattgtaaactgtgctctttttatatgttatataatcttccatttt

SEQ ID NO: 745415 - DNA, 120 bp, Artificial Sequence
  ENSG00000204920_27 (sequence is synthesized)
aggcacttgacttgatatgcatcagagggtccatatggcagagaaaccgtggaagtttggggagattgccatgtgcttcagttatgcctcaaagtcttcaacttcattggactgttcact

SEQ ID NO: 745416 - DNA, 120 bp, Artificial Sequence
  ENSG00000204920_28 (sequence is synthesized)
ttcaagggaaaccttagtaaggtgatatctgtgatagtcttctcaactacaagctcatctgagagttcacaatgggagaagcattaaaaatttgatacatgtgactgtggcacgtttcag

SEQ ID NO: 745417 - DNA, 120 bp, Artificial Sequence
  ENSG00000204920_29 (sequence is synthesized)
aattccccaaagtaggaggaaaaatgaccacattcaaggtgaggggggcgtgcctctctcgctgttaaaattccatgtcactactcatattttcatgtgtttttctctgtcatgagaaga

SEQ ID NO: 745418 - DNA, 120 bp, Artificial Sequence
  ENSG00000204922_0 (sequence is synthesized)
agtgagaccgcgcggcaacagcttgcggctgcggggagctcccgtgggcgctccgctggctgtgcaggcggccatggattccttgcggaaaatgctgatctcagtcgcaatgctgggcgc

SEQ ID NO: 745419 - DNA, 120 bp, Artificial Sequence
  ENSG00000204922_1 (sequence is synthesized)
aggggctggcgtgggctacgcgctcctcgttatcgtgaccccgggagagcggcggaagcaggaaatgctaaaggagatgccactgcaggacccaaggagcagggaggaggcggccaggac

SEQ ID NO: 745420 - DNA, 120 bp, Artificial Sequence
  ENSG00000204922_2 (sequence is synthesized)
ccagcagctattgctggccactctgcaggaggcagcgaccacgcaggagaacgtggcctggaggaagaactggatggttggcggcgaaggcggcgccggcgggaggtcaccgtgagaccg

SEQ ID NO: 745421 - DNA, 120 bp, Artificial Sequence
  ENSG00000204922_3 (sequence is synthesized)
gacttgcctccgtgggcgccggaccttggcttgggcgcaggaatccgaggcagcctttctccttcgtgggcccagcggagagtccggaccgagataccatgccaggactctccggggtcc

SEQ ID NO: 745422 - DNA, 120 bp, Artificial Sequence
  ENSG00000204922_4 (sequence is synthesized)
tgtgagctgccgtcgggtgagcacgtttcccccaaaccctggactgactgctttaaggtccgcaaggcgggccagggccgagacgcgagtcggatgtggtgaactgaaagaaccaataaa

SEQ ID NO: 745423 - DNA, 120 bp, Artificial Sequence
  ENSG00000204922_5 (sequence is synthesized)
atcatgttcctccacccagaatgagccctgcagtcgacacctaccaatgcttagagacgcgtggtcggtgctgggggcgcggcctggagctgctgcctgtcccaccccaccagaagaggc

SEQ ID NO: 745424 - DNA, 85 bp, Artificial Sequence
  ENSG00000204922_6 (sequence is synthesized)
ggcctggagctgctgcctgtcccaccccaccagaagaggctgatcccgataggtatctgaccaaatgtcacccaggctggagtgc

SEQ ID NO: 745425 - DNA, 120 bp, Artificial Sequence
  ENSG00000204922_7 (sequence is synthesized)
attctcctgcctcagcttcccgagtagccgggatcacaagtgcgcgccaccaagcccagctaacttttgtgtttttagttgagacagggttcaccatgttggctagactggtctcgaact

SEQ ID NO: 745426 - DNA, 69 bp, Artificial Sequence
  ENSG00000204922_8 (sequence is synthesized)
tctcgaactccagaccaccacctcgccctgccgcggccacattttttcttttttttgagatggagtctt

SEQ ID NO: 745427 - DNA, 86 bp, Artificial Sequence
  ENSG00000204922_9 (sequence is synthesized)
gcctcccatgtagctgggattacaggcgtccgcaaccacgcccggctgatattagtagttttagtagaggcgggtttcaccatgag

SEQ ID NO: 745428 - DNA, 120 bp, Artificial Sequence
  ENSG00000204922_10 (sequence is synthesized)
gtgagccactgcgcccggccaaccacattttcaaaacaggtcatgtggtgtcaggttggagtgtacttccagggataaccgtgggacattcttgaaatctgaactatcctgggaagtctt

SEQ ID NO: 745429 - DNA, 120 bp, Artificial Sequence
  ENSG00000204922_11 (sequence is synthesized)
gaagtaatggatgcctatagtggacactcaggactcctgtccttggagcgagattggaggggcatctagcacttaacatatgccacaatgctttctgtggccattatttaacctctggtt

SEQ ID NO: 745430 - DNA, 120 bp, Artificial Sequence
  ENSG00000204922_12 (sequence is synthesized)
aaacaagcttaggaggctgacttactagtagtaaaaggagtgtgctttgagtcacagatcctggttgaactccagcatgttacaaacctcagccctgttctatgaaaggtcataactacg

SEQ ID NO: 745431 - DNA, 120 bp, Artificial Sequence
  ENSG00000204922_13 (sequence is synthesized)
aggattattgtaaaacattaatttagaaatgtaaagtggtccccaatctctggatctggtcaggatttattggagctgccactgaggggattaaataagtggggtcaaagccccacagcc

SEQ ID NO: 745432 - DNA, 120 bp, Artificial Sequence
  ENSG00000204922_14 (sequence is synthesized)
tagtcaaccaagttgctcctcttttgtctatcctgtggttcccaagcaagactgcaattgaaaaaaaggctgctgttattaaagtcagaacaccaaataaagctttttttttttttttga

SEQ ID NO: 745433 - DNA, 120 bp, Artificial Sequence
  ENSG00000204922_15 (sequence is synthesized)
attaaagccctgtgggccaagagttgtgataaccaacttggaatttcctgactcctatgcttactgatttttcccaacctgagttgaggggatggagagggatgtgtatgtgtgtagatg

SEQ ID NO: 745434 - DNA, 120 bp, Artificial Sequence
  ENSG00000204922_16 (sequence is synthesized)
ccctccatgcgctgtgttgaaaacgcgcgggtgactgcaggaaaccacagagcacagctcgggcctctactgatcgggaaacgtcggaagacagaaaaatgggcaatcataaaacccacg

SEQ ID NO: 745435 - DNA, 120 bp, Artificial Sequence
  ENSG00000204922_17 (sequence is synthesized)
gcaaccatgaagacacgcactctccccctagcaatcccaccccggaattgaggacacagggtccccgcgctcagcccttggtgccagcacttcttggacacctcaaccccctcagctaaa

SEQ ID NO: 745436 - DNA, 120 bp, Artificial Sequence
  ENSG00000204923_0 (sequence is synthesized)
aggtgggcgggatgcgaagagctatggggaaggattcgaattccggtggatttaaatcgcgggaggagaagctaccgcggcctaaagacctctgttgaacacagactgcagttccagcca

SEQ ID NO: 745437 - DNA, 120 bp, Artificial Sequence
  ENSG00000204923_1 (sequence is synthesized)
ccacagctaatctggatcatgaatgggagccaccgtggtcttggcaagtccgaaaacatagctgagtagctcgtctagaaaagagatttgtgttcagctgagttaaaagaagtatttacc

SEQ ID NO: 745438 - DNA, 120 bp, Artificial Sequence
  ENSG00000204923_2 (sequence is synthesized)
tcaaacctctcctcttgcacaaccaacccccgttataaaaggaagtgcaaaatggaataaactgattttaagtgaatacaagctgtctttatatacaaaagtaactcaaggatggtgatg

SEQ ID NO: 745439 - DNA, 120 bp, Artificial Sequence
  ENSG00000204923_3 (sequence is synthesized)
tacccagtcatgctttcaactgatttgggaagcctacaccattcaccttaggttacatatgaggataacttaaaacattaagctatgcataaaaactccaagagaaacaataatttaaga

SEQ ID NO: 745440 - DNA, 120 bp, Artificial Sequence
  ENSG00000204923_4 (sequence is synthesized)
gtttctcacacagaagcgaactctgtggatgctgagaaggaaaaaaatgagagtcaaaacaacttttttgaactgctgcctgcagaaatcacttttaaaattttcagtcagctggacatt

SEQ ID NO: 745441 - DNA, 120 bp, Artificial Sequence
  ENSG00000204923_5 (sequence is synthesized)
cggagtctgtgcagggcttcattgacatgcaggagctggaatgacacaataagaaacagtgactctttatggaaacctcactgcatgactgtaagagctgtgtgccgaagagaaatagat

SEQ ID NO: 745442 - DNA, 120 bp, Artificial Sequence
  ENSG00000204923_6 (sequence is synthesized)
gatgatctagaaagtggttattcctggagggtgatactgctgaggaattaccagaagagtaaagtgaaacacgaatggctaagtggcagatacagcaacatttgttctcccattagccta

SEQ ID NO: 745443 - DNA, 120 bp, Artificial Sequence
  ENSG00000204923_7 (sequence is synthesized)
ccagaaaaaatcatgtacccaatggatgcagatacatggggggaaattctagaagcagaactggaaagataaggggaaaaaaaatcacaaatctcaggtctttgaaagtttaaaacttaa

SEQ ID NO: 745444 - DNA, 120 bp, Artificial Sequence
  ENSG00000204923_8 (sequence is synthesized)
atgactcttaggttgcaaaagcgatatctttattcgttcattttgttgttcacctttttaaaagaaaatgaaatggaactattataaaagtaaagctttatttttgttttgcactttagt

SEQ ID NO: 745445 - DNA, 120 bp, Artificial Sequence
  ENSG00000204923_9 (sequence is synthesized)
tagtaaaatttttctggttttattgtaatgtggaaaaatcatgaaatgttatttttataagaaataatatactgatagagtgatttccaaatacaatgtttcatgtatttgtgttaatat

SEQ ID NO: 745446 - DNA, 120 bp, Artificial Sequence
  ENSG00000204923_10 (sequence is synthesized)
gcaatactaaatgtaagagtgatttgtatgttcagcttaatgataattcaaaatttcaggaagccactttaaactgacttaaagattcattaagtggtggttataactaggctcatggga

SEQ ID NO: 745447 - DNA, 120 bp, Artificial Sequence
  ENSG00000204923_11 (sequence is synthesized)
agactagctaagtgaaattaatagcaatacatttaaattaatacattgacattttaatgactttaacatttctatttcagtggaatcagattgaaatgtcaaatagtgaaactattttta

SEQ ID NO: 745448 - DNA, 120 bp, Artificial Sequence
  ENSG00000204923_12 (sequence is synthesized)
atgtgttaagcctgtggtttagttttaagttaatgtcatctcagggctaaagtttgtccaattgagattcccattaattttatataaacctggaacggctctcaggagctgaaagtaagt

SEQ ID NO: 745449 - DNA, 120 bp, Artificial Sequence
  ENSG00000204923_13 (sequence is synthesized)
ggaaagtttccagaacactttaccatcagaatgccacactagcctggtaaaactctctttctgacagccttatagcaccatctagtgtgctattcttagatagcaagacaaaggactttc

SEQ ID NO: 745450 - DNA, 120 bp, Artificial Sequence
  ENSG00000204923_14 (sequence is synthesized)
agctcctttttgttttctccatattaaaaagaaaactgttattctaaagaatccttaacacttgtctttgttaaagtttataactttttaggaacctttattttaacttttaaaaacttt

SEQ ID NO: 745451 - DNA, 120 bp, Artificial Sequence
  ENSG00000204923_15 (sequence is synthesized)
tgtttctcttttttcataaaaacagattatatgctactcactataacaaattgtttattctgaatctgtggttaccaccatagtaaaaaagtgtctacaaactgctttagttagtgtggg

SEQ ID NO: 745452 - DNA, 120 bp, Artificial Sequence
  ENSG00000204923_16 (sequence is synthesized)
gttttcttcttaaaaactgttctctatagcattaaatataagaatccaggaaaccaatatttaacaaataggcaaatattagaaagatgccccactatatgcaaattctgtatgttgaat

SEQ ID NO: 745453 - DNA, 120 bp, Artificial Sequence
  ENSG00000204923_17 (sequence is synthesized)
caagcagtagataattaattgtctcctactatcttcttagagttggaagagtccttgaaaatcaggcagtcaagtgtccaggactattcagtaattttctcaataggaacactgtcagtc

SEQ ID NO: 745454 - DNA, 120 bp, Artificial Sequence
  ENSG00000204923_18 (sequence is synthesized)
agccagcccaagctgaaatcctgtacttctactaatagcatctctgttatgtcacagaacagtccagttgtagtctaggcttgcactgaagaccacctctctgtaacgtttgccttctag

SEQ ID NO: 745455 - DNA, 120 bp, Artificial Sequence
  ENSG00000204923_19 (sequence is synthesized)
ccccacttccaccctctagaaccaggctgattcagtccttcctgtctatgattgccagatatttgaagactgatagcctgtctcttcctatgtcttctctccaattccactgatgatcat

SEQ ID NO: 745456 - DNA, 120 bp, Artificial Sequence
  ENSG00000204923_20 (sequence is synthesized)
ctctccaattccactgatgatcatagagtataatttctagacccaacaacattctcttctgcccatttactcttaacaaaagaaaggggctgtgcgccatggctcacgcctgtaatccca

SEQ ID NO: 745457 - DNA, 120 bp, Artificial Sequence
  ENSG00000204923_21 (sequence is synthesized)
caaagtatgggaaaaattaaagctataagcattttgctgaatagcatctgtgtacaatagtaaatgtacacatatatttttagctgtttttttgtaatggatgtttattatttttgtcca

SEQ ID NO: 745458 - DNA, 120 bp, Artificial Sequence
  ENSG00000204923_22 (sequence is synthesized)
gcccccttacaatctatcatcatcatctgttaatagaagttatcctaattagggagactcacccttctcacttccaaccaagtgtgtggttttttttggccggggtggggggcagttttt

SEQ ID NO: 745459 - DNA, 88 bp, Artificial Sequence
  ENSG00000204923_23 (sequence is synthesized)
cgcacccagctgattatcctgtttttcccagcctccgtgtttagtccaaggatggaaacatgacccaatccccccttttcataagttg

SEQ ID NO: 745460 - DNA, 120 bp, Artificial Sequence
  ENSG00000204923_24 (sequence is synthesized)
aggatggaaacatgacccaatccccccttttcataagttggaagaaagaagccctttcctctttgctgatgaaactgttccctgccacacaaagaaaacggatcttggccgggcgcggtg

SEQ ID NO: 745461 - DNA, 120 bp, Artificial Sequence
  ENSG00000204923_25 (sequence is synthesized)
aaaaaaaaaaaaaagaaaacgaaaacggatcttaagtaagagaatgtggagccaccaggggaaagaacaattgcagggaaagaggcctgattatattccagaccctggtcccagccattc

SEQ ID NO: 745462 - DNA, 120 bp, Artificial Sequence
  ENSG00000204923_26 (sequence is synthesized)
agaggcctgattatattccagaccctggtcccagccattccttatctgcttacctaaattaattcaaattgagtttcaccatcatactgggacccccacctgatgtggtttcgttgccca

SEQ ID NO: 745463 - DNA, 120 bp, Artificial Sequence
  ENSG00000204923_27 (sequence is synthesized)
tttttcaaatatgtattatttgtggcttacattaacatcttagatttcactctgacttcctcaccagtcagtcttaatctgctataatatggccatcactccatatggttgaaactgttg

SEQ ID NO: 745464 - DNA, 120 bp, Artificial Sequence
  ENSG00000204923_28 (sequence is synthesized)
gtatccaaattacaagtgacttaatgtctaaatccactggatgcattctacttgttaatatatttgacacacataaacactcacactgacacacataagtacttcttaaaactctctcct

SEQ ID NO: 745465 - DNA, 120 bp, Artificial Sequence
  ENSG00000204923_29 (sequence is synthesized)
ccatgggttggaactatagtctcttggacttttctttccctactctaacccgtcttctcagtttcctccaaagactcgctttccttcacctactcattacatgttagtgttcccccaaag

SEQ ID NO: 745466 - DNA, 120 bp, Artificial Sequence
  ENSG00000204923_30 (sequence is synthesized)
ttccacctgttgtcatctcgtctctatactctaacatccttggtgatcccatctacaactcctatgtcagctaccattgttggtgctaatgccgtctatgtccgtgtcccaacatcagat

SEQ ID NO: 745467 - DNA, 120 bp, Artificial Sequence
  ENSG00000204923_31 (sequence is synthesized)
tgtcccaacatcagatctccatgagatgttccagaaatacatatgctattatcttttggatttttatccaaagatagtataagtatatatatatatatataaaatatttgatatatccaa

SEQ ID NO: 745468 - DNA, 120 bp, Artificial Sequence
  ENSG00000204923_32 (sequence is synthesized)
agcacctgaatcaaaacttaccatctcataaaagtagttcttcctccagttcctatctcagtgaatggcatgtcctgttagaaaatcaccatattttacttttctccatcattctccaag

SEQ ID NO: 745469 - DNA, 120 bp, Artificial Sequence
  ENSG00000204923_33 (sequence is synthesized)
tccagccgagtcaattcttacttgattttatcatccaaatatctaagtaattcacctcttccccatctttatctctgcctcattacttaattcttgtccttatttgacattgggatttct

SEQ ID NO: 745470 - DNA, 120 bp, Artificial Sequence
  ENSG00000204923_34 (sequence is synthesized)
aaaataacctcttactggtgttcctgcctccagttccttccttttactgttagcagtgtagtctttgttaaaccccaaatttagcacgtcaccctaacttaaactcctgactgcatacag

SEQ ID NO: 745471 - DNA, 120 bp, Artificial Sequence
  ENSG00000204923_35 (sequence is synthesized)
gtagaaatcaaaattccccactaaagcccatagggcctttaatgatgtggtctggcctacctctccagcctgttctctaaccactgtcccaccctatatctttctgttcagtcttacaaa

SEQ ID NO: 745472 - DNA, 120 bp, Artificial Sequence
  ENSG00000204923_36 (sequence is synthesized)
actatttcataaaaattttctcacttctctgcctttgcacaggctgtttgatatacctggagtaatccccaccattgattcttttcttggcaaaaatctattgtaaaacttatcatcttg

SEQ ID NO: 745473 - DNA, 120 bp, Artificial Sequence
  ENSG00000204923_37 (sequence is synthesized)
gcctggaaacaatccataacttctactgttctggattaagtgactttttagatgttcttgtagttctttgtatagacctctctcaaaactgtcatatgacattaaattgtctattttatt

SEQ ID NO: 745474 - DNA, 120 bp, Artificial Sequence
  ENSG00000204923_38 (sequence is synthesized)
tgtgtgtttgcccctttacactgtgaacttcttaatggcagggaccattttttatttatttttgtgtcttcaaaacctggcacacactagatgctctataaagatttgttaaattatttc

SEQ ID NO: 745475 - DNA, 120 bp, Artificial Sequence
  ENSG00000204923_39 (sequence is synthesized)
tatagttatttattttaatcctacacagaatgtataaaaataatttactatattgttagtgaagaagattgtatcaaaatgcagtatacaatccttaaggtatgtgggatgcttgatagt

SEQ ID NO: 745476 - DNA, 120 bp, Artificial Sequence
  ENSG00000204923_40 (sequence is synthesized)
aatacaaatgtatgaataattgttccagtcttctccaaacctgtaagagggaaataggaaaataaaaatgttttgttttattgttttgaactcttgaaaataaacttaacctcaaaaata

SEQ ID NO: 745477 - DNA, 120 bp, Artificial Sequence
  ENSG00000204928_0 (sequence is synthesized)
ggctgcacggaaggctggagaccacagggtcaactttctgctgatggaggaccctgagaaaaagctgaatcagaagagtgatggcaaaccccggaaagtacgatttaaaatctcctcctc

SEQ ID NO: 745478 - DNA, 120 bp, Artificial Sequence
  ENSG00000204928_1 (sequence is synthesized)
ctacagcggtcgagtattgaagcaggtctttgaggatgggcaggaattagagtcaccaaaggaggaataccctcacagttttctgcaagagtctcttgaaacaatggatggtgtttatgg

SEQ ID NO: 745479 - DNA, 120 bp, Artificial Sequence
  ENSG00000204928_2 (sequence is synthesized)
gtctggggaagtccccaggccccagatgtgctcccctaagctgactgctcagaggatcagtgtgtttagagagggtaatgcctacaccttggcaggcggccagcctcggttcaacgatta

SEQ ID NO: 745480 - DNA, 120 bp, Artificial Sequence
  ENSG00000204928_3 (sequence is synthesized)
caaggcgaatgaccataagcccctacctattatagattttggaaagataatcatctacactaataacctgaaaatcattcgaaccccaatggacaagagagattttgtgaggaaaattct

SEQ ID NO: 745481 - DNA, 120 bp, Artificial Sequence
  ENSG00000204928_4 (sequence is synthesized)
ccagaaggaagaggaggctgaggaagagtctctgatgaacaaagaagaaagctatggaggcagggaccagcacgatagacctttggtggaggcagaaagcacattaccccaaaaccggta

SEQ ID NO: 745482 - DNA, 120 bp, Artificial Sequence
  ENSG00000204928_5 (sequence is synthesized)
tacacaggaaggggatattcccgaggacagctgttttcactgccgagggtcgggcagtgccacctgctctctgtgccacggcagcaagttctcgatgctggccaacagatttaaggagtc

SEQ ID NO: 745483 - DNA, 120 bp, Artificial Sequence
  ENSG00000204928_6 (sequence is synthesized)
ctatcgggccctgaggtgccctgcctgcaatgagaatggcctacagccttgccagatttgcaatcaatagcccgtggcttttgcatgtccactgttatcttaccctccctaaagttattt

SEQ ID NO: 745484 - DNA, 120 bp, Artificial Sequence
  ENSG00000204928_7 (sequence is synthesized)
ctaataaaccgcccccttctcctcctcctgcctctcccaacaaggaggccacagtggctgcagtcactcccactgctggcaaaactcaattatctgatgacattttgtgaggccggtaac

SEQ ID NO: 745485 - DNA, 120 bp, Artificial Sequence
  ENSG00000204928_8 (sequence is synthesized)
tggtgtgagtgtatctcacttgacttagctcagttttcttcttgcttcagtgagcaaatacatgtacacttcaggcatcaggttgggagttattttgcaaaattatgtggtgagaaagga

SEQ ID NO: 745486 - DNA, 120 bp, Artificial Sequence
  ENSG00000204928_9 (sequence is synthesized)
gtaaaaaaggcaggtttctgatgaactgatttcttgttgcttataatgcatctcatgtgattattagtcaaactgaatttctgattaagcagaagaggaaacggacagccaacgctgaac

SEQ ID NO: 745487 - DNA, 120 bp, Artificial Sequence
  ENSG00000204928_10 (sequence is synthesized)
gcactagcaggccacagcaagcaaaatgggatgttcactgtggagacaggcaagccaaggagccttccctttcaaagtcctgaacctcttccatgtggtgtgtttggataatatttatgc

SEQ ID NO: 745488 - DNA, 120 bp, Artificial Sequence
  ENSG00000204928_11 (sequence is synthesized)
agacagtgagcaatactatttcttaagtcaagatgagataagacatttttgtgtgcctctaactactgaggttataagccaagtcaaagttatttatgataaatttggtgctcaaatatg

SEQ ID NO: 745489 - DNA, 120 bp, Artificial Sequence
  ENSG00000204928_12 (sequence is synthesized)
tgtgtatgatataacttcttcgagcccctgaattactaccaaataaataaatccactttaagtctagaacctagccatgatctcttcataaaggactgcaggtattttatagattaccta

SEQ ID NO: 745490 - DNA, 120 bp, Artificial Sequence
  ENSG00000204928_13 (sequence is synthesized)
ctggaaatctctaaaagaaaaaaattaaccaaggctgatttttagcagtaatgtttctactatccatgaatatgcatagtaaggatgattctttcctcttgaggttggttataaaattag

SEQ ID NO: 745491 - DNA, 120 bp, Artificial Sequence
  ENSG00000204928_14 (sequence is synthesized)
aacatacttttgttaatgaacttttatagctctaacacccactccccaagccccttaagaataacactgcaaaatttatctcttgagacctgctgcattctgtgataataattttgattt

SEQ ID NO: 745492 - DNA, 120 bp, Artificial Sequence
  ENSG00000204928_15 (sequence is synthesized)
cataacttaataatttctcaagatttgtttgttattctctaatattcagcgtttaacataatttaacaatggaatgcttttcaggcaatataaataattctaataaaaaagactaaaata

SEQ ID NO: 745493 - DNA, 120 bp, Artificial Sequence
  ENSG00000204928_16 (sequence is synthesized)
cccacaaggtaaagtagtgcagcctgtttagttactttgacattgttctcaatttcaaatgaagcagataggaattctggattgtggtcacgacctgtaaaaaccgtactggggcagcat

SEQ ID NO: 745494 - DNA, 120 bp, Artificial Sequence
  ENSG00000204930_0 (sequence is synthesized)
agtcaagaccctccctcattggccctagaccccttgtccctacccacttccccaggtcatgccagagctcctttgcgaagttctgcagatatccaagtccccttcccagatagcagactt

SEQ ID NO: 745495 - DNA, 120 bp, Artificial Sequence
  ENSG00000204930_1 (sequence is synthesized)
tcaggcaaggcatttcaacactcagcacctgcagctgaggcacatccacaaccaagagcctttcctccctgaggatcaacacctccccctgccatcctaagtcaaggtcttgacctaagg

SEQ ID NO: 745496 - DNA, 120 bp, Artificial Sequence
  ENSG00000204930_2 (sequence is synthesized)
acttgtaacaaccaagccaaagcccagaggatggaagcacatgagatcatagaagagcctcatatcaccatggatgcagagaagcaccccccttcaaaggacccctctgctgaggactta

SEQ ID NO: 745497 - DNA, 120 bp, Artificial Sequence
  ENSG00000204930_3 (sequence is synthesized)
caggagaaccatatctctgaaagcttcttgaagccttccacctctgagaccccgttagagccccatacctctgaatcccctttggtgccatccccttcccagatccccttagaggcccat

SEQ ID NO: 745498 - DNA, 120 bp, Artificial Sequence
  ENSG00000204930_4 (sequence is synthesized)
tcccctgaaacccatcaggagccttccatctctgagactccttcagagacccctacctatgaggcttcattggatagtcccatctcagtggtgccagagaaacaccttactcttcctccc

SEQ ID NO: 745499 - DNA, 120 bp, Artificial Sequence
  ENSG00000204930_5 (sequence is synthesized)
caatcacgagactatgtctgtctgtcttcttctgatactctgaaggaagacctctcctctgagtcttcttccaatgaggtcccatggacaaggaggtctacccatctctctgaatctgag

SEQ ID NO: 745500 - DNA, 120 bp, Artificial Sequence
  ENSG00000204930_6 (sequence is synthesized)
agccttccagaacactgtctttcaggcccttcatcccaggtccaagtggacacaaccgaaaagcaggaggaagaagcaggagaggttgaaaagggagtagatgccagtgacagcactgct

SEQ ID NO: 745501 - DNA, 120 bp, Artificial Sequence
  ENSG00000204930_7 (sequence is synthesized)
cacacagcccaacctggacaccaactaggtaacacagcccgcccagtgttccctgctaggcagacagagctggtggaagtggctaaggcaatgcatagagaggagtttggtgctcaagtg

SEQ ID NO: 745502 - DNA, 120 bp, Artificial Sequence
  ENSG00000204930_8 (sequence is synthesized)
aacaatcttttccagtgggagaaggatgcagccctgaatgccatccagacaggtctctacattggctggcgctgcccccattacctatgggactgtttccggattggggatgagtccaga

SEQ ID NO: 745503 - DNA, 120 bp, Artificial Sequence
  ENSG00000204930_9 (sequence is synthesized)
tgcttttgtggacacttgttgagagagcaccggatcatctcagacatatcggtgccctgcaaggtaagccagtgccgctgcttcatgttctgctttatcccatcacgcccagaggaggtg

SEQ ID NO: 745504 - DNA, 120 bp, Artificial Sequence
  ENSG00000204930_10 (sequence is synthesized)
ggtgagttctggctcaagagacgggccacctttgaccccaaggcctggagggcccaatgtcgctgcaaacacagccacgaagaacatgcagccactgggccccatccctgcaggcatcat

SEQ ID NO: 745505 - DNA, 120 bp, Artificial Sequence
  ENSG00000204930_11 (sequence is synthesized)
ggctgttgctgcggctgttttgagtctaatttcctctgtgcggcctgtgaccggcgctgggaggaacacgagactttctttgacacccagaagacccggcaacgaggaggaaggcctcgc

SEQ ID NO: 745506 - DNA, 120 bp, Artificial Sequence
  ENSG00000204930_12 (sequence is synthesized)
gggacagacactgtcagcaactggcacaggcctttgtgagtctggcccagatcagcaataaaagaggagtcattggaacctgacttggctctatatggggcaggtagatcccagcccagg

SEQ ID NO: 745507 - DNA, 120 bp, Artificial Sequence
  ENSG00000204930_13 (sequence is synthesized)
gagagactgcctaataacttagagttgacacctattagacacaggagaaagcctggatctggccatctgcctccatcacactcacattcaagctgcctgttgaaggaaagtggcttcaag

SEQ ID NO: 745508 - DNA, 120 bp, Artificial Sequence
  ENSG00000204930_14 (sequence is synthesized)
aaagactgaaaagtgtccattgggttttgcaattagaagatctttgggaacatcggagagtgcagtttcacactggtgcagtggaggcaggagtcaaacagcagtgagtttcaaggagtc

SEQ ID NO: 745509 - DNA, 120 bp, Artificial Sequence
  ENSG00000204930_15 (sequence is synthesized)
tcttaaagaagcttggatgaaaagtacaaaagtaaagtcagacaatatccagagggagttgtggagtcaaggaagtacttttgtaggaaggaaaaggggaagaggccagtagactaaagg

SEQ ID NO: 745510 - DNA, 120 bp, Artificial Sequence
  ENSG00000204930_16 (sequence is synthesized)
accttgaaggacccagaagagagagaagagatgcctggtgagacaagatcccagagatggaggaaagggatgaggtcaaagcagaggtgaagggattttctctggacaggagaaacacca

SEQ ID NO: 745511 - DNA, 120 bp, Artificial Sequence
  ENSG00000204930_17 (sequence is synthesized)
cttcctatgaccaagacgaaggaagaggatggagccttcctagagtttcagggaacaagaacctgtggaagttcccctctgatggcttctatatgccctgtgaagtaggagataaggcca

SEQ ID NO: 745512 - DNA, 120 bp, Artificial Sequence
  ENSG00000204930_18 (sequence is synthesized)
atggctggggtccaggggaagagggataagagtagggagcaggagacaagaagagaaaggggaaggtttgggaaggctaatgtagggaactggagaaaaacctcatcagtgggtagttca

SEQ ID NO: 745513 - DNA, 120 bp, Artificial Sequence
  ENSG00000204930_19 (sequence is synthesized)
ggattcgggcacagttggaagtgagaacctagttagagaagcagagaatccaaatatttaatgggttgatgatgtgagggtgtcagggaggaagatcaggaaaactaagcaaaagaaggc

SEQ ID NO: 745514 - DNA, 120 bp, Artificial Sequence
  ENSG00000204930_20 (sequence is synthesized)
atgaggatgtgaagggagcatacagcaccaatagggaaagaaagtgatgccaggaggcaaatgacagattgaaaaagggagcagtcaaaggaagagaagtctctaatgaggtacagtagc

SEQ ID NO: 745515 - DNA, 120 bp, Artificial Sequence
  ENSG00000204930_21 (sequence is synthesized)
agacgtaggggcaggggttggagtacaagagacagtgttcagaggctgcagagcataacatctttcagatgagggcaagtgaaggtgataagtgcttgaagtagagaaaactgtgggcca

SEQ ID NO: 745516 - DNA, 120 bp, Artificial Sequence
  ENSG00000204930_22 (sequence is synthesized)
aggatcaaaatcagtgaatgtgggaagtcacaagggagtccataggttcttatgggagtaggagattccagcactaatgggctctgtgaacccaggcaagtcactgtccctctttaggct

SEQ ID NO: 745517 - DNA, 120 bp, Artificial Sequence
  ENSG00000204930_23 (sequence is synthesized)
gagtttctggacctgtaaaacaggaataacctctgtgttgcctactttctatgagaaccaaagaaataactaatttcaaagtgctttgtatccacctatcctccagactggcttccttcc

SEQ ID NO: 745518 - DNA, 120 bp, Artificial Sequence
  ENSG00000204930_24 (sequence is synthesized)
tcttcctagatcccagatccacttatctctcgcccttctccagggcaactctagggtctcccagtgtcccagaggcaccacagagaactgcagcctctggggcccagagaagaggccatt

SEQ ID NO: 745519 - DNA, 120 bp, Artificial Sequence
  ENSG00000204930_25 (sequence is synthesized)
ctacatttcctcacaattaggggggccatctgttcctccaagggaaggaatgcaatctggactgctaggatccctggggaaaatcacagaatcaaatgtctgccctttagaggagaaagg

SEQ ID NO: 745520 - DNA, 120 bp, Artificial Sequence
  ENSG00000204930_26 (sequence is synthesized)
attttctaacaataatatagctatacaaaagagattgttatatctctagaagcaaagttccccaacagtggttatatgccccatgataaccattcacctaaaactaattcaactaatagt

SEQ ID NO: 745521 - DNA, 120 bp, Artificial Sequence
  ENSG00000204930_27 (sequence is synthesized)
caacaatagagttaggattactatgataaactcattgaaggaaataataagcagccaatacaaactatatttacgtagactgtaaaaatatgaaaaattgattacacatgggttagtatc

SEQ ID NO: 745522 - DNA, 120 bp, Artificial Sequence
  ENSG00000204930_28 (sequence is synthesized)
atatgcaatacatattacatattatgaaaaaaagacaggaaacaccaaatgttattcattcaacaattactgaccacctatatgtatcaggtcatgtgtttaaaaaaaaaaaaaagaaaa

SEQ ID NO: 745523 - DNA, 120 bp, Artificial Sequence
  ENSG00000204930_29 (sequence is synthesized)
gactgcctataccttgctctctcaacaaagcctccctggtgtaagggggcactggcactacaggcaatcagcatcaagacagaagaagcaaagccaaaagccacatctagacaggcttta

SEQ ID NO: 745524 - DNA, 120 bp, Artificial Sequence
  ENSG00000204930_30 (sequence is synthesized)
gctgaggcacatccacaaccaagagcctttcctccctgaggatcaacacctccccctgccatcctaagtcaaggtcttgacctaaggacttgtaacaaccaagccaaagcccagaggcta

SEQ ID NO: 745525 - DNA, 120 bp, Artificial Sequence
  ENSG00000204936_0 (sequence is synthesized)
agaaagagattaccagccacagacgggtcatgagcgcggtattactgctggccctcctggggttcatcctcccactgccaggagtgcaggcgctgctctgccagtttgggacagttcagc

SEQ ID NO: 745526 - DNA, 120 bp, Artificial Sequence
  ENSG00000204936_1 (sequence is synthesized)
atgtgtggaaggtgtccgacctgccccggcaatggacccctaagaacaccagctgcgacagcggcttggggtgccaggacacgttgatgctcattgagagcggaccccaagtgagcctgg

SEQ ID NO: 745527 - DNA, 120 bp, Artificial Sequence
  ENSG00000204936_2 (sequence is synthesized)
tgctctccaagggctgcacggaggccaaggaccaggagccccgcgtcactgagcaccggatgggccccggcctctccctgatctcctacaccttcgtgtgccgccaggaggacttctgca

SEQ ID NO: 745528 - DNA, 120 bp, Artificial Sequence
  ENSG00000204936_3 (sequence is synthesized)
acaacctcgttaactccctcccgctttgggccccacagcccccagcagacccaggatccttgaggtgcccagtctgcttgtctatggaaggctgtctggaggggacaacagaagagatct

SEQ ID NO: 745529 - DNA, 120 bp, Artificial Sequence
  ENSG00000204936_4 (sequence is synthesized)
gccccaaggggaccacacactgttatgatggcctcctcaggctcaggggaggaggcatcttctccaatctgagagtccagggatgcatgccccagccagtttgcaacctgctcaatggga

SEQ ID NO: 745530 - DNA, 120 bp, Artificial Sequence
  ENSG00000204936_5 (sequence is synthesized)
cacaggaaattgggcccgtgggtatgactgagaactgcgatatgaaagattttctgacctgtcatcgggggaccaccattatgacacacggaaacttggctcaagaacccactgattgga

SEQ ID NO: 745531 - DNA, 120 bp, Artificial Sequence
  ENSG00000204936_6 (sequence is synthesized)
ccacatcgaataccgagatgtgcgaggtggggcaggtgtgtcaggagacgctgctgctcctagatgtaggactcacatcaaccctggtggggacaaaaggctgcagcactgttggggctc

SEQ ID NO: 745532 - DNA, 120 bp, Artificial Sequence
  ENSG00000204936_7 (sequence is synthesized)
aaaattcccagaagaccaccatccactcagcccctcctggggtgcttgtggcctcctatacccacttctgctcctcggacctgtgcaatagtgccagcagcagcagcgttctgctgaact

SEQ ID NO: 745533 - DNA, 120 bp, Artificial Sequence
  ENSG00000204936_8 (sequence is synthesized)
ccctccctcctcaagctgcccctgtcccaggagaccggcagtgtcctacctgtgtgcagccccttggaacctgttcaagtggctccccccgaatgacctgccccaggggcgccactcatt

SEQ ID NO: 745534 - DNA, 120 bp, Artificial Sequence
  ENSG00000204936_9 (sequence is synthesized)
ctgtccaccaaaatgagcattcagggctgcgtggcccaaccttccagcttcttgttgaaccacaccagacaaatcgggatcttctctgcgcgtgagaagcgtgatgtgcagcctcctgcc

SEQ ID NO: 745535 - DNA, 120 bp, Artificial Sequence
  ENSG00000204936_10 (sequence is synthesized)
tctcagcatgagggaggtggggctgagggcctggagtctctcacttggggggtggggctggcactggccccagcgctgtggtggggagtggtttgcccttcctgctaactctattacccc

SEQ ID NO: 745536 - DNA, 120 bp, Artificial Sequence
  ENSG00000204936_11 (sequence is synthesized)
cacgattcttcaccgctgctgaccacccacactcaacctccctctgacctcataacctaatggccttggacaccagattctttcccattctgtccatgaatcatcttccccacacacaat

SEQ ID NO: 745537 - DNA, 120 bp, Artificial Sequence
  ENSG00000204936_12 (sequence is synthesized)
cattcatatctactcacctaacagcaacactggggagagcctggagcatccggacttgccctatgggagaggggacgctggaggagtggctgcatgtatctgataatacagaccctgtcc

SEQ ID NO: 745538 - DNA, 120 bp, Artificial Sequence
  ENSG00000204936_13 (sequence is synthesized)
tttctcccagtgctgggatttctccatgtgagggggcagcaggacacccagggatctagcgtgggggaggagaggagcctaatgagaaaatgaccatctaaagcctgcccttcattggtc

SEQ ID NO: 745539 - DNA, 120 bp, Artificial Sequence
  ENSG00000204936_14 (sequence is synthesized)
tggttcacgtctccaaaccagcttggatggtagcagagacttcagggtgctccagccaaacgtatttgggcatcaccatgacctgggaggggaagatgcactgagacgtatgaggcttcc

SEQ ID NO: 745540 - DNA, 120 bp, Artificial Sequence
  ENSG00000204936_15 (sequence is synthesized)
agcctagcagccagggccctagcacaaacaggaggctcgccccatctgagcaactgcaggagaggttagtacagtcatgcattgcttaacgacagggacgtgtcgttagaaatgtgtcgt

SEQ ID NO: 745541 - DNA, 120 bp, Artificial Sequence
  ENSG00000204936_16 (sequence is synthesized)
taggtgattttatgaccataggaacattgtagcgtgcacttacaccaacccagatggtacagcccaatacacacccaggatggacgctagagtcgactgctcctaggctacaagcctgca

SEQ ID NO: 745542 - DNA, 120 bp, Artificial Sequence
  ENSG00000204936_17 (sequence is synthesized)
gtgcatgttatggtgtgaatactgcaggcaatcttaacaccacggcaagtatttgtgcatctacacacatctaaacatagaaaaggtacagcataaatacactattgtcatctcagcaga

SEQ ID NO: 745543 - DNA, 120 bp, Artificial Sequence
  ENSG00000204936_18 (sequence is synthesized)
gccccacagcccccagcagatcccatgatgggagctgcagaaggcccctttgggaaggctgagcaggttgactcttgaggccagcaaaagtggggtgcagagaaggtatctgatcaaatc

SEQ ID NO: 745544 - DNA, 120 bp, Artificial Sequence
  ENSG00000204936_19 (sequence is synthesized)
ggtcgggaggagagggaggggctgctagaaggggatccgctgagcacagaggggctgttacggagtccctcccaccctcgctcgctatcccgaccctcgctggctccatccctcccctga

SEQ ID NO: 745545 - DNA, 120 bp, Artificial Sequence
  ENSG00000204941_0 (sequence is synthesized)
agaaggaggaaggacagcacagcctacagccgtgctcaggaagtttctggatcctaggctcagctccacagaggagaacacgcaggcgcagagaccatggggcccctctcagcccctccc

SEQ ID NO: 745546 - DNA, 120 bp, Artificial Sequence
  ENSG00000204941_1 (sequence is synthesized)
tgcacacagcacatcacctggaaggggctcctgctcacagcatcacttttaaacttctggaacctgcctatcactgctcaagtcacgattgaagccctgccacccaaagtttccgagggg

SEQ ID NO: 745547 - DNA, 120 bp, Artificial Sequence
  ENSG00000204941_2 (sequence is synthesized)
aaggatgttcttctacttgtccacaatttgcctcagaatcttgctggctacatctggtacaaaggacaactgatggacctctaccattacattacatcatatgtagtagacggtcaaata

SEQ ID NO: 745548 - DNA, 120 bp, Artificial Sequence
  ENSG00000204941_3 (sequence is synthesized)
aatatatatgggcctgcatacactggacgagaaacagtatattccaatgcatccctgctgatccagaatgtcacccgggaagacgcaggatcctacaccttacacatcataaagcgaggt

SEQ ID NO: 745549 - DNA, 120 bp, Artificial Sequence
  ENSG00000204941_4 (sequence is synthesized)
gataggactagaggagtaactggatatttcaccttcaacttatacctggaaactcccaagccctccatctccagtagcaacttaaaccccagggaggccatggaggctgtgatcttaacc

SEQ ID NO: 745550 - DNA, 120 bp, Artificial Sequence
  ENSG00000204941_5 (sequence is synthesized)
tgtgatcctgcggcttcagacacaagctacctgtggtggatgaatggtcagagcctccctatgactcacaggttgcagctgtccaaaaccaacaggaccctctttatatttggtgtcaca

SEQ ID NO: 745551 - DNA, 120 bp, Artificial Sequence
  ENSG00000204941_6 (sequence is synthesized)
aagtatattgcaggaccctatgaatgtgaaatacggaacccagtgagtgccagccacagtgacccagtcaccctgaatctcctcctgaagctgcccaagccctacatcaccatcaacaac

SEQ ID NO: 745552 - DNA, 120 bp, Artificial Sequence
  ENSG00000204941_7 (sequence is synthesized)
ggtcagagcctcccggtcagtcccagggtaaagcgacccattgaaaacaggatcctcattctacccagtgtcacgagaaatgaaacaggaccctatgaatgtgaaatacgggaccgagat

SEQ ID NO: 745553 - DNA, 120 bp, Artificial Sequence
  ENSG00000204941_8 (sequence is synthesized)
ggtggcatgcgcagtgacccagtcaccctgaatgtcctctatggtccagacctccccagcatttacccttcattcacctattaccgttcaggagaaaacctctacttgtcctgcttcgcg

SEQ ID NO: 745554 - DNA, 120 bp, Artificial Sequence
  ENSG00000204941_9 (sequence is synthesized)
gaatctaacccaccggcagagtatttttggacaattaatgggaagtttcagcaatcaggacaaaagctctctatcccccaaattactacaaagcatagagggctctatacttgctctgtt

SEQ ID NO: 745555 - DNA, 120 bp, Artificial Sequence
  ENSG00000204941_10 (sequence is synthesized)
cgtaactcagctactggcaaggaaagctccaaatccatgacagtcgaagtctctgctccttcaggaataggacgtcttcctctccttaatccaatatagcagccgtgaagtcatttctgt

SEQ ID NO: 745556 - DNA, 120 bp, Artificial Sequence
  ENSG00000204941_11 (sequence is synthesized)
atttcaggaagactggcagacagttgctttgattcttcctcaaactacttacaatcacctacagtccaaaattgctttttcttcaaggagatttatggaaaagactctgacaaggactct

SEQ ID NO: 745557 - DNA, 120 bp, Artificial Sequence
  ENSG00000204941_12 (sequence is synthesized)
tgaatacaagttcctgataacttcaagatcataccactggactaagaactttcaaaattttaatgaacaggctgataccttcatgaaattctagacaaagaagaaaaaaactccatgtta

SEQ ID NO: 745558 - DNA, 120 bp, Artificial Sequence
  ENSG00000204941_13 (sequence is synthesized)
ttggactaaataatcaaaagcataatgttttcataattttctatttgaaaatgtgctgattctttgaatgttttattctccagatttatgaactttttttcttgagcaattggtaaagta

SEQ ID NO: 745559 - DNA, 120 bp, Artificial Sequence
  ENSG00000204941_14 (sequence is synthesized)
tacttttgtaaacaaaaattgaaacatttgcttttgctctctatctgagtgccccagaattgggaaactattcatgagtattcatatgtttatggtaataaagttatctgcacaagttca

SEQ ID NO: 745560 - DNA, 120 bp, Artificial Sequence
  ENSG00000204941_15 (sequence is synthesized)
taacatgaggtctaaactcctgacaactttttatgggaaaattacagtattacgaattgagcatcggaaatccagaaatccacaatctgaaatgctccaaaactcaacccttctgaccac

SEQ ID NO: 745561 - DNA, 80 bp, Artificial Sequence
  ENSG00000204941_16 (sequence is synthesized)
cacaatctgaaatgctccaaaactcaacccttctgaccactgatgtgatgttaaaaagaagtgctcactggcgcattgtg

SEQ ID NO: 745562 - DNA, 120 bp, Artificial Sequence
  ENSG00000204941_17 (sequence is synthesized)
actgggattacaggcctgagccaccgcacctggcccacacatttttacataccaagagatcctttaatccacccaaaggctgacgttagctgcatctgtaacacaactttttcctcaaat

SEQ ID NO: 745563 - DNA, 120 bp, Artificial Sequence
  ENSG00000204941_18 (sequence is synthesized)
aactttttcctcaaatatatggagttttttttaggcttccacttctatacttccctattctcactccctgttttaatttaacatagacatgcaatgctagataatagaattgctctctac

SEQ ID NO: 745564 - DNA, 120 bp, Artificial Sequence
  ENSG00000204941_19 (sequence is synthesized)
cagctgaacatttgggagcctgtgcagtttctggcccttcttgttgcacatagataaatacatccggtgttatagagactcagttgtaaaaatcaataaatgtgctgcctggttaaaatg

SEQ ID NO: 745565 - DNA, 120 bp, Artificial Sequence
  ENSG00000204941_20 (sequence is synthesized)
ctagaggagtaactggatatttcaccttcaacttatacctgaagctgcccaagccctacatcaccatcaacaactcaaaacccagggagaataaggatgtcttagccttcacctgtgaac

SEQ ID NO: 745566 - DNA, 120 bp, Artificial Sequence
  ENSG00000204941_21 (sequence is synthesized)
cagcatccttggcaatagggttttaggtggagtctacctggctttcagagaagagttaggaaaacatttttattcccagcctgtgtcccatgggcacaagcaaatcccaaattctcctcc

SEQ ID NO: 745567 - DNA, 120 bp, Artificial Sequence
  ENSG00000204941_22 (sequence is synthesized)
tgaacccttccaatttgtctctacaaactctcttctccttgtttttctgttttctcatggctgaccttgtgtctggcctaagaaagttagggagggggctttatcagccctgagccctat

SEQ ID NO: 745568 - DNA, 120 bp, Artificial Sequence
  ENSG00000204941_23 (sequence is synthesized)
gtggtagaggaggcttcacagagggatgagaaggagagtcctcaagatcaagttgcttctcgatgtcaccaacacatccccttctgccatgtctttgtttccttgtacctattccatgag

SEQ ID NO: 745569 - DNA, 120 bp, Artificial Sequence
  ENSG00000204941_24 (sequence is synthesized)
ctacaaggaacatctgaggctctgaaacaagctcacacttttcccccaaatgagacgaggaagccccttgggtgagggaggagcagctcagactctgcttcctgctctgctccatgcttc

SEQ ID NO: 745570 - DNA, 120 bp, Artificial Sequence
  ENSG00000204941_25 (sequence is synthesized)
tctggtgactgggcctgcctcactcaacctggggtgggaccagcatgtgtggagaaagagtcctggtggcctgtcctgaatttggctaaatcgagctgccagttgaagccaagcctcccc

SEQ ID NO: 745571 - DNA, 120 bp, Artificial Sequence
  ENSG00000204941_26 (sequence is synthesized)
cgggccaggctgcagggaaataagaagagagggagcctcagggaagactcctgcgttgcgtcctggctctgaagtcaccggttgtatgaggttgtgggcacagcatgtgggacacagcac

SEQ ID NO: 745572 - DNA, 120 bp, Artificial Sequence
  ENSG00000204941_27 (sequence is synthesized)
ggaggatagtgactgatgcagagctggagaaatagagagattcacccctggggctctgcatggcaggaaaggggcagtgccaaaaagtgtgtaattatagagagggtaagactaccagac

SEQ ID NO: 745573 - DNA, 120 bp, Artificial Sequence
  ENSG00000204941_28 (sequence is synthesized)
actttatatatatctaatataagacttaccattaactatttctatgtgtgcaatttagtgttgtgtaaccatcacactatccatttccagaactttttcctcttaccatattaaacctct

SEQ ID NO: 745574 - DNA, 120 bp, Artificial Sequence
  ENSG00000204941_29 (sequence is synthesized)
gtacccaataaacagtaactcactccttctccccataacccttagcacacaccattctacattctgtctctatgtaactggctattctaactatcttttataaatggaattatatgataa

SEQ ID NO: 745575 - DNA, 120 bp, Artificial Sequence
  ENSG00000204941_30 (sequence is synthesized)
gaatgtgaaatgcacggacgtgggccttctgtcaatcagctccctgccatggagacctgacagagtctcattcatggctgccacaacagagagactgagaaaaagatgcaaccatgaaaa

SEQ ID NO: 745576 - DNA, 120 bp, Artificial Sequence
  ENSG00000204941_31 (sequence is synthesized)
ggtgaaaaggtggtaagttctaatgacatagaaaatagcaatcagcctttcttatgtctgaaagccttccaaaatatctgagtgcagtagagatttgacagaggactgatcaccatccta

SEQ ID NO: 745577 - DNA, 120 bp, Artificial Sequence
  ENSG00000204941_32 (sequence is synthesized)
atgcctcttcctgaggctcccccatgtaaaataacatcaccttcattccttctttacttttctttccatgacagctccttcaggaataggacgtcttcctctccttaatccaatatagca

SEQ ID NO: 745578 - DNA, 120 bp, Artificial Sequence
  ENSG00000204941_33 (sequence is synthesized)
tgcgcagtgacccagtcaccctgaatgtcctctgtgagtatcttttgttcctctgtgggccaggacaccagcttaaatctaaatgaccacaagccagtcctctcagtctttctccggtcc

SEQ ID NO: 745579 - DNA, 120 bp, Artificial Sequence
  ENSG00000204941_34 (sequence is synthesized)
aagtatagacacctttatttctggacatctgagctggccatgactccctgcccttggaaaacctaggtaggcacagccttaaccaggaatataaggggagggggcgctcttgtcatggga

SEQ ID NO: 745580 - DNA, 120 bp, Artificial Sequence
  ENSG00000204941_35 (sequence is synthesized)
aatgaagaaatgaatgatccaaaacctctttagagactggatgttggatgcagaatcctaggaggttctagccacacctgtcccttgtccttcagaggctgacatccatgtttcatcccc

SEQ ID NO: 745581 - DNA, 120 bp, Artificial Sequence
  ENSG00000204946_0 (sequence is synthesized)
gggacgcagttcgctgccgcccggcagtagctctcaggttaggcgggtcccgctccgcttccgccgtcgctgccgcgccgccccgggcccgacaggccgggtccagggactgcaacccag

SEQ ID NO: 745582 - DNA, 120 bp, Artificial Sequence
  ENSG00000204946_1 (sequence is synthesized)
cgagggacgcgggcagccatggccgaagcggcgcctgcccgggaccccgagacagacaagcacacagaggaccagagtccttcgacacccttgccccagccagctgctgagaagaactcg

SEQ ID NO: 745583 - DNA, 120 bp, Artificial Sequence
  ENSG00000204946_2 (sequence is synthesized)
tacctctactccacggaaatcacactgtggacggtggtggccgccattcaggccttggagaagaaggtggattcctgcctgacccgcttgctgactctggaggggcgcacggggacagcc

SEQ ID NO: 745584 - DNA, 120 bp, Artificial Sequence
  ENSG00000204946_3 (sequence is synthesized)
gagaagaagctggccgactgcgagaagacagctgtggagttcgggaaccagctggagggcaagtgggccgtgctggggaccttgctgcaggagtacgggctgctgcagaggcggctggag

SEQ ID NO: 745585 - DNA, 120 bp, Artificial Sequence
  ENSG00000204946_4 (sequence is synthesized)
aatgtggagaacttgctgcgcaacaggaacttctggatcttgcggctgcccccgggcagcaagggggaggcccccaaggtgcccgtgaccttcgatgatgtggccgtgtatttctctgag

SEQ ID NO: 745586 - DNA, 120 bp, Artificial Sequence
  ENSG00000204946_5 (sequence is synthesized)
ctggagtggggcaagctggaggactggcagaaggagctctacaagcacgtgatgaggggcaactacgagacgctggtctccctggattatgcaatctccaaaccagacatcctcacccgg

SEQ ID NO: 745587 - DNA, 120 bp, Artificial Sequence
  ENSG00000204946_6 (sequence is synthesized)
atagagaggggagaggagccttgtcttgaccggtggggccaggagaaggggaatgaagtagaggtgggacgtccaaggatgatgggcactggcctccctccgtatccagagcacctcacc

SEQ ID NO: 745588 - DNA, 120 bp, Artificial Sequence
  ENSG00000204946_7 (sequence is synthesized)
agcccacttagccctgcccaggaggagctgaaagaagggcaggcccccaagcagcagcaggactcagaggcgagagtggccccagccgggccagaagcaggtggtggtgtggccatcaag

SEQ ID NO: 745589 - DNA, 120 bp, Artificial Sequence
  ENSG00000204946_8 (sequence is synthesized)
acagaggcacagtctgaagacgagatgacgcctgagcggctctttctgggggtgtcccgaggccagaccgagtgtagaatcccccgagggcccaggaacaggcctgggggccccagccgt

SEQ ID NO: 745590 - DNA, 120 bp, Artificial Sequence
  ENSG00000204946_9 (sequence is synthesized)
catcaggcccagggcatgcccagggtgcgggcaggggagccacggccaccgggggccagtggggagacgccccgagtcctctcccgcaggcggcagcgggcattcccctgccccgactgc

SEQ ID NO: 745591 - DNA, 120 bp, Artificial Sequence
  ENSG00000204946_10 (sequence is synthesized)
gggcagagcttccgcctgaagatcaatctgacgattcatcagcggacccatgtggaggaggggcggcaggaggcccccggccgctcgcccaccagctgcggggacagccaggccatgctg

SEQ ID NO: 745592 - DNA, 120 bp, Artificial Sequence
  ENSG00000204946_11 (sequence is synthesized)
gagccgggggaggtggtggtacccggccctgtcatccgctggctccccgaggagcctgagggtcgccgctccgtggcagggggccgtgccttggtggggcggcggcctgcagccagcaag

SEQ ID NO: 745593 - DNA, 120 bp, Artificial Sequence
  ENSG00000204946_12 (sequence is synthesized)
atgtaccactgcagcgagtgcctgcgcttcttccagcagcgcaagagcctgctgctgcaccagcgcctgcacaccggcaatggccagggctggcccgcctgcccctactgcggcaaggcc

SEQ ID NO: 745594 - DNA, 120 bp, Artificial Sequence
  ENSG00000204946_13 (sequence is synthesized)
ttccgccggccctcggacctcttccggcaccagcgcatccacaccggtgagcggccctaccagtgcccccagtgtggccggaccttcaaccgcaaccaccacctggccgtgcacatgcag

SEQ ID NO: 745595 - DNA, 120 bp, Artificial Sequence
  ENSG00000204946_14 (sequence is synthesized)
acatgcagacccacgcccgaggccaggtgggcccacacttccctgccgcccccgcccgccacgggagcctgcccctgccctggcccagccggaaggaggagggctgacctggcaggagcc

SEQ ID NO: 745596 - DNA, 120 bp, Artificial Sequence
  ENSG00000204946_15 (sequence is synthesized)
acccctggcggggtctctcccctgtgcctgacgcaggttcttccttttcctgggatggagagaggtttgttgtttttacccattcaaatgggaagctagctgcccttctggtgacattgt

SEQ ID NO: 745597 - DNA, 120 bp, Artificial Sequence
  ENSG00000204946_16 (sequence is synthesized)
gtgtgaccgggtgctttctgtttcctgtttgcactcttcgctgccttttctgcattcctgacttctaaaagatgccttaaggcttaagggatgccatatttttgataaggcctctggtag

SEQ ID NO: 745598 - DNA, 120 bp, Artificial Sequence
  ENSG00000204946_17 (sequence is synthesized)
gtaccacagccaagaggaccagagatcatggcccttccagtatgggggcgatagagacatcggggacctgggatttttgttttgtgcagagatctcctgcctgctgtcaccatgagaaac

SEQ ID NO: 745599 - DNA, 120 bp, Artificial Sequence
  ENSG00000204946_18 (sequence is synthesized)
tacttttgtaaatgtgtgtagttgttaatggaactttgccttttgcaaagtcggaaagagtcggcttttccatgtgaggctcgcagagctgaaaggggagctacgtccaccagcctgtgg

SEQ ID NO: 745600 - DNA, 83 bp, Artificial Sequence
  ENSG00000204946_19 (sequence is synthesized)
tggcccagcctgtgggttttgatggggatgtcttggctgctgtcttggaggcacagtgtctccccatgtgtgtgtttcttggc

SEQ ID NO: 745601 - DNA, 120 bp, Artificial Sequence
  ENSG00000204946_20 (sequence is synthesized)
cttggaggcacagtgtctccccatgtgtgtgtttcttggcccagagtgactcccagtattcctagtccttccccacaggatagtcacatccattatttacttttgttgtcagctgggagg

SEQ ID NO: 745602 - DNA, 120 bp, Artificial Sequence
  ENSG00000204946_21 (sequence is synthesized)
ggaaactgaagcctggacacgtctccccaagggctcagtgttcatgggtgtgtaagatccattgactggaccccagaaagcaccctgaggggcagtgcagagagagcccaggaagcccct

SEQ ID NO: 745603 - DNA, 120 bp, Artificial Sequence
  ENSG00000204946_22 (sequence is synthesized)
ccactagaggaggcccttggtctggctgaggaccacgtccaccctgggcctccaggcctgcttttcacattaaaggcggggcagtctcctctcaaaggagttctcccttgagcactttgg

SEQ ID NO: 745604 - DNA, 120 bp, Artificial Sequence
  ENSG00000204946_23 (sequence is synthesized)
gctctggggcagagttgggctaggagatctgggtgaatcctttagtcacagctagtctcatgttcctcttctgtcaaaggggtcatggccccagtgtgtcctacctcagagttgtcaggg

SEQ ID NO: 745605 - DNA, 120 bp, Artificial Sequence
  ENSG00000204946_24 (sequence is synthesized)
tcaaagtaacaggcactgggacaaatatgaagcctagctttgtgcttcctttcaaattcagggcctcctttctactccattccagcctttttttcctgtcagaatccctcaggaaggacc

SEQ ID NO: 745606 - DNA, 120 bp, Artificial Sequence
  ENSG00000204946_25 (sequence is synthesized)
tttatcttctggagtgagtggcagttccactgggttcagtgaaagagtcgcccatggggctctgttccccaggagtcctttgtattttggtgaacaaattcttaccaaagcatgagattc

SEQ ID NO: 745607 - DNA, 120 bp, Artificial Sequence
  ENSG00000204946_26 (sequence is synthesized)
ggactgtagaagttcagactgcctcagttcagactgcctcatggggcagtctggaggtcagctggcttctggtgtctctcatcacaccactgcggacgctgtctgtagagcagccttggt

SEQ ID NO: 745608 - DNA, 120 bp, Artificial Sequence
  ENSG00000204946_27 (sequence is synthesized)
gtgggtgactctgaagctggagtgatgggaccccagctatccttgttttttaccgccttgtctggcactgtgaccacgcttcagggctgcttctgggggtcttggtccctggatgtgcca

SEQ ID NO: 745609 - DNA, 120 bp, Artificial Sequence
  ENSG00000204946_28 (sequence is synthesized)
tttccttgcccttctgaccctcacacttcttccaaagtcttgagcagagttgggggccaatggtagcattgctgtcatctctgggaggagagtgagtatacaagtcagtgacagttcagc

SEQ ID NO: 745610 - DNA, 120 bp, Artificial Sequence
  ENSG00000204946_29 (sequence is synthesized)
caggctcccttgggtttgggaagaggcactgcccttctgtgctgtggatcctgcttgtctgctctggagtccccccacccttgccaggagcttcacaaaccagagacgggctgtcagcaa

SEQ ID NO: 745611 - DNA, 120 bp, Artificial Sequence
  ENSG00000204946_30 (sequence is synthesized)
gagctcagacaggatgtggtgcaagtgcaggtgcacgagtttaaccctcagctgcaggagctagtctcaggtgttctggggatgcctcaggctaagaattttgccgactttctgggcttg

SEQ ID NO: 745612 - DNA, 120 bp, Artificial Sequence
  ENSG00000204946_31 (sequence is synthesized)
gttggctaatgccaaatgcccctgcttaaatatcacaaggtgctgattctccttttttctttttttcataccaatgtgctcaaactttgagctaggtcttgtgagtttgcctagcactca

SEQ ID NO: 745613 - DNA, 120 bp, Artificial Sequence
  ENSG00000204946_32 (sequence is synthesized)
gacctgtttaagtaacgttctttacattgaaacaagtcaaccgaagctttgtggtgcaggagctgagggtgccccagactcagtgggagccctggttgggccccaaactctcccagcagg

SEQ ID NO: 745614 - DNA, 120 bp, Artificial Sequence
  ENSG00000204946_33 (sequence is synthesized)
gtcctcggtttcctcatttgtgaaataaatgagtgggccacgacgttaataagcccaagagaactgtgaaggtggtagtcccttgccctaattggtgctcaataaagttgttggcataaa

SEQ ID NO: 745615 - DNA, 120 bp, Artificial Sequence
  ENSG00000204946_34 (sequence is synthesized)
tctgatctgcagagatctcccttccggctatcgtggctgctgttcaggtggtggagaagaagatggaaccccaggctgcctggctacagagcctggagggatgcatgtggacagccaaga

SEQ ID NO: 745616 - DNA, 120 bp, Artificial Sequence
  ENSG00000204946_35 (sequence is synthesized)
caagccagatctggcaccagtggagaaaggagacaggcaggcaactgcagcctgcccagtgcggagaggggccagagcccgggcactgggccctggttaatggtggagccagcctggtgt

SEQ ID NO: 745617 - DNA, 120 bp, Artificial Sequence
  ENSG00000204946_36 (sequence is synthesized)
gtggcagccaggtcgggctggtgtcttcagagtggctgtgtcagaagggcctcgtgtatgacagaaacgcaggccagctggaacgtccccaggcgttctgtcctggatcaagcaagagga

SEQ ID NO: 745618 - DNA, 120 bp, Artificial Sequence
  ENSG00000204946_37 (sequence is synthesized)
aggggcaagtgggaggagccagcagggcccacaggagaccactgtggcacacctgtgctcaggcagcatggtgctgggcgctgcaggggctcattaatgcatgagacacagattccactc

SEQ ID NO: 745619 - DNA, 120 bp, Artificial Sequence
  ENSG00000204946_38 (sequence is synthesized)
aggagagagaagacgaacacagacacagtacacgagacctgtctgggccgcagagaggagtctggaggtagggtccaagggccacgagccagtttgggctgctggaggggggcctggcaa

SEQ ID NO: 745620 - DNA, 120 bp, Artificial Sequence
  ENSG00000204946_39 (sequence is synthesized)
ggagggctctcggggaagcacctgtgggggtctgcttcctgaccccagggagctagaggcctccctccctccaggccccccgagccaggctgagccagccgctaggggcacggagcagtg

SEQ ID NO: 745621 - DNA, 120 bp, Artificial Sequence
  ENSG00000204946_40 (sequence is synthesized)
cccaccttgcgcccagtgtggccagagcttcggccagaaggagctcagtgcgccgcaccagcgcgtgcatcgtggcccccggcctttcgctggtgctcagtgtcccaagagcttcacgca

SEQ ID NO: 745622 - DNA, 120 bp, Artificial Sequence
  ENSG00000204946_41 (sequence is synthesized)
gcggaccacccccgccagccaccgtcgggcgcacgtggccgagtgcacctacacccgcgcccaatgcggcaagaccttcctccagcagtcgacgctcacacccactactgcgcgcacatc

SEQ ID NO: 745623 - DNA, 120 bp, Artificial Sequence
  ENSG00000204946_42 (sequence is synthesized)
agggagaagccctacgagtgcgccaagctctttggccgcctgtccacgctgctggagcaccggcacatgcacacgggtgagcggcccttccagtgcacgcaatgtggctgctgcttcagc

SEQ ID NO: 745624 - DNA, 120 bp, Artificial Sequence
  ENSG00000204946_43 (sequence is synthesized)
cgcctgtccacgctgctggagcaccggcacacacacatcagcgagaagcccttccagtgtgcgcagtgcgacaagcgtttcacgcgtctggccaacctgaccgtgcaccagagagtgcac

SEQ ID NO: 745625 - DNA, 120 bp, Artificial Sequence
  ENSG00000204946_44 (sequence is synthesized)
ttgggcgagcgctccttccagtgcgcccagtacagcaggagattcatgcagaagcccggcttcctgcgtcatctgtgtggccactcgcaggagaagcactatccttgcagcccttgtggt

SEQ ID NO: 745626 - DNA, 120 bp, Artificial Sequence
  ENSG00000204946_45 (sequence is synthesized)
ctgcagccagagagccctttcagaatctgacccaaaagatggccagtattctaagaaaaagcacatatgcttacgatgtgcaaacagctgaaggtgttctttcaactatagtaaaagggg

SEQ ID NO: 745627 - DNA, 120 bp, Artificial Sequence
  ENSG00000204946_46 (sequence is synthesized)
cagtggtgaaatatagtgattttcacctgtgcttccattctgaagttctggaaagaagtactggatggactgaagtccaggacaacgtcccaaagaaaggcagagtccaggtaggcttgg

SEQ ID NO: 745628 - DNA, 120 bp, Artificial Sequence
  ENSG00000204946_47 (sequence is synthesized)
aggaccaagccctggatgagcactggagggcagaggcctcagtgtccagcactgtgccctgcacatggaaagcccctacgtttgtggaatgaatgaataataaaaatgttttcataagtg

SEQ ID NO: 745629 - DNA, 120 bp, Artificial Sequence
  ENSG00000204946_48 (sequence is synthesized)
tctgtcatgacctgcctggcgatcattaccgtgatttcctgtctgctgaattcctgtgctgcagtttccttctgtgggacatgaggctttagactggaatctagctgccaggcctccctc

SEQ ID NO: 745630 - DNA, 120 bp, Artificial Sequence
  ENSG00000204946_49 (sequence is synthesized)
agcatgtggagatcatttcttcagccctctgtcttcaggcaggtagaaggccaggccaccaccaagccagatctggcaccagtggagaaaggagacaggcaggcaactgcagcctgccca

SEQ ID NO: 745631 - DNA, 120 bp, Artificial Sequence
  ENSG00000204947_0 (sequence is synthesized)
gcgcccggccggctctgcctttgggggccagcagggctgtacctgggagttgggttggggcggagcggaggggaggccgtgccaggcagggccggttcgtgcggaaccgccatggccgag

SEQ ID NO: 745632 - DNA, 120 bp, Artificial Sequence
  ENSG00000204947_1 (sequence is synthesized)
ccggcttcggtaactgtgacatttgatgatgtggccttatatttttcggaacaagagtgggagatcctggagaagtggcagaagcaaatgtataagcaagagatgaagaccaattacgag

SEQ ID NO: 745633 - DNA, 120 bp, Artificial Sequence
  ENSG00000204947_2 (sequence is synthesized)
acccttgattccctggggtatgctttttccaagccagatttgatcacatggatggaacaagggagaatgctattaatcagcgaacagggatgcttagataaaacaagaaggacaactagc

SEQ ID NO: 745634 - DNA, 120 bp, Artificial Sequence
  ENSG00000204947_3 (sequence is synthesized)
cctcctactgatgaacagttgaacatgaagaatactggaaagttgctatgttttgatgacgaaggaactcccaggacaaaagaagaggattgccgtttaaatggtcctcaaaaacaggac

SEQ ID NO: 745635 - DNA, 120 bp, Artificial Sequence
  ENSG00000204947_4 (sequence is synthesized)
ttgtgtgctgccttacgagggaaagagagaaagattttattagctcaaacagccaccttccagtctccaagtctccgagaaacagagattctaaataaaaaagtcagcatcacagcatat

SEQ ID NO: 745636 - DNA, 120 bp, Artificial Sequence
  ENSG00000204947_5 (sequence is synthesized)
gatccagacaagaaagacctgcggcataagcctcgggagaccccagggcgcttagaaattcccacagggccaagatgctattcctgctatgtctgtaggaaagtcttccaagtaaggagg

SEQ ID NO: 745637 - DNA, 120 bp, Artificial Sequence
  ENSG00000204947_6 (sequence is synthesized)
gatttgctaaagcacaaacggagccactccaagagccagctctgcagatacccaaagtacaaaaactcgtccagagggaagtccgaactcaggcggacgcagaggctcctgtgtcagaag

SEQ ID NO: 745638 - DNA, 120 bp, Artificial Sequence
  ENSG00000204947_7 (sequence is synthesized)
aagcggttccagtgcagtgagtgtgagaagagctacttcctgaagggcagcctcgtcactcatcaggttgtccacaccggccagcggccctacccatgccctgagtgcgacaagaccttc

SEQ ID NO: 745639 - DNA, 120 bp, Artificial Sequence
  ENSG00000204947_8 (sequence is synthesized)
cggtacagggccaacctgaagaagcacctgtgtctacaccgcggggagcggccgttctgctgcggggagtgcggccgggccttcgtgcagcagtgcgagctcacggagcacttgcggctg

SEQ ID NO: 745640 - DNA, 120 bp, Artificial Sequence
  ENSG00000204947_9 (sequence is synthesized)
cacagcggagagaagcccttccagtgtccgcagtgtgaccggtgcttccgcctgaagaggggcatgaaggtccatctgacccagcacagcgggaagaggcccttccactgtcccgagtgt

SEQ ID NO: 745641 - DNA, 120 bp, Artificial Sequence
  ENSG00000204947_10 (sequence is synthesized)
ggccggagcttctcccggaaggctgccctgaagacccaccagaggacgcacagcgaggaaaagccgttttcttgtggtgaatgtggcaggaaattcatctacaagattaagctggacgag

SEQ ID NO: 745642 - DNA, 120 bp, Artificial Sequence
  ENSG00000204947_11 (sequence is synthesized)
cacatcagagttcacacgggagagaagcccttttcgtgtcccgagtgtaacaaaagtttccgcctcaagagaagcctgaaagcccacgggctgcagcacattgggaagcggcccttccag

SEQ ID NO: 745643 - DNA, 120 bp, Artificial Sequence
  ENSG00000204947_12 (sequence is synthesized)
tgcccggagtgcagcaggggcttcttctggaggaacgccatgcgcgcccaccagcgcctgcacagcgagcaaaagcccttcccctgcgccgagtgcggcaagcgcttcacgcggccttcc

SEQ ID NO: 745644 - DNA, 120 bp, Artificial Sequence
  ENSG00000204947_13 (sequence is synthesized)
cagtcgcggctcacgcagcacctgaaggtccacaccacggaaaagccgttctcctgcgccgagtgcggccgcagtttccgccgacgcgcgcatctcacagagcacacgaggcttcacagt

SEQ ID NO: 745645 - DNA, 120 bp, Artificial Sequence
  ENSG00000204947_14 (sequence is synthesized)
ggcgaggagcccttccagtgtcccgagtgcgacaagagcttctcctggaaggcctccatgaagttccaccagcggatgcacagggacgagaagcccttcgcgtgcggtgagtgtgacaag

SEQ ID NO: 745646 - DNA, 120 bp, Artificial Sequence
  ENSG00000204947_15 (sequence is synthesized)
acctacacgcatcagtctcagctcaccgagcacctgaggctgcacagtggagagaagccctaccagtgtcctgaatgcgagaagactttccgcctcaagggaaacctgaaaagccacctg

SEQ ID NO: 745647 - DNA, 120 bp, Artificial Sequence
  ENSG00000204947_16 (sequence is synthesized)
ctgcagcacagtggccaaaagccattctcttgtgtgatgtgcggcaaaagtttcactcaacagtaccggctcacagaacacattcgagtccacagcggggagaagcccttccagtgtccg

SEQ ID NO: 745648 - DNA, 120 bp, Artificial Sequence
  ENSG00000204947_17 (sequence is synthesized)
gagtgtgacaagagctactgcatcaggggcagcttgaaggtccacttgtataagcacagtggagagaggcccttccagtgtcccgagtgtggcaaaggcttcctccagaagagaagcctg

SEQ ID NO: 745649 - DNA, 120 bp, Artificial Sequence
  ENSG00000204947_18 (sequence is synthesized)
aaggcccatctgtgccttcacagtggggagaggcctttttcttgtgatgagtgtggaaggagcttcacgtacgtgggggcgctcaagacccacattgcagtgcatgccaaagagaagccc

SEQ ID NO: 745650 - DNA, 120 bp, Artificial Sequence
  ENSG00000204947_19 (sequence is synthesized)
tccagcctctaggtcaggccatgcagcagtcacgcagtcggctttcaggaggtgccagcagctctgttggctcaagttgaggcaggttgaaggattcacagggtaagatcgggcacagtg

SEQ ID NO: 745651 - DNA, 83 bp, Artificial Sequence
  ENSG00000204947_20 (sequence is synthesized)
aggcaacattgcaagactccatctctacaaaaaatataaaagtcagccaggcgttgtggtgcatgcttgtggtcccagctact

SEQ ID NO: 745652 - DNA, 79 bp, Artificial Sequence
  ENSG00000204947_21 (sequence is synthesized)
caacattgcaagactccatctctacaaaaaatataaaagtcagccaggcgttgtggtgcatgcttgtggtcccagctac

SEQ ID NO: 745653 - DNA, 120 bp, Artificial Sequence
  ENSG00000204947_22 (sequence is synthesized)
gacagagcaagatcttgtctcaaaaaagaaaaaaaatcacaaaatactggctacagacacactggacaggtgtgtggtctgcagaactctatggctccttgacaaaagttccaaataatc

SEQ ID NO: 745654 - DNA, 120 bp, Artificial Sequence
  ENSG00000204947_23 (sequence is synthesized)
aaataatccatagacagtcaaagagacatctccctcaataatcgtcataggaaagacgtgccagttgtggaggaaacattcacactgatctgctagtccaacgatctcttcagtgtcatc

SEQ ID NO: 745655 - DNA, 120 bp, Artificial Sequence
  ENSG00000204947_24 (sequence is synthesized)
caataatcccttcattaaattcagaaactacagcctgagtgaagaaatgttacagccaggaacatattcctcagtcagcttttccattaccaggccattttacttaaatctgtattaaag

SEQ ID NO: 745656 - DNA, 120 bp, Artificial Sequence
  ENSG00000204947_25 (sequence is synthesized)
tcttcagttttctctcatagtggattttcattttctctcagatggtgagagggcttctgtttcttggaatgtttccatattgctaaaaataaatgtcttccactatctcatttgttaaaa

SEQ ID NO: 745657 - DNA, 120 bp, Artificial Sequence
  ENSG00000204947_26 (sequence is synthesized)
caggcatgagccactgcacctggcctgaactaaagtcttggtaaggctttattctattgtcattcatgtcatttcaacggctttcatttttttgacttaactttgatctcaacgtctcta

SEQ ID NO: 745658 - DNA, 120 bp, Artificial Sequence
  ENSG00000204947_27 (sequence is synthesized)
ggaatcgaagtcaactatgaaaatgatttttattgtgggtaatggtaaaaaagagagagaggcgtgagccaccacacccggccaaaaaaattatttaagtatgcagtaaactcaaagtct

SEQ ID NO: 745659 - DNA, 120 bp, Artificial Sequence
  ENSG00000204947_28 (sequence is synthesized)
ggtgagtaagatggatttaagatcatgaattattttattttcctagccttgtttcctgaatctttctttttggatatctgactagatctagtcaataaaaaaagttgttttgatggagaa

SEQ ID NO: 745660 - DNA, 120 bp, Artificial Sequence
  ENSG00000204947_29 (sequence is synthesized)
ctttgggggccagcagggctgtacctgggagttgggttggggcggagcggaggggaggccgtgccaggcagggccggttcgtgcggaaccgccatggccgagccggcttcggtaagaagg

SEQ ID NO: 745661 - DNA, 80 bp, Artificial Sequence
  ENSG00000204950_0 (sequence is synthesized)
cggggcgatgcctggcggtggcagtggcggcggccccggccggggcccgtgaccatgggcatcgccgagtccacgccgga

SEQ ID NO: 745662 - DNA, 120 bp, Artificial Sequence
  ENSG00000204950_1 (sequence is synthesized)
gcccgtgaccatgggcatcgccgagtccacgccggatgagctgccgtcggacgcagaggagcagctgcgcagcggcgaccagcagctggagctgagcgggcggcggttgcggcggctgcc

SEQ ID NO: 745663 - DNA, 120 bp, Artificial Sequence
  ENSG00000204950_2 (sequence is synthesized)
cagcgcagtgtgcgcgctgagccgcctgcagaagctgtatgtgagcggcacggggctgcgcgagctgccggaggagatcgaggagctgcgcgagctgcgcatcctggcgctggacttcaa

SEQ ID NO: 745664 - DNA, 120 bp, Artificial Sequence
  ENSG00000204950_3 (sequence is synthesized)
caagctcgagcgactgcctgacggcctgtgccgcctgccgcgcctcacgcgcctctatctgggcggcaaccggctgctggcgctgcccgccgacttcgcgcagttgcagagcctgcgctg

SEQ ID NO: 745665 - DNA, 120 bp, Artificial Sequence
  ENSG00000204950_4 (sequence is synthesized)
cctctggatcgagggcaacttcttgcggcgcttcccgcggccgctgctgcgcctggtggcgctgcagtcgctccagatgggcgacaaccggctgcgcgcgctgccggccgagctgccgcg

SEQ ID NO: 745666 - DNA, 120 bp, Artificial Sequence
  ENSG00000204950_5 (sequence is synthesized)
catgacgggcttgcgcggcctctggctctacggcaaccgcttcgaggagttcccgcccgcgctgctgcgcatgggccgcctgcacatcctcgacctcgaccgcaaccgcctgggcggctt

SEQ ID NO: 745667 - DNA, 120 bp, Artificial Sequence
  ENSG00000204950_6 (sequence is synthesized)
ccccgacctgcacccgctgcgcgcgctgcgcgtcttctcctacgaccacaaccccgtcaccgggcccccgcgcgtcgcggacaccgtgttcctcgtgggcgagggcgccgtcgagcgcat

SEQ ID NO: 745668 - DNA, 120 bp, Artificial Sequence
  ENSG00000204950_7 (sequence is synthesized)
ggcggagcgcgacgagcccacgccccggcctccgccccggcgcccagcgcgggcctttgaggatgaggaggaggaagacctgctcataggcggcgctggttcccgggctctgggcgcccc

SEQ ID NO: 745669 - DNA, 120 bp, Artificial Sequence
  ENSG00000204950_8 (sequence is synthesized)
ctggttaggcctgcgggactggtgggtccctacttaggtcaatggaacggctacttttggcgagttgccgggcacaggcagggctggggctcatcttcagacactcctaggtagtaagag

SEQ ID NO: 745670 - DNA, 120 bp, Artificial Sequence
  ENSG00000204950_9 (sequence is synthesized)
gactgactataccctggctgatctgtgggcaattgtcagaccaagaagtctgggctgggtccagtccccgatggagccactgataacagaggcaccagcttcctcctggaaccagggtct

SEQ ID NO: 745671 - DNA, 120 bp, Artificial Sequence
  ENSG00000204950_10 (sequence is synthesized)
ctgagggccacagaattgtcacgtctccctgagtctggatgcagggcacccaacaccctccctctttctggggtttgggtctcctaggcccaccctttctaggacaggagccgctacctc

SEQ ID NO: 745672 - DNA, 120 bp, Artificial Sequence
  ENSG00000204950_11 (sequence is synthesized)
tgggatggactgcgtgcctgtgtggggcaggactgcccttgcgaggagggcctggcccaggagcaggggcttggagtggggctggtgcccgggacagaagtgggaaatagatgggggccc

SEQ ID NO: 745673 - DNA, 120 bp, Artificial Sequence
  ENSG00000204950_12 (sequence is synthesized)
caacaccgaagctgccctcacccctccatcagggctgatcgtacatacctccctcctcggccccctgagattggtatggggcacagaaggcagggggtcacccccaccctattctgttct

SEQ ID NO: 745674 - DNA, 120 bp, Artificial Sequence
  ENSG00000204950_13 (sequence is synthesized)
cttctcccagcctcccagcatgtgcctggaaccttgctgggaagagagagctccccctccactccccaccccatagcctgagccttccagctgtcaagtttgaaaagaagccaccgtgcc

SEQ ID NO: 745675 - DNA, 120 bp, Artificial Sequence
  ENSG00000204950_14 (sequence is synthesized)
tccagggcctcctgcaccgcagagaggggctctctgctctgggaggctgctcagcgcctctcccacggcctgcactctcctttcccttaaatgggcacagccagggtggctggcatggga

SEQ ID NO: 745676 - DNA, 120 bp, Artificial Sequence
  ENSG00000204950_15 (sequence is synthesized)
ctggcactctgtacctccactccgtcaccagggacagccccgagggggtgaggagaggggccttgctctgcaattcccagagccagatcttcctcatccaagcaataacgggacgaggga

SEQ ID NO: 745677 - DNA, 120 bp, Artificial Sequence
  ENSG00000204950_16 (sequence is synthesized)
gccagggccaaggacactcagggacactgttggggcagcggccccacatggtaatgttttctttagagagaagaaaaaacaactggctgtaaacgtaaattatatttcttggagaaagaa

SEQ ID NO: 745678 - DNA, 120 bp, Artificial Sequence
  ENSG00000204952_0 (sequence is synthesized)
gggtagggctgcagctccggagcctacgggagtgtgaccctctcgcctcctggcgggaagctcttgaggagatattttcttttctaaacactaagaaatttgaggatggtggggcaaaac

SEQ ID NO: 745679 - DNA, 120 bp, Artificial Sequence
  ENSG00000204952_1 (sequence is synthesized)
gactaactcccactttcctgtgactctgtagccggaaaaactgtcaaaatctgtggataaatttgtgagacaagaagaagaatggcatccagaataaatacaaatttcactttgattccc

SEQ ID NO: 745680 - DNA, 120 bp, Artificial Sequence
  ENSG00000204952_2 (sequence is synthesized)
aaccagaaacttagacgtagtaatcgtcaaaccagctgttattccaagacccttggctcaggctttcaacccatatcaacatttggaaattttaaagccttaccattggaaatattccag

SEQ ID NO: 745681 - DNA, 120 bp, Artificial Sequence
  ENSG00000204952_3 (sequence is synthesized)
ataattttaaaatatttgtcagtgaaggatatcagcatgctaagcatggtgtccaaaacagtcagccaacacattattaattatatctcaacctcatcaggaagcaaaagacttttacta

SEQ ID NO: 745682 - DNA, 120 bp, Artificial Sequence
  ENSG00000204952_4 (sequence is synthesized)
caggactttcataaccttgagctgcctgacaggagacaagactctgctatactggagcactacagatctctaggtctactgtttaaaagatgcacattgctgctacccaccaaggaaagg

SEQ ID NO: 745683 - DNA, 120 bp, Artificial Sequence
  ENSG00000204952_5 (sequence is synthesized)
ctaaaatacattcacaagatactcacagaagtttcctgctttaaattcaatggctgtgcagctcctatgcagtgtttaggattaacatgttatggcatgtttttacagaccttaacagca

SEQ ID NO: 745684 - DNA, 120 bp, Artificial Sequence
  ENSG00000204952_6 (sequence is synthesized)
ggttgggatgaacttgagtgccatcgcgtttataatttcttatgcgaactgactaatctctgccgcaagatacaaatggctgtctgcagcaaaccaggaagtgcccaaaaactggagtta

SEQ ID NO: 745685 - DNA, 120 bp, Artificial Sequence
  ENSG00000204952_7 (sequence is synthesized)
agaatcagactcttctgtaggaatgtcctccttgatcattggacacatcgaagtgattctgctttttggttgacgcgaatattaaaaccatggccaatggtgaatcaggcaagattactg

SEQ ID NO: 745686 - DNA, 120 bp, Artificial Sequence
  ENSG00000204952_8 (sequence is synthesized)
tatatcatctttgggccaatatctcctcaagatggacaggtggtttggcaggaaatgatagaagaacctacagatgaattcagtctgaaaggtttggctgatgccattaagttactatat

SEQ ID NO: 745687 - DNA, 120 bp, Artificial Sequence
  ENSG00000204952_9 (sequence is synthesized)
agcagatgatgttatcagtcttgtagatgaactatcagtggttccccgtgagtggcttctagagaataatgcacgtctcctaatgctaagtggaaacaacatctgtttcagtttcatggc

SEQ ID NO: 745688 - DNA, 120 bp, Artificial Sequence
  ENSG00000204952_10 (sequence is synthesized)
tagtaaagctgtgaatggacgcaccattgaactggcaaggctcgtagtctttttggctttggtgtgtgagaaagaactgtactgcatggattggacagttaaaatgatgcaaaaagtctg

SEQ ID NO: 745689 - DNA, 120 bp, Artificial Sequence
  ENSG00000204952_11 (sequence is synthesized)
caaagtctttagcactccagtggaaagaaagaacttcctgcagaatgtggcaaatgcatttgcatgtgttataatggaaatgctgcaatcaattatgtctggagaccgtgatgaagatga

SEQ ID NO: 745690 - DNA, 120 bp, Artificial Sequence
  ENSG00000204952_12 (sequence is synthesized)
cagaagctttttgaatttgttccatcttgtacatgctcaggctaacttccataaggaggtcctgtatttgaccatgaatactcctctgtctacctaaatcctcagaaagccttgccttta

SEQ ID NO: 745691 - DNA, 120 bp, Artificial Sequence
  ENSG00000204952_13 (sequence is synthesized)
gagaacgtcactgaacgaatgattagaggagtgctactttttcactcaaaaaatagcatccatgggactttttatcatctaagtaacctaagaattcaaaagctggatagaattttagaa

SEQ ID NO: 745692 - DNA, 120 bp, Artificial Sequence
  ENSG00000204952_14 (sequence is synthesized)
gcaactacgtacatcattattaatataaaaataacaggcagcctcaagaatgtgctgagatttctctggaaaacaagctctgcctctccgggttttagtcaacctaacaccaaaccaaaa

SEQ ID NO: 745693 - DNA, 120 bp, Artificial Sequence
  ENSG00000204952_15 (sequence is synthesized)
tagaatgttagctgttcaagaatctgggaccagccaacctgtatgtatgcatttttgaagcaagagaaaattccattttatagttagacccaaattcactaaatagtgtgtatgttcact

SEQ ID NO: 745694 - DNA, 120 bp, Artificial Sequence
  ENSG00000204952_16 (sequence is synthesized)
ttgtttaagttgtatagacatagcccagaatgttttgtgaagatttgcaatatggtgttttggaatgtgtagaatacaaatcacagtttttactaccttcttggcatatgcttacaaaga

SEQ ID NO: 745695 - DNA, 120 bp, Artificial Sequence
  ENSG00000204952_17 (sequence is synthesized)
acattatattttgttcatgttttacatgaactaatggataaaaaacaaagtatacatatatgtctatatatatatatagacacacacacacagacatatatttccttctttaaggtaatc

SEQ ID NO: 745696 - DNA, 120 bp, Artificial Sequence
  ENSG00000204952_18 (sequence is synthesized)
atacaaaaggtctatacatacaggaaggtatatattgtctcaatgcaatcaaatcatcttttactggggattcaaataaaatgtagcaaataagagaaaaataaaatgaaagaaaatagc

SEQ ID NO: 745697 - DNA, 120 bp, Artificial Sequence
  ENSG00000204954_0 (sequence is synthesized)
gtattttgggtccggcctgctcgccgtccgctccgtccgcccttagacctgttgcccagcatccctgcagttcgcggtacagtctctagtagagcgcgtgtatagaggcagagaggagtg

SEQ ID NO: 745698 - DNA, 120 bp, Artificial Sequence
  ENSG00000204954_1 (sequence is synthesized)
aagtccacagttcctctcctccaagagcctgccgaccatgcccgcgggcgtgcccatgtccacctacctgaaaatgttcgcagccagtctcctggccatgtgcgcaggggcagaagtggt

SEQ ID NO: 745699 - DNA, 120 bp, Artificial Sequence
  ENSG00000204954_2 (sequence is synthesized)
gcacaggtactaccgaccggacctgacaatacctgaaattccaccaaagcgtggagaactcaaaacggagcttttgggactgaaagaaagaaaacacaaacctcaagtttctcaacagga

SEQ ID NO: 745700 - DNA, 120 bp, Artificial Sequence
  ENSG00000204954_3 (sequence is synthesized)
ggaacttaaataactatgccaagaattctgtgaataatataagtcttaaatatgtatttcttaatttattgcatcaaactacttgtccttaagcacttagtctaatgctaactgcaagag

SEQ ID NO: 745701 - DNA, 120 bp, Artificial Sequence
  ENSG00000204954_4 (sequence is synthesized)
gaggtgctcagtggatgtttagccgatacgttgaaatttaattacggtttgattgatatttcttgaaaactgccaaagcacatatcatcaaaccatttcatgaatatggtttggaagatg

SEQ ID NO: 745702 - DNA, 120 bp, Artificial Sequence
  ENSG00000204954_5 (sequence is synthesized)
tttagtcttgaatataacgcgaaatagaatatttgtaagtctactatatgggttgtctttatttcatataaattaagaaattatttaaaactatgaactagtttcattaattgaatttgc

SEQ ID NO: 745703 - DNA, 120 bp, Artificial Sequence
  ENSG00000204954_6 (sequence is synthesized)
taagtggagttatttctcattgctaaactgttttttttcaaattctagatctctgctaactttagtaaatgaacactaaagtggtgagctttgataatgcattttgtggatacaaaatca

SEQ ID NO: 745704 - DNA, 120 bp, Artificial Sequence
  ENSG00000204954_7 (sequence is synthesized)
gaaaggctgggggcattgctcaccttttgcgtgaagaaaagacctgtcccttagagccagtttttgcttaaggggaggacagaccgtcgtcacccagtggaccacgtgaatgaatggatg

SEQ ID NO: 745705 - DNA, 120 bp, Artificial Sequence
  ENSG00000204954_8 (sequence is synthesized)
cagtgcatgctttagaagcaccgcatacctccttttacaggtacagagtaagtggtctggctactgagggaaagagtcatgatttgaatccgagtcttctgtaagacaatgacttcatga

SEQ ID NO: 745706 - DNA, 120 bp, Artificial Sequence
  ENSG00000204954_9 (sequence is synthesized)
aggtgaaaaatcagttttatggttattaaagtaaaaatttaccttgggtaaaaatgccatctttatttcattaagtactggttctaagtgacttccaataagatacattttcttcctgtt

SEQ ID NO: 745707 - DNA, 120 bp, Artificial Sequence
  ENSG00000204954_10 (sequence is synthesized)
ttgaagttgatccccattgtgaaaaatatacattgtagtggtcatggaaatgcgccatccatactccctaaggcaggcttgttgccctagtatcaagcatgccagcagctttcaatggtc

SEQ ID NO: 745708 - DNA, 120 bp, Artificial Sequence
  ENSG00000204954_11 (sequence is synthesized)
agcttctagaaggattgcctcggctatggtggccttgctcaaagccatgcctcctgaaggggcccaaatccagtgactgttggaggtgagaatagaaaggcctggccacttcagcacgtg

SEQ ID NO: 745709 - DNA, 120 bp, Artificial Sequence
  ENSG00000204954_12 (sequence is synthesized)
agtggtgggcaactctgctgggcccaccacaactccctatggggtttagggacactgtctttggatctgcattgcaactcaacttatacctctgctcagtcctgtttcctttctcaggtg

SEQ ID NO: 745710 - DNA, 120 bp, Artificial Sequence
  ENSG00000204954_13 (sequence is synthesized)
ttgatcgaagggtgtgccttcatagaccccctgctaaactgcacctcagtgtttcttggagaaccaaatctgtaacatatatgcattaaaaattaaaggcagtactatattatcccctaa

SEQ ID NO: 745711 - DNA, 120 bp, Artificial Sequence
  ENSG00000204954_14 (sequence is synthesized)
tcacgtgcctgcgccggcagcgctcccactttcctgtccggtgcggccccgggtccctgtattttgggtccggcctgctcgccgtccgctccgtccgcccttagacctgttgcccagcat

SEQ ID NO: 745712 - DNA, 120 bp, Artificial Sequence
  ENSG00000204954_15 (sequence is synthesized)
aggtagaaggggcgcggggaaacgacctggtatcggttttccgcttgctgatcaagagctccctttaatgccgcacgcaggccggcgcccctcactgataaacgattggggctgggcctc

SEQ ID NO: 745713 - DNA, 120 bp, Artificial Sequence
  ENSG00000204954_16 (sequence is synthesized)
ggcctggagggcgttcgtcctctcagtgccctcagctcgtaaaggaggaaaccgaggcgtggggttgggcgagaacccaggggtcctcctgcacccccgccgccgtgtgtctcgtgtcca

SEQ ID NO: 745714 - DNA, 120 bp, Artificial Sequence
  ENSG00000204954_17 (sequence is synthesized)
cagaagacggggactaggagcgctctgccgacgtcagcttttgtctccagtattttcgggggctggtggacgcgtgggcgatagggtgctgtccttggggtgctgtgtatatgggatgat

SEQ ID NO: 745715 - DNA, 120 bp, Artificial Sequence
  ENSG00000204954_18 (sequence is synthesized)
cccaagctttctgtttggtatgtctcttttttgctcctgttcataaaataatccaatactcttgtaaaacattcaaattgagttcaagtatgtagagtaaaaagtgaaaatcccccctct

SEQ ID NO: 745716 - DNA, 120 bp, Artificial Sequence
  ENSG00000204954_19 (sequence is synthesized)
tataacctcctttctcctgtctgctcacgacacgttaactactgtttcttgtttggtgaatatcctttactacttctcactgttgttgaatgtccactgatacgggttggatatttgtct

SEQ ID NO: 745717 - DNA, 120 bp, Artificial Sequence
  ENSG00000204954_20 (sequence is synthesized)
atgcccgcgggcgtgcccatgtccacctacctgaaaatgttcgcagccagtctcctggccatgtgcgcaggggcagaagtggtgcacaggtactaccgaccggacctggtgtgaatagtg

SEQ ID NO: 745718 - DNA, 120 bp, Artificial Sequence
  ENSG00000204954_21 (sequence is synthesized)
gtttggagcacaatgttgggagcagtcatttctgtttggactctgcctggacagatgagaaacaggttgagaagagtgaagttgatttctcaaagtcacatagcttagtgagacgatttg

SEQ ID NO: 745719 - DNA, 120 bp, Artificial Sequence
  ENSG00000204954_22 (sequence is synthesized)
gcccaagctttctgtttgcaaaactggatcacaagtctttcggtcggagaactggaaggtctgggcagagtcgagcagaggagaccatgatgactgcctagacttgtgctcagtgctgtg

SEQ ID NO: 745720 - DNA, 120 bp, Artificial Sequence
  ENSG00000204954_23 (sequence is synthesized)
gtgcatgctttagaagcaccgcatacctccttttacagatgtttgaaacttcattattaaatgttgggagaaaaagaatcagattcttaggatctgataactccagaaagaaaggaaatt

SEQ ID NO: 745721 - DNA, 120 bp, Artificial Sequence
  ENSG00000204954_24 (sequence is synthesized)
catctgaagaatcatggaccagacccaaaatctggttttactccacaaatggagcctgtcctctgaaccccaatcaaacagcaaagtggagagtttcttcccagagacacttaccttaag

SEQ ID NO: 745722 - DNA, 120 bp, Artificial Sequence
  ENSG00000204954_25 (sequence is synthesized)
cagtttatgttgctgaagagtctcgcgggaaacattcaaggggagatcatctgagtccaccttcagatggcaaaagaaagttcagtgagcaataaaaccactggaagaaagcaaagccaa

SEQ ID NO: 745723 - DNA, 120 bp, Artificial Sequence
  ENSG00000204954_26 (sequence is synthesized)
acaaacactctacactgccagacccccacaacaatcaccccttctcccaaacttcagatacttaccacacccttgacaaaattgaggtatttaggcatcatatcatggaagtcgtctgtg

SEQ ID NO: 745724 - DNA, 120 bp, Artificial Sequence
  ENSG00000204954_27 (sequence is synthesized)
tctggaaattaaactttcaaattttaaacgcagcatgtactacttaaaaactcaccttaatgtaatcgctctttttagatccatattcgtcaaacagaccacgtggagcagatgtgggta

SEQ ID NO: 745725 - DNA, 120 bp, Artificial Sequence
  ENSG00000204954_28 (sequence is synthesized)
caaataaaattgatttgaaggtaacttccccttcagcagtaaagtgaatataagccatggggtcatcactttcctgtggaaagttggtatcttagtcattcaaacgacacaggagaaaag

SEQ ID NO: 745726 - DNA, 120 bp, Artificial Sequence
  ENSG00000204954_29 (sequence is synthesized)
cagtgcaagaactaagcaatgtactatgtggtacatattcagtttagcaattaactaacaaaaaattttcctttactggcgggaggtggggaagagaaagaaaagggtggggggaagaga

SEQ ID NO: 745727 - DNA, 120 bp, Artificial Sequence
  ENSG00000204954_30 (sequence is synthesized)
aagaaaagggtggagtgaagaaatatctagaattgcaattctaattcactagacatggttgttttgatgatgattgtcaataacattatttcctaaactctcagaaggaaggatgagttt

SEQ ID NO: 745728 - DNA, 120 bp, Artificial Sequence
  ENSG00000204954_31 (sequence is synthesized)
atacttcttacgtatgagagaagtgaataggaaaaccaccaccctgcctaaatgacaaaattacatacaacacttcagtgtgcccttgaactacagtaagtactcaagaacatgtttctt

SEQ ID NO: 745729 - DNA, 120 bp, Artificial Sequence
  ENSG00000204954_32 (sequence is synthesized)
ccatggaacttagctctaagagtggctacaaagatgtatgtaaatacctgtaaaacaaagttggaaattctcttgatctgcattatctattactgtatatggctgttaagcactgaaatg

SEQ ID NO: 745730 - DNA, 120 bp, Artificial Sequence
  ENSG00000204954_33 (sequence is synthesized)
tagctagttcaaattcagatgtgctattaaagtgtaaaatacattttgaaggcacagtacaaattttaaaaaggatataaaatgtctcattattagtttttatattgattatgttgaaat

SEQ ID NO: 745731 - DNA, 120 bp, Artificial Sequence
  ENSG00000204954_34 (sequence is synthesized)
gcaatgcagatgctcctggaccactccattctcctcgtggcagcaaaagtgatcttgaacgaaattaggatcacatttgccctgggcccaaaacctttggatggcatcccattgcatcta

SEQ ID NO: 745732 - DNA, 120 bp, Artificial Sequence
  ENSG00000204954_35 (sequence is synthesized)
gggcaatgcatggcctgtgaggtcttacacagtctggccgctgcctacctgtggcctatctgccaccattttaccagttctttcccctgttaacattcacgcctgcttccttgctgtttc

SEQ ID NO: 745733 - DNA, 120 bp, Artificial Sequence
  ENSG00000204956_0 (sequence is synthesized)
atgaagattcagaaaaagctgactggctgcagcaggctgatgcttctgtgtctttctctggagctgctgttggaagctggggctgggaatattcactactcagtgccggaagagacagac

SEQ ID NO: 745734 - DNA, 120 bp, Artificial Sequence
  ENSG00000204956_1 (sequence is synthesized)
aaaggttccttcgtaggcaacatcgccaaggacctagggctgcaaccccaggagctggcagatggcggagtccgcatcgtctccagaggtaggatgccgcttttcgctctgaatcctaga

SEQ ID NO: 745735 - DNA, 120 bp, Artificial Sequence
  ENSG00000204956_2 (sequence is synthesized)
agtggcagcttgatcaccgcgcgcaggatagaccgggaggagctctgcgctcagagcatgccgtgtctcgtgagttttaatatccttgttgaggataaaatgaagctttttcctgttgaa

SEQ ID NO: 745736 - DNA, 120 bp, Artificial Sequence
  ENSG00000204956_3 (sequence is synthesized)
gtagaaataattgatattaatgacaacactccccaattccagttagaggaactggagtttaaaatgaatgaaataacgactccaggtaccagagtctcattgccttttgggcaagacctt

SEQ ID NO: 745737 - DNA, 120 bp, Artificial Sequence
  ENSG00000204956_4 (sequence is synthesized)
gatgtgggtatgaactcactccagagctaccaactcagctctaaccctcatttctccctggatgtgcaacagggagccgatgggcctcaacatccagagatggtgctgcagagtccctta

SEQ ID NO: 745738 - DNA, 120 bp, Artificial Sequence
  ENSG00000204956_5 (sequence is synthesized)
gacagagaagaagaagctgtccaccacctcatcctcacagcttctgatgggggtgaaccagtccgttcagggaccctcagaatttacattcaggtggtggatgcaaatgacaatcctcca

SEQ ID NO: 745739 - DNA, 120 bp, Artificial Sequence
  ENSG00000204956_6 (sequence is synthesized)
gcatttactcaggcacaataccatataaatgtccccgaaaacgtgccgctgggtactcagctgctcatggtaaatgccactgaccctgatgagggagccaatggggaagtaacgtactcc

SEQ ID NO: 745740 - DNA, 120 bp, Artificial Sequence
  ENSG00000204956_7 (sequence is synthesized)
tttcacaatgtagaccacagagtggcccaaatatttcgtttagattcttacacaggagaaatatcaaataaagaaccactagatttcgaagaatacaaaatgtattcaatggaagttcaa

SEQ ID NO: 745741 - DNA, 120 bp, Artificial Sequence
  ENSG00000204956_8 (sequence is synthesized)
gcccaggatggtgcggggctcatggctaaagttaaggtactgatcaaagttttggatgtaaatgataatgccccagaagtgaccatcacctctgtcaccactgcagttccagaaaacttt

SEQ ID NO: 745742 - DNA, 120 bp, Artificial Sequence
  ENSG00000204956_9 (sequence is synthesized)
cctcctgggaccataattgctcttatcagtgtgcatgaccaggactcaggagacaatggctacaccacatgtttcattcctggaaatttaccctttaaattggaaaagttagttgataat

SEQ ID NO: 745743 - DNA, 120 bp, Artificial Sequence
  ENSG00000204956_10 (sequence is synthesized)
tattaccgtttagtgactgaaagaacactggacagagaacttatctctgggtacaacatcacaataacagcaatagaccaaggaactccagctctatctactgaaactcacatttcacta

SEQ ID NO: 745744 - DNA, 120 bp, Artificial Sequence
  ENSG00000204956_11 (sequence is synthesized)
ctagtgacagatatcaatgacaactccccagtcttccatcaggactcctactctgcctacattcccgaaaacaaccccagaggagcctccatcttctctgtgagggcccacgacttggac

SEQ ID NO: 745745 - DNA, 120 bp, Artificial Sequence
  ENSG00000204956_12 (sequence is synthesized)
agcaatgagaatgcacaaatcacttactccctaatagaggacactatccagggggcacccctatctgcctacctctccatcaactccgacactggggtcctgtatgcgctgcgatccttc

SEQ ID NO: 745746 - DNA, 120 bp, Artificial Sequence
  ENSG00000204956_13 (sequence is synthesized)
gactatgagcagttccgggacatgcaactgaaagtgatggcgcgggacagtggggatccgcccctcagcagcaacgtgtctctcagcctattcctgctggaccagaacgacaacgcgccc

SEQ ID NO: 745747 - DNA, 120 bp, Artificial Sequence
  ENSG00000204956_14 (sequence is synthesized)
accagaacgacaacgcgcccgagatcctgtaccccgccctccccacagatggttctaccggcgtggagctggcgcccctctccgcagagcccggctacctggtgaccaaggtggtggcgg

SEQ ID NO: 745748 - DNA, 120 bp, Artificial Sequence
  ENSG00000204956_15 (sequence is synthesized)
aacgcctggctgtcctaccgcctgctcaaggccagcgagccgggactcttctcggtgggtctgcacacgggcgaggtgcgcacggcgcgagccctgctggacagagacgcgctcaagcag

SEQ ID NO: 745749 - DNA, 120 bp, Artificial Sequence
  ENSG00000204956_16 (sequence is synthesized)
agtctcgtggtggccgtccaggaccacggccagcccccgctctccgccactgtcacgctcaccgtggccgtggccgacaggatctccgacatcctggccgacctgggcagcctcgagccc

SEQ ID NO: 745750 - DNA, 120 bp, Artificial Sequence
  ENSG00000204956_17 (sequence is synthesized)
tccgccaaacccaacgattcggacctcactctgtacctggtggtggcggcggccgcggtctcctgcgtcttcctggccttcgtcatcgtgctgctggcgcacaggctgcggcgctggcac

SEQ ID NO: 745751 - DNA, 120 bp, Artificial Sequence
  ENSG00000204956_18 (sequence is synthesized)
aagtcacgtctgctacaggcttcgggaggcggcttagcgagcatgcccggttcgcactttgtgggcgtggacggggttcgggctttcctgcagacctattcccacgaggtctccctcact

SEQ ID NO: 745752 - DNA, 120 bp, Artificial Sequence
  ENSG00000204956_19 (sequence is synthesized)
tgcggacacactcatcagccaggagagctgtgagaaaaagggttttctatcagcaccccagtctttacttgaagacaaaaaggaaccattttctcagcaagccccgcccaacacggactg

SEQ ID NO: 745753 - DNA, 120 bp, Artificial Sequence
  ENSG00000204956_20 (sequence is synthesized)
gcgtttctctcaggcccagagacccggcaccagcggctcccaaaatggcgatgacaccggcacctggcccaacaaccagtttgacacagagatgctgcaagccatgatcttggcgtccgc

SEQ ID NO: 745754 - DNA, 120 bp, Artificial Sequence
  ENSG00000204956_21 (sequence is synthesized)
cagtgaagctgctgatgggagctccaccctgggagggggtgccggcaccatgggattgagcgcccgctacggaccccagttcaccctgcagcacgtgcccgactaccgccagaatgtcta

SEQ ID NO: 745755 - DNA, 120 bp, Artificial Sequence
  ENSG00000204956_22 (sequence is synthesized)
catcccaggcagcaatgccacactgaccaacgcagctggcaagcgggatggcaaggccccagcaggtggcaatggcaacaagaagaagtcgggcaagaaggagaagaagtaacatggagg

SEQ ID NO: 745756 - DNA, 120 bp, Artificial Sequence
  ENSG00000204956_23 (sequence is synthesized)
ccaggccaagagccacagggcggcctctccccaaccagcccagcttctccttacctgcacccaggcctcagagtttcagggctaacccccagaatactggtaggggccaaggccatgctc

SEQ ID NO: 745757 - DNA, 120 bp, Artificial Sequence
  ENSG00000204956_24 (sequence is synthesized)
cccttgggaaacagaaacaagtgcccagtcagcacctaccccttcccccccagggggttgaatatgcaaaagcagttccgctgggaacccccatccaatcaactgctgtacccatggggg

SEQ ID NO: 745758 - DNA, 120 bp, Artificial Sequence
  ENSG00000204956_25 (sequence is synthesized)
tagtggggttactgtagacaccaagaaccatttgccacaccccgtttagttacagctgaactcctccatcttccaaatcaatcaggcccatccatcccatgcctccctcctccccacccc

SEQ ID NO: 745759 - DNA, 120 bp, Artificial Sequence
  ENSG00000204956_26 (sequence is synthesized)
actccaacagttcctctttcccgagtaaggtggttggggtgttgaagtaccaagtaacctacaagcctcctagttctgaaaagttggaagggcatcatgacctcttggcctctcctttga

SEQ ID NO: 745760 - DNA, 120 bp, Artificial Sequence
  ENSG00000204956_27 (sequence is synthesized)
ttctcaatcttcccccaaagcatggtttggtgccagccccttcacctccttccagagcccaagatcaatgctcaagttttggaggacatgatcaccatccccatggtactgatgcttgct

SEQ ID NO: 745761 - DNA, 120 bp, Artificial Sequence
  ENSG00000204956_28 (sequence is synthesized)
ggatttagggagggcattttgctaccaagcctcttcccaacgccctggggaccagtcttctgttttgtttttcattgtttgacgtttccactgcatgccttgacttcccccacctcctcc

SEQ ID NO: 745762 - DNA, 120 bp, Artificial Sequence
  ENSG00000204956_29 (sequence is synthesized)
tcaaacaagagactccactgcatgttccaagacagtatggggtggtaagataaggaagggaagtgtgtggatgtggatggtgggggcatggacaaagcttgacacatcaagttatcaagg

SEQ ID NO: 745763 - DNA, 120 bp, Artificial Sequence
  ENSG00000204956_30 (sequence is synthesized)
ccttggaggaggctctgtatgtcctcaggggactgacaacatcctccagattccagccataaaccaataactaggctggacccttcccactacataatagggctcagcccaggcagccag

SEQ ID NO: 745764 - DNA, 120 bp, Artificial Sequence
  ENSG00000204956_31 (sequence is synthesized)
ctttgggctgagctaacaggaccaatggattaaactggcatttcagtccaaggaagctcgaagcaggtttaggaccaggtccccttgagaggtcagaggggcctctgtgggtgctgggta

SEQ ID NO: 745765 - DNA, 120 bp, Artificial Sequence
  ENSG00000204956_32 (sequence is synthesized)
ctccagaggtgccactggtggaagggtcagcggagccccagcaggaagggtgggccagccaggccattcttagtccctgggttggggaggcagggagctagggcagggaccaaatgaaca

SEQ ID NO: 745766 - DNA, 120 bp, Artificial Sequence
  ENSG00000204956_33 (sequence is synthesized)
gaaagtctcagcccaggatggggcttcttcaacagggcccctgccctcctgaagcctcagtccttcaccttgccaggtgccgtttctcttccgtgaaggccactgcccaggtccccagtg

SEQ ID NO: 745767 - DNA, 120 bp, Artificial Sequence
  ENSG00000204956_34 (sequence is synthesized)
cgccccctagtggccatagcctggttaaagttccccagtgcctccttgtgcatagaccttcttctcccacccccttctgcccctgggtccccggccatccagcggggctgccagagaacc

SEQ ID NO: 745768 - DNA, 120 bp, Artificial Sequence
  ENSG00000204956_35 (sequence is synthesized)
ccagacctgcccttacagtagtgtagcgccccctccctctttcggctggtgtagaatagccagtagtgtagtgcggtgtgcttttacgtgatggcgggtgggcagcgggcggcgggctcc

SEQ ID NO: 745769 - DNA, 120 bp, Artificial Sequence
  ENSG00000204956_36 (sequence is synthesized)
gcgcagccgtctgtccttgatctgcccgcggcggcccgtgttgtgttttgtgctgtgtccacgcgctaaggcgaccccctcccccgtactgacttctcctataagcgcttctcttcgcat

SEQ ID NO: 745770 - DNA, 120 bp, Artificial Sequence
  ENSG00000204956_37 (sequence is synthesized)
agtcacgtagctcccaccccaccctcttcctgtgtctcacgcaagttttatactctaatatttatatggctttttttcttcgacaaaaaaataataaaacgtttcttctgaaaagctgaa

SEQ ID NO: 745771 - DNA, 120 bp, Artificial Sequence
  ENSG00000204956_38 (sequence is synthesized)
aacccatgtatctttgtagctttttattacaagtcctgcaaaatcacgattgagtctacacgttcatatgcaggtatatttataattgttcttgcactgaaaaggagactgtgatcataa

SEQ ID NO: 745772 - DNA, 120 bp, Artificial Sequence
  ENSG00000204956_39 (sequence is synthesized)
tgtaggtggttgggttgaaggtatgtgtgagatgccatctctgtttggaaagagcactgcattagaaacggcgatctagcttctaacattttcttacttgcctctgggctaaaaggtttg

SEQ ID NO: 745773 - DNA, 120 bp, Artificial Sequence
  ENSG00000204956_40 (sequence is synthesized)
attagaaaaggctcaccaatatttaaatgactaacactattttcaaattttctttttataagtacctgctaatctacccctgaatttaatgtagatgtcatctgtcaggacactgtgata

SEQ ID NO: 745774 - DNA, 120 bp, Artificial Sequence
  ENSG00000204956_41 (sequence is synthesized)
gtttatttggggacatttgaagaggtgaagattgtctaaagtagtatttttagttgtgttcatataagattatagagatctatataaactgcaattttaaattattgttgaatattttag

SEQ ID NO: 745775 - DNA, 120 bp, Artificial Sequence
  ENSG00000204956_42 (sequence is synthesized)
taaactgcaattttaaattattgttgaatattttagccttttattctatctttattatcagatttttttggttttgagatggggtcatgctagagtgcagtggcatgatcatggctcact

SEQ ID NO: 745776 - DNA, 120 bp, Artificial Sequence
  ENSG00000204956_43 (sequence is synthesized)
cctcagcctctcaaagtgctgatattacaggtgtgagctgtggtgcctgtactgaagaatacgtctatttaagtaatgtatgaagtaacaaaatgaacaacacaaaatttatcatgcaac

SEQ ID NO: 745777 - DNA, 120 bp, Artificial Sequence
  ENSG00000204956_44 (sequence is synthesized)
ttgagaaatatctttgaagcctcctgacttatacattatacctgtaatgaaatcagctaacaaaaatcaagtatatatcctattttaatgtgtgttaacttttcagaagaaaaaaaaagt

SEQ ID NO: 745778 - DNA, 120 bp, Artificial Sequence
  ENSG00000204956_45 (sequence is synthesized)
atggtcggggagtaagtccatgctttgatgtatttactctgctccaataaaatacagagatacataaaatataagaggaaagcaaaagcaaagtggtgagctagtctaaagccatgtgag

SEQ ID NO: 745779 - DNA, 120 bp, Artificial Sequence
  ENSG00000204956_46 (sequence is synthesized)
ttatagtcttggacttaaaagcagaaattgaaggttaggaaactgcctccagcaatgtaatagggacagaagtgcttcagactagataaatatctggaccaggcttactgcctgaatcca

SEQ ID NO: 745780 - DNA, 120 bp, Artificial Sequence
  ENSG00000204956_47 (sequence is synthesized)
aaataagcaatgaggcccttcagctggttaaaaaggaaaagaaagatgcattaacatgctgcctagctgggcgcagtggctcacgtctgtatttccaacaatttgagaggctgaggcgga

SEQ ID NO: 745781 - DNA, 120 bp, Artificial Sequence
  ENSG00000204956_48 (sequence is synthesized)
aagatccttggagccctggagttcaagaccagccggacagggcggcctgcgactgtagtcccagctacgcggggcggggaggggcggggcggggcggggcaggagctgacgtgggaggat

SEQ ID NO: 745782 - DNA, 84 bp, Artificial Sequence
  ENSG00000204956_49 (sequence is synthesized)
ggggcggggcggggcggggcaggagctgacgtgggaggatcccttgagcccaggaagtcaaggcttcagcgaaccgtcacaccc

SEQ ID NO: 745783 - DNA, 120 bp, Artificial Sequence
  ENSG00000204961_0 (sequence is synthesized)
acttggacgttggaataagatagtaaaactcacaacaaaactttgtagaacttagtcaggaaaagaatctcaagcatagctttaaaaacagaaattgccccgagtactaaggatgagcaa

SEQ ID NO: 745784 - DNA, 120 bp, Artificial Sequence
  ENSG00000204961_1 (sequence is synthesized)
taatgaaattaaaacatattgtaataacattacacaaactatattggagactacaaagaagagattattcatagattataaagcttggaaagaatcaaaacaacacatttctggaaacag

SEQ ID NO: 745785 - DNA, 120 bp, Artificial Sequence
  ENSG00000204961_2 (sequence is synthesized)
attgtataaatgctacaaaagagaaaaatatattttctccccacgcaacacaagaccttaaagtcaattctcgcttttcttgcaatattttataccttttcaattcatagaattactcaa

SEQ ID NO: 745786 - DNA, 120 bp, Artificial Sequence
  ENSG00000204961_3 (sequence is synthesized)
gaaaactacctcagttggttgctactttttgttgattccttttaccagacatgactaagtttctttttcatcagtagatttctgggctcctatattcactagagattgcaactcctggat

SEQ ID NO: 745787 - DNA, 120 bp, Artificial Sequence
  ENSG00000204961_4 (sequence is synthesized)
ttctcttacactagaatcctatttcgagccatatgggagattctgaattccagaacaaaagaattttgtaatttaaaattcgtgattgctcaatggaatcattttaattgttacttcatt

SEQ ID NO: 745788 - DNA, 120 bp, Artificial Sequence
  ENSG00000204961_5 (sequence is synthesized)
tctgtcgttatttaaaacttaagtggagagttttctcagggataagaaaaccacaatcaaggtcatacaaaacttttagaggcagtcagtctgctaagaaggctccagcaagagaaacgg

SEQ ID NO: 745789 - DNA, 120 bp, Artificial Sequence
  ENSG00000204961_6 (sequence is synthesized)
gatcttctgtttcaacaatcattacttaagaaaaaattaagaaaatgaaataagttttgcagaataactgtgaaatttttattcatgaaatatgtacttacactttgggccacgtgatgt

SEQ ID NO: 745790 - DNA, 120 bp, Artificial Sequence
  ENSG00000204961_7 (sequence is synthesized)
cactctttgccgcgatgttctctctgaatccagacaaatacagcccttttcccatgggaaagaggctcaattctttttcactctctctgtgctgaacgatggcgaacacagcagaatggg

SEQ ID NO: 745791 - DNA, 120 bp, Artificial Sequence
  ENSG00000204961_8 (sequence is synthesized)
actgacgaaatcagatgatttcttctaatttggaggcaattttcactaattagaagaagactgagtatttgaaatgttatactcaagtcgaggagatccagagggtcagcctctactgct

SEQ ID NO: 745792 - DNA, 120 bp, Artificial Sequence
  ENSG00000204961_9 (sequence is synthesized)
ctcgcttctgatcctcgcaatgtgggtggtggggagcggccagctccactactccgtcccggaggaagccgaacacggcaccttcgtgggccgcatcgcgcaggacctggggctggagct

SEQ ID NO: 745793 - DNA, 90 bp, Artificial Sequence
  ENSG00000204961_10 (sequence is synthesized)
ccttcgtgggccgcatcgcgcaggacctggggctggagctggcggagctggtgccgcgcctgttccagttggattccaaaggccgcgggg

SEQ ID NO: 745794 - DNA, 120 bp, Artificial Sequence
  ENSG00000204961_11 (sequence is synthesized)
cgggcggagcgcggagtgcagcatccacctggaggtgatcgtagacaggccgctgcaggttttccatgtggacgtggaggtgaaggacattaacgacaaccctccagtgttcccagcgac

SEQ ID NO: 745795 - DNA, 120 bp, Artificial Sequence
  ENSG00000204961_12 (sequence is synthesized)
acaaaagaatctgttcatcgcggaatccaggccgcttgactctcggtttccactagagggcgcgtccgatgcagatatcggggagaacgccctgctcacttacagactgagccccaatga

SEQ ID NO: 745796 - DNA, 120 bp, Artificial Sequence
  ENSG00000204961_13 (sequence is synthesized)
gtatttcttcctggacgtgccaaccagcaaccagcaggtaaaacctcttggacttgtattacggaaacttttagacagagaagaaactccggagcttcatttattgctcacggccaccga

SEQ ID NO: 745797 - DNA, 120 bp, Artificial Sequence
  ENSG00000204961_14 (sequence is synthesized)
tggaggcaaacccgagctgactggcaccgttcaattactcatcacggtactggacaacaatgacaatgccccagtgttcgacagaaccctgtatacggtgaaattaccagaaaacgtttc

SEQ ID NO: 745798 - DNA, 120 bp, Artificial Sequence
  ENSG00000204961_15 (sequence is synthesized)
tatcggaacgctggtgattcaccccaatgcctcagatttagacgaaggcttgaatggggatattatttactccttctccagtgatgtttctccagatataaaatccaagttccacatgga

SEQ ID NO: 745799 - DNA, 120 bp, Artificial Sequence
  ENSG00000204961_16 (sequence is synthesized)
ccccttaagtggggcaatcacagtgataggacatatggattttgaagaaagtagagcacacaagatcccagtcgaggctgtcgataaaggcttcccacccctggctggtcattgtacact

SEQ ID NO: 745800 - DNA, 120 bp, Artificial Sequence
  ENSG00000204961_17 (sequence is synthesized)
tcttgtggaagttgtggatgtaaatgacaatgctccacagttgactatcaaaacgctctcggttcctgtaaaagaggacgcacaactggggacagttattgccctgattagtgtgatcga

SEQ ID NO: 745801 - DNA, 120 bp, Artificial Sequence
  ENSG00000204961_18 (sequence is synthesized)
cctagacgcagatgccaacgggcaggttacctgctccctgacgccccacgtccccttcaagctggtgtccacctacaagaattactactcgttggtgctggacagagctctggaccgcga

SEQ ID NO: 745802 - DNA, 120 bp, Artificial Sequence
  ENSG00000204961_19 (sequence is synthesized)
gagtgtgtccgcctacgagctggtggttaccgcgcgggacgggggctcgccttcactgtgggccacggccagggtgtctgtggaggtggccgacgtgaacgacaacgcaccagcgttcgc

SEQ ID NO: 745803 - DNA, 120 bp, Artificial Sequence
  ENSG00000204961_20 (sequence is synthesized)
gcagtccgagtacacggtgttcgtgaaggagaacaacccgccgggctgccacatcttcacggtgtctgcgcgggacgctgacgcgcaggagaacgccctggtgtcctactcgctggtgga

SEQ ID NO: 745804 - DNA, 120 bp, Artificial Sequence
  ENSG00000204961_21 (sequence is synthesized)
gcggcggttgggcgagcgctcgctgtcgagctacgtgtcagtgcacgcggagagcggcaaggtgtacgcgctgcagccgttggaccacgaggagctggagctgctacagttccaggtgag

SEQ ID NO: 745805 - DNA, 90 bp, Artificial Sequence
  ENSG00000204961_22 (sequence is synthesized)
gacaatgcgccggcgctgctgacacctcggatgaggggcactgacggcgcagtgagcgagatggtgctgcggtcggtgggcgccggcgta

SEQ ID NO: 745806 - DNA, 120 bp, Artificial Sequence
  ENSG00000204961_23 (sequence is synthesized)
agtgagcgagatggtgctgcggtcggtgggcgccggcgtagtggtggggaaggtgcgcgcagtggacgccgactcgggctacaacgcgtggctttcatacgagctgcagccagaaacggc

SEQ ID NO: 745807 - DNA, 120 bp, Artificial Sequence
  ENSG00000204961_24 (sequence is synthesized)
cagcgcgagcatcccgttccgcgtggggctgtacacgggcgagatcagcacaacgcgtgccctggacgaaacggacgcaccgcgccagcgcctactggtgctggtgaaagaccacgggga

SEQ ID NO: 745808 - DNA, 120 bp, Artificial Sequence
  ENSG00000204961_25 (sequence is synthesized)
gccagcgctgacggccacggccactgtgctggtgtcgctggtggagagcggccaggcgccaaagtcatcgtcgcgggcgtcagtgggtgccacgggccccgaggtgacgctggtggatgt

SEQ ID NO: 745809 - DNA, 120 bp, Artificial Sequence
  ENSG00000204961_26 (sequence is synthesized)
cgctgctgctgtacactgtgctgcggtgctcggcgatgcccaccgagggcgagtgcgcgcctggcaagccgacgctggtgtgttctagcgcggtggggagttggtcgtactcgcagcaga

SEQ ID NO: 745810 - DNA, 120 bp, Artificial Sequence
  ENSG00000204961_27 (sequence is synthesized)
ggaggcagagggtgtgctctggcgagggtaagcagaagaccgacctcatggccttcagcccgggcctttctccttgtgctggatctacagagcgaacgggagaaccctctgcttcctcag

SEQ ID NO: 745811 - DNA, 120 bp, Artificial Sequence
  ENSG00000204961_28 (sequence is synthesized)
attcaactgggaagccacgacagcccaaccctgactggcgttactctgcctccctgagagcaggcatgcacagctctgtgcacctagaggaggctggcattctacgggctggtccaggag

SEQ ID NO: 745812 - DNA, 120 bp, Artificial Sequence
  ENSG00000204961_29 (sequence is synthesized)
ggcctgatcagcagtggccaacagtatccagtgcaacaccagaaccagaggcaggagaagtgtcccctccagtcggtgcgggtgtcaacagcaacagctggacctttaaatacggaccag

SEQ ID NO: 745813 - DNA, 120 bp, Artificial Sequence
  ENSG00000204961_30 (sequence is synthesized)
gcaaccccaaacaatccggtcccggtgagttgcccgacaaattcattatcccaggatctcctgcaatcatctccatccggcaggagcctactaacagccaaattgacaaaagtgacttca

SEQ ID NO: 745814 - DNA, 120 bp, Artificial Sequence
  ENSG00000204961_31 (sequence is synthesized)
taaccttcggcaaaaaggaggagaccaagaaaaagaagaaaaagaagaagggtaacaagacccaggagaaaaaagagaaagggaacagcacgactgacaacagtgaccagtgaggtcctc

SEQ ID NO: 745815 - DNA, 120 bp, Artificial Sequence
  ENSG00000204961_32 (sequence is synthesized)
aaatggaaacaagccacttagccagtttttgtaataatggcaaatctctcccatgtagcaattccctgctcctttttcctatctacatgagccctcttagagacctcagaaatctgcaga

SEQ ID NO: 745816 - DNA, 120 bp, Artificial Sequence
  ENSG00000204961_33 (sequence is synthesized)
aagttccctgtgtctgtctagaacgcatttaacaggttttgtcgtaaaagctttactaagtctggtgttaactctttctctccactctggcttgttttcagaacctaaaaagcagaccca

SEQ ID NO: 745817 - DNA, 120 bp, Artificial Sequence
  ENSG00000204961_34 (sequence is synthesized)
agtttcctttctcctccgccgcaaaggagaggcttcccagccccgccagtgagaggttggactctctgccctgtgctccggggatcctgtcttgatgacacttgcagggcaggctgaaaa

SEQ ID NO: 745818 - DNA, 120 bp, Artificial Sequence
  ENSG00000204961_35 (sequence is synthesized)
gttttgagattgagcagcttgggagtttgtggccactgggtatgtgtggctaccgcgggtatgcgagtgccagatattggctgagacgagccagcttagactaattggtacaaggaaggc

SEQ ID NO: 745819 - DNA, 120 bp, Artificial Sequence
  ENSG00000204961_36 (sequence is synthesized)
aagaaaacaaagacaaataaacagcggaagttatcagtatggaggggaagtgtaaacttaaagggaccagactttctaaatcttacaactcaagaggtggcagccaccctctaggagaca

SEQ ID NO: 745820 - DNA, 120 bp, Artificial Sequence
  ENSG00000204961_37 (sequence is synthesized)
aaactacccccactgacaaggctttaggagaccctaaagtctgttggctgtgacgtcattatacctaaaatctgcatcatacctgcaagccaacagttcagtgttttaacagagaaccac

SEQ ID NO: 745821 - DNA, 120 bp, Artificial Sequence
  ENSG00000204961_38 (sequence is synthesized)
cctgggaaacagaagcagatctgatgtgtttcctatacatgtcctgtgctcactttattaaaaattcttttgcacacaatgtttatgaaaaggccagatccttttccaatacttatgcaa

SEQ ID NO: 745822 - DNA, 120 bp, Artificial Sequence
  ENSG00000204961_39 (sequence is synthesized)
aagcaaaagaaaaccccgacacctcacctttcgctgtttgttgtttcatagatttatttaaaaaaagagaaagtctatagctataaatctttaaagagaaatatgaatacaattccccta

SEQ ID NO: 745823 - DNA, 120 bp, Artificial Sequence
  ENSG00000204961_40 (sequence is synthesized)
aactctcctcaaaagagaattcagtctacagccatttaaatgatcattgctgctacagaagtgctttaagagaattgcctgaaacatctgtattatatcggccacctgccaatcacagct

SEQ ID NO: 745824 - DNA, 120 bp, Artificial Sequence
  ENSG00000204961_41 (sequence is synthesized)
ttactctttcaggtcactctggggctgcctcttgcatgtattactaaataaaatgatctctctttctctctctctctctcttttctaagaaacaattatgtgcactttgatacacaacct

SEQ ID NO: 745825 - DNA, 120 bp, Artificial Sequence
  ENSG00000204961_42 (sequence is synthesized)
tctctaaccaactatatatcaagacccaaaaattgaagaaaaatattgttttctcatacagtgagcagatttttcaatctactaattctgtgacttgtcttggtgtgctagcctacacct

SEQ ID NO: 745826 - DNA, 120 bp, Artificial Sequence
  ENSG00000204961_43 (sequence is synthesized)
tctctttggtttagttttccttttctataacactctgaattgctaatcttactaacacctatgatgttacctgaaatcaatctcccatatgtatgctgtatgctatgctaagactcctga

SEQ ID NO: 745827 - DNA, 120 bp, Artificial Sequence
  ENSG00000204961_44 (sequence is synthesized)
aatatacttactctgtgcttgtgtatgtgaatgttaatgcaactattacctagagtgaactttaagctttattgttgaatgtaattccattatatttccttttgtacacctgtgaaaaag

SEQ ID NO: 745828 - DNA, 120 bp, Artificial Sequence
  ENSG00000204961_45 (sequence is synthesized)
tggagtagtgtttttttaaccattgttaatcagcttttgtgtatgaaagacacagtaaaatttctttcttaaatcaagatactggtgattcaaggaattttatttatggtccagccaaga

SEQ ID NO: 745829 - DNA, 120 bp, Artificial Sequence
  ENSG00000204961_46 (sequence is synthesized)
gccatctcgtgccaagacttctgctggcaagggaatggataaagctgttttgttctagtaacaattttggaatgaatactgacaatattccatgagggtgtgcaagcacaaattttacca

SEQ ID NO: 745830 - DNA, 120 bp, Artificial Sequence
  ENSG00000204961_47 (sequence is synthesized)
atctgacctctttgaagttgcagaatgctttgaaattctaatggtatctgaaatatcagctcatagaaagtaacaaaatttgctgtcaccttaaataagacattttaattttgttataat

SEQ ID NO: 745831 - DNA, 120 bp, Artificial Sequence
  ENSG00000204961_48 (sequence is synthesized)
tagaagtttgattaattatattatctatttaggcattaatataaaagaggtaggagtctgttatttaaaaaaagcattaaatttaaaaaaaaactgtcttgtctacttttagcttcattc

SEQ ID NO: 745832 - DNA, 120 bp, Artificial Sequence
  ENSG00000204961_49 (sequence is synthesized)
cttcattctcccatattttgaagggtgtgtaacttcagctctgcaggattgcatggggtaaaacttgttaccaacacatgtgaaccattgctacattgtaggttgtgatcattttgcccc

SEQ ID NO: 745833 - DNA, 120 bp, Artificial Sequence
  ENSG00000204961_50 (sequence is synthesized)
actgaagcccatgtatctgaccttacgtgccttttgaactaggagaatcgggctaatttattaatgatgataattataatgtatctgtacagcactttttacatttgcgaagtgctttcc

SEQ ID NO: 745834 - DNA, 120 bp, Artificial Sequence
  ENSG00000204961_51 (sequence is synthesized)
aatccatgttagttactagttattacagctgtaaggataaaacacgtcatgtggattcattttgaattggtgctattggtatttcctctgttattgctaataaatgaaaatggtggtatg

SEQ ID NO: 745835 - DNA, 120 bp, Artificial Sequence
  ENSG00000204961_52 (sequence is synthesized)
gggtttttctagcattttatttatttatataattttttttcttgaaagatattatcgattactcccaggggccgttcaaatagttttattcatttttctagaaatccagcagattttttt

SEQ ID NO: 745836 - DNA, 120 bp, Artificial Sequence
  ENSG00000204961_53 (sequence is synthesized)
tctgataaagtaaaccccttaacattggagccgactttgtcttgacttctagtgagaattataaactgtatattaaatagatattttttgggtgctgaatcaattttatttaaatttgtg

SEQ ID NO: 745837 - DNA, 120 bp, Artificial Sequence
  ENSG00000204961_54 (sequence is synthesized)
tgttagtcattcattaaacattaacatcactatcatttatttattgctaaatgatgcatagtattttagtctacttgtattgtttataagaaacccaagcaaaaatatatagcaattgtt

SEQ ID NO: 745838 - DNA, 120 bp, Artificial Sequence
  ENSG00000204961_55 (sequence is synthesized)
accttgttaagtttgtagttctctacatttctctggatggagactgtgaacatctgattgttcagcaaccttcagtatctattattttaataagaaagaaacttcccctaaactttagaa

SEQ ID NO: 745839 - DNA, 120 bp, Artificial Sequence
  ENSG00000204961_56 (sequence is synthesized)
aacagttgctccactttaggaatcaaattatgtcaataaatgttataaacacagccttcatttcaacttatataaaatatgttttaaaatgcctgacaatgtagataattcaagaaatgt

SEQ ID NO: 745840 - DNA, 120 bp, Artificial Sequence
  ENSG00000204961_57 (sequence is synthesized)
tgactgaaattttgtctacacttagaacattttttgaaattcagtttacagaaattggagaaaatgctttttaaacaagtgtttcctttcttcaagaagacattctccttttaattgaaa

SEQ ID NO: 745841 - DNA, 120 bp, Artificial Sequence
  ENSG00000204961_58 (sequence is synthesized)
ttttctccattcagtgataaaatgatcagccatgtgaagattcgaaacttcgagttcttttgaaattcagagtctgtaacttaaaacattacccttatgaatttagatgagaattcactt

SEQ ID NO: 745842 - DNA, 120 bp, Artificial Sequence
  ENSG00000204961_59 (sequence is synthesized)
gttctgtcagtaatccataagacagaaatctgtttttttaaaaatatctttttctcctctcagctcatacataacacaaggcagaaatctggatatgagatttgcctctttaatgtcact

SEQ ID NO: 745843 - DNA, 120 bp, Artificial Sequence
  ENSG00000204961_60 (sequence is synthesized)
acatgttatgtttcctgaattgtagtatgtgactttcaaaatggtggttttccacactctacctttagtgcaagctatttgtttgttttctaatttatagttttaaaaacttcgcttatt

SEQ ID NO: 745844 - DNA, 120 bp, Artificial Sequence
  ENSG00000204961_61 (sequence is synthesized)
gagtttttgttatgtggtttatatttttctttctctttcagctattttatttaatattgtgtcagatattttacaaggtatgacctaattaaaaactcagtagagaaagatcagaatggc

SEQ ID NO: 745845 - DNA, 120 bp, Artificial Sequence
  ENSG00000204961_62 (sequence is synthesized)
cttgagaatagagccacaaaaataactatgaaaatgccagtaacgtttatttaaaacaaaatattttaatttttaaattttcccttaaaacacacttttggaatatgctacaatattaca

SEQ ID NO: 745846 - DNA, 83 bp, Artificial Sequence
  ENSG00000204961_63 (sequence is synthesized)
tcccttaaaacacacttttggaatatgctacaatattacatgttttttgtctttttatttttctgagacggagtcgttttctg

SEQ ID NO: 745847 - DNA, 89 bp, Artificial Sequence
  ENSG00000204961_64 (sequence is synthesized)
agctgtgagccactgtgccaaggccaaaacttgagtggtctctgagctcctgtcattaaacctatctatatctgtctatcagcacaact

SEQ ID NO: 745848 - DNA, 120 bp, Artificial Sequence
  ENSG00000204961_65 (sequence is synthesized)
ctgtcattaaacctatctatatctgtctatcagcacaactcaccttgaatatagtcttatactttcaagtatctttgtctttgcacgtttttcaagtttcatgtgccatttaaacttgga

SEQ ID NO: 745849 - DNA, 120 bp, Artificial Sequence
  ENSG00000204961_66 (sequence is synthesized)
cccaggtatctgattatttgatgtgaatagagggatgctacagatgtcatttgtctcccgccctaagtcctccagtctccttagagctagtacttactaagcatttactatgtcatcaat

SEQ ID NO: 745850 - DNA, 87 bp, Artificial Sequence
  ENSG00000204961_67 (sequence is synthesized)
gtgttctttattattgacggctgtattgatgggattggtaatttagtccttcatattaatctctattctctctcagagtacaagctc

SEQ ID NO: 745851 - DNA, 120 bp, Artificial Sequence
  ENSG00000204961_68 (sequence is synthesized)
ccttcatattaatctctattctctctcagagtacaagctctcatcatatgcaaattctcagaagggctgtgaacaccttagtaataaatttatcttttgaggtcattagcaaacatgaac

SEQ ID NO: 745852 - DNA, 120 bp, Artificial Sequence
  ENSG00000204961_69 (sequence is synthesized)
tcacagggatccagagatggtaaaattcaaaacagcctgtcaagttcaaaacagagaggtgaaagcagaagagacactttcctattttgcctaataggtctccttatatgcatctgtagt

SEQ ID NO: 745853 - DNA, 120 bp, Artificial Sequence
  ENSG00000204961_70 (sequence is synthesized)
taacattcctcaattcaagttagaatcatgaaacaataatgaagctcctcctatgtctcttttcaagttgtaattactatataggaaaaactaagttgtcacccaatatcttagacactt

SEQ ID NO: 745854 - DNA, 120 bp, Artificial Sequence
  ENSG00000204961_71 (sequence is synthesized)
tgagagcaaagggggtgctgtaaataagtatacaagatcacagacctaaattgagcctgttccagacaaattggggcctatggtcaacctatccttagacctgctaacgcattagcatta

SEQ ID NO: 745855 - DNA, 120 bp, Artificial Sequence
  ENSG00000204961_72 (sequence is synthesized)
gcagcacctaagtcctcattgaatgttctggttcaaggctccacctcagaaattctgaaatgggtagtaagagcaaattttcattttaaagcacacctgagatgattctcatacaaccga

SEQ ID NO: 745856 - DNA, 120 bp, Artificial Sequence
  ENSG00000204961_73 (sequence is synthesized)
tcatacaaccgaaattttagatccatagccctatttgatacttgacagtgcaagtttctgtaatttaaaaagatgtggtggcctgacacctgcaatcccaacattttgggaggccaaggt

SEQ ID NO: 745857 - DNA, 85 bp, Artificial Sequence
  ENSG00000204961_74 (sequence is synthesized)
acattttgggaggccaaggtgggagggtcccttccttgagcccagcagtttgagaccaatgtagtgagactcatctctgcctctc

SEQ ID NO: 745858 - DNA, 89 bp, Artificial Sequence
  ENSG00000204961_75 (sequence is synthesized)
gcctgggacattgaggctgcagtgaactgtgatggcacaactgcatttcagcccgggtgacagcaagattctgtctcaaaaaaaaaaaa

SEQ ID NO: 745859 - DNA, 120 bp, Artificial Sequence
  ENSG00000204961_76 (sequence is synthesized)
tccctactttttattcaatattggacatctacattgggatatttatgttatcacttggtataaaatgtacattagtagaaattgagtttagtttttattattttgtgcgtggagatgatt

SEQ ID NO: 745860 - DNA, 120 bp, Artificial Sequence
  ENSG00000204961_77 (sequence is synthesized)
gatcaatggcaaacttattttacgctccagatagctaaaacaaacgttgatattttgatacataactcattacattttaattcagggtttataaaaaagtaatctctaaaatcagaattt

SEQ ID NO: 745861 - DNA, 120 bp, Artificial Sequence
  ENSG00000204961_78 (sequence is synthesized)
gaatgaattttgatgcaagaggcattccagaggagtagagaagtatagaaacagaatttagtaggacacataaactgatggattaagtgacacccatttctgtcagttttcttattcata

SEQ ID NO: 745862 - DNA, 120 bp, Artificial Sequence
  ENSG00000204961_79 (sequence is synthesized)
aatattgttgctctgtcattcagattttaataaaaaaagtttaaagtaattgacacatttaaaaatattctttagaaaagtcaaaacatcattaaataaaataaattaacccttgcataa

SEQ ID NO: 745863 - DNA, 120 bp, Artificial Sequence
  ENSG00000204962_0 (sequence is synthesized)
cttttctctgacagcatctgtctctaaaggccgaacaacgggagatgcagcggaattggattaaaagactctgaaagtacagtcgttcatctttatattaagataatattttctgatagg

SEQ ID NO: 745864 - DNA, 120 bp, Artificial Sequence
  ENSG00000204962_1 (sequence is synthesized)
aaacgactatttaacatggattatcactggcgaggagagctgggatcctggcgactactactcttgcttctgctcctcgcagcctggaaggtggggagcggccagctccactactccgtc

SEQ ID NO: 745865 - DNA, 120 bp, Artificial Sequence
  ENSG00000204962_2 (sequence is synthesized)
cccgaggaggccaaacacggcaccttcgtgggccggatcgcgcaggacctggggctggagctggcggagctggtgccgcgcctgttccgggtggcgtccaaaagacaccgggaccttctg

SEQ ID NO: 745866 - DNA, 120 bp, Artificial Sequence
  ENSG00000204962_3 (sequence is synthesized)
cattttgtttgtgaattctcggatcgaccgcgaggagctgtgcgggcggagcgcggagtgcagcatccacctggaggtgatcgtggacaggccgctgcaggttttccatgtggacgtgga

SEQ ID NO: 745867 - DNA, 120 bp, Artificial Sequence
  ENSG00000204962_4 (sequence is synthesized)
gttttccatgtggacgtggaggtgaaggatgttaatgacaacccgccagtgttccgggtaaaagaccaaaagctgtttgtttcagaatccagaatgccagactctcggtttccgctagag

SEQ ID NO: 745868 - DNA, 120 bp, Artificial Sequence
  ENSG00000204962_5 (sequence is synthesized)
ggcgcgtccgatgcagatgttggagctaactccgtgttaacctacaggcttagctctcatgattacttcatgctagatgtgaattcaaagaacgatgagaataaactggttgagctcgta

SEQ ID NO: 745869 - DNA, 120 bp, Artificial Sequence
  ENSG00000204962_6 (sequence is synthesized)
ttaagaaaatccttggacagagaggacgctcctgcgcaccacttattcctgacagccacagatgggggcaaacctgagctcacaggcactgttcagctgctggtcacagtgctggatgtg

SEQ ID NO: 745870 - DNA, 120 bp, Artificial Sequence
  ENSG00000204962_7 (sequence is synthesized)
aatgataatgctcccactttcgaacagtctgaatacgaagtaagaatattcgaaaacgcagacaacggaacaacagttatcaaactgaatgcttctgatccggatgaaggagccaatggg

SEQ ID NO: 745871 - DNA, 120 bp, Artificial Sequence
  ENSG00000204962_8 (sequence is synthesized)
gcaatttcatattcttttaatagccttgttgaaactatggttattgaccactttagcatagatcgaaatacgggagaaatagtgattcggggtaatttggattttgaacaagaaaactta

SEQ ID NO: 745872 - DNA, 120 bp, Artificial Sequence
  ENSG00000204962_9 (sequence is synthesized)
tacaaaatcctcattgacgccacggacaaaggccatcctcccatggcgggtcattgcaccgttttagtgagaattttggataaaaatgataacgtccctgagatagcactgacttcctta

SEQ ID NO: 745873 - DNA, 120 bp, Artificial Sequence
  ENSG00000204962_10 (sequence is synthesized)
tccttgcctgtacgtgaagacgctcaatttggtactgtcatcgccctaattagcgtgaacgacctcgattcaggtgccaacgggcaggtgacctgctccctgatgccccatgtccccttc

SEQ ID NO: 745874 - DNA, 120 bp, Artificial Sequence
  ENSG00000204962_11 (sequence is synthesized)
aagctggtgtccaccttcaagaattactactcgttggtgctggacagcgccctggaccgcgagagagtgtcggcctatgagttggtggtaaccgcgcgggacgggggctcgccttcgctg

SEQ ID NO: 745875 - DNA, 120 bp, Artificial Sequence
  ENSG00000204962_12 (sequence is synthesized)
tgggccaccgccagcttgtctgtggaggtggccgacgtgaacgacaatgctccggcgttcgcgcagcccgagtacacggtgttcgtgaaggagaacaacccgccgggctgccacatcttc

SEQ ID NO: 745876 - DNA, 120 bp, Artificial Sequence
  ENSG00000204962_13 (sequence is synthesized)
acggtgtctgcgcgagacgcggacgcgcaggagaacgcgctggtgtcctactcgcttgtggagcggcgggtgggcgagcgctcgctgtcgagctacatttcggtgcacacggagagcggc

SEQ ID NO: 745877 - DNA, 120 bp, Artificial Sequence
  ENSG00000204962_14 (sequence is synthesized)
agagcggcaaggtgtacgcgctgcagccgctggaccacgaggagctagagctgctgcagttccaggtgagcgcgcgcgacgcgggcgtgccgcctctgggcagcaacgtgacgctgcagg

SEQ ID NO: 745878 - DNA, 120 bp, Artificial Sequence
  ENSG00000204962_15 (sequence is synthesized)
ctggacgagaatgacaacgcgccggcactgctggagcctcgggtgggtggcactggtggcgcagcgagcaagctggtgccgcggtctgtgggcgcgggccacgtggtagcgaaggtgcgc

SEQ ID NO: 745879 - DNA, 120 bp, Artificial Sequence
  ENSG00000204962_16 (sequence is synthesized)
gcagtggacgccgactcgggctacaacgcgtggctttcgtatgagctgcagccagctgcaagcagccctcgcatcccgttccgcgtggggctgtacacgggcgagatcagcaccactcgt

SEQ ID NO: 745880 - DNA, 120 bp, Artificial Sequence
  ENSG00000204962_17 (sequence is synthesized)
gtcctggacgaagcggactctccgcgccaccgtctgctggtcctggtgaaggatcatggtgaacctgcgctgaccgccacggccacggttctggtgtcgctggtggagagcggccaggct

SEQ ID NO: 745881 - DNA, 120 bp, Artificial Sequence
  ENSG00000204962_18 (sequence is synthesized)
ccaaaagcgtcatcgaggcagtcggctggcgttttgggtccggaagcggcgctggtggatgtcaacgtgtacctgatcatcgccatctgcgcggtatccagcctgctggtgctcacgctg

SEQ ID NO: 745882 - DNA, 120 bp, Artificial Sequence
  ENSG00000204962_19 (sequence is synthesized)
ctgctgtacactgcgctgcggtgctcagcactgcccactgagggcgggtgccgggcgggcaagcccactctggtgtgctccagtgcggtggggagctggtcatactcgcaacaacagccg

SEQ ID NO: 745883 - DNA, 120 bp, Artificial Sequence
  ENSG00000204962_20 (sequence is synthesized)
cagagggtgtgctctggtgaggggccaccgaagacggacctcatggccttcagcccctgccttcctcctgatctgggatcagttgatgtaggcgaagagcaagatttaaatgttgatcat

SEQ ID NO: 745884 - DNA, 120 bp, Artificial Sequence
  ENSG00000204962_21 (sequence is synthesized)
ggcctcaaaccacgacagcccaaccctgactggcgttactctgcctccctgagagcaggcatgcacagctctgtgcacctagaggaggctggcattctacgggctggtccaggagggcct

SEQ ID NO: 745885 - DNA, 120 bp, Artificial Sequence; identical to SEQ ID NO: 80633
  ENSG00000204962_22 (sequence is synthesized)

SEQ ID NO: 745886 - DNA, 120 bp, Artificial Sequence; identical to SEQ ID NO: 80634
  ENSG00000204962_23 (sequence is synthesized)

SEQ ID NO: 745887 - DNA, 120 bp, Artificial Sequence; identical to SEQ ID NO: 80635
  ENSG00000204962_24 (sequence is synthesized)

SEQ ID NO: 745888 - DNA, 120 bp, Artificial Sequence; identical to SEQ ID NO: 80636
  ENSG00000204962_25 (sequence is synthesized)

SEQ ID NO: 745889 - DNA, 120 bp, Artificial Sequence; identical to SEQ ID NO: 80637
  ENSG00000204962_26 (sequence is synthesized)

SEQ ID NO: 745890 - DNA, 120 bp, Artificial Sequence; identical to SEQ ID NO: 80638
  ENSG00000204962_27 (sequence is synthesized)

SEQ ID NO: 745891 - DNA, 120 bp, Artificial Sequence; identical to SEQ ID NO: 80639
  ENSG00000204962_28 (sequence is synthesized)

SEQ ID NO: 745892 - DNA, 120 bp, Artificial Sequence; identical to SEQ ID NO: 80640
  ENSG00000204962_29 (sequence is synthesized)

SEQ ID NO: 745893 - DNA, 120 bp, Artificial Sequence; identical to SEQ ID NO: 80641
  ENSG00000204962_30 (sequence is synthesized)

SEQ ID NO: 745894 - DNA, 120 bp, Artificial Sequence; identical to SEQ ID NO: 80642
  ENSG00000204962_31 (sequence is synthesized)

SEQ ID NO: 745895 - DNA, 120 bp, Artificial Sequence; identical to SEQ ID NO: 80643
  ENSG00000204962_32 (sequence is synthesized)

SEQ ID NO: 745896 - DNA, 120 bp, Artificial Sequence; identical to SEQ ID NO: 80644
  ENSG00000204962_33 (sequence is synthesized)

SEQ ID NO: 745897 - DNA, 120 bp, Artificial Sequence; identical to SEQ ID NO: 80645
  ENSG00000204962_34 (sequence is synthesized)

SEQ ID NO: 745898 - DNA, 120 bp, Artificial Sequence; identical to SEQ ID NO: 80646
  ENSG00000204962_35 (sequence is synthesized)

SEQ ID NO: 745899 - DNA, 120 bp, Artificial Sequence; identical to SEQ ID NO: 80647
  ENSG00000204962_36 (sequence is synthesized)

SEQ ID NO: 745900 - DNA, 120 bp, Artificial Sequence; identical to SEQ ID NO: 80648
  ENSG00000204962_37 (sequence is synthesized)

SEQ ID NO: 745901 - DNA, 120 bp, Artificial Sequence; identical to SEQ ID NO: 80649
  ENSG00000204962_38 (sequence is synthesized)

SEQ ID NO: 745902 - DNA, 120 bp, Artificial Sequence; identical to SEQ ID NO: 80650
  ENSG00000204962_39 (sequence is synthesized)

SEQ ID NO: 745903 - DNA, 120 bp, Artificial Sequence; identical to SEQ ID NO: 80651
  ENSG00000204962_40 (sequence is synthesized)

SEQ ID NO: 745904 - DNA, 120 bp, Artificial Sequence; identical to SEQ ID NO: 80652
  ENSG00000204962_41 (sequence is synthesized)

SEQ ID NO: 745905 - DNA, 120 bp, Artificial Sequence; identical to SEQ ID NO: 80653
  ENSG00000204962_42 (sequence is synthesized)

SEQ ID NO: 745906 - DNA, 120 bp, Artificial Sequence; identical to SEQ ID NO: 80654
  ENSG00000204962_43 (sequence is synthesized)

SEQ ID NO: 745907 - DNA, 120 bp, Artificial Sequence
  ENSG00000204963_0 (sequence is synthesized)
actctttggatgcacaacaatggccacacatcgagattgaaatgaagggataaaaacattcctataaattcgaaggcaagttttgctgactagaaaaacaagccaataatttgaaatggt

SEQ ID NO: 745908 - DNA, 120 bp, Artificial Sequence
  ENSG00000204963_1 (sequence is synthesized)
gtgcccgaatggatacgacccagggggccgacatctactgctgtttattataattctagcagcttgggaggcagggagaggccagctccactactcggtccccgaggaggctaaacatgg

SEQ ID NO: 745909 - DNA, 120 bp, Artificial Sequence
  ENSG00000204963_2 (sequence is synthesized)
caacttcgtgggccgcatcgcgcaggacctggggctggagctggcggagctggtgccgcgcctgttccgggcggtgtgcaaattccgtggggatcttctggaggtaaatctgcagaatgg

SEQ ID NO: 745910 - DNA, 120 bp, Artificial Sequence
  ENSG00000204963_3 (sequence is synthesized)
cattttgtttgtgaattctcggatcgaccgcgaggagctgtgcgggcggagcgcggagtgcagcatccacctggaggtgatcgtggaaaggccgctgcaggttttccatgtggacgtgga

SEQ ID NO: 745911 - DNA, 120 bp, Artificial Sequence
  ENSG00000204963_4 (sequence is synthesized)
ggtgaaggacattaacgacaaccctccggtgttcccagcgacacaaaggaatctgttcatcgcggaatccaggccgcttgactctcggtttccactagagggcgcgtccgatgcagatat

SEQ ID NO: 745912 - DNA, 120 bp, Artificial Sequence
  ENSG00000204963_5 (sequence is synthesized)
cggggagaacgccctgctcacttacagactgagccccaatgagtatttcttcctggacgtgccaaccagcaaccagcaggtaaaacctcttggacttgtattacggaaacttttagacag

SEQ ID NO: 745913 - DNA, 120 bp, Artificial Sequence
  ENSG00000204963_6 (sequence is synthesized)
agaagaaactccggagcttcatttattgctcacggccaccgatggaggcaaacccgagctgactggcaccgttcaattactcatcacggtactggacaacaatgacaatgccccagtgtt

SEQ ID NO: 745914 - DNA, 120 bp, Artificial Sequence
  ENSG00000204963_7 (sequence is synthesized)
cgacagaaccctgtatacggtgaaattaccagaaaacgtttctatcggaacgctggtgattcaccccaatgcctcagatttagacgaaggcttgaatggggatattatttactccttctc

SEQ ID NO: 745915 - DNA, 120 bp, Artificial Sequence
  ENSG00000204963_8 (sequence is synthesized)
cagtgatgtttctccagatataaaatccaagttccacatggaccccttaagtggggcaatcacagtgataggacatatggattttgaagaaagtagagcacacaagatcccagtcgaggc

SEQ ID NO: 745916 - DNA, 120 bp, Artificial Sequence
  ENSG00000204963_9 (sequence is synthesized)
tgtcgataaaggcttcccacccctggctggtcattgtacagttcttgtggaagttgtggatgtaaatgacaatgctccacagttgactctcacttccctgtctctccctattccagagga

SEQ ID NO: 745917 - DNA, 120 bp, Artificial Sequence
  ENSG00000204963_10 (sequence is synthesized)
cgcccaaccaggtaccgtcatcacattgattagcgtgtttgaccgagattttggagtcaacggacaggttacctgctccctgacgccccgcgttcccttcaagttggtgtccaccttcaa

SEQ ID NO: 745918 - DNA, 120 bp, Artificial Sequence
  ENSG00000204963_11 (sequence is synthesized)
gaattactattcattggtgctggacagcgctctggaccgcgagagtgtgtccgcctatgagctggtggttaccgcgcgggacgggggctcgccttctctgtgggccactgctagcgtgtc

SEQ ID NO: 745919 - DNA, 120 bp, Artificial Sequence
  ENSG00000204963_12 (sequence is synthesized)
cgtggaggtggccgacgtgaacgacaacgccccggcgttcgcgcagcccgagtatacggtgttcgtgaaggagaacaacccgccgggctgccacatcttcactgtgtcggcgggggacgc

SEQ ID NO: 745920 - DNA, 120 bp, Artificial Sequence
  ENSG00000204963_13 (sequence is synthesized)
ggacgcgcagaagaacgcgctggtgtcctactcgctggtggagctgcgggtgggcgagcgcgcgctgtcgagctacgtgtcagtgcacgcggagagcggcaaggtgtacgcgctgcagcc

SEQ ID NO: 745921 - DNA, 120 bp, Artificial Sequence
  ENSG00000204963_14 (sequence is synthesized)
agagcggcaaggtgtacgcgctgcagccgttggaccacgaggagctggagctgttgcagttccaggtgagcgcgcgcgatgcgggcgtgccgcctctgggcagcaacgtgacgctgcagg

SEQ ID NO: 745922 - DNA, 120 bp, Artificial Sequence
  ENSG00000204963_15 (sequence is synthesized)
gccggcactgctggcgcctcgggtgggtggcactggtggcgcagtgagagagcttgtgccgcggtctgtgggcgcgggccatgtggtggcgaaggtacgtgcagttgacgctgactcagg

SEQ ID NO: 745923 - DNA, 120 bp, Artificial Sequence
  ENSG00000204963_16 (sequence is synthesized)
ctacaacgcgtggctttcgtatgagttgcaaccggtggcggccggtgcgagcatcccgttccgcgtggggctgtacactggtgagatcagcacgacacgagccctagatgagacggacgc

SEQ ID NO: 745924 - DNA, 120 bp, Artificial Sequence
  ENSG00000204963_17 (sequence is synthesized)
accgcgccaccgccttctggtgcttgtgaaggaccacggggagccctcgctgacagccacagccaccgtgctggtgtcgctggtggaaagcggccaggcaccaaaggcgtcgtcgcgggc

SEQ ID NO: 745925 - DNA, 120 bp, Artificial Sequence
  ENSG00000204963_18 (sequence is synthesized)
atcgttgggcattgcaggcccagagaccgagctggtggatgtcaacgtgtacctgatcatcgccatctgcgcggtgtccagtctgttggtgcttaccctgctgctgtacacggcgttgcg

SEQ ID NO: 745926 - DNA, 120 bp, Artificial Sequence
  ENSG00000204963_19 (sequence is synthesized)
gtgctcagcgccgtcctctgagggcgcatgtagtttggtaaagcccactctggtgtgctccagcgcggtggggagctggtcattctcccagcagaggcggcagagggtgtgctctgggga

SEQ ID NO: 745927 - DNA, 120 bp, Artificial Sequence
  ENSG00000204963_20 (sequence is synthesized)
gggcccacccaagacagacctcatggccttcagtcccagccttcctcagggtccatcctctacagacaatccacgacagcccaaccctgactggcgttactctgcctccctgagagcagg

SEQ ID NO: 745928 - DNA, 120 bp, Artificial Sequence
  ENSG00000204963_21 (sequence is synthesized)
catgcacagctctgtgcacctagaggaggctggcattctacgggctggtccaggagggcctgatcagcagtggccaacagtatccagtgcaacaccagaaccagaggcaggagaagtgtc

SEQ ID NO: 745929 - DNA, 120 bp, Artificial Sequence; identical to SEQ ID NO: 80633
  ENSG00000204963_22 (sequence is synthesized)

SEQ ID NO: 745930 - DNA, 120 bp, Artificial Sequence; identical to SEQ ID NO: 80634
  ENSG00000204963_23 (sequence is synthesized)

SEQ ID NO: 745931 - DNA, 120 bp, Artificial Sequence; identical to SEQ ID NO: 80635
  ENSG00000204963_24 (sequence is synthesized)

SEQ ID NO: 745932 - DNA, 120 bp, Artificial Sequence; identical to SEQ ID NO: 80636
  ENSG00000204963_25 (sequence is synthesized)

SEQ ID NO: 745933 - DNA, 120 bp, Artificial Sequence; identical to SEQ ID NO: 80637
  ENSG00000204963_26 (sequence is synthesized)

SEQ ID NO: 745934 - DNA, 120 bp, Artificial Sequence; identical to SEQ ID NO: 80638
  ENSG00000204963_27 (sequence is synthesized)

SEQ ID NO: 745935 - DNA, 120 bp, Artificial Sequence; identical to SEQ ID NO: 80639
  ENSG00000204963_28 (sequence is synthesized)

SEQ ID NO: 745936 - DNA, 120 bp, Artificial Sequence; identical to SEQ ID NO: 80640
  ENSG00000204963_29 (sequence is synthesized)

SEQ ID NO: 745937 - DNA, 120 bp, Artificial Sequence; identical to SEQ ID NO: 80641
  ENSG00000204963_30 (sequence is synthesized)

SEQ ID NO: 745938 - DNA, 120 bp, Artificial Sequence; identical to SEQ ID NO: 80642
  ENSG00000204963_31 (sequence is synthesized)

SEQ ID NO: 745939 - DNA, 120 bp, Artificial Sequence; identical to SEQ ID NO: 80643
  ENSG00000204963_32 (sequence is synthesized)

SEQ ID NO: 745940 - DNA, 120 bp, Artificial Sequence; identical to SEQ ID NO: 80644
  ENSG00000204963_33 (sequence is synthesized)

SEQ ID NO: 745941 - DNA, 120 bp, Artificial Sequence; identical to SEQ ID NO: 80645
  ENSG00000204963_34 (sequence is synthesized)

SEQ ID NO: 745942 - DNA, 120 bp, Artificial Sequence; identical to SEQ ID NO: 80646
  ENSG00000204963_35 (sequence is synthesized)

SEQ ID NO: 745943 - DNA, 120 bp, Artificial Sequence; identical to SEQ ID NO: 80647
  ENSG00000204963_36 (sequence is synthesized)

SEQ ID NO: 745944 - DNA, 120 bp, Artificial Sequence; identical to SEQ ID NO: 80648
  ENSG00000204963_37 (sequence is synthesized)

SEQ ID NO: 745945 - DNA, 120 bp, Artificial Sequence; identical to SEQ ID NO: 80649
  ENSG00000204963_38 (sequence is synthesized)

SEQ ID NO: 745946 - DNA, 120 bp, Artificial Sequence; identical to SEQ ID NO: 80650
  ENSG00000204963_39 (sequence is synthesized)

SEQ ID NO: 745947 - DNA, 120 bp, Artificial Sequence; identical to SEQ ID NO: 80651
  ENSG00000204963_40 (sequence is synthesized)

SEQ ID NO: 745948 - DNA, 120 bp, Artificial Sequence; identical to SEQ ID NO: 80652
  ENSG00000204963_41 (sequence is synthesized)

SEQ ID NO: 745949 - DNA, 120 bp, Artificial Sequence; identical to SEQ ID NO: 80653
  ENSG00000204963_42 (sequence is synthesized)

SEQ ID NO: 745950 - DNA, 120 bp, Artificial Sequence; identical to SEQ ID NO: 80654
  ENSG00000204963_43 (sequence is synthesized)

SEQ ID NO: 745951 - DNA, 120 bp, Artificial Sequence
  ENSG00000204963_44 (sequence is synthesized)
catggccttcagtcccagccttcctcagggtccatcctctacagacaatgtgagtcataaataatcttgtttccaacaattttaaaacaattagttcaattggtctccttaaattttctt

SEQ ID NO: 745952 - DNA, 120 bp, Artificial Sequence
  ENSG00000204963_45 (sequence is synthesized)
tcataatttcttttttagttgatagctttatgtataattattattttttaatgttatgctgtatttgcactaattatttggaagtacgtttaatatacacttttgttttgggatgcgtaa

SEQ ID NO: 745953 - DNA, 120 bp, Artificial Sequence
  ENSG00000204963_46 (sequence is synthesized)
tactatagatcaaaatctatggtttatgttggctactctccatttttggaggaggactttgctaactggagcaatggattcacctttcttctatagtgtatttacaaaatcaaatattta

SEQ ID NO: 745954 - DNA, 120 bp, Artificial Sequence
  ENSG00000204965_0 (sequence is synthesized)
agattttccttagacagaaaggaaaagaaccttccatttttggctgtgccaagaagctcagaaaggcgataatataaaaaatatatagttaattgggaattgaatttacaaaatacattg

SEQ ID NO: 745955 - DNA, 120 bp, Artificial Sequence
  ENSG00000204965_1 (sequence is synthesized)
tgtggtgatgcaatagaaagctcataattggaacgagattgagatggtatattcccggagaggaagtctgggatcccggctcctgctgctctggcttctccttgcctactggaaggcagg

SEQ ID NO: 745956 - DNA, 120 bp, Artificial Sequence
  ENSG00000204965_2 (sequence is synthesized)
gagcggccagctccactactcgatcccggaggaagccaaacacggaaccttcgttggccgcatcgcgcaggacctagggctggagctggcggagctggtgccgcgcctgttccgggtggc

SEQ ID NO: 745957 - DNA, 87 bp, Artificial Sequence
  ENSG00000204965_3 (sequence is synthesized)
cgggaggagctgtgccggcggagggcggagtgcagcatccacctggaggtgatcgtggacaggccgctgcaggttttccatgtggag

SEQ ID NO: 745958 - DNA, 120 bp, Artificial Sequence
  ENSG00000204965_4 (sequence is synthesized)
ggtgatcgtggacaggccgctgcaggttttccatgtggaggtggcagtgaaggacatcaatgacaatccgcccaggttctccagacaagaacaaagattattcattttagagtcaagaat

SEQ ID NO: 745959 - DNA, 120 bp, Artificial Sequence
  ENSG00000204965_5 (sequence is synthesized)
gccagattcgcggtttccgctagagggcgcgtcggatttggatattggagcaaatgcacaattgagatacaggttaaatccaaacgaatattttgacttagatgttaaaacaaatgaaga

SEQ ID NO: 745960 - DNA, 120 bp, Artificial Sequence
  ENSG00000204965_6 (sequence is synthesized)
agaaacgaactttttagagctggttttgaggaaatccttagatagagaagaaacacaagaacaccgtttattagtgattgcaactgatggaggaaaacccgaactaacaggtacagttca

SEQ ID NO: 745961 - DNA, 120 bp, Artificial Sequence
  ENSG00000204965_7 (sequence is synthesized)
gttgttgatcaatgtattggatgctaatgataacgccccagaatttgataaatccatttataatgtcagattgttggaaaatgcaccaagtgggacattagttattaaactgaacgcctc

SEQ ID NO: 745962 - DNA, 120 bp, Artificial Sequence
  ENSG00000204965_8 (sequence is synthesized)
agatgcagatgagggcatcaataaggaaatagtgtatttctttagtaatcttgttcttgacgatgtaaagtccaaatttataattaattctaatactggtgaaataaaagttaacgggga

SEQ ID NO: 745963 - DNA, 120 bp, Artificial Sequence
  ENSG00000204965_9 (sequence is synthesized)
actggattatgaagactataactcatatgaaattaatattgatgccatggataaaagtacattcccattatcaggacactgtaaagtagtagtgaaactcctggatgtgaatgataatac

SEQ ID NO: 745964 - DNA, 120 bp, Artificial Sequence
  ENSG00000204965_10 (sequence is synthesized)
cccagagatggccataaccacccttttcctgcctgtcaaagaggacgctccactcagcacggtcattgctctgatcagcgtgtctgaccgtgactcaggtgccaacgggcaggtgacctg

SEQ ID NO: 745965 - DNA, 120 bp, Artificial Sequence
  ENSG00000204965_11 (sequence is synthesized)
ctccctaatgccccacgttcccttcaagctggtgtccaccttcaagaattactactcgttggtgctggacagcgccctggaccgcgagagcgtgtcggtctatgagctggtggtgaccgc

SEQ ID NO: 745966 - DNA, 120 bp, Artificial Sequence
  ENSG00000204965_12 (sequence is synthesized)
gcgggacgggggctcgccttcgctgtgggccaccgccagcgtgtctgtggaagtggccgacgtgaacgacaacgctccggcgttcgcgcagccccagtataccgtgttcgtgaaggagaa

SEQ ID NO: 745967 - DNA, 120 bp, Artificial Sequence
  ENSG00000204965_13 (sequence is synthesized)
caacccgccaggctgccacatcttcacggtgtctgcacgggacgcggacgcgcaggagaacgccctggtgtcctactcgctggtggagcggcgggtgggcgagcgcccgctgtcgagtta

SEQ ID NO: 745968 - DNA, 120 bp, Artificial Sequence
  ENSG00000204965_14 (sequence is synthesized)
cgtttcggtgcacgcggagagcggcaaggtgtacgcgctgcagccgctggaccacgaggaagtggagctgctgcagttccaggtgagcgcgcgcgacgcgggcgtgccgcctctgggcag

SEQ ID NO: 745969 - DNA, 120 bp, Artificial Sequence
  ENSG00000204965_15 (sequence is synthesized)
cgctgcaggtgttcgtgctggacgagaacgacaacgcgccggcgctgctggtgcctcgagtgggtggcaccggcggcgcagtgagcgagctggtgccgaggtcagtgggtgcgggccacg

SEQ ID NO: 745970 - DNA, 120 bp, Artificial Sequence
  ENSG00000204965_16 (sequence is synthesized)
gggccacgtggtggcgaaggtgcgcgcagtggaccctgattcgggctacaacgcttggctttcgtatgagctgcagccagcgcctggcagtgcgcgcatcccgttccgcgtggggctgta

SEQ ID NO: 745971 - DNA, 120 bp, Artificial Sequence
  ENSG00000204965_17 (sequence is synthesized)
cacaggcgagatcagcacaacacgctctctggatgagaccgaagcaccgcgccaccgccttctggtgctggtgaaggaccatggagagcccccgctgacagccacagccacagtgctggt

SEQ ID NO: 745972 - DNA, 120 bp, Artificial Sequence
  ENSG00000204965_18 (sequence is synthesized)
gtcgctggtggaaagtggccaggcgccgaaggcctcatcgcgggcgtcggcgggcgctgtgggtcccgaggctgccctggtggatgtcaacgtgtacctgatcatcgccatctgtgcggt

SEQ ID NO: 745973 - DNA, 120 bp, Artificial Sequence
  ENSG00000204965_19 (sequence is synthesized)
gtccagcctgctggtgctcacgctgctgctgtacaccgcgctgcggtgctcggcgcagcccaccgaggccgtgtgcacacggggcaagcccactctgttgtgctccagcgcggtggggag

SEQ ID NO: 745974 - DNA, 120 bp, Artificial Sequence
  ENSG00000204965_20 (sequence is synthesized)
ctggtcgtactcgcagcagaggagacagagggtgtgctctggggaagctccacccaaaacagacctcatggccttcagtccaagccttcctcagggtcccacctctacagacaacccacg

SEQ ID NO: 745975 - DNA, 120 bp, Artificial Sequence
  ENSG00000204965_21 (sequence is synthesized)
acagcccaaccctgactggcgttactctgcctccctgagagcaggcatgcacagctctgtgcacctagaggaggctggcattctacgggctggtccaggagggcctgatcagcagtggcc

SEQ ID NO: 745976 - DNA, 120 bp, Artificial Sequence; identical to SEQ ID NO: 80633
  ENSG00000204965_22 (sequence is synthesized)

SEQ ID NO: 745977 - DNA, 120 bp, Artificial Sequence; identical to SEQ ID NO: 80634
  ENSG00000204965_23 (sequence is synthesized)

SEQ ID NO: 745978 - DNA, 120 bp, Artificial Sequence; identical to SEQ ID NO: 80635
  ENSG00000204965_24 (sequence is synthesized)

SEQ ID NO: 745979 - DNA, 120 bp, Artificial Sequence; identical to SEQ ID NO: 80636
  ENSG00000204965_25 (sequence is synthesized)

SEQ ID NO: 745980 - DNA, 120 bp, Artificial Sequence; identical to SEQ ID NO: 80637
  ENSG00000204965_26 (sequence is synthesized)

SEQ ID NO: 745981 - DNA, 120 bp, Artificial Sequence; identical to SEQ ID NO: 80638
  ENSG00000204965_27 (sequence is synthesized)

SEQ ID NO: 745982 - DNA, 120 bp, Artificial Sequence; identical to SEQ ID NO: 80639
  ENSG00000204965_28 (sequence is synthesized)

SEQ ID NO: 745983 - DNA, 120 bp, Artificial Sequence; identical to SEQ ID NO: 80640
  ENSG00000204965_29 (sequence is synthesized)

SEQ ID NO: 745984 - DNA, 120 bp, Artificial Sequence; identical to SEQ ID NO: 80641
  ENSG00000204965_30 (sequence is synthesized)

SEQ ID NO: 745985 - DNA, 120 bp, Artificial Sequence; identical to SEQ ID NO: 80642
  ENSG00000204965_31 (sequence is synthesized)

SEQ ID NO: 745986 - DNA, 120 bp, Artificial Sequence; identical to SEQ ID NO: 80643
  ENSG00000204965_32 (sequence is synthesized)

SEQ ID NO: 745987 - DNA, 120 bp, Artificial Sequence; identical to SEQ ID NO: 80644
  ENSG00000204965_33 (sequence is synthesized)

SEQ ID NO: 745988 - DNA, 120 bp, Artificial Sequence; identical to SEQ ID NO: 80645
  ENSG00000204965_34 (sequence is synthesized)

SEQ ID NO: 745989 - DNA, 120 bp, Artificial Sequence; identical to SEQ ID NO: 80646
  ENSG00000204965_35 (sequence is synthesized)

SEQ ID NO: 745990 - DNA, 120 bp, Artificial Sequence; identical to SEQ ID NO: 80647
  ENSG00000204965_36 (sequence is synthesized)

SEQ ID NO: 745991 - DNA, 120 bp, Artificial Sequence; identical to SEQ ID NO: 80648
  ENSG00000204965_37 (sequence is synthesized)

SEQ ID NO: 745992 - DNA, 120 bp, Artificial Sequence; identical to SEQ ID NO: 80649
  ENSG00000204965_38 (sequence is synthesized)

SEQ ID NO: 745993 - DNA, 120 bp, Artificial Sequence; identical to SEQ ID NO: 80650
  ENSG00000204965_39 (sequence is synthesized)

SEQ ID NO: 745994 - DNA, 120 bp, Artificial Sequence; identical to SEQ ID NO: 80651
  ENSG00000204965_40 (sequence is synthesized)

SEQ ID NO: 745995 - DNA, 120 bp, Artificial Sequence; identical to SEQ ID NO: 80652
  ENSG00000204965_41 (sequence is synthesized)

SEQ ID NO: 745996 - DNA, 120 bp, Artificial Sequence; identical to SEQ ID NO: 80653
  ENSG00000204965_42 (sequence is synthesized)

SEQ ID NO: 745997 - DNA, 120 bp, Artificial Sequence; identical to SEQ ID NO: 80654
  ENSG00000204965_43 (sequence is synthesized)

SEQ ID NO: 745998 - DNA, 120 bp, Artificial Sequence
  ENSG00000204965_44 (sequence is synthesized)
aaatattaaatgtcacattcacccactttttttgtatttaaaaattatgtcttagtacacaaatattgtggtacacaattattgcactaattcatgtattatatgctttttatgaggctt

SEQ ID NO: 745999 - DNA, 120 bp, Artificial Sequence
  ENSG00000204965_45 (sequence is synthesized)
ttctgctggggtaatagattcatcagctttctgtgatattaagtgtttttaaaataatattttatattagcatttgaattttgcatctctaaaaatgtaggataataattgtaagacata

SEQ ID NO: 746000 - DNA, 120 bp, Artificial Sequence
  ENSG00000204965_46 (sequence is synthesized)
gtttggagtcattctcaaagtttcagtttatgactacatgaaaatttattttattttattgttattttttagagaccctttgttgcttagtctgcagtgatctgatcatagctcaccgaa

SEQ ID NO: 746001 - DNA, 120 bp, Artificial Sequence
  ENSG00000204965_47 (sequence is synthesized)
tctgatcatagctcaccgaagcctgaaactcctgggctcaagtgatcctcctatctcagccgcccaagtagctggactacatgcacatgctaattaaagttttttttttttttttttttt

SEQ ID NO: 746002 - DNA, 120 bp, Artificial Sequence
  ENSG00000204965_48 (sequence is synthesized)
gtcttgctactttgcccaggctggtcttgaactcctggtttgaagccatgctcccgtctcagcctcccgaagtactaagattacaggattgagcaagagtgcctggcctataaaaatgtt

SEQ ID NO: 746003 - DNA, 120 bp, Artificial Sequence
  ENSG00000204965_49 (sequence is synthesized)
ttaacaccacccttccaattttgcctttttgtttctattgaatttaaattaattattattttattacactaatttagtttgttttcaattgtatttttgcagcatatggtttatttcaac

SEQ ID NO: 746004 - DNA, 120 bp, Artificial Sequence
  ENSG00000204965_50 (sequence is synthesized)
tttgcctaagcagttcacctgtatacccatgatgaatttgataattgtaatttaaaaattatatttttcattttattgattttttgaataggaaacacatatacatggtttactgttcta

SEQ ID NO: 746005 - DNA, 120 bp, Artificial Sequence
  ENSG00000204965_51 (sequence is synthesized)
aaggtgcaaaagaatacagttaaattttccctttcacctccttcatgaagccaaaacattctctggtatccttctagagatttttttcatatacaaataaacttccctacccccttaaaa

SEQ ID NO: 746006 - DNA, 120 bp, Artificial Sequence
  ENSG00000204965_52 (sequence is synthesized)
aacatatgagtattgattttaatcttgcttttttcatttactaatgtatcttgatgatcatgaattatcattactgaagtagatttgtttttcttttatctggatctatggtgttccatt

SEQ ID NO: 746007 - DNA, 120 bp, Artificial Sequence
  ENSG00000204965_53 (sequence is synthesized)
cattgtgtaggtatgtgattggttatttttcccttaacattaacatttagtggaacaatgatttaattttctggaaatttgcatatttttcaatatatctaatatatattagatatataa

SEQ ID NO: 746008 - DNA, 120 bp, Artificial Sequence
  ENSG00000204965_54 (sequence is synthesized)
ttatatattttatataatatatataataaatatataataataatatatatcagatattttgatacagaattttgctcttgttgcccaaacgagtgcaatggtacaatcttggcctcccag

SEQ ID NO: 746009 - DNA, 84 bp, Artificial Sequence
  ENSG00000204965_55 (sequence is synthesized)
gatattttgatacagaattttgctcttgttgcccaaacgagtgcaatggtacaatccttcccaagtagctgggattacaggcat

SEQ ID NO: 746010 - DNA, 90 bp, Artificial Sequence
  ENSG00000204965_56 (sequence is synthesized)
gtgcccacacctggctaattttttgtatcatggtggtctcgaactcctaatctcaggtgatttacccgcctcggcctcccaaagtgctgg

SEQ ID NO: 746011 - DNA, 120 bp, Artificial Sequence
  ENSG00000204965_57 (sequence is synthesized)
tattgatgaggagtaactgtgaatctcctcagttgtgcaaattctactatattttggttgggaaattttactgcttgttgttacttttagattaaaaaaataaatataccatgatacaaa

SEQ ID NO: 746012 - DNA, 120 bp, Artificial Sequence
  ENSG00000204967_0 (sequence is synthesized)
atatacactctttggagtctgaaatatggaggatgcagctgcacttgactgaccgattaaaagatttcccttgactttgagaaacgatatttaatcagaacaaaatactgtgcactaaag

SEQ ID NO: 746013 - DNA, 120 bp, Artificial Sequence
  ENSG00000204967_1 (sequence is synthesized)
atggagttttcctggggaagcggccaggaatcccggcgtctgctgctcttacttcttctcctcgcagcctgggaggcagggaacggtcagctccactactcggtctccgaggaggccaaa

SEQ ID NO: 746014 - DNA, 120 bp, Artificial Sequence
  ENSG00000204967_2 (sequence is synthesized)
cacggcaccttcgtgggccgcatcgcgcaggacctgggactggagctggcggagctggtgccgcgcctgttccgggtggcgtccaagggccgcggaggccttctggaggtaaatctgcag

SEQ ID NO: 746015 - DNA, 120 bp, Artificial Sequence
  ENSG00000204967_3 (sequence is synthesized)
gcattttgtttgtgaattctcggatcgaccgggaggagctgtgccggcggagcgcggagtgcagcatccacctggaggtgatcgtagacaggccgctgcaggttttccatgtggacgtgg

SEQ ID NO: 746016 - DNA, 120 bp, Artificial Sequence
  ENSG00000204967_4 (sequence is synthesized)
gtggaggtgagggacattaacgataacccgccggtgttcccagcaacacaaaagaacctgtccatcgcggaatccaggccgcttgactctcggtttccactagagggcgcctcggatgca

SEQ ID NO: 746017 - DNA, 120 bp, Artificial Sequence
  ENSG00000204967_5 (sequence is synthesized)
gatatcggggagaacgccctgctcacttacagactgagcccaaatgaatacttttctctggaaaaaccacctgatgacgagctggtaaaaggtcttgggcttatattacggaaatcttta

SEQ ID NO: 746018 - DNA, 120 bp, Artificial Sequence
  ENSG00000204967_6 (sequence is synthesized)
gacagagaagaagctccggagatttttttagtgctcacagccactgatggaggcaaacccgagttgactggcaccgttcagttactcatcacagtactggatgccaatgacaatgcccca

SEQ ID NO: 746019 - DNA, 120 bp, Artificial Sequence
  ENSG00000204967_7 (sequence is synthesized)
gcttttgacagaaccatttataaggtgagattactagaaaatgttcctaatggaacattggtaattaaacttaacgcctcagatttagacgaaggattgaatggggacattgtttattca

SEQ ID NO: 746020 - DNA, 120 bp, Artificial Sequence
  ENSG00000204967_8 (sequence is synthesized)
ttctcaaatgatatttcgccaaatgtgaaatccaagtttcacatagatccaattactggacaaattattgtaaagggatatattgactttgaagaaagcaaatcctatgaaattattgta

SEQ ID NO: 746021 - DNA, 120 bp, Artificial Sequence
  ENSG00000204967_9 (sequence is synthesized)
gagggcattgataagggacagctcccactttctggccattgtagagttattgtggaagtagaagacaacaacgataatgtcccagatttggaattcaagtctttatcacttccaattaga

SEQ ID NO: 746022 - DNA, 120 bp, Artificial Sequence
  ENSG00000204967_10 (sequence is synthesized)
gaggacgctccactgggtacagtcatcgccctgatcagcgtgtccgacaaagacatgggtgtcaatgggctggtcacctgctccttgacgtcccacgtccccttcaagctggtgtccacc

SEQ ID NO: 746023 - DNA, 120 bp, Artificial Sequence
  ENSG00000204967_11 (sequence is synthesized)
ttcaagaattactactcgttggtgctggacagtgccctggaccgcgagagcgtgtcagcctatgagctggtggtgaccgcgcgagacgggggctcgccttcgctgtgggccacggccagt

SEQ ID NO: 746024 - DNA, 120 bp, Artificial Sequence
  ENSG00000204967_12 (sequence is synthesized)
gtttctgtggaggtggctgatgtgaacgacaacgctccggcgttcgcgcagcccgagtacacagtgttcgtgaaggagaacaacccgccgggctgccacatcttcactgtgtctgcgtgg

SEQ ID NO: 746025 - DNA, 120 bp, Artificial Sequence
  ENSG00000204967_13 (sequence is synthesized)
gacgcggacgcgcaggagaacgcgctggtgtcctactcgctggtagagcggcgggtaggggagcgcgcgctgtcgagctacgtttcggtgcatgcggagagcggcaaggtgtacgcgctg

SEQ ID NO: 746026 - DNA, 120 bp, Artificial Sequence
  ENSG00000204967_14 (sequence is synthesized)
gagagcggcaaggtgtacgcgctgcagccgctggaccacgaggagctagagctgctgcagtttcaggtgaccgctcgcgatgccggcgtgccacctctgggcagcaacgtgacgctgcag

SEQ ID NO: 746027 - DNA, 120 bp, Artificial Sequence
  ENSG00000204967_15 (sequence is synthesized)
aacgcgccagcactgctagcgcctcgggcgggtggcactggtggcgcagtgagcgagctggtgccatggtcggtgggtgtgggccacgtggtggcaaaggtgcgcgcggtggatgctgac

SEQ ID NO: 746028 - DNA, 120 bp, Artificial Sequence
  ENSG00000204967_16 (sequence is synthesized)
tcgggctacaacgcgtggctttcgtacgagctgcagccggggactggtggcgcgcgcatcccgttccgcgtggggctgtacactggcgagatcagcacaacgcgtgccctggacgaaacg

SEQ ID NO: 746029 - DNA, 120 bp, Artificial Sequence
  ENSG00000204967_17 (sequence is synthesized)
gacgctccgcgccaccgcctactggtactggtgaaggaccacggcgagcccgcgctgacggccacggccactgtgctggtgtcacttgtggagagtggacaggcgccaaaggcctcctca

SEQ ID NO: 746030 - DNA, 120 bp, Artificial Sequence
  ENSG00000204967_18 (sequence is synthesized)
cgggcgttggtgggcgctgtgggtcccgatgctgcgctggtggatgtcaacgtatacctgatcattgccatctgcgcggtgtccagccttttggtgctcacgctgctgctgtacaccgcg

SEQ ID NO: 746031 - DNA, 120 bp, Artificial Sequence
  ENSG00000204967_19 (sequence is synthesized)
ctgcggtgctctgcgctgcccaccgagggcgcgtgcgctccgggcaagcccacgctggtgtgctccagtgcggtggggagctggtcatactcgcagcagaggaggccgagggtgtgctct

SEQ ID NO: 746032 - DNA, 120 bp, Artificial Sequence
  ENSG00000204967_20 (sequence is synthesized)
ggtgagggcccacccaagaccgacctcatggccttcagccccagtttacctgactctagggacagagaagatcagctgcagacaactgaggaatcctttgcaaagccacgacagcccaac

SEQ ID NO: 746033 - DNA, 120 bp, Artificial Sequence
  ENSG00000204967_21 (sequence is synthesized)
cctgactggcgttactctgcctccctgagagcaggcatgcacagctctgtgcacctagaggaggctggcattctacgggctggtccaggagggcctgatcagcagtggccaacagtatcc

SEQ ID NO: 746034 - DNA, 120 bp, Artificial Sequence; identical to SEQ ID NO: 80633
  ENSG00000204967_22 (sequence is synthesized)

SEQ ID NO: 746035 - DNA, 120 bp, Artificial Sequence; identical to SEQ ID NO: 80634
  ENSG00000204967_23 (sequence is synthesized)

SEQ ID NO: 746036 - DNA, 120 bp, Artificial Sequence; identical to SEQ ID NO: 80635
  ENSG00000204967_24 (sequence is synthesized)

SEQ ID NO: 746037 - DNA, 120 bp, Artificial Sequence; identical to SEQ ID NO: 80636
  ENSG00000204967_25 (sequence is synthesized)

SEQ ID NO: 746038 - DNA, 120 bp, Artificial Sequence; identical to SEQ ID NO: 80637
  ENSG00000204967_26 (sequence is synthesized)

SEQ ID NO: 746039 - DNA, 120 bp, Artificial Sequence; identical to SEQ ID NO: 80638
  ENSG00000204967_27 (sequence is synthesized)

SEQ ID NO: 746040 - DNA, 120 bp, Artificial Sequence; identical to SEQ ID NO: 80639
  ENSG00000204967_28 (sequence is synthesized)

SEQ ID NO: 746041 - DNA, 120 bp, Artificial Sequence; identical to SEQ ID NO: 80640
  ENSG00000204967_29 (sequence is synthesized)

SEQ ID NO: 746042 - DNA, 120 bp, Artificial Sequence; identical to SEQ ID NO: 80641
  ENSG00000204967_30 (sequence is synthesized)

SEQ ID NO: 746043 - DNA, 120 bp, Artificial Sequence; identical to SEQ ID NO: 80642
  ENSG00000204967_31 (sequence is synthesized)

SEQ ID NO: 746044 - DNA, 120 bp, Artificial Sequence; identical to SEQ ID NO: 80643
  ENSG00000204967_32 (sequence is synthesized)

SEQ ID NO: 746045 - DNA, 120 bp, Artificial Sequence; identical to SEQ ID NO: 80644
  ENSG00000204967_33 (sequence is synthesized)

SEQ ID NO: 746046 - DNA, 120 bp, Artificial Sequence; identical to SEQ ID NO: 80645
  ENSG00000204967_34 (sequence is synthesized)

SEQ ID NO: 746047 - DNA, 120 bp, Artificial Sequence; identical to SEQ ID NO: 80646
  ENSG00000204967_35 (sequence is synthesized)

SEQ ID NO: 746048 - DNA, 120 bp, Artificial Sequence; identical to SEQ ID NO: 80647
  ENSG00000204967_36 (sequence is synthesized)

SEQ ID NO: 746049 - DNA, 120 bp, Artificial Sequence; identical to SEQ ID NO: 80648
  ENSG00000204967_37 (sequence is synthesized)

SEQ ID NO: 746050 - DNA, 120 bp, Artificial Sequence; identical to SEQ ID NO: 80649
  ENSG00000204967_38 (sequence is synthesized)

SEQ ID NO: 746051 - DNA, 120 bp, Artificial Sequence; identical to SEQ ID NO: 80650
  ENSG00000204967_39 (sequence is synthesized)

SEQ ID NO: 746052 - DNA, 120 bp, Artificial Sequence; identical to SEQ ID NO: 80651
  ENSG00000204967_40 (sequence is synthesized)

SEQ ID NO: 746053 - DNA, 120 bp, Artificial Sequence; identical to SEQ ID NO: 80652
  ENSG00000204967_41 (sequence is synthesized)

SEQ ID NO: 746054 - DNA, 120 bp, Artificial Sequence; identical to SEQ ID NO: 80653
  ENSG00000204967_42 (sequence is synthesized)

SEQ ID NO: 746055 - DNA, 120 bp, Artificial Sequence; identical to SEQ ID NO: 80654
  ENSG00000204967_43 (sequence is synthesized)

SEQ ID NO: 746056 - DNA, 120 bp, Artificial Sequence
  ENSG00000204967_44 (sequence is synthesized)
cctctttttacatatccattttaactaaagtcttttggaattataggacatcagagcaatatatattgccttccttcattttatgctgcattattcaatgcatattaacagaactgtaat

SEQ ID NO: 746057 - DNA, 120 bp, Artificial Sequence
  ENSG00000204967_45 (sequence is synthesized)
ttctagtaaattttcactatattcaccctctttgtttttggtaataatcaacattttagaaaacattttactattatttaacctattacatataaacaaatgtgcacaggctgaaataat

SEQ ID NO: 746058 - DNA, 120 bp, Artificial Sequence
  ENSG00000204967_46 (sequence is synthesized)
aaagctccataaattgtatgaaagtgaaaagctccgttgcctccatcgctgaagcccctcgcatgcacctgccaaatcacttcccttatttttcctccagtgtaaccgcacatttgcctt

SEQ ID NO: 746059 - DNA, 120 bp, Artificial Sequence
  ENSG00000204967_47 (sequence is synthesized)
ttataactgtttgttcggggcctgttttgggaacgttatctaattggacttgcacaacatgtattgtctgtgcatttgtgtgttatttgtatttatcactcattgtttatgaaattatcc

SEQ ID NO: 746060 - DNA, 120 bp, Artificial Sequence
  ENSG00000204967_48 (sequence is synthesized)
atgttgttatatgtagttgtagtttatttatttctgtttctagtactatttcataaatatactataccttatttattctactgttcaggaatttgcattgtgcctcaatgtctatttcaa

SEQ ID NO: 746061 - DNA, 120 bp, Artificial Sequence
  ENSG00000204967_49 (sequence is synthesized)
ataatgccatcataaatatattgtacatttctttgatgcccatgtacacagatttctctcaggtttttgcctaagagttgtgtttgtgggtcacagaatatgtgtgtatctttgtctttt

SEQ ID NO: 746062 - DNA, 120 bp, Artificial Sequence
  ENSG00000204967_50 (sequence is synthesized)
gtagctaacaccaaccaattttccaagatgtttttacctgtttacattcctagtagtgcataaggctttctgctgggccacatcatctctacatttgtcaggttattttcatgttagcca

SEQ ID NO: 746063 - DNA, 120 bp, Artificial Sequence
  ENSG00000204967_51 (sequence is synthesized)
ttttactgggtgacttttgtaatctcattttgaaattattttatatttaaatgaagttgagtacctttctattttattttggcaatttttataccttattttgtgcaatagctgctcaaa

SEQ ID NO: 746064 - DNA, 120 bp, Artificial Sequence
  ENSG00000204967_52 (sequence is synthesized)
tctcctatttctctagtctgttgtttttcttttcttttttctcttctttttgcttccatagaactttatttatttccttatcttgtttttcttattacttaaacaaatcttgtattctga

SEQ ID NO: 746065 - DNA, 120 bp, Artificial Sequence
  ENSG00000204967_53 (sequence is synthesized)
acataactcctttttttagtagttttcaacctcatggctagtttttaattcttttttgtcttttggtgaatagaaagtcataattttgattaaactcaatttatcaatttttgcttctga

SEQ ID NO: 746066 - DNA, 120 bp, Artificial Sequence
  ENSG00000204967_54 (sequence is synthesized)
tcctatttcacaaagataattttctgtggtatcttttatttcattgtttacattacatctacaatccatttggaatatacatatttttatcattgttgtgaggtaggggtcaagatttat

SEQ ID NO: 746067 - DNA, 120 bp, Artificial Sequence
  ENSG00000204967_55 (sequence is synthesized)
tcactctgattgtagtttcttttgaagatttattttttactaccatttttttgttggacttttaaaatgagtttggaagtgttccctctccttcaattttttttttttggaagagtttga

SEQ ID NO: 746068 - DNA, 120 bp, Artificial Sequence
  ENSG00000204967_56 (sequence is synthesized)
aaacaattatcattgattcttctttaaaagtttggtagaattctccaggaaagatatctggttttgggcttttgttgttgttgttgttaggaggtttggattactgattcaatctcctta

SEQ ID NO: 746069 - DNA, 120 bp, Artificial Sequence
  ENSG00000204967_57 (sequence is synthesized)
cttataattgtggcatcaggtgtaatgccacctcttttgtttctgacttccagtctttttgtttttttcttagtctagctaaggggcttgtcagttttgttgttttttcaaaaaatcaac

SEQ ID NO: 746070 - DNA, 120 bp, Artificial Sequence
  ENSG00000204967_58 (sequence is synthesized)
taagtttaaaaacttaatttaaactttttttcatttatttttgctctaatctttattatagtatttcctccctttgctttgggcttcctcatttgtcctttttttctagttccttgagtt

SEQ ID NO: 746071 - DNA, 120 bp, Artificial Sequence
  ENSG00000204967_59 (sequence is synthesized)
gttaagttttttatttgagatctttcttctttcttcatttttagtgtaggcatttacaactcccttctttgtttttgttttcatgtttaagagacaagatctcactatgatgtacagagg

SEQ ID NO: 746072 - DNA, 85 bp, Artificial Sequence
  ENSG00000204967_60 (sequence is synthesized)
tagcttgcccagcttaatattccttcttagtactgcttttgttgtatcctgtaagtttttattgtgttgtgttttcatttttgtt

SEQ ID NO: 746073 - DNA, 120 bp, Artificial Sequence
  ENSG00000204967_61 (sequence is synthesized)
atcctgtaagtttttattgtgttgtgttttcatttttgtttatcttaacatattttctaattcatcttttgatttcccctttcattcaaatgaaattttgaacagaatttcgttcaaaat

SEQ ID NO: 746074 - DNA, 120 bp, Artificial Sequence
  ENSG00000204967_62 (sequence is synthesized)
tctgttgtttaatttctacatatttgcagattttccagttttaattccagtattgatttctagttttattccactgtggtcagaaaagatatttagtaggatttcaaccttcttgaattt

SEQ ID NO: 746075 - DNA, 120 bp, Artificial Sequence
  ENSG00000204967_63 (sequence is synthesized)
gttaagacttgttttgtgacctgacgtgtgatttatcctggaaaatgctctgagtgtgcttgagaagactgtatatttgctgctgttgggtggaattttctgtatatgtctgttagttcc

SEQ ID NO: 746076 - DNA, 120 bp, Artificial Sequence
  ENSG00000204967_64 (sequence is synthesized)
atttcagctatagtgttgttcaagtcctctgcttccttgctgattttctgtctgaatgttctattccttattgaaagtaggataccaaaatctcctactacagtcattggagatacattc

SEQ ID NO: 746077 - DNA, 120 bp, Artificial Sequence
  ENSG00000204967_65 (sequence is synthesized)
tgagaattgtatcattctgagatttcatcactgtgcaaacatgagagtgtacttacatatttacacaaacctagatagtatagcctactacagacctaggttacatgatctattgcttct

SEQ ID NO: 746078 - DNA, 120 bp, Artificial Sequence
  ENSG00000204967_66 (sequence is synthesized)
aggctacaaacctgtacatatgttaactgtactgaatactatagggaattgtaacacaatggtaagtatttgtatacctaaatatatctaaacatctaaaaggtacagtaaaaacattgt

SEQ ID NO: 746079 - DNA, 120 bp, Artificial Sequence
  ENSG00000204967_67 (sequence is synthesized)
acagatttttaaaatggtacacctgaatagggtacttaccctatgaatggagactgcggggctggaaatttatctgcatgagtcaatgagtgaatggtgagtgaatgtgaaggcccagga

SEQ ID NO: 746080 - DNA, 120 bp, Artificial Sequence
  ENSG00000204967_68 (sequence is synthesized)
gaaggcccaggacattactgtgcactaatgtagactttaaagcactatacatttaggctacactcaatttatcaaaaaattttctttttacaggctggtcatggtggctcatgcctgtaa

SEQ ID NO: 746081 - DNA, 70 bp, Artificial Sequence
  ENSG00000204967_69 (sequence is synthesized)
gaaaataatttttaaaaattagctaggtgtggtgacacacacttgtagttccagctactcaggaggctga

SEQ ID NO: 746082 - DNA, 79 bp, Artificial Sequence
  ENSG00000204967_70 (sequence is synthesized)
gtgtggtgacacacacttgacttgaggaggtcaaggctacagtgagctatggtcgtgccactgcactccagcctgagca

SEQ ID NO: 746083 - DNA, 120 bp, Artificial Sequence
  ENSG00000204967_71 (sequence is synthesized)
tctcaattttttttctttcttcagtaataaattaaccttagcttactgtaacttttcaactttgtaaacttaaattttttaaccttttgactcttttgtaataacgcttagcttaaaaca

SEQ ID NO: 746084 - DNA, 120 bp, Artificial Sequence
  ENSG00000204967_72 (sequence is synthesized)
ttgtacagctgtacaaaaatattttctctttatatccttattttacaagtttttttgacttttaatttttttatttttttcacttttacttagtgtttttttttgttgttgttgttaaaa

SEQ ID NO: 746085 - DNA, 120 bp, Artificial Sequence
  ENSG00000204967_73 (sequence is synthesized)
tgttaaaaatgaagatataaacacccatactagcctaggactgtattgggtcaggatcatcaatatcattgtcttccacctccatatcttgtcccactggaaggtcttctggggcagtta

SEQ ID NO: 746086 - DNA, 120 bp, Artificial Sequence
  ENSG00000204967_74 (sequence is synthesized)
cacatgcgatgctatcatctcctatgataacaatatcttctagtggaatacttcccaaaagactttcctgaggctgttttgtggtgaccttttttcttttttttttttgagttaatgtat

SEQ ID NO: 746087 - DNA, 120 bp, Artificial Sequence
  ENSG00000204967_75 (sequence is synthesized)
tttttataagtagaaagagtacactgtaaaataccactaaaaagtatagtaaatacataaagcagtaacatttactatctgtatcaagtattatgtactgtaaattactgtacataattg

SEQ ID NO: 746088 - DNA, 120 bp, Artificial Sequence
  ENSG00000204967_76 (sequence is synthesized)
tatgtgctatcttgtacttttatataactggtagtgcaataggtttgtttacaccaacatcaccacaaacatgtgagtaatgtgctacaacattatgactgctacatcatcactaggtga

SEQ ID NO: 746089 - DNA, 120 bp, Artificial Sequence
  ENSG00000204967_77 (sequence is synthesized)
tttcagctccattataatcttatgggactactcttgtacatgtggtctgttattggttgaaacgttgttatacaacacttgactttattgtattgctatctatttctccatttctgtgaa

SEQ ID NO: 746090 - DNA, 120 bp, Artificial Sequence
  ENSG00000204967_78 (sequence is synthesized)
tctgtgaatgtttgcctcatatatttaggtgttttaatgttgggtgcatatgtatttataattgctatgtccttctggtgaattgaccttttatcattatataatgtccttctttgtctc

SEQ ID NO: 746091 - DNA, 120 bp, Artificial Sequence
  ENSG00000204967_79 (sequence is synthesized)
ttatgacactttttgacttaaagactattttgtgtgatgtagctgtttccacatttgcactcttttggttacaatttgcatgaaatttttttaatatcctttaactttcaggctatccag

SEQ ID NO: 746092 - DNA, 120 bp, Artificial Sequence
  ENSG00000204967_80 (sequence is synthesized)
gtctttaaatctaaagcaaatctcttgtagttagcatataattgggtctttaaaaaaaatcaattcaaccactttgtatcttttgattgggggagtttatcccatttttatttaaagtaa

SEQ ID NO: 746093 - DNA, 120 bp, Artificial Sequence
  ENSG00000204967_81 (sequence is synthesized)
ttattgatagggcataacttactgttgcctctttgttaattgttgtttgcagcttgtagactttttgctcctctttcctcctcttactgtcttcctttgtgttttattgagaattgtaat

SEQ ID NO: 746094 - DNA, 120 bp, Artificial Sequence
  ENSG00000204967_82 (sequence is synthesized)
gctatgtttttgttcctttcctgttttcttttgtatatcttccataggtattttctttgtggttaccatggggcttacattttaaaactcttataaaaatgtattttaaactgatagcat

SEQ ID NO: 746095 - DNA, 120 bp, Artificial Sequence
  ENSG00000204967_83 (sequence is synthesized)
ctttactacaatcacaaaacaaaactcattatgtttacttctcccctacccaaattttatgttattgatgtcataaatacatctttttatattgtgtatacattattttatagttagttt

SEQ ID NO: 746096 - DNA, 120 bp, Artificial Sequence
  ENSG00000204967_84 (sequence is synthesized)
ttctgtacttttgtcttttaatcagattttaaaatatcagattttaaagtgacttttgtaccaccattacagtattatagtattctgtttttatctatatatttatctttactagtgagc

SEQ ID NO: 746097 - DNA, 120 bp, Artificial Sequence
  ENSG00000204967_85 (sequence is synthesized)
tttatactttaataaaatacctatgtatttctgtttagcatcccctaattttaactcaaaaggccccctcttaacatttcttgtaaggcaagtctaattgtgatcaccttcagcttttgt

SEQ ID NO: 746098 - DNA, 120 bp, Artificial Sequence
  ENSG00000204967_86 (sequence is synthesized)
ttaactgggaaggtctttatctctttttcatttttgaagacaaactttggtggatttggtattcttggctggcagttctttttcttttcagcactttcagtataacatctcacccctttc

SEQ ID NO: 746099 - DNA, 120 bp, Artificial Sequence
  ENSG00000204967_87 (sequence is synthesized)
tggatggcaaggtttctactgagaaatctactggtagagttaggggtgttcttttgtacgtgatgaggcatttttcttttgctgctttctaaattcttaacatttcttggatcttgatgt

SEQ ID NO: 746100 - DNA, 120 bp, Artificial Sequence
  ENSG00000204967_88 (sequence is synthesized)
ccatttccttcctcatatttgggaagttttcagatgtaattttaaaaaataagctgtctgtccttttctcttatggcttcttcttttgaaactgtcataatgagtagagcagcctgctcg

SEQ ID NO: 746101 - DNA, 120 bp, Artificial Sequence
  ENSG00000204967_89 (sequence is synthesized)
aggatgtcctatcaatttcttaggctttctttactctctttcatttcttgctctttttgctactctgtctggataatttcaaatgatgtgtccttgagttcactgactcattcttctact

SEQ ID NO: 746102 - DNA, 120 bp, Artificial Sequence
  ENSG00000204967_90 (sequence is synthesized)
tgattaagtctgctgttgaacatgtctgtaaaattttcagttcaattattgtattcttcagttccaaaatttctttttagttcttttgaatattttctatctgctgaaattctgattctg

SEQ ID NO: 746103 - DNA, 120 bp, Artificial Sequence
  ENSG00000204967_91 (sequence is synthesized)
cttatgcattattttcctgagctcactgaacatctttatgacaattattttgaatactttgtcaagtaattcacatagctctatttctttaggtttggtttctggaggtgtgtttgtgtg

SEQ ID NO: 746104 - DNA, 120 bp, Artificial Sequence
  ENSG00000204967_92 (sequence is synthesized)
tgtgtgtgtgtgtgtgtgtgggcacgcactatttgattgggccatgtttcctgttttctcatattccttattactttgtgttgatatctatacatttcaaaaaaacaaaaaacaacaaca

SEQ ID NO: 746105 - DNA, 120 bp, Artificial Sequence
  ENSG00000204967_93 (sequence is synthesized)
caccagctacctcttccagtctttatggactggatttgtacatggaaagatctttactaatcaggctggctagagattctagggacctctcaaaccttttctgtggatgcatcttctatg

SEQ ID NO: 746106 - DNA, 120 bp, Artificial Sequence
  ENSG00000204967_94 (sequence is synthesized)
gacttgtgtgtataattcctaattagagggatctgccagcttttttttttaagatgctctaatctttttccctctgtggtgtctgtgtgctgtactgtgggccctctggagcagcagtat

SEQ ID NO: 746107 - DNA, 120 bp, Artificial Sequence
  ENSG00000204967_95 (sequence is synthesized)
tcactcagctcttttaggttctgagaagccctcagttatagattctgctgaatcctatcagtgcctggagtcaagtgagacagaaacttggactgcccactaaaattcaggaactttgga

SEQ ID NO: 746108 - DNA, 120 bp, Artificial Sequence
  ENSG00000204967_96 (sequence is synthesized)
tgcattttactctctctttccctcatgagagagagagtgctgagctgagtttctctctgtgtgctgtatcacaggtcctgaggagcatcagcccgccacccagctctttattattctgag

SEQ ID NO: 746109 - DNA, 120 bp, Artificial Sequence
  ENSG00000204967_97 (sequence is synthesized)
ctgccctcaggattttagaatatgccaggttccatcagtgctctgagatatgcaagacagctcccctgaaaagtcagaacactgaatgcatgctttactttctctttcccttctcaggga

SEQ ID NO: 746110 - DNA, 120 bp, Artificial Sequence
  ENSG00000204967_98 (sequence is synthesized)
gaagacaggagctgggaatttccccctgtttgaatggaactgtgctgctggatgggactatagggaaagtgccccagaaaagtgcccagctagttttacacttgcttggagcccaggacc

SEQ ID NO: 746111 - DNA, 120 bp, Artificial Sequence
  ENSG00000204967_99 (sequence is synthesized)
ctcttaactggtttcggcacttatcaccatgggaattggtccttgtattgttgttgagttggtatacctgtggagggtctggggattcctataacagcatcttgctgatgtcactacctc

SEQ ID NO: 746112 - DNA, 120 bp, Artificial Sequence
  ENSG00000204967_100 (sequence is synthesized)
tgttatctttttaagctatatatgcttttacaaattattttattgatttcctcttttgttgattataacacacatccttgacttattacctcaattaaatcaataattttaataattcca

SEQ ID NO: 746113 - DNA, 120 bp, Artificial Sequence
  ENSG00000204969_0 (sequence is synthesized)
acttcagagaagcggaggaataagagaagcagcaggactttaacagagactagaatatttaaatttttgcaaaacatgctcttctaatttgatcaaaacattgaggattggtaatggcgt

SEQ ID NO: 746114 - DNA, 120 bp, Artificial Sequence
  ENSG00000204969_1 (sequence is synthesized)
cttctatcagaaggggccgaggggcctggacacggctgctctcgcttctgctcctcgcagcctgggaggtggggagcggccagctccgctactccgtccccgaggaggccaaacacggca

SEQ ID NO: 746115 - DNA, 120 bp, Artificial Sequence
  ENSG00000204969_2 (sequence is synthesized)
ggcaccttcgtgggccgcatcgcgcaggacctggggctggagctggaggagctggtgccgcgcctgttccgggtggcgtccaaaagacacggggaccttctggaggtaaatctgcagaat

SEQ ID NO: 746116 - DNA, 120 bp, Artificial Sequence
  ENSG00000204969_3 (sequence is synthesized)
ttttgtttgtgaattctcggatcgaccgggaggagctgtgcgggcggagcgcggaatgtagcatccacgtggaggtgatcgtggacaggccgctgcaggttttccatgtggaagtggagg

SEQ ID NO: 746117 - DNA, 120 bp, Artificial Sequence
  ENSG00000204969_4 (sequence is synthesized)
tgaaggacattaacgacaacccgccaatatttccaatgacagtaaagactatccggtttcccgaatcaaggctgcttgattctcggtttcctctagagggagcatctgatgcagatatag

SEQ ID NO: 746118 - DNA, 120 bp, Artificial Sequence
  ENSG00000204969_5 (sequence is synthesized)
gagtaaatgctcttctctcctacaagctcagctccagtgagtttttcttcctagatatacaggcaaatgatgaactaagcgaatctttgtctctcgtgctggggaaatcgctggacagag

SEQ ID NO: 746119 - DNA, 120 bp, Artificial Sequence
  ENSG00000204969_6 (sequence is synthesized)
aggaaactgctgaggttaatttgttactggtggctactgatgggggcaaacctgagctcacgggcaccgttcaaatacttattaaggtattagatgtaaatgacaatgaaccaacttttg

SEQ ID NO: 746120 - DNA, 120 bp, Artificial Sequence
  ENSG00000204969_7 (sequence is synthesized)
cccaatcagtttacaaagtaaaattgttagagaatacggcaaatgggaccttagtggttaagttaaacgcttctgatgcagatgaaggaccgaacagcgagattgtgtattcactcggta

SEQ ID NO: 746121 - DNA, 120 bp, Artificial Sequence
  ENSG00000204969_8 (sequence is synthesized)
gtgatgtgtcctccactatacagactaagtttaccatagatcccatctcaggggaaatcagaactaagggaaaattagattatgaagaagcaaagtcctacgagattcaggtcactgcaa

SEQ ID NO: 746122 - DNA, 120 bp, Artificial Sequence
  ENSG00000204969_9 (sequence is synthesized)
ctgacaaaggaaccccttcaatgtcaggacattgtaaaatttcattaaaacttgtggacatcaatgataacacaccagaagtctcaataacgtctctctcacttcccatctcagagaacg

SEQ ID NO: 746123 - DNA, 120 bp, Artificial Sequence
  ENSG00000204969_10 (sequence is synthesized)
cttccctgggcactgtcattgctctcatcacggtgtcggatcgcgactctggtacgaatggacatgtcacctgctccctgacgccccacgtccctttcaagctggtgtccaccttcaaga

SEQ ID NO: 746124 - DNA, 120 bp, Artificial Sequence
  ENSG00000204969_11 (sequence is synthesized)
attactactcgttggtgctggacagcgccctggaccgcgagagcgtgtcagcctatgagctggtggtgaccgcacgggacgggggctcgccttcactgtgggccaccaccagcgtgtcca

SEQ ID NO: 746125 - DNA, 120 bp, Artificial Sequence
  ENSG00000204969_12 (sequence is synthesized)
tcgaggtggccgacgtgaacgacaacgcgccggcgttcgcacagcctgagtacacagtattcgtgaaggagaacaacccgccgggctgccacatcttcacggtgtcagcgtgggatgcgg

SEQ ID NO: 746126 - DNA, 120 bp, Artificial Sequence
  ENSG00000204969_13 (sequence is synthesized)
acgcgcaggagaacgcgctggtgtcctactcgctggtggagcggcgggtgggcgagcgcgcgttgtcgagctacgtttcggtgcacgcggagagcggcaaggtgtacgcgctgcagccgc

SEQ ID NO: 746127 - DNA, 120 bp, Artificial Sequence
  ENSG00000204969_14 (sequence is synthesized)
ggagagcggcaaggtgtacgcgctgcagccgctggaccacgaggaagtggagctgctgcagttccaggtgagcgcgcgggatgcgggcgtgccgcctctgggcagcaacgtgacgctgca

SEQ ID NO: 746128 - DNA, 120 bp, Artificial Sequence
  ENSG00000204969_15 (sequence is synthesized)
cggcactgttggcgcctagggctggcaccgctgctggcgcagtgagtgagctggtgccgtggtcggtgggtgcagggcacgtggtggcgaaggtgcgcgcagtggacgctgactcaggct

SEQ ID NO: 746129 - DNA, 120 bp, Artificial Sequence
  ENSG00000204969_16 (sequence is synthesized)
acaacgcgtggctttcgtacgagcttcagctgggtactggcagcgctcgcatcccgttccgcgtggggctatacacgggtgagatcagcacgacacgtgccctagacgaggctgactccc

SEQ ID NO: 746130 - DNA, 120 bp, Artificial Sequence
  ENSG00000204969_17 (sequence is synthesized)
ctcgacaccgcctactcgtgctggtgaaggaccacggcgaaccagcgttgacagccacggccaccgtgttagtgtcgttggtggaaagtggccaggcacccaaggcctcgtcgcgggcgt

SEQ ID NO: 746131 - DNA, 120 bp, Artificial Sequence
  ENSG00000204969_18 (sequence is synthesized)
gggtgggcgccgcgggctcagaggctacgctggtggatgtcaacgtgtacctgatcatcgccatctgcgcggtatccagcctgttggtgctcacggtgctgctgtacactgcgctgcggt

SEQ ID NO: 746132 - DNA, 120 bp, Artificial Sequence
  ENSG00000204969_19 (sequence is synthesized)
gctcggtgccacccaccgagggtgcgcgcgcgccaggaaagcccacgctggtgtgctccagcgccgtggggagctggtcttactcgcagcagaggcggcagagggtgtgctctggggagg

SEQ ID NO: 746133 - DNA, 120 bp, Artificial Sequence
  ENSG00000204969_20 (sequence is synthesized)
acccccccaagacggacctcatggccttcagccctagcttatctcaaggtccagactccgcagaagagaaacagctctcagaatcagaatacgtaggaaagccacgacagcccaaccctg

SEQ ID NO: 746134 - DNA, 120 bp, Artificial Sequence
  ENSG00000204969_21 (sequence is synthesized)
actggcgttactctgcctccctgagagcaggcatgcacagctctgtgcacctagaggaggctggcattctacgggctggtccaggagggcctgatcagcagtggccaacagtatccagtg

SEQ ID NO: 746135 - DNA, 120 bp, Artificial Sequence; identical to SEQ ID NO: 80633
  ENSG00000204969_22 (sequence is synthesized)

SEQ ID NO: 746136 - DNA, 120 bp, Artificial Sequence; identical to SEQ ID NO: 80634
  ENSG00000204969_23 (sequence is synthesized)

SEQ ID NO: 746137 - DNA, 120 bp, Artificial Sequence; identical to SEQ ID NO: 80635
  ENSG00000204969_24 (sequence is synthesized)

SEQ ID NO: 746138 - DNA, 120 bp, Artificial Sequence; identical to SEQ ID NO: 80636
  ENSG00000204969_25 (sequence is synthesized)

SEQ ID NO: 746139 - DNA, 120 bp, Artificial Sequence; identical to SEQ ID NO: 80637
  ENSG00000204969_26 (sequence is synthesized)

SEQ ID NO: 746140 - DNA, 120 bp, Artificial Sequence; identical to SEQ ID NO: 80638
  ENSG00000204969_27 (sequence is synthesized)

SEQ ID NO: 746141 - DNA, 120 bp, Artificial Sequence; identical to SEQ ID NO: 80639
  ENSG00000204969_28 (sequence is synthesized)

SEQ ID NO: 746142 - DNA, 120 bp, Artificial Sequence; identical to SEQ ID NO: 80640
  ENSG00000204969_29 (sequence is synthesized)

SEQ ID NO: 746143 - DNA, 120 bp, Artificial Sequence; identical to SEQ ID NO: 80641
  ENSG00000204969_30 (sequence is synthesized)

SEQ ID NO: 746144 - DNA, 120 bp, Artificial Sequence; identical to SEQ ID NO: 80642
  ENSG00000204969_31 (sequence is synthesized)

SEQ ID NO: 746145 - DNA, 120 bp, Artificial Sequence; identical to SEQ ID NO: 80643
  ENSG00000204969_32 (sequence is synthesized)

SEQ ID NO: 746146 - DNA, 120 bp, Artificial Sequence; identical to SEQ ID NO: 80644
  ENSG00000204969_33 (sequence is synthesized)

SEQ ID NO: 746147 - DNA, 120 bp, Artificial Sequence; identical to SEQ ID NO: 80645
  ENSG00000204969_34 (sequence is synthesized)

SEQ ID NO: 746148 - DNA, 120 bp, Artificial Sequence; identical to SEQ ID NO: 80646
  ENSG00000204969_35 (sequence is synthesized)

SEQ ID NO: 746149 - DNA, 120 bp, Artificial Sequence; identical to SEQ ID NO: 80647
  ENSG00000204969_36 (sequence is synthesized)

SEQ ID NO: 746150 - DNA, 120 bp, Artificial Sequence; identical to SEQ ID NO: 80648
  ENSG00000204969_37 (sequence is synthesized)

SEQ ID NO: 746151 - DNA, 120 bp, Artificial Sequence; identical to SEQ ID NO: 80649
  ENSG00000204969_38 (sequence is synthesized)

SEQ ID NO: 746152 - DNA, 120 bp, Artificial Sequence; identical to SEQ ID NO: 80650
  ENSG00000204969_39 (sequence is synthesized)

SEQ ID NO: 746153 - DNA, 120 bp, Artificial Sequence; identical to SEQ ID NO: 80651
  ENSG00000204969_40 (sequence is synthesized)

SEQ ID NO: 746154 - DNA, 120 bp, Artificial Sequence; identical to SEQ ID NO: 80652
  ENSG00000204969_41 (sequence is synthesized)

SEQ ID NO: 746155 - DNA, 120 bp, Artificial Sequence; identical to SEQ ID NO: 80653
  ENSG00000204969_42 (sequence is synthesized)

SEQ ID NO: 746156 - DNA, 120 bp, Artificial Sequence; identical to SEQ ID NO: 80654
  ENSG00000204969_43 (sequence is synthesized)

SEQ ID NO: 746157 - DNA, 120 bp, Artificial Sequence
  ENSG00000204969_44 (sequence is synthesized)
tcttttactttttcttgccaattctaaaattgttctttttaaaaaattctatatgatttctactagttatttagattcatagttcttcatttattttatatcatcctaccgtgcgatttt

SEQ ID NO: 746158 - DNA, 120 bp, Artificial Sequence
  ENSG00000204969_45 (sequence is synthesized)
tttggaattttcacttcacagatgtactgatgctatgccaaataaatattgaatagctaccaaataaacattgttttctattctgctgcattccccatctgtacattaaaatacctggta

SEQ ID NO: 746159 - DNA, 120 bp, Artificial Sequence
  ENSG00000204969_46 (sequence is synthesized)
aatgaaaatattacaaatgaaatgggtgaaaatggaattcttcctccttttttccaatgtgcttgatgtcaatgatcattttgtaaaaatatagtttgggtccccacatagtgaaagtac

SEQ ID NO: 746160 - DNA, 120 bp, Artificial Sequence
  ENSG00000204969_47 (sequence is synthesized)
tctggtttctgtttgattcagaaatttggtgggttttttgttgttgttttggtttttgtgtgtgtgtgtttgtgtgagtgtagttcttcaatagagagggagcgtaaagctattttcact

SEQ ID NO: 746161 - DNA, 120 bp, Artificial Sequence
  ENSG00000204969_48 (sequence is synthesized)
agattgattttttgtttagacaaacaggatgaaaataactttatggatataggaggcaaggaaagtttttaaatggctaccattatgtctttatatattaaatttctttatgtaagaaaa

SEQ ID NO: 746162 - DNA, 120 bp, Artificial Sequence
  ENSG00000204970_0 (sequence is synthesized)
atggtgttttctaggagagggggcctgggagcccgggatctgcttctttggcttctgctcctcgcagcctgggaggtggggagcggccagctccactactcgatcccggaggaagccaaa

SEQ ID NO: 746163 - DNA, 120 bp, Artificial Sequence
  ENSG00000204970_1 (sequence is synthesized)
cacggcaccttcgttggccgcgttgctcaggacctgggactggagctggcggagctggtgcctcgcctgttccgggtggcgtccaaaacacacagggaccttctggaggtaaatctgcag

SEQ ID NO: 746164 - DNA, 120 bp, Artificial Sequence
  ENSG00000204970_2 (sequence is synthesized)
gcattttgtttgtgaattctcggatcgatcgcgaggagctgtgccagtggagcgcggagtgcagcatccacctggagttgatcgccgacaggccgctgcaggttttccatgtggaggtga

SEQ ID NO: 746165 - DNA, 120 bp, Artificial Sequence
  ENSG00000204970_3 (sequence is synthesized)
gtgaaggtgaaagacattaacgataatccacccgtcttcaggggcagagaacaaataatatttattcctgaatctagactcctgaattcgcgttttccgatagaaggagctgctgatgca

SEQ ID NO: 746166 - DNA, 120 bp, Artificial Sequence
  ENSG00000204970_4 (sequence is synthesized)
gacattggtgctaacgctcttctaacgtacacgctcagcccgagtgattatttctctttggatgtagaggcaagtgatgaactgagtaaatctctttggcttgaattgagaaaatatttg

SEQ ID NO: 746167 - DNA, 120 bp, Artificial Sequence
  ENSG00000204970_5 (sequence is synthesized)
gatagagaagaaacaccagaacttcacttattactgactgccactgatgggggcaaaccggagctgcaaggtacagttgagctgctgatcaccgtcctcgacgttaatgataacgcccca

SEQ ID NO: 746168 - DNA, 120 bp, Artificial Sequence
  ENSG00000204970_6 (sequence is synthesized)
ctgtttgaccaggccgtatacagagtccacttgttagagactacagcaaatggaacattagtgaccacattaaatgcctctgatgctgacgaaggtgtaaatggtgaagtcgtcttttcc

SEQ ID NO: 746169 - DNA, 120 bp, Artificial Sequence
  ENSG00000204970_7 (sequence is synthesized)
tttgacagtggtatttctcgtgacattcaagaaaaattcaaagttgattccagctcaggagaaattaggttaattgataaactggattatgaagaaacaaaatcctacgaaattcaagta

SEQ ID NO: 746170 - DNA, 120 bp, Artificial Sequence
  ENSG00000204970_8 (sequence is synthesized)
aaggcagttgataaaggaagtcctccgatgtcaaatcactgtaaggttttggtgaaagtgctggatgtaaatgataatgctccagaactggcggtcacttcattgtatttgcctatcaga

SEQ ID NO: 746171 - DNA, 120 bp, Artificial Sequence
  ENSG00000204970_9 (sequence is synthesized)
gaggacgctccactcagcaccgtcatcgccctcatcaccgtgtctgaccgtgactcaggtgccaacgggcaggtgacttgctccttaatgccccacgtccccttcaagctggtgtccacc

SEQ ID NO: 746172 - DNA, 120 bp, Artificial Sequence
  ENSG00000204970_10 (sequence is synthesized)
ttcaagaattactactcgttggtgttggacagcgccctggatcgcgagagcctgtcggtctatgagctggtggtgaccgcgcgggacgggggctcgccttcgctgtgggccacggccagg

SEQ ID NO: 746173 - DNA, 120 bp, Artificial Sequence
  ENSG00000204970_11 (sequence is synthesized)
gtgtccgtggaggtggccgacgtgaatgacaacgcgcctgcgttcgcgcagcccgagtacacagtattcgtgaaggagaacaacccgccgggctgccacatcttcacggtgtctgcgcgg

SEQ ID NO: 746174 - DNA, 120 bp, Artificial Sequence
  ENSG00000204970_12 (sequence is synthesized)
gacgcggacgcgcaggagaacgcgctggtgtcctattcgctggtggaacggcgggtgggcgagcgcgcgctgtcgaactacgtgtcagtgcacgcggagagcggcaaggtgtacgcactg

SEQ ID NO: 746175 - DNA, 120 bp, Artificial Sequence
  ENSG00000204970_13 (sequence is synthesized)
gagagcggcaaggtgtacgcactgcagcccctggaccacgaggagctggagctgctgcagttccaggtgagcgcgcgggatgcgggcgtgccgcctctgggcagcaacgtgacgctgcag

SEQ ID NO: 746176 - DNA, 120 bp, Artificial Sequence
  ENSG00000204970_14 (sequence is synthesized)
aacgcgccggcgctgctggcgcctcgagtgggtggcactattggtgcagtcagtgagctggtgccgcgattggtgggtgcgggtcatgtggtggcgaaggtgcgcgcagtggacgccgac

SEQ ID NO: 746177 - DNA, 120 bp, Artificial Sequence
  ENSG00000204970_15 (sequence is synthesized)
tcgggctacaacgcgtggctgtcctatgaactgcagccggcagcaggcggcgcgcgcatcccgttccgcgtggggctgtacacgggcgagatcagcacgactcgtgtcctggacgaggct

SEQ ID NO: 746178 - DNA, 120 bp, Artificial Sequence
  ENSG00000204970_16 (sequence is synthesized)
gacttgtcgcgctaccgccttctggtgctagtgaaggatcacggtgagccggcgctgacagccacggccactgtgcttgtatctctggtggagagcggccaggcgccaaaggcgtcttcg

SEQ ID NO: 746179 - DNA, 120 bp, Artificial Sequence
  ENSG00000204970_17 (sequence is synthesized)
cgggcgtcggtgggtgtcgcgggcccagaggcggcgctggtggatgtcaacgtgtacctgatcatcgccatctgcgcggtgtccagcctgctggtgctcacactgctgctgtacacggcg

SEQ ID NO: 746180 - DNA, 120 bp, Artificial Sequence
  ENSG00000204970_18 (sequence is synthesized)
ctgcggtgctcagtgccgcccactgagggtgcgtatgtgccgggcaagcccactctggtgtgctccagcgcgttggggagctggtcgaactcacagcagaggcggcagagggtgtgctct

SEQ ID NO: 746181 - DNA, 120 bp, Artificial Sequence
  ENSG00000204970_19 (sequence is synthesized)
agcgagggcccacccaagaccgacctcatggccttcagcccaggcctatctccaagtcttaacacgtcagaaagaaatgaacaaccagaagcaaatttggatctttctggtaatccacga

SEQ ID NO: 746182 - DNA, 120 bp, Artificial Sequence
  ENSG00000204970_20 (sequence is synthesized)
cagcccaaccctgactggcgttactctgcctccctgagagcaggcatgcacagctctgtgcacctagaggaggctggcattctacgggctggtccaggagggcctgatcagcagtggcca

SEQ ID NO: 746183 - DNA, 120 bp, Artificial Sequence; identical to SEQ ID NO: 80633
  ENSG00000204970_21 (sequence is synthesized)

SEQ ID NO: 746184 - DNA, 120 bp, Artificial Sequence; identical to SEQ ID NO: 80634
  ENSG00000204970_22 (sequence is synthesized)

SEQ ID NO: 746185 - DNA, 120 bp, Artificial Sequence; identical to SEQ ID NO: 80635
  ENSG00000204970_23 (sequence is synthesized)

SEQ ID NO: 746186 - DNA, 120 bp, Artificial Sequence; identical to SEQ ID NO: 80636
  ENSG00000204970_24 (sequence is synthesized)

SEQ ID NO: 746187 - DNA, 120 bp, Artificial Sequence; identical to SEQ ID NO: 80637
  ENSG00000204970_25 (sequence is synthesized)

SEQ ID NO: 746188 - DNA, 120 bp, Artificial Sequence; identical to SEQ ID NO: 80638
  ENSG00000204970_26 (sequence is synthesized)

SEQ ID NO: 746189 - DNA, 120 bp, Artificial Sequence; identical to SEQ ID NO: 80639
  ENSG00000204970_27 (sequence is synthesized)

SEQ ID NO: 746190 - DNA, 120 bp, Artificial Sequence; identical to SEQ ID NO: 80640
  ENSG00000204970_28 (sequence is synthesized)

SEQ ID NO: 746191 - DNA, 120 bp, Artificial Sequence; identical to SEQ ID NO: 80641
  ENSG00000204970_29 (sequence is synthesized)

SEQ ID NO: 746192 - DNA, 120 bp, Artificial Sequence; identical to SEQ ID NO: 80642
  ENSG00000204970_30 (sequence is synthesized)

SEQ ID NO: 746193 - DNA, 120 bp, Artificial Sequence; identical to SEQ ID NO: 80643
  ENSG00000204970_31 (sequence is synthesized)

SEQ ID NO: 746194 - DNA, 120 bp, Artificial Sequence; identical to SEQ ID NO: 80644
  ENSG00000204970_32 (sequence is synthesized)

SEQ ID NO: 746195 - DNA, 120 bp, Artificial Sequence; identical to SEQ ID NO: 80645
  ENSG00000204970_33 (sequence is synthesized)

SEQ ID NO: 746196 - DNA, 120 bp, Artificial Sequence; identical to SEQ ID NO: 80646
  ENSG00000204970_34 (sequence is synthesized)

SEQ ID NO: 746197 - DNA, 120 bp, Artificial Sequence; identical to SEQ ID NO: 80647
  ENSG00000204970_35 (sequence is synthesized)

SEQ ID NO: 746198 - DNA, 120 bp, Artificial Sequence; identical to SEQ ID NO: 80648
  ENSG00000204970_36 (sequence is synthesized)

SEQ ID NO: 746199 - DNA, 120 bp, Artificial Sequence; identical to SEQ ID NO: 80649
  ENSG00000204970_37 (sequence is synthesized)

SEQ ID NO: 746200 - DNA, 120 bp, Artificial Sequence; identical to SEQ ID NO: 80650
  ENSG00000204970_38 (sequence is synthesized)

SEQ ID NO: 746201 - DNA, 120 bp, Artificial Sequence; identical to SEQ ID NO: 80651
  ENSG00000204970_39 (sequence is synthesized)

SEQ ID NO: 746202 - DNA, 120 bp, Artificial Sequence; identical to SEQ ID NO: 80652
  ENSG00000204970_40 (sequence is synthesized)

SEQ ID NO: 746203 - DNA, 120 bp, Artificial Sequence; identical to SEQ ID NO: 80653
  ENSG00000204970_41 (sequence is synthesized)

SEQ ID NO: 746204 - DNA, 120 bp, Artificial Sequence; identical to SEQ ID NO: 80654
  ENSG00000204970_42 (sequence is synthesized)

SEQ ID NO: 746205 - DNA, 120 bp, Artificial Sequence
  ENSG00000204970_43 (sequence is synthesized)
agctactgatcactaaaagtgaaggaggaagctccattttgtcaccgcctgagagaagacagaaacggtaaagagataaatgattggaaatattagataaaatggcatgattttgaagta

SEQ ID NO: 746206 - DNA, 120 bp, Artificial Sequence
  ENSG00000204970_44 (sequence is synthesized)
catcttttcaaatatcactttaaaaaatgtcttcaaggtgttcactaacgttgaaataaatcataccattgaatgtagatatcctattaatggcagttttgtcttgaatggaactagaaa

SEQ ID NO: 746207 - DNA, 120 bp, Artificial Sequence
  ENSG00000204977_0 (sequence is synthesized)
gagtccattttggggctgtgcttggcgcgtaccgtgcggtccctgtagttggaggacgggcggtcgcgcggcctttcccactagccggaggtcggagataagtacccgccgcccggctcc

SEQ ID NO: 746208 - DNA, 120 bp, Artificial Sequence
  ENSG00000204977_1 (sequence is synthesized)
tctcgggaaagcggggtggtcctcgaaccttcagcgagggtggggagttgcccaggtcagcagggatctgcgtgggttgggggggctggcgaaggccgtctgagctccagtccggcagcg

SEQ ID NO: 746209 - DNA, 120 bp, Artificial Sequence
  ENSG00000204977_2 (sequence is synthesized)
cggcagaaaccagcggggcactgtcatgggcctggggaggagcggcctgcggagggcgccggggcagtgtgtctgtggtccagaaaacctgctccgtccggagccttcctggccccgcta

SEQ ID NO: 746210 - DNA, 120 bp, Artificial Sequence
  ENSG00000204977_3 (sequence is synthesized)
ccagcgtctccacatcccctagaaaagaaaagacgggtgtgggccttaggttacagcgcgccgccagcgtttggttgcatggcgccgggggagggcgccctaaccgagaagctgcttaat

SEQ ID NO: 746211 - DNA, 120 bp, Artificial Sequence
  ENSG00000204977_4 (sequence is synthesized)
acaaagagctccaggctcctggcggttcaccaggtctaaacagccgggctttatttgtgggggcgattgaaaaaattgagggtcaagattggggtgctgtgcaaataaatgcgttaatac

SEQ ID NO: 746212 - DNA, 120 bp, Artificial Sequence
  ENSG00000204977_5 (sequence is synthesized)
tgttctttttcttctttctttgcagtagcctctagttcgttagtcaaaacgtgaaaaaaaagacctgctttgccctgggaaatagtaaccctgccaaatacatcagcttgtaggagacag

SEQ ID NO: 746213 - DNA, 120 bp, Artificial Sequence
  ENSG00000204977_6 (sequence is synthesized)
aggatgtgatggagctgcttgaagaagatctcacatgccctatttgttgtagtctgtttgatgatccacgggttttgccttgctcccacaacttctgcaaaaaatgcttagaaggtatct

SEQ ID NO: 746214 - DNA, 120 bp, Artificial Sequence
  ENSG00000204977_7 (sequence is synthesized)
tagaagggagtgtgcggaattccttgtggagaccagctccattcaagtgtcctacatgccgtaaggaaacttcagctactggaattaatagcctgcaggttaattactccctgaagggta

SEQ ID NO: 746215 - DNA, 120 bp, Artificial Sequence
  ENSG00000204977_8 (sequence is synthesized)
ttgtggaaaagtataacaagatcaagatctctcccaaaatgccagtatgcaaaggacacttggggcagcctctcaacattttctgcctgactgatatgcagctgatttgtgggatctgtg

SEQ ID NO: 746216 - DNA, 120 bp, Artificial Sequence
  ENSG00000204977_9 (sequence is synthesized)
ctactcgtggggagcacaccaaacatgtcttctgttctattgaagatgcctatgctcaggaaagggatgcctttgagtccctcttccagagctttgagacctggcgtcggggagatgctc

SEQ ID NO: 746217 - DNA, 120 bp, Artificial Sequence
  ENSG00000204977_10 (sequence is synthesized)
tttctcgcttggataccttggaaactagtaagaggaaatccctacagttactgactaaagattcagataaagtgaaggaattttttgagaagttacaacacacactggatcaaaagaaga

SEQ ID NO: 746218 - DNA, 120 bp, Artificial Sequence
  ENSG00000204977_11 (sequence is synthesized)
atgaaattctgtctgactttgagaccatgaaacttgctgttatgcaagcatatgacccagagatcaacaaactcaacaccatcttgcaggagcaacggatggcctttaacattgctgagg

SEQ ID NO: 746219 - DNA, 120 bp, Artificial Sequence
  ENSG00000204977_12 (sequence is synthesized)
ctttcaaagatgtgtcagaacccattgtatttctgcaacagatgcaggagtttagagagaaaatcaaagtaatcaaggaaactcctttacctccctctaatttgcctgcaagccctttaa

SEQ ID NO: 746220 - DNA, 120 bp, Artificial Sequence
  ENSG00000204977_13 (sequence is synthesized)
tgaagaactttgataccagtcagtgggaagacataaaactagtcgatgtggataaactttctttgcctcaagacactggcacattcattagcaagattccctggagcttttataagttat

SEQ ID NO: 746221 - DNA, 120 bp, Artificial Sequence
  ENSG00000204977_14 (sequence is synthesized)
ttttgctaatccttctgcttggccttgtcattgtctttggtcctaccatgttcctagaatggtcattatttgatgacctggcaacttggaaaggctgtctttcaaacttcagttcctatc

SEQ ID NO: 746222 - DNA, 120 bp, Artificial Sequence
  ENSG00000204977_15 (sequence is synthesized)
tgactaaaacagccgatttcatagaacaatcagttttttactgggaacaggtgacagatgggtttttcattttcaatgaaagattcaagaattttactttggtggtactgaacaatgtgg

SEQ ID NO: 746223 - DNA, 120 bp, Artificial Sequence
  ENSG00000204977_16 (sequence is synthesized)
cagaatttgtgtgcaaatataaactattataaaatctgtttcaagtatgcagttttcttttgttagaaattgttagagaatagagagtggtaattcagatttggtcaacgattctagtca

SEQ ID NO: 746224 - DNA, 120 bp, Artificial Sequence
  ENSG00000204977_17 (sequence is synthesized)
catattttcctccaaaagtattccttccaaaaataatctatacatgttcaaattaggtagcataaagataaaagtgaaatttagtagtataggcctgaacctttttttgtttaaaagagt

SEQ ID NO: 746225 - DNA, 120 bp, Artificial Sequence
  ENSG00000204977_18 (sequence is synthesized)
gcttttgaaataagcatccaccccaaatgttggttgtatttatgctgtgataaaaataggtgagagatcatatgatctaatattgtattgatggaagtataggtagtatagtagtgattg

SEQ ID NO: 746226 - DNA, 62 bp, Artificial Sequence
  ENSG00000204977_19 (sequence is synthesized)
tattgtattgatggaagtataggtagtatagtagtgattgttcttcaagcatgcagtaaaga

SEQ ID NO: 746227 - DNA, 120 bp, Artificial Sequence
  ENSG00000204977_20 (sequence is synthesized)
agcacctttttgacagtgaacatggtctaaaaaagggaagatattgtagaagatttcacacacacacgcgtgtgtgggagacaactaaaggtattgaaggtactaattaattagatttcc

SEQ ID NO: 746228 - DNA, 120 bp, Artificial Sequence
  ENSG00000204977_21 (sequence is synthesized)
aaaattttctacagagagttaattatcaccaaaatgtgaatggtacatacaaaacctggcattttcttgtgataagtttacatttttaggagagtggagctttcaatctgcccttttctc

SEQ ID NO: 746229 - DNA, 120 bp, Artificial Sequence
  ENSG00000204977_22 (sequence is synthesized)
ctttgtttttgtagttttcaccaaagatgatcaactagaaatgttaagtggctatgcaagcaaaagcatagataggttaaaaaaaaggatcagctggctgggcagggtggctcatgtcta

SEQ ID NO: 746230 - DNA, 120 bp, Artificial Sequence
  ENSG00000204977_23 (sequence is synthesized)
taatctcagcattctaggacagtgatgtgggaggattatttgaggctaggagttccagttcgaaaccagcttcgtaaacatagcaagacccagtctctaccaaaaaaaaaaaaaaaaaaa

SEQ ID NO: 746231 - DNA, 120 bp, Artificial Sequence
  ENSG00000204977_24 (sequence is synthesized)
atatatatacacacacacacacacatatgtacacatacatatatatacatatatatgtatatatagaacacatggcaagagcaggaaatgggaagactaccttttttctggcagctatgt

SEQ ID NO: 746232 - DNA, 120 bp, Artificial Sequence
  ENSG00000204977_25 (sequence is synthesized)
cttttttctggcagctatgtgttgttttgttcgaaagatggcaagtgtacaaccaaaccaatccacttgcttacagaaagaatgtttagtgtagttaagactaatttgacaacagataaa

SEQ ID NO: 746233 - DNA, 120 bp, Artificial Sequence
  ENSG00000204977_26 (sequence is synthesized)
acagtctgtcagctattacaaagtaatcagctgaacactaatgctgttctgtctgctcacaagagataaagataccctctcatggaataaacaccttgcttagaattcatataacaaaga

SEQ ID NO: 746234 - DNA, 120 bp, Artificial Sequence
  ENSG00000204977_27 (sequence is synthesized)
agtaaccttataactgctctctagtctgccttatttgtgtcatagagtaagatattccttgaaagcccattaagtggaatagactttctgaaaataagagttctttacctcagtcctcct

SEQ ID NO: 746235 - DNA, 120 bp, Artificial Sequence
  ENSG00000204977_28 (sequence is synthesized)
aaatttaaagcacagaagaaatgatttccttctagctatgagaatagtcaaattgagcttgccaggctgtctcattcctaacatgtaattcatgatttagccactaaatttctaaggaga

SEQ ID NO: 746236 - DNA, 120 bp, Artificial Sequence
  ENSG00000204977_29 (sequence is synthesized)
tttctaaggagatcataagaaattaagaaaaacgtttaagtctagcctctgcgtggtagacaggtatggggagggagaatgcttttcccctcccagtaataaaaaaaaaaaaaaaaaaaa

SEQ ID NO: 746237 - DNA, 120 bp, Artificial Sequence
  ENSG00000204977_30 (sequence is synthesized)
tatatatatatatatatatagttttactaggttttcatggataagtttttaaatgtaagacaggaaagggatctatttgatgtctatcttcagatatattggcagttttccttaagctat

SEQ ID NO: 746238 - DNA, 120 bp, Artificial Sequence
  ENSG00000204977_31 (sequence is synthesized)
tattggcagttttccttaagctatttagttcctcatctgttgctttttcattttgtatactgcaagttcccaggcaactcgaatttgcaaacacagccatggatacactatttaccttac

SEQ ID NO: 746239 - DNA, 120 bp, Artificial Sequence
  ENSG00000204977_32 (sequence is synthesized)
agtagtttcctgggaatctaagtctggtttttgttattcttccctcccctccactgcataatcatgtataactagcaacatttatggttataggttgatttcctaagtgtggctgatggt

SEQ ID NO: 746240 - DNA, 120 bp, Artificial Sequence
  ENSG00000204977_33 (sequence is synthesized)
agcctctagtttgaagtgagggaagaatgagtagtcaggaactggtcactttgaatgtgggagggaagatattcacgacaaggttttctacgataaagcagtttcctgcttctcgtttgg

SEQ ID NO: 746241 - DNA, 120 bp, Artificial Sequence
  ENSG00000204977_34 (sequence is synthesized)
cacgcatgttagatggcagagaccaagaattcaagatggttggtggccagatttttgtagacagagatggtgatttgtttagtttcatcttagattttttgagaactcaccagcttttat

SEQ ID NO: 746242 - DNA, 120 bp, Artificial Sequence
  ENSG00000204977_35 (sequence is synthesized)
tacccactgaattttcagactatcttaggcttcagagagaggctcttttctatgaacttcgttctctagttgatctcttaaacccatacctgctacagccaagacctgctcttgtggagg

SEQ ID NO: 746243 - DNA, 120 bp, Artificial Sequence
  ENSG00000204977_36 (sequence is synthesized)
tacatttcctaagccggaacactcaagcttttttcagggtgtttggctcttgcagcaaaacaattgagatgctaacagggaggattacagtgtttacagaacaaccttcagcgccgacct

SEQ ID NO: 746244 - DNA, 120 bp, Artificial Sequence
  ENSG00000204977_37 (sequence is synthesized)
ggaatggtaactttttccctcctcagatgaccttacttccactgcctccacaaagaccttcttaccatgacctggttttccagtgtggttctgacagcactactgataaccaaactggag

SEQ ID NO: 746245 - DNA, 120 bp, Artificial Sequence
  ENSG00000204977_38 (sequence is synthesized)
tcaggtattttgtactttgcagtatttctcttgtataccagtttgtgatgttttctctaaaaacttgaagttcctcaggcctgtaacttctggaaaagatgattattcaaaataatgttt

SEQ ID NO: 746246 - DNA, 120 bp, Artificial Sequence
  ENSG00000204977_39 (sequence is synthesized)
tggggtaaccagtggagttgggtagaatgaccaaataattattttccaaactgggatactttttagagtgaaaggggctattattaggtgggacaaaaggaataaatgaagactgcccag

SEQ ID NO: 746247 - DNA, 120 bp, Artificial Sequence
  ENSG00000204977_40 (sequence is synthesized)
aaaaaactgagactatggacattcaaatcatgggagaaaataattttgtagattatgttccattgctaatgaatttgacttagaaaagaattgccttatttttaagagattgtttcagtg

SEQ ID NO: 746248 - DNA, 120 bp, Artificial Sequence
  ENSG00000204977_41 (sequence is synthesized)
gttcacataaaggctcgctcactggtttctcttgagttccttacacactatataagttgttctttcagttttatgattcaactactgtttttccttcagctgactttatttttaaacacc

SEQ ID NO: 746249 - DNA, 120 bp, Artificial Sequence
  ENSG00000204977_42 (sequence is synthesized)
cttaaagacagatatatctcatggcaaatttggtatcctgttacagccttggctcttaaacaactcaaaatattgggataggctgtcagtatgttaaggatagttgctcctgagtcaatt

SEQ ID NO: 746250 - DNA, 120 bp, Artificial Sequence
  ENSG00000204977_43 (sequence is synthesized)
cttcacttactccctctgttgttcttggctggatcctaacgctgatttccactctgctgtcacaaacatttttccccccgtaaaatgtcttaatgctgtcctaccattattttaccaact

SEQ ID NO: 746251 - DNA, 120 bp, Artificial Sequence
  ENSG00000204977_44 (sequence is synthesized)
gtgaaagctggctttaatttttaggaggaaaagaaaagcctgcatgtgttctttattggtatcatttaaaatatacttttttttttttttttggtaaaggtaggcgtattttaagatatt

SEQ ID NO: 746252 - DNA, 120 bp, Artificial Sequence
  ENSG00000204977_45 (sequence is synthesized)
ttcttaacttgagcagtagccaacaggaaggataccagtgtctctctctcttagcgacacactccttggtcttgcttaccaactggaggacactaggtagaataaccgagtatgacaatt

SEQ ID NO: 746253 - DNA, 120 bp, Artificial Sequence
  ENSG00000204977_46 (sequence is synthesized)
cttaattgtttacattttataacttcctgtccttcaaaagagtttgaaatgtcattttgggaaaagagagccagtcaagctagtaggctgattgtgaagaaaatctaataccttatcttt

SEQ ID NO: 746254 - DNA, 120 bp, Artificial Sequence
  ENSG00000204977_47 (sequence is synthesized)
atctcaaacctctgtacaactttattttcattgatgggatactttaacaaaaatgaaattttttttggtttttaaaatatgagtgattatgacctctttggggatcatgcttcaaaaagt

SEQ ID NO: 746255 - DNA, 120 bp, Artificial Sequence
  ENSG00000204977_48 (sequence is synthesized)
cagaaacctagagacaaaactgtcattgatttttaagaagaaacacactaggtcaaaagaagatgtcctggaaatacgaagtactctttaaaaaccatgcatttggagaaagtaattgtt

SEQ ID NO: 746256 - DNA, 120 bp, Artificial Sequence
  ENSG00000204977_49 (sequence is synthesized)
tccttgaaaaacatgattaaaaactaaaactgggatgttcctgtgtgtacacagtgccaaatggttttccctttttatgttgtgttttagaaacagcacgaaagttttttccattttaaa

SEQ ID NO: 746257 - DNA, 120 bp, Artificial Sequence
  ENSG00000204977_50 (sequence is synthesized)
gtgagaaaacattatatttagacttccataattccaaaatcagaagctatttttaaaattagcattttcttgcatcaccaaatggtattcaattgtttgaagctcaaaatttttaccatt

SEQ ID NO: 746258 - DNA, 120 bp, Artificial Sequence
  ENSG00000204977_51 (sequence is synthesized)
ccataaatgtttgtgaatttttagacagtgccaatttaaaagtagagatagccaatctgaatacggtgaaattatggggatctctggtgattgggatgaaaactctggccttaaaaggtc

SEQ ID NO: 746259 - DNA, 120 bp, Artificial Sequence
  ENSG00000204977_52 (sequence is synthesized)
cacttttagtatataattgcctaattagcaatcatttttattttttgctcactccctggtctgaatctatctgtctattcagatattttttggtaggtttggaaaatggagaagtgagcc

SEQ ID NO: 746260 - DNA, 120 bp, Artificial Sequence
  ENSG00000204977_53 (sequence is synthesized)
taattggtgcctaattgtctggtgtatcattcactttattcagtttgttctatcaatatgatttacccctcaaggttaacctagcaggttgctcagttattatctctcaaggtcacagta

SEQ ID NO: 746261 - DNA, 120 bp, Artificial Sequence
  ENSG00000204977_54 (sequence is synthesized)
ctagaaatacttggcttgcatctttcagatgccattcatgttatcaagctcaaattatagttggtcacaggattctaaagtctttatttgacttctcctttttgaactggctcaaatgga

SEQ ID NO: 746262 - DNA, 120 bp, Artificial Sequence
  ENSG00000204977_55 (sequence is synthesized)
aaagtgtagttgcttttaaatgttaaaaataagtttaaactttatatttcccattggtttcccctattttgtcctttctttgtgtgcttgaaatattttatttttcagtttgtcctcata

SEQ ID NO: 746263 - DNA, 120 bp, Artificial Sequence
  ENSG00000204977_56 (sequence is synthesized)
gggaatcaagtattttagctaggtgatgtcttgcaagtacgttccactttgttacaatctactatctgtatatactatttgtatcttaattcttttatgagatgttctgtaacatttttc

SEQ ID NO: 746264 - DNA, 120 bp, Artificial Sequence
  ENSG00000204977_57 (sequence is synthesized)
tcactttgacaaatgtttttagactgtacagtcaagatctggcgcttgggggtaagtggaatgatttgctaatattgagaatctgttgtatcaaacataataaactttttttgagatgtg

SEQ ID NO: 746265 - DNA, 120 bp, Artificial Sequence
  ENSG00000204977_58 (sequence is synthesized)
ggggcggagctagccggagccgcgagtccattttggggctgtgcttggcgcgtaccgtgcggtccctgtagttggaggacgggcggtcgcgcggcctttcccactagccggagtagcctc

SEQ ID NO: 746266 - DNA, 89 bp, Artificial Sequence
  ENSG00000204977_59 (sequence is synthesized)
aaaacgtgaaaaaaaagacctgctttgccctgggaaatagtaaccctgccaaatacatcagcttgtaggagacagagaataacagcacc

SEQ ID NO: 746267 - DNA, 120 bp, Artificial Sequence
  ENSG00000204977_60 (sequence is synthesized)
acttctcccaagatcgtaaattctggaggagccattccttcatcatccatgtttgcatccttcacaccgttcactggttaagtgcttatagcctctagttcgttagtcaaaacgtgaaaa

SEQ ID NO: 746268 - DNA, 120 bp, Artificial Sequence
  ENSG00000204977_61 (sequence is synthesized)
aaattggccaacggaacaaatgtcctcggcttactgattgacactttattaaaggaaggctttcatttggtcagcactagaacagtatcttctgaagacaaaactgaatgctatagcttt

SEQ ID NO: 746269 - DNA, 120 bp, Artificial Sequence
  ENSG00000204977_62 (sequence is synthesized)
gaaaggataaaaagccctgaagtgctcatcacgaatgaaacaccaaaaccagagactatcatcataccagagcaatctcagataaagaaatgaagttgtctatcctcttttaaagagaaa

SEQ ID NO: 746270 - DNA, 120 bp, Artificial Sequence
  ENSG00000204977_63 (sequence is synthesized)
cttaattgcacggcagcttaactgggagactttcttcccgggcggccccacccgggaccgcgccgcttcagtcgagcccaccgtctgggcaaacggcgtccacttcccggagccgctgcc

SEQ ID NO: 746271 - DNA, 120 bp, Artificial Sequence
  ENSG00000204977_64 (sequence is synthesized)
ctctgcgggggggctttgggcgggcgcaggactctggaagggagaaaagcccgcagcccggccctccccgtcccaggcggcccgcgcgggtggacggcgggagcaggcggcggttggaga

SEQ ID NO: 746272 - DNA, 120 bp, Artificial Sequence
  ENSG00000204977_65 (sequence is synthesized)
gagacgccggaaggaacgcggtctcaccacccggctccctccgccaaggcgaggcgcggccggggaggcgggacacaggcgaagcgggacggggaggcggggccggagtagcctctagtt

SEQ ID NO: 746273 - DNA, 120 bp, Artificial Sequence
  ENSG00000204978_0 (sequence is synthesized)
atagctcagagacgatggaactgtggaggcagctgaatcaggctggactggtgcctccggggctgggcccacccccccaggccctgagggaggtctccccagtggaaatccctggtcaga

SEQ ID NO: 746274 - DNA, 120 bp, Artificial Sequence
  ENSG00000204978_1 (sequence is synthesized)
ccctcaggactgcaggggcagacactggaggtgcctgcgatagtctgctgtggatcagggaggagctggggaacctgcgccgagtggatgtccagctgctgggacagctgtgcagcctgg

SEQ ID NO: 746275 - DNA, 120 bp, Artificial Sequence
  ENSG00000204978_2 (sequence is synthesized)
ggctggagatgggggcgctgcgggaggaactggtcaccatattggaggaggaggaggagagcagcaaggaagaggaggaggatcaagagccccagaggaagcaggaggaggaacacctgg

SEQ ID NO: 746276 - DNA, 120 bp, Artificial Sequence
  ENSG00000204978_3 (sequence is synthesized)
ggagatttgcaggtcaaagcagatgtggaatcaagtatacccctttagtaagtgctttctctgaaggtgcctgcaatgatatttaggcattggcctgtgagctatgggtgtgtttgcaga

SEQ ID NO: 746277 - DNA, 120 bp, Artificial Sequence
  ENSG00000204978_4 (sequence is synthesized)
tgacatgaggatgtgtttggaggtgatgtgggaggttgtagagaagttgcaggtgctttcgcagatgagcctcaggtgtgctgctgagatggggatctctgcaaatatgctggtgatgca

SEQ ID NO: 746278 - DNA, 120 bp, Artificial Sequence
  ENSG00000204978_5 (sequence is synthesized)
tacagatgcgatttcagatcaacgctgtccagtatggtagccaccggacacacatggttatttagtgcttgaaacatggggactgcaaattgagatgtgctgtgagtgtaaaatacacac

SEQ ID NO: 746279 - DNA, 120 bp, Artificial Sequence
  ENSG00000204978_6 (sequence is synthesized)
agtgtaaaatacacaccaaatattaaaggcttagtatgatgaaaagaacataagacatctcaataatttttagattacttattgaaataataatattttgagcatatcagtattagtaaa

SEQ ID NO: 746280 - DNA, 120 bp, Artificial Sequence
  ENSG00000204979_0 (sequence is synthesized)
gtcactccctgaggagcctgagagccggccgggtgctgggctcctggctatccctgtgatggtagctcagcgagatctggggacctggcgctgagcgcgttgccagccgggatcttcctc

SEQ ID NO: 746281 - DNA, 120 bp, Artificial Sequence
  ENSG00000204979_1 (sequence is synthesized)
ttcatctaggcctgggcgctggcgtgagaactcggactgggtcctggacgagcgccccccgaaactccttggaaccttgaacaagtaaaatgcaggaagtttgctaataaagacatcacc

SEQ ID NO: 746282 - DNA, 120 bp, Artificial Sequence
  ENSG00000204979_2 (sequence is synthesized)
aaaggttaaagagaaaatcatctagaggaaatgctggcagtatggcatgtgttctttaacaaatctctacagcagattctctcgttttagggactatccagattatgattggcatctttc

SEQ ID NO: 746283 - DNA, 120 bp, Artificial Sequence
  ENSG00000204979_3 (sequence is synthesized)
tttttttatcattgcaggagtcttcctaataagagtaacaaagtatccgactcgatctggaattataagtactttaatcataaacatcatctgcataattactacaattactgcagtaac

SEQ ID NO: 746284 - DNA, 120 bp, Artificial Sequence
  ENSG00000204979_4 (sequence is synthesized)
tctaacaataatagagttgtctcattttaattctgtgtcatacaggaattatggacaagcaaaacttgggagggaagtatcacgtattttactgttcttctacggtttggaattttctat

SEQ ID NO: 746285 - DNA, 120 bp, Artificial Sequence
  ENSG00000204979_5 (sequence is synthesized)
tgcacttacacactcaatatacagctgttccaatttgtttcgaagacaaaatgatcttacatctgttactgaggaagctgagagcactccttaaaaaccctagaaatatgagaattttgc

SEQ ID NO: 746286 - DNA, 120 bp, Artificial Sequence
  ENSG00000204979_6 (sequence is synthesized)
tgttgctgatgcctggtgtgggtcctaatgatatctctgtataacaaagcagttacgaagcctacagattttgtgcaaaataaaatacaaacaaggtgaatttttctcctcattcaaaaa

SEQ ID NO: 746287 - DNA, 120 bp, Artificial Sequence
  ENSG00000204979_7 (sequence is synthesized)
agcctttggaacgtatgaacctgtaacttacaaaacaggatgtactttatggggaatttttaaacttgggagggaagtatcacgtattttactgttcttctacggtttggaattttctat

SEQ ID NO: 746288 - DNA, 120 bp, Artificial Sequence
  ENSG00000204979_8 (sequence is synthesized)
gaactcggactgggtcctggacgagcgccccccgaaactccttggaaccttgaacaagtaaaatgcagggtagtgatgtcgctttgctggagtgctttcgtgtcagaagccataaaggga

SEQ ID NO: 746289 - DNA, 120 bp, Artificial Sequence
  ENSG00000204979_9 (sequence is synthesized)
cacggaggctgattacggtgttcctctccctatcatactctgtaaacagtaggcactatttactactcagagatgatagctgtaaaatgccgatatgttttagtcatagagagagacttt

SEQ ID NO: 746290 - DNA, 120 bp, Artificial Sequence
  ENSG00000204979_10 (sequence is synthesized)
tcagttatgaaggctgttattcagaacagatggatgaaagttgatgcctctaatattaaggcctagaaagaagaaagaaggctattgcttctgaatttggagaggtggtgactgaacaat

SEQ ID NO: 746291 - DNA, 120 bp, Artificial Sequence
  ENSG00000204979_11 (sequence is synthesized)
ctttatggggaattttttttcgaagacaaaatgatcttacatctgttactgaggaagctgagagcactccttaaaaaccctagaaatatgagaattttgctgttgctgatgcctggtgtg

SEQ ID NO: 746292 - DNA, 120 bp, Artificial Sequence
  ENSG00000204983_0 (sequence is synthesized)
acactctaccaccatgaatccactcctgatccttacctttgtggcagctgctcttgctgccccctttgatgatgatgacaagatcgttgggggctacaactgtgaggagaattctgtccc

SEQ ID NO: 746293 - DNA, 120 bp, Artificial Sequence
  ENSG00000204983_1 (sequence is synthesized)
ctaccaggtgtccctgaattctggctaccacttctgtggtggctccctcatcaacgaacagtgggtggtatcagcaggccactgctacaagtcccgcatccaggtgagactgggagagca

SEQ ID NO: 746294 - DNA, 120 bp, Artificial Sequence
  ENSG00000204983_2 (sequence is synthesized)
caacatcgaagtcctggaggggaatgagcagttcatcaatgcagccaagatcatccgccacccccaatacgacaggaagactctgaacaatgacatcatgttaatcaagctctcctcacg

SEQ ID NO: 746295 - DNA, 120 bp, Artificial Sequence
  ENSG00000204983_3 (sequence is synthesized)
acactgcgagctctggcgccgactacccagacgagctgcagtgcctggatgctcctgtgctgagccaggctaagtgtgaagcctcctaccctggaaagattaccagcaacatgttctgtg

SEQ ID NO: 746296 - DNA, 120 bp, Artificial Sequence
  ENSG00000204983_4 (sequence is synthesized)
tgggcttccttgagggaggcaaggattcatgtcagggtgattctggtggccctgtggtctgcaatggacagctccaaggagttgtctcctggggtgatggctgtgcccagaagaacaagc

SEQ ID NO: 746297 - DNA, 120 bp, Artificial Sequence
  ENSG00000204983_5 (sequence is synthesized)
ctggagtctacaccaaggtctacaactatgtgaaatggattaagaacaccatagctgccaatagctaaagcccccagtatctcttcagtctctataccaataaagtgaccctgttctcac

SEQ ID NO: 746298 - DNA, 120 bp, Artificial Sequence
  ENSG00000204983_6 (sequence is synthesized)
agtgagaattttacactctacctctgctaactgtagagtgtatagacagagctgagaactgctgcctacaccaagaactctcaaacctgagtatgcatcagaacgccctgcaggcttgtt

SEQ ID NO: 746299 - DNA, 120 bp, Artificial Sequence
  ENSG00000204983_7 (sequence is synthesized)
aaggcacaaatcactgggccccttccccaaggttctgatcagtaggtgggggtaaggaccaagaattcacatttctaacaagttcccaggagatgctaatgctatggctacccttggatt

SEQ ID NO: 746300 - DNA, 120 bp, Artificial Sequence
  ENSG00000204983_8 (sequence is synthesized)
agattacacagaagggtggttctcaccaggccaagaatggagggaggaacaggcactgtgcacagttggcaaaggcctggggtgaagaacgctgggaaaacttcaaggagctccttgtgc

SEQ ID NO: 746301 - DNA, 120 bp, Artificial Sequence
  ENSG00000204983_9 (sequence is synthesized)
ccacagtgctagtgactgtggagattgtgggaaagagtctggggaggcaggttgaggagcagcctctggtgggatccctttgactcttccccaccccactaccaccaacctctggagcag

SEQ ID NO: 746302 - DNA, 120 bp, Artificial Sequence
  ENSG00000204983_10 (sequence is synthesized)
ataggtcctgggtctcataccttcactgacccacatccctctgctgcccatgcgatatggccacacaccccaccccatgcctccagagctgtccatgagcagagagcttgaggaacctgg

SEQ ID NO: 746303 - DNA, 120 bp, Artificial Sequence
  ENSG00000204983_11 (sequence is synthesized)
caggccactgctacaagtcgtaagtgtggggcccccgactgcaaagctcccggccagtctgcctgggagagcttggcttcagcccagggaactactgaggttgggtaagatggatgggag

SEQ ID NO: 746304 - DNA, 120 bp, Artificial Sequence
  ENSG00000204983_12 (sequence is synthesized)
aggtggtggagaagaaaacttgttggcagctgcggactctccagagcagagagtgaacacaagacaggaacctctcacacccaggcaaatccatgaaacagcaagggttgtggtcataaa

SEQ ID NO: 746305 - DNA, 120 bp, Artificial Sequence
  ENSG00000204983_13 (sequence is synthesized)
agcaggcagggatgatcttggggtggtgagagctagtgagaaaagcaggcaagtatcttttgctggttagctacacattaaagccaactaagaaagactttttaaaaatacagatgcctt

SEQ ID NO: 746306 - DNA, 80 bp, Artificial Sequence
  ENSG00000204991_0 (sequence is synthesized)
aggctgaccctgcgcggcggaaggcgcggctgcatggacgcgggtccggcgcgcgggaggcgatgacggccccgccatgg

SEQ ID NO: 746307 - DNA, 120 bp, Artificial Sequence
  ENSG00000204991_1 (sequence is synthesized)
gcggccggagccctgggagctgtccctggaggaggtgctgaaggcctacgagcagccgctcaacgaggagcaggcgtgggccgtgtgcttccagggctgccgcgggctgcggggctcgcc

SEQ ID NO: 746308 - DNA, 120 bp, Artificial Sequence
  ENSG00000204991_2 (sequence is synthesized)
gggccggcgcctgcgggataccggggacctcctgctgcgcggggacggctcggtcggggcgcgggagcccgaggccgcggaacctgcaaccatggtcgtgccactagccagctcggaagc

SEQ ID NO: 746309 - DNA, 120 bp, Artificial Sequence
  ENSG00000204991_3 (sequence is synthesized)
ccagaccgtgcagtccctcggcttcgccatctaccgcgcgctggactgggggctggacgagagcgaggagcgcgaactcagccctcagctggagcggctcatcgacctcatggccaacaa

SEQ ID NO: 746310 - DNA, 120 bp, Artificial Sequence
  ENSG00000204991_4 (sequence is synthesized)
cgacagcgaggacagcggctgcggtgccgccgatgagggctacgggggtcccgaggaggaggaggaggccgagggcgtcccccgcagcgtgcgcacctttgcccaggccatgcggctgtg

SEQ ID NO: 746311 - DNA, 120 bp, Artificial Sequence
  ENSG00000204991_5 (sequence is synthesized)
cgcggcgcggctgaccgacccccggggcgcacaggcgcattaccaggccgtgtgccgcgcgctcttcgtggagacgctggagctgcgggccttcctggccagggtccgggaggccaagga

SEQ ID NO: 746312 - DNA, 120 bp, Artificial Sequence
  ENSG00000204991_6 (sequence is synthesized)
gatgctgcagaagcttcgggaggacgagccgcatctggagacgcctcgggcagagctggacagcctgggtcacacagactgggcccgactgtgggttcagctcatgcgggagctccgccg

SEQ ID NO: 746313 - DNA, 120 bp, Artificial Sequence
  ENSG00000204991_7 (sequence is synthesized)
cggagtgaagctgaagaaggtgcaagagcaggagttcaaccccctccccaccgagttccagctcacgcccttcgagatgctgatgcaggacatccgggcccggaactacaagctgcgcaa

SEQ ID NO: 746314 - DNA, 120 bp, Artificial Sequence
  ENSG00000204991_8 (sequence is synthesized)
ggtcatggtggatggggacatcccgccccgggtgaagaaggacgctcacgagctcatcctggactttatccgctcacggcctccactgaagcaggtctctgagaggcggctgcgcccgtt

SEQ ID NO: 746315 - DNA, 120 bp, Artificial Sequence
  ENSG00000204991_9 (sequence is synthesized)
gccaccaaagcaaaggtccctgcatgagaagatcctggaggagatcaagcaggagcggaggctgcgcccggtgcggggcgagggctgggctgcccgcgggtttggctctctgccctgcat

SEQ ID NO: 746316 - DNA, 120 bp, Artificial Sequence
  ENSG00000204991_10 (sequence is synthesized)
cctcaacgcctgctccggagatgccaagtccacctcctgcatcaacctgtcagtcacagatgctgggggcagcgcccagcgcccgcggccccgcgtgctgctcaaggcgcctaccttggc

SEQ ID NO: 746317 - DNA, 120 bp, Artificial Sequence
  ENSG00000204991_11 (sequence is synthesized)
tgaaatggaagagatgaatacatctgaggaagaagagtctccgtgtggggaggtgacgctgaaacgggaccgctccttctcagagcatgacctggcccagctccgaagtgaggtggcctc

SEQ ID NO: 746318 - DNA, 120 bp, Artificial Sequence
  ENSG00000204991_12 (sequence is synthesized)
tggcctgcagtcggccacccaccccccaggagggacggagccaccacggccccgagctggcagtgcgcatgtgtggaggcccggctcccgagaccagggtacctgtcccgcgagtgtctc

SEQ ID NO: 746319 - DNA, 120 bp, Artificial Sequence
  ENSG00000204991_13 (sequence is synthesized)
cggggctcctcgggggacagacccgaggcctccatgacccccgatgccaaacacctgtggctggagttcagccaccccgtggagagcctggcgctgactgtggaagaggtgatggacgtg

SEQ ID NO: 746320 - DNA, 120 bp, Artificial Sequence
  ENSG00000204991_14 (sequence is synthesized)
cgccgtgtgctggtgaaggccgagatggaaaagtttttgcagaacaaggagctcttcagcagtctgaagaaggggaagatttgctgctgctgccgggccaagttcccgctgttctcgtgg

SEQ ID NO: 746321 - DNA, 120 bp, Artificial Sequence
  ENSG00000204991_15 (sequence is synthesized)
ccgcccagctgtctcttctgcaagagagccgtctgcacttcctgtagcataaagatgaagatgccttctaagaaatttggacacatccctgtctacacactgggctttgagagtcctcag

SEQ ID NO: 746322 - DNA, 120 bp, Artificial Sequence
  ENSG00000204991_16 (sequence is synthesized)
agggtatcagctgccaaaaccgcgccaatccagagaagagacatctttcagtctctgcaagggccacagtggcagagcgtggaggaggcgttcccccacatctactcccacggctgtgtc

SEQ ID NO: 746323 - DNA, 120 bp, Artificial Sequence
  ENSG00000204991_17 (sequence is synthesized)
ctgaaggatgtctgcagtgagtgcaccagctttgtggcagacgtggtgcgttccagccgcaagagcgtggacgtcctcaacactacgccacgacgcagtcgccagacccaatccctctac

SEQ ID NO: 746324 - DNA, 120 bp, Artificial Sequence
  ENSG00000204991_18 (sequence is synthesized)
atccctaacaccaggactcttgacttcaagtgacagccccaggtggccaggcctccaggaggcaccaggcaggccctgtatcaggctaggacgctctgagctgtgcatgtacatatatac

SEQ ID NO: 746325 - DNA, 120 bp, Artificial Sequence
  ENSG00000204991_19 (sequence is synthesized)
atatatagatacatttataatatatacacacagtctatatatttatatacactgtttcctggccccagagctcatttgggttcaggcgcacttcaaaaccctccctgggggaggctgttt

SEQ ID NO: 746326 - DNA, 120 bp, Artificial Sequence
  ENSG00000204991_20 (sequence is synthesized)
cttctcaggattccttgccagggaggaaggggagggaacagggtgggttttctcactgaagagagaaagcagaaggttctagatcctggcacagactgcatcccatgttcccatgctctt

SEQ ID NO: 746327 - DNA, 120 bp, Artificial Sequence
  ENSG00000204991_21 (sequence is synthesized)
ctccgtccccaggaatgcgaacggcagtttcccttccccagtggacgtctaggtggggacagggtatcttggctcccagctggaccagagtgccctgcttgcctctgctctccctttgtg

SEQ ID NO: 746328 - DNA, 120 bp, Artificial Sequence
  ENSG00000204991_22 (sequence is synthesized)
gggactcaggcagcagaggcatctgggaagtctctgagtaggcagggtcctcctgggaggcacccccacctgtttgaaaggtctggccaggcgtggtggttcaggcctgtaattccagca

SEQ ID NO: 746329 - DNA, 76 bp, Artificial Sequence
  ENSG00000204991_23 (sequence is synthesized)
gttgtctctactgaaaatgcaaaaattagccaggtatagtggcaggaacctgtaatcccagctacaggggaggctg

SEQ ID NO: 746330 - DNA, 60 bp, Artificial Sequence
  ENSG00000204991_24 (sequence is synthesized)
tactgaaaatgcaaaaattagccaggtatagtggcaggataggttgcagtgagccgagat

SEQ ID NO: 746331 - DNA, 120 bp, Artificial Sequence
  ENSG00000204991_25 (sequence is synthesized)
tgtctcgaaaaaaaaaaaggtccgtgccaagctgctccctgcccttgccctttccctttccctggggtccaaaccacatgtgtcctgcctctcctggccctaccacattctggtgctgtc

SEQ ID NO: 746332 - DNA, 120 bp, Artificial Sequence
  ENSG00000204991_26 (sequence is synthesized)
ctcactcgcccctggcccagaggctcctgaagatgctgggcggtcctggcacagggaggagcagctctgtaaatctgtgcacatggccactcttggcctaataaaggaggtctcacagtc

SEQ ID NO: 746333 - DNA, 120 bp, Artificial Sequence
  ENSG00000204991_27 (sequence is synthesized)
ggcagcagtaggatcaacacagctgagaaaaataggaattacccacgttggaaaataaagaagaaaaaaagtttttttttaaaaaaagcatccaagaactgtgggaaaatatcaaatgat

SEQ ID NO: 746334 - DNA, 120 bp, Artificial Sequence
  ENSG00000204991_28 (sequence is synthesized)
atcatatgcatgtaataggactcccaaaagaagaagaaagaacaaatcataaaaaatgtttgaagagaaaattaccaataattttcccaaaataatgaaagacctgagctcagagcacac

SEQ ID NO: 746335 - DNA, 120 bp, Artificial Sequence
  ENSG00000204991_29 (sequence is synthesized)
cgcctgctgtccagggcttcctctgtctctgctctgggacctccccatggccacgcattccgccgcatggtctggatccctcgcggtgtctgggttcagccatgctcagcctctgtgtcg

SEQ ID NO: 746336 - DNA, 120 bp, Artificial Sequence
  ENSG00000204991_30 (sequence is synthesized)
gtcaccagcctagaaaccctggagcaccccgggccggaacccttccctcagatctgtcgtgagttccctttcagagatcaagcccagcctggctcagtcttgcaccccttgggatccacg

SEQ ID NO: 746337 - DNA, 85 bp, Artificial Sequence
  ENSG00000204991_31 (sequence is synthesized)
catccgccctcttcggcctcccaaagtgctgggacctgacctcgtcatccgccctcttcggcctcccaaagtgctgggatcacag

SEQ ID NO: 746338 - DNA, 120 bp, Artificial Sequence
  ENSG00000204991_32 (sequence is synthesized)
gcgtgagccaccgcacccggccaaggcccacttcttaaggaattagaggacacatttaagatgaccacaggtcacatgagtggttctttagctctgaagtctcagaagtgctttctgaag

SEQ ID NO: 746339 - DNA, 120 bp, Artificial Sequence
  ENSG00000204991_33 (sequence is synthesized)
gggggctactgagcaccacagaacctggccttccatctgccctgggctcacagcctcacctggggagcaggcggcccttctctgtacctggcgtgaggtctcctggccacggacgttgtt

SEQ ID NO: 746340 - DNA, 120 bp, Artificial Sequence
  ENSG00000204991_34 (sequence is synthesized)
ggcgtcacacctgtggcacctgaggtgaattgttcagatggaaacggcaccatcaggcaactggcaacagaagcctaaagccctgggtgcctcaggtcagaggaaggaaggaatgcaagg

SEQ ID NO: 746341 - DNA, 120 bp, Artificial Sequence
  ENSG00000204991_35 (sequence is synthesized)
gccccgctccccccaatgccaggagcgtgtgttcacagctttagacaggacaacccactgcaaatccaaagcagaaaacatggtccaactccatctctgtggcaccttcatagatggtgc

SEQ ID NO: 746342 - DNA, 120 bp, Artificial Sequence
  ENSG00000204991_36 (sequence is synthesized)
ccacctgccttggcagtgatgaccgacactgcgaacgctgtgctggcagtgtgtttaagggctttaactgaatcatctcgatggagctgaaatccagccccattttacagaagagaaaac

SEQ ID NO: 746343 - DNA, 120 bp, Artificial Sequence
  ENSG00000204991_37 (sequence is synthesized)
tgaggcttagagagatcaggtgtcaagttctatgccaagcacagggaagcaaaaacaggacacactcaacataaggtggccccaggaatcagtggccaggacacgggaggtgtgctgagc

SEQ ID NO: 746344 - DNA, 120 bp, Artificial Sequence
  ENSG00000204991_38 (sequence is synthesized)
aaaagaggacatcagctgctcagggagggaaggtttgagatggattctggctggtgtggatcagcccatggtgtgtttgcaggcagggacaccttgaacagacatgggctgaggggagtt

SEQ ID NO: 746345 - DNA, 120 bp, Artificial Sequence
  ENSG00000204991_39 (sequence is synthesized)
tgtgtggagcgtggccagtgaaggctgggctggccggcagggtccgctggtcatgggaggcctggcctgcagcagcagggcccatcaaagacatggggatggatggctgatggacaagat

SEQ ID NO: 746346 - DNA, 120 bp, Artificial Sequence
  ENSG00000204991_40 (sequence is synthesized)
ggctgatggacagcgttttagaaggtcgcaggcttgtttaggctgaggccagggagggttagggtcctcagggaaggagagtaagctaggggagcctcctgcatagaagacttcctacct

SEQ ID NO: 746347 - DNA, 120 bp, Artificial Sequence
  ENSG00000204991_41 (sequence is synthesized)
cctcctcctcaggggccgcccggggcctggtgctgtcctgtagccagcctgggaggtgtcccagcacgtcttcctgtggccagcctgggaggtgtcccagtgcgtctgcgtcacgggtga

SEQ ID NO: 746348 - DNA, 120 bp, Artificial Sequence
  ENSG00000204991_42 (sequence is synthesized)
ggcgggctggcttcctcttgcctgtgtgccagcccggggctgtgtggccctgggccctttttctgggaaggggccatgtgagccatgcccaccccaccccaggtgcatgcggagcccaga

SEQ ID NO: 746349 - DNA, 120 bp, Artificial Sequence
  ENSG00000204991_43 (sequence is synthesized)
gccccctgggagcagcactccctccgggtgggcctggcaggctcttccgactccagagtgggcccgtgtcatggtcacttccccaccacaggtcccgcttccccaccgcaggtcccgctt

SEQ ID NO: 746350 - DNA, 120 bp, Artificial Sequence
  ENSG00000204991_44 (sequence is synthesized)
gggctgcggggctcgccgggccggcgcctgcgggataccggggacctcctgctgcgcggggacggctcggtcggggcgcgggagcccgaggccgcggttgaagaggtcagaaacccagga

SEQ ID NO: 746351 - DNA, 120 bp, Artificial Sequence
  ENSG00000204991_45 (sequence is synthesized)
tgatccacctgtcaggggtcagcacctggaccctcaactgccactgtaagctcctctcggtacatgctcacaggttctggggttagaacacagacagctttaggggccgtgattctgccg

SEQ ID NO: 746352 - DNA, 120 bp, Artificial Sequence
  ENSG00000204991_46 (sequence is synthesized)
gattacaggtgtgggccaccgcgcccggccgggaacatccttttcatccggtccatgtcttgcttgtgccttggtctcttgtggaccgacagctgctgtctccctggccgggtgctgggc

SEQ ID NO: 746353 - DNA, 120 bp, Artificial Sequence
  ENSG00000204991_47 (sequence is synthesized)
agacgacttcaggtgcaaacaggaaaaatcagcctggtgaccagtgccccgaaaccccacccgaccaaaactggaacctcaccgcagggcagggccttcctctcccattcacctgccctg

SEQ ID NO: 746354 - DNA, 120 bp, Artificial Sequence
  ENSG00000204991_48 (sequence is synthesized)
aagtcatgtctggaacgtcatgtttccactttctactgcctttttagttttctttctttgttttttttgcttttgttcattttattttattttattgttttgagatggagtcgcgctctg

SEQ ID NO: 746355 - DNA, 86 bp, Artificial Sequence
  ENSG00000204991_49 (sequence is synthesized)
aggagtgagccaccgcgcccggccttattttattttttaatagagatgtctcactatgttgcccggactattggcctcccaaagtg

SEQ ID NO: 746356 - DNA, 120 bp, Artificial Sequence
  ENSG00000204991_50 (sequence is synthesized)
cctcccaaagtgctgggattacagttctgagccactgtgcctggcctctttttttttttgagatagaatctccctctgtcacccaggttggactgcagtggtgcgatctcagctcactgc

SEQ ID NO: 746357 - DNA, 120 bp, Artificial Sequence
  ENSG00000204991_51 (sequence is synthesized)
catcacgcccagcctttttttttttttttttagatctaccctcttgttgcccagggggagtccagtggcgtgatcttggctcactgcaaccgccgcctcccgggttcaagcaattctcct

SEQ ID NO: 746358 - DNA, 120 bp, Artificial Sequence
  ENSG00000204991_52 (sequence is synthesized)
gcctcagtctcccgagtgtcttctgtcttttgtaaaagtttttcatgcccaagtgagattaattgtttaaaaaaaaaaaaacaagaagaaaacaacatagatttaccgcaagacctattg

SEQ ID NO: 746359 - DNA, 120 bp, Artificial Sequence
  ENSG00000204991_53 (sequence is synthesized)
atatattattaaacatggtggtatacccagggtgggtgtgacacagaccaaaagaggctgtgtgttctgttgttgataatttaaaaacaataataaaaccgaagtctatgtcaccacaaa

SEQ ID NO: 746360 - DNA, 120 bp, Artificial Sequence
  ENSG00000205002_0 (sequence is synthesized)
agcagcagcggtagagcagtgaccaggcgtctccgcgatgggccccggggacttccgccgctgcagagagagaatttcccaggggctccagggactcccaggtagagcggagctttggtt

SEQ ID NO: 746361 - DNA, 120 bp, Artificial Sequence
  ENSG00000205002_1 (sequence is synthesized)
cccacctcgtcccgcgtgcgacttcttcggggacggcaggagcacggacatccaggaggaggccctcgccgccagcccgctgctggaggacctcagacgacggctgacgcgcgccttcca

SEQ ID NO: 746362 - DNA, 120 bp, Artificial Sequence
  ENSG00000205002_2 (sequence is synthesized)
gcgcgcgatctcgaggcgcgtgcaggaggcggcggcggcggcggcggcgcgggaggagcagagctggacgggcgttgaggccaccctggccaggctgcgggcggagctggtggaaatgca

SEQ ID NO: 746363 - DNA, 120 bp, Artificial Sequence
  ENSG00000205002_3 (sequence is synthesized)
ggtggaaatgcatttccaaaaccaccagctggctagaactttactggacctaaacatgaaagtgcagcaattgaaaaaggagtatgaactggaaattacatcagactcccaaagcccaaa

SEQ ID NO: 746364 - DNA, 78 bp, Artificial Sequence
  ENSG00000205002_4 (sequence is synthesized)
agtatgaactggaaattacatcagactcccaaagcccaaaagatgatgctgcgaatccggaataaagaaatgcacacg

SEQ ID NO: 746365 - DNA, 120 bp, Artificial Sequence
  ENSG00000205002_5 (sequence is synthesized)
tggatcctaaaactaacgcatacaaccctgaaacaattctgatgaacacattatgctttgcataagttttgaggggcaatttatagacccaaaacaaatgacaggggaaggtgacagaaa

SEQ ID NO: 746366 - DNA, 120 bp, Artificial Sequence
  ENSG00000205002_6 (sequence is synthesized)
aacatctaagagaggggagagaaaaatgatgtattaccaagttttaaagttatttatttgttatttttactgggacatagaagtaaaatataactatagataaatctctctctgtctctc

SEQ ID NO: 746367 - DNA, 120 bp, Artificial Sequence
  ENSG00000205002_7 (sequence is synthesized)
atgctttaatgccaactttcggtattcaaccttgtgtcacctgacctttctggcattgcctgagctttcagagtttgtgcttgttttgttttacttgattattctcagtttgtctgtcca

SEQ ID NO: 746368 - DNA, 120 bp, Artificial Sequence
  ENSG00000205002_8 (sequence is synthesized)
gcagcctgccctgcttcttgtggagaattgtttctacttggattctaaccatgccctttaggtggtctgtgactaagggtattccatcttcctggatatagtcatgcagctcaaggcagg

SEQ ID NO: 746369 - DNA, 120 bp, Artificial Sequence
  ENSG00000205002_9 (sequence is synthesized)
cagatgggtttgtccttaggatttttgaatgggcactaaaagagtagatgactatttctgccagtagaagctgtggatcaggggcttggaagctgctggtggtcaccatgtgagaaagcc

SEQ ID NO: 746370 - DNA, 120 bp, Artificial Sequence
  ENSG00000205002_10 (sequence is synthesized)
cacaccctaatggaggtgactgaaacggaaccactaaaagcacaaaaggggagggagggagggagggtgcttcgcttccttgttcctggggtcaagctgtataagactccaggccttgct

SEQ ID NO: 746371 - DNA, 120 bp, Artificial Sequence
  ENSG00000205002_11 (sequence is synthesized)
cttgtttatgtacatgaaatattctgatatccttctcataaaatctctttttgcctaagtaaattcaagctggagtttcatgacttgtatctagtgttcataactaatacagttgttcag

SEQ ID NO: 746372 - DNA, 120 bp, Artificial Sequence
  ENSG00000205002_12 (sequence is synthesized)
ttttaggagttaaaatggttcttactgttgaattggactatctaactgtacccgaaaagtgctgtctttttaatgcaaacagtaaagttaataaaaaatagttgcagatctaagtgatat

SEQ ID NO: 746373 - DNA, 120 bp, Artificial Sequence
  ENSG00000205002_13 (sequence is synthesized)
ttataatggttattgtctgcaaaatacaaattaatttataacaagctatgtaattttaatatttaataaactataaaaatcagttcttgaagacaaaggagaacagaagagacacagtct

SEQ ID NO: 746374 - DNA, 79 bp, Artificial Sequence
  ENSG00000205002_14 (sequence is synthesized)
cagttcttgaagacaaaggagaacagaagagacacagtctttctcttgttaaaagaaatacaaggacaagcatggtgga

SEQ ID NO: 746375 - DNA, 77 bp, Artificial Sequence
  ENSG00000205002_15 (sequence is synthesized)
tgacagagggggacttggcctcgaaaaaataaataaataataaaaataaaataaatgcaagttgttttatgtgtgtg

SEQ ID NO: 746376 - DNA, 120 bp, Artificial Sequence
  ENSG00000205002_16 (sequence is synthesized)
ggccaggctgcgggcggagctggtgagagagcgggctaggcggacggctcccagggctccctctcccgggtcctctcctccagctgcagagccgctggccgcgtagcccacccgacgcct

SEQ ID NO: 746377 - DNA, 120 bp, Artificial Sequence
  ENSG00000205022_0 (sequence is synthesized)
tgcccctctaccatgtggcccttcccgagccgctctctcttcccacccccgactcaggcctggctccagacggtctcctcagaccctgaggcccagggctggggggcctggaacgagacc

SEQ ID NO: 746378 - DNA, 120 bp, Artificial Sequence
  ENSG00000205022_1 (sequence is synthesized)
aaggagattctggggccagagggtggggaagggaaggaggagaaagaggaggaagaggatgcagaggaagaccaggatggggatgcaggctttctgctgtctctgctggagcaagagaac

SEQ ID NO: 746379 - DNA, 120 bp, Artificial Sequence
  ENSG00000205022_2 (sequence is synthesized)
ctggctgagtgcccattgcctgaccaggagctggaggccatcaagatgaaggtgtgtgccatggagcaggccgaggggacgccacggcctccaggagtgcagcaacaggccgaggaagag

SEQ ID NO: 746380 - DNA, 120 bp, Artificial Sequence
  ENSG00000205022_3 (sequence is synthesized)
gagggcaccgcggccgggcagctgctgagccctgagaccgtgggctgccccctctctgggacccccgaggagaaggtggaggctgaccacagatccgtctacgtgggcaacgtggactac

SEQ ID NO: 746381 - DNA, 120 bp, Artificial Sequence
  ENSG00000205022_4 (sequence is synthesized)
gggggctccgccgaggagctggaggcccacttcagccgctgtggggaggtccaccgagtcacgatcctgtgtgacaagttctctggacaccccaagggttatgcctacatagagtttgcc

SEQ ID NO: 746382 - DNA, 120 bp, Artificial Sequence
  ENSG00000205022_5 (sequence is synthesized)
ccgaaaagaaccaacttccctgggatcagctccacagaccgcgggggccttcgaggacacccaggctccaggggggcacccttcccccacagcggcctccagggcaggccccggctcaga

SEQ ID NO: 746383 - DNA, 120 bp, Artificial Sequence
  ENSG00000205022_6 (sequence is synthesized)
ccacaagggcagaaccgggcccgtggaaaattctcaccatggttttcaccgtattaaagggaagacccgattttgagagaggggctggggcctggatcaggagtaaaccacttgtgctcc

SEQ ID NO: 746384 - DNA, 120 bp, Artificial Sequence
  ENSG00000205022_7 (sequence is synthesized)
atcctggggctggggcagggagtggcgcgggggcgaggccagaggagaggggtgtccagagcagccactggccccctcttggcggggggatggcccagtagggccttgtatggtggtcca

SEQ ID NO: 746385 - DNA, 120 bp, Artificial Sequence
  ENSG00000205022_8 (sequence is synthesized)
gacccaaggccacagccacgagtcacagccacggcccggtggtgagcctggcatgggccccacggggatctgcggggctctgggtgttgagggaggggaggagcagagtcccaggcagtg

SEQ ID NO: 746386 - DNA, 120 bp, Artificial Sequence
  ENSG00000205022_9 (sequence is synthesized)
ccaggccagcttggggttggcatgctcagctcttcaactaagtcattttaagaaaaatagaaacgtgtgtcttaatggtgaagcataaattattaaacttgggctctttttaaaagcaaa

SEQ ID NO: 746387 - DNA, 120 bp, Artificial Sequence
  ENSG00000205029_0 (sequence is synthesized)
atgtttctgacagagagaaatacgacatctgaggccacattcactctcttgggcttctcagattacctggaactgcaaattcccctcttctttgtatttctggcagtctacggcttcagt

SEQ ID NO: 746388 - DNA, 120 bp, Artificial Sequence
  ENSG00000205029_1 (sequence is synthesized)
gtggtagggaatcttgggatgatagtgatcatcaaaattaacccaaaattgcatacccccatgtattttttcctcaaccacctctcctttgtggatttctgctattcctccatcattgct

SEQ ID NO: 746389 - DNA, 120 bp, Artificial Sequence
  ENSG00000205029_2 (sequence is synthesized)
cccatgatgctggtgaacctggttgtagaagatagaaccatttcattctcaggatgtttggtgcaattctttttcttttgcacctttgtagtgactgaattaattctatttgcggtgatg

SEQ ID NO: 746390 - DNA, 120 bp, Artificial Sequence
  ENSG00000205029_3 (sequence is synthesized)
gcctatgaccactttgtggccatttgcaatcctctgctctacacagttgccatctcccagaaactctgtgccatgctggtggttgtattgtatgcatggggagtcgcatgttccctgaca

SEQ ID NO: 746391 - DNA, 120 bp, Artificial Sequence
  ENSG00000205029_4 (sequence is synthesized)
tttcatggtttcaacacaatcaatcatttcttctgtgagttatcctccctgatatcactctcttaccctgactcttatctcagccagttgcttcttttcactgttgccacttttaatgag

SEQ ID NO: 746392 - DNA, 120 bp, Artificial Sequence
  ENSG00000205029_5 (sequence is synthesized)
ataagcacactactcatcattctgacatcttatgcattcatcattgtcaccaccttgaagatgccttcagccagtgggcaccgcaaagtcttctccacctgtgcctcccacctgactgcc

SEQ ID NO: 746393 - DNA, 120 bp, Artificial Sequence
  ENSG00000205029_6 (sequence is synthesized)
atcaccatcttccatggcaccatcctcttcctctactgtgtacccaactccaaaaactccaggcacacagtcaaagtggcctctgtgttttacaccgtggtgatccccttgttgaatccc

SEQ ID NO: 746394 - DNA, 120 bp, Artificial Sequence
  ENSG00000205029_7 (sequence is synthesized)
ctgatctacagtctgagaaataaagatgttaaggatgcaatccgaaaaataatcaatacaaaatattttcatattaaacataggcattggtatccatttaattttgttattgaacaataa

SEQ ID NO: 746395 - DNA, 120 bp, Artificial Sequence
  ENSG00000205030_0 (sequence is synthesized)
atgggcaaggaaaactgcaccactgtggctgagttcattctccttggactatcagatgtccctgagttgagagtctgcctcttcctgctgttccttctcatctatggagtcacgttgtta

SEQ ID NO: 746396 - DNA, 120 bp, Artificial Sequence
  ENSG00000205030_1 (sequence is synthesized)
gccaatctgggcatgactgcactgattcaggtcagctctcggctccacacccccgtgtactttttcctcagccacttgtcctttgtagatttctgctactcctcaataattgtgccaaag

SEQ ID NO: 746397 - DNA, 120 bp, Artificial Sequence
  ENSG00000205030_2 (sequence is synthesized)
atgttggctaatatctttaacaaggacaaagccatctccttcctagggtgcatggtgcaattctacttgttttgcacatgtggagtcactgaggtcttcctgctggccgtgatggcctat

SEQ ID NO: 746398 - DNA, 120 bp, Artificial Sequence
  ENSG00000205030_3 (sequence is synthesized)
acggtgtgttctctgattcactcgtccttagctcttaggatcctcttctatagatctaatgtgattaaccacttcttctgtgatctaccccctctcctaagtcttgcttgctctgatgtc

SEQ ID NO: 746399 - DNA, 120 bp, Artificial Sequence
  ENSG00000205030_4 (sequence is synthesized)
actgtgaatgagacactgctgttcctggtggccactttgaatgagagtgttaccatcatgatcatcctcacctcctacctgctaattctcaccactatcctgaagatacactctgcagag

SEQ ID NO: 746400 - DNA, 120 bp, Artificial Sequence
  ENSG00000205030_5 (sequence is synthesized)
agcaggcacaaagctttctccacctgtgcctcccacctcacagccatcactgtctcccatggaacaatcctttacatttattgcaggccgagttcaggcaacagtggagatgttgacaaa

SEQ ID NO: 746401 - DNA, 120 bp, Artificial Sequence
  ENSG00000205030_6 (sequence is synthesized)
gtggccaccgtgttctacacagttgtgattcccatgctgaaccccctgatctacagcctgagaaataaggatgtgaacaaagctctcagaaaagtgatgggctccaaaattcactcctag

SEQ ID NO: 746402 - DNA, 120 bp, Artificial Sequence
  ENSG00000205038_0 (sequence is synthesized)
gttccccagctctcccgggacgaagcgggcccgccagcgagtcgcagtcccaggagccgagctccagcactagagccagctgcgagcggagggcaccaactccgcagaactggcttttca

SEQ ID NO: 746403 - DNA, 120 bp, Artificial Sequence
  ENSG00000205038_1 (sequence is synthesized)
atgggacacctgtggctcctgggtatttggggcctctgtgggctgctcctgtgtgccgcggatcccagcacagatggctctcaaataatccccaaagtcacagaaataatacctaaatat

SEQ ID NO: 746404 - DNA, 120 bp, Artificial Sequence
  ENSG00000205038_2 (sequence is synthesized)
ggcagtataaatggagcaacaaggctgactataagaggggaaggtttttctcaagcaaaccagtttaactatggagttgataacgctgagttgggaaacagtgtgcaattaatttcttct

SEQ ID NO: 746405 - DNA, 120 bp, Artificial Sequence
  ENSG00000205038_3 (sequence is synthesized)
ttccagtcaattacttgtgatgtagaaaaagatgcaagtcattcaactcaaattacatgctatactagagcaatgccggaagattcctacactgttagagtcagtgtggacggggttcct

SEQ ID NO: 746406 - DNA, 120 bp, Artificial Sequence
  ENSG00000205038_4 (sequence is synthesized)
gttacggaaaataacacctgcaaaggtcacatcaacagctgggaatgtaccttcaacgcaaaaagttttagaaccccaacaataagaagcatcacacctttatctggaactccaggtaca

SEQ ID NO: 746407 - DNA, 120 bp, Artificial Sequence
  ENSG00000205038_5 (sequence is synthesized)
ctaataacaatccaaggcagaatcttcactgatgtctatggaagtaatattgcactaagctcaaatgggaaaaatgttaggattttgagagtttacattggaggaatgccctgtgagctt

SEQ ID NO: 746408 - DNA, 120 bp, Artificial Sequence
  ENSG00000205038_6 (sequence is synthesized)
ctcataccacaatctgataatttatatggtctaaaactggatcatccaaatggagatatgggttctatggtttgtaagacgactggaacttttattggtcatcacaatgtcagcttcatc

SEQ ID NO: 746409 - DNA, 120 bp, Artificial Sequence
  ENSG00000205038_7 (sequence is synthesized)
ttagataatgattatggaaggagttttccacagaaaatggcatattttgtttcttctctcaataaaattgcaatgtttcaaacatatgcagaggtcaccatgattttcccttcacaagga

SEQ ID NO: 746410 - DNA, 120 bp, Artificial Sequence
  ENSG00000205038_8 (sequence is synthesized)
agcattcgaggtggcaccacgctgacaataagtgggcgtttctttgatcagacagatttccccgtcagagttctagttggaggtgaaccttgtgatattttgaatgtcacagaaaatagt

SEQ ID NO: 746411 - DNA, 120 bp, Artificial Sequence
  ENSG00000205038_9 (sequence is synthesized)
atatgttgcaagacaccccccaaacctcatattctcaaaactgtatatccaggagggagaggcctgaagcttgaggtgtggaataatagccgtccaatacgtttggaagagatactggaa

SEQ ID NO: 746412 - DNA, 120 bp, Artificial Sequence
  ENSG00000205038_10 (sequence is synthesized)
tacaatgaaaaaacgcctgggtacatgggtgccagttgggtagattcagcttcctatatttggctcatggaacaagacacatttgttgcacgctttagtggatttttggtggctccagat

SEQ ID NO: 746413 - DNA, 120 bp, Artificial Sequence
  ENSG00000205038_11 (sequence is synthesized)
tctgatgtttatagattctacatcaagggtgatgaccgttatgctatttattttagccagactggacttccagaagataaggtgaggattgcatatcattctgctaatgccaacagttat

SEQ ID NO: 746414 - DNA, 120 bp, Artificial Sequence
  ENSG00000205038_12 (sequence is synthesized)
ttttccagtccaacacaaagatcagatgatattcatctgcagaaaggaaaagaatactatattgaaatcttgctgcaggagtacagattaagtgcatttgttgatgttggactgtaccag

SEQ ID NO: 746415 - DNA, 120 bp, Artificial Sequence
  ENSG00000205038_13 (sequence is synthesized)
tatcgaaatgtttatactgaacaacaaacaggagatgcagtgaatgaagaacaagttatcaaatcccagtcgacaatcctccaggaagtacaggttataacattggaaaactgggaaaca

SEQ ID NO: 746416 - DNA, 120 bp, Artificial Sequence
  ENSG00000205038_14 (sequence is synthesized)
actaatgcaattaatgaggttcagaagatcaaggtaaccagcccatgtgtggaagctaattcatgttcactttaccaatatagattaatctataatatggaaaaaactgtcttcctacct

SEQ ID NO: 746417 - DNA, 120 bp, Artificial Sequence
  ENSG00000205038_15 (sequence is synthesized)
gctgatgcttctgaattcatactgcaatcagccttgaatgacctctggtctataaaaccggacacagttcaagtaataagaacacaaaatccccagagctatgtctacatggtaacattc

SEQ ID NO: 746418 - DNA, 120 bp, Artificial Sequence
  ENSG00000205038_16 (sequence is synthesized)
atatcaactagaggagactttgatctgcttggttatgaagtagttgaagggaataatgtcacactggatattacagaacaaaccaaaggaaaacccaacttggagacattcacactgaat

SEQ ID NO: 746419 - DNA, 120 bp, Artificial Sequence
  ENSG00000205038_17 (sequence is synthesized)
tgggatgggatcgcttctaagccactcactctatggtcatcagaagctgaatttcagggagcagtggaagaaatggttagcactaagtgtccaccacaaattgcaaattttgaagaagga

SEQ ID NO: 746420 - DNA, 120 bp, Artificial Sequence
  ENSG00000205038_18 (sequence is synthesized)
tttgttgtgaaatatttcagagactatgaaactgattttaatctggaacatattaacagagggcagaagacagctgaaaccgatgcttactgtggtcgttattccctgaaaaacccagct

SEQ ID NO: 746421 - DNA, 120 bp, Artificial Sequence
  ENSG00000205038_19 (sequence is synthesized)
gttctttttgactcagcagatgttaaaccaaacagacgaccatatggagatattttattgtttccttataatcagttatgtttagcatacaaaggattcctggcaaattatattggtcta

SEQ ID NO: 746422 - DNA, 120 bp, Artificial Sequence
  ENSG00000205038_20 (sequence is synthesized)
aaatttcagtaccaagacaatagcaagattactagaagcactgatacacagtttacatacaactttgcttatggaaacaactggacttacacttgcatagaccttctggatctcgtaaga

SEQ ID NO: 746423 - DNA, 120 bp, Artificial Sequence
  ENSG00000205038_21 (sequence is synthesized)
acgaaatacactgggacaaatgtttctcttcagaggattagcttacataaagcatcagaatcacagtccttctatgtggatgtagtgtacattggacacacatctacaatctcaacattg

SEQ ID NO: 746424 - DNA, 120 bp, Artificial Sequence
  ENSG00000205038_22 (sequence is synthesized)
gatgaaatgcccaagagaagacttcctgcattagcaaataaaggaatattcttagagcactttcaggtgaatcagaccaaaacaaatgggccaactatgacaaaccaatattctgttacc

SEQ ID NO: 746425 - DNA, 120 bp, Artificial Sequence
  ENSG00000205038_23 (sequence is synthesized)
atgacttcatacaattgcagttacaatatacccatgatggctgtgagctttgggcagataatcacacatgagacagagaacgagtttgtctacagaggaaataattggccaggcgagtca

SEQ ID NO: 746426 - DNA, 120 bp, Artificial Sequence
  ENSG00000205038_24 (sequence is synthesized)
aaaattcatattcaaagaattcaagctgcatctccacctctaagtggcagctttgacattcaagcttatggacatattcttaaaggcctccccgctgctgtgtcagctgcagatctgcag

SEQ ID NO: 746427 - DNA, 120 bp, Artificial Sequence
  ENSG00000205038_25 (sequence is synthesized)
tttgcactccagagtctggagggaatgggaagaatctcagttacacgagagggaacctgtgctggctacgcgtggaacatcaaatggagaagcacctgcggaaagcagaatcttctacag

SEQ ID NO: 746428 - DNA, 120 bp, Artificial Sequence
  ENSG00000205038_26 (sequence is synthesized)
attaatgattccaacattattggagaaaaggctaatatgacagttacaaggataaaggaaggtggcttattcagacaacatgtacttggagacctacttcgtacacccagtcaacagcca

SEQ ID NO: 746429 - DNA, 120 bp, Artificial Sequence
  ENSG00000205038_27 (sequence is synthesized)
caggttgaagtctatgtcaatggaattccagctaaatgttcaggtgactgtggatttacatgggattccaacattactcccctagtcttggcgataagcccttctcaagggtcctatgaa

SEQ ID NO: 746430 - DNA, 120 bp, Artificial Sequence
  ENSG00000205038_28 (sequence is synthesized)
gaaggcacaattctaaccatagtgggttctggattttctcctagttcagctgtaacagtctcagttggaccagtaggttgttctcttctttctgtggatgaaaaagagctcaagtgccag

SEQ ID NO: 746431 - DNA, 120 bp, Artificial Sequence
  ENSG00000205038_29 (sequence is synthesized)
attctgaatggaagtgctggacatgcccccgttgctgtgtccatggctgatgttggactagcacagaatgtagggggtgaagagttctactttgtttatcagagtcagatctcacatatc

SEQ ID NO: 746432 - DNA, 120 bp, Artificial Sequence
  ENSG00000205038_30 (sequence is synthesized)
tggcctgattctggaagcatagcaggtggtactctactgactttatctggatttggctttaatgaaaattcaaaggtattagttggaaatgaaacctgcaatgtgattgaaggggatttg

SEQ ID NO: 746433 - DNA, 120 bp, Artificial Sequence
  ENSG00000205038_31 (sequence is synthesized)
aataggataacctgcaggacaccaaaaaaaactgagggtacagttgatatttcagttactaccaatggatttcaagccacagcaagggatgcttttagttataattgtttacagacacca

SEQ ID NO: 746434 - DNA, 120 bp, Artificial Sequence
  ENSG00000205038_32 (sequence is synthesized)
attataactgattttagtccaaaagtacgaacaatactaggagaagttaatttaacaattaagggctataattttggaaatgaactcacacaaaacatggcggtgtatgttggaggaaaa

SEQ ID NO: 746435 - DNA, 120 bp, Artificial Sequence
  ENSG00000205038_33 (sequence is synthesized)
acctgccagattcttcactggaacttcacagatattagatgccttttgcccaagttgtctcctggaaaacatgatatctatgtagaagtcagaaactggggttttgcatcaacaagagac

SEQ ID NO: 746436 - DNA, 120 bp, Artificial Sequence
  ENSG00000205038_34 (sequence is synthesized)
aaattaaattcttcaatacagtatgttttagaagtgaccagcatgtttccacaaagaggctccttgtttggtggaactgaaatcaccataaggggttttggattcagcacaataccagct

SEQ ID NO: 746437 - DNA, 120 bp, Artificial Sequence
  ENSG00000205038_35 (sequence is synthesized)
gagaataccgtgctgttagggtccatcccttgcaatgttacatcatcatcagaaaatgtcataaaatgtattcttcattcaactgggaatatattcaggattaccaacaatgggaaagat

SEQ ID NO: 746438 - DNA, 120 bp, Artificial Sequence
  ENSG00000205038_36 (sequence is synthesized)
tcagtacatggattaggttatgcctggtcaccaccagtcctaaatgtgtctgtgggggacacagtggcatggcattggcaaacacatccgtttcttagagggataggatataggattttt

SEQ ID NO: 746439 - DNA, 120 bp, Artificial Sequence
  ENSG00000205038_37 (sequence is synthesized)
tctgtctccagtcctggaagtgtaatttatgatggcaaaggattcacaagtggaagacaaaaatctacatcaggttcattttcttaccaatttacttctcctggaatccattattatagc

SEQ ID NO: 746440 - DNA, 120 bp, Artificial Sequence
  ENSG00000205038_38 (sequence is synthesized)
agcgggtatgttgatgaggctcactccatttttctccaaggagtcattaatgttttaccagctgaaaccagacacattcccttgcacctgtttgtgggtcgctctgaagccacatatgct

SEQ ID NO: 746441 - DNA, 120 bp, Artificial Sequence
  ENSG00000205038_39 (sequence is synthesized)
tatggaggacctgagaatttgcacttgggaagctctgtggcaggctgcctagcaacagaacccctgtgcagcctgaacaataccagggttaaaaattcaaaaagattgctatttgaggtt

SEQ ID NO: 746442 - DNA, 120 bp, Artificial Sequence
  ENSG00000205038_40 (sequence is synthesized)
tcaagttgtttttcaccatctataagcaacattactccgtccactggaacagtaaatgaactaataacaattattggacatggctttagtaatctcccatgggctaataaggttacaatt

SEQ ID NO: 746443 - DNA, 120 bp, Artificial Sequence
  ENSG00000205038_41 (sequence is synthesized)
ggtagctacccctgtgtcgtagaagaaagtagtgaggattcaattacatgtcatattgaccctcaaaactcaatggatgttggtatcagggaaactgtcactttgactgtctacaacctg

SEQ ID NO: 746444 - DNA, 120 bp, Artificial Sequence
  ENSG00000205038_42 (sequence is synthesized)
ggcactgctatcaatacgttgtccaatgaatttgataggcgatttgtacttttgccaaacattgacctggtgttgccaaatgcaggatcaactacaggaatgacaagcgtgaccataaaa

SEQ ID NO: 746445 - DNA, 120 bp, Artificial Sequence
  ENSG00000205038_43 (sequence is synthesized)
ggctctggatttgccgtttcttctgcaggtgtaaaagtccttatgggtcatttcccatgtaaagttctatcagtgaattatacggccattgaatgtgaaacatcccctgctgcccaacag

SEQ ID NO: 746446 - DNA, 120 bp, Artificial Sequence
  ENSG00000205038_44 (sequence is synthesized)
cttgtggatgtagatcttctaatacatggagtgcctgcccagtgccagggaaactgcaccttttcatacttagaaagcatcactccttacataacaggagtcttcccaaactctgtcata

SEQ ID NO: 746447 - DNA, 120 bp, Artificial Sequence
  ENSG00000205038_45 (sequence is synthesized)
ggatctgtaaaagttcttattgaaggagaaggtttggggactgttttggaggacattgctgttttcattggaaatcaacagttcagagcaatagaggttaatgaaaacaacatcactgct

SEQ ID NO: 746448 - DNA, 120 bp, Artificial Sequence
  ENSG00000205038_46 (sequence is synthesized)
cttgtgactcctctcccagttggacatcattctgttagtgttgtggtgggaagtaaaggcttggctctgggaaacctgactgtcagcagccccccagtagcatctctatcaccaacttct

SEQ ID NO: 746449 - DNA, 120 bp, Artificial Sequence
  ENSG00000205038_47 (sequence is synthesized)
ggaagcattggtggtggaactacactggtgatcacaggaaatggcttctatccaggcaacactacagtcactattggggatgaaccttgtcaaattatttccatcaaccccaatgaagtc

SEQ ID NO: 746450 - DNA, 120 bp, Artificial Sequence
  ENSG00000205038_48 (sequence is synthesized)
tactgccgcactcccgctgggaccactggaatggtcgatgttaaaatctttgttaatacaattgcttatccacctttgctttttacatatgccctggaggatactccatttctcagagga

SEQ ID NO: 746451 - DNA, 120 bp, Artificial Sequence
  ENSG00000205038_49 (sequence is synthesized)
attatcccaagcagaggtccaccaggaactgaaattgagatcactggatccaactttggctttgagatcttggaaatctccgtgatgataaataacattcagtgtaatgtaaccatggcc

SEQ ID NO: 746452 - DNA, 120 bp, Artificial Sequence
  ENSG00000205038_50 (sequence is synthesized)
aatgatagtgtggtgcagtgcatcgtgggagatcatgctgggggcacatttcctgttatgatgcatcataagacaaaaggctcagccatgtccacagttgtatttgagtacccgcttaat

SEQ ID NO: 746453 - DNA, 120 bp, Artificial Sequence
  ENSG00000205038_51 (sequence is synthesized)
attcaaaatattaatccaagccaagggagctttggtgggggtcaaaccatgactgtgacaggcaccggatttaatccacaaaattcaattatattagtttgtggctcagaatgtgcaatt

SEQ ID NO: 746454 - DNA, 120 bp, Artificial Sequence
  ENSG00000205038_52 (sequence is synthesized)
gacaggcttagatctgattacacaacactattatgtgaaattccatctaataatggcacgggagctgagcaagcctgtgaagtgagtgtggttaatgggaaagatttgtcacagtccatg

SEQ ID NO: 746455 - DNA, 120 bp, Artificial Sequence
  ENSG00000205038_53 (sequence is synthesized)
actccgtttacgtacgcagtgtcactgactccactcatcactgcagtatctcctaagagaggcagtacagcagggggcaccagactgacagtcgtgggatcaggattcagtgaaaatatg

SEQ ID NO: 746456 - DNA, 120 bp, Artificial Sequence
  ENSG00000205038_54 (sequence is synthesized)
gaggatgttcatatcaccatagctgaagccaaatgtgatgttgagtattccaacaagacacacatcatctgcatgacagatgcccatactctatcagggtgggctccagtttgtgtccac

SEQ ID NO: 746457 - DNA, 120 bp, Artificial Sequence
  ENSG00000205038_55 (sequence is synthesized)
atcagaggtgtcggcatggccaaactggataatgctgactttctttatgttgatgcctggtcctccaatttctcatgggggggaaaatctcccccagaagaaggatctcttgttgttatt

SEQ ID NO: 746458 - DNA, 120 bp, Artificial Sequence
  ENSG00000205038_56 (sequence is synthesized)
acaaaaggacagaccattctgctggatcaaagcacccctattttgaaaatgttgcttattcagggtgggactctaatatttgatgaagctgacattgaactccaggcagaaaatattcta

SEQ ID NO: 746459 - DNA, 120 bp, Artificial Sequence
  ENSG00000205038_57 (sequence is synthesized)
attacagatggaggtgttcttcagattggaacagagacatccccattccaacacaaggctgtcattaccttgcatggtcacctgcgatctcctgagctccctgtctatggtgccaaaaca

SEQ ID NO: 746460 - DNA, 120 bp, Artificial Sequence
  ENSG00000205038_58 (sequence is synthesized)
ctggctgtgcgggagggaatcctggatctgcacggtgtgcctgttcctgtgacctggactcgcttggctcatactgcaaaggcaggggaaagaattttaattttacaagaagcagtaaca

SEQ ID NO: 746461 - DNA, 120 bp, Artificial Sequence
  ENSG00000205038_59 (sequence is synthesized)
tggaaaccaggagataacattgtaattgcaagcacaggacacagacacagtcaaggagagaatgaaaaaatgaccattgcatctgtgtctgctgatggcataaacataacactaagtaac

SEQ ID NO: 746462 - DNA, 120 bp, Artificial Sequence
  ENSG00000205038_60 (sequence is synthesized)
ccactaaattacacacacttaggaattacggtcacactccctgatggaactctgtttgaagcaagagcagaagttggaattcttacaagaaatattttaataagaggatctgataatgtt

SEQ ID NO: 746463 - DNA, 120 bp, Artificial Sequence
  ENSG00000205038_61 (sequence is synthesized)
gagtggaataacaaaattcctgcatgtcctgatggatttgacacaggagaatttgctacacagacctgtctccaaggaaagtttggagaagaaataggaagtgaccaatttggaggctgc

SEQ ID NO: 746464 - DNA, 120 bp, Artificial Sequence
  ENSG00000205038_62 (sequence is synthesized)
gttatgtttcatgctcctgtacctggtgctaacatggtaactgggagaatagaatatgtagaggtattccatgctggccaggctttccggttggggcgatatccaatacattggcacctg

SEQ ID NO: 746465 - DNA, 120 bp, Artificial Sequence
  ENSG00000205038_63 (sequence is synthesized)
cttggagacttacagtttaaatcttatgtaagaggctgtgcaattcaccaggcctataacagagctgttactattcataacacacaccatcttctggttgagaggaatattatatatgat

SEQ ID NO: 746466 - DNA, 120 bp, Artificial Sequence
  ENSG00000205038_64 (sequence is synthesized)
attaagggaggagcattttttatagaagatggtattgaacatggcaatatcctccagtataacttggcagtatttgtacagcaaagtaccagtcttctgaatgatgatgtgaccccggct

SEQ ID NO: 746467 - DNA, 120 bp, Artificial Sequence
  ENSG00000205038_65 (sequence is synthesized)
gcattttgggtcaccaacccgaacaataccatacgacacaatgctgttgctggtggcactcactttggcttttggtaccggatgaacaaccaccctgatgggccatcctatgacagaaac

SEQ ID NO: 746468 - DNA, 120 bp, Artificial Sequence
  ENSG00000205038_66 (sequence is synthesized)
atttgtcaaaaaagagttccccttggcgaattttttaacaatactgtccattctcaaggttggtttggaatgtggatctttgaggaatatttccccatgcaaacgggatcttgtacatct

SEQ ID NO: 746469 - DNA, 120 bp, Artificial Sequence
  ENSG00000205038_67 (sequence is synthesized)
acagtgcctgcacctgcaatatttaactcacttactacttggaattgtcaaaaaggagctgaatgggtcaatggaggtgcccttcagttccataactttgtgatggtgaataactatgag

SEQ ID NO: 746470 - DNA, 120 bp, Artificial Sequence
  ENSG00000205038_68 (sequence is synthesized)
gctggaattgagactaagaggatcctggctccttatgttggagggtggggtgaaaccaatggagcggtgattaaaaatgccaaaatagtcggccatcttgatgaactgggaatggggtct

SEQ ID NO: 746471 - DNA, 120 bp, Artificial Sequence
  ENSG00000205038_69 (sequence is synthesized)
gcattttgcacagcaaaaggcctggttctcccatttagtgaaggcttgactgtctcttctgtgcactttatgaactttgaccgtcccaactgtgtagctttgggagtgacatccatctct

SEQ ID NO: 746472 - DNA, 120 bp, Artificial Sequence
  ENSG00000205038_70 (sequence is synthesized)
ggagtttgtaatgacagatgtgggggttggagtgcaaagtttgttgacgtccagtattctcacacaccgaacaaggctggctttcgctgggaacatgaaatggtaatgattgatgttgat

SEQ ID NO: 746473 - DNA, 120 bp, Artificial Sequence
  ENSG00000205038_71 (sequence is synthesized)
ggctcacttacagggcacaaaggacataccgtcattccacacagctcattgctagacccttctcattgtactcaggaagctgagtggagcattgggttccctggatcagtctgtgatgct

SEQ ID NO: 746474 - DNA, 120 bp, Artificial Sequence
  ENSG00000205038_72 (sequence is synthesized)
tcagtcagctttcaccgtttagcgttcaaccagccttctccagtatctctgcttgaaaaggatgtggttctttcagactcttttggcacaagcattattccatttcagaagaaacgactg

SEQ ID NO: 746475 - DNA, 120 bp, Artificial Sequence
  ENSG00000205038_73 (sequence is synthesized)
actcatatgtctggatggatggctctgattccaaatgcaaatcacattaactggtattttaaaggtgtggatcacataaccaacatttcatatacatcgacattctatggattcaaggaa

SEQ ID NO: 746476 - DNA, 120 bp, Artificial Sequence
  ENSG00000205038_74 (sequence is synthesized)
gaagactatgtaattatatcacataacttcactcaaaatcctgacatgtttaatattattgatatgaggaatggttcctcaaatccattgaattggaatactagcaagaatggggactgg

SEQ ID NO: 746477 - DNA, 120 bp, Artificial Sequence
  ENSG00000205038_75 (sequence is synthesized)
caccttgaagcaaacactagtactctatattacttggtgtcaggaagaaatgaccttcatcagagtcagctcatttctgggaacctggatcctgatgtgaaagacgttgttattaatttc

SEQ ID NO: 746478 - DNA, 120 bp, Artificial Sequence
  ENSG00000205038_76 (sequence is synthesized)
caagcttactgttgtattctccaggattgctttcctgtacatccgccatcaagaaaaccaattcccaagaagcgaccagccacatataatttatggtcaaatgattctttttggcaatca

SEQ ID NO: 746479 - DNA, 120 bp, Artificial Sequence
  ENSG00000205038_77 (sequence is synthesized)
tcacgagaaaataattatactgtacctcacccaggggcaaatgtgattatacctgaaggaacatggattgtagctgacatagatatgccatcaatggaaagactcattatttggggggtt

SEQ ID NO: 746480 - DNA, 120 bp, Artificial Sequence
  ENSG00000205038_78 (sequence is synthesized)
ctagaactggaagataaatacaatgtaggagctgcagaatcttcttacagagaagttgttttgaatgctacctacatatcactgcagggaggtagattaatcggtggctgggaagataac

SEQ ID NO: 746481 - DNA, 120 bp, Artificial Sequence
  ENSG00000205038_79 (sequence is synthesized)
ccttttaaaggagacttaaagattgttcttagaggaaatcatactacacaagactgggctcttccagaaggaccaaatcaaggggcaaaggtcttaggggtgtttggtgagctggatctt

SEQ ID NO: 746482 - DNA, 120 bp, Artificial Sequence
  ENSG00000205038_80 (sequence is synthesized)
catggaattccacattcaatatataaaactaagctctcagaaactgcatttgcaggttccaaagtcctgtctctgatggatgctgtggattggcaggagggagaagagattgtgataaca

SEQ ID NO: 746483 - DNA, 120 bp, Artificial Sequence
  ENSG00000205038_81 (sequence is synthesized)
accacaagctacgatttccaccagacagaaacaagaagtatcgttaaaatcctgcatgatcataaaattctcattcttaatgatagcctttcctatactcactttgctgaaaaataccat

SEQ ID NO: 746484 - DNA, 120 bp, Artificial Sequence
  ENSG00000205038_82 (sequence is synthesized)
gtccctggaactggtgagagctacacgttagcagctgatgttgggatactgagtaggaacatcaaaatagttggtgaagattaccccggttggtctgaggactcttttggagcacgcgta

SEQ ID NO: 746485 - DNA, 120 bp, Artificial Sequence
  ENSG00000205038_83 (sequence is synthesized)
gaataagtaatgtggaattttatcacagtggtcaagaaggcttcagggatagcacagatccaagatatgctgtaacgtttcttaacctaggacagattcaagaacatggctcatcttata

SEQ ID NO: 746486 - DNA, 120 bp, Artificial Sequence
  ENSG00000205038_84 (sequence is synthesized)
ttcgaggctgtgcttttcaccatggcttctctccagcaattggtgtatttgggacagatggattggacatagatgacaacatcattcactttacagtgggggaaggcataagaatatggg

SEQ ID NO: 746487 - DNA, 120 bp, Artificial Sequence
  ENSG00000205038_85 (sequence is synthesized)
ggaatgccaaccgagtccgagggaatttgattgcactttcggtttggccaggaacctatcagaacagaaaagatttaagttcaactctctggcatgcagcaattgagataaatagaggga

SEQ ID NO: 746488 - DNA, 120 bp, Artificial Sequence
  ENSG00000205038_86 (sequence is synthesized)
ccaatacagttttacagaataatgtagtggctggatttggaagagcaggataccgcattgatggtgaaccttgcccaggccagtttaatcctgtggaaaagtggtttgacaatgaagccc

SEQ ID NO: 746489 - DNA, 120 bp, Artificial Sequence
  ENSG00000205038_87 (sequence is synthesized)
atggaggtttatatgggatctatatgaaccaagatggccttcctggatgttctcttatacaaggatttaccatttggacatgctgggattatggaatttattttcagaccacagagagtg

SEQ ID NO: 746490 - DNA, 120 bp, Artificial Sequence
  ENSG00000205038_88 (sequence is synthesized)
tgcacatttataatgtgaccctggttgacaatggaatggccatttttccaatgatttacatgccagctgctatatcacacaaaatttccagtaaaaatgtacaaattaagagctcattaa

SEQ ID NO: 746491 - DNA, 120 bp, Artificial Sequence
  ENSG00000205038_89 (sequence is synthesized)
ttgttggaagtagccctgggtttaattgctctgatgtcctaactaatgatgatcctaatattgaactcactgctgctcatcggagtcctagatctccatcaggtgggagaagtgggattt

SEQ ID NO: 746492 - DNA, 120 bp, Artificial Sequence
  ENSG00000205038_90 (sequence is synthesized)
gttggcctacctttgcttcagctcataacatggcaccccgaaagccccatgcaggaatcatgagttacaatgccatcagtggccttttggacatctcaggttcaacatttgttggattta

SEQ ID NO: 746493 - DNA, 120 bp, Artificial Sequence
  ENSG00000205038_91 (sequence is synthesized)
agaatgtttgttcaggggaaactaatgttatattcattactaaccctttaaatgaggatttacagcatccaatccatgtgaagaatataaaactggttgataccactgaacaatcaaaaa

SEQ ID NO: 746494 - DNA, 120 bp, Artificial Sequence
  ENSG00000205038_92 (sequence is synthesized)
tatttatacataggcctgatataagtaaggtcaatccatctgattgtgtagacatggtttgtgatgccaagaggaaatcttttcttagagacatagatggctcctttctggggaatgctg

SEQ ID NO: 746495 - DNA, 120 bp, Artificial Sequence
  ENSG00000205038_93 (sequence is synthesized)
gttctgtgatacctcaagcagaatatgaatgggacggaaacagccaagtaggaattggagactacagaattcctaaggcgatgctcacattcttgaatggaagtagaattcctgtcactg

SEQ ID NO: 746496 - DNA, 120 bp, Artificial Sequence
  ENSG00000205038_94 (sequence is synthesized)
agaaagcacctcataaaggaattattagagattcaacctgtaagtaccttccagagtggcagagctatcagtgctttgggatggaatatgcaatgatggttattgaaagtctggatcctg

SEQ ID NO: 746497 - DNA, 120 bp, Artificial Sequence
  ENSG00000205038_95 (sequence is synthesized)
acacagaaactcgaagactttccccagtggctataatgggcaacggttatgttgatcttattaatggcccacaggatcatggctggtgtgctggatatacatgccagagaaggctgtccc

SEQ ID NO: 746498 - DNA, 120 bp, Artificial Sequence
  ENSG00000205038_96 (sequence is synthesized)
tgtttcacagcattgtggctctgaacaaatcttatgaagtttacttcactggcaccagtcctcagaatcttcgactgatgttgcttaatgttgatcataacaaggctgttctagtaggaa

SEQ ID NO: 746499 - DNA, 120 bp, Artificial Sequence
  ENSG00000205038_97 (sequence is synthesized)
ttttcttttccacacttcaacgtttggatgtctatgtgaacaacttattggtctgtccaaaaactacaatatggaatgcccagcagaaacactgtgaacttaataaccatctgtacaaag

SEQ ID NO: 746500 - DNA, 120 bp, Artificial Sequence
  ENSG00000205038_98 (sequence is synthesized)
accaattccttcctaacctggattccactgtccttggtgaaaactactttgatggaacctaccagatgctttatcttttggttaaaggaactatacctgttgaaattcacactgccacag

SEQ ID NO: 746501 - DNA, 120 bp, Artificial Sequence
  ENSG00000205038_99 (sequence is synthesized)
tgatatttgtttctttccaattatctgttgcaacagaagatgacttttatacctctcacaatctggttaaaaatcttgccttgttcctaaagataccaagtgacaaaatccgtatcagca

SEQ ID NO: 746502 - DNA, 120 bp, Artificial Sequence
  ENSG00000205038_100 (sequence is synthesized)
aaataagagggaagagtctgaggaggaagagatccatgggattcataattgaaatagagattggagaccctcctattcagttcataagcaatggcaccacaggtcagatgcagttatctg

SEQ ID NO: 746503 - DNA, 120 bp, Artificial Sequence
  ENSG00000205038_101 (sequence is synthesized)
aactccaggaaattgctggttctcttggacaagctgtaattttaggaaacatcagtagtatccttggatttaacatttcgtccatgtctattactaatcccctccccagcccaagtgact

SEQ ID NO: 746504 - DNA, 120 bp, Artificial Sequence
  ENSG00000205038_102 (sequence is synthesized)
ctgggtggattaaggtgactgcccagccagttgaaaggtctgcatttcctgttcatcacgtggccttcgtgtcctcactcttagtgatcactcagccggtggcagcacagccaggacagc

SEQ ID NO: 746505 - DNA, 120 bp, Artificial Sequence
  ENSG00000205038_103 (sequence is synthesized)
catttcctcagcagccttcggtaaaggcaacagattctgacggtaactgtgtatcagttggaattactgcactaactttgagggccatactcaaggactccaataataaccaagtcaatg

SEQ ID NO: 746506 - DNA, 120 bp, Artificial Sequence
  ENSG00000205038_104 (sequence is synthesized)
gccttagtggaaatacaacaattccgtttagcagctgttgggccaactacacagaccttactccccttagaacaggaaaaaattataagattgaatttatactggataatgttgttgggg

SEQ ID NO: 746507 - DNA, 120 bp, Artificial Sequence
  ENSG00000205038_105 (sequence is synthesized)
tagaatccagaactttcagcctgctggcagagtctgtctctagcagtggcagcagcagcagcagcaacagcaaagcatcaactgtgggtacatatgcccagataatgactgtagtaatta

SEQ ID NO: 746508 - DNA, 120 bp, Artificial Sequence
  ENSG00000205038_106 (sequence is synthesized)
gctgtctggttggaagaatgtggctcttggaaatatttatggctgcagtttcaactttgaatataactttaagaagctactaaagtgctgttccgaagaataggctgaaacaaaaatata

SEQ ID NO: 746509 - DNA, 120 bp, Artificial Sequence
  ENSG00000205038_107 (sequence is synthesized)
agaattattagctactttgttgggcaataggcaaaagtctatagcattttcatgaaaatatactaaaaatatttttatgatatataaaatgtactaattagctttaaacactaaaatcag

SEQ ID NO: 746510 - DNA, 120 bp, Artificial Sequence
  ENSG00000205038_108 (sequence is synthesized)
atttcttcaaaatataaatttgttttgattctttatatttatatgtttttatttcatttcaataaacttccagaaatttgtcatttggaagtagatatgacacctctaagttattgtacc

SEQ ID NO: 746511 - DNA, 120 bp, Artificial Sequence
  ENSG00000205038_109 (sequence is synthesized)
aacaaatcatagaatcctttaaataatggaaagagcttgtctagttccgacttaagctctttacatcagattggaagcattttaagtattctttttaatacttgagggggggggttctta

SEQ ID NO: 746512 - DNA, 120 bp, Artificial Sequence
  ENSG00000205038_110 (sequence is synthesized)
ttttctctatccatttacaaggttttgatttccaataatctaagccattctagtttctaaggattttggagagacgagattgtcttcacacaatctgagatgacaatctcatctcagatt

SEQ ID NO: 746513 - DNA, 120 bp, Artificial Sequence
  ENSG00000205038_111 (sequence is synthesized)
tttcacactgagttcctgtctttcagattcacagtaatcccaggaattctagactgtcctgtatttctggatctgcccaactctggccaatattgggaaaagttttcttgtccttggaat

SEQ ID NO: 746514 - DNA, 120 bp, Artificial Sequence
  ENSG00000205038_112 (sequence is synthesized)
gaacttttggaacaagtccaaactccttctctgcctacccctccttcccactcaaaactgccactactaagagcaggactcccctcaaccccgggcatgagttgagggttgaggggttcc

SEQ ID NO: 746515 - DNA, 120 bp, Artificial Sequence
  ENSG00000205038_113 (sequence is synthesized)
cttaactggtggatgcttattcactgtttactggatgaatgaagtataaagtgtgggaagtcaacaacagaacagaacttattttcaagaagataaattagagaatgcaaaaaagctaca

SEQ ID NO: 746516 - DNA, 120 bp, Artificial Sequence
  ENSG00000205038_114 (sequence is synthesized)
gactaaggtagctaagttaaccgaactctctaacagtattgaaaatagcaattctttactcagaaaattctaaagggaatacttaatttgacagaactcctaataaagacattgtagcca

SEQ ID NO: 746517 - DNA, 120 bp, Artificial Sequence
  ENSG00000205038_115 (sequence is synthesized)
gatccagagccttccagcaagtgacactcagcaaacatttgggacagctgagagaattcaacaaagcccataccgttgtctcttgtataacatctcctagtacattcacctcagatcatt

SEQ ID NO: 746518 - DNA, 120 bp, Artificial Sequence
  ENSG00000205038_116 (sequence is synthesized)
gttagtcttacttagcagaaaatgtataaacacttaccaggtagtaaaatcaaatatcttggtataaatgtggcatttcattcacttgagcagtatctgttgggtgttctagtaagtagg

SEQ ID NO: 746519 - DNA, 120 bp, Artificial Sequence
  ENSG00000205038_117 (sequence is synthesized)
aaggctacaagaaataagatgctatgccttccctcgaagagttttcaggatatttggggaaagaatggaaacagaccatttcaatacaacatgatcactgtctcagggagagagagacag

SEQ ID NO: 746520 - DNA, 120 bp, Artificial Sequence
  ENSG00000205038_118 (sequence is synthesized)
agaaagacagagagatagagacagagacagagagggagggggagagagagatagatagagagagagagaaagcatgaggttgctagcaatatggaggccttaagccttgttcaggagggc

SEQ ID NO: 746521 - DNA, 120 bp, Artificial Sequence
  ENSG00000205038_119 (sequence is synthesized)
tacctagaagagcagtggaagaaaactgggagaggaccactgaaggcctaggggctacagaaaaaattcaaatgaacagctggaatggaaatagtcacaattttaagggaattgcaggta

SEQ ID NO: 746522 - DNA, 120 bp, Artificial Sequence
  ENSG00000205038_120 (sequence is synthesized)
agaggtccctgacaaggtagtcttcaaagtatacatgaaagccccttcatgaggaacatttgccatgtccagagagcattgatacttcattgtacagcaccaggtaacagagcactttta

SEQ ID NO: 746523 - DNA, 120 bp, Artificial Sequence
  ENSG00000205038_121 (sequence is synthesized)
tactcccctcagttccaaccctggtggggtgaaaaacctctgttcctgggatagggagggggaaagagacccaacatgggccatttcacgctgagacttaaaaatcagtcttcctaaggc

SEQ ID NO: 746524 - DNA, 120 bp, Artificial Sequence
  ENSG00000205038_122 (sequence is synthesized)
aaatctagtttactgttcattccgtgatacttcctttctgttggaaaactaaattccaaaaactgcaattccagcatctatggaacaaattcctacatttgggttctggaagagatacaa

SEQ ID NO: 746525 - DNA, 120 bp, Artificial Sequence
  ENSG00000205038_123 (sequence is synthesized)
aaatattcttcacaccagaacattgtaaaagccataaaattgtccaccatctgtattcttttcttacctaaaggtttaattcagcccactggagttttttgtcaagattttttctgtcag

SEQ ID NO: 746526 - DNA, 120 bp, Artificial Sequence
  ENSG00000205038_124 (sequence is synthesized)
tttttaataaggaaattttctaatacaagttatatggcagtaaaaggaatttctaaaaattgcttcttagccacacagactttgttaaaaagttcctgttttaactgctttaggcttctg

SEQ ID NO: 746527 - DNA, 120 bp, Artificial Sequence
  ENSG00000205038_125 (sequence is synthesized)
gctgtctgctttttaagaacattctagaattatcataataattccttattccagataaattacaatttaattactacttttaaaaatgcttgaattattggaatccatgggcaatacatc

SEQ ID NO: 746528 - DNA, 120 bp, Artificial Sequence
  ENSG00000205038_126 (sequence is synthesized)
ttcacatgtcccttattcatatgctaagcaagttttatttttgctttttttttgcatttaaataatatttctctgaacattctgtctcagaaattgatgtttaaattcttaaaaataatt

SEQ ID NO: 746529 - DNA, 120 bp, Artificial Sequence
  ENSG00000205038_127 (sequence is synthesized)
tgtattgtaagaagtggctatctagctcttgaacaagtcataaaaatcctttgatgtgtgaatattcttctacctaagacctgaaatgttggcgaagtaaatatgttgttccaattttgg

SEQ ID NO: 746530 - DNA, 120 bp, Artificial Sequence
  ENSG00000205038_128 (sequence is synthesized)
tcaaagtaagaaacagagaataaaaagttaataagaatagcttcttgtatttctcatagtaagtgaaatgtttatatcttgtactactgtctctactcattcctaaattccatcaccttg

SEQ ID NO: 746531 - DNA, 120 bp, Artificial Sequence
  ENSG00000205038_129 (sequence is synthesized)
tgatcattgcaatgacttctagatggtccatctgtttttaccttttatccattttatccccaaaagtgctatttaaaatatccctagcactaataataacaataatcaataataaagtaa

SEQ ID NO: 746532 - DNA, 120 bp, Artificial Sequence
  ENSG00000205038_130 (sequence is synthesized)
aggtttatcacatgttcactacatgccagacactatgctgtgtgttctacatggaccctttccttacagcaatcctatgaggataaccttattcccttctccaaatgaggaaacttgaaa

SEQ ID NO: 746533 - DNA, 120 bp, Artificial Sequence
  ENSG00000205038_131 (sequence is synthesized)
tgttgaagggttaggttaaattcccaagttcacagagctactaatggtaaagctgggattcaaacacagacaatttaactccagagcccaaattccaacatttaattgcttcccactttt

SEQ ID NO: 746534 - DNA, 120 bp, Artificial Sequence
  ENSG00000205038_132 (sequence is synthesized)
cctcaagcatgggcaagtgcttcattgggaagagtttttaatccaaattcctgttcaaattcttggtttctactttaccacttctatgccctcaggcaagttcttagtttccattattct

SEQ ID NO: 746535 - DNA, 120 bp, Artificial Sequence
  ENSG00000205038_133 (sequence is synthesized)
cagtttcttcaactgtaaaatgtggaaagtgtgacatctgaagactgatggtatcatatatatgacatgtaacacagtgcctaacaggcggtaaaatgatagccactcttgtttttattt

SEQ ID NO: 746536 - DNA, 120 bp, Artificial Sequence
  ENSG00000205038_134 (sequence is synthesized)
ccataatgtggcctatatcatgtcaatccctggcccagtaaaccattaggcttcttattacactggaacagtgcctggcatgtaataagcaccatgtgagtgctaattattagaattatt

SEQ ID NO: 746537 - DNA, 120 bp, Artificial Sequence
  ENSG00000205038_135 (sequence is synthesized)
ggctgggcactgggccacctagaacaaagacaatttcccagcttcacttgcagtgagactgatcaatttctgtgcagtgggttacaaaaacagacattatctcgtggcatattctagaaa

SEQ ID NO: 746538 - DNA, 120 bp, Artificial Sequence
  ENSG00000205038_136 (sequence is synthesized)
ctgaccttaaaacatagctattatgcatccctttgccttttcttcatccctttctgtttttccagctacatggagcaagatggctcctgagacctggaggataaaggccagtgcctttta

SEQ ID NO: 746539 - DNA, 120 bp, Artificial Sequence
  ENSG00000205038_137 (sequence is synthesized)
ttgctccataacttgtgttagaaaatctccttactaaaaatctacagaaaaatcttgacaaaaaaaaaattccagtggattgaattaaaactttaggtaagaaaagactaagatggtgga

SEQ ID NO: 746540 - DNA, 120 bp, Artificial Sequence
  ENSG00000205038_138 (sequence is synthesized)
caattttatggcttttacaatgtccttgtgtgaagaatatttttatacctcttccagaacccagagagctcagctgaaaggagtttgggttcctgacattgtggtgccctataccagccc

SEQ ID NO: 746541 - DNA, 120 bp, Artificial Sequence
  ENSG00000205038_139 (sequence is synthesized)
ttgctcctttagggtttcattgttatttggtggttatcctaaatctcctgctttcatcagatgtctgagatggcaaaatttggaaggatcaagagaacagagagttaatccttcctaatg

SEQ ID NO: 746542 - DNA, 120 bp, Artificial Sequence
  ENSG00000205038_140 (sequence is synthesized)
ggaaaggtggacaatgccaaggttaaaataccacatgcatctttgagttactactataccctcccgaatggaaatgcttcaactttaatctgaggctaggcgcagtggctcacgcctgta

SEQ ID NO: 746543 - DNA, 120 bp, Artificial Sequence
  ENSG00000205038_141 (sequence is synthesized)
gcgagacacatctcaaaaaaaaaaacccaaaaaactttaatctgaatccattatgtgttgggttgggttggggaacctaccaaaacagtgggagagtcttgccctttttctaagatcatc

SEQ ID NO: 746544 - DNA, 120 bp, Artificial Sequence
  ENSG00000205038_142 (sequence is synthesized)
agtgggcattttcagcttccccattatggtagtagctgcaaggagtgttcagtctccagtgaaagaaatattaagatttattcccccaatttcccctccccagagagtagctacagacac

SEQ ID NO: 746545 - DNA, 120 bp, Artificial Sequence
  ENSG00000205038_143 (sequence is synthesized)
actgtgtaagaccaaataggaaaagtctgccacaggggacacagtaggtacttgaatacttgtgggcagtctaaccagctacaaacctcttgttgccgtacttgcaagtcctaatacagt

SEQ ID NO: 746546 - DNA, 120 bp, Artificial Sequence
  ENSG00000205038_144 (sequence is synthesized)
actgtagttattataattccatcattctgaaattagaaagatggtcatggagaaactgttctaagaacgccattcacccatgaatgtgactttattagaggttttttttttaggttaagg

SEQ ID NO: 746547 - DNA, 120 bp, Artificial Sequence
  ENSG00000205038_145 (sequence is synthesized)
actatgtattctttcaatttctctaaagtgcttagcacacactctgcccatggtaagtgttaaataaactttctgataaaccaatgattgggtagcatgatgaaacttttcctatcctgc

SEQ ID NO: 746548 - DNA, 120 bp, Artificial Sequence
  ENSG00000205038_146 (sequence is synthesized)
tttttgagattaagaaatcttttaaaaatattacagaaactgcactttatcctgacttacagccttaatgtttgaagtagcagtgtataaaattcacacccagttatagactgagtaatt

SEQ ID NO: 746549 - DNA, 120 bp, Artificial Sequence
  ENSG00000205038_147 (sequence is synthesized)
atagttgctatggtaatgggctctgtgcctatgagcaaaaaaaaaaaattccttttgtgcaagatatttatgactgtgcctggctacatggcaatagtattttcctttggtttttcatta

SEQ ID NO: 746550 - DNA, 120 bp, Artificial Sequence
  ENSG00000205038_148 (sequence is synthesized)
cagtaacttatgcatttaggcagatgatcctttatatatgtaaacgctataaattcttaggaagaaaataaatttattaagtttttcacatcaaaaatttctagtatgattatgagttca

SEQ ID NO: 746551 - DNA, 120 bp, Artificial Sequence
  ENSG00000205038_149 (sequence is synthesized)
attttcaagtgaaagtaatccttaaaggatttaatttcaaataagaactacgtacaaaatatagatttaaattaattttcactgtatgaaatgtacagtatacatagaccaactccttta

SEQ ID NO: 746552 - DNA, 120 bp, Artificial Sequence
  ENSG00000205038_150 (sequence is synthesized)
acaagaatttctggtatgtcttaaagggcatgggtggttagagggagatccccaaacaaacaattcaaaattaagagtttaaaaagcaacaatcaagacacatatcctcctaagtgaatt

SEQ ID NO: 746553 - DNA, 120 bp, Artificial Sequence
  ENSG00000205038_151 (sequence is synthesized)
tgaattagacactggaaaatttaaaaaggtcagttactatgaagaaggtgtaacaatatttatattaatcagacagcaaagtaacaaactgacttagaggaaggaaaatagtaaaataca

SEQ ID NO: 746554 - DNA, 120 bp, Artificial Sequence
  ENSG00000205038_152 (sequence is synthesized)
aaagactaagttagcagatcattttgatatccagatgtgctgaaatgatggacactgagaagaaagaatagacaaaacttggcaacagatcttggtatgaaataaatatcccatgagtag

SEQ ID NO: 746555 - DNA, 120 bp, Artificial Sequence
  ENSG00000205038_153 (sequence is synthesized)
tacataaaagcctggagagagaggggaaggattgtaagtgtcatagttctgacagctgctctttcatcctatgcctttaaaacaaagggaacaaagaagggaacaaagaaggtagaagcg

SEQ ID NO: 746556 - DNA, 120 bp, Artificial Sequence
  ENSG00000205038_154 (sequence is synthesized)
ggggtatggagggttgacttctggctgtccctccctgtttccctttgttaatatattgctagtagacatgtctacttctggttgctgatgacataaaattcacctctatttcttggaagc

SEQ ID NO: 746557 - DNA, 120 bp, Artificial Sequence
  ENSG00000205038_155 (sequence is synthesized)
actattccatgttgtgagctaaaggggattgtactgatcttgaagataacaaatctgcctgcttcaaaggtttcaccgattttattgctgtgtttccaacacatttccacatatggtatg

SEQ ID NO: 746558 - DNA, 120 bp, Artificial Sequence
  ENSG00000205038_156 (sequence is synthesized)
atatttaatttgcaaaataaatccgtaaagcaggaattactaacctaattttgcagatgagaaaactgaggcttaaagttgttcaaggtcaaagtcacgatgtccatcatgctgtagctc

SEQ ID NO: 746559 - DNA, 120 bp, Artificial Sequence
  ENSG00000205038_157 (sequence is synthesized)
aatgaatgagtctcacattgtttcatgttgttttatttctactttctcaatccatgtacaagatagatttacaaactactgttttatgttggttgtatgaatttcaatacatttactgtt

SEQ ID NO: 746560 - DNA, 120 bp, Artificial Sequence
  ENSG00000205038_158 (sequence is synthesized)
agaaataacaaaaggtcttagactgccagatgctgttcccatcaactctacttaattcataatatagctgaactctgtcataaatctaataacgatgtggacattagccagaagtatgat

SEQ ID NO: 746561 - DNA, 120 bp, Artificial Sequence
  ENSG00000205038_159 (sequence is synthesized)
gtggctgaacctcaccactgaacacaaaatgagaattcacctcatcttttcatttgaatttatttctactaaaatatatgtattatttttcttgatttctaaccaggccccttctgaaga

SEQ ID NO: 746562 - DNA, 120 bp, Artificial Sequence
  ENSG00000205038_160 (sequence is synthesized)
aaactggttaactctaaattgttactaaattttgaatcttcctgtatttagcaataaaagttactgctaattgtaataacaattatgaggaaaaatttatttaaatgcttcatagaaagt

SEQ ID NO: 746563 - DNA, 120 bp, Artificial Sequence
  ENSG00000205038_161 (sequence is synthesized)
taattttcatttaatagaaaagaaataaaaaatctgcttcagactgtttgatttctctattaggcaattgaccctaactagtatatggtgattttgagtattaaaaaagaagttataatt

SEQ ID NO: 746564 - DNA, 120 bp, Artificial Sequence
  ENSG00000205038_162 (sequence is synthesized)
ttccagaatattaatgtttattattttgaaagcaagtaaaattctccagtaggaagattaataaaacaattcattaaaattctcatcagaaaatcctatgctttcaaatgtatctgctca

SEQ ID NO: 746565 - DNA, 120 bp, Artificial Sequence
  ENSG00000205038_163 (sequence is synthesized)
aagatgtcactctatgtgcggcaaagctttgttttacttgatcaagaaatgaatgtgactttatgatcttgtattcaactgtgaacagctgctcattaataaaaagccattaaagtccaa

SEQ ID NO: 746566 - DNA, 120 bp, Artificial Sequence
  ENSG00000205038_164 (sequence is synthesized)
caggattcttatactgtatgttgaagaattgatgttaaattttccttctaaaacaacaacaaaacactggcatttgtgatttaatattaatttgtataatttgtaaatgccctttcatgt

SEQ ID NO: 746567 - DNA, 120 bp, Artificial Sequence
  ENSG00000205038_165 (sequence is synthesized)
aagtaggattatatattatcatccctttttaaaattgaagaaccttaagctcaaagaacttagtgcctggccaaattcccacagctattggcacagctaggattagaatcaaaatcttct

SEQ ID NO: 746568 - DNA, 120 bp, Artificial Sequence
  ENSG00000205038_166 (sequence is synthesized)
gattcaaactccactgctctttcactgaaccaggatggctgcttagaaatgtaaaataattatatataaattaatgtagtaaacacatcaattattttcatttggcctattaaataacac

SEQ ID NO: 746569 - DNA, 120 bp, Artificial Sequence
  ENSG00000205038_167 (sequence is synthesized)
aagcaagagaaaataaatcaaaatgttacagttattcggaacaatccccacattccttgtaaaccccagatggtcttgaacctgtaccagcttaatcagctcgattgtcctggaggtaga

SEQ ID NO: 746570 - DNA, 120 bp, Artificial Sequence
  ENSG00000205045_0 (sequence is synthesized)
atggacctcgccagaaaagaatttctgcgtggaaatggcttagctgctgggaaaatgaacatcagtattgatttagacacaaactatgctgagctggttctaaatgtgggaagagtcact

SEQ ID NO: 746571 - DNA, 120 bp, Artificial Sequence
  ENSG00000205045_1 (sequence is synthesized)
cttggagagaacaatagaaaaaaaatgaaggattgtcaactgagaaaacagcagaatgaaaatgtctcacgagctgtgtgtgctctgctgaattctggagggggagtgatcaaggctgaa

SEQ ID NO: 746572 - DNA, 120 bp, Artificial Sequence
  ENSG00000205045_2 (sequence is synthesized)
gttgagaataaaggctatagttataaaaaagatggaatagggctagatttggaaaattcttttagtaacatgctgccatttgttcctaatttcctggacttcatgcagaatggtaactac

SEQ ID NO: 746573 - DNA, 120 bp, Artificial Sequence
  ENSG00000205045_3 (sequence is synthesized)
tttcacatttttgtgaaatcatggagcttggaaacctctggtccgcagattgccacgttgagctccagtttgtacaagagagatgtaacgtctgcaaaagtcatgaatgcttctgctgca

SEQ ID NO: 746574 - DNA, 120 bp, Artificial Sequence
  ENSG00000205045_4 (sequence is synthesized)
ctggagttcctcaaagacatggaaaaaactggagggagagcatatttaagaccagaattccctgcaaaaagggcctgtgttgatgtacaagaagaaagtaacatggaagccttggctgct

SEQ ID NO: 746575 - DNA, 120 bp, Artificial Sequence
  ENSG00000205045_5 (sequence is synthesized)
gatttttttaacagaacagaacttggttataaagaaaaattgacctttactgaatccacacacgttgaaataaaaaacttctcgactgaaaagttgttacaacgaattacagagattctc

SEQ ID NO: 746576 - DNA, 120 bp, Artificial Sequence
  ENSG00000205045_6 (sequence is synthesized)
cctcaatatgtttctgcatttgcaaatactgatggaggatatttattcgttggtctaaatgaagataaagaagtaattggctttaaagcagagaagagttatcttactaagttagaagaa

SEQ ID NO: 746577 - DNA, 120 bp, Artificial Sequence
  ENSG00000205045_7 (sequence is synthesized)
gtatatgataaaggaaggctttgtggatatgtgtatgcactcagagtggaacgcttctgctgtgcagtgtttgctaaaaagcctgattcctggcacgtgaaagataacagagttaagcag

SEQ ID NO: 746578 - DNA, 120 bp, Artificial Sequence
  ENSG00000205045_8 (sequence is synthesized)
ttgaccgagaaggaatggatccagttcatggtggattcagaaccagtatgtgaggaactgccctctccagcaagtacatcatcacctgtctcccagagttatcctcttcgtgaatatatt

SEQ ID NO: 746579 - DNA, 120 bp, Artificial Sequence
  ENSG00000205045_9 (sequence is synthesized)
aacttcaaaattcagccactgagatatcaccttccagggctatcagaaaagataacttgtgctccaaaaaccttctgcagaaatctgttctcacaacatgaaggacttaagcaattaata

SEQ ID NO: 746580 - DNA, 120 bp, Artificial Sequence
  ENSG00000205045_10 (sequence is synthesized)
tgtgaagaaatgggctctgtcaataagggctcactgatcttctctaggagctggtctttggatctgggcttgcaagagaaccacaaagtcctctgtgatgctcttctgatttcccaggac

SEQ ID NO: 746581 - DNA, 120 bp, Artificial Sequence
  ENSG00000205045_11 (sequence is synthesized)
aagcctccagtcctatacaccttccacatggtacaggatgaggagtttaaagactattctacacaaactgcccaaactttaaaacagaagctggcaaaaattggtggttacactaaaaaa

SEQ ID NO: 746582 - DNA, 120 bp, Artificial Sequence
  ENSG00000205045_12 (sequence is synthesized)
gtgtgtgtcatgacaaagatcttctacttgagccctgaaggcaagacaagctgccagtatgatttaaactcgcaagtaatttaccctgaatcctactattggacaacagctcaaacaatg

SEQ ID NO: 746583 - DNA, 120 bp, Artificial Sequence
  ENSG00000205045_13 (sequence is synthesized)
aaagacttggaaaaggccctttcaaatatcttacctaaggagaatcaaatctttttgtttgtttgtttgtttcgtttttgtttgtttgtttgttggtttgtttgttttttcttgagatga

SEQ ID NO: 746584 - DNA, 120 bp, Artificial Sequence
  ENSG00000205045_14 (sequence is synthesized)
tggtcttgaactcctgacctcgtgattcaacccccccccccggtctcccaaagtgctaggagtacagatgtgagccaccgcgcccggctggagaatcaattcttttatagaccaattagc

SEQ ID NO: 746585 - DNA, 120 bp, Artificial Sequence
  ENSG00000205045_15 (sequence is synthesized)
cgcccggctggagaatcaattcttttatagaccaattagcctttgacatttccagcatctcccagataatcagtatagataaggatgtttaaatcttgtccaaggctcacttgaatcatg

SEQ ID NO: 746586 - DNA, 120 bp, Artificial Sequence
  ENSG00000205045_16 (sequence is synthesized)
gaagatggactgggctacagagatatttttcattatatatttggtaacattctctaattctctaaaaatacgtctttgaaaacattgcaagttaggcaacttgacgtgatgttggaaaac

SEQ ID NO: 746587 - DNA, 120 bp, Artificial Sequence
  ENSG00000205045_17 (sequence is synthesized)
tgggattagcctatgttcgcttcttcctaagttctttatagatattccttaagggaaattagaaaaattaattacctacacatgttttgccataccaagatgtcatttgactataaagga

SEQ ID NO: 746588 - DNA, 120 bp, Artificial Sequence
  ENSG00000205045_18 (sequence is synthesized)
aatatcagacattcttatccaatggacatggaaaacatagttctctaatatcttcttgaaaactatattgcaatgaaatgcagccaatgaagagatgaatcaaaatggagaacttgccga

SEQ ID NO: 746589 - DNA, 87 bp, Artificial Sequence
  ENSG00000205045_19 (sequence is synthesized)
gcatgagaattgcttgaacgcaggaagtggaggttattgggcaagagagcaagactctgtcatctctatgcaaataaactagaaaat

SEQ ID NO: 746590 - DNA, 87 bp, Artificial Sequence
  ENSG00000205045_20 (sequence is synthesized)
aagaaatggataaattcctgaacacatgcaacctcccaagactgagccagggagaagtcaaatccctgaacaggtctaaccaaaaaa

SEQ ID NO: 746591 - DNA, 120 bp, Artificial Sequence
  ENSG00000205045_21 (sequence is synthesized)
ataaactcagttatatggcaatgtattaaattgctatcaatgcatttttactgttaattttccttccaagtatagagtgtttcagcagcatcaagagttaattttacaatttgtatctga

SEQ ID NO: 746592 - DNA, 120 bp, Artificial Sequence
  ENSG00000205045_22 (sequence is synthesized)
cctaggaatctaaccacaatatgtaaccacaatatctaatgttctgtattgggaatgcaggatcagttctaagtagacgtttggtatactgtgcattagttagcttgagtctctcccatg

SEQ ID NO: 746593 - DNA, 120 bp, Artificial Sequence
  ENSG00000205045_23 (sequence is synthesized)
ccaaattaagagcgtgatttttgttttctaacattattccatagtatgtgaggaactgccctctccagcaagtacatcatcacctgtctcccagagttatcctcttcgtgaatatattaa

SEQ ID NO: 746594 - DNA, 120 bp, Artificial Sequence
  ENSG00000205045_24 (sequence is synthesized)
caggaacatggatggaactggaggccattacccttagcaaactaacttaagaacagaaaaccaagtccagcatcttctcactgataaatgggagctaaacgaaagaacttatgaacacaa

SEQ ID NO: 746595 - DNA, 120 bp, Artificial Sequence
  ENSG00000205045_25 (sequence is synthesized)
gtccagcatcttctcactgataaatgggagctaaacgaaagaacttatgaacacaaagaaggaaacagcagacactggggtctatttgagggggggagggtgggaggagggagaggagca

SEQ ID NO: 746596 - DNA, 120 bp, Artificial Sequence
  ENSG00000205045_26 (sequence is synthesized)
ctgggtgatgaaataatatgtataacaaaaccccatgacacatgtttacctgtgtaatgagccttcacatgcgcccccaaacctaaaataaaaattaacaaaaattttatctacatataa

SEQ ID NO: 746597 - DNA, 120 bp, Artificial Sequence
  ENSG00000205057_0 (sequence is synthesized)
atgaacaaattggggcacaacgaacttaaggaatgccttaagactgccactgattctctacagacagtgcagcctagtatctcccagacttgtacttcctatggccctgcacttggggcc

SEQ ID NO: 746598 - DNA, 120 bp, Artificial Sequence
  ENSG00000205057_1 (sequence is synthesized)
ccactgcctggtagaaatgaagtggccttgctaacaagtttacctccaaactatgagatttcagaaggaaaaccaagagccatctctgcatatgtgagagcgggcaaaggaaatgtgaca

SEQ ID NO: 746599 - DNA, 120 bp, Artificial Sequence
  ENSG00000205057_2 (sequence is synthesized)
ggaagatccaaagagaactttggccttaactaagcttcctacattctcctggagtcggtggtttatgaatgtggtgccatctggggaactgacaacccctgatgtgttcactctgctcgt

SEQ ID NO: 746600 - DNA, 120 bp, Artificial Sequence
  ENSG00000205057_3 (sequence is synthesized)
cttccaggtgagagaagaagaaggcgagaaagaaagagaagttccagaatttcacaggctgagggagatggtagtaacttctgtttatgttggtttctgtttattggtttgctttttatt

SEQ ID NO: 746601 - DNA, 120 bp, Artificial Sequence
  ENSG00000205057_4 (sequence is synthesized)
ttgaactcgtttgacttcaggttccagatttgtttttttctttgtaaacgagactttgacattgttagcaggcccatctgtttgcttttcttaaataaaatgtaaattggtttttgtttt

SEQ ID NO: 746602 - DNA, 120 bp, Artificial Sequence
  ENSG00000205060_0 (sequence is synthesized)
cttggcagcgtcggtgttggccgcgggagaaggggagaccgcggcggcccccagtgagagcggctttccaggacggtgcgatgtgctgcgcagcgaagaggcaggaggccggcttcctgg

SEQ ID NO: 746603 - DNA, 120 bp, Artificial Sequence
  ENSG00000205060_1 (sequence is synthesized)
ggtagcggtacaggcgggcgcttactctgtgcgcttgcttccccaaccctgcaccggccatgcgcccggccttggcggtgggcctggtgttcgcaggctgctgcagtaacgtgatcttcc

SEQ ID NO: 746604 - DNA, 120 bp, Artificial Sequence
  ENSG00000205060_2 (sequence is synthesized)
tagagctcctggcccggaagcatccaggatgtgggaacattgtgacatttgcacaatttttatttattgctgtggaaggcttcctctttgaagctgatttgggaaggaagccaccagcta

SEQ ID NO: 746605 - DNA, 120 bp, Artificial Sequence
  ENSG00000205060_3 (sequence is synthesized)
tcccaataaggtactatgccataatggtgaccatgttcttcaccgtgagcgtggtgaacaactatgccctgaatctcaacattgccatgcccctgcatatgatatttagatccggttctc

SEQ ID NO: 746606 - DNA, 120 bp, Artificial Sequence
  ENSG00000205060_4 (sequence is synthesized)
taattgccaacatgattctaggaattatcattttgaagaaaagatacagtatattcaaatatacctccattgccctggtgtctgtggggatatttatttgcacttttatgtcagcaaagc

SEQ ID NO: 746607 - DNA, 120 bp, Artificial Sequence
  ENSG00000205060_5 (sequence is synthesized)
aggtgacttcccagtccagcttgagtgagaatgatggattccaggcatttgtgtggtggttactaggtattggggcattgacttttgctcttctgatgtcagcaaggatggggatattcc

SEQ ID NO: 746608 - DNA, 120 bp, Artificial Sequence
  ENSG00000205060_6 (sequence is synthesized)
aagagactctctacaaacgatttgggaaacactccaaggaggctttgttttataatcacgcccttccacttccgggtttcgtcttcttggcttctgatatttatgaccatgcagttctat

SEQ ID NO: 746609 - DNA, 120 bp, Artificial Sequence
  ENSG00000205060_7 (sequence is synthesized)
tcaataagtctgagttatatgaaattcccgtcatcggagtgaccctgcccatcatgtggttctacctcctcatgaacatcatcactcagtacgtgtgcatccggggtgtgtttatcctca

SEQ ID NO: 746610 - DNA, 120 bp, Artificial Sequence
  ENSG00000205060_8 (sequence is synthesized)
ccacagaatgcgcctccctcaccgtcacgctcgtcgtgaccctacgcaaatttgtgagcctcatcttttccatcttgtacttccagaaccccttcaccctgtggcactggctgggcacct

SEQ ID NO: 746611 - DNA, 120 bp, Artificial Sequence
  ENSG00000205060_9 (sequence is synthesized)
tgtttgtcttcattgggaccttaatgtacacagaggtgtggaacaacctagggaccacaaaaagtgagcctcagaaggacagcaagaagaactgaggcctgtctggagtacgtagaccag

SEQ ID NO: 746612 - DNA, 120 bp, Artificial Sequence
  ENSG00000205060_10 (sequence is synthesized)
tgtcgtcgtgagggtgggaccctgtgaaggtctgaccaccgtttcgcttttgttaatgccgagctacccgcagtgctgagccagccgtgcaaaaggaaatcttcaggaggggacttctca

SEQ ID NO: 746613 - DNA, 120 bp, Artificial Sequence
  ENSG00000205060_11 (sequence is synthesized)
cgttgctcagactgacacatgtagactaaatagaaacccctcagccctaaaatagaaaaaagaacagttctggactattgaacagcccattcatttatttctgttttgtttaccgacata

SEQ ID NO: 746614 - DNA, 120 bp, Artificial Sequence
  ENSG00000205060_12 (sequence is synthesized)
ttcagtattattcttgttttctgaattctgagtctcctgaacaaaaggcttactatccatggtcttggaaaagattgtcccttctcttgctgttgtaatgcatctctgctacagcagtca

SEQ ID NO: 746615 - DNA, 120 bp, Artificial Sequence
  ENSG00000205060_13 (sequence is synthesized)
ttgtcatcctgtgaccttatcccttttgtctcccatcaccttttccttcttcagcagcacctcacagtcagtcagacgctgcaggcaccactatcaccaggagtggccaagtaaaccgag

SEQ ID NO: 746616 - DNA, 120 bp, Artificial Sequence
  ENSG00000205060_14 (sequence is synthesized)
acaccagtaacagcagggctggacttcctccagcgttttgggaaggaaagagatgttcccctgagctgattcccagtgacagtgcagcaagactagtgggactcctctttcccacatttt

SEQ ID NO: 746617 - DNA, 120 bp, Artificial Sequence
  ENSG00000205060_15 (sequence is synthesized)
gcttttttttttttctatgcaaaagtcagatgcttctatccattgctttctgtgattagggcggccctgcagcatatctcacagcagacacagtgttcataacaaagaaaggttgtgccg

SEQ ID NO: 746618 - DNA, 62 bp, Artificial Sequence
  ENSG00000205060_16 (sequence is synthesized)
acagcagacacagtgttcataacaaagaaaggttgtatcacttgaggtcaggagttcaagac

SEQ ID NO: 746619 - DNA, 66 bp, Artificial Sequence
  ENSG00000205060_17 (sequence is synthesized)
aaggttgcagtgagctgaggtcgtgctactgcactcccgcctgggtgacagagtgagactctatct

SEQ ID NO: 746620 - DNA, 120 bp, Artificial Sequence
  ENSG00000205060_18 (sequence is synthesized)
atctcaaaaaaaaaaaaaaaaaagaaaggttgttatggactggacacccctgaagcccattgcctaggccacagtggtgacggcaggatggccctgctcagcaccgcaagagccatggct

SEQ ID NO: 746621 - DNA, 120 bp, Artificial Sequence
  ENSG00000205060_19 (sequence is synthesized)
tggccctgctcagcaccgcaagagccatggctgtccctgttggcccagccgggcactcacagggcagaagggtgggtctcaagtgggaggataaggcttcaccaccaggagattcccctc

SEQ ID NO: 746622 - DNA, 120 bp, Artificial Sequence
  ENSG00000205060_20 (sequence is synthesized)
tgcccgatgactctgttaagagtcacgacccatcaagggaatgcatagatggagatatatagtgtgtgatgtgtaaatcaggtcaaacctcaacgacaattgaaagttgttattgtccta

SEQ ID NO: 746623 - DNA, 120 bp, Artificial Sequence
  ENSG00000205060_21 (sequence is synthesized)
tgaggtatcttagcattctcgatgggtattgaggatggttggatgtgctttattgtgtgtggaaacatgcctctctttgctaatcatttcagaggtccagttttcctttcactggacaat

SEQ ID NO: 746624 - DNA, 120 bp, Artificial Sequence
  ENSG00000205060_22 (sequence is synthesized)
cttgaataggaggaacgctgttgctgtaatatgcgtagcttctgtgtgctcttgtgtagtctgtgtgtgatcaaagggcacggaagtggctgcactttcacatcccttttctttacttag

SEQ ID NO: 746625 - DNA, 120 bp, Artificial Sequence
  ENSG00000205060_23 (sequence is synthesized)
ttacttagctggaaccttacataccagtacatgctcctctgtaagcagctgaactcaccggccacttctctgtttgcctatagacaaagactgtgtgtgtgtgtgtgtatgtatgtgtgt

SEQ ID NO: 746626 - DNA, 120 bp, Artificial Sequence
  ENSG00000205060_24 (sequence is synthesized)
tgcacacattgtgttcttaaactgagacgtggctctgcaggtctcctgggctcattccatggtgtggtatgtttattccactgtccagagctattctctgatggatttgagcaacagcag

SEQ ID NO: 746627 - DNA, 120 bp, Artificial Sequence
  ENSG00000205060_25 (sequence is synthesized)
tggagataaatgtcctagagtcaccaggtcgcttggagaagtcatttaagctgcctcgggtttttgttacttaaaatgtggatattatttctccacctaaatcactgagtttacagagta

SEQ ID NO: 746628 - DNA, 120 bp, Artificial Sequence
  ENSG00000205060_26 (sequence is synthesized)
ataatgtgttgctctggacattgacagctttctagagccagtaatgggctcttctgaaggatgctgaattagaagtgaacctattcataggatcaaaagccacttgctttgaaatatgta

SEQ ID NO: 746629 - DNA, 120 bp, Artificial Sequence
  ENSG00000205060_27 (sequence is synthesized)
tcttaccacttaatagaagaacctgtccctagaggcgacttcattgctatggatctggagtctctgaactcttaataggatgcagcctcacatacataatgtcacccattttatgttgat

SEQ ID NO: 746630 - DNA, 120 bp, Artificial Sequence
  ENSG00000205060_28 (sequence is synthesized)
gaaaacattacaagttttcttcattgggtatgtgttgatgttcacagacagtacttgggcccattaggttttcgcgtctggtcttagagcatgtgtattcatctcagcgtgaatacctca

SEQ ID NO: 746631 - DNA, 120 bp, Artificial Sequence
  ENSG00000205060_29 (sequence is synthesized)
gccagtcttatgaataggaggctatgtatgggcagggaatagattagattagaacactcgcacaagatgaccacatatagaagcagaaagccccaaattccctgggaactgttttttctc

SEQ ID NO: 746632 - DNA, 120 bp, Artificial Sequence
  ENSG00000205060_30 (sequence is synthesized)
tagtagctgaatataaggaaatatgtctaatggacaccagttaatactttttaaaactactctttaaaaaaaaaatacgttccccttggttaactgattttttaatccagggtggacatt

SEQ ID NO: 746633 - DNA, 120 bp, Artificial Sequence
  ENSG00000205060_31 (sequence is synthesized)
ttttcaacctttattaaaaagacaaataaactattttgtagaagatcagactcctacttaactggaagagaaatgtctattaaatgtctctcctctttctctgggtcaagaccatgtaat

SEQ ID NO: 746634 - DNA, 120 bp, Artificial Sequence
  ENSG00000205060_32 (sequence is synthesized)
tttatgcttcagagatgaagatactgtttgtttacaaagagtttagtttttaagacatccaaaactctatgctagagcaaaaatcaaatagcaaaggacactagccagaaaatacagtgt

SEQ ID NO: 746635 - DNA, 120 bp, Artificial Sequence
  ENSG00000205060_33 (sequence is synthesized)
gtgtgtgtgcacctgtgtgcctgctgaacaacttgacagtgtaacagataaggtaactgaagatggtggatatttgaattgtattagcttaatgtctacatatctttggccaaaactcta

SEQ ID NO: 746636 - DNA, 120 bp, Artificial Sequence
  ENSG00000205060_34 (sequence is synthesized)
ttgtcatattagaaacatgttatctttttcatgtttattagtaatttatttttgattctttgttttctttttcgtccaactaaaacaactgtaatgtacttgatacatttatatcaagtt

SEQ ID NO: 746637 - DNA, 120 bp, Artificial Sequence
  ENSG00000205060_35 (sequence is synthesized)
ctaaagtatttagacaaatccaaatactttgtttttagttttttcctcctttccatcctgttaaccacagtgaaacgctgcagtattttgatttggtcagtgctacggaggaagaccatg

SEQ ID NO: 746638 - DNA, 120 bp, Artificial Sequence
  ENSG00000205060_36 (sequence is synthesized)
aaagctgaattggtctgtgccacccagagtaaacctcttctcttcttctggaaagatggcgtgatgtttttcaaggattctaataaatatcccgcagtcatctcctgagcagctttcctc

SEQ ID NO: 746639 - DNA, 120 bp, Artificial Sequence
  ENSG00000205060_37 (sequence is synthesized)
tgtttcacttcagaactccttcccccactttcttcactccagtttcttcacttgcagcgttttctgctaagaaagacttatcatcttgtatctgtttatgcctctcttctttggggcccc

SEQ ID NO: 746640 - DNA, 120 bp, Artificial Sequence
  ENSG00000205060_38 (sequence is synthesized)
tggatgtttttgtggatttttacagagtatttatatctgcacagcgtgtattttgttatacattcttacaagcattgatattggggggtacattcataatagtgagaatatctggcagaa

SEQ ID NO: 746641 - DNA, 120 bp, Artificial Sequence
  ENSG00000205060_39 (sequence is synthesized)
tgtgtgaatgccatatctgtagatgacgatgaatgtgaagggttaatgtagaaatgtttgtttattctgttacagctcaaaatggaggctgagaatctctaccaccattcccttctctat

SEQ ID NO: 746642 - DNA, 120 bp, Artificial Sequence
  ENSG00000205060_40 (sequence is synthesized)
ttgagaatctctaccaccattcccttctctatttgggaaacaatactctcttattttgctatttttaccttcccattaactggcttcactcaacagtgccagatacctatggagagggga

SEQ ID NO: 746643 - DNA, 120 bp, Artificial Sequence
  ENSG00000205060_41 (sequence is synthesized)
agtaaaacaccttaggtcaggaataataaaccaatgagttagctcagggccggtggacatgttcactggtggaccagttggcattgacctaaacggacagagaaatgcacatggaggaga

SEQ ID NO: 746644 - DNA, 120 bp, Artificial Sequence
  ENSG00000205060_42 (sequence is synthesized)
actacgttgaaatcaagatcctatgtctgttgtattttctctttgcctggagtaaatagcattataagtcattccacccttattagataaccaaagcatattggtctcaatagctttctc

SEQ ID NO: 746645 - DNA, 120 bp, Artificial Sequence
  ENSG00000205060_43 (sequence is synthesized)
ctgaaaaatgtgattgaatcttacctgtagcagttcactcttaaggttgaaagaactgtcaatatagataaaatccattccttattattattgattggtgtgacatttgaaaatgtgtct

SEQ ID NO: 746646 - DNA, 120 bp, Artificial Sequence
  ENSG00000205060_44 (sequence is synthesized)
aaacaatatttgtaagtaaaagaaccagtcataagcctcaaatgtgttcagtgtgtaccaagctggaatgggagactggcccctcttggctttaaagtagcatgttgtctttttctagca

SEQ ID NO: 746647 - DNA, 120 bp, Artificial Sequence
  ENSG00000205060_45 (sequence is synthesized)
gcttcttcctagtagacattccagggatgggaggggccagggatcatgtcttactcatttctgtatcgccagcccctggcatagtgtctggcttatgttatgtgaataaatgaatgcttg

SEQ ID NO: 746648 - DNA, 120 bp, Artificial Sequence
  ENSG00000205060_46 (sequence is synthesized)
ccaagatctcttcttccctcaagtttctggaaaacctgagggttcgtgatacctgttcccactcctcatcagcgggttggcaagaaagcaaataaggggaaacatttttaacattccaag

SEQ ID NO: 746649 - DNA, 120 bp, Artificial Sequence
  ENSG00000205060_47 (sequence is synthesized)
caagagaaggaagaacgactattgggaggaggtacaccagagattgctcagtgtgcagcctgctacctcacttttggctctggattgcctggtggtagaagggaagagtattatgtagtt

SEQ ID NO: 746650 - DNA, 120 bp, Artificial Sequence
  ENSG00000205060_48 (sequence is synthesized)
agcaccttacatatttgatgctcaggaagaaagtgcaagaagatccctaatagaacattaaagattcttaaaagtttttgaagtaggctgcttggggtgaccagccccacccttacatct

SEQ ID NO: 746651 - DNA, 120 bp, Artificial Sequence
  ENSG00000205060_49 (sequence is synthesized)
ccatagttggtacagttagcttgtagcagctgaagctgatgcctggagatcactgtctgttggtctgatctcagtatcatactgagacacctcccctgagccttacctacttaaattggt

SEQ ID NO: 746652 - DNA, 120 bp, Artificial Sequence
  ENSG00000205060_50 (sequence is synthesized)
aaccgtcctaccaaaatttgtcaattttaatcaagtgaggcaagttgcaagggagccagagatacgtgaaaaaagaaaagcagaaatactgatactttctaagaaagaagttgtaataat

SEQ ID NO: 746653 - DNA, 120 bp, Artificial Sequence
  ENSG00000205060_51 (sequence is synthesized)
ttctttggcacattgacttactgatatcttttgaaatgcatagatgactcttgtgaaccaaagagagcagtagtggttattccccggcgcaataaaaatgcctttgtgtatcacttgcga

SEQ ID NO: 746654 - DNA, 120 bp, Artificial Sequence
  ENSG00000205060_52 (sequence is synthesized)
ttgccagtcatttctgtgccagttgctttcattccagagaatggcctcattctccaaaaaaagatgatgattttagaagtaggatttcctaacaaattatgtggtggggagggacggcgg

SEQ ID NO: 746655 - DNA, 120 bp, Artificial Sequence
  ENSG00000205060_53 (sequence is synthesized)
ggattttattcatcccgtctgagctcttcatacagtattaccattaggttttaagaacaaagatgggggaggagggagtagaaagctgagagtacgtagaacagctacaagacattagtg

SEQ ID NO: 746656 - DNA, 120 bp, Artificial Sequence
  ENSG00000205060_54 (sequence is synthesized)
ggtattcagattttgagctgtgtaaatatcaaacatcggcttccagccttaagagttatttgagcagagagttaaggaggaatgggagattttgtgaataaaatgttttgccaaactgaa

SEQ ID NO: 746657 - DNA, 120 bp, Artificial Sequence
  ENSG00000205060_55 (sequence is synthesized)
agaatatgagaagttaaaccagggaccatgccagaaggttctctcactgatcccccaagtacagtctacagaaaactaccttgactccactcctccagaaccccttcaccctgtggcact

SEQ ID NO: 746658 - DNA, 120 bp, Artificial Sequence
  ENSG00000205060_56 (sequence is synthesized)
tattcaaatcatgtgttcctttcgaaaatgtctccattccactttccagtcattgcagcagcaaaagcttttacaggggtttctcaattatttacaaatgaagtaaaagaatatcttcga

SEQ ID NO: 746659 - DNA, 120 bp, Artificial Sequence
  ENSG00000205076_0 (sequence is synthesized)
atgtccaacgtcccccacaagtcctcactgcccgagggcatccgccctggcacggtgctgagaattcgcggcttggttcctcccaatgccagcaggttccatgtaaacctgctgtgcggg

SEQ ID NO: 746660 - DNA, 120 bp, Artificial Sequence
  ENSG00000205076_1 (sequence is synthesized)
ggccgggcgttcctttccagcgcgggcagcccttcgaggtgctcatcatcgcgtcagacgacggcttcaaggccgtggttggggacgcccagtaccaccacttccgccaccgcctgccgc

SEQ ID NO: 746661 - DNA, 120 bp, Artificial Sequence
  ENSG00000205076_2 (sequence is synthesized)
tggcgcgcgtgcgcctggtggaggtgggcggggacgtgcagctggactccgtgaggatcttctgagcagaagcccaggcgggcccggggccttggctggcaaataaagcgttagcccgca

SEQ ID NO: 746662 - DNA, 120 bp, Artificial Sequence
  ENSG00000205076_3 (sequence is synthesized)
ctctttcaaaggagcaagtgggcagtgagtgtgccacggactggcctgggctgtggcctccgggtaacccccatcccgactgtcccctctacctctttgtggcttcctctggggccctct

SEQ ID NO: 746663 - DNA, 120 bp, Artificial Sequence
  ENSG00000205076_4 (sequence is synthesized)
ttgaggatctttctgtttgtctttgttgctctccccatctgtttccctgtctgtttctggtctctttcctgcctctccgccaccctttcctcttccactgatttctgccagtctcagccc

SEQ ID NO: 746664 - DNA, 120 bp, Artificial Sequence
  ENSG00000205078_0 (sequence is synthesized)
accagtcatcaagcgaggctcgcgcgcaggccccgcgttggaaaatggcggggaagctgaaacctctgaatgtggaggcgccagaagctactgaggaggctgaagggcaagccaagtctt

SEQ ID NO: 746665 - DNA, 120 bp, Artificial Sequence
  ENSG00000205078_1 (sequence is synthesized)
tgaagactgaagacttgctggcaatggtgataaagctgcagaaagagggaagcctggagccacagatagaggacctgattagccggattaatgatcttcagcaagcaaagaagaaatcca

SEQ ID NO: 746666 - DNA, 120 bp, Artificial Sequence
  ENSG00000205078_2 (sequence is synthesized)
gtgaggaactgagagagacccacagtctctgggaggccctgcatagggaattagactccttgaatggagagaaagtgcacctagaggaggtcttgggcaaaaagcaagaggcactgagga

SEQ ID NO: 746667 - DNA, 120 bp, Artificial Sequence
  ENSG00000205078_3 (sequence is synthesized)
tcctccagatgcactgccaagagaaggaaagcgaggctcagaggttggatgtcagaggacagctggaggatctgatgggccagcacaaggacctctgggaattccacatgctggagcagc

SEQ ID NO: 746668 - DNA, 120 bp, Artificial Sequence
  ENSG00000205078_4 (sequence is synthesized)
gctgcactcgccgcctgaggtcgagggcgccatggcggtgaatgacgggctgaaggcggagctggagatattcggggagcaggtccggagcgcccccgaggtcggggccggcgagggaga

SEQ ID NO: 746669 - DNA, 120 bp, Artificial Sequence
  ENSG00000205078_5 (sequence is synthesized)
ggccggacctgagctcccccgcgctcgcgacgaggaggatcccgagccgccggtggctgcccctgacgccctctaggccagcaggacccgcccgttcccgaccttccctcgagacccgcc

SEQ ID NO: 746670 - DNA, 120 bp, Artificial Sequence
  ENSG00000205078_6 (sequence is synthesized)
aagaaataaaggcgatgatttccgaccatgctcgcgttctccgcggagtctgtgctacaccgtggagcggggcggggcgtgctgggatctcgaggcggggcctctgccggacccctccca

SEQ ID NO: 746671 - DNA, 120 bp, Artificial Sequence
  ENSG00000205078_7 (sequence is synthesized)
ccagtcgagccccgggcgccgtacagaggctgggtaaatgctcctgaactcagagagagtaagtgggtgtcagtatcccccgccccacggcctcatctcgagttcccaaaccatctatgt

SEQ ID NO: 746672 - DNA, 120 bp, Artificial Sequence
  ENSG00000205078_8 (sequence is synthesized)
gcagggcggaggggaacccgcccaggtcccccgctccgcccccgactgccgcttccccggcctgtgcctccctcggcgtcgtcgggtctccgcgtctcggtggcttcctcctcgtcccct

SEQ ID NO: 746673 - DNA, 120 bp, Artificial Sequence
  ENSG00000205084_0 (sequence is synthesized)
aaacttggtcccccggctcgcggagtgcctgcgagcggtgctcatggcgctctatgagctcttctctcacccggtcgagcgcagttaccgcgcggggctctgctccaaagccgcgctgtt

SEQ ID NO: 746674 - DNA, 120 bp, Artificial Sequence
  ENSG00000205084_1 (sequence is synthesized)
cctgctgctggccgctgcgctcacgtacatcccgccgctgctggtggccttccggagccacgggttttggctgaagcggagcagctacgaggagcagccgaccgtgcgcttccaacacca

SEQ ID NO: 746675 - DNA, 120 bp, Artificial Sequence
  ENSG00000205084_2 (sequence is synthesized)
ggtgctgctcgtggccctgctcggacccgaaagcgacgggttcctcgcctggagcacgttccccgccttcaaccggctgcaaggggatcgcctgcgcgtcccgctcgtttcgactagaga

SEQ ID NO: 746676 - DNA, 120 bp, Artificial Sequence
  ENSG00000205084_3 (sequence is synthesized)
agaagacaggaaccaggatgggaagacggacatgttacattttaagctggagcttcccctgcagtccacggagcacgttctcggtgtgcagctcatcctgactttctcctatcgattaca

SEQ ID NO: 746677 - DNA, 120 bp, Artificial Sequence
  ENSG00000205084_4 (sequence is synthesized)
caggatggcgaccctcgtgatgcagagcatggcgtttctccagtcctcctttcctgtcccgggatcccagttatacgtgaacggagacctgaggctgcagcagaagcagccgctgagctg

SEQ ID NO: 746678 - DNA, 120 bp, Artificial Sequence
  ENSG00000205084_5 (sequence is synthesized)
tggtggcctagatgcccgatacaacatatccgtgatcaacgggaccagcccctttgcctatgactacgacctcacccatattgttgctgcctaccaggagaggaacgttaccaccgtcct

SEQ ID NO: 746679 - DNA, 120 bp, Artificial Sequence
  ENSG00000205084_6 (sequence is synthesized)
gaatgatcccaaccccatctggctggtgggcagggccgcagatgctccatttgtgattaatgctatcatccgataccctgtggaagtcatttcttatcagccaggattctgggagatggt

SEQ ID NO: 746680 - DNA, 120 bp, Artificial Sequence
  ENSG00000205084_7 (sequence is synthesized)
aaagttcgcctgggtgcagtatgtcagcatcctgcttatcttcctctgggtgtttgaaagaatcaagatcttcgtgtttcagaatcaggtggtgaccaccattcctgtgacagtgacgcc

SEQ ID NO: 746681 - DNA, 120 bp, Artificial Sequence
  ENSG00000205084_8 (sequence is synthesized)
ccggggagacttgtgtaaggagcacttatcctagaaaggccatttctgaagactcagcaggaccgtggctgcctcattgtcatcttctgggaacatcttaggaccttttgaaagagccca

SEQ ID NO: 746682 - DNA, 120 bp, Artificial Sequence
  ENSG00000205084_9 (sequence is synthesized)
gcggacacctgcgggcttgtgtgcttttccctcagagacaacggttctttccggttttgctctacacagttccgtatcttcagagctcctgcagaattgtcagggactagtttgtggaaa

SEQ ID NO: 746683 - DNA, 120 bp, Artificial Sequence
  ENSG00000205084_10 (sequence is synthesized)
ggtctgagagttcctggaggctataattagctttttgggttttccttctttgccttagcgttgaatttcaggagaaaattgcagtcagttcagacatcttggaaagagtcccatctctgg

SEQ ID NO: 746684 - DNA, 120 bp, Artificial Sequence
  ENSG00000205084_11 (sequence is synthesized)
tcaagcagagacttttcctctgttgaactgaggaacacactgtgcatttctaccttctgttgtgagccactcttactcttttcagggctctcttgtgacaaacatgccaatcactagcac

SEQ ID NO: 746685 - DNA, 120 bp, Artificial Sequence
  ENSG00000205084_12 (sequence is synthesized)
tttgcacccctgggcttctccatttcccattcacagctttgatttccagagctgaggcctttaactggagacctggaggggcagggcccaagggcaagggccgcattagcacaggcaatc

SEQ ID NO: 746686 - DNA, 120 bp, Artificial Sequence
  ENSG00000205084_13 (sequence is synthesized)
agggagggccgctgaaggacacttggaccgtccacctgccccagcccaacagtcagtcatctgtcatcagctcagctgagcagccctggatctttgccgtactgtgactgggctctttgc

SEQ ID NO: 746687 - DNA, 120 bp, Artificial Sequence
  ENSG00000205084_14 (sequence is synthesized)
cctatttttccctctgtctgtgcccctggatggcaggctgaagtcagaggggctgtttcattctcagccccctcagcagcactgggggaagaaagcattgtcacaacaggttctttctgg

SEQ ID NO: 746688 - DNA, 120 bp, Artificial Sequence
  ENSG00000205084_15 (sequence is synthesized)
ccctcacccaacagcctgggcacttggccctcctcctccttgacagccctcccccttcctgcaaaggacaggggcgacaggggttggtgttgggattggctcccgctgcctgacaaccac

SEQ ID NO: 746689 - DNA, 120 bp, Artificial Sequence
  ENSG00000205084_16 (sequence is synthesized)
aagtttatttggaaggctagcgggaagcccagcggctggcgtttcccttgactaaggaacagggtgcccatcagagtggggcgggcagctttgggaaggacacaagaagcagtaagagtg

SEQ ID NO: 746690 - DNA, 120 bp, Artificial Sequence
  ENSG00000205084_17 (sequence is synthesized)
agaataccaagcagtccagtggattaccctcgtggctaagcaagtgtctgcaggagcagagatggctggaaggggcctctgcacacggaagatggcttgttcagcccattcacctcctga

SEQ ID NO: 746691 - DNA, 120 bp, Artificial Sequence
  ENSG00000205084_18 (sequence is synthesized)
ggatgtgggcagtctcctccaagaacacatggagctgcttcctgatcccaagcaggtcattgccactggaaggacatggccccggtgatccatgcttcatgcccacccagaaacacaccc

SEQ ID NO: 746692 - DNA, 120 bp, Artificial Sequence
  ENSG00000205084_19 (sequence is synthesized)
ctcagtgtgtgcctcagtttactttggagatcagttgtcgtttttagtgctcctttaggcttactaaaacagttttggaaacaaagctattttgaagtattcaagcagaggaattcccta

SEQ ID NO: 746693 - DNA, 120 bp, Artificial Sequence
  ENSG00000205084_20 (sequence is synthesized)
acactgacccccttgtctttttttaatattcaggctgttttatatgcctaaatttttttcttaagatctaaacgaaaaatagtttcttgtttaaattcacataaggcaatgagatatgga

SEQ ID NO: 746694 - DNA, 120 bp, Artificial Sequence
  ENSG00000205084_21 (sequence is synthesized)
aagatgacaagatacgtataaacattggtttgcattttattaaattattctaatgcaaatcttgtataaagaacccatgatgttttgtaactttctaattaaaatgttcaaaatgaggcc

SEQ ID NO: 746695 - DNA, 65 bp, Artificial Sequence
  ENSG00000205084_22 (sequence is synthesized)
tgaggctgcagtgtgctatgattgcaccactgtactgtagcctgggtgacagagtgagaccctat

SEQ ID NO: 746696 - DNA, 120 bp, Artificial Sequence
  ENSG00000205084_23 (sequence is synthesized)
gtgacagagtgagaccctatctgttaaaataaataaataaataaataaaaaagtcaaaatggaagatcacatgtacctttttcgagggaaagggtttggaatggcaaagaatagggaggg

SEQ ID NO: 746697 - DNA, 120 bp, Artificial Sequence
  ENSG00000205084_24 (sequence is synthesized)
cagaggttgcacacacctgtctttattactcatctacagccatgctttacaaggctctgcctaacgaccttggaacttccatgaggtctttggtgaaagtcccctagttcttccccaggt

SEQ ID NO: 746698 - DNA, 120 bp, Artificial Sequence
  ENSG00000205084_25 (sequence is synthesized)
agatgagttttcagtgggattcacatgccatgtgaaatctacgtgttggataattatgactgtgtctggtgaatatgaaattatttacagaccagatgttgatagtttctgactctgaat

SEQ ID NO: 746699 - DNA, 73 bp, Artificial Sequence
  ENSG00000205084_26 (sequence is synthesized)
ttatttacagaccagatgttgatagtttctgactctgaatcacagcatagctgcaagaggtaaataaaaagca

SEQ ID NO: 746700 - DNA, 72 bp, Artificial Sequence
  ENSG00000205084_27 (sequence is synthesized)
cactccagcctagaggattttattaactcagctccgacccatagctaagttaaggtttgatgttattactga

SEQ ID NO: 746701 - DNA, 120 bp, Artificial Sequence
  ENSG00000205084_28 (sequence is synthesized)
tccgacccatagctaagttaaggtttgatgttattactgaatatttggaggcagaaagactcctgattttgccaaatgattagtacagtttcggcttaagtcagatgaggcccccctaat

SEQ ID NO: 746702 - DNA, 120 bp, Artificial Sequence
  ENSG00000205084_29 (sequence is synthesized)
attccatcatgtaaggctaataaagcaattatttcttttttttttttccttccaacttttattgtagactcatggggtatatgtatgggtttcgtatatagctaaattgtacaacctggg

SEQ ID NO: 746703 - DNA, 120 bp, Artificial Sequence
  ENSG00000205084_30 (sequence is synthesized)
atgggtttcgtatatagctaaattgtacaacctgggggtttggtgtacagattatttcatcacccacgtaataagcatagtacccagtaggtggtttttcttttctttttctttttcttt

SEQ ID NO: 746704 - DNA, 85 bp, Artificial Sequence
  ENSG00000205084_31 (sequence is synthesized)
gtgcagcagcatgatctcagctcattgcagccccctcccgagtagctgggattacgggtgcccaccaccatgcccggctaatttt

SEQ ID NO: 746705 - DNA, 72 bp, Artificial Sequence
  ENSG00000205084_32 (sequence is synthesized)
cctttggccacccaaagtgctgggatcacagcagtttgatcacagaagttattatggttggcattctggcac

SEQ ID NO: 746706 - DNA, 120 bp, Artificial Sequence
  ENSG00000205084_33 (sequence is synthesized)
agtttgatcacagaagttattatggttggcattctggcacacatctttctaatcttttttgttgtatgtaacctttttagtatcacaaacaacacttttataaaccttgtgtagaaatca

SEQ ID NO: 746707 - DNA, 120 bp, Artificial Sequence
  ENSG00000205084_34 (sequence is synthesized)
cttggcaagcagacatcatggagactatacacagacgtctcacaagggggatgactgcaaatccagtattgcttactgattttatggcatatactagtggcattattgcaataatagagg

SEQ ID NO: 746708 - DNA, 120 bp, Artificial Sequence
  ENSG00000205084_35 (sequence is synthesized)
gaattttaaaacaaaagtagaaaacattgccctacaaatcaactattttttcattcctttcattctttagccttctgcagatctttttatacagccattgtagtgtagaaacacattggg

SEQ ID NO: 746709 - DNA, 120 bp, Artificial Sequence
  ENSG00000205084_36 (sequence is synthesized)
atccaagttacttttatttatttaaacttggaatataaatacttccccacacagctacaaagctgtgatactacttttagtggcagtatagtattccttcagttagccattcagcacatg

SEQ ID NO: 746710 - DNA, 120 bp, Artificial Sequence
  ENSG00000205084_37 (sequence is synthesized)
tagaagaaactctttccaagttttttatgtattttaacaaaagtattttgactattattttaacaaataatgtgtgatcagctttgcacatgcaatttctctttccttccgaatgatttc

SEQ ID NO: 746711 - DNA, 120 bp, Artificial Sequence
  ENSG00000205084_38 (sequence is synthesized)
tttcagttctgaagcacaggataatttccaggtatcaaataatctttatagccttcaactgccagagtcaaacagccatcgtggttaatggttaatgattgcattgcagttaccaccgtc

SEQ ID NO: 746712 - DNA, 120 bp, Artificial Sequence
  ENSG00000205084_39 (sequence is synthesized)
cggtgcgtggttcccgcctgggcctggggcagagtcggggatagggtggggatggggactggaatgaggatgtggggcgagcggccccggccctggggagcccagctttgatcctaagga

SEQ ID NO: 746713 - DNA, 120 bp, Artificial Sequence
  ENSG00000205084_40 (sequence is synthesized)
ctcgcgaacccgcaaaggtggcgtttcatctcctaggacctagggaatcgatcttctgtttcattctgcttctcccagatgtccccggcccccagaaagttagccatgctgtcagcgtgt

SEQ ID NO: 746714 - DNA, 120 bp, Artificial Sequence
  ENSG00000205084_41 (sequence is synthesized)
gcgccctgacacagagtccagaagtgtgggggcagcctgtgtctgcccgggtcacacccgcgggcctggcctgatggagggtgtttgtgaaagtccatttaggagcctggaaggccgcgc

SEQ ID NO: 746715 - DNA, 120 bp, Artificial Sequence
  ENSG00000205084_42 (sequence is synthesized)
tcacaccactataggaacggaaagggcagcatttttatgcagacctgacccctggaaaccaaggcgctgattggttaagcggccttcccagaacgcgctgtggccgagtcacgcctccct

SEQ ID NO: 746716 - DNA, 120 bp, Artificial Sequence
  ENSG00000205084_43 (sequence is synthesized)
gggtttgtcccattggagactgcgccatcctgaagctgtcgggatgaaatggaagcatgttactgtctgtaatttatttatttatttttaaattttttcaccagtagagcgctgagagga

SEQ ID NO: 746717 - DNA, 120 bp, Artificial Sequence
  ENSG00000205084_44 (sequence is synthesized)
atctgtaatttagtatttgctttgagataagcgaatgcttcctttgtagtcactccttttcactcattttctgaaaacgttttcctttagaagtatgaaacttctggttttccttctttc

SEQ ID NO: 746718 - DNA, 120 bp, Artificial Sequence
  ENSG00000205084_45 (sequence is synthesized)
aaattcgaatctcttcagacatatctaagatgattgccctacaagccaaccttgtatagctgaggagaaaagaaaatcagacttgttcccagcaactaaataaaattgtttttaaaaatc

SEQ ID NO: 746719 - DNA, 120 bp, Artificial Sequence
  ENSG00000205084_46 (sequence is synthesized)
tcgtttcgtggaggagataatgcctgttgtgtacagcaagacagtgggtcattgtgtatttacagaagtgatgtggattcctcccagactcattagtgaccagggctgctgggcctgttt

SEQ ID NO: 746720 - DNA, 120 bp, Artificial Sequence
  ENSG00000205084_47 (sequence is synthesized)
ctgcgctcacgtacatcccgccgctgctggtggccttccggagccacggtgagcctgccccggccgctgtgccacgaggctccccgggcgcgctcggccagggccggcctccctaaccgc

SEQ ID NO: 746721 - DNA, 120 bp, Artificial Sequence
  ENSG00000205084_48 (sequence is synthesized)
aggtagagcccattcagccgctgctcaggactttcaagttaccaccgtcctgaatgatcccaaccccatctggctggtgggcagggccgcagatgctccatttgtgattaatgctatcat

SEQ ID NO: 746722 - DNA, 120 bp, Artificial Sequence
  ENSG00000205085_0 (sequence is synthesized)
aggaaatgctggggaggtgggggcagatcacatcaacatcctggcattgggctgggtcggcgtggagccccagaaatgttcccaagcccattcttaccaagaaccaatgagtaaaatcag

SEQ ID NO: 746723 - DNA, 120 bp, Artificial Sequence
  ENSG00000205085_1 (sequence is synthesized)
gggcctcccacctgaggtcagggaaccaggccctggagtggaacttggggtggaaaatggccttctttgtcaactgattcattctccagaattcaatttgttctccaactcggtggtgtt

SEQ ID NO: 746724 - DNA, 120 bp, Artificial Sequence
  ENSG00000205085_2 (sequence is synthesized)
tgaaagcaactttatccagacccatgtacctgaggctgatttccaggtcactaagcccgggaactggagagatgtctgtgaagggtctgccaccgtgatcctcggggtcacctcctcggt

SEQ ID NO: 746725 - DNA, 120 bp, Artificial Sequence
  ENSG00000205085_3 (sequence is synthesized)
gccctccctgccactccccaatgtcctcctgatggccaatgttacctggccccagggtccatttaccacctggagcacacctggtgacgccccagtcatcaacctcagcaggcttctccc

SEQ ID NO: 746726 - DNA, 120 bp, Artificial Sequence
  ENSG00000205085_4 (sequence is synthesized)
cctgaagtacgtggagctacgaatctacgaccggctccagcgcatcctgagggttaggacagtgaccgaaaagatctactatctgaagctccacgaaaaacacccagagattgtgtttca

SEQ ID NO: 746727 - DNA, 120 bp, Artificial Sequence
  ENSG00000205085_5 (sequence is synthesized)
attctgggtccgcttggtgaaaattctgcagaaaggcctgtccatcaccaccaaagacccgagaatcaaattcactcactgcctggtgcccaagatgcccaccaactccacagaaacaac

SEQ ID NO: 746728 - DNA, 120 bp, Artificial Sequence
  ENSG00000205085_6 (sequence is synthesized)
acctgaaaacagcctcctgtcatccccccagcccagcgagcccctcgtgctgctggcggctgagcagaccagtggcagtttctcacagctctcaggaaagccccagctcacagcagacag

SEQ ID NO: 746729 - DNA, 120 bp, Artificial Sequence
  ENSG00000205085_7 (sequence is synthesized)
gaacaatgacactgccattgaaatagacaactgcagcagctacaagataccctctccagtggcatctccaatcaatttgaatatacccatgagagctgccttgagccacagcctctggga

SEQ ID NO: 746730 - DNA, 120 bp, Artificial Sequence
  ENSG00000205085_8 (sequence is synthesized)
acaagaggactggaatgagcaccttctacaagttcatatagccagttacctaggagagcacttcttgggagcctgacacctaggcaaaacatgctcttccttgcatacgtgtacttgcta

SEQ ID NO: 746731 - DNA, 120 bp, Artificial Sequence
  ENSG00000205085_9 (sequence is synthesized)
ccacctcttataatgctccttttccactgtgagccaagtgaccttgggagaggtaagatggtgtttccaacaaggtgcttctctacttccaccaataaacttccaagtgagtccctaatt

SEQ ID NO: 746732 - DNA, 120 bp, Artificial Sequence
  ENSG00000205085_10 (sequence is synthesized)
tttgcaggttgggctatagggaggctccagtttgggaaaggactgactgagaacaggagcagtttttggaaaaataggtgggaaaagttactgtctgtgtgtacagagaactacctgaga

SEQ ID NO: 746733 - DNA, 74 bp, Artificial Sequence
  ENSG00000205085_11 (sequence is synthesized)
ggaaaagttactgtctgtgtgtacagagaactacctgagactggtagagtcttgctctgtctccaggctggagt

SEQ ID NO: 746734 - DNA, 68 bp, Artificial Sequence
  ENSG00000205085_12 (sequence is synthesized)
aagtagctgggactacaggcacacactacacctggctaagcagctcctgagctcaggccatccagtca

SEQ ID NO: 746735 - DNA, 120 bp, Artificial Sequence
  ENSG00000205085_13 (sequence is synthesized)
caggctggtctccagctcctgagctcaggccatccagtcacattggcctctcaaagggttaggattacaggcgtgagccaccaggcccagcctcgagtctgggtaatttataaagaaaag

SEQ ID NO: 746736 - DNA, 84 bp, Artificial Sequence
  ENSG00000205085_14 (sequence is synthesized)
caaaagagaagcagacctgtcctacgagtctggagcaggagaaagaaagaagtgggaggtgctatgcacttttaaacaaccaaa

SEQ ID NO: 746737 - DNA, 85 bp, Artificial Sequence
  ENSG00000205085_15 (sequence is synthesized)
agagaagcagacctgtcctacgagtctggagcaggagaaagaaagaagtgggaggtgctatgcacttttaaacaaccaaatctcg

SEQ ID NO: 746738 - DNA, 120 bp, Artificial Sequence
  ENSG00000205085_16 (sequence is synthesized)
ctccaacactggggattaaattcaacatgagatttgggcagggagacagatccaaatcatatatcagtctgctcagttgaaaccacacaatagccaagcaaagccaagaaagccagtcca

SEQ ID NO: 746739 - DNA, 120 bp, Artificial Sequence
  ENSG00000205085_17 (sequence is synthesized)
aggctggcttggaaagggcctctgaggagaaatcaactttcaaaggggcagggggaaatagaggttgagctactgcaagcccaaaataaaagaaatcctgagaaggatggtaaccagctg

SEQ ID NO: 746740 - DNA, 120 bp, Artificial Sequence
  ENSG00000205085_18 (sequence is synthesized)
ccaaaataaaagaaatcctgagaaggatggtaaccagctggaagattcctttgtgttgctccactatatcaagcaagaaattgagtctttggctgggcgcggtggctcttgcctgtaatc

SEQ ID NO: 746741 - DNA, 120 bp, Artificial Sequence
  ENSG00000205085_19 (sequence is synthesized)
attaggtcttcattgccctgtgttagtgtaaagctatgaaggctcccctggctcatacaacatttcattgctaatgaaaacatggtgaggaagatattgactgcccatcaccagaaattc

SEQ ID NO: 746742 - DNA, 120 bp, Artificial Sequence
  ENSG00000205085_20 (sequence is synthesized)
tgattaatttgactgtttcttacccagaacctaatgaaagtgaactggaagacatggcatctttgagtattgggaatggggtaggagctttggccaacctttatacacatagggaatact

SEQ ID NO: 746743 - DNA, 90 bp, Artificial Sequence
  ENSG00000205085_21 (sequence is synthesized)
gtagctgggattacaggtgtgaaccaccagtccggctaatttttgtatttttagcagactttgatctcctgacctcaggttatccaccct

SEQ ID NO: 746744 - DNA, 69 bp, Artificial Sequence
  ENSG00000205085_22 (sequence is synthesized)
ccacgcccactccaatatttaataagtatttgtcaggctcctgctaggtgctagacactgcgtttgacg

SEQ ID NO: 746745 - DNA, 120 bp, Artificial Sequence
  ENSG00000205085_23 (sequence is synthesized)
ttgtcaggctcctgctaggtgctagacactgcgtttgacgctaagtatattggagagaacaagacagacggacaagttacctgccttgagggagggtctgggagagatgccaagtcctat

SEQ ID NO: 746746 - DNA, 120 bp, Artificial Sequence
  ENSG00000205085_24 (sequence is synthesized)
tttggagacatagtgaagccattaatgttgacctgatgtctgagccacccagtctgcaaatgaaagctggaggccctgctttccagcatgtgtggttcacatcctatgtggtgcagaaag

SEQ ID NO: 746747 - DNA, 120 bp, Artificial Sequence
  ENSG00000205085_25 (sequence is synthesized)
aaagaacatggttgccctcctcttgtgcatgctcagttgggctgagcagtcaaatctggctgaattgagtcagaaaagacatctgagttaagaggatgcctgatgcttgttggttttgtc

SEQ ID NO: 746748 - DNA, 120 bp, Artificial Sequence
  ENSG00000205085_26 (sequence is synthesized)
ttgcctccagtaaaattaaaaacaagtttcctttcagtatgttacaatcaaataagctgagcattgttggtgctggtgagggacatctagaagctgaacttagaaaagactaatgtgcag

SEQ ID NO: 746749 - DNA, 120 bp, Artificial Sequence
  ENSG00000205085_27 (sequence is synthesized)
ggtgattgtacttccaaatgcatgcctgttgtcctggtatcattattaatacatacccatttcactctgagaagtgtccctcagtgaatcacaaatcatgtggccatcctatctatatgg

SEQ ID NO: 746750 - DNA, 120 bp, Artificial Sequence
  ENSG00000205085_28 (sequence is synthesized)
catacttataaacattgaaaggcttgtcatccccacttctttgtcttggtttaagccttcatcagccctcacctagactattgtattaatagtaaccccaggccaggcatggtggctcag

SEQ ID NO: 746751 - DNA, 120 bp, Artificial Sequence
  ENSG00000205085_29 (sequence is synthesized)
acagagccagattccgtctcaaaataaaataaagtaaaatagtaaccccaattggtctcccagactttatcatcatcatcatcataatagctaacatctttagaaatttgctatcttcta

SEQ ID NO: 746752 - DNA, 120 bp, Artificial Sequence
  ENSG00000205085_30 (sequence is synthesized)
agcactatgctgactttacaaagatcacataaaccacaccacaagccattgagaagtagatcttattattacattttataaatgataaaccggagccacagagaggttcaagaacttgct

SEQ ID NO: 746753 - DNA, 120 bp, Artificial Sequence
  ENSG00000205085_31 (sequence is synthesized)
taaggtcacacaggtagtaagtagcagagccaggacttgaagccagtctgtctaactccaaaatccaaattactcttgatgcctctccaatgtcttcccaactcattcccttttcatacc

SEQ ID NO: 746754 - DNA, 82 bp, Artificial Sequence
  ENSG00000205085_32 (sequence is synthesized)
gcctctccaatgtcttcccaactcattcccttttcatacctctaacagagcaactttttgacacataaatctgacagaaagg

SEQ ID NO: 746755 - DNA, 62 bp, Artificial Sequence
  ENSG00000205085_33 (sequence is synthesized)
tggtgaaaccctgtctctactaaaaatgtgaaaattagccaggtgtggtggtgaggcagagg

SEQ ID NO: 746756 - DNA, 75 bp, Artificial Sequence
  ENSG00000205085_34 (sequence is synthesized)
tccactgcgctctatatctgactgagtttcctccttaataaaaccagaccctttgacatgaaatgactagacccc

SEQ ID NO: 746757 - DNA, 120 bp, Artificial Sequence
  ENSG00000205085_35 (sequence is synthesized)
taataaaaccagaccctttgacatgaaatgactagacccctgcctctctctccagcctctccactggccactgctgccatagaatcttatgctcccaccatgccaaatttcttgtggttc

SEQ ID NO: 746758 - DNA, 120 bp, Artificial Sequence
  ENSG00000205085_36 (sequence is synthesized)
cctaaatgcgccatgtttgaagatactttgaggacattgtatatacttttgttctacctgagatacatttgcttactttctccacatattgccctcatgacacttatccttattgatgga

SEQ ID NO: 746759 - DNA, 120 bp, Artificial Sequence
  ENSG00000205085_37 (sequence is synthesized)
tttcttcaatgctactattgtgccttacatgtgccttgtattatagcatttttatagcatttctcacccaattgtggctatttgtttacatgtctgtctccttggtggaactgtgaactc

SEQ ID NO: 746760 - DNA, 120 bp, Artificial Sequence
  ENSG00000205085_38 (sequence is synthesized)
tgtcataacagatgccattttatgtcagttagacttctttggttgccagtaagagaagctgactctaatctaaaccaaaaggaattcattggacggatgtgggttggctcacaaaatcaa

SEQ ID NO: 746761 - DNA, 120 bp, Artificial Sequence
  ENSG00000205085_39 (sequence is synthesized)
agggacaactgcggagccgatcttggaatgctctgacaccagaacagctctgtgaattcagataggggtagtgaattgaccatttcatcaaatgctgcagcaagctaggtggtttcccca

SEQ ID NO: 746762 - DNA, 120 bp, Artificial Sequence
  ENSG00000205085_40 (sequence is synthesized)
aaggaaattgaggagtgttacaagaagaccattaggggaacggttatctggtggctgataataacaaatttccatggcagtctctttgctctctgttggaagaggtactccaccatgggc

SEQ ID NO: 746763 - DNA, 120 bp, Artificial Sequence
  ENSG00000205085_41 (sequence is synthesized)
cttgagcatctctacacatccttgctaagcgtgtcaaatttcaagtcctaactgtcctctgtctctggaggaggagacaggtttggttactgtttgttgtaaaaattactgagcccttca

SEQ ID NO: 746764 - DNA, 120 bp, Artificial Sequence
  ENSG00000205085_42 (sequence is synthesized)
ccatgggtgcctcagctgtatgcaaagccccttgtattgctgggggacagagcaactggtactgccatgctggtgctctggctgtttgctgttggcaataaactattctgttttggttca

SEQ ID NO: 746765 - DNA, 120 bp, Artificial Sequence
  ENSG00000205085_43 (sequence is synthesized)
gcccaagatgcccaccaactccacagaaacaacagtaagtgggcctccttccgggacctgtcgagaaataagtatatataagtatatatagccatgccctgtcacccaggctggagtgca

SEQ ID NO: 746766 - DNA, 120 bp, Artificial Sequence
  ENSG00000205086_0 (sequence is synthesized)
atggtgaggatgtccagaccattattcctcgattgggcctggagacccctctgcagcccctcccaatctctcccactgacctacggaccagaaggctggattttgcaatggaagggaact

SEQ ID NO: 746767 - DNA, 120 bp, Artificial Sequence
  ENSG00000205086_1 (sequence is synthesized)
tttcctcaggcacctctgagagggagacacactctcagccaagtacccaacaagggacatgagaaggcttctgctgtgcagctgccagagaaacaggggacagatcaaagcaggagagga

SEQ ID NO: 746768 - DNA, 120 bp, Artificial Sequence
  ENSG00000205086_2 (sequence is synthesized)
ccaacatctgcggtaaccaaagcaaggacaagttaccctgagtcagaaaccttcattgtgtatttgtgcagttacttttggaactcaagtaaaggagtttacatgtcaggttccacctga

SEQ ID NO: 746769 - DNA, 120 bp, Artificial Sequence
  ENSG00000205086_3 (sequence is synthesized)
tggggaccctgcctttcaagtcgtttgtgtgagggctgcgttggtggcccaactagccagggaagggctatggtatgcggggtcaggcgggaataggcaggaaatgtttgtgataagagg

SEQ ID NO: 746770 - DNA, 120 bp, Artificial Sequence
  ENSG00000205086_4 (sequence is synthesized)
cttcgcctcttgcaagctcctctggtttccagacccagctgcaggataagggcccaggagctgagcagggagcctcagaggaggctgctgcaagagccagctcttgggatttcagcaggc

SEQ ID NO: 746771 - DNA, 120 bp, Artificial Sequence
  ENSG00000205086_5 (sequence is synthesized)
agagttgcaatcagaggcccctggggtccctgaagaccatgcctggggatagaaacgaccctgggaacccagccagggctgccttcctttgggatcagggattttcaatcatacttcaga

SEQ ID NO: 746772 - DNA, 120 bp, Artificial Sequence
  ENSG00000205086_6 (sequence is synthesized)
gggccaaatcaatcccttaagaaaaataaaacaaaacaaaccccagctttgttaatccaagttgctgagagggtgggaagtacagacttgaccccccaggggatttcatgcgctggattg

SEQ ID NO: 746773 - DNA, 120 bp, Artificial Sequence
  ENSG00000205086_7 (sequence is synthesized)
gtcccagttggagccattcattaatgttaaccagtagaaatggaaaatggaagggtgcactgacaaaagaccaggctggaagctctgagaaggaatctatcccaaagggatcatctgctg

SEQ ID NO: 746774 - DNA, 120 bp, Artificial Sequence
  ENSG00000205086_8 (sequence is synthesized)
gggataaatagagtcatcgaacagtgtgtcatgcaggcatttgcaaagcttggtgctccttagatttccagtgtcgcctctttgcccaaggcccagtgactccaccatctgtggttgact

SEQ ID NO: 746775 - DNA, 120 bp, Artificial Sequence
  ENSG00000205086_9 (sequence is synthesized)
tggccagctcacaaaggagcaagatgtgcttcacaggaacaccccatgagcggggatgaggctacaggccacttgctattgtaccagctccccttcttaaggattagcagcttctatcta

SEQ ID NO: 746776 - DNA, 120 bp, Artificial Sequence
  ENSG00000205086_10 (sequence is synthesized)
tccctggaggctgcactgtaaatgcctgtgtaatgctaatttgtggttggcaggagattgattgggaaggagcaggacaatggcaagaggaggctgagctccctcctcctcctggtgtaa

SEQ ID NO: 746777 - DNA, 120 bp, Artificial Sequence
  ENSG00000205086_11 (sequence is synthesized)
tgtgtgtgtgtgtgtgtacgtgtgtgtacgtgtgtgtcttctgggagaaatgtagcaacaagcccacagaagagatgattattcaaagagaggaagaagatttactcaccgatgcccaga

SEQ ID NO: 746778 - DNA, 120 bp, Artificial Sequence
  ENSG00000205086_12 (sequence is synthesized)
agaggaagaagatttactcaccgatgcccagaatctgaaaggcatgtctggagtggagagatgggagtctatgaagcacaaatccagggagattttttgatgggaataagtgacaaccca

SEQ ID NO: 746779 - DNA, 120 bp, Artificial Sequence
  ENSG00000205086_13 (sequence is synthesized)
cactcttaacatattctattcattagaaccaagtccctaagtccagcccacgcttagaggaagggattacatgggaggcaagaatcactgagagccatttcggaaactgcctacacttag

SEQ ID NO: 746780 - DNA, 120 bp, Artificial Sequence
  ENSG00000205086_14 (sequence is synthesized)
aaaaacacttcaagagctcccggccaagggcctggcacatagcaagtgctcaaggaattgttacttggaccagtgactcttctaggatgtgatctaggttttcccatagtggcctgggtc

SEQ ID NO: 746781 - DNA, 120 bp, Artificial Sequence
  ENSG00000205086_15 (sequence is synthesized)
tctgctgtcccatctttattcctgttggcactgctgggttttcagcaaaggctttttcctctgacactgggaggtttgtgactaggctctctgggtgtgggccagcagacaggatagacg

SEQ ID NO: 746782 - DNA, 120 bp, Artificial Sequence
  ENSG00000205086_16 (sequence is synthesized)
ctaacttacactcttgctgtcttccgaacagcctcttcatgaccatgtgtggtcttactttgtggtcagtgtacagatattttaatttcctgctcacctgctcagaggaggatctgattt

SEQ ID NO: 746783 - DNA, 120 bp, Artificial Sequence
  ENSG00000205086_17 (sequence is synthesized)
cttcttgcatttatttttctctccggcagcctgtggacaggtatttctgtctgaccatctggtagccattcacctttatggtggcttgagaaaggaatcaatttcacttgtttctttagt

SEQ ID NO: 746784 - DNA, 120 bp, Artificial Sequence
  ENSG00000205086_18 (sequence is synthesized)
aatatctgcctcttttgacagcaagttacctttatcacctcttaaaattcttactatgttgcaccttctgttaccttgggggctctttcaatcccctaactttgtgcaactgcatctccc

SEQ ID NO: 746785 - DNA, 120 bp, Artificial Sequence
  ENSG00000205086_19 (sequence is synthesized)
tctttggtttagcttctcaggcctttctttttgcaccacggtttaatacattccatatatacttctaagtctgctggtacctctccccacccactgcctgctgagagtgacggattcttc

SEQ ID NO: 746786 - DNA, 120 bp, Artificial Sequence
  ENSG00000205086_20 (sequence is synthesized)
ctggctggaccaagtctaaagtaatcagaaaacaactgaaagaggaaagctgacccctgccctcatcctgcccctctgcagacttcttgaggccttttgtctaattgtggtgggtaatgt

SEQ ID NO: 746787 - DNA, 120 bp, Artificial Sequence
  ENSG00000205086_21 (sequence is synthesized)
gggcagggtaaaaaatggggaagatagagcaaattttctgggcaagaatgaggggagaggtgagtggagcgtcttcatctcgctctggttttgtatcatgggtgtctccagggcctactg

SEQ ID NO: 746788 - DNA, 120 bp, Artificial Sequence
  ENSG00000205086_22 (sequence is synthesized)
tctcctctgagactcctagaaagtgaggagccatggattggtatcctactaacagatggaacatcagaggcccgtggtaaggagtataataagctcagctcgccatgctctgttttgttt

SEQ ID NO: 746789 - DNA, 120 bp, Artificial Sequence
  ENSG00000205086_23 (sequence is synthesized)
ttgttggaagaagtgttgaaaaaaggagtggttatacactggcctatctagctatagaatacaaacacttagggtgagcagcagggaatgccttttctgaaaatgatgctgcatggaatg

SEQ ID NO: 746790 - DNA, 120 bp, Artificial Sequence
  ENSG00000205086_24 (sequence is synthesized)
gatgattaattccctggttaaaatgaagccagactatctttcagagtcttaagcctcctcccaataccctccacatactagtttctaattggttaatgaatatggtcactatttctaggg

SEQ ID NO: 746791 - DNA, 77 bp, Artificial Sequence
  ENSG00000205086_25 (sequence is synthesized)
gtttctaattggttaatgaatatggtcactatttctagggcctgttgctccagtgtagtggtcaagagtgtacactc

SEQ ID NO: 746792 - DNA, 88 bp, Artificial Sequence
  ENSG00000205086_26 (sequence is synthesized)
atagctaatgcatgtggggctttccactatggcacacatatacctatgtaacaaaccataccttctgcacatgtatcccagaacttaa

SEQ ID NO: 746793 - DNA, 120 bp, Artificial Sequence
  ENSG00000205086_27 (sequence is synthesized)
ggacctcctaaattctacccccaggaagccccaaactccacagcctgtggcttcacaagcttcatcctcagagcttcctacagcccattcactcattcattctttcatccaaggaatgtt

SEQ ID NO: 746794 - DNA, 120 bp, Artificial Sequence
  ENSG00000205086_28 (sequence is synthesized)
ttactagctcctgctatacaccaggcatccatgggatggcccaccctcgggatacatcagggaagaaaacatacaaagacccctacccttttggaagttatacttgagcaggcagagaca

SEQ ID NO: 746795 - DNA, 120 bp, Artificial Sequence
  ENSG00000205086_29 (sequence is synthesized)
agtcttctagaaattaacccctcatcagctgagctcctcaacagtgagtggcagcttggactcttggctgcaggcagttctcctgaaccggtcaccagggctcaggatgagctatccaga

SEQ ID NO: 746796 - DNA, 120 bp, Artificial Sequence
  ENSG00000205086_30 (sequence is synthesized)
tgcatctgtgacaatgtggctttcatcttcatcacagttgaccccgtgggaggaaagccccctttctcccacttcagcccacatctctcttcccagaacagcaaactgccacccaggagg

SEQ ID NO: 746797 - DNA, 120 bp, Artificial Sequence
  ENSG00000205089_0 (sequence is synthesized)
tataaaatgccgggttaagcggcaactcagactcaggatcccgctcacgacatggcctcgggcgctcagctcccgccgcagccgtcgagctcagaggtcagcgccgtccagagcccaggc

SEQ ID NO: 746798 - DNA, 120 bp, Artificial Sequence
  ENSG00000205089_1 (sequence is synthesized)
gggcgtcccggcgccggtctggaggaaacagccctgggcgttcctctcccgccgtctccgggggaggcccctctgccccgaagcaaccggagcaggtgccctgggacccgccagcccgga

SEQ ID NO: 746799 - DNA, 120 bp, Artificial Sequence
  ENSG00000205089_2 (sequence is synthesized)
gtgcggccccggcgcggtacggcgccagccgggaaaaccgcagacgcggtccccgccgccgccccagagcaagctccgcggccggctccacagtcccgcaagccgcgcaacctggaaggc

SEQ ID NO: 746800 - DNA, 120 bp, Artificial Sequence
  ENSG00000205089_3 (sequence is synthesized)
gctccacagtcccgcaagccgcgcaacctggaaggcgacctggacgagcgccggctgctctgccacttgcagctggcccaggaccgcgaggcgcgcctgtggcggggcggcaaaccccag

SEQ ID NO: 746801 - DNA, 120 bp, Artificial Sequence
  ENSG00000205089_4 (sequence is synthesized)
gatgaaatctgcgacgccttcgaggaagtcgtgctgtggctcctgcggcttcagaacaccttttacttctcccagtccacttttaacctggccctcaccatctttggccgcctcctgatt

SEQ ID NO: 746802 - DNA, 120 bp, Artificial Sequence
  ENSG00000205089_5 (sequence is synthesized)
tcagtgaaggtaaaagagaaatacctgcattgcgccacaattacttccttgaggctcgctgcaaaagttaatgaagaagaggagtttattccacaagtaaaagacttcacaaagcactat

SEQ ID NO: 746803 - DNA, 120 bp, Artificial Sequence
  ENSG00000205089_6 (sequence is synthesized)
ggctctgactattccccgaatgagctgctgaggatggagctggctattctggacagactgcactgggacctctatattgggacgccgctggacttcttgactatattccatgccctggtg

SEQ ID NO: 746804 - DNA, 120 bp, Artificial Sequence
  ENSG00000205089_7 (sequence is synthesized)
gtcctgagctggccccatgtgttggagctgctgcctcagaggaatccttccctccacgtcgcatccctgaccaggcagctgcagcactgtatggcgggccaccagctgctgcagttcaag

SEQ ID NO: 746805 - DNA, 120 bp, Artificial Sequence
  ENSG00000205089_8 (sequence is synthesized)
ggctccacactggccttggtcatcatcaccttagagctggagaggctcatgcccggctggtgtgctcctatatctgatctgctaaagaaagcacaggttggtgatatgcagtacagctgc

SEQ ID NO: 746806 - DNA, 120 bp, Artificial Sequence
  ENSG00000205089_9 (sequence is synthesized)
aactagcccctctgcctccaccccggggctttcagagcatagtgtgaaacctccttgcttggactaccatgagttctttggcttgttatgaatcctgtaaaaagggaaggtggctctgga

SEQ ID NO: 746807 - DNA, 120 bp, Artificial Sequence
  ENSG00000205089_10 (sequence is synthesized)
agagcaactgagaaaaagttcccaactgagcccttggaaaaaaaataaaggggagaggggaaaggcaggctgaggtcagtagaggtcagggtggtctgatagactatgaccctgtcttcc

SEQ ID NO: 746808 - DNA, 120 bp, Artificial Sequence
  ENSG00000205089_11 (sequence is synthesized)
ctttttctcctctgggcctgaagccagggagtatgaatgaatgttcaaatggcagcttgttttaccttccttctccagcaagggttggcattggcccctgggagcgctggaatatgaaac

SEQ ID NO: 746809 - DNA, 120 bp, Artificial Sequence
  ENSG00000205089_12 (sequence is synthesized)
caagaggcaggcctggctcagggctgaagggctggggctagctctgaccagttcttgctgctctacctgccagagctggccaggtccttccaacttcccaggcttatcccaaacacatat

SEQ ID NO: 746810 - DNA, 120 bp, Artificial Sequence
  ENSG00000205089_13 (sequence is synthesized)
gtggtgcttccagtcccaactaccctgcctgccactcctcacatgggacagtctctgcagatgcatttacccaaccatggctatgacttatgtcttccctttacaaggactggattataa

SEQ ID NO: 746811 - DNA, 120 bp, Artificial Sequence
  ENSG00000205089_14 (sequence is synthesized)
agtatgctttgtttaatgtaacttgagcaagctttaggcatatctttcctttgttactcttaagcaaagtggtttcagttattagtttaactagagggattttgtgctaatgaatgggta

SEQ ID NO: 746812 - DNA, 120 bp, Artificial Sequence
  ENSG00000205089_15 (sequence is synthesized)
ttataggctaacacctgtgatgggaggcacagctctgaatgctttctgttgggatgagcaggttctgaggccaagcctgctccaaccacagtgctgccaggaggaggagccggctgcctc

SEQ ID NO: 746813 - DNA, 120 bp, Artificial Sequence
  ENSG00000205089_16 (sequence is synthesized)
tctcatgctgtgctaccacagagccattctctaagcaggggagtgcagctgacaaagatgccagctggggctgtgtaagttgtgttgggggcatgaatgactgagccacacattcagagg

SEQ ID NO: 746814 - DNA, 120 bp, Artificial Sequence
  ENSG00000205089_17 (sequence is synthesized)
ttttttttttttttttggtgtgtttgtgtaaatgtgctaagccatggggtgggaggggaaagatttactaggtgcaaagtggtcaagggccagatatactataattgtctatattataga

SEQ ID NO: 746815 - DNA, 120 bp, Artificial Sequence
  ENSG00000205089_18 (sequence is synthesized)
ggtcaagggccagatatactataattgtctatattatagagttagtatacatctgtattttttcttgacacacttttgcttgttggtgctttcgttaaaattacactttaattgcttccg

SEQ ID NO: 746816 - DNA, 120 bp, Artificial Sequence
  ENSG00000205089_19 (sequence is synthesized)
cagatggagatgctgaggccatgctgctcacagcttccagtggtggccgttgagtgccctctgcctccttccttccagtgtaagtgggaccacagtgcatgaggcagaaggacatcctga

SEQ ID NO: 746817 - DNA, 120 bp, Artificial Sequence
  ENSG00000205089_20 (sequence is synthesized)
tctggacagactgcactgggacctctatattgggacgccgctggacttcttgactataaatggaaacattgtcatctaggtactttccgctcataacgatgatgtcacaaagcagacttt

SEQ ID NO: 746818 - DNA, 120 bp, Artificial Sequence
  ENSG00000205089_21 (sequence is synthesized)
cggagtggaagctcagcttggccacaggatgggcattaagcctcaagccccttacggagccatggataggaatgaaaagggttgggcaacatttgatgttccctgatggaaatttaaatt

SEQ ID NO: 746819 - DNA, 120 bp, Artificial Sequence
  ENSG00000205089_22 (sequence is synthesized)
gtttgcacttttgatcattgatataggaaaagtatggcgttttctgttctaacattaaaaaccatggtctccagttccatgccctggtggtcctgagctggccccatgtgttggagctgc

SEQ ID NO: 746820 - DNA, 120 bp, Artificial Sequence
  ENSG00000205089_23 (sequence is synthesized)
gctgtttacaacatgggatggcaaagcacaggcgtgcacacgcccttgcacatgcaccacagtgaggtgacgcacaaggctcatgacatacggaagagtgaaaaggtatcttaaatccaa

SEQ ID NO: 746821 - DNA, 120 bp, Artificial Sequence
  ENSG00000205089_24 (sequence is synthesized)
cacagttccaccagactcccacttctaaaggacattaaattaactttacaaagatttttagacggcactattatggtgagtttctcttttaaatacacactgcaaaaatatttaactttc

SEQ ID NO: 746822 - DNA, 80 bp, Artificial Sequence
  ENSG00000205090_0 (sequence is synthesized)
gagtcgagccgagccgagcgcatcgcagggaggacccgagggcggagcggagcgcggcgggccgggccgagagaccccag

SEQ ID NO: 746823 - DNA, 80 bp, Artificial Sequence
  ENSG00000205090_1 (sequence is synthesized)
ctcctccccccggccggtgccggggttgcagcgagcggcggcggacgatccagggaagcgctgacctctgcggaggcggc

SEQ ID NO: 746824 - DNA, 120 bp, Artificial Sequence
  ENSG00000205090_2 (sequence is synthesized)
ccggggggcggcgctccggcccggcccggccccgcccgatgtccatgagcgcgaacaccatgatcttcatgattctgggggcgtcggtcgtgatggccatcgcgtgcttgatggacatga

SEQ ID NO: 746825 - DNA, 120 bp, Artificial Sequence
  ENSG00000205090_3 (sequence is synthesized)
acgcgctgctggaccgattccacaactacatcctcccgcacctgcggggcgaggaccgcgtctgccactgcaactgtggccggcaccatatccactacgtgatcccgtacgacggggacc

SEQ ID NO: 746826 - DNA, 120 bp, Artificial Sequence
  ENSG00000205090_4 (sequence is synthesized)
agtcggtggtggacgcctccgagaactactttgtgacggacagtgtgaccaagcaggagatcgacctcatgctggggctgctgctgggcttttgcatcagctggttcctggtgtggatgg

SEQ ID NO: 746827 - DNA, 120 bp, Artificial Sequence
  ENSG00000205090_5 (sequence is synthesized)
gacctggctgcccaagctgtgcagcctgcgggagctgggccggcggccgcacaggcccttcgaggaggccgccgggaacatggtacacgtgaagcagaaactctaccacaatggccaccc

SEQ ID NO: 746828 - DNA, 120 bp, Artificial Sequence
  ENSG00000205090_6 (sequence is synthesized)
cagcccgcggcacctgtgagccgcacggggacttaccggggccaccgagccaaccggctgctgtacagatgtaaaagggacctcgtggacgcccgggccggcgggactggacagcagccc

SEQ ID NO: 746829 - DNA, 120 bp, Artificial Sequence
  ENSG00000205090_7 (sequence is synthesized)
tgggcccaggttgtccggggctgtggccggccgggagagtccagtggaaggtgctgtctcttctttttataaagggggttggggtgtgggctagggtgggggttgggttaggggagaccc

SEQ ID NO: 746830 - DNA, 120 bp, Artificial Sequence
  ENSG00000205090_8 (sequence is synthesized)
accctgcagttggggggcaggacacaagggcggactcatccccagcggtgctggggggcagggagggtcctggggggcagggagggtcctggggggcaggtgggggcaggggcggcgagg

SEQ ID NO: 746831 - DNA, 120 bp, Artificial Sequence
  ENSG00000205090_9 (sequence is synthesized)
cggcccgggccagcatctgtttgaaggcgctgtttcccgtgcgctgcgtccaccgtctgtctggccccagccagcttgggcggaggggaggggggcgaggggagcacccgcgtgtgcaca

SEQ ID NO: 746832 - DNA, 120 bp, Artificial Sequence
  ENSG00000205090_10 (sequence is synthesized)
gccacagggtggggtgcaggtggctgggcccaggcagcattcaggcccctggccccgcagtggcgggcactcatgtgaagcccacccctctgtggtcagtaaattctccagaaagcgcca

SEQ ID NO: 746833 - DNA, 120 bp, Artificial Sequence
  ENSG00000205090_11 (sequence is synthesized)
ggaaccagccccacgcaggccgcgagccgccttccacccttgagggctgccaggtgcgcagggggaggagctgtctcaaggtgggcgggggtctcctgggggcgcatggctttaggacgc

SEQ ID NO: 746834 - DNA, 120 bp, Artificial Sequence
  ENSG00000205090_12 (sequence is synthesized)
cagcccagtgtgatgtccacagtggagacccaagccagcctcatcagggctggggcaggaagcgcctgctggcacagggctgggccctgcactgagtccctgggcaggggaatgcaggtc

SEQ ID NO: 746835 - DNA, 120 bp, Artificial Sequence
  ENSG00000205090_13 (sequence is synthesized)
aaggcgggaagggcctgccttgaggggcactgggcaccacccccgggctggagaggagctgagggatgggctgggggggcagcggggaggtggagcttcctcaaggtcattcagattgag

SEQ ID NO: 746836 - DNA, 120 bp, Artificial Sequence
  ENSG00000205090_14 (sequence is synthesized)
gggagcgcccagaccccccgcacccaccgtgtgaccccctctgtgcacgtgtagcgatgggatcctcttggccatgcatgtttgtacgtccatgtacgaaataaacatcttctcatgaga

SEQ ID NO: 746837 - DNA, 120 bp, Artificial Sequence
  ENSG00000205097_0 (sequence is synthesized)
cacactctgcctttggacgtgagagagagcgcacctttcacttgagcttcaacatgggaaagggaaatgaagactccgatctccactgctcctccatccagtgctccactgaccagcccc

SEQ ID NO: 746838 - DNA, 120 bp, Artificial Sequence
  ENSG00000205097_1 (sequence is synthesized)
ctttccaacagatctcctttacagaaaagggctcagatgagaagaaaccattcaaagaaaaaggcaagaccgccttctcccattccagtgagaagcacatacaaaggcaaggatcggagc

SEQ ID NO: 746839 - DNA, 120 bp, Artificial Sequence
  ENSG00000205097_2 (sequence is synthesized)
ccaatccaaacaaggagaattctgaggaaaccaagctcaaggccgggaacagcactgctggatcagaaccagagtccagctcatatcgggaaaactgcaggaaaagaaaaatgagttcca

SEQ ID NO: 746840 - DNA, 120 bp, Artificial Sequence
  ENSG00000205097_3 (sequence is synthesized)
aggacagctgccaagacacagcagggaactgtccagaaaaggagtgcagcttgtcattgaataaaaaatcaagatcctccactgctgtgcacaacagtgaaatccaggagacctgtgatg

SEQ ID NO: 746841 - DNA, 120 bp, Artificial Sequence
  ENSG00000205097_4 (sequence is synthesized)
cccaccataggggacattccagggcttgcactgggcacagcaagcggcataggtctcgggccctaggagtccaaacaccgtcaattcgaaaaagcttggtgacttctgtgcgagctatgt

SEQ ID NO: 746842 - DNA, 120 bp, Artificial Sequence
  ENSG00000205097_5 (sequence is synthesized)
cagaggctgtttatcaagacctagcccaggtgtgggcacagcagatccattctccacttacctgtgagcagctgacactgctcactcggctccgggggcctctgtgtgcccaggtgcaga

SEQ ID NO: 746843 - DNA, 120 bp, Artificial Sequence
  ENSG00000205097_6 (sequence is synthesized)
ccttgtattccatggccacccaggcagcttatgtcttccctgctgagagctggcttgtcccagccacactgccaggtcctggggaatcagccctggatagagaagcccatcccttccctg

SEQ ID NO: 746844 - DNA, 120 bp, Artificial Sequence
  ENSG00000205097_7 (sequence is synthesized)
ggcaggagataactgagactgtcagtggatcagatgaggctaagctgtgagcaccctgaccctattcagcagagatgcagctctgggaatgagaacaaggatctgcttcttctcagattc

SEQ ID NO: 746845 - DNA, 120 bp, Artificial Sequence
  ENSG00000205097_8 (sequence is synthesized)
aaatgacagaacctgaagaagtcataggaaagaaacttgagcggtatactcagaatggtgagagccctgaattttgcagaccgctaagactatagacaaattttatatttcatgttagac

SEQ ID NO: 746846 - DNA, 120 bp, Artificial Sequence
  ENSG00000205097_9 (sequence is synthesized)
atttgatgccttttggatgtctgatgacagtcatgcatttctatataatcagaaaaacattagaatgtaatcgtgaatttgcatattttagattgtagaaaagtaaatataaaattatgt

SEQ ID NO: 746847 - DNA, 67 bp, Artificial Sequence
  ENSG00000205097_10 (sequence is synthesized)
aaatataaaattatgtgctccttttttgtttttttttttttttgagacagtcttgctattcctgggt

SEQ ID NO: 746848 - DNA, 120 bp, Artificial Sequence
  ENSG00000205097_11 (sequence is synthesized)
tcccaagcagctgggactacaggcatgtactgctatgcctggctaattttttttttcctgtattgttagtagagacagagttttgtcactttggccaggttggcctcgaactcaggtgat

SEQ ID NO: 746849 - DNA, 120 bp, Artificial Sequence
  ENSG00000205097_12 (sequence is synthesized)
acgtgctgggattacaggcatgagccgccttaccaagaaattgcttctcttttaatccagaaaaggttgtaggctctcactcttccagcctgaacccatggagtactaatatccacaaac

SEQ ID NO: 746850 - DNA, 120 bp, Artificial Sequence
  ENSG00000205097_13 (sequence is synthesized)
aacccatggagtactaatatccacaaaccattaatagcactccctgtgggaaaatgtctatatatttttagtttgatataattatagtaaaattactatgcaagctgtttacttttaata

SEQ ID NO: 746851 - DNA, 120 bp, Artificial Sequence
  ENSG00000205097_14 (sequence is synthesized)
ctgtttacttttaatatttctacataaaatttaagtcaagatatagtaaatggtaaatgattgtacttatttattgacctgcctcatgtttcatttcattttaaacatcctaaatttata

SEQ ID NO: 746852 - DNA, 120 bp, Artificial Sequence
  ENSG00000205097_15 (sequence is synthesized)
acatttcaattgattgtactatattgcaggatatggagatttcatcacgtactacaatacagtgtattttgttatatttgacgtatattctacttgtattttgtactgagatcatacact

SEQ ID NO: 746853 - DNA, 120 bp, Artificial Sequence
  ENSG00000205097_16 (sequence is synthesized)
catacactatttcattatctaagtgtattaattgtttggttgctttataattttcattttatgtaatgaaataaacaatgttgtttggaattttaaatttctttcatatggaatttgtat

SEQ ID NO: 746854 - DNA, 120 bp, Artificial Sequence
  ENSG00000205108_0 (sequence is synthesized)
accagaaccctgaattccgagatagagggatggttgatctcatgctaatgaagtttagaccatgttgagccctacttttgttctgtgggaagttggatatcccttatacatctatggctc

SEQ ID NO: 746855 - DNA, 120 bp, Artificial Sequence
  ENSG00000205108_1 (sequence is synthesized)
catcttcatcgttattgtaattatctggcaagtgaaaaggagccaccatgaattgagttcagaacctaaaaggagctgctgccggtgtcaccaaaaagtcaggcaaagagctagagatgc

SEQ ID NO: 746856 - DNA, 120 bp, Artificial Sequence
  ENSG00000205108_2 (sequence is synthesized)
agcatcaacagctaggagacgttcccgggaagaagctgagaagccacagaagctgctctccatcattaaaagccagggctggcttcctctggagagaagtgtgcggcgaatcctgtgtgc

SEQ ID NO: 746857 - DNA, 120 bp, Artificial Sequence
  ENSG00000205108_3 (sequence is synthesized)
agatccctgctgccaaatctgcaattctgtggctctggagattcagcaattgctggtgggtgagaacaaccagatctccctgactttatcggggccattgcagggctcctcttgcctaga

SEQ ID NO: 746858 - DNA, 120 bp, Artificial Sequence
  ENSG00000205108_4 (sequence is synthesized)
gatgctgtctacgtctagtatgtctttagatcagagtctggagtttcattcctggcacaccagagagctttcactgtcatctgtaaccccaacactgtcacaattaacagatcagaaatc

SEQ ID NO: 746859 - DNA, 120 bp, Artificial Sequence
  ENSG00000205108_5 (sequence is synthesized)
tttaacccagtcagctgcccagtcaacgtatgcagatggcatacaagattactgggctgatcacctccagctagggcaggaatttcaagtgccagatgtgctccggggcccaaacaccat

SEQ ID NO: 746860 - DNA, 120 bp, Artificial Sequence
  ENSG00000205108_6 (sequence is synthesized)
agcttcttcaaggattgagaagccaagggctccactgaaccaggaggagatgacgcagagcaaccccagccttgtccagggaaaccaaggccagcatcacttgaattcccaggtctcctt

SEQ ID NO: 746861 - DNA, 120 bp, Artificial Sequence
  ENSG00000205108_7 (sequence is synthesized)
gctgtccctgaacccagaaaccctgaaccggatgcatccaatggccttgcatatggtcctccctgcccacctgccatttctcagtcctgaagtgctgaggcttcttgaggtacatgttaa

SEQ ID NO: 746862 - DNA, 120 bp, Artificial Sequence
  ENSG00000205108_8 (sequence is synthesized)
aaaatggatgcatttccagaggtgggggctcccaagacgtgtggaggagtccctgaggcagcttatgccaaacccaccattgtattaccaacctggaaatgaccagccagtttctttcaa

SEQ ID NO: 746863 - DNA, 120 bp, Artificial Sequence
  ENSG00000205108_9 (sequence is synthesized)
cctgaagaatactcctcaggtctctcttcatagatttgagaccatttccctccagacctggtgttcatgtgtggctggccagcccatccagaccttctgggtttctgaatggtccacaat

SEQ ID NO: 746864 - DNA, 120 bp, Artificial Sequence
  ENSG00000205108_10 (sequence is synthesized)
gaacccagaacaaagacaccactgtcagcaaactccaaaccctatggctctagccttgccctctccagcccttaaagccctaagtggcccccatccacagtctgggggacaagataatga

SEQ ID NO: 746865 - DNA, 120 bp, Artificial Sequence
  ENSG00000205108_11 (sequence is synthesized)
ctcagggagtgatctccagcagaaatacagccagctattctgtgggctcccttctctgcacagtgagtccctggttgccactttcatgggatctcaaggcctccccaagattgaaaatgt

SEQ ID NO: 746866 - DNA, 120 bp, Artificial Sequence
  ENSG00000205108_12 (sequence is synthesized)
gcccaagccccccttgaaggatccttttctcttcaatgagctctccttcccccaactgctccctaaaacttcaccccagtcagccccaccctcttccccactttccccaaactggatgtc

SEQ ID NO: 746867 - DNA, 120 bp, Artificial Sequence
  ENSG00000205108_13 (sequence is synthesized)
tccatctgaccatcaacgagctcagatcaatgtcccatttctgactctggctgagtatgaagccttggagtggcacctgctacagaggcaactccagcttcagtggggctggccagctgc

SEQ ID NO: 746868 - DNA, 120 bp, Artificial Sequence
  ENSG00000205108_14 (sequence is synthesized)
cctccagaggtctcagcacacccagtgcctcatgcagcatgagccctgtggcaaagctcagtctcctgagaccacgacagcttcccagacagggaagtccatctcagtgctcaccaggga

SEQ ID NO: 746869 - DNA, 120 bp, Artificial Sequence
  ENSG00000205108_15 (sequence is synthesized)
actactcttcttcccggagcatgcccggaagctgctggaattccacatccagaaacagttgattcgccatcgctggggcctgcctcagaagatccagcagtccatccagttgctccttac

SEQ ID NO: 746870 - DNA, 120 bp, Artificial Sequence
  ENSG00000205108_16 (sequence is synthesized)
ctccactgatcagcagactgtgtccagcagcagcacagccctagccaacgtgagcatcccccagcctgtagccctagaggccaacggggcttgcgatgtgctgtcacccattgcggcccc

SEQ ID NO: 746871 - DNA, 120 bp, Artificial Sequence
  ENSG00000205108_17 (sequence is synthesized)
gcagagccacatcgactccaaatgtggacaaatccaccagggcaagatccccgcctgtgtacacaggtcctgggactgcagaatttctggggtcctggcagtggctccttttccctgcat

SEQ ID NO: 746872 - DNA, 120 bp, Artificial Sequence
  ENSG00000205108_18 (sequence is synthesized)
tccagaaagccagttcctggaactgcagacagcaagtgacccggacctgcatcacaaagttatgccctggatgccaacggcccttgatcagcagcaacaggctttaccaggtactgtcac

SEQ ID NO: 746873 - DNA, 120 bp, Artificial Sequence
  ENSG00000205108_19 (sequence is synthesized)
tgaacaccctaagctgctccgagtcttgtctgtggaagccattgagaaactggagacaactttacggcacaagcatctggccttcctgtcggggctgcctgctctgtattatgtggcgct

SEQ ID NO: 746874 - DNA, 120 bp, Artificial Sequence
  ENSG00000205108_20 (sequence is synthesized)
ccccagggccctggccccggcagtcactagccaatctgtcatcacagagatggagcctagtcccgtggaaatcccagcagagcctctgattcagatggtttcatttgaagaacagtgtat

SEQ ID NO: 746875 - DNA, 120 bp, Artificial Sequence
  ENSG00000205108_21 (sequence is synthesized)
aagtcttgggccatgccctcaaggcaacaatgagagttgtacagacgttgcaaaagagttccagcctgcagtgccagtaaaaggaacaatggagacgctgcctctagaaagccagacgca

SEQ ID NO: 746876 - DNA, 120 bp, Artificial Sequence
  ENSG00000205108_22 (sequence is synthesized)
tcctactagcccccactcactccagacacatatcttgaccaaactaaacttccacctgagaaaaaaggtcctagagatacaatggggaattcccattagggcaaggaagtccagggaaca

SEQ ID NO: 746877 - DNA, 120 bp, Artificial Sequence
  ENSG00000205108_23 (sequence is synthesized)
aactgttgcagcaccagagaacatatccacacagaagtctcttgaaagtctaaaccaccaaggggagacattgctccaggaactgcccatcccaccagacactcttcctgcccctaatcc

SEQ ID NO: 746878 - DNA, 120 bp, Artificial Sequence
  ENSG00000205108_24 (sequence is synthesized)
agaaggggttcaccttaaagaacagctggccaatgacttgaaggcagtgcagcagaaccaaaagcaatccaattccaaagctgtaccccagggttctgcccactcggtctccaagatctc

SEQ ID NO: 746879 - DNA, 120 bp, Artificial Sequence
  ENSG00000205108_25 (sequence is synthesized)
acagcccagtggggacatgacagaggcccacatgccttgtgttcaggtagaggccaatgtgaacaaacccagcctggaggaaccctgtggccctgagcctcaaagccctagcaagagcaa

SEQ ID NO: 746880 - DNA, 120 bp, Artificial Sequence
  ENSG00000205108_26 (sequence is synthesized)
ggacccagcccatgtccccatgctagcaggaaacagagaggacccagaggaaaccaaagcagccagggaccacagagaaggggatgcggggtttgggcgctcctcaaccagagaagagag

SEQ ID NO: 746881 - DNA, 120 bp, Artificial Sequence
  ENSG00000205108_27 (sequence is synthesized)
acgccctgctgaagaccagaggccagcagggatgcttccaaacaagacaccccgagggtcctggcgatggagccgtagctttcatcttgctgatccctgtcaacacagcccccagcatca

SEQ ID NO: 746882 - DNA, 120 bp, Artificial Sequence
  ENSG00000205108_28 (sequence is synthesized)
ccctcagcttaagctcccacagctacctccacgagtccctggggagaaagagtctgagaaggacctgcaagacagtcaaaccaagctaactgtcatccttgaaccagcgacaattcctga

SEQ ID NO: 746883 - DNA, 120 bp, Artificial Sequence
  ENSG00000205108_29 (sequence is synthesized)
gaatgcccagactgtgttgccccaggcttcacagggtcagcctttcctgagccaaccaactcaggctaagcctttgcagggccaaactttgcaaggccaagttttgcatgggctggtgat

SEQ ID NO: 746884 - DNA, 120 bp, Artificial Sequence
  ENSG00000205108_30 (sequence is synthesized)
gccagtccatgctcaaaagaagcccagccttacagagtctagcttcagaaataaaattaaatgttttctgcagcatattaaccccaagacaaaaggcaaagggcatgaggactccatgtt

SEQ ID NO: 746885 - DNA, 120 bp, Artificial Sequence
  ENSG00000205108_31 (sequence is synthesized)
ctcagccgctgcgaaggtggccaaaaccagaaaagaaaatgttgcaaagagcctggctccagccaagagccctgtggggagaagtaagacggagaagccgacagggtgctccaaggccca

SEQ ID NO: 746886 - DNA, 120 bp, Artificial Sequence
  ENSG00000205108_32 (sequence is synthesized)
atctcgtcctgctcagaagctggtgggcccagccttcttggatggtccccaatccctagacgataagctccggctacactccagacaacctggctctgcctcagccctgggctacccccg

SEQ ID NO: 746887 - DNA, 120 bp, Artificial Sequence
  ENSG00000205108_33 (sequence is synthesized)
ccactgccctcgtcactgtcctcgagaggcttgtgccaacaaaccagggcacccaacctagctcctgaccctcacctcagatagaaacattggtccgctcaaggagaacatgcagagcca

SEQ ID NO: 746888 - DNA, 120 bp, Artificial Sequence
  ENSG00000205108_34 (sequence is synthesized)
tgaaaaagagtttataggctccccaactgctgcagccctccagaggaccagtattgtcatttccataaatgtgcaggtgggacagatgccactagaaatacactctatatttctcagcaa

SEQ ID NO: 746889 - DNA, 120 bp, Artificial Sequence
  ENSG00000205111_0 (sequence is synthesized)
atggaaaagtatgaaaaattagctaagactggagaagggtcttatggggttgtattcaaatgcagaaacaaaacctctggacaagtagtagctgttaaaaaatttgtggaatctgaagat

SEQ ID NO: 746890 - DNA, 120 bp, Artificial Sequence
  ENSG00000205111_1 (sequence is synthesized)
gatcctgttgttaagaaaatagcactaagagaaatacgtatgttgaagcaattaaaacatccaaatcttgtgaacctcatcgaggtgttcaggagaaaaaggaaaatgcatttagttttt

SEQ ID NO: 746891 - DNA, 120 bp, Artificial Sequence
  ENSG00000205111_2 (sequence is synthesized)
gaatactgtgatcatacacttttaaatgagctggaaagaaacccaaatggagttgctgatggagtgatcaaaagcgtattatggcaaacacttcaagctcttaatttctgtcatatacat

SEQ ID NO: 746892 - DNA, 120 bp, Artificial Sequence
  ENSG00000205111_3 (sequence is synthesized)
aactgtattcacagagatataaaacctgaaaatattctaataactaagcaaggaataatcaagatttgtgacttcgggtttgcacaaattctgattccaggagatgcctacaccgattat

SEQ ID NO: 746893 - DNA, 120 bp, Artificial Sequence
  ENSG00000205111_4 (sequence is synthesized)
gtagctacgagatggtaccgagctcctgaacttcttgtgggagatactcagtatggttcttcagtcgatatatgggctattggttgtgtttttgcagagctcctgacaggccagccactg

SEQ ID NO: 746894 - DNA, 120 bp, Artificial Sequence
  ENSG00000205111_5 (sequence is synthesized)
tggcctggaaaatcagatgtggaccaactttatctgataatcagaacactaggaaaattaatcccaagacatcaatcaatctttaaaagtaacgggtttttccatggcatcagtatacct

SEQ ID NO: 746895 - DNA, 120 bp, Artificial Sequence
  ENSG00000205111_6 (sequence is synthesized)
aagacatggaaactcttgaggaaaagttctcagatgttcatcctgtggctctgaacttcatgaaggggtgtctgaagatgaatccagatgacagattaacctgttcccaactcctggaga

SEQ ID NO: 746896 - DNA, 120 bp, Artificial Sequence
  ENSG00000205111_7 (sequence is synthesized)
gctcctactttgattcttttcaagaggcccaaattaaaagaaaagcacgtaatgaaggaagaaacagaagacgccaacaggtacttccgctcaaaagttaaagtgctataaaaataattc

SEQ ID NO: 746897 - DNA, 120 bp, Artificial Sequence
  ENSG00000205111_8 (sequence is synthesized)
cttttttgtttttgtttgtctgcctttcaaagtgagacaaggtggacaccaagacctttcatttgtactggtgtagttgtatttgtctagcttaataaatattggtaattgatgtaataa

SEQ ID NO: 746898 - DNA, 120 bp, Artificial Sequence
  ENSG00000205111_9 (sequence is synthesized)
aaccatagaactatgaaaatatcaagattattgcaaaaatcttattccaaacacacctgaatcaaatcgttacgcaactctttggctgctctgattggatatcccacccacaagatcgta

SEQ ID NO: 746899 - DNA, 120 bp, Artificial Sequence
  ENSG00000205111_10 (sequence is synthesized)
tacccataatataacaacttcatataataaaatgctgattccaacaggactgagttttgccagcattgcaaaggaatccaagtgcctttctgtagcctccagatgtgcaataacggtaac

SEQ ID NO: 746900 - DNA, 120 bp, Artificial Sequence
  ENSG00000205111_11 (sequence is synthesized)
ttgactcttccatcttttcacccacagcaggcacctaagtctgcctttcctaggctttttctcaaaaccaagatctgccaggtacaaaggaatgaaacccagacatctgggaaccaaatt

SEQ ID NO: 746901 - DNA, 120 bp, Artificial Sequence
  ENSG00000205111_12 (sequence is synthesized)
ctacccaatgggccaatattgcagaacagtatggtgactgttatgacaaacattaattctgcagtttatcaggtgactgtccttcacttgctttcagaaaactttgaagttaaatcgtaa

SEQ ID NO: 746902 - DNA, 120 bp, Artificial Sequence
  ENSG00000205111_13 (sequence is synthesized)
cgtaatgaaggaagaaacagaagacgccaacagaatcaactgttgcctctcataccaggaagccacatctcccccacacctgatggaagaaaacaagtcctccagttaaaatttgatcac

SEQ ID NO: 746903 - DNA, 120 bp, Artificial Sequence
  ENSG00000205111_14 (sequence is synthesized)
caaacatttaggaaaatgttctttcaagtgcaaagtaatttaatatgtacacattttgtacaagtgagataggaattctcagtgtttcaaatgcaaatgagccatatgaaaattaagatg

SEQ ID NO: 746904 - DNA, 120 bp, Artificial Sequence
  ENSG00000205111_15 (sequence is synthesized)
ccttctagaattgttttgctctgatcattgctgattcctttccccatgttttacatgccaactttatcttttagaatattttctttaaatgttataaagcctaaaactgcacatatggaa

SEQ ID NO: 746905 - DNA, 120 bp, Artificial Sequence
  ENSG00000205111_16 (sequence is synthesized)
gagacattttcaatttcatcagagcagcccctcccgaggctatctatatggagaatttgtgagcttatactttgatttatgaaaaagatttacatgtgtcatcttgcttcagctgaccac

SEQ ID NO: 746906 - DNA, 120 bp, Artificial Sequence
  ENSG00000205116_0 (sequence is synthesized)
atgagtgagcaggggagggagacggaggaggaggaggggggaggtggtgcttccgacacagcgcccatgctgccccggggacctcccgaccaccaggcctcagccctgacgtgcccaggg

SEQ ID NO: 746907 - DNA, 120 bp, Artificial Sequence
  ENSG00000205116_1 (sequence is synthesized)
gcccccgctgctgcccggccggctgctggccgggctcctgctgcacctcctgctgcccgccgcagccttcctgctggtgctcctgcccgcggccgccgtcgtctacctgggattcctgtg

SEQ ID NO: 746908 - DNA, 120 bp, Artificial Sequence
  ENSG00000205116_2 (sequence is synthesized)
tcgagggtccaccccgctccgggtccccggtgccgcgcgctgttctcagaccgcggctccgcggcgctcatcgtgttcgggcttctctcgctgccgccgctgctggtgctcgcctcggcc

SEQ ID NO: 746909 - DNA, 80 bp, Artificial Sequence
  ENSG00000205116_3 (sequence is synthesized)
ctccgcccgctgggacccccggaccccgccgccccccggggcgccccgacgaggacgagcaactctgcgcctgggtgtga

SEQ ID NO: 746910 - DNA, 120 bp, Artificial Sequence
  ENSG00000205126_0 (sequence is synthesized)
tctctttctccataggtgccaggcagccttcagaggccagtaaagatacccggagtatgagtcatcggtcagacacccttcctgtgccctctggtcagaggagaggccgggtccccagag

SEQ ID NO: 746911 - DNA, 120 bp, Artificial Sequence
  ENSG00000205126_1 (sequence is synthesized)
accacagcatctatacccagctgttggagataacgctgcacttgcagcaggccatgacggagcacttcgtgcagctgacgagcagacagggcctgtcgctggaggaaaggaggcacactg

SEQ ID NO: 746912 - DNA, 120 bp, Artificial Sequence
  ENSG00000205126_2 (sequence is synthesized)
aggccatctgtgagcatgaagcccttctgagtcgcttaatatgccggatgatcaacctcctacagtctggggccgcgagtggcctggagctccaagtgcctcttccttctgaggactcta

SEQ ID NO: 746913 - DNA, 120 bp, Artificial Sequence
  ENSG00000205126_3 (sequence is synthesized)
ggggtgatgtcagatatgggcagagggcccaactctctgggcagcctgatccagttccccaactgagtgattgtgaagctgcctttgtcaaccgcgacctatccatccgtgggattgaca

SEQ ID NO: 746914 - DNA, 120 bp, Artificial Sequence
  ENSG00000205126_4 (sequence is synthesized)
tctctgtcttttatcagtcgagcttccaggactacaatgcctaccaaaaagataaatatcataaggacaagaacaccttgggtttcattaaccttggcaccagtgagaacaagctctgca

SEQ ID NO: 746915 - DNA, 120 bp, Artificial Sequence
  ENSG00000205126_5 (sequence is synthesized)
tggatctgatgactgaaagattgcaagaaagtgacatgaactgcattgaggacaccttgcttcagtaccctgattggagagggcagccattcctgcgggaagaagtggcccggttcctga

SEQ ID NO: 746916 - DNA, 120 bp, Artificial Sequence
  ENSG00000205126_6 (sequence is synthesized)
cctactactgcagggcacctacccgacttgacccagaaaatgtggtggttctaaatggctgctgctctgtcttctgtgccctggccatggttctgtgtgatccaggcgaggccttcctgg

SEQ ID NO: 746917 - DNA, 120 bp, Artificial Sequence
  ENSG00000205126_7 (sequence is synthesized)
ggctttgcctttagctcccgcctgtatgcaaaggttgagttgattcctgtccacctggagagtgaggtcactgttacaaacacccatcctttccagctcactgtggacaagttagaggaa

SEQ ID NO: 746918 - DNA, 120 bp, Artificial Sequence
  ENSG00000205126_8 (sequence is synthesized)
gccctgcttgaagctaggcttgaggggaaaaaggtccgaggccttgtgctaatcaaccctcagaatcctctgggtgacatctactccccagactcactgatgaaatacctggaatttgcc

SEQ ID NO: 746919 - DNA, 120 bp, Artificial Sequence
  ENSG00000205126_9 (sequence is synthesized)
aagaggtataacctacatgtgatcatagatgagatttacatgctgtctgtgtttgatgaatccatcacattccacagcattctgagcatgaaaagtttgcctgatagcaacaggacccat

SEQ ID NO: 746920 - DNA, 120 bp, Artificial Sequence
  ENSG00000205126_10 (sequence is synthesized)
gtgatctggggtaccagtaaggattttggcatctctggcttccgctttggtgctctgtatacccacaacaaggaggtggcctctgctgtgagtgcctttggctacctccacagtatttct

SEQ ID NO: 746921 - DNA, 120 bp, Artificial Sequence
  ENSG00000205126_11 (sequence is synthesized)
ggcatcacccagcacaagctgtgtcaactgctccagaacacagaatggattgacaaagtatacctacccaccaattgctaccggctccgggaagctcacaagtacatcactgctgagctg

SEQ ID NO: 746922 - DNA, 120 bp, Artificial Sequence
  ENSG00000205126_12 (sequence is synthesized)
aaggcattggagatcccttttcacaaccgcagctctggcctctatgtctggatcaacttgaaaaagtacctggatccctgtacatttgaagaagaacggctcctctattgccgcttcctg

SEQ ID NO: 746923 - DNA, 120 bp, Artificial Sequence
  ENSG00000205126_13 (sequence is synthesized)
gacaacaagctattgttatcccgtggcaaaacctacatgtgtaaggagccaggctggttctgcctcatctttgcagatgagctcccccggctaaaattggctatgcgtcggttctgtgat

SEQ ID NO: 746924 - DNA, 120 bp, Artificial Sequence
  ENSG00000205126_14 (sequence is synthesized)
gtgctgcaggagcagaaggaggctttgatagtgaagcagttggaggatgcaatgagggagtaggccgtctgcctcccaaccagcagttccagcccatcacttgctcagggaccccctaat

SEQ ID NO: 746925 - DNA, 120 bp, Artificial Sequence
  ENSG00000205129_0 (sequence is synthesized)
agtaccaccaccagacgccaccatgcctgcggaaggaggaaaaacggacatggaaaggattggcctctttagtgagatggaatatattactgtgggtgataaatatgtgtcacaatttaa

SEQ ID NO: 746926 - DNA, 120 bp, Artificial Sequence
  ENSG00000205129_1 (sequence is synthesized)
tcgaccctttaatgaggctgcaagcaaaaataaacagatgctacctggagggtccaaagaaatgtcagatcttcaggcaggttattttgatccccattttgtaaggatttttgaaggtga

SEQ ID NO: 746927 - DNA, 120 bp, Artificial Sequence
  ENSG00000205129_2 (sequence is synthesized)
aggctacataaatctgaatcaagtgaggagacgggatatggtggaagcagccaaaaaaaatctaggcaaagcattcctccctagtaatggagagaaaaagccatgtggcttaggaagcta

SEQ ID NO: 746928 - DNA, 120 bp, Artificial Sequence
  ENSG00000205129_3 (sequence is synthesized)
ctatggaacaataggtggtccagtcccatttttcagcgcacagtcaaaacctcgagaaaaatacaaggcacctggaaagaatttatacacaaacccgggaaagaaaggaactggatatgg

SEQ ID NO: 746929 - DNA, 120 bp, Artificial Sequence
  ENSG00000205129_4 (sequence is synthesized)
tgcagcaaaactaaagtataagaaagcgaatgaagagcaccatcgtttacttaaaggagcaccatttaagttaaatcttcacccaagggactattttgacgctaatccttatttttctga

SEQ ID NO: 746930 - DNA, 120 bp, Artificial Sequence
  ENSG00000205129_5 (sequence is synthesized)
ggaatctttaccaccaattaaaaaagaagagaagaagaaaacaatttcaaatacttttaaaccgtcttctcctggtaaaaagcctggtggaatgaaggcaggaacatttgatccttaccc

SEQ ID NO: 746931 - DNA, 120 bp, Artificial Sequence
  ENSG00000205129_6 (sequence is synthesized)
atcacattctgctgacccttatgtggctaaattggcaaatatttctggcaaagatgataagattttccacccaccaagtggaccaaaaagcagaccagttgaaagtataatgactttgaa

SEQ ID NO: 746932 - DNA, 120 bp, Artificial Sequence
  ENSG00000205129_7 (sequence is synthesized)
tgtcagaagggcactaaattcaaagaactacaagacttcttcagtaccatcctattagcaactggaagacaagtagctttctagatcttaactatgagtaattcactatcaagagctaat

SEQ ID NO: 746933 - DNA, 120 bp, Artificial Sequence
  ENSG00000205129_8 (sequence is synthesized)
tatttgaaaaaatataagatgttatggagcagatagctcaagcagttaaaagaaattctgcaactctaattctcttccttattttaatactactagttaataaatagtatttgctaataa

SEQ ID NO: 746934 - DNA, 120 bp, Artificial Sequence
  ENSG00000205129_9 (sequence is synthesized)
cgtgcagaggcgctgcgcagcccaggcgtgtcgcgcgcttgggaaccctcgccgctcccgcagcgcagttaacgtggacaagctggggcaacctggacgagctggggcaacctgatctcg

SEQ ID NO: 746935 - DNA, 120 bp, Artificial Sequence
  ENSG00000205129_10 (sequence is synthesized)
cgctcccgcagcgcagttaacgtggacaagctggggcaacctggacgagctggggcaacctgatctcggctgtcggagtgggtgtcctcaagaaaggactttgctataaaacacgtgacc

SEQ ID NO: 746936 - DNA, 120 bp, Artificial Sequence
  ENSG00000205133_0 (sequence is synthesized)
gtcccgcccctgcccctgagtgacagaaccgtggacagcaacatttcccacaggacacgaagtttgtcggcccttgccttggcagagctgagtaagaaaaatcaccaagaatattatttt

SEQ ID NO: 746937 - DNA, 120 bp, Artificial Sequence
  ENSG00000205133_1 (sequence is synthesized)
tggtatttggaattgaatttgccaggaatgcaagcactgctacctaactaaagaccttggctttggaaacatcttaccccttggcagctctccagagtttagacttggcagcatcaaaga

SEQ ID NO: 746938 - DNA, 120 bp, Artificial Sequence
  ENSG00000205133_2 (sequence is synthesized)
cacaacgcaagcaatatgaaacagaaaaacaagttggttggatagctgtcctccatgcagtcattcatgatccaggctgtcatcatcttcatcactcatgttcagagttaccctagaggt

SEQ ID NO: 746939 - DNA, 120 bp, Artificial Sequence
  ENSG00000205133_3 (sequence is synthesized)
catctccatttcatccagataaatgagtatgcaaggaacgtttttataggcattttggagatcaaagatgggtagaaaagatgctgctactataaaacttcctgttgatcagtacagaaa

SEQ ID NO: 746940 - DNA, 120 bp, Artificial Sequence
  ENSG00000205133_4 (sequence is synthesized)
acaaattggtaaacaggattataaaaaaactaaacctattttacgagcaaccaaattaaaagcagaagcaaagaaaacagcaataggcataaaggaagttggccttgtacttgcagctat

SEQ ID NO: 746941 - DNA, 120 bp, Artificial Sequence
  ENSG00000205133_5 (sequence is synthesized)
attggcactactactggctttctatgctttcttttatctcagactcaccacggatgttgaccctgatctggaccaagatgaagattagctaagcaacaatcaatgcatgaaagagaaata

SEQ ID NO: 746942 - DNA, 120 bp, Artificial Sequence
  ENSG00000205133_6 (sequence is synthesized)
atactgaaactgtaacatctttaattctttctgctaatattttcagtttgcagacatatgatttttgatagttgcataggatgtcaggaaaagaaccttacctagcaatgcagtatagta

SEQ ID NO: 746943 - DNA, 120 bp, Artificial Sequence
  ENSG00000205133_7 (sequence is synthesized)
tgtgctactggatacttttatatatctttctgctttgacagccaccctatacatggtacatttagatgaaatgggaaccagatcctaaatttttcaaatgtcattgccaatttatgtgta

SEQ ID NO: 746944 - DNA, 120 bp, Artificial Sequence
  ENSG00000205133_8 (sequence is synthesized)
taattccatcacttcctgatgagtaagtctatttttgttctatatacatcataagttagtatatattcttatttacagaaacatgctcaaatcacattcagaaagaacaaaaagtcatgg

SEQ ID NO: 746945 - DNA, 120 bp, Artificial Sequence
  ENSG00000205133_9 (sequence is synthesized)
gaaattttttattttacaacaaagccctgctttctttctggacgtattttacatcattagagagactatctgcacatacatctaccataatctttttccttctttgccaactgttcagtg

SEQ ID NO: 746946 - DNA, 120 bp, Artificial Sequence
  ENSG00000205133_10 (sequence is synthesized)
cacatgtgctgcatcagaaatggcacctggatgacagaagctcaaagagtcacatatgtctctaaaatagagttcttttcctcttgggctgtctgaactggtgtaaatagaagctcagtt

SEQ ID NO: 746947 - DNA, 120 bp, Artificial Sequence
  ENSG00000205133_11 (sequence is synthesized)
gatcttggttttaattaacttattactctattaatataaccttggaattctattctaattatgttgttctggctgcttgtagtatcagttcgcccctcttgttagggagatatgtaacaa

SEQ ID NO: 746948 - DNA, 120 bp, Artificial Sequence
  ENSG00000205133_12 (sequence is synthesized)
tctgtcatttaattgagcagtctttttcacataacagtaatagcaaaaatcctacctactcagaatcatcttcttaggttgtctcctaaatctgaacaatacagttgttttataaaatta

SEQ ID NO: 746949 - DNA, 120 bp, Artificial Sequence
  ENSG00000205133_13 (sequence is synthesized)
tatttcatatgtaattatctgttgatataatttttcaatgtattttgtatttgtgggagcataatgacctgtacattcaatatttttactggtaattcaatttttaaatatgtttttaca

SEQ ID NO: 746950 - DNA, 120 bp, Artificial Sequence
  ENSG00000205133_14 (sequence is synthesized)
atagaaaatgaaattgttggaaacatgtgcacaaagtgttttatattatatacattgtatttatgaagaataaataaaatattaagattgttttcctgctagccaagagaagaaatcctt

SEQ ID NO: 746951 - DNA, 120 bp, Artificial Sequence
  ENSG00000205133_15 (sequence is synthesized)
gggaaatatctaaggagtatatggggctttataagcactgtttctaaaagatattctctggtacttttgcaaaaagtcgactgtgactgtgtagcattatgttctgtagaatttttttca

SEQ ID NO: 746952 - DNA, 120 bp, Artificial Sequence
  ENSG00000205133_16 (sequence is synthesized)
agtagcataatttatttcattggtgtgaaaacagccaaaggttccaatatcctcacaaatcatttatgccaaacatctgagggcaaaatttagccggtgttatttactagattcttccct

SEQ ID NO: 746953 - DNA, 120 bp, Artificial Sequence
  ENSG00000205133_17 (sequence is synthesized)
ttgaactcacagactcaagagacagaccaagagttcttatatactcaccacagcggaccaatccaagtggcatttttaggaaaggttgcagcatttaatgccatgtggtatgtctgttcg

SEQ ID NO: 746954 - DNA, 120 bp, Artificial Sequence
  ENSG00000205133_18 (sequence is synthesized)
tcaagtgggtggcaagggaatatccaagctggcattttggatatgatgggccttttactttcctgagtgacatgccacatgtcaagaaatactgctccccacccccccactcccatcaca

SEQ ID NO: 746955 - DNA, 120 bp, Artificial Sequence
  ENSG00000205133_19 (sequence is synthesized)
tttacgtgaacaattttcatttagttatttcccgttccatatggtgttaaaacagtcgtattaaataaagattatttctagttttcagtggtaatttaaatgagaggatatgtaataatt

SEQ ID NO: 746956 - DNA, 120 bp, Artificial Sequence
  ENSG00000205133_20 (sequence is synthesized)
gcttattagatacttatccaaatgaaatataacagagtttacagtacttaaaatggctggttatggtcttggaaatgtttgaaaattcattatcctgaaaaaaactttaccattctgttt

SEQ ID NO: 746957 - DNA, 120 bp, Artificial Sequence
  ENSG00000205133_21 (sequence is synthesized)
tacccttgaggtattttttggggaaaaatgtttttgataactattaatctaaatatagtataattataggcaaatttcactgcctagttttattgatatcctgagtctacagctagtcca

SEQ ID NO: 746958 - DNA, 120 bp, Artificial Sequence
  ENSG00000205133_22 (sequence is synthesized)
ttcgtatgactgattgatttatgatagctccagagaaccataaatttcaaaggctaaactctctgattttagtaaatagtaggtaaagtgacacaatatatgtttacacaacactgtttt

SEQ ID NO: 746959 - DNA, 120 bp, Artificial Sequence
  ENSG00000205133_23 (sequence is synthesized)
catgaaatgcaaactttgcaaaactcacattaactgggaagcagccaaccctctgtagagaaatcccagattgggagtctggtttgaatctttgaagacagaaaggtgatatccggcctg

SEQ ID NO: 746960 - DNA, 120 bp, Artificial Sequence
  ENSG00000205133_24 (sequence is synthesized)
ctgttttaaagggaccacacttttgaatacctactggtgtttggcagaaatctgagactggcaccagacacaaattttagacatgggtatcttccctccagtaattcactgctcagagta

SEQ ID NO: 746961 - DNA, 120 bp, Artificial Sequence
  ENSG00000205133_25 (sequence is synthesized)
atttagaagacaaaaacagaaaaaattgtaatgattttttaagtgttagaatatgtttgttaacatactctgcaaaataaatttcaactaatgcaatagacttaaaatatagcctatgga

SEQ ID NO: 746962 - DNA, 120 bp, Artificial Sequence
  ENSG00000205133_26 (sequence is synthesized)
atactgtgattgaagtttgaaggcttgctggttcttattttgcatgcaagtttagacagggtaaagaatgtataaatttatttgagatgagatacagtattgtaaaaatataacctcatc

SEQ ID NO: 746963 - DNA, 120 bp, Artificial Sequence
  ENSG00000205133_27 (sequence is synthesized)
tagaattgcttttaaaacaagcaaaagcctattttagtacaaatgtagggtgggtagttgttttaaggtagcaaaatacttcaagattttctatctttttaatttttcatgaagacagaa

SEQ ID NO: 746964 - DNA, 120 bp, Artificial Sequence
  ENSG00000205133_28 (sequence is synthesized)
gaaatactttcaccccaaccaatgactgtaagatcttgagagtatgttcttactcatttctgtaattgcagtagtgtagtcatctgcatataaatttaataaatgcatgttaaaatttaa

SEQ ID NO: 746965 - DNA, 120 bp, Artificial Sequence
  ENSG00000205133_29 (sequence is synthesized)
ggtgtgcggctggcttgtcccgcccctgcccctgagtgacagaaccgtggacagcaacatttcccacaggacacgaagtttgtcggcccttgccttggcagagctgaggcattttggaga

SEQ ID NO: 746966 - DNA, 120 bp, Artificial Sequence
  ENSG00000205133_30 (sequence is synthesized)
tttgtcggcccttgccttggcagagctgaggtgtgtgtccggcgagtgcgaggggattggggagaccctgcccgggaagctcggggtccgggaatgaaagcgggcgcacctctttagcga

SEQ ID NO: 746967 - DNA, 120 bp, Artificial Sequence
  ENSG00000205133_31 (sequence is synthesized)
gccctaaagcgtttgggagacgatcgttccgtccctgggagcggcacttggtggggctgggcggagggaggctctgcaagagaaacccggagtccgggaaacccagtagtaagaaaaatc

SEQ ID NO: 746968 - DNA, 120 bp, Artificial Sequence
  ENSG00000205133_32 (sequence is synthesized)
ttgtttttttctggcaatgaacctgggttccaagcataggtttttcttatggaaggcagttttacaataaggaaatgtttttacttgtatttattttgtgatatttcagcaaatccaaat

SEQ ID NO: 746969 - DNA, 120 bp, Artificial Sequence
  ENSG00000205133_33 (sequence is synthesized)
aaatgtagtaacatttataaagctatacatttataactgatttatttgttaaatatttagtattatcaattgtctgttaaagatttgttgctacattaaatgcttggtctgtcttgatgt

SEQ ID NO: 746970 - DNA, 120 bp, Artificial Sequence
  ENSG00000205133_34 (sequence is synthesized)
cacaacgcaaggtagtgaatgaataaagtattgacttctgaagtgttatctctgctgggatgttggcttaaatgactagaaaggaattgggggaagcataatgagtaaccattttggcag

SEQ ID NO: 746971 - DNA, 120 bp, Artificial Sequence
  ENSG00000205133_35 (sequence is synthesized)
atagcctcagtgatttgctttaagaaaaaattaagcatagtctgtaaaggcaaaaaacaaaactaaattgaaaagggaataatatcttgagtgtttattcatttaatccaacttctctcc

SEQ ID NO: 746972 - DNA, 120 bp, Artificial Sequence
  ENSG00000205133_36 (sequence is synthesized)
taaaatggagtggtatcttccctagccacacacaattaagattaaaataacttgattcctatttacaattaataaatgcaaaatactatgcaaataggattgctatatgaataaattata

SEQ ID NO: 746973 - DNA, 120 bp, Artificial Sequence
  ENSG00000205133_37 (sequence is synthesized)
gcaacattgcagcaatctgacttattttgttgtcatgtctcctgaccacatctggaagggttatctacttttgaagacacatccagataattcaggacaatctgtccattttgaggttct

SEQ ID NO: 746974 - DNA, 120 bp, Artificial Sequence
  ENSG00000205133_38 (sequence is synthesized)
gtgtgcggctggcttgtcccgcccctgcccctgagtgacagaaccgtggacagcaacatttcccacaggacacgaagtttgtcggcccttgccttggcagagctgaggtttacagtgcaa

SEQ ID NO: 746975 - DNA, 120 bp, Artificial Sequence
  ENSG00000205133_39 (sequence is synthesized)
gcccttgccttggcagagctgaggtttacagtgcaaacccccaggaaggaagcttgtgctgcttgttaacattgggaggagcattggcctacaagctggagtgcaatggcgctatctcag

SEQ ID NO: 746976 - DNA, 76 bp, Artificial Sequence
  ENSG00000205133_40 (sequence is synthesized)
ggtgagccaccgcgtctggccaaaattgtacttttgagatgaacattaaatccataaactttctcatctatcgagg

SEQ ID NO: 746977 - DNA, 120 bp, Artificial Sequence
  ENSG00000205133_41 (sequence is synthesized)
agatgaacattaaatccataaactttctcatctatcgaggtccgttttggacaaagaaaagctgattatttttagtacatgccactggaatatcattacttgatacttagaactgttttt

SEQ ID NO: 746978 - DNA, 120 bp, Artificial Sequence
  ENSG00000205133_42 (sequence is synthesized)
aaagaaaacagcaataggcataaagtctactttttttttcttcccaggaagttggccttgtacttgcagctatattggcactactactggctttctatgctttcttttatctcagactca

SEQ ID NO: 746979 - DNA, 120 bp, Artificial Sequence
  ENSG00000205133_43 (sequence is synthesized)
tttttcctgcttcctcttattaatgaacgagtatttgcataccaaaacatttgcagagaagagattcagacaggattaggtggctttatcggtggtggtgaggttgtggggcgggggtat

SEQ ID NO: 746980 - DNA, 120 bp, Artificial Sequence
  ENSG00000205133_44 (sequence is synthesized)
ttttcttggagcttggtgtattcctgaatccatcagatgttggtgtccgcgtggatgactaggaaaaggggattggagattaggtttcttctacttggagttctctgctgcttgtttgag

SEQ ID NO: 746981 - DNA, 120 bp, Artificial Sequence
  ENSG00000205133_45 (sequence is synthesized)
cttaataagcctcctgaagaagttgaagcaatttattgctagaggagccccaatgtataatctccctttcattctctactgtggagaggtgtgctaaacctgtagagctgtttttgcttc

SEQ ID NO: 746982 - DNA, 120 bp, Artificial Sequence
  ENSG00000205133_46 (sequence is synthesized)
actcggctcatacttaatgatcaacaagtatggtgtgagatggtaacctcagataaccattttaaatctgcctttgtttgctcatatactctgtctcctaatgattcagcacaacaaaca

SEQ ID NO: 746983 - DNA, 120 bp, Artificial Sequence
  ENSG00000205133_47 (sequence is synthesized)
cctgcatattaagtaataaacagattaatatcatcataaaatatcatttactcagcaatatttcttagtaaattgatacatccatttttcttatgtattgtggagagaggaaatatgaca

SEQ ID NO: 746984 - DNA, 120 bp, Artificial Sequence
  ENSG00000205133_48 (sequence is synthesized)
taaaatggaagaatatgggcctctgtttatctctgacctcatcgcttactgttctttcccactcctcactctactcaaagcctttaaatagctctccattttactcaacatcaaatctaa

SEQ ID NO: 746985 - DNA, 120 bp, Artificial Sequence
  ENSG00000205133_49 (sequence is synthesized)
ataaagctcttaaactggtctaaatgtctctacagtacttgaacctttgttatttctctaatttcatcttcaactctgctcatcgttattctcttgccctgggcatactgcctccctttt

SEQ ID NO: 746986 - DNA, 120 bp, Artificial Sequence
  ENSG00000205133_50 (sequence is synthesized)
tgttctctgaacgtgccaggcattttctcatctcagaatttttgcacttgctattctttctactgaattgctcttcatccatatatagcaattgtatgaccaatttccttacttttcttt

SEQ ID NO: 746987 - DNA, 120 bp, Artificial Sequence
  ENSG00000205133_51 (sequence is synthesized)
tggtcgttattaaaatttcaccttctaaatggagtcttacctgatgaccatccaaagctttatattctttctttgctctataatttttatcactatctattaaactatatatttacactt

SEQ ID NO: 746988 - DNA, 120 bp, Artificial Sequence
  ENSG00000205138_0 (sequence is synthesized)
ctttggcctttgctggctgtgtggcggctccgcggttcgcaggtcgttcgctgagcgtctctgcttagccgcggtcatgagccggcacagccggctgcagaggcaggttctgagcctgta

SEQ ID NO: 746989 - DNA, 120 bp, Artificial Sequence
  ENSG00000205138_1 (sequence is synthesized)
ccgcgatctgctgcgcgccgggcgtgggaagccgggcgccgaggcgcgagtgcgggcagagttccggcagcatgcgggcctgccgcggtccgacgtgctgcgcatcgagtacctgtaccg

SEQ ID NO: 746990 - DNA, 120 bp, Artificial Sequence
  ENSG00000205138_2 (sequence is synthesized)
ggcgccagctgcagctgctacgctcgggccacgccaccgccatgggcgccttcgtacgcccgcgggccccgaccggggagcctggcggcgtgggttgccagcctgacgacggcgacagtc

SEQ ID NO: 746991 - DNA, 120 bp, Artificial Sequence
  ENSG00000205138_3 (sequence is synthesized)
cgacagtccaaggaacccccacgacagcacgggggcaccggagacccgccccgacggacggtgacaggcgaagagccgaactcgctcgatggcgtggtggagccaggaggctcgcctgac

SEQ ID NO: 746992 - DNA, 120 bp, Artificial Sequence
  ENSG00000205138_4 (sequence is synthesized)
gtcttaagagactagcttgacgaattggggatgtcagagactcctccttggcgacgcagggggcctagagagccccgtgatggacggcaagggaggcccgccttttccgatgcttggaga

SEQ ID NO: 746993 - DNA, 120 bp, Artificial Sequence
  ENSG00000205138_5 (sequence is synthesized)
caggtcggtgctcctcccccatgagggcttggggcggcctgggacgctggcgggctggacagtgtcaagccaagagctacttgcccgaaggtacggggagccaggacgacccccggtgga

SEQ ID NO: 746994 - DNA, 120 bp, Artificial Sequence
  ENSG00000205138_6 (sequence is synthesized)
cagggagagcctgagacgcccttctcttgacccctgagaacatacccacttctggctcctcaaggagtctcccctctcctgtatttaactctgagaagtgcagactttttgctgagaacg

SEQ ID NO: 746995 - DNA, 120 bp, Artificial Sequence
  ENSG00000205138_7 (sequence is synthesized)
ttttgggaaggtgccctgatgagcggtgagaagcccggaatccccttctggaaaactttcccccattaattgtgacaagccaggaccatgaggaaggggtaggggtctatcaccctggtt

SEQ ID NO: 746996 - DNA, 120 bp, Artificial Sequence
  ENSG00000205138_8 (sequence is synthesized)
gatcaactgaagacccccaaaggcccctacttgatggttttgaggggcaacattgactcatttgccccttccctctcggaatgttggacaaagggaataaaattggggatatgtctactt

SEQ ID NO: 746997 - DNA, 120 bp, Artificial Sequence
  ENSG00000205143_0 (sequence is synthesized)
gcggccctttcctcggggtcccgcctggtaccagggaccccctcagctgggggactgcgcctggaagctgtcatggaggccctgcagaagcagcaggcagctcggctggcccagggggtg

SEQ ID NO: 746998 - DNA, 120 bp, Artificial Sequence
  ENSG00000205143_1 (sequence is synthesized)
gggccattggcccctgcatgcccgctgctgccaccgcagcctcccctgcctgaccaccggaccctacaggcccctgagggggccttggggaatgttggggctgaggaagaggaagatgct

SEQ ID NO: 746999 - DNA, 120 bp, Artificial Sequence
  ENSG00000205143_2 (sequence is synthesized)
gaagaagatgaggagaagcgggaggaagccggggcagaggaggaggcagctgaggagagccgtccaggggcccagggccccagctcgccttctagccagccccctggactccatccccac

SEQ ID NO: 747000 - DNA, 120 bp, Artificial Sequence
  ENSG00000205143_3 (sequence is synthesized)
gagtggacctacgaggaacaattcaagcagctgtatgagctcgatgcagaccccaagaggaaggaatttctggatgacctgtttagcttcatgcaaaagagggggacgccagtgaaccgc

SEQ ID NO: 747001 - DNA, 120 bp, Artificial Sequence
  ENSG00000205143_4 (sequence is synthesized)
gtgcccatcatggcgaagcaggtgctcgacctgtacgctctgtttcgcctggtgaccgccaagggcggcctggtggaagtcatcaaccgcaaagtgtggcgggaagtcacgcgcggcctc

SEQ ID NO: 747002 - DNA, 120 bp, Artificial Sequence
  ENSG00000205143_5 (sequence is synthesized)
acgagtgcgagactcgagcgctcagctccccaggggagctccaggccgccatagacagcaatcggcgcgagggccgtcgccaggcttacaccgctactccgctcttcggcttggcagggc

SEQ ID NO: 747003 - DNA, 120 bp, Artificial Sequence
  ENSG00000205143_6 (sequence is synthesized)
ccctcggggcgctcaggacccagccttgggtcccggccccgcccctccggcgacccagtccagccctggcccagcccagggttccacctccggcctgccagcgcatgcatgcgctcagct

SEQ ID NO: 747004 - DNA, 120 bp, Artificial Sequence
  ENSG00000205143_7 (sequence is synthesized)
agctgagtccaagccctattaagaaagaggagagtggaattccaaacccttgtctggcactgcctgtgggcctggcactgggacctacacgggagaaattggcaccagaggagcccccag

SEQ ID NO: 747005 - DNA, 120 bp, Artificial Sequence
  ENSG00000205143_8 (sequence is synthesized)
agaagagagctgtgctgatggggcctatggacccacctcgaccttgcatgccccccagtttcctgccccgtggcaaggttcccctgagggaagagcggctggatgggcctcttaatctgg

SEQ ID NO: 747006 - DNA, 120 bp, Artificial Sequence
  ENSG00000205143_9 (sequence is synthesized)
caggcagtggcatcagcagtatcaacatggccctagagatcaacggggtggtctacactggtgtcctctttgcccgccgccagcctgtgccagcttcccagggtccaaccaaccctgcac

SEQ ID NO: 747007 - DNA, 120 bp, Artificial Sequence
  ENSG00000205143_10 (sequence is synthesized)
ccccaccctccacagggcccccttccagcatcttgccctgagaggtcctacttgaaactaagagtcccagccccattgctgaggggggaggagaccccctgctttgattctttctggctg

SEQ ID NO: 747008 - DNA, 120 bp, Artificial Sequence
  ENSG00000205155_0 (sequence is synthesized)
agggaaacctggggcgtctcgcgcaaacgtccataactgaaagtagctaaggcaccccagccggaggaagtgagctctcctgggtcaaggcttgggtcttgccccgcagacccttgggac

SEQ ID NO: 747009 - DNA, 120 bp, Artificial Sequence
  ENSG00000205155_1 (sequence is synthesized)
gacccggccccagcgcagctatgaacctggagcgagtgtccaatgaggagaaattgaacctgtgccggaagtactacctgggggggtttgctttcctgccttttctctggttggtcaaca

SEQ ID NO: 747010 - DNA, 120 bp, Artificial Sequence
  ENSG00000205155_2 (sequence is synthesized)
tctggttcttccgagaggccttccttgtcccagcctacacagaacagagccaaatcaaaggctatgtctggcgctcagctgtgggcttcctcttctgggtgatagtgctcacctcctgga

SEQ ID NO: 747011 - DNA, 120 bp, Artificial Sequence
  ENSG00000205155_3 (sequence is synthesized)
tcaccatcttccagatctaccggccccgctggggtgcccttggggactacctctccttcaccatacccctgggcaccccctgacaacttctgcacatactggggccctgcttattctccc

SEQ ID NO: 747012 - DNA, 120 bp, Artificial Sequence
  ENSG00000205155_4 (sequence is synthesized)
aggacaggctccttaaagcagaggagcctgtcctgggagccccttctcaaactcctaagacttgttttcatgtcccacgttctctgctgacatcccccaataaaggaccctaactttcga

SEQ ID NO: 747013 - DNA, 120 bp, Artificial Sequence
  ENSG00000205155_5 (sequence is synthesized)
ataactgaaagtagctaaggcaccccagccggaggaagtgagctctcctggggcgtggttgttcgtgatccttgcatctgttacttagggtcaaggcttgggtcttgccccgcagaccct

SEQ ID NO: 747014 - DNA, 120 bp, Artificial Sequence
  ENSG00000205155_6 (sequence is synthesized)
taaatgattattaatatttaaaaacatctgttgagagctttgtacgaggcttagtatttagacatgatgtacattttttacagtgcatactactcataatcttctgaactaggaactttc

SEQ ID NO: 747015 - DNA, 88 bp, Artificial Sequence
  ENSG00000205155_7 (sequence is synthesized)
cagtgcatactactcataatcttctgaactaggaactttcctgctcaggaaactattagatgagaaactaagaaaggaatagtgcttc

SEQ ID NO: 747016 - DNA, 120 bp, Artificial Sequence
  ENSG00000205155_8 (sequence is synthesized)
gcagtggtaggatcggcctagtgcttccatttctaggggctgttatcctgtactggtagtcgtgaattcaaaaatataactttcctactgtgggctgcagtattctcatcagaagtgtag

SEQ ID NO: 747017 - DNA, 120 bp, Artificial Sequence
  ENSG00000205155_9 (sequence is synthesized)
atcacgatgctacttcctgggatttatctggaccaagacgtgtgacaaatggaagtttcccgttttctgaaggaagtgttgtctgcaaaaataaaaatagtcaagagctttctcagagaa

SEQ ID NO: 747018 - DNA, 120 bp, Artificial Sequence
  ENSG00000205155_10 (sequence is synthesized)
aagggaaggctggtctagggaagtctggagagcagccggaggccaacccttccagcttctgtttcccatgacagatgtctggcgctcagctgtgggcttcctcttctgggtgatagtgct

SEQ ID NO: 747019 - DNA, 120 bp, Artificial Sequence
  ENSG00000205177_0 (sequence is synthesized)
cggggcctgagcgcgcgtctcccggcgcggggttcctcccacgcagaccctcattcaaacgatgccaaaggggcggcgcggcagccacagccccaccatgagccagcggtcggctccgcc

SEQ ID NO: 747020 - DNA, 120 bp, Artificial Sequence
  ENSG00000205177_1 (sequence is synthesized)
cctctatttcccgtccctgtacgaccgcggcatctcctcgtccccgctcagcgacttcaacatctggaagaagctcttcgtgccgctgaaggcgggcggggcgccagtgggcggggcggc

SEQ ID NO: 747021 - DNA, 120 bp, Artificial Sequence
  ENSG00000205177_2 (sequence is synthesized)
ggcgcccccgcccccgccaccacccggcctgggtccctccagcgagcgcccctggccctcgccctggccctccggcctggcctccatcccctacgagcctctgcgcttcttctactcacc

SEQ ID NO: 747022 - DNA, 120 bp, Artificial Sequence
  ENSG00000205177_3 (sequence is synthesized)
aggctcgcctctgcctcccacccggaggagctctgcgagctggagatccggattaaggagctggagttgctcaccatcactggggacggcttcgactcccagagctacacattcctgaag

SEQ ID NO: 747023 - DNA, 120 bp, Artificial Sequence
  ENSG00000205177_4 (sequence is synthesized)
gcgctaaaagacgaaaagttacaaggactgaagaccaagcaacctggaaagaagtcggcctctctctcctgaggagctgcctaccagagcttgggcagccacctccttaggtgttagtgc

SEQ ID NO: 747024 - DNA, 120 bp, Artificial Sequence
  ENSG00000205177_5 (sequence is synthesized)
ttagataatgtgtcccatttgttgtcatttcaaagatggttattttctgttctgtatttaccgctgttcttgttgctaccagcatgtacttcacatacagtgcccactttgtgtggtaaa

SEQ ID NO: 747025 - DNA, 120 bp, Artificial Sequence
  ENSG00000205177_6 (sequence is synthesized)
cgtgtgctgatgcgggcaggatccctcagcctacgagctgaatgactcctccctgttggaggacacattcctgaaggcgctaaaagacgaaaagttacaaggactgaagaccaagcaacc

SEQ ID NO: 747026 - DNA, 120 bp, Artificial Sequence
  ENSG00000205186_0 (sequence is synthesized)
gcctatatttctttggttttcaattacgagtggctcttctcagcaagtgttccatgatggttgagcccttcttgggaacctggaagctggtctccagtgaaaactttgaggattacatga

SEQ ID NO: 747027 - DNA, 120 bp, Artificial Sequence
  ENSG00000205186_1 (sequence is synthesized)
acagaaagttctttccaggacactaagatctccttcaagctgggggaagaatttgatgaaactacagcagacaaccggaaagtaaagagcaccataacattagagaatggctcaatgatt

SEQ ID NO: 747028 - DNA, 120 bp, Artificial Sequence
  ENSG00000205186_2 (sequence is synthesized)
cacgtccaaaaatggcttggcaaagagacaacaatcaaaagaaaaattgtggatgaaaaaatggtagtggaatgtaaaatgaataatattgtcagcaccagaatctacgaaaaggtgtga

SEQ ID NO: 747029 - DNA, 120 bp, Artificial Sequence
  ENSG00000205189_0 (sequence is synthesized)
aaaggaggttgtgtccgtggtcgtaacctcttcgcgtgaaaggcaccgcctggtccagtctttgtgaaggaacaaaataagttcacttccttgggcaccgccacccaccctcagcaaatg

SEQ ID NO: 747030 - DNA, 120 bp, Artificial Sequence
  ENSG00000205189_1 (sequence is synthesized)
acaaggctggagcgcagctcccaccgcacagttatttgcaaagtcccaggtgaactcgtggcgagagaaggaaaatgcgcgtcccgggcgcgggtagggcctggtcggacggaaacgctc

SEQ ID NO: 747031 - DNA, 120 bp, Artificial Sequence
  ENSG00000205189_2 (sequence is synthesized)
cgccggctttattgtcgcttcgttatgtggcggagccgagcagtttagcgtgcctctcaccctcagcgcctgcgaagccggcggcggcgtcgggactcctcggcgcgcggaggaaggata

SEQ ID NO: 747032 - DNA, 120 bp, Artificial Sequence
  ENSG00000205189_3 (sequence is synthesized)
tctgtgtggaggatcggtgtgtgcgcgcgcggctttaaagagggggcagcggagggtctccccgcactccgctgctcaacttcgaaggcctcgctcgctgcaggctcgctcctcacctct

SEQ ID NO: 747033 - DNA, 120 bp, Artificial Sequence
  ENSG00000205189_4 (sequence is synthesized)
cctcgctcgctgcaggctcgctcctcacctctccgccgcccgcccccttctccgcgcgggacgctgcccggagcgcggcggggcgggggtggaggacgagagagcggtcggaggcgtcgg

SEQ ID NO: 747034 - DNA, 80 bp, Artificial Sequence
  ENSG00000205189_5 (sequence is synthesized)
gcagacccgggagcgagcgcgagccgggctgccgggcgagagggcgaggccgagccccgcgagaccggaacgccgggggc

SEQ ID NO: 747035 - DNA, 120 bp, Artificial Sequence
  ENSG00000205189_6 (sequence is synthesized)
cgcggcccgaggccgtgcgcgagccggggcaccgggcggcggcggcggcggcgcgcgccatgtcgttcagtgaaatgaaccgcaggacgctggcgttccgaggaggcgggttggtcaccg

SEQ ID NO: 747036 - DNA, 120 bp, Artificial Sequence
  ENSG00000205189_7 (sequence is synthesized)
ctagcggcggcggctccacgaacaataacgctggcggggaggcctcagcttggcctccgcagccccagccgagacagcccccgccgccagcgccgcccgcgcttcagccgcctaatgggc

SEQ ID NO: 747037 - DNA, 120 bp, Artificial Sequence
  ENSG00000205189_8 (sequence is synthesized)
ggggggccgacgaggaagtggaattggagggcctggagccccaagacctggaggcctccgccgggccggccgccggcgccgccgaggaagccaaggagttgctgctcccccaagacgcgg

SEQ ID NO: 747038 - DNA, 120 bp, Artificial Sequence
  ENSG00000205189_9 (sequence is synthesized)
gcggccccacctcgcttggcggtggcgcggggggccccctgctagcggaaaggaaccgtcggactctggccttccgaggcggcggcggcgggggtctcggcaacaatggcagtagccgcg

SEQ ID NO: 747039 - DNA, 120 bp, Artificial Sequence
  ENSG00000205189_10 (sequence is synthesized)
gccgccccgagacctcggtgtggcccttgaggcatttcaatgggcgagggccggcgactgtggatctggagctggacgcgctggaggggaaggagttgatgcaggacggcgcgtccctga

SEQ ID NO: 747040 - DNA, 120 bp, Artificial Sequence
  ENSG00000205189_11 (sequence is synthesized)
gcgacagcaccgaggacgaggaggagggggcgagcctgggcgacggcagcggggcggaaggcggcagctgcagcagcagcaggcggtcgggcggcgatggcggggacgaagtggagggca

SEQ ID NO: 747041 - DNA, 120 bp, Artificial Sequence
  ENSG00000205189_12 (sequence is synthesized)
gcggtgtgggagctggcgaaggagagactgtccagcacttcccgctcgcgcggcccaagtctctaatgcagaagctccaatgctccttccagacctcctggctcaaggactttccctggc

SEQ ID NO: 747042 - DNA, 120 bp, Artificial Sequence
  ENSG00000205189_13 (sequence is synthesized)
tgcgctattccaaggatactggtcttatgtcttgcggctggtgccaaaagacccctgcagatgggggaagcgtggaccttcccccagtggggcatgatgagctttcgcgagggacccgca

SEQ ID NO: 747043 - DNA, 120 bp, Artificial Sequence
  ENSG00000205189_14 (sequence is synthesized)
actacaagaaaaccctcctcctgaggcaccacgtctctaccgagcacaaactccacgaagccaacgcccaggagtcagaaataccatcagaggaggggtactgtgactttaatagtaggc

SEQ ID NO: 747044 - DNA, 120 bp, Artificial Sequence
  ENSG00000205189_15 (sequence is synthesized)
caaatgagaactcttattgctatcaacttctgcgacaactaaatgaacagagaaagaaaggtattctttgtgatgtcagcattgtggtaagcggaaaaatcttcaaagctcataagaaca

SEQ ID NO: 747045 - DNA, 120 bp, Artificial Sequence
  ENSG00000205189_16 (sequence is synthesized)
tcctggttgcaggcagccgtttctttaagactttatattgcttttcaaacaaagaaagccctaaccaaaacaatactacccacttagatattgctgcagttcaaggtttttcagtcatct

SEQ ID NO: 747046 - DNA, 120 bp, Artificial Sequence
  ENSG00000205189_17 (sequence is synthesized)
tggacttcttgtattctggtaacctggtgctcacaagccaaaatgccattgaagttatgaccgtggccagctatcttcaaatgagtgaagttgttcaaacttgccgaaatttcattaaag

SEQ ID NO: 747047 - DNA, 120 bp, Artificial Sequence
  ENSG00000205189_18 (sequence is synthesized)
atgccttaaatataagcattaaatcagaagctccagagtctgtagttgtggactataataatagaaaaccagttaatagagatggtctgtcttcatcacgggatcaaaaaattgccagtt

SEQ ID NO: 747048 - DNA, 120 bp, Artificial Sequence
  ENSG00000205189_19 (sequence is synthesized)
tttgggcaacacggaatcttaccaatttggcaagtaatgtaaagattgaaaatgatggttgtaatgtcgacgagggccaaatagaaaactaccaaatgaatgacagtagttgggtccagg

SEQ ID NO: 747049 - DNA, 120 bp, Artificial Sequence
  ENSG00000205189_20 (sequence is synthesized)
atggatctcctgaaatggctgaaaatgaatctgaaggtcaaacaaaagtgtttatttggaataatatgggctcccagggaattcaagagactggcaaaacaaggaggaaaaaccaaacta

SEQ ID NO: 747050 - DNA, 120 bp, Artificial Sequence
  ENSG00000205189_21 (sequence is synthesized)
caaaaagatttatttataatattccacctaataatgaaacgaatttagaagattgctcagtaatgcagccacctgttgcctatccagaagaaaatacactactcatcaaggaagaaccag

SEQ ID NO: 747051 - DNA, 120 bp, Artificial Sequence
  ENSG00000205189_22 (sequence is synthesized)
atttagatggtgctctactctcggggccagatggtgataggaatgtgaatgcaaatttattggctgaagctggcactagtcaagatggaggtgatgctggtacttcacatgatttcaagt

SEQ ID NO: 747052 - DNA, 120 bp, Artificial Sequence
  ENSG00000205189_23 (sequence is synthesized)
atggtttgatgcctggtccttcaaatgatttcaagtatggattgataccaggtacttcaaatgatttcaagtatggattgataccaggtgcttcaaatgatttcaagtatggattattgc

SEQ ID NO: 747053 - DNA, 120 bp, Artificial Sequence
  ENSG00000205189_24 (sequence is synthesized)
cagaatcttggccaaaacaagaaacctgggaaaatggtgaatcatctctaatcatgaacaagttaaaatgccctcattgtagctatgtagccaaatacagacgaacactaaaaaggcact

SEQ ID NO: 747054 - DNA, 120 bp, Artificial Sequence
  ENSG00000205189_25 (sequence is synthesized)
tgctcattcacacaggagtgagatcatttagctgtgatatttgtggaaaactgtttactcgaagagaacatgtaaaaagacattccctggtgcataaaaaggataaaaaatacaaatgta

SEQ ID NO: 747055 - DNA, 120 bp, Artificial Sequence
  ENSG00000205189_26 (sequence is synthesized)
tggtgtgtaagaagatcttcatgttagcagccagtgttggaataagacatggatctcgacgttatggtgtttgtgtagactgtgcagataaatcacagccaggagggcaagaaggtgtag

SEQ ID NO: 747056 - DNA, 120 bp, Artificial Sequence
  ENSG00000205189_27 (sequence is synthesized)
atcagggacaggatacagaattccctcgggatgaagaatacgaggagaatgaagtaggagaagctgatgaagagctagttgatgatggagaagatcagaatgatccctctcgatgggatg

SEQ ID NO: 747057 - DNA, 120 bp, Artificial Sequence
  ENSG00000205189_28 (sequence is synthesized)
aatcaggagaagtttgtatgtctctagatgattaactgacctactatactcctcaaggatgctgcatttggacctaatatgaatcgacaatttggattgttgaacttgaaggcttgcaaa

SEQ ID NO: 747058 - DNA, 120 bp, Artificial Sequence
  ENSG00000205189_29 (sequence is synthesized)
atatggtacatgctggatagtagttatgttgctgtgaaaactgtagggtcaaagccttatagcaaaaaaaatttttttttatatttgcacaggactatacagcaaacaaccatgtggttg

SEQ ID NO: 747059 - DNA, 120 bp, Artificial Sequence
  ENSG00000205189_30 (sequence is synthesized)
gattacatggagtccccacatactcagtcagttatcaaagtaaaatattttttatttataggatatacagtaactatttgggtcctatgaaaatagtccttaaagagcttacattcatgt

SEQ ID NO: 747060 - DNA, 120 bp, Artificial Sequence
  ENSG00000205189_31 (sequence is synthesized)
gctactttaacatgaatggagaaaatccgtttatggaagtacagtgacaattgacccaatcactctgtccatcaaaccactcaggctagtttgtactagtagagttttgtttctattttt

SEQ ID NO: 747061 - DNA, 120 bp, Artificial Sequence
  ENSG00000205189_32 (sequence is synthesized)
atttttattaattttattttttttaatacagattttcagtgaggggctttttcaaccccattggttctattttcttgtatttttccatttaatttgcttcataacttaaaccaagtctct

SEQ ID NO: 747062 - DNA, 120 bp, Artificial Sequence
  ENSG00000205189_33 (sequence is synthesized)
tctagtcttaggtattatttctcgattttgtgctgatgggcatgtttataagaactggagaggtaatttattggaatgaactaactgacttcctccattcccctcttcctttttgacatg

SEQ ID NO: 747063 - DNA, 120 bp, Artificial Sequence
  ENSG00000205189_34 (sequence is synthesized)
aattttactacttcacaaatgaagaatgatgttatgaagttaccgtggcgaagttgacaaataccactaaaatgattatgatttagaagtaactttcttctgctgctctaatctgataaa

SEQ ID NO: 747064 - DNA, 120 bp, Artificial Sequence
  ENSG00000205189_35 (sequence is synthesized)
tggttactatatgatattttctgacatggtatttggttttgggtatctgttactttggcactattcttgtttgcctctttatttttgccagtgtactatacctcagtcctatttgaaaga

SEQ ID NO: 747065 - DNA, 120 bp, Artificial Sequence
  ENSG00000205189_36 (sequence is synthesized)
cctaattgaaagaaaaatcatagaaataagtaaaatgatttgttttataatttatccaccatgtccagtttggttagcttgttatgcaatataagtgaaatatcaggtttttacccgtgt

SEQ ID NO: 747066 - DNA, 120 bp, Artificial Sequence
  ENSG00000205189_37 (sequence is synthesized)
cccttttatcatgaaaattaacacaaaatgtgcattctcttttgtttcatacttagcgggatattgattgttttgaaattatgatcaatacttaatttatttttttctgtccttgaagtc

SEQ ID NO: 747067 - DNA, 120 bp, Artificial Sequence
  ENSG00000205189_38 (sequence is synthesized)
actacaccttgatacagtctttctagtagtcaccatgattcaacagtctcaaaaatcttacaaataaaattctgagaagctttattattctataaattcttcagggtacaaagggtgaca

SEQ ID NO: 747068 - DNA, 120 bp, Artificial Sequence
  ENSG00000205189_39 (sequence is synthesized)
tattgaggtgaaattgtcagatttacttagcctggtgacatgaattagctgattgtggaactctcagcagcatttcacgtattgttaacatgtatggcatttattagcatattgtatatt

SEQ ID NO: 747069 - DNA, 120 bp, Artificial Sequence
  ENSG00000205189_40 (sequence is synthesized)
atataagattgagggatgtcatattttcagctttcttttaaataaaaattgagtatattttcctattttatatcaggtaactaaattatgctagttatgtggaaaaaattgcaaagatgc

SEQ ID NO: 747070 - DNA, 120 bp, Artificial Sequence
  ENSG00000205189_41 (sequence is synthesized)
tttgacagatataatccctttggtgctccatctgatcaaagttgaaaagttgatgttttttaagagacaagctttatcattgtctctgatttcagtagaataatggtttattgttagaca

SEQ ID NO: 747071 - DNA, 120 bp, Artificial Sequence
  ENSG00000205189_42 (sequence is synthesized)
tgcatcttttgtcatctatattgtagtttctacataactgtaaacctgacagataagaatagtttcggtttgatttttgtttaaaacagatgagtacttcttaatgttctagacaaatga

SEQ ID NO: 747072 - DNA, 120 bp, Artificial Sequence
  ENSG00000205189_43 (sequence is synthesized)
gtaaaatgtatttctggtagaaattagttgggcaaagatactatgaatgaaaaagtattttaaacgtaaaatgttctttgtgaatatgtaagtatagtataaagatttctttcatcccat

SEQ ID NO: 747073 - DNA, 120 bp, Artificial Sequence
  ENSG00000205189_44 (sequence is synthesized)
ccatttatccccttcctttaaataaactagtttacaattggtagatctgtctatatataaatatatattaaagaacaaagatatatatctaaaaatcacctaaatctgctttattagact

SEQ ID NO: 747074 - DNA, 120 bp, Artificial Sequence
  ENSG00000205189_45 (sequence is synthesized)
ttcacttattgcatagaaactggacttggctttacattcttaatgtacttttacttttcctcaagatatgaacttactctcttgaagctgaattttcttttactacttaaatcatttatg

SEQ ID NO: 747075 - DNA, 120 bp, Artificial Sequence
  ENSG00000205189_46 (sequence is synthesized)
tatatctggtaaattatgaccaaatttttgttagattgcatacagtaaattgaaatacacacttggtacactacgggattgttgtgcttttgtttggttttagttggaaataaggtttga

SEQ ID NO: 747076 - DNA, 120 bp, Artificial Sequence
  ENSG00000205189_47 (sequence is synthesized)
tgtagatggcttgttactgttaatttaaaatattctataattgtccattactttatgttgtgttgtgacagatttggctatatttttagtcaattgaaatatgatactttaaaagtttgt

SEQ ID NO: 747077 - DNA, 120 bp, Artificial Sequence
  ENSG00000205189_48 (sequence is synthesized)
ttttaggtaatccaaaggaaaagtgtttatactcttgaatatattagcctcagcctatataaaaatttctttgaagtaaacattttaccggaaacagaattgacagatttttctacttgc

SEQ ID NO: 747078 - DNA, 120 bp, Artificial Sequence
  ENSG00000205189_49 (sequence is synthesized)
tgactgcctaacttattttgtttcatgatctcgagggactgccttttcccatctagatcttttaaaaaaatagttttagtactaaggtatactactggacatttctatttttttaagtgt

SEQ ID NO: 747079 - DNA, 120 bp, Artificial Sequence
  ENSG00000205189_50 (sequence is synthesized)
attctttttctgacttacagtaaaatttcaggaagttgatagatactaagaacttatgattggtctcagaggtaacaatgaaatactcataattttgtctgtggaactctggcagaatta

SEQ ID NO: 747080 - DNA, 120 bp, Artificial Sequence
  ENSG00000205189_51 (sequence is synthesized)
tgttacacatttggcgaagttgtctcttgtaatttatattttaaatgaaaaagtattttagagcttttaatgaaggggaagagtataaactttctttcatattcactctgtagttacaga

SEQ ID NO: 747081 - DNA, 120 bp, Artificial Sequence
  ENSG00000205189_52 (sequence is synthesized)
ccgtctcataaatcaagattgtgcattattagagttctcagagacagatacttccatatggacccctgttcatttttcttatttactagatattttgctaaatttagcacactagcaatt

SEQ ID NO: 747082 - DNA, 120 bp, Artificial Sequence
  ENSG00000205189_53 (sequence is synthesized)
aagagtttaaaaaagaagaaacgttataggaaagggaaactgaacagtaatgagtagctttgaaattggggaaaacacactagctgggttaggtacagctatcctaatggagaagagtga

SEQ ID NO: 747083 - DNA, 120 bp, Artificial Sequence
  ENSG00000205189_54 (sequence is synthesized)
gctaaatgcgttaattcatgtaaagtgcttagaacactggtacataataggtgcataacacatcttaaagttgtttaataatagataagaaccaagaggaaaaagaaataagaaaagatg

SEQ ID NO: 747084 - DNA, 120 bp, Artificial Sequence
  ENSG00000205189_55 (sequence is synthesized)
ggggaaaggaaggagaaaataggaaatgaaaggattaggacttgggcatttatattaatacaaaatggtgtaaacggcctgaatatcactgtagtagtatcatacgggggaaagtgtgat

SEQ ID NO: 747085 - DNA, 120 bp, Artificial Sequence
  ENSG00000205189_56 (sequence is synthesized)
ggaaaataggtttaaaaatcttaatttttaaaactttagtaagctttatttatattttttaggattttctgaacatagcatgaagggtttagattcatttttctgaaaaacgattaaaaa

SEQ ID NO: 747086 - DNA, 120 bp, Artificial Sequence
  ENSG00000205189_57 (sequence is synthesized)
aactaccaattttttttttgagtgcccacacttgccgttgtgctgtatacatgattttaccttaatcctctataaggtaggtgctaattgtctccattttatagatgaggaaaggctcag

SEQ ID NO: 747087 - DNA, 120 bp, Artificial Sequence
  ENSG00000205189_58 (sequence is synthesized)
agaaattcagaaacttggctaatttaacacagctgtgacagagctcgaatttgaccacgtctgattctgaagcccatactctttcagggaggctctattgctgcctcattaaacaactct

SEQ ID NO: 747088 - DNA, 120 bp, Artificial Sequence
  ENSG00000205189_59 (sequence is synthesized)
tgtagaatttcagctcttaatggagtctatggattatatttttcctataagacagctgtgtttagaattttgagtgtctttcctccccccaataaatttccttactactctttcttcata

SEQ ID NO: 747089 - DNA, 120 bp, Artificial Sequence
  ENSG00000205189_60 (sequence is synthesized)
aagcagttgttttgtcactttgactatattaagacacatcagtgtagcacatgctcttaactggctgtggcattttaattttataaaagaatggtttttatctgaagaactagatagaaa

SEQ ID NO: 747090 - DNA, 120 bp, Artificial Sequence
  ENSG00000205189_61 (sequence is synthesized)
ccccagtttttgtgccgttcagtcacccagatccttaaacttaactatggtacataatatccacacttagaactaacaggtgtttagtcactttaggacttaaaatggaaagtttttttt

SEQ ID NO: 747091 - DNA, 120 bp, Artificial Sequence
  ENSG00000205189_62 (sequence is synthesized)
tttttcctgctgtatctctgctttcaactgaagttaaagaattctagatagtttaaaatgtgttagggataagcacacttcaaaagatgttttctagccctaaattttatgacattgggt

SEQ ID NO: 747092 - DNA, 120 bp, Artificial Sequence
  ENSG00000205189_63 (sequence is synthesized)
acttaaatttggagtacactagctattgagaacaatattttgggttgaggagagatggttgaggccattatttagtgggagcattggcattttgaacactgtaaacaaaagaacacttcc

SEQ ID NO: 747093 - DNA, 120 bp, Artificial Sequence
  ENSG00000205189_64 (sequence is synthesized)
gcctgctgtttgtaaaagctctttgggaagatcttttacgaagaccaactttttaaaatgtaaattacctacctaatataagtgtcctaagacatgtatgtaaacttccggaactgtttt

SEQ ID NO: 747094 - DNA, 120 bp, Artificial Sequence
  ENSG00000205189_65 (sequence is synthesized)
gtctgtgtatttagaaaatacacaagaatctttattcaaacctaaaaatataaacttgtgagcactaaactgcttctggctttgtgaattttattgactgacatttaattcagatttctt

SEQ ID NO: 747095 - DNA, 120 bp, Artificial Sequence
  ENSG00000205189_66 (sequence is synthesized)
tgcaagtgtactaatttagactaattggggtaaggggaacaccttaatgaactttgacttatgtataattcagatatctttgtacttaaggcttacaagtttgaattatggaatactata

SEQ ID NO: 747096 - DNA, 120 bp, Artificial Sequence
  ENSG00000205189_67 (sequence is synthesized)
agggttttttgtttatttgtatgtttttatatgaaagtacataaatgacagactacctccaagtaatcctgctttaattaatagcagtgatttgtaatcagtgtatcttttaagattctc

SEQ ID NO: 747097 - DNA, 120 bp, Artificial Sequence
  ENSG00000205189_68 (sequence is synthesized)
tacaggttttagaaaatattaaaaattccctgtaatttacatttgtgcataatcttggaaatgggttgaaaagcaaaggtaaactgcttcatcccatgttgtatatttgtggactgattg

SEQ ID NO: 747098 - DNA, 120 bp, Artificial Sequence
  ENSG00000205189_69 (sequence is synthesized)
actacaagtgatgtgatgttataaatttgaagtctttgaaactttattaatgtagagaaaacataactagctttttaggttatttcaaagttagtaatagagcaaaggaaatcagaactg

SEQ ID NO: 747099 - DNA, 120 bp, Artificial Sequence
  ENSG00000205189_70 (sequence is synthesized)
gccagatattcagacttgacttagaaaaacaggagtttgttgattttgtttggagaagggcacaataaaggggagcccacatagcattataatgcctagtatctttaaacatgtaaagag

SEQ ID NO: 747100 - DNA, 120 bp, Artificial Sequence
  ENSG00000205189_71 (sequence is synthesized)
ctatcatgaggcagaagaattaagaaactttatatgtttctaaggggtcatgattgggaccattggctcaagattgaaaatcggtttttaattatccaaagatgaaatggggctgcttca

SEQ ID NO: 747101 - DNA, 120 bp, Artificial Sequence
  ENSG00000205189_72 (sequence is synthesized)
gaaaaaggtctaccactggagataacgctatgaaaagtgaaagagattacttaatcattttgacaaaggcagtattgaccagacatttctatttcagagttggatttgtgcttagttttt

SEQ ID NO: 747102 - DNA, 120 bp, Artificial Sequence
  ENSG00000205189_73 (sequence is synthesized)
tttaggtgttgggacccttgtagttgctttttattttgcttagtcaacaaacactaaaatgataaaatttggtatgtataagtactggacgaaggatgttttgacactaaaaaggacata

SEQ ID NO: 747103 - DNA, 120 bp, Artificial Sequence
  ENSG00000205189_74 (sequence is synthesized)
atttaggaaattaagaatttagacaccaagtttggcttaatagaaaaagtcactatctgaacttctttctttttcaccacaaatcaccgcagaccagtgtttgggagcaggtgtaggaaa

SEQ ID NO: 747104 - DNA, 120 bp, Artificial Sequence
  ENSG00000205189_75 (sequence is synthesized)
ttgaattattggatctatgtttaggtaagaaaactaaaggtacttcagaatttaggctatgacataactgtctttctgaagtttaaagaaagaaagtgaactatagaaatctattcagct

SEQ ID NO: 747105 - DNA, 120 bp, Artificial Sequence
  ENSG00000205189_76 (sequence is synthesized)
aattaaagtgaatgaaaaatattacagattccataactgcatggcgccttacctgctattaatactgccgccttactgtcagccagatgattttttcccaccacggccagtcttaaattt

SEQ ID NO: 747106 - DNA, 120 bp, Artificial Sequence
  ENSG00000205189_77 (sequence is synthesized)
ggcaataagaaaaagctaatcttccaagtgtaagtaggtatgtgttagaatcttggtgaaagataaacacaagacagtcttcttggcgcaggtcctaacagttggtgagataatacataa

SEQ ID NO: 747107 - DNA, 120 bp, Artificial Sequence
  ENSG00000205189_78 (sequence is synthesized)
gatggtttcaggattattgtagaattatttaggttgaaagagactgtaagagactaatgaagcatacccagagaggttgctacagtgactccagtcagttttaggacccaggactcctga

SEQ ID NO: 747108 - DNA, 120 bp, Artificial Sequence
  ENSG00000205189_79 (sequence is synthesized)
acttcaatttcagtattatttttctgtaccaaactcattcaataaatacttgagattagggataagtttgaagttagaagattccagagtacactcaaatagtatttggcacatagcttg

SEQ ID NO: 747109 - DNA, 120 bp, Artificial Sequence
  ENSG00000205189_80 (sequence is synthesized)
ttgatcaaaagtatttactaagtgagtgacaaaaggcactagcaactttaaggattttgcctattagtatcatatggcatgtagctatcaagccagtttcgtttagttattttgtgttgc

SEQ ID NO: 747110 - DNA, 120 bp, Artificial Sequence
  ENSG00000205189_81 (sequence is synthesized)
caagcatatgatacgtggtgtcacactgagcctttgggatcctttccctggatacataaccctagtagataatgttactgcaagatgtaatgaccaaatccaacctactgcaaatgttac

SEQ ID NO: 747111 - DNA, 120 bp, Artificial Sequence
  ENSG00000205189_82 (sequence is synthesized)
tatggaaatctcaatgcaaaagtagcctttgtgattttttttttaaaccgtctccataacagaacacttagaattattagccatttgctgcaaagtatttgttttaaaatgtctggcata

SEQ ID NO: 747112 - DNA, 120 bp, Artificial Sequence
  ENSG00000205189_83 (sequence is synthesized)
tacaccactaacatttaaatgcccaacattcggtctatacgtgaaaaaactagaagaaaagccctgttggagttttgatgtagagtgcaataatacatcaataaaggtattttaaaatga

SEQ ID NO: 747113 - DNA, 120 bp, Artificial Sequence
  ENSG00000205189_84 (sequence is synthesized)
ccgagcagtttagcgtgcctctcaccctcagcgcctgcgaagccggcggcggcgtcgggactcctcggcgcgcggaggaaggatatctgtgtggatctggagctggacgcgctggagggg

SEQ ID NO: 747114 - DNA, 120 bp, Artificial Sequence
  ENSG00000205208_0 (sequence is synthesized)
ctttcggctttgggcgcgagtggttaaaagacagttggtgtcggttcggcttctcgggtcggattccgcggtcccaacccttccccatggccgaccctgaggagttgcaggtttcttcgc

SEQ ID NO: 747115 - DNA, 120 bp, Artificial Sequence
  ENSG00000205208_1 (sequence is synthesized)
cgcccccgccgcctccctcttctccctcctcttcagacgcctctgcagcatcttccccgggcggcccagtgagtttgggctggccagttccgagcaggagcagcggcccaacggtggacc

SEQ ID NO: 747116 - DNA, 120 bp, Artificial Sequence
  ENSG00000205208_2 (sequence is synthesized)
agctggaggaagtggagctgcagatcggagacgcagccttttcattaaccaaacttcttgaagccacatctgcagtatcagctcaagtggaagaacttgccttcaaatgtacagaaaatg

SEQ ID NO: 747117 - DNA, 120 bp, Artificial Sequence
  ENSG00000205208_3 (sequence is synthesized)
cacgtttccttaaaacgtggcgggacctcttgaaagaaggctatgattctttgaaacctgatgactgatttggcatacttcgttgtttaataatgactgcaataattcatacttcttatg

SEQ ID NO: 747118 - DNA, 120 bp, Artificial Sequence
  ENSG00000205208_4 (sequence is synthesized)
tcatattttgtacatgtaccacacatataggatgacctctgtccagcagttctgtatatactcagaatgaaatttttcttggttttcttggtttttgtgaaagcagaataccgatgctat

SEQ ID NO: 747119 - DNA, 120 bp, Artificial Sequence
  ENSG00000205208_5 (sequence is synthesized)
ttttgttgcggaccagtacttgtttgtccttaaatactttatgcctctgaactttcatagaatcctttatgaaagttaacttcatcaatagacggttaatattaatagagccacagtgct

SEQ ID NO: 747120 - DNA, 120 bp, Artificial Sequence
  ENSG00000205208_6 (sequence is synthesized)
accagtagcaaactaggtagaccattatttgttttgcaacaagatgctaagcatggcagactttgaagttgcgtttcatcttaaggaccaagggaggtaactttaaggttgccagtggtg

SEQ ID NO: 747121 - DNA, 120 bp, Artificial Sequence
  ENSG00000205208_7 (sequence is synthesized)
gatccagctccgttaggctaagttgtctacagctaatgattgtgtctttattctatatccccagcacctaaaacagggtcacacaacattcactaaatgtttgttgaataaaagagttaa

SEQ ID NO: 747122 - DNA, 120 bp, Artificial Sequence
  ENSG00000205208_8 (sequence is synthesized)
caaacataattgaaagctttttttcttcctatatttagcatgaagactgtcattgtttctctaggaaatgtatgaatctgaacttttttgacttgaagaaaaacattctttttttacaga

SEQ ID NO: 747123 - DNA, 120 bp, Artificial Sequence
  ENSG00000205208_9 (sequence is synthesized)
gatttggactttgatgataggttttaaaaatatatgataaatattttttgtacttgtttgattttttttttaaagactttacttcagaaagggaaagactgtttagaaagaatgcatatt

SEQ ID NO: 747124 - DNA, 120 bp, Artificial Sequence
  ENSG00000205208_10 (sequence is synthesized)
ttttccctatttatttctgtggttactgcttttgcagtttaacagtgtttgtatttgatatttgtatatgtttgattgctatctttaaagtgccttatcagatttatggctctgtgctat

SEQ ID NO: 747125 - DNA, 120 bp, Artificial Sequence
  ENSG00000205208_11 (sequence is synthesized)
tactttttgagctttgcaagttgtgtacataataattctaaagaagttactttgtttgcaatgcatcaaatttaaatgatgtgattttttttgtattatttgatcttagtgacagtgttc

SEQ ID NO: 747126 - DNA, 120 bp, Artificial Sequence
  ENSG00000205208_12 (sequence is synthesized)
tattttgcatcctgtatcttatgttgcttttggtgttttgtgttgtgtgtcaacgattaagccaactaattctctaccatatataacttctggacatttttgatacaacatcttaattct

SEQ ID NO: 747127 - DNA, 120 bp, Artificial Sequence
  ENSG00000205208_13 (sequence is synthesized)
ttgtagatatggagataggtacagaactatattctaatgccccacaatggggctatgagaggggacagatggatgggcaaagaatagttttgtttaacatattaggtcatagttcttgat

SEQ ID NO: 747128 - DNA, 120 bp, Artificial Sequence
  ENSG00000205208_14 (sequence is synthesized)
ttttagttaaagataaacacatagggtgtgatttctataccaaagatatgcttatttcagtattagaaaaatattcttcttacatctcctgaaaattgcaatttttaaaatgtgtaaaaa

SEQ ID NO: 747129 - DNA, 120 bp, Artificial Sequence
  ENSG00000205208_15 (sequence is synthesized)
taaattattattaaaagcacattttatttccatttgtttggattcattaccttaaaactttattgacatatttcaaagatataggaaaggtaaatgatttcaagaaaatccgtgtatttc

SEQ ID NO: 747130 - DNA, 120 bp, Artificial Sequence
  ENSG00000205208_16 (sequence is synthesized)
taccatgcagatgtaataaatgttagcatttggctatattttcttcagacacacatatgcatgtaattgcaaatgttagatacatttgaagtttgctttgttacctgtttgatcctgtcc

SEQ ID NO: 747131 - DNA, 120 bp, Artificial Sequence
  ENSG00000205208_17 (sequence is synthesized)
cgttcctccctccccagagtccccagaggtaaccactagagggggcataatatagcatgtgtttttatatttttaatacaaatatattttttaaaagcgctacaaaatattgttttatat

SEQ ID NO: 747132 - DNA, 120 bp, Artificial Sequence
  ENSG00000205208_18 (sequence is synthesized)
atgtggtagccagcttccagatggccccagtgatccctggcctcctggtgttcatgccccagtatagccttctcctgcattttacagtgctgacttttgtaactaccaggatattgagca

SEQ ID NO: 747133 - DNA, 120 bp, Artificial Sequence
  ENSG00000205208_19 (sequence is synthesized)
aatgcagtgtgtgatttctgaggccatatcttttactcttttttttttttttaagagacaagatctcactctattgctcaggctggagtgtggtggcaggatcatagctcactgtaacct

SEQ ID NO: 747134 - DNA, 120 bp, Artificial Sequence
  ENSG00000205208_20 (sequence is synthesized)
taaacttggactcaaacaatcctcccatctcgcctcctcctataaagcactgggattacaggcatttttgctcatttttctatgttgttttttttacttgtcagtttttagatattacat

SEQ ID NO: 747135 - DNA, 120 bp, Artificial Sequence
  ENSG00000205208_21 (sequence is synthesized)
attttgaatactaatgatctgttatgtatgttccaattatcttttttagtctggtttgtcttcatattttggttatgaaatcttgaatttttaaaaacgtaattttaccaatctttcata

SEQ ID NO: 747136 - DNA, 120 bp, Artificial Sequence
  ENSG00000205208_22 (sequence is synthesized)
atgatttgctttttctggtttttgtataggaaatgtcataaaaatagtcctattcagccttccaaaagttacaaaatttttgtttttaacatttagatgtttagtccaactgaaatttgt

SEQ ID NO: 747137 - DNA, 120 bp, Artificial Sequence
  ENSG00000205208_23 (sequence is synthesized)
tttcttttatggcatgattttggaatcttgttttaattatttttacatatttatagctgttcctccaagtatcaatttttcaagtgcaacatctgtcatgcagttactatgtaagggcca

SEQ ID NO: 747138 - DNA, 120 bp, Artificial Sequence
  ENSG00000205208_24 (sequence is synthesized)
gattctgacctttctgttctttttatctgaaggaaatttgaacatgccacccccaaatatgccgatttggcatactgattatttcgagctaaaggtgcttgactaacagtagttgcagaa

SEQ ID NO: 747139 - DNA, 120 bp, Artificial Sequence
  ENSG00000205208_25 (sequence is synthesized)
atggctattttaactgtcctttcctacctgtagcaagccatacaaacttctttgataaagatgctttcctgataccaagatgagaagatggctctaatcagctgagacagcaccagagga

SEQ ID NO: 747140 - DNA, 120 bp, Artificial Sequence
  ENSG00000205208_26 (sequence is synthesized)
atctacaaacaagaaactattagtttcttaacatatatttaccttccacagtttctgcctctggaagcctaaaactgctttccttcgtcttgtcacacttctctgaaatgtattctttgt

SEQ ID NO: 747141 - DNA, 120 bp, Artificial Sequence
  ENSG00000205208_27 (sequence is synthesized)
ggaagatgctatatagtccagagttgtaagccactacttgtgtttaccttttcattgagttttctcctgtgtgatgtacgttgcatatattaataaaattacttgtttttctcttgttaa

SEQ ID NO: 747142 - DNA, 120 bp, Artificial Sequence
  ENSG00000205208_28 (sequence is synthesized)
atgacgcaacggccagccgaggcttccgggtcatgtaccaaaccagggaaagataagggactccaagtcccagccggggagcggtgaaacagccacagcgcggccagaggggtccgcgaa

SEQ ID NO: 747143 - DNA, 120 bp, Artificial Sequence
  ENSG00000205208_29 (sequence is synthesized)
tcccacagcacgacgcacgcgcagtgaaaggcagtagaaggcggggcgacgcacacggcttcctgggaggtgtagttttctctacgagtgcccttcgagatcgattggaggctcgcgcag

SEQ ID NO: 747144 - DNA, 120 bp, Artificial Sequence
  ENSG00000205209_0 (sequence is synthesized)
gctgggaccagactccgctgtcatgagggtgacatccgccacctgtgctcttctgctggctctgatctgcagcgtccagctgggggatgcctgcctggatatcgataaactgcttgcgaa

SEQ ID NO: 747145 - DNA, 120 bp, Artificial Sequence
  ENSG00000205209_1 (sequence is synthesized)
gacagaggagtccttcctcaatgtccagcaatgctttgccaatgtctccgtgacagaaagatttgctcattcagttgttattaagaagatccttcagagcaacgattgcatagaagcagc

SEQ ID NO: 747146 - DNA, 120 bp, Artificial Sequence
  ENSG00000205209_2 (sequence is synthesized)
cttctgatctgaggacccctgcagatcagatattggccctcctgccttccttggggctccccgcgttcctggcctggctctgttcatcactacagagaccccaatgaacacctgcagctc

SEQ ID NO: 747147 - DNA, 120 bp, Artificial Sequence
  ENSG00000205209_3 (sequence is synthesized)
caccagaaggaaccaattccggacacataacaagcagcagtgaggacaccaaagacacagacccagatgcagaggcagaggcagccacacagcccctcccagccacaatcacaacctcat

SEQ ID NO: 747148 - DNA, 120 bp, Artificial Sequence
  ENSG00000205209_4 (sequence is synthesized)
acaatcacaacctcatattcatataatcacagaccctccaccccacatagtgggtggaatcctgccagcgcattccactcacacacacacaaaatcccattctcacacacgtgcacccaa

SEQ ID NO: 747149 - DNA, 120 bp, Artificial Sequence
  ENSG00000205209_5 (sequence is synthesized)
gcctcgtcccgcacacacaacatgacaggccacagagccggctgagagtctcagcacgcatggacgcctgcactgcgcaggttgcagcccaggctgcaggaccacaggtggcagggacga

SEQ ID NO: 747150 - DNA, 120 bp, Artificial Sequence
  ENSG00000205209_6 (sequence is synthesized)
cacagcaggtggccggccagggagtggcagtggcctccatcctccctgctcagccacagcccctgcttcagcgtctgccagtccaactgtcaactcatccactcaactttacaactggaa

SEQ ID NO: 747151 - DNA, 120 bp, Artificial Sequence
  ENSG00000205209_7 (sequence is synthesized)
tgtgggggcgttcagggccctgccactggtgacggccactctaagtcctacccaatgctgggtaggtcctttaagaggcccaagtcctgggcgctactatgaggttctgtacgtgcacag

SEQ ID NO: 747152 - DNA, 120 bp, Artificial Sequence
  ENSG00000205209_8 (sequence is synthesized)
tgatggctcatgcctggccgaggtgagcccactcagtctgggtggcacagcctaatctaggaactgctctgcggttctacatggctctcagcagcccagtgagtgtcctctgcaccgggc

SEQ ID NO: 747153 - DNA, 120 bp, Artificial Sequence
  ENSG00000205209_9 (sequence is synthesized)
gtgtccctcaggtgctcctagccagaccctcccttgacacagtagggcacaaaccgctattggagcggcactggcacccgagtgtacaagcgtcagcatccctgctgccttccccacccc

SEQ ID NO: 747154 - DNA, 120 bp, Artificial Sequence
  ENSG00000205209_10 (sequence is synthesized)
cagctgtccccacctgctgattctgcccctggggtcacacttacaatttagggtcctgtcaggagacaaaaatcacgtgagtgacatcagctccctcatatgtaggtgctgggaaaaggg

SEQ ID NO: 747155 - DNA, 120 bp, Artificial Sequence
  ENSG00000205209_11 (sequence is synthesized)
agctccctcatatgtaggtgctgggaaaagggcttgtggggtgcctgtataaactggccataaaaatacgggaataagttgtggaaagccacaaaaggcctctgaggaggaaagcctcct

SEQ ID NO: 747156 - DNA, 120 bp, Artificial Sequence
  ENSG00000205209_12 (sequence is synthesized)
acccgctgtcttctctgtaaacactgtgctcagggagaaagacacttctttgaaacactggaatgtggacagacgtgcaggctcccagtcaaggccgctcctactagctactctccaaca

SEQ ID NO: 747157 - DNA, 120 bp, Artificial Sequence
  ENSG00000205209_13 (sequence is synthesized)
atctgcttcttagatcgaagggactgtactcaataaatagtgtggagaccagagctcggcaccttttgcagcctccacattttgcactggccccctggctccccacctttcactcttaac

SEQ ID NO: 747158 - DNA, 120 bp, Artificial Sequence
  ENSG00000205209_14 (sequence is synthesized)
ttgtcttttctcaatcctttgtcaccaccagacttcgggtaccctacgggtagtgttgaggctggtccccaacatgtaggatcccttcactgtgtcacatgtgtccctaacacacttgct

SEQ ID NO: 747159 - DNA, 120 bp, Artificial Sequence
  ENSG00000205209_15 (sequence is synthesized)
acatctcatgtcctttaggttctgtgttttactccagataatgttctttgaatctaaattacagtttactgatttctcaaaagctgcacctaatgtgctatccattcagacagacatact

SEQ ID NO: 747160 - DNA, 120 bp, Artificial Sequence
  ENSG00000205209_16 (sequence is synthesized)
cacttagcaaatgtttgttgagccagcactcagtggcagattctgtgctagggcgtgccaagtgcagacacacgtttgccaagacacagggtcacatgtgcatgcacactcagacttgca

SEQ ID NO: 747161 - DNA, 120 bp, Artificial Sequence
  ENSG00000205209_17 (sequence is synthesized)
ggcttacaccagtgttcagcctgctcccaatcccagggagctccagggaggacagagagaatgtcacaacacccaacccctcccactgcatgctgagtccagttcccgatacgctgccac

SEQ ID NO: 747162 - DNA, 89 bp, Artificial Sequence
  ENSG00000205209_18 (sequence is synthesized)
tcccactgcatgctgagtccagttcccgatacgctgccaccccaacagcatggcccagggccgagggtctctctgcagacctgccctga

SEQ ID NO: 747163 - DNA, 120 bp, Artificial Sequence
  ENSG00000205209_19 (sequence is synthesized)
ggttacctggtacttggtcctggggtgctttagtgcaggagagatattggcgtggggtgtgagagttggataaagaggtaattggggctgtagactctagactggttggctgtatatgag

SEQ ID NO: 747164 - DNA, 120 bp, Artificial Sequence
  ENSG00000205209_20 (sequence is synthesized)
agaggtgctctgggtcaaggcttttgccatctctaagaaagggctagccctgggaggggcagtctctccagagccagcaaacttttaaagatgtcaccataaaatacagaaaataagcat

SEQ ID NO: 747165 - DNA, 120 bp, Artificial Sequence
  ENSG00000205209_21 (sequence is synthesized)
tctttaaaacacgatcttcacactattcacagccaagatttgactcaacctcagtgtccatcaacaagtgaaaagatgaagaaaatacgaagaagatccttcagagcaacgattgcatag

SEQ ID NO: 747166 - DNA, 120 bp, Artificial Sequence
  ENSG00000205212_0 (sequence is synthesized)
atggcctcctggggtggagaaaagcggggaggggctggggggtctccgaagccggcagtctacgccacgaggaagacccctagtgttgggagccaggaggaccagtggtacttggactac

SEQ ID NO: 747167 - DNA, 120 bp, Artificial Sequence
  ENSG00000205212_1 (sequence is synthesized)
ccgggggaccagtggtccttgggcttctcctacagctggtggaagaacagcgtcggcagcgagagcaagcacggtgagggcgccttagaccagctccagcacgatgtccgcctggaagat

SEQ ID NO: 747168 - DNA, 120 bp, Artificial Sequence
  ENSG00000205212_2 (sequence is synthesized)
ggagacactggcgtggacaagagggataggaagaagagcattcagcaactagttcctgaatataaggaaaaacagacacctgaaagtcttcctcaaaataacaatccagctgctccaagc

SEQ ID NO: 747169 - DNA, 120 bp, Artificial Sequence
  ENSG00000205212_3 (sequence is synthesized)
caggctgaaggaggagaaggaggagtcgcctgtggtacggtggagcagatgacgtggctctgcagcttgcctcatgcagttggtggtggagatggagaccacagctcgactggagcggta

SEQ ID NO: 747170 - DNA, 120 bp, Artificial Sequence
  ENSG00000205212_4 (sequence is synthesized)
ggagggcacccacgggggcctggagagtattgtcatctgcatgagcaaagggttcatcaccacatctttgcaagaggaaaaagaaaggggaagaatcatgtgtctaatgttgtaaggtaa

SEQ ID NO: 747171 - DNA, 120 bp, Artificial Sequence
  ENSG00000205212_5 (sequence is synthesized)
aggctcttctgtgtccagcggaggagcaactctgtgtccagcttagagaactggaagaagccgcaaccttccacctgctggagggtggaggatggatggagcctggagcctgggtcacta

SEQ ID NO: 747172 - DNA, 120 bp, Artificial Sequence
  ENSG00000205212_6 (sequence is synthesized)
aggaagaggcactgccacatgctggaggctggaacctgtgccaccatggcttgcctcgctgtggttggtggtgacgtcggagactgcagcttagccacagtggtagaaacgtgatgggct

SEQ ID NO: 747173 - DNA, 120 bp, Artificial Sequence
  ENSG00000205212_7 (sequence is synthesized)
tccaagtaagggatggttttcctcttctcggactccagactctagaaggcgattttctccactcgagctggattgcatgctgctccaagccaggctgaaggaggagaaggaggagtcgcc

SEQ ID NO: 747174 - DNA, 120 bp, Artificial Sequence
  ENSG00000205212_8 (sequence is synthesized)
tgtctaatgttgtaagggtcttgctctgtcacccaggctgcagcgatggaatgatcatagctcactgcagacttgacctcctgtgctcaaatgatactcctgctcaaatcagcctaggtt

SEQ ID NO: 747175 - DNA, 120 bp, Artificial Sequence
  ENSG00000205212_9 (sequence is synthesized)
catatgagtctcccaagcagcaaggattcagcttcaagttttgatggcttattttcgtatatgtaagttatattctttaaatgttgatgtcaaatctattaaacttttttattatagtca

SEQ ID NO: 747176 - DNA, 120 bp, Artificial Sequence
  ENSG00000205212_10 (sequence is synthesized)
ttcacaaccaaaaacaaggttttattaacttttgcctttaagaacctgcagtgtttagccctctttgattcctagtattattacctttggtatgaactcttttattaaactgatcactct

SEQ ID NO: 747177 - DNA, 120 bp, Artificial Sequence
  ENSG00000205212_11 (sequence is synthesized)
agaggtttatgcattttgtatcatttttcaagccaacagaaatgtgtaatgcctataattctgacactttagttatttttaaggctatgagcatgtaagatactgttggaagaatatgta

SEQ ID NO: 747178 - DNA, 120 bp, Artificial Sequence
  ENSG00000205212_12 (sequence is synthesized)
taaataccactaggtagcttattttgaagagatagtatctaaatttttgtccagagtagattggttgcagtttcttaggtgtgtttcttaatacgttgcctcaatgttttaaagcatgta

SEQ ID NO: 747179 - DNA, 120 bp, Artificial Sequence
  ENSG00000205212_13 (sequence is synthesized)
tgtagaaatttgaatacagtttaacttcatatagtcctttgtttatagatttaatatttctaaagactaaagacatcacagctccctttaagattcagtaatattaataaaattttagaa

SEQ ID NO: 747180 - DNA, 120 bp, Artificial Sequence
  ENSG00000205212_14 (sequence is synthesized)
agggttagaatccaacaaattcagaggaaaattgttaaattctatagctgtagagcagaaatgaaacccaggttctaagctctaagggggccatgaggtaccatacaggtgcatcagtga

SEQ ID NO: 747181 - DNA, 120 bp, Artificial Sequence
  ENSG00000205212_15 (sequence is synthesized)
agcaaaattacaggatggttaagagagtgagctgtggagccaaactctatgtaacatgaatttttaaactgcctggtgcctcagtttatccatctttacagtggggactgtagtaagttt

SEQ ID NO: 747182 - DNA, 120 bp, Artificial Sequence
  ENSG00000205212_16 (sequence is synthesized)
ttctttttctgctcagttgtctgtcttgttgccactgttccctagtctgtcttgttgccactcagtgcccacatgagaggatctacggtaatttctgacagcctgggactccttaaagaa

SEQ ID NO: 747183 - DNA, 120 bp, Artificial Sequence
  ENSG00000205212_17 (sequence is synthesized)
aaacagaaggtgctacaaaacccattttaggagaaacctctgttgtcctcatggaaccccaagaacttcaggcagacaggtctctctcaaaatctaaggctctcctctgttttgttttgc

SEQ ID NO: 747184 - DNA, 120 bp, Artificial Sequence
  ENSG00000205212_18 (sequence is synthesized)
gttatctgaccttttaggtttggttgggcatcagaaatcagtcggggagagagatctaaagaaagttgtggatatgaagatgtatttatggtaaaaaagttatgaaggaaagaaatgtta

SEQ ID NO: 747185 - DNA, 120 bp, Artificial Sequence
  ENSG00000205212_19 (sequence is synthesized)
tatgagagaggatcttgtatggcaaattcttgtcctaaagtagaatgactaattatgaaagagggaaatacaggaaaagtcagaaagttcatgtcatagatggtctgtggaagttgtgct

SEQ ID NO: 747186 - DNA, 120 bp, Artificial Sequence
  ENSG00000205212_20 (sequence is synthesized)
agggttcataaaatgagaaagaaaaacttacaactgctagatcttctcctgtctagaagtgttgtgtatgtgttggatatgtaaaggagccctaattacttggcttagaagaaaaggacg

SEQ ID NO: 747187 - DNA, 120 bp, Artificial Sequence
  ENSG00000205212_21 (sequence is synthesized)
gctcttaaatattttgtcagaaaaatagaatctccaatgccttttatttcacatgacttcagtaatctttgggaaataaagacagtgttaaaatcattggtaaaaaaaatcatcaaaatt

SEQ ID NO: 747188 - DNA, 120 bp, Artificial Sequence
  ENSG00000205212_22 (sequence is synthesized)
tatccattttgtctaatttaagtcagaggttaaattttagaagtgctttaacgtcataaattgattgactttggaaaattgttctgtttacctggtttggagctgctcaacttctaggta

SEQ ID NO: 747189 - DNA, 120 bp, Artificial Sequence
  ENSG00000205212_23 (sequence is synthesized)
aggcctgggggacaggtggagttagccatgtctcctagctatgctggaaagagtcagactttacctgcagttctgtcttgtatcctatacactgcacctggtacgttattaaaacttcct

SEQ ID NO: 747190 - DNA, 120 bp, Artificial Sequence
  ENSG00000205212_24 (sequence is synthesized)
gctgcttctaatctctgagttccactttaaatttttccatcacttgaatactatcctctgtactaaatttttccgcaattaaatacttagaatcatttttgcccacttgacccaagcatt

SEQ ID NO: 747191 - DNA, 120 bp, Artificial Sequence
  ENSG00000205212_25 (sequence is synthesized)
agtgatatatctttaaaatacttataatgtgtcacaatatatttagcaaatgtagcgaatggcatttttacttttgtcagcatttacatagcatttagcaatgctatctcaagtattttt

SEQ ID NO: 747192 - DNA, 120 bp, Artificial Sequence
  ENSG00000205212_26 (sequence is synthesized)
gcttggcgtggcagtgatcgcttggcttggcatttctggcttagcggtcctcctttcgcagattggaaaccgcgggctatcctgctgggaggttgtggccgaggcagtagctcgctactg

SEQ ID NO: 747193 - DNA, 120 bp, Artificial Sequence
  ENSG00000205213_0 (sequence is synthesized)
agagcgtgcaaccctagaagggaaaaggacgggaagagattgagccgcggctgggagacagcgagccagagtctgggtgtttgtgcgagagccacggcgggggctggggcgagtggccgg

SEQ ID NO: 747194 - DNA, 120 bp, Artificial Sequence
  ENSG00000205213_1 (sequence is synthesized)
catggctgaaggctgcgctctgcaaccttgaagagccgctgcattgagaggccagggacagggagaccggtgcgatggcagagcgcggcccccgccgctgcgccgggccggcccggctgg

SEQ ID NO: 747195 - DNA, 120 bp, Artificial Sequence
  ENSG00000205213_2 (sequence is synthesized)
cgtgagccgccggaggagcggggctgcctctgcgcgtccatggagcagcgggaagggcgaaactccggagcgccgcgtccctgcgccgctgcggcggactgctgaaggggccgagcccgc

SEQ ID NO: 747196 - DNA, 80 bp, Artificial Sequence
  ENSG00000205213_3 (sequence is synthesized)
gcggaccgccgaggaagagacccccgctccagcccgcaggccggctgcccgggggcggcgggggacatcggagggcagcg

SEQ ID NO: 747197 - DNA, 120 bp, Artificial Sequence
  ENSG00000205213_4 (sequence is synthesized)
ctagggctgctctgcttcctcgccctggggctgctcggctcggccgggcccagcggcgcggcgccgcctctctgcgcggcgccctgcagctgcgacggcgaccgtcgggtggactgctcc

SEQ ID NO: 747198 - DNA, 120 bp, Artificial Sequence
  ENSG00000205213_5 (sequence is synthesized)
accgtcgggtggactgctccgggaaggggctgacggccgtgcccgaggggctcagcgccttcacccaagcgctggatatcagtatgaacaacattactcagttgccagaagatgcattta

SEQ ID NO: 747199 - DNA, 120 bp, Artificial Sequence
  ENSG00000205213_6 (sequence is synthesized)
agaactttccttttctagaagagctacaattggcgggcaacgacctttcttttatccacccaaaggccttgtctgggttgaaagaactcaaagttctaacgctccagaataatcagttga

SEQ ID NO: 747200 - DNA, 120 bp, Artificial Sequence
  ENSG00000205213_7 (sequence is synthesized)
aaacagtacccagtgaagccattcgagggctgagtgctttgcagtctttgcgtttagatgccaaccatattacctcagtccccgaggacagttttgaaggacttgttcagttacggcatc

SEQ ID NO: 747201 - DNA, 120 bp, Artificial Sequence
  ENSG00000205213_8 (sequence is synthesized)
tgtggctggatgacaacagcttgacggaggtgcctgtgcaccccctcagcaatctgcccaccctacaggcgctgaccctggctctcaacaagatctcaagcatccctgactttgcattta

SEQ ID NO: 747202 - DNA, 120 bp, Artificial Sequence
  ENSG00000205213_9 (sequence is synthesized)
ccaacctttcaagcctggtagttctgcatcttcataacaataaaattagaagcctgagtcaacactgttttgatggactagataacctggagaccttagacttgaattataataacttgg

SEQ ID NO: 747203 - DNA, 120 bp, Artificial Sequence
  ENSG00000205213_10 (sequence is synthesized)
gggaatttcctcaggctattaaagcccttcctagccttaaagagctaggatttcatagtaattctatttctgttatccctgatggagcatttgatggtaatccactcttaagaactatac

SEQ ID NO: 747204 - DNA, 120 bp, Artificial Sequence
  ENSG00000205213_11 (sequence is synthesized)
atttgtatgataatcctctgtcttttgtggggaactcagcatttcacaatttatctgatcttcattccctagtcattcgtggtgcaagcatggtgcagcagttccccaatcttacaggaa

SEQ ID NO: 747205 - DNA, 120 bp, Artificial Sequence
  ENSG00000205213_12 (sequence is synthesized)
ctgtccacctggaaagtctgactttgacaggtacaaagataagcagcatacctaataatttgtgtcaagaacaaaagatgcttaggactttggacttgtcttacaataatataagagacc

SEQ ID NO: 747206 - DNA, 120 bp, Artificial Sequence
  ENSG00000205213_13 (sequence is synthesized)
ttccaagttttaatggttgccatgctctggaagaaatttctttacagcgtaatcaaatctaccaaataaaggaaggcacctttcaaggcctgatatctctaaggattctagatctgagta

SEQ ID NO: 747207 - DNA, 120 bp, Artificial Sequence
  ENSG00000205213_14 (sequence is synthesized)
gaaacctgatacatgaaattcacagtagagcttttgccacacttgggccaataactaacctagatgtaagtttcaatgaattaacttcctttcctacggaaggcctgaatgggctaaatc

SEQ ID NO: 747208 - DNA, 120 bp, Artificial Sequence
  ENSG00000205213_15 (sequence is synthesized)
aactgaaacttgtgggcaacttcaagctgaaagaagccttagcagcaaaagactttgttaacctcaggtctttatcagtaccatatgcttatcagtgctgtgcattttggggttgtgact

SEQ ID NO: 747209 - DNA, 120 bp, Artificial Sequence
  ENSG00000205213_16 (sequence is synthesized)
cttatgcaaatttaaacacagaagataacagcctccaggaccacagtgtggcacaggagaaaggtactgctgatgcagcaaatgtcacaagcactcttgaaaatgaagaacatagtcaaa

SEQ ID NO: 747210 - DNA, 120 bp, Artificial Sequence
  ENSG00000205213_17 (sequence is synthesized)
taattatccattgtacaccttcaacaggtgcttttaagccctgtgaatatttactgggaagctggatgattcgtcttactgtgtggttcattttcttggttgcattatttttcaacctgc

SEQ ID NO: 747211 - DNA, 120 bp, Artificial Sequence
  ENSG00000205213_18 (sequence is synthesized)
ttgttattttaacaacatttgcatcttgtacatcactgccttcgtccaaattgtttataggcttgatttctgtgtctaacttattcatgggaatctatactggcatcctaacttttcttg

SEQ ID NO: 747212 - DNA, 120 bp, Artificial Sequence
  ENSG00000205213_19 (sequence is synthesized)
atgctgtgtcctggggcagattcgctgaatttggcatttggtgggaaactggcagtggctgcaaagtagctgggtttcttgcagttttctcctcagaaagtgccatatttttattaatgc

SEQ ID NO: 747213 - DNA, 120 bp, Artificial Sequence
  ENSG00000205213_20 (sequence is synthesized)
tagcaactgtcgaaagaagcttatctgcaaaagatataatgaaaaatgggaagagcaatcatctcaaacagttccgggttgctgcccttttggctttcctaggtgctacagtagcaggct

SEQ ID NO: 747214 - DNA, 120 bp, Artificial Sequence
  ENSG00000205213_21 (sequence is synthesized)
taacgttagtgctattaaactcactagcatttttattaatggccgttatctacactaaactatactgcaacttggaaaaagaggacctctcagaaaactcacaatctagcatgattaagc

SEQ ID NO: 747215 - DNA, 120 bp, Artificial Sequence
  ENSG00000205213_22 (sequence is synthesized)
atgtcgcttggctaatcttcaccaattgcatctttttctgccctgtggcgtttttttcatttgcaccattgatcactgcaatctctatcagccccgaaataatgaagtctgttactctga

SEQ ID NO: 747216 - DNA, 120 bp, Artificial Sequence
  ENSG00000205213_23 (sequence is synthesized)
tattttttccattgcctgcttgcctgaatccagtcctgtatgttttcttcaacccaaagtttaaagaagactggaagttactgaagcgacgtgttaccaagaaaagtggatcagtttcag

SEQ ID NO: 747217 - DNA, 120 bp, Artificial Sequence
  ENSG00000205213_24 (sequence is synthesized)
tttccatcagtagccaaggtggttgtctggaacaggatttctactacgactgtggcatgtactcacatttgcagggcaacctgactgtttgcgactgctgcgaatcgtttcttttaacaa

SEQ ID NO: 747218 - DNA, 120 bp, Artificial Sequence
  ENSG00000205213_25 (sequence is synthesized)
agccagtatcatgcaaacacttgataaaatcacacagctgtcctgcattggcagtggcttcttgccaaagacctgagggctactggtccgactgtggcacacagtcggcccactctgatt

SEQ ID NO: 747219 - DNA, 120 bp, Artificial Sequence
  ENSG00000205213_26 (sequence is synthesized)
atgcagatgaagaagattcctttgtctcagacagttctgaccaggtgcaggcctgtggacgagcctgcttctaccagagtagaggattccctttggtgcgctatgcttacaatctaccaa

SEQ ID NO: 747220 - DNA, 120 bp, Artificial Sequence
  ENSG00000205213_27 (sequence is synthesized)
gagttaaagactgaactactgtgtgtgtaaccgtttcccccgtcaaccaaaatcagtgtttatagagtgaaccctattctcatctttcatctgggaagcacttctgtaatcactgcctgg

SEQ ID NO: 747221 - DNA, 120 bp, Artificial Sequence
  ENSG00000205213_28 (sequence is synthesized)
tgtcacttagaagaaggagaggtggcagtttatttctcaaaccagtcattttcaaagaacaggtgcctaaattataaattggtgaaaaatgcaatgtccaagcaatgtatgatctgtttg

SEQ ID NO: 747222 - DNA, 120 bp, Artificial Sequence
  ENSG00000205213_29 (sequence is synthesized)
aaacaaatatatgacttgaaaaggatcttaggtgtagtagagcaatataatgttagttttttctgatccataagaagcaaatttatacctatttgtgtattaagcacaagataaagaaca

SEQ ID NO: 747223 - DNA, 120 bp, Artificial Sequence
  ENSG00000205213_30 (sequence is synthesized)
gctgttaatattttttaaaaatctattttaaaatgtgattttctataactgaagaaaatatcttgctaattttacctaatgtttcatccttaatctcaggacaacttactgcagggccaa

SEQ ID NO: 747224 - DNA, 120 bp, Artificial Sequence
  ENSG00000205213_31 (sequence is synthesized)
aaaagggactgtcccagctagaactgtgagagtatacataggcattactttattatgttttcacttgccatccttgacataagagaactataaattttgtttaagcaatttataaatcta

SEQ ID NO: 747225 - DNA, 120 bp, Artificial Sequence
  ENSG00000205213_32 (sequence is synthesized)
aaacctgaagatgtttttaaaacaatattaacagctgttaggttaaaaaaatagctggacatttgttttcagtcattatacattgctttggtccaatcagtaattttttcttaagtgttt

SEQ ID NO: 747226 - DNA, 120 bp, Artificial Sequence
  ENSG00000205213_33 (sequence is synthesized)
tgtgattacactactagaaaaaaagtaaaaggctaattgctgtgtgggtttagtcgatttggctaaactactaactaatgtgggggtttaatagtatctgagggatttggtggcttcatg

SEQ ID NO: 747227 - DNA, 120 bp, Artificial Sequence
  ENSG00000205213_34 (sequence is synthesized)
taatgttctcattaatgaatacttcctaatatcgttggctctactaatattttccaatttgctgggatgtcacctagcaatagcttggattatatagaaagtaaactgtggtcaatactt

SEQ ID NO: 747228 - DNA, 120 bp, Artificial Sequence
  ENSG00000205213_35 (sequence is synthesized)
gcatttaattagacgaaacggggagtaattatgacacgaagtacttatgtttatttcttagtgagctggattatcttgaacctgtgctattaaatggaaatttccatacatcttccccat

SEQ ID NO: 747229 - DNA, 120 bp, Artificial Sequence
  ENSG00000205213_36 (sequence is synthesized)
actattttttataaaagagcctattcaatagctcagaggttgaactctggttaaacaagataatatgttattaataaaaatagaagaagaaagaataaagcttagtcctgtgtctttaaa

SEQ ID NO: 747230 - DNA, 120 bp, Artificial Sequence
  ENSG00000205213_37 (sequence is synthesized)
aattaaaaattttacttgattcccatctatgggctttagacctattactgggtggagtcttaaagttataattgttcaatatgttttttgaacagtgtgctaaatcaatagcaaacccac

SEQ ID NO: 747231 - DNA, 120 bp, Artificial Sequence
  ENSG00000205213_38 (sequence is synthesized)
tgccatattagttattctgaatatactaaaaaaatccagctagattgcagtttaataattaaactgtacatactgtgcatataatgaatttttatcttatgtaaattatttttagaacac

SEQ ID NO: 747232 - DNA, 120 bp, Artificial Sequence
  ENSG00000205213_39 (sequence is synthesized)
aagttgggaaatgtggcttctgttcatttcgtttaattaaagctacctcctaaactatagtggctgccagtagcagactgttaaattgtggtttatatactttttgcattgtaaatagtc

SEQ ID NO: 747233 - DNA, 120 bp, Artificial Sequence
  ENSG00000205213_40 (sequence is synthesized)
tttgttgtacattgtcagtgtaataaaaacagaatctttgtatatcaaaatcatgtagtttgtataaaatgtgggaaggatttatttacagtgtgttgtaattttgtaaggccaactatt

SEQ ID NO: 747234 - DNA, 120 bp, Artificial Sequence
  ENSG00000205213_41 (sequence is synthesized)
tacaagttttaaaaattgctatcatgtatatttacacatctgataaatattaaatcataacttggtaagaaactcctaattaaaaggttttttccaaaattcaggttattgaaaactttt

SEQ ID NO: 747235 - DNA, 120 bp, Artificial Sequence
  ENSG00000205213_42 (sequence is synthesized)
cattttattcatttaaaaactagaataacagatatataaaagtgttaatctttgtgctatatggtatgaaatacaatattgtactcagtgttttgaattattaaagtttctagaaagcaa

SEQ ID NO: 747236 - DNA, 120 bp, Artificial Sequence
  ENSG00000205213_43 (sequence is synthesized)
agagaacattttcgaatgctgagccagtttgactgaaagaaaagacagaaacaagatttgggggcagaatgcaagttggtttcaaaggtcttgggtgtaagaaggtgacaacttgcaatt

SEQ ID NO: 747237 - DNA, 120 bp, Artificial Sequence
  ENSG00000205213_44 (sequence is synthesized)
aactgtgatcagactgtgtgactgtagattagtgttttcctcctggtccatgtgggaaatcaagcccagtatcaacatctaatgtcacaagtgtttttgagttactgtgaagatgatatc

SEQ ID NO: 747238 - DNA, 120 bp, Artificial Sequence
  ENSG00000205213_45 (sequence is synthesized)
tagtccatatgtaaatatgtgagcacttattctatatgggaataaattttgcttactatcttgagttgaattatttcttacatgaataatgtttttccgcaggactttgacaggtacaaa

SEQ ID NO: 747239 - DNA, 120 bp, Artificial Sequence
  ENSG00000205213_46 (sequence is synthesized)
gccttagcagcaaaagactttgttaacctcaggtgtgtttttgcttatttttcttttttgttgaagttatggtaggctccaaaattacagagtgtcctggttttttgctctggttctcag

SEQ ID NO: 747240 - DNA, 120 bp, Artificial Sequence
  ENSG00000205213_47 (sequence is synthesized)
actggagcccttgatggcctcaaagagataatacagctattcaccagaatggttttttaatacagtggacttttcattagcaataagatggcagaaaccatgtaaatgtgaacctgcaga

SEQ ID NO: 747241 - DNA, 120 bp, Artificial Sequence
  ENSG00000205213_48 (sequence is synthesized)
aaacaatgctataatacttcatgaaggttttagagttatgggggactgcattaaatataatagagagtattgttacgaggccgagcgtggtggctcgcacctgtaatcccagtactttgg

SEQ ID NO: 747242 - DNA, 89 bp, Artificial Sequence
  ENSG00000205213_49 (sequence is synthesized)
ccgagcgtggtggctcgcacctgtaatcccagtactttggggaaggccaaggtgggctgatcacttgacactgagaccctgtctctaca

SEQ ID NO: 747243 - DNA, 120 bp, Artificial Sequence
  ENSG00000205220_0 (sequence is synthesized)
agacgtgaagcctagcagaggactttttagctgctcactggccccgcttgtctggccgactcatccgcccgcgacccctaatcccctctgcctgccccaagatgctgaagccagccctgg

SEQ ID NO: 747244 - DNA, 120 bp, Artificial Sequence
  ENSG00000205220_1 (sequence is synthesized)
agccccgagggggcttctccttcgagaactgccaaagaaatgcatcattggaacgcgtcctcccggggctcaaggtccctcacgcacgcaagaccgggaccaccatcgcgggcctggtgt

SEQ ID NO: 747245 - DNA, 120 bp, Artificial Sequence
  ENSG00000205220_2 (sequence is synthesized)
tccaagacggggtcattctgggcgccgatacgcgagccactaacgattcggtcgtggcggacaagagctgcgagaagatccacttcatcgcccccaaaatctactgctgtggggctggag

SEQ ID NO: 747246 - DNA, 120 bp, Artificial Sequence
  ENSG00000205220_3 (sequence is synthesized)
tagccgcggacgccgagatgaccacacggatggtggcgtccaagatggagctacacgcgttatctacgggccgcgagccccgcgtggccacggtcactcgcatcctgcgccagacgctct

SEQ ID NO: 747247 - DNA, 120 bp, Artificial Sequence
  ENSG00000205220_4 (sequence is synthesized)
gtgggtgcatcgctgatcgtgggcggcgtagacctgactggaccgcagctctacggtgtgcatccccatggctcctacagccgtctgcccttcacagccctgggctctggtcaggacgcg

SEQ ID NO: 747248 - DNA, 120 bp, Artificial Sequence
  ENSG00000205220_5 (sequence is synthesized)
gccctggcggtgctagaagaccggttccagccgaacatgacgctggaggctgctcaggggctgctggtggaagccgtcaccgccgggatcttgggtgacctgggctccgggggcaatgtg

SEQ ID NO: 747249 - DNA, 120 bp, Artificial Sequence
  ENSG00000205220_6 (sequence is synthesized)
gacgcatgtgtgatcacaaagactggcgccaagctgctgcggacactgagctcacccacagagcccgtgaagaggtctggccgctaccactttgtgcctggaaccacagctgtcctgacc

SEQ ID NO: 747250 - DNA, 120 bp, Artificial Sequence
  ENSG00000205220_7 (sequence is synthesized)
cagacagtgaagccactaaccctggagctagtggaggaaactgtgcaggctatggaggtggagtaagctgaggcttagagcttggaacaagggggaataaacccagaaaatacagttaaa

SEQ ID NO: 747251 - DNA, 120 bp, Artificial Sequence
  ENSG00000205220_8 (sequence is synthesized)
tgggggtgggggagggtgtgttggtcgacttgggttccaggcttaccccggaagatgagggagacggggaccaggttaggggaagcaacaggggtcttgaaagcagagccgaaacatggg

SEQ ID NO: 747252 - DNA, 120 bp, Artificial Sequence
  ENSG00000205220_9 (sequence is synthesized)
cccttctcctcgaactctgcccctgtgaccttggcctcactccaaacggcgtcgcagcggttgacttcagatgcttctcctgccttcaggctctggtcaggacgcggccctggcggtgct

SEQ ID NO: 747253 - DNA, 120 bp, Artificial Sequence
  ENSG00000205220_10 (sequence is synthesized)
agaagaccggttccagccgaacatgacggtgagcggcctctgtccccgactttgtggtcgctggtgggatgtgcacccgggagctgggggagcacaggaccctggcccagtgcgggtggc

SEQ ID NO: 747254 - DNA, 120 bp, Artificial Sequence
  ENSG00000205221_0 (sequence is synthesized)
aattcagcactaaaaccagtgtgagaagcagtatgtgtgagcatgtgtgtgtgtgtatgtgtgtgggggggggtgtaaaatgtgtttttcaaagtactgagaggttgatgggactgttcg

SEQ ID NO: 747255 - DNA, 120 bp, Artificial Sequence
  ENSG00000205221_1 (sequence is synthesized)
attagctcctctgagaagaagagaaaaggttcttggacctctccctgtttcttccttagaataatttggatgggatttgtgatgcaggaaagcctaagggaaaaagaatattcattctgt

SEQ ID NO: 747256 - DNA, 120 bp, Artificial Sequence
  ENSG00000205221_2 (sequence is synthesized)
gtggtgaaaattttttgaaaaaaaaattgccttcttcaaacaagggtgtcattctgatatttatgaggactgttgttctcactatgaaggcatctgttattgaaatgttccttgttttgc

SEQ ID NO: 747257 - DNA, 120 bp, Artificial Sequence
  ENSG00000205221_3 (sequence is synthesized)
tggtgactggagtacattcaaacaaagaaacggcaaagaagattaaaaggcccaagttcactgtgcctcagatcaactgcgatgtcaaagccggaaagatcatcgatcctgagttcattg

SEQ ID NO: 747258 - DNA, 120 bp, Artificial Sequence
  ENSG00000205221_4 (sequence is synthesized)
tgaaatgtccagcaggatgccaagaccccaaataccatgtttatggcactgacgtgtatgcatcctactccagtgtgtgtggcgctgccgtacacagtggtgtgcttgataattcaggag

SEQ ID NO: 747259 - DNA, 120 bp, Artificial Sequence
  ENSG00000205221_5 (sequence is synthesized)
ggaaaatacttgttcggaaggttgctggacagtctggttacaaagggagttattccaacggtgtccaatcgttatccctaccacgatggagagaatcctttatcgtcttagaaagtaaac

SEQ ID NO: 747260 - DNA, 120 bp, Artificial Sequence
  ENSG00000205221_6 (sequence is synthesized)
ccaaaaagggtgtaacctacccatcagctcttacatactcatcatcgaaaagtccagctgcccaagcaggtgagaccacaaaagcctatcagaggccacctattccagggacaactgcac

SEQ ID NO: 747261 - DNA, 120 bp, Artificial Sequence
  ENSG00000205221_7 (sequence is synthesized)
agccggtcactctgatgcagcttctggctgtcactgtagctgtggccacccccaccaccttgccaaggccatccccttctgctgcttctaccaccagcatccccagaccacaatcagtgg

SEQ ID NO: 747262 - DNA, 120 bp, Artificial Sequence
  ENSG00000205221_8 (sequence is synthesized)
gccacaggagccaggagatggatctctggtccactgccacctacacaagcagccaaaacaggcccagagctgatccaggtatccaaaggcaagatccttcaggagctgccttccagaaac

SEQ ID NO: 747263 - DNA, 120 bp, Artificial Sequence
  ENSG00000205221_9 (sequence is synthesized)
ctgttggagcggatgtcagcctgggagagatggactcatggaaacctggatcggtccttttagatgaaggacttgttccaaaagaagaattgagcacacagtctttggagccagtatccc

SEQ ID NO: 747264 - DNA, 120 bp, Artificial Sequence
  ENSG00000205221_10 (sequence is synthesized)
tgggagatccaaactgcaaaattgacttgtcgtttttaattgatgggagcaccagcattggcaaacggcgattccgaatccagaagcagctcctggctgatgttgcccaagctcttgaca

SEQ ID NO: 747265 - DNA, 120 bp, Artificial Sequence
  ENSG00000205221_11 (sequence is synthesized)
gctactcactttaacctcaagacacacacgaattctcgagatctgaagacagccatagagaaaattactcagagaggaggactttctaatgtaggtcgggccatctcctttgtgaccaag

SEQ ID NO: 747266 - DNA, 120 bp, Artificial Sequence
  ENSG00000205221_12 (sequence is synthesized)
aacttcttttccaaagccaatggaaacagaagcggggctcccaatgtggtggtggtgatggtggatggctggcccacggacaaagtggaggaggcttcaagacttgcgagagagtcagga

SEQ ID NO: 747267 - DNA, 120 bp, Artificial Sequence
  ENSG00000205221_13 (sequence is synthesized)
atcaacattttcttcatcaccattgaaggtgctgctgaaaatgagaagcagtatgtggtggagcccaactttgcaaacaaggccgtgtgcagaacaaacggcttctactcgctccacgtg

SEQ ID NO: 747268 - DNA, 120 bp, Artificial Sequence
  ENSG00000205221_14 (sequence is synthesized)
cagagctggtttggcctccacaagaccctgcagcctctggtgaagcgggtctgcgacactgaccgcctggcctgcagcaagacctgcttgaactcggctgacattggcttcgtcatcgac

SEQ ID NO: 747269 - DNA, 120 bp, Artificial Sequence
  ENSG00000205221_15 (sequence is synthesized)
ggctccagcagtgtggggacgggcaacttccgcaccgtcctccagtttgtgaccaacctcaccaaagagtttgagatttccgacacggacacgcgcatcggggccgtgcagtacacctac

SEQ ID NO: 747270 - DNA, 120 bp, Artificial Sequence
  ENSG00000205221_16 (sequence is synthesized)
gaacagcggctggagtttgggttcgacaagtacagcagcaagcctgacatcctcaacgccatcaagagggtgggctactggagtggtggcaccagcacgggggctgccatcaacttcgcc

SEQ ID NO: 747271 - DNA, 120 bp, Artificial Sequence
  ENSG00000205221_17 (sequence is synthesized)
ctggagcagctcttcaagaagtccaagcccaacaagaggaagttaatgatcctcatcaccgacgggaggtcctacgacgacgtccggatcccagccatggctgcccatctgaagggagtg

SEQ ID NO: 747272 - DNA, 120 bp, Artificial Sequence
  ENSG00000205221_18 (sequence is synthesized)
atcacctatgcgataggcgttgcctgggctgcccaagaggagctagaagtcattgccactcaccccgccagagaccactccttctttgtggacgagtttgacaacctccatcagtatgtc

SEQ ID NO: 747273 - DNA, 120 bp, Artificial Sequence
  ENSG00000205221_19 (sequence is synthesized)
cccaggatcatccagaacatttgtacagagttcaactcacagcctcggaactgaattcagagcaggcagagcaccagcaagtgctgctttactaactgacgtgttggaccaccccaccgc

SEQ ID NO: 747274 - DNA, 120 bp, Artificial Sequence
  ENSG00000205221_20 (sequence is synthesized)
ttaatggggcacgcacggtgcatcaagtcttgggcagggcatggagaaacaaatgtcttgttattattctttgccatcatgctttttcatattccaaaacttggagttacaaagatgatc

SEQ ID NO: 747275 - DNA, 120 bp, Artificial Sequence
  ENSG00000205221_21 (sequence is synthesized)
acaaacgtatagaatgagccaaaaggctacatcatgttgagggtgctggagattttacattttgacaattgttttcaaaataaatgttcggaatacagtgcagcccttacgacaggctta

SEQ ID NO: 747276 - DNA, 120 bp, Artificial Sequence
  ENSG00000205221_22 (sequence is synthesized)
cgtagagcttttgtgagatttttaagttgttatttctgattagaactctgtaaccctcagcaagtttcatttttgtcatgacaatgtaggaattgctgaattaaatgtttagaaggatga

SEQ ID NO: 747277 - DNA, 120 bp, Artificial Sequence
  ENSG00000205221_23 (sequence is synthesized)
ccttctgagtccatgaacacgcgacgtgttttgggagatagcggagaaattaacatcttaaccggtcaagctccactggctctggcaatattttaacagatgccaggaacatgggcacag

SEQ ID NO: 747278 - DNA, 120 bp, Artificial Sequence
  ENSG00000205221_24 (sequence is synthesized)
aaatcaatgagatcagatggctggggctgaagaatgaaagctttattttttgtttttgcaattccgagattgtgtctctatatttgtgtcattttcattcagattgactgttgccttgag

SEQ ID NO: 747279 - DNA, 120 bp, Artificial Sequence
  ENSG00000205221_25 (sequence is synthesized)
ttttaatgtattgttgctttagaaaatgacatgacattctgtccggaaatgtttcctggcagctaaaaggaaaaagctgtatctacttagatatgaaatgaagagaagcaaagagaacga

SEQ ID NO: 747280 - DNA, 120 bp, Artificial Sequence
  ENSG00000205221_26 (sequence is synthesized)
ggtggtttatgtgataacagcaagctgctcatccaaataacccaggccaaaaatacactgtctacaaggttgtgccaactcagctttcatgtgaaccacaaaagggagtatcggtagacc

SEQ ID NO: 747281 - DNA, 120 bp, Artificial Sequence
  ENSG00000205221_27 (sequence is synthesized)
tcaggccaagaaaatacctttttccaggtttctgtgttaaatcaagaactgtactatgcattattgtatctccagaggtgttttgatttcccacacaaagagaaactgtgagtcgcttta

SEQ ID NO: 747282 - DNA, 120 bp, Artificial Sequence
  ENSG00000205221_28 (sequence is synthesized)
caccaggcaatggagaagaatgggtgggaagagagacggcccccatcagtcagctgagcacctagatgactttcgccaacctgctctattattatacttaggatagaaatggagggctcg

SEQ ID NO: 747283 - DNA, 120 bp, Artificial Sequence
  ENSG00000205221_29 (sequence is synthesized)
tgttgacatccagtctcaatctttcatttggcggtaataaatcactcttatttcagatatgaataggtttctcactgaaacagatacatagatattgataataaacaatcaaaagaacaa

SEQ ID NO: 747284 - DNA, 120 bp, Artificial Sequence; identical to SEQ ID NO: 594912
  ENSG00000205238_0 (sequence is synthesized)

SEQ ID NO: 747285 - DNA, 75 bp, Artificial Sequence; identical to SEQ ID NO: 594913
  ENSG00000205238_1 (sequence is synthesized)

SEQ ID NO: 747286 - DNA, 120 bp, Artificial Sequence
  ENSG00000205238_2 (sequence is synthesized)
tcgcccctgagcctgaggagacctgggtagtggagatgctgtgtgggctcaagatgaagctgaagcaacagcgagtgtcacccatcctccctgagcaccacaaggacttcaacagtcagc

SEQ ID NO: 747287 - DNA, 120 bp, Artificial Sequence; identical to SEQ ID NO: 594915
  ENSG00000205238_3 (sequence is synthesized)

SEQ ID NO: 747288 - DNA, 120 bp, Artificial Sequence; identical to SEQ ID NO: 565627
  ENSG00000205238_4 (sequence is synthesized)

SEQ ID NO: 747289 - DNA, 120 bp, Artificial Sequence; identical to SEQ ID NO: 594917
  ENSG00000205238_5 (sequence is synthesized)

SEQ ID NO: 747290 - DNA, 120 bp, Artificial Sequence; identical to SEQ ID NO: 594918
  ENSG00000205238_6 (sequence is synthesized)

SEQ ID NO: 747291 - DNA, 120 bp, Artificial Sequence; identical to SEQ ID NO: 594919
  ENSG00000205238_7 (sequence is synthesized)

SEQ ID NO: 747292 - DNA, 120 bp, Artificial Sequence; identical to SEQ ID NO: 594920
  ENSG00000205238_8 (sequence is synthesized)

SEQ ID NO: 747293 - DNA, 120 bp, Artificial Sequence; identical to SEQ ID NO: 594921
  ENSG00000205238_9 (sequence is synthesized)

SEQ ID NO: 747294 - DNA, 71 bp, Artificial Sequence; identical to SEQ ID NO: 594922
  ENSG00000205238_10 (sequence is synthesized)

SEQ ID NO: 747295 - DNA, 71 bp, Artificial Sequence; identical to SEQ ID NO: 594923
  ENSG00000205238_11 (sequence is synthesized)

SEQ ID NO: 747296 - DNA, 63 bp, Artificial Sequence; identical to SEQ ID NO: 594924
  ENSG00000205238_12 (sequence is synthesized)

SEQ ID NO: 747297 - DNA, 90 bp, Artificial Sequence; identical to SEQ ID NO: 594925
  ENSG00000205238_13 (sequence is synthesized)

SEQ ID NO: 747298 - DNA, 120 bp, Artificial Sequence
  ENSG00000205250_0 (sequence is synthesized)
ggcctggctgaggggaggcggcgggcgggcgcgatggcggaggccgggccacaggcgccgccgcccccgggcactccaagccggcacgaaaagagcctgggactgctcaccaccaagttc

SEQ ID NO: 747299 - DNA, 120 bp, Artificial Sequence
  ENSG00000205250_1 (sequence is synthesized)
ccggcacgaaaagagcctgggactgctcaccaccaagttcgtgtcccttctgcaggaggccaaggacggcgtgcttgacctcaagctggcagctgacaccctagctgtacgccagaagcg

SEQ ID NO: 747300 - DNA, 120 bp, Artificial Sequence
  ENSG00000205250_2 (sequence is synthesized)
gcggatttacgacattaccaatgttttggaaggtatcgggctaatcgagaaaaagtccaagaacagcatccagtggaagggtgtggggcctggctgcaatacccgggagattgctgacaa

SEQ ID NO: 747301 - DNA, 120 bp, Artificial Sequence
  ENSG00000205250_3 (sequence is synthesized)
actgattgagctcaaggcagagatcgaggagctgcagcagcgggagcaagaactagaccagcacaaggtgtgggtgcagcagagcatccggaacgtcacagaggacgtgcagaacagctg

SEQ ID NO: 747302 - DNA, 120 bp, Artificial Sequence
  ENSG00000205250_4 (sequence is synthesized)
tttggcctacgtcactcatgaggacatctgcagatgctttgctggagataccctcttggccatccgggccccatcaggcaccagcctggaggtgcccatcccagagggtctcaatgggca

SEQ ID NO: 747303 - DNA, 120 bp, Artificial Sequence
  ENSG00000205250_5 (sequence is synthesized)
gaagaagtaccagattcacctgaagagtgtgagtggtcccattgaggttctgctggtgaacaaggaggcatggagctcaccccctgtggctgtgcctgtgccaccacctgaagatttgct

SEQ ID NO: 747304 - DNA, 120 bp, Artificial Sequence
  ENSG00000205250_6 (sequence is synthesized)
ccagagcccatctgctgtttctacacctccacctctgcccaagcctgccctagcccagtcccaggaagcctcacgtccaaatagtcctcagctcactcccactgctgtccctggcagtgc

SEQ ID NO: 747305 - DNA, 120 bp, Artificial Sequence
  ENSG00000205250_7 (sequence is synthesized)
agaagtccagggaatggctggcccagcagctgagatcacagtgagtggcggccctgggactgatagcaaggacagtggtgagctcagttcactcccactgggcccaacaacactggacac

SEQ ID NO: 747306 - DNA, 120 bp, Artificial Sequence
  ENSG00000205250_8 (sequence is synthesized)
aacagtaacagcagcagttcgtccggacccaacccttctacctcctttgagcccatcaaggcagaccccacaggtgttttggaactccccaaagagctgtcagaaatctttgatcccaca

SEQ ID NO: 747307 - DNA, 120 bp, Artificial Sequence
  ENSG00000205250_9 (sequence is synthesized)
cgagagtgcatgagctcggagctgctggaggagttgatgtcctcagaagtgtttgcccctctgcttcgtctttctccacccccgggagaccacgattatatctacaacctggacgagagt

SEQ ID NO: 747308 - DNA, 120 bp, Artificial Sequence
  ENSG00000205250_10 (sequence is synthesized)
gaaggtgtctgtgacctctttgatgtgcctgttctcaacctctgactgacagggacatgccctgtgtggctgggacccagactgtctgacctgggggttgcctggggacctctcccaccc

SEQ ID NO: 747309 - DNA, 120 bp, Artificial Sequence
  ENSG00000205250_11 (sequence is synthesized)
gacccctacagagcttgagagccacagacgcctggcttctccggcctcccctcaccgcacagttctggccacagctcccgctcctgtgctggcacttctgtgctcgcagagcaggggaac

SEQ ID NO: 747310 - DNA, 120 bp, Artificial Sequence
  ENSG00000205250_12 (sequence is synthesized)
aggactcagcccccatcaccgtggagccaaagtgtttgcttctccctttctgcggccttcgccagcccaggctcggctgccacccagtggcacagaaccgaggagctgccattacccccc

SEQ ID NO: 747311 - DNA, 120 bp, Artificial Sequence
  ENSG00000205250_13 (sequence is synthesized)
atagggggcagtgtcttgttcctgccagcctcagtgtcttgcttctgccagctccttcccctaggagggaagggtggggtggaactgggcacatgccagcaccacttctagcttccttcg

SEQ ID NO: 747312 - DNA, 120 bp, Artificial Sequence
  ENSG00000205250_14 (sequence is synthesized)
ctatcccccaccccctgaccctccagctcctcctggccctctcacgtgcccacttctgctgggcctttagccctagaacctgcaggtggtgggggcggctaccaagaaggaacagaggtc

SEQ ID NO: 747313 - DNA, 120 bp, Artificial Sequence
  ENSG00000205250_15 (sequence is synthesized)
tctggggaggagtctgggtggtccagccctgatgattggccccacctcctgctgccccataaccctctcttcatttcggctttttcatttaccctcatttagagccatttgcagagattt

SEQ ID NO: 747314 - DNA, 120 bp, Artificial Sequence
  ENSG00000205250_16 (sequence is synthesized)
agaaagatttacagtaacgaatggattcctatataaagattatttttatactttttgcagcaaaaggaaattgtaatatttgtacagtgttcaagtgaataaaaaccatgcctaaggcta

SEQ ID NO: 747315 - DNA, 120 bp, Artificial Sequence
  ENSG00000205250_17 (sequence is synthesized)
aaccccgggggcggcccagctgggtcctccgagagccggccgccatcgtgtgctttctcacaggagagaagccgggggatgtttcattcattcggccgaggccatcgagctacagctatg

SEQ ID NO: 747316 - DNA, 120 bp, Artificial Sequence
  ENSG00000205250_18 (sequence is synthesized)
ggccaggctcgggctgcaggtgttcgtcctcgtggcccttcctggctggcgaggagaagagctgcctatgggacagagctgcggtcctgagctgcagtagcgcctgggaggcactacagg

SEQ ID NO: 747317 - DNA, 120 bp, Artificial Sequence
  ENSG00000205250_19 (sequence is synthesized)
gttggaatccagattactcccttcccagaccacgtctcagggtggctgggggtacaccccagagtggggctgagcattctccattctctctgccaggcagctgacaccctagctgtacgc

SEQ ID NO: 747318 - DNA, 120 bp, Artificial Sequence
  ENSG00000205250_20 (sequence is synthesized)
ccacccagaagtgtcgggcgtggggtggagggtgccgaagaaggcaggggccatgggacccagagttctcagcagtccctctcagccccactccctgggctcaggggtgtggggcctggc

SEQ ID NO: 747319 - DNA, 120 bp, Artificial Sequence
  ENSG00000205250_21 (sequence is synthesized)
ctcttgggagtttgtcttatagccactggccatggcccagcctcaggctccctcctcagagcccctccccttccactcttagcctgtgatccctcccccggtggacctgagtccccagaa

SEQ ID NO: 747320 - DNA, 120 bp, Artificial Sequence
  ENSG00000205250_22 (sequence is synthesized)
cggtctctgagggcctgtgtgtcagaccttagctaaagaattgggtcttttctgtagtctgccatctgtcaccatagggcatcagccattctccttaaccctcacactttggcctacgtc

SEQ ID NO: 747321 - DNA, 120 bp, Artificial Sequence
  ENSG00000205250_23 (sequence is synthesized)
tgctgggattatgggtgtgagccactgtgccccgctgatgtgtttcttctccatcttgtatgctcctgactggtcatgggaaagggatgttggccttggctagaacaccctcacctaggg

SEQ ID NO: 747322 - DNA, 120 bp, Artificial Sequence
  ENSG00000205250_24 (sequence is synthesized)
ggatgttggccttggctagaacaccctcacctagggatcagccatcggtagaggaatgaggtgcctgtggccagtgatctttcactccacataattgaacccagatttcctggttactga

SEQ ID NO: 747323 - DNA, 120 bp, Artificial Sequence
  ENSG00000205250_25 (sequence is synthesized)
ctggcaatgcctaattctccttgggtctgggaaccaggcttgtggtcctcctgtgtctgggttccagcacagccagtttcaacgacctcttcctgaccttgtatgactgggtttgggggc

SEQ ID NO: 747324 - DNA, 120 bp, Artificial Sequence
  ENSG00000205250_26 (sequence is synthesized)
aggagttgatgtcctcagaagggacatgccctgtgtggctgggacccagactgtctgacctgggggttgcctggggacctctcccacccgacccctacagagcttgagagccacagacgc

SEQ ID NO: 747325 - DNA, 120 bp, Artificial Sequence
  ENSG00000205268_0 (sequence is synthesized)
ggaaggcagctgcttgaggtccaaggcagtcagtgtcccctctcttttgcctcgggacagctggtatttatcagactcctaagaagttttccttgctccctagtagaagagagagattat

SEQ ID NO: 747326 - DNA, 120 bp, Artificial Sequence
  ENSG00000205268_1 (sequence is synthesized)
gcagcgggcttttgattgatccaatgggaattacattgatctggtgtctggccttggttcttatcaagtggatcacctctaagaggcgtggagctatttcctatgacagttctgatcaga

SEQ ID NO: 747327 - DNA, 120 bp, Artificial Sequence
  ENSG00000205268_2 (sequence is synthesized)
ctgcattatacattcgtatgctaggagatgtacgtgtaaggagccgagcaggatttgaatcagaaagaagaggttctcacccatatattgattttcgtattttccactctcaatctgaaa

SEQ ID NO: 747328 - DNA, 120 bp, Artificial Sequence
  ENSG00000205268_3 (sequence is synthesized)
ttgaagtgtctgtctctgcaaggaatatcagaaggctactaagtttccagcgatatcttagatcttcacgcttttttcgtggtactgcggtttcaaattccctaaacattttagatgatg

SEQ ID NO: 747329 - DNA, 120 bp, Artificial Sequence
  ENSG00000205268_4 (sequence is synthesized)
attataatggacaagccaagtgtatgctggaaaaagttggaaattggaattttgatatctttctatttgatagactaacaaatggaaatagtctagtaagcttaacctttcatttattta

SEQ ID NO: 747330 - DNA, 120 bp, Artificial Sequence
  ENSG00000205268_5 (sequence is synthesized)
gtcttcatggattaattgagtacttccatttagatatgatgaaacttcgtagatttttagttatgattcaagaagattaccacagtcaaaatccttaccataacgcagtccacgctgcgg

SEQ ID NO: 747331 - DNA, 120 bp, Artificial Sequence
  ENSG00000205268_6 (sequence is synthesized)
atgttactcaggccatgcactgttacttaaaggaacctaagcttgccaattctgtaactccttgggatatcttgctgagcttaattgcagctgccactcatgatctggatcatccaggtg

SEQ ID NO: 747332 - DNA, 120 bp, Artificial Sequence
  ENSG00000205268_7 (sequence is synthesized)
ttaatcaacctttccttattaaaactaaccattacttggcaactttatacaagaatacctcagtactggaaaatcaccactggagatctgcagtgggcttattgagagaatcaggcttat

SEQ ID NO: 747333 - DNA, 120 bp, Artificial Sequence
  ENSG00000205268_8 (sequence is synthesized)
tctcacatctgccattagaaagcaggcaacaaatggagacacagataggtgctctgatactagccacagacatcagtcgccagaatgagtatctgtctttgtttaggtcccatttggata

SEQ ID NO: 747334 - DNA, 120 bp, Artificial Sequence
  ENSG00000205268_9 (sequence is synthesized)
gaggtgatttatgcctagaagacaccagacacagacatttggttttacagatggctttgaaatgtgctgatatttgtaacccatgtcggacgtgggaattaagcaagcagtggagtgaaa

SEQ ID NO: 747335 - DNA, 120 bp, Artificial Sequence
  ENSG00000205268_10 (sequence is synthesized)
aggagatatagaaaaaaaatatcatttgggtgtgagtccactttgcgatcgtcacactgaatctattgccaacatccagattggttttatgacttacctagtggagcctttatttacaga

SEQ ID NO: 747336 - DNA, 120 bp, Artificial Sequence
  ENSG00000205268_11 (sequence is synthesized)
atgggccaggttttccaatacaaggctatcccagacaatgcttggacacgtggggctgaataaagccagctggaagggactgcagagagaacagtcgagcagtgaggacactgatgctgc

SEQ ID NO: 747337 - DNA, 120 bp, Artificial Sequence
  ENSG00000205268_12 (sequence is synthesized)
atttgagttgaactcacagttattacctcaggaaaatcggttatcataacccccagaaccagtgggacaaactgcctcctggaggtttttagaaatgtgaaatggggtcttgaggtgaga

SEQ ID NO: 747338 - DNA, 120 bp, Artificial Sequence
  ENSG00000205268_13 (sequence is synthesized)
gaacttaactcttgactgccaaggtttccaagtgagtgatgccagccagcattatttatttccaagatttcctctgttggatcatttgaacccacttgttaattgcaagacccgaacata

SEQ ID NO: 747339 - DNA, 120 bp, Artificial Sequence
  ENSG00000205268_14 (sequence is synthesized)
cagcaatatgaatttggctttcatgtgaaaccttgaatatgcaaagcccagcaggagagaatccgaaaggagtaacaaaggaagttttgatatgtgccacgactttttcaaagcatctaa

SEQ ID NO: 747340 - DNA, 120 bp, Artificial Sequence
  ENSG00000205268_15 (sequence is synthesized)
tcttcaaaacgtgaaacttgaattgttcagcaacaatctcttggaatttaaccagtctgatgcaacaatgtgtatcttgtaccttccactaagttctctctgagaaaatggaaatgtgaa

SEQ ID NO: 747341 - DNA, 120 bp, Artificial Sequence
  ENSG00000205268_16 (sequence is synthesized)
gtgcccagcctctgctgcctctggcaagacaatgtttacaaatcaactctgaaaatattggttctaaattgccttggagcatgattgtgaaggaaccactcaaacaaatttaaagatcaa

SEQ ID NO: 747342 - DNA, 120 bp, Artificial Sequence
  ENSG00000205268_17 (sequence is synthesized)
actttagactgcagctctttccccctggtttgcctttttcttctttggatgccaccaaagcctcccatttgctatagttttatttcatgcactggaaactgagcatttatcgtagagtac

SEQ ID NO: 747343 - DNA, 120 bp, Artificial Sequence
  ENSG00000205268_18 (sequence is synthesized)
cgccaagctttcactccagtgccgtttggcaatgcaattttttttagcaattagtttttaatttggggtgggaggggaagaacaccaatgtcctagctgtattatgattctgcagtgaag

SEQ ID NO: 747344 - DNA, 120 bp, Artificial Sequence
  ENSG00000205268_19 (sequence is synthesized)
acattgcatgttgttttcactactgtacacttgacctgcacatgcgagaaaaaggtggaatgtttaaaacaccataatcagctcagggtatttgccaatctgaaataaaagtgggatggg

SEQ ID NO: 747345 - DNA, 120 bp, Artificial Sequence
  ENSG00000205268_20 (sequence is synthesized)
gctgctcctgagtcccgcgcgccctgggtctggccgctggctccagctgtcttttcttgcactgctttgctccgttcgtgctgcgctcgaactctgcagtccgggtacctgctcctctcg

SEQ ID NO: 747346 - DNA, 120 bp, Artificial Sequence
  ENSG00000205268_21 (sequence is synthesized)
gccgaggagccccagggcggcggggttccctttccgactttgcctgtgctggccccgcttgcaccccgtcccccctcgcctggagcgaggcgcgcgccggtcctggtaattggcgccgcg

SEQ ID NO: 747347 - DNA, 80 bp, Artificial Sequence
  ENSG00000205268_22 (sequence is synthesized)
ctggggttggggaggcgtgagcgcggcttcccagcccggggtcggtccccgcccgccctgcccccgtctcggcccggagc

SEQ ID NO: 747348 - DNA, 120 bp, Artificial Sequence
  ENSG00000205268_23 (sequence is synthesized)
ccccgagccgcggccccctcccactgcaggggccggcggccgcggcagggcgggcgccgcgcggaggcagggcgggcgtattcaatggaagtgtgttaccagctgccggtactgcccctg

SEQ ID NO: 747349 - DNA, 120 bp, Artificial Sequence
  ENSG00000205268_24 (sequence is synthesized)
gacaggccggtcccccagcacgtcctcagccgccgaggagccatcagcttcagctccagctccgctctcttcggctgccccaatccccggcagctctctcagaggcgtggagctatttcc

SEQ ID NO: 747350 - DNA, 120 bp, Artificial Sequence
  ENSG00000205268_25 (sequence is synthesized)
aagtccctttcgctgcagtgagtgagaggtatgttgtgtgtgaatgtacggatgtgtgtttgcgtgcatgtttgtgcatgtgtgactgtgcatgttatgtttctccatgtgggcaaagat

SEQ ID NO: 747351 - DNA, 120 bp, Artificial Sequence
  ENSG00000205268_26 (sequence is synthesized)
ttgaaatgtaagcttttatttattattttagaatgtgacataatgagcagccacactcgggggaggggaaggttggtaggtaagctgtaacagattgctccagttgccttaaactatgca

SEQ ID NO: 747352 - DNA, 120 bp, Artificial Sequence
  ENSG00000205268_27 (sequence is synthesized)
catagctaagtgaccaaacttcttgttttgatttgaaaaaagtgcattgttttcttgtccctccctttgatgaaacgttaccctttgacgggccttttgatgtgaacagatgttttctag

SEQ ID NO: 747353 - DNA, 120 bp, Artificial Sequence
  ENSG00000205268_28 (sequence is synthesized)
gacaaactataaggactaattttaaacttcaaacattccacttttgtaatttgttttaaattgttttatgtatagtaagcacaactgtaatctagttttaagagaaaccggtgctttctt

SEQ ID NO: 747354 - DNA, 120 bp, Artificial Sequence
  ENSG00000205268_29 (sequence is synthesized)
ttagttcatttgtatttcccttgttactgtaaaagactgtttattaattgtttacagtttgttgcaacagccattttcttgggagaaagcttgagtgtaaagccatttgtaaaaggcttt

SEQ ID NO: 747355 - DNA, 120 bp, Artificial Sequence
  ENSG00000205268_30 (sequence is synthesized)
gccatactcattttaatatgtgcctgttgctgttaacttttgatgaataaaaacctatcttttcatatttttatctttgacatttaccttataactcaatcttttggaaaacacaatgct

SEQ ID NO: 747356 - DNA, 120 bp, Artificial Sequence
  ENSG00000205268_31 (sequence is synthesized)
aaattacaaggaaatcaaagttagcttcttggctcttgtaattcatccctcagatgtttactcagtccgagcttatctactaatgactcaccttgcaagtgagtaagcagaagcccagtt

SEQ ID NO: 747357 - DNA, 120 bp, Artificial Sequence
  ENSG00000205268_32 (sequence is synthesized)
taaaattatgctcatttctatttttaaaaataatttaagaaattttacccttgttttcccttgttatggctcttctaattctcatttaattttaggatgtaaaaagtatatttttgcaga

SEQ ID NO: 747358 - DNA, 120 bp, Artificial Sequence
  ENSG00000205268_33 (sequence is synthesized)
aaaaaaggataggtaaacaaagaaatgacaaaaataaaataaataaaataaaaatggataggtggtgacccactgagcctgatcataatacgaagaccagcttctgccactgcctttcca

SEQ ID NO: 747359 - DNA, 120 bp, Artificial Sequence
  ENSG00000205268_34 (sequence is synthesized)
gactcttaccactgcctgttgattaaatctaactcttcaacatcctagacaggcccttataatcttgcttcaaatgctgtgcagccatcttgcctcaacttccctctcatttgcctacag

SEQ ID NO: 747360 - DNA, 120 bp, Artificial Sequence
  ENSG00000205268_35 (sequence is synthesized)
catctcgggacgcttctgtgtttcccaagtatacgctgttctttcgctctttgtgcctcgccagtgctttccatgtgcctcgtagagttatttttcttgaagaggcagctcaaatgtcac

SEQ ID NO: 747361 - DNA, 120 bp, Artificial Sequence
  ENSG00000205268_36 (sequence is synthesized)
cttctccagaagctgctctccacttgctttaggcagagtcagtcacttttcttctagattccaaagtgcctgatccacttggttgtggattcctggagcctagcaccacaccagaagcac

SEQ ID NO: 747362 - DNA, 120 bp, Artificial Sequence
  ENSG00000205268_37 (sequence is synthesized)
gaggcccttgagaactgtgtgttgagtgaactaataactgtattatagaaagcataatgaaaatgtcctgtgactgaagtatgtgtagcttgttgcaggagttcacaggaaagttgacta

SEQ ID NO: 747363 - DNA, 120 bp, Artificial Sequence
  ENSG00000205268_38 (sequence is synthesized)
ggattgagtgtgttgggctttgggtataaaggagggggattctacgggggcagtagctcaacaaggaatagagggaggagtgtaattttggtagctggtgttgaatagggcctttgagaa

SEQ ID NO: 747364 - DNA, 120 bp, Artificial Sequence
  ENSG00000205268_39 (sequence is synthesized)
tcagactgaacacagtgaaatatgtgcccaaagttcagaaagatgaagtttccagaaactaagaaggtagcacaatatgtggcatcatactcagaaaggaagaccatgccatggggccag

SEQ ID NO: 747365 - DNA, 120 bp, Artificial Sequence
  ENSG00000205268_40 (sequence is synthesized)
aaattcagaaacgtaattcttacattgtgattgcaatggatactcatggaagaaagtgggtagtggccgatttgacttcagagtgacaggtagagaagggaagagcgtgtagaactgtgg

SEQ ID NO: 747366 - DNA, 120 bp, Artificial Sequence
  ENSG00000205268_41 (sequence is synthesized)
ccagactttaggagtgtgagggatgctgaatctcccagagagctcacactggccaggaatgctgagagtagcagatgcttttcttttgggaggatagtaaaacaatttagaaccagatat

SEQ ID NO: 747367 - DNA, 120 bp, Artificial Sequence
  ENSG00000205268_42 (sequence is synthesized)
gctttgtcttgattctcaagtagaataatcttcaaatgcaaaagaatacattagaaatggacaaaagtggccaggagcggtagctcatacttgtaacccagcactttgggaagccgaggc

SEQ ID NO: 747368 - DNA, 69 bp, Artificial Sequence
  ENSG00000205268_43 (sequence is synthesized)
tagctcatacttgtaacccagcactttgggaagccgaggcgggctcacgtttctactaaaaatacaaaa

SEQ ID NO: 747369 - DNA, 120 bp, Artificial Sequence
  ENSG00000205268_44 (sequence is synthesized)
ctggcgaggagctagggaagggagtcacggcggggcgcgaagggaactgcggatgagatagatgggggaaaacgtttgtcgggaggcgactccaacagagccccagggtgcagaacacaa

SEQ ID NO: 747370 - DNA, 120 bp, Artificial Sequence
  ENSG00000205268_45 (sequence is synthesized)
ggaaggctactgtcgccctcggccgcttgccagtctccctgggcgctgcggcggcgcggggcgctgggcctgcggcgcggcgtcgtgacgtcacggtggcggcagccgtggttggcgcaa

SEQ ID NO: 747371 - DNA, 120 bp, Artificial Sequence
  ENSG00000205268_46 (sequence is synthesized)
gcgcaaggtccgcggctgcaaagtgtgaattacgccgggctcgcgccggcggcggagtgaagtcaggctccgggggaggggaggagcaggactccggcggcggcggcggcggcggcggcg

SEQ ID NO: 747372 - DNA, 120 bp, Artificial Sequence
  ENSG00000205268_47 (sequence is synthesized)
gcggcccgagctggtcgctgctcctgagtcccgcgcgccctgggtctggccgctggctccagctgtcttttcttgcactgctttgctccgttcgtgctgcgctcgaactctgcagtccgg

SEQ ID NO: 747373 - DNA, 120 bp, Artificial Sequence
  ENSG00000205268_48 (sequence is synthesized)
agaagaaaaactcttagaagccagcaacttttacaagcaccctgggacatttagttgaggggcttgagtgttgtataacacaataatttttagtcagaataatgttaatagagcctgttt

SEQ ID NO: 747374 - DNA, 120 bp, Artificial Sequence
  ENSG00000205268_49 (sequence is synthesized)
ttaaaagttgaaagattcgtactgtttttttgtttttaaaaagatttccatgccaaagagttttaagtattgatgctgaactgaaatggacaagcttgagttacctggaaaattcattta

SEQ ID NO: 747375 - DNA, 120 bp, Artificial Sequence
  ENSG00000205268_50 (sequence is synthesized)
gtcctaacgtaaacctaaataataccatgctctgatgagtggtattgtggcaggtcatgaggtgctgtgggaacacaaatctggccaagtttgccagaaaatgagaggcatttcatgaaa

SEQ ID NO: 747376 - DNA, 120 bp, Artificial Sequence
  ENSG00000205268_51 (sequence is synthesized)
agcagatgatatagtcaaggtgatcttttttatcattgaacatttgtcagctaatcataaacttttatttattgtgattattaaataagtttggtaatgattattgagagtaaagttaca

SEQ ID NO: 747377 - DNA, 120 bp, Artificial Sequence
  ENSG00000205268_52 (sequence is synthesized)
atttctggtgtgcaagattgctttccctgacatgaatacattgtatcattgttatgaatgtagccatccgttaggggaggattttatcacagacttgacatagacttccacttaacatga

SEQ ID NO: 747378 - DNA, 120 bp, Artificial Sequence
  ENSG00000205268_53 (sequence is synthesized)
ttactcagtagcctccttaaacatcaggactaaaggaataaccttacatcttagattacattattgaaatccaataaccaatttgttgataaataaacacccttaaaattttagatcttt

SEQ ID NO: 747379 - DNA, 120 bp, Artificial Sequence
  ENSG00000205268_54 (sequence is synthesized)
gttcagtaatggctacagtaataaaaatgtgccaaactatgtttgtcattttaaagccattatttctcaaaaagaacggtttatgttttagctgccattttaattaagcttgttaaaaat

SEQ ID NO: 747380 - DNA, 120 bp, Artificial Sequence
  ENSG00000205268_55 (sequence is synthesized)
gaaatggcctaaggatgaactctgtaaactccacatgggcagggccactgttgtatcatggctttgccagtgtggtgatgagatcaggacctggcagatgtgcttggtgaacctaatgaa

SEQ ID NO: 747381 - DNA, 120 bp, Artificial Sequence
  ENSG00000205268_56 (sequence is synthesized)
caaccacctgaggaatgacgtgaagggggaggagattaccaccactaccattggctgctaattcaaaactactgtgatggcgtagagcttattttagatatatctgtgattcattattct

SEQ ID NO: 747382 - DNA, 120 bp, Artificial Sequence
  ENSG00000205268_57 (sequence is synthesized)
tctctctgccaacatccagcaagatgtaatacaaggaatatgttttctttcagtgtttctcatgtcaacacaaatgcagttttttccattttctttttactcttgggacacagtcatgtt

SEQ ID NO: 747383 - DNA, 120 bp, Artificial Sequence
  ENSG00000205269_0 (sequence is synthesized)
cctcgagtgtcggcgacccgagggcgggcaggcgggcggcaggtgccgccgcagcctctggctggtcccgcgtctccgtcctccggcggcgatgagctgggccctgtcgggggctgcacc

SEQ ID NO: 747384 - DNA, 120 bp, Artificial Sequence
  ENSG00000205269_1 (sequence is synthesized)
ggctgcccatcagcaccggcctcctggcgtgacctcggcctcctcgcgtgtccagtccccgcggcgcggcgctgcccctgagagggagcggcggcggcctcctccgccccgagtcctcgc

SEQ ID NO: 747385 - DNA, 120 bp, Artificial Sequence
  ENSG00000205269_2 (sequence is synthesized)
gtcctcgctcgggggccgcgcgaggacggcgcccggccccctcccctccttcctccgtccgccgtcctcaatgtctccccggcggggagggggctgcctgggagacacgctgagcggccc

SEQ ID NO: 747386 - DNA, 80 bp, Artificial Sequence
  ENSG00000205269_3 (sequence is synthesized)
gctgagcggcccccccacggaggccctccggctgcagcagcagcagcgcccggcccggcgtcccgcagcctccaccagcg

SEQ ID NO: 747387 - DNA, 120 bp, Artificial Sequence
  ENSG00000205269_4 (sequence is synthesized)
gccgccgcccggcacccgaggagagggcggcgggcgcccctcggggaagatgaaggcggaggggggcgaccactccatgatcaacctgtcggtgcagcaggtcctgagcctctgggccca

SEQ ID NO: 747388 - DNA, 120 bp, Artificial Sequence
  ENSG00000205269_5 (sequence is synthesized)
cgggacggtgctgaggaacctcacggagatgtggtactggatcttcctctgggctctcttctcttctctgtttgtccatggtgctgcaggagtgttgatgtttgtgatgctgcagaggca

SEQ ID NO: 747389 - DNA, 120 bp, Artificial Sequence
  ENSG00000205269_6 (sequence is synthesized)
taggcagggaagagtcatctctgtcattgcagtcagcattggatttctggcttctgtaactggagcgatgattaccagtgcagcagtagcgggcatttacagagtagctgggaagaacat

SEQ ID NO: 747390 - DNA, 120 bp, Artificial Sequence
  ENSG00000205269_7 (sequence is synthesized)
ggcccctttggaagcgctggtatggggcgttggacagactgtactgacattaatcatctccttttcaaggatcctcgctacactttgaggtttctgtgggaatgtcttacttcacataag

SEQ ID NO: 747391 - DNA, 120 bp, Artificial Sequence
  ENSG00000205269_8 (sequence is synthesized)
gaaacagatgtacagattccctgaaaacggcattgttaacaagtggaaatgaaattgtgcaagaatgtggactgagcaggtcaaagcataaggaagaccttgagctgtgtggaaggattg

SEQ ID NO: 747392 - DNA, 120 bp, Artificial Sequence
  ENSG00000205269_9 (sequence is synthesized)
ccctctggtgttcaagtgattgcactaccgcactgcaccttatgtgcctctgtctcaggcaaggtgcattaagacactatgtaaagttacaagaaaaagcaccttgtttagctgcctatc

SEQ ID NO: 747393 - DNA, 120 bp, Artificial Sequence
  ENSG00000205269_10 (sequence is synthesized)
aggttaacattggtgttgaaatcatcgttcctaacagtgttatgttaagttacagggacgttttgaggtattgatatatgtgccaaactcttttctttttgttaacattgatcatgtgac

SEQ ID NO: 747394 - DNA, 120 bp, Artificial Sequence
  ENSG00000205269_11 (sequence is synthesized)
aatttgcaagtgtagatgtagctgagtgctgtgaacatatttgacatgaattcaggtaatgtactaagatttttgttcggtaacactaaatcccgtatgagtgctaaatactgaattgtt

SEQ ID NO: 747395 - DNA, 120 bp, Artificial Sequence
  ENSG00000205269_12 (sequence is synthesized)
taatatgagagaaattatttggtttttaatgttgcgcgtttctgggatttagggcttcaatatgtttaggtattattgttatttaattgatgtggaagataagtcttcttaactgaagac

SEQ ID NO: 747396 - DNA, 120 bp, Artificial Sequence
  ENSG00000205269_13 (sequence is synthesized)
tagctcaactgttttaagaactcagagtagctctatagggtgcatacttttcaccaacttaagtaacacccttttaatagcttctctcatgcatccatattctgtttatacaaattcaga

SEQ ID NO: 747397 - DNA, 120 bp, Artificial Sequence
  ENSG00000205269_14 (sequence is synthesized)
aacttgaagggtcatacacattgattgtagtttgtgcgtcataaaaatgtaatttgaagattttcttaaaaatttttgtaagaaaaaagtctgaaatgcatgttgcattctttgaccctt

SEQ ID NO: 747398 - DNA, 120 bp, Artificial Sequence
  ENSG00000205269_15 (sequence is synthesized)
ctaaagaaagtttttgccttgtatctcatggacaaaacatctttataactagtatctcagtgggattgtattacgtgttgcatatatcttgatttttgacaaaacataaacagtctttca

SEQ ID NO: 747399 - DNA, 120 bp, Artificial Sequence
  ENSG00000205269_16 (sequence is synthesized)
ttctggagtattaactgtttttagagactggcctaaattaggctctggaaataaagacctcatttgtagaaataagtaacaagtaagttatataggaagagtaatgaactattttacttt

SEQ ID NO: 747400 - DNA, 120 bp, Artificial Sequence
  ENSG00000205269_17 (sequence is synthesized)
ggacatgtggcaacatcataattttgctaagtaaaaattggggaatatagtagataattttaaaatttggcaattagtctcagcatatcaatgcagtactgagcgtgtattagagtaatt

SEQ ID NO: 747401 - DNA, 120 bp, Artificial Sequence
  ENSG00000205269_18 (sequence is synthesized)
cagttgttcagttcttgatttatgatatgaagttatgatttaagtttagtagaagaatctgtgagggcatatagcaaaagtggaaatgtcctttatataaaacattttaagaggttctgg

SEQ ID NO: 747402 - DNA, 120 bp, Artificial Sequence
  ENSG00000205269_19 (sequence is synthesized)
caatacgtaattgtaagagtataggaagtagggttgaactggtctcctaatgagattttttttggcaccagatacaattataatgtgctaactcaaaggagacattgcagagaatatgaa

SEQ ID NO: 747403 - DNA, 120 bp, Artificial Sequence
  ENSG00000205269_20 (sequence is synthesized)
gttaaggataatccaaaaataacctggtagccttgctgtttaatccaatttgctataaaagtaggcctttgttatattacattcaaatttaagaactttgttacccataccactttttct

SEQ ID NO: 747404 - DNA, 120 bp, Artificial Sequence
  ENSG00000205269_21 (sequence is synthesized)
ctatccagaagcagagtatatccacaacttaccaatgagaagttggagaggcagtacttttctcagtatggaagccaatttgggagatttactaacactggcttggaaatttgttttaaa

SEQ ID NO: 747405 - DNA, 120 bp, Artificial Sequence
  ENSG00000205269_22 (sequence is synthesized)
aaaataataagcaactatgcatggatctttgaagtaaatcttaaaattgattatttttattatgtacaggcctgaaattgttttcatgtgttctttatattcctgatgtttttacaaatt

SEQ ID NO: 747406 - DNA, 120 bp, Artificial Sequence
  ENSG00000205269_23 (sequence is synthesized)
aaatttaggcataacttttccaagtcaatctgattttttcttttctgccagacttgaattgtgttcttcttttactttggctattctgtcaataatttaaagcattcgtattcttccaga

SEQ ID NO: 747407 - DNA, 120 bp, Artificial Sequence
  ENSG00000205269_24 (sequence is synthesized)
ggaattaccaatagcatgtggaaattgtttcagatctccagaatgaatacttattttaacatatgtttattttatgatttaagaaagttatggtaaagtaatatggagcatgattcataa

SEQ ID NO: 747408 - DNA, 120 bp, Artificial Sequence
  ENSG00000205269_25 (sequence is synthesized)
tccaaaattaacaagaaaataacttggatacattaaatgtactaatgtgtggaccaaagagatttaaactattgtttttactctagaatgaaagtataattgaacggttaataattagtt

SEQ ID NO: 747409 - DNA, 120 bp, Artificial Sequence
  ENSG00000205269_26 (sequence is synthesized)
tgtagagtgtcctgcagttattatcaagttgctttacattatcaattgtgtgtgtatgtgtatacttttaattttaggggttatttttggtttctttgctgttttcagttatttccattg

SEQ ID NO: 747410 - DNA, 120 bp, Artificial Sequence
  ENSG00000205269_27 (sequence is synthesized)
agattttgtgcaactgtctctcttttgatgttttgagatgcagttgaatagtttgagtttgtgaattgtcttaatagctatttatatgctgaaatttttaaaaagttagtagctttccta

SEQ ID NO: 747411 - DNA, 120 bp, Artificial Sequence
  ENSG00000205269_28 (sequence is synthesized)
tagacacaagaaatgtttaatgatatatatacacacacgtatatatcattatataggtatatagagagctgctatatatgaatacagtctacttggaaagctttttttcagtgaacactt

SEQ ID NO: 747412 - DNA, 120 bp, Artificial Sequence
  ENSG00000205269_29 (sequence is synthesized)
tcatgttctagtggaaaatttgttcagtgtaatgatcttttaaataggtttgaggatgtttgaaaattttgaattttgggaaaattttcttcacttaatagagctggagacccttgtttg

SEQ ID NO: 747413 - DNA, 120 bp, Artificial Sequence
  ENSG00000205269_30 (sequence is synthesized)
ggacatgacaaaagtccttattgatgtatttgggttatatactttgttaaaattcgtatgtgatttagcagtacattttcttcgtgacaaatgcaagaagggagggaggatcctctatag

SEQ ID NO: 747414 - DNA, 120 bp, Artificial Sequence
  ENSG00000205269_31 (sequence is synthesized)
tggacactcctttatttaaaaaatgtttaataaaatattgtttatagtgaaatcagctccccaaagaaggaactcctacatgcccaaactaattacagttgaacatactgattaaaaatg

SEQ ID NO: 747415 - DNA, 120 bp, Artificial Sequence
  ENSG00000205269_32 (sequence is synthesized)
ccatagatcacagctagtcaggaggcctcaaataaactgcaaataatgcttaaaactttaaaagaaggagaaccagcagtcttccgaaccatgggacagttccaaggtaatagcctacct

SEQ ID NO: 747416 - DNA, 120 bp, Artificial Sequence
  ENSG00000205269_33 (sequence is synthesized)
tgcctaggataagtgaagtcctaaatgatggctatcttcagggcctggagcagaattattctttagatcttaatgtttaccaaacagtgttacagtttgttacccaatatactttcttag

SEQ ID NO: 747417 - DNA, 120 bp, Artificial Sequence
  ENSG00000205269_34 (sequence is synthesized)
tatttgcagcatacatttcactgctcaaaaaagtataagggttttgtttgtactttaaatgagagaaataaagaaatgagttggcctgtatatcttgtatttgtgatatgagcaacggga

SEQ ID NO: 747418 - DNA, 120 bp, Artificial Sequence
  ENSG00000205269_35 (sequence is synthesized)
taatttgaaatcacagaatgttgtgggaaaggtctttaaagaacctctaatgaagaaaatgtggctgccacattgatgtacctaggctgccactcatacagcaaataattctattttgta

SEQ ID NO: 747419 - DNA, 120 bp, Artificial Sequence
  ENSG00000205269_36 (sequence is synthesized)
aacacttcgtgtggatccactatgtaaagtgctctaccaagtattttctctagtaagaagtacaagaattaccaagatggaattctttaccttgagtacaccaagagctagcaagatgat

SEQ ID NO: 747420 - DNA, 120 bp, Artificial Sequence
  ENSG00000205269_37 (sequence is synthesized)
aaaaagtttgggacaacattttgcttcctgattttagttgagagttagcctgttatccctccaaattctcattttcctggttcatccactaaatagaatttccataactgagatatcatg

SEQ ID NO: 747421 - DNA, 120 bp, Artificial Sequence
  ENSG00000205269_38 (sequence is synthesized)
gctgtgacatagtgaagagaatacgagactccaagccagcaacacagattgaattaagactctgtcacttgtcaactttttgaccttgagcaaatcacttaacttctctgagcctcagtt

SEQ ID NO: 747422 - DNA, 120 bp, Artificial Sequence
  ENSG00000205269_39 (sequence is synthesized)
catactccgtaaaatgtgactaatacctcatgtagttattgtgaggattacgtgagattgtttatgaatggcaaagcagtatgtatttcacagtaaatgatcaactgatagtctctagaa

SEQ ID NO: 747423 - DNA, 120 bp, Artificial Sequence
  ENSG00000205269_40 (sequence is synthesized)
tttttttaaattacattttgcaattgcattaccaattgaatatgttgttttgtaaaattcatcaattttgtttcatttctatattttccttacatatgctttaggaaagaaactaaaaac

SEQ ID NO: 747424 - DNA, 120 bp, Artificial Sequence
  ENSG00000205269_41 (sequence is synthesized)
gttttcttataatcttgcttcatctccttttcactttttctttttaaaatcagcagatctttaagaaccttttgtgaattggtggtggtggaaatggccagtgcaagcaggattaaatta

SEQ ID NO: 747425 - DNA, 120 bp, Artificial Sequence
  ENSG00000205269_42 (sequence is synthesized)
ggagttctgttgaccactggttaaaataggaaaagggtagagaggtagtcagccttgactcccttatctattcccacttacttcccttggattcattcagccatgttgatttattgactt

SEQ ID NO: 747426 - DNA, 120 bp, Artificial Sequence
  ENSG00000205269_43 (sequence is synthesized)
tctgctatttgctaattattcttcttgaaaagtaagagcgatatataacccttcagtcttctatatgtctgtttcttctgccggccctgggcccttggctctacagtgtagtgccaattc

SEQ ID NO: 747427 - DNA, 120 bp, Artificial Sequence
  ENSG00000205269_44 (sequence is synthesized)
attctgtagaaaaatagaacgatattcagtgtctaccaagttctttcttccacaggccaagggtgcttaagccctagctgttattttgtttcttttatttatttattttttgagacggag

SEQ ID NO: 747428 - DNA, 120 bp, Artificial Sequence
  ENSG00000205269_45 (sequence is synthesized)
ttacaggtgtaagctgccgtgcccagcctatttttttttaacttcaaatactattattttaaatttatgttcattatgtaattcagggagtaacgatgcctggagcaatttctgaaatat

SEQ ID NO: 747429 - DNA, 120 bp, Artificial Sequence
  ENSG00000205269_46 (sequence is synthesized)
tctcaaaccacttcactcttgacactacagatttttctctcagtctcaatcagaatctctgcagtcattatttgtttttaagatgtgagggacgaggaaaattactgaagaaattctagc

SEQ ID NO: 747430 - DNA, 120 bp, Artificial Sequence
  ENSG00000205269_47 (sequence is synthesized)
agatttcgattgcagagaaatttggtaacactttttgggtaactgggtaaattactatttcttttaataatcgggtgaaactctgaattgttaaaacggaccaataatcaaatggtttta

SEQ ID NO: 747431 - DNA, 120 bp, Artificial Sequence
  ENSG00000205269_48 (sequence is synthesized)
taatctttcttaacttcccgtccttgttataacatcttggaagaagactcttcaggataaaaaggatattatttgattaaaaattatagcatttggagaggtaacacacaaaaacaaaaa

SEQ ID NO: 747432 - DNA, 120 bp, Artificial Sequence
  ENSG00000205269_49 (sequence is synthesized)
catatttgacaaagcgccctacatcctgtgttttgttaggactagaaactatactggatgagtatgtatactgcatgtttacacatgctgtgtttctttatatgtgaggcttcactgacc

SEQ ID NO: 747433 - DNA, 120 bp, Artificial Sequence
  ENSG00000205269_50 (sequence is synthesized)
accgtgcattttgaaattgtattgcattttgtgtgtgtgtgtggtgacaggtttgctcttctcacttaaggagctctggtctgtgtaggcagtacagtgttgttagggaggttgctgaat

SEQ ID NO: 747434 - DNA, 120 bp, Artificial Sequence
  ENSG00000205269_51 (sequence is synthesized)
tatctaaaaatgtatccatgaatttgggggaaataatgcttaatatctgaagtattttcagtaaatgtggagatatatcagataatacttttaaattagtggaaacacatttctgagtga

SEQ ID NO: 747435 - DNA, 120 bp, Artificial Sequence
  ENSG00000205269_52 (sequence is synthesized)
actgagctatgaactataatcatctcttcccctgagtttagggaagttgttttcacattctttacatttattgcacatatactgaacttacataataactcttccctgattttgagaacg

SEQ ID NO: 747436 - DNA, 120 bp, Artificial Sequence
  ENSG00000205269_53 (sequence is synthesized)
aatttagcaatttcctaaaaatcttcctcctctttccatacagatgtcgtatgttatagtttaaacatatgtacaatttgttgatagaatccaaggagctggtttaggaaagaatactct

SEQ ID NO: 747437 - DNA, 120 bp, Artificial Sequence
  ENSG00000205269_54 (sequence is synthesized)
taacccctacagttatgcagctctaatcttactgaaaagtaaatactttaggcaagtcaggagagcatgaacctcatacatacatttttacgattatgtactgcacccacatgtatctac

SEQ ID NO: 747438 - DNA, 120 bp, Artificial Sequence
  ENSG00000205269_55 (sequence is synthesized)
tcttggtagtaacatgactccaccctttttgggaatgtatttaggtggataactgaaacggaaaagcagtttgacacaaatacacagaaagaggaattgcggtgcataatcaatcgtctg

SEQ ID NO: 747439 - DNA, 120 bp, Artificial Sequence
  ENSG00000205269_56 (sequence is synthesized)
agtcccataactgtaacactttttctcttataaattggtagttcctaaaaatcaccactttaaaaattttattctgtcttgctgaattaagcagaaatcactttttttagagccttgttt

SEQ ID NO: 747440 - DNA, 120 bp, Artificial Sequence
  ENSG00000205269_57 (sequence is synthesized)
aaaggaacgttaactcgagagtactactgatgatgacgcttctcttgtttttaaagtatttacacatcattgttaagtatttttggaatggaacattttaaagttttctccatagaaagc

SEQ ID NO: 747441 - DNA, 120 bp, Artificial Sequence
  ENSG00000205269_58 (sequence is synthesized)
aacatagtggcacttgttgagtaaatgatcataaaaatgacttgcttttaatagcagatgagttgatagtttaactgttgacactttcttaatgtttttgatgttggatgcatttacaat

SEQ ID NO: 747442 - DNA, 120 bp, Artificial Sequence
  ENSG00000205269_59 (sequence is synthesized)
ggaagaatttttttgaaagatttggccctctcaccaatacacacattcagacttgagctgcacgcatttagatgaacaaataggaaattcacggtattttttgttttagccatccaaaat

SEQ ID NO: 747443 - DNA, 120 bp, Artificial Sequence
  ENSG00000205269_60 (sequence is synthesized)
tcataggattctaccaaaaatattagcccctgactctagttattctgagatgagggaatcaactttatcttgaaagttaactagctaaaatgtctttatttaaatagcaaaaatatagtt

SEQ ID NO: 747444 - DNA, 120 bp, Artificial Sequence
  ENSG00000205269_61 (sequence is synthesized)
tacctgacaagtattaaaagtctcactttcaaattgtgttaactctcagaccactgatgaatcttttggtaaatcacaggcagattttaaaagctaaatgaagccttagtgccttgaaag

SEQ ID NO: 747445 - DNA, 120 bp, Artificial Sequence
  ENSG00000205269_62 (sequence is synthesized)
ttaagatacttgtgcaaaatggatttagcaagattcaggattggcaccagtgagttggctagatacacatcaccagtgactgggaattcaaagtttagaaagcctaacgaatagtagcta

SEQ ID NO: 747446 - DNA, 120 bp, Artificial Sequence
  ENSG00000205269_63 (sequence is synthesized)
ctaacttcatatggttcaatgtaaatcagttacttagtcattgactgtgacagatgacagctactttcactatattttcatgatgtggtatttttctctattttttctttttccaagtat

SEQ ID NO: 747447 - DNA, 120 bp, Artificial Sequence
  ENSG00000205269_64 (sequence is synthesized)
gaaatggaaaaaaatgtagttaagaaaattaagtgtgagactttaaaatttagttttgttgtaaactagagattctagtgaacagtgttagttttatactgtagtacagggcacacactt

SEQ ID NO: 747448 - DNA, 120 bp, Artificial Sequence
  ENSG00000205269_65 (sequence is synthesized)
taacctttagaaatatgtttaccatcagggatttatttttactatagaaatactaaatgtactgtgaagcttaaagacaggagaataaatgttggaggggtaatacacaaaaacaaaggc

SEQ ID NO: 747449 - DNA, 120 bp, Artificial Sequence
  ENSG00000205269_66 (sequence is synthesized)
atatttgatgaagtaccctgtgttatgtgaacacaatttccccttctgttaagactataaactatatgagtatgtgtactgcatgtttacataaaacagtttaattttgaaggattattt

SEQ ID NO: 747450 - DNA, 120 bp, Artificial Sequence
  ENSG00000205269_67 (sequence is synthesized)
aatacctaacaagctgtaaatattgtatattattgatttttaattttatataagcaattttttatttcccaattcatgtacaaatctcattatgtatatagcataatttcctggagaaca

SEQ ID NO: 747451 - DNA, 120 bp, Artificial Sequence
  ENSG00000205269_68 (sequence is synthesized)
gcataatttcctggagaacacaaattttgcagtgaattttaagtaattttaattgcagtaagcatcagtttagcctagagatgttgatctttattttaaattatttttcaccattctcat

SEQ ID NO: 747452 - DNA, 120 bp, Artificial Sequence
  ENSG00000205269_69 (sequence is synthesized)
tttcttcaaagggcagcaataaacatatgcaagttatttttaattatagaaagtaggtctacaaagataagatctaggttccaattcattgctttaaggaaaagatgcacaattactatc

SEQ ID NO: 747453 - DNA, 120 bp, Artificial Sequence
  ENSG00000205269_70 (sequence is synthesized)
attcagtgtctaatcacaggaccatttctgaggtccacatgtggctctcctctttgtaatatacagggtgaactctttactgatacacacaagacaactgttaaaaagtgaatccagcac

SEQ ID NO: 747454 - DNA, 120 bp, Artificial Sequence
  ENSG00000205269_71 (sequence is synthesized)
gcacttaaatgtcattacacagaatttattggattaaaaatttgtaatatacagtattttaataaagtttctgtattcaatttcatgcacttatatataaataaacctgtctttgaaagc

SEQ ID NO: 747455 - DNA, 120 bp, Artificial Sequence
  ENSG00000205274_0 (sequence is synthesized)
gatcagtcatccctcctcgctggtgaatggagacagtggtcacaactctccccagagaaggtggtgtggggccatcacggaagatgctgctgcttctgctgcttctggggccaggctccg

SEQ ID NO: 747456 - DNA, 120 bp, Artificial Sequence
  ENSG00000205274_1 (sequence is synthesized)
tctgtgaacatcgagtgccgttccctggactttcaggccacaactatgttttggtatcgtcagctccggaaacagagcctcatgctgatggcaacttccaatgagggctccgaggtcaca

SEQ ID NO: 747457 - DNA, 120 bp, Artificial Sequence
  ENSG00000205274_2 (sequence is synthesized)
tacgagcaaggcgtcaagaaggacaagtttcccatcaaccatccaaacctgaccttctccgctctgacagtgaccagtgcccatcctgaagacagcagcttctacatctgcagtgctaga

SEQ ID NO: 747458 - DNA, 120 bp, Artificial Sequence
  ENSG00000205277_0 (sequence is synthesized)
atgctggtgatctggattctgacgctggctctccggctctgcgcgtccgttactacagtgacaccaggctcaacagtaaacaccagtattggaggtaatacaacttctgcatccacaccc

SEQ ID NO: 747459 - DNA, 120 bp, Artificial Sequence
  ENSG00000205277_1 (sequence is synthesized)
agttcaagcgacccttttaccacctttagtgactatggggtgtcagtcacatttatcacgggctcaactgcaacaaaacacttccttgacagctccacaaactcaggccacagtgaggaa

SEQ ID NO: 747460 - DNA, 120 bp, Artificial Sequence
  ENSG00000205277_2 (sequence is synthesized)
tcaacagtatcccacagcggcccaggtgcaactggaacaacactcttcccttcccactctgcaacctcagtttttgttggagaacctaaaacctcacccatcacttcagcctcaatggaa

SEQ ID NO: 747461 - DNA, 120 bp, Artificial Sequence
  ENSG00000205277_3 (sequence is synthesized)
acaacagcgttacctggcagtaccacaacagcaggcctgagtgagaaatctaccaccttctacagtagccccagatcaccagacagaacactctcacctgcccgcacgacaagctcaggc

SEQ ID NO: 747462 - DNA, 120 bp, Artificial Sequence
  ENSG00000205277_4 (sequence is synthesized)
gtcagtgaaaaatcaaccacctcccacagccgaccaggcccaacgcacacaatagcgttccctgacagtaccaccatgccaggcgtcagtcaggaatctacagcttcccacagcatcccc

SEQ ID NO: 747463 - DNA, 120 bp, Artificial Sequence
  ENSG00000205277_5 (sequence is synthesized)
ggctccacagacacaacactgtcccctggcactaccacaccatcatcccttggtccagaatctactaccttccacagcagcccaggctacactaaaacaacacgcttacctgacaacacc

SEQ ID NO: 747464 - DNA, 120 bp, Artificial Sequence
  ENSG00000205277_6 (sequence is synthesized)
acaacctcaggcctccttgaagcatctacgcccgtccacagcagcactggatcgccacacacaacactgtccccttccagctctacaacccatgagggagaacctaccaccttccagagc

SEQ ID NO: 747465 - DNA, 120 bp, Artificial Sequence
  ENSG00000205277_7 (sequence is synthesized)
tggccaagctcaaaggacacttcgcctgcaccttctggtaccacatcagcctttgttaaactatctacaacttatcacagcagcccgagctcaactccaacaacccacttttctgccagc

SEQ ID NO: 747466 - DNA, 120 bp, Artificial Sequence
  ENSG00000205277_8 (sequence is synthesized)
tccacaaccttgggccatagtgaggaatcgacaccagtccacagcagcccagttgcaactgcaacaacacccccacctgcccgctccgcgacctcaggccatgttgaagaatctacagcc

SEQ ID NO: 747467 - DNA, 120 bp, Artificial Sequence
  ENSG00000205277_9 (sequence is synthesized)
taccacaggagcccgggctcaactcaaacaatgcacttccctgaaagctccacaacttcaggccatagtgaagaatcagcaactttccacggcagcacaacacacacaaaatcttcaact

SEQ ID NO: 747468 - DNA, 120 bp, Artificial Sequence
  ENSG00000205277_10 (sequence is synthesized)
cctagcaccacagctgccctagcacatacaagctaccacagcagcctgggctcaactgaaacaacacacttccgtgatagctccacaatctcaggccgtagtgaggaatcaaaagcatcc

SEQ ID NO: 747469 - DNA, 120 bp, Artificial Sequence
  ENSG00000205277_11 (sequence is synthesized)
cacagcagcccagatgcaatggcaacaacagtcttacctgccggctctacaccctcagttcttgttggagactcgacgccctcacccatcagttcaggctcaatggaaaccacagcgtta

SEQ ID NO: 747470 - DNA, 120 bp, Artificial Sequence
  ENSG00000205277_12 (sequence is synthesized)
cccggcagtaccacaaaaccaggcctcagtgagaaatctaccactttctacagtagccccagatcaccagacacaacacacttacctgccagcatgacaagctcaggcgtcagtgaagaa

SEQ ID NO: 747471 - DNA, 120 bp, Artificial Sequence
  ENSG00000205277_13 (sequence is synthesized)
tccaccacctcccacagccgaccaggctcaacacacacaacagcattccctggcagtaccaccatgccaggcctcagtcaggaatctacagcttcccacagcagcccaggccccacagac

SEQ ID NO: 747472 - DNA, 120 bp, Artificial Sequence
  ENSG00000205277_14 (sequence is synthesized)
acaacattgtcccctggcagtaccacagcatcatcccttggtccagaatatactaccttccacagccgcccaggctccactgaaacaacactcttacctgacaacaccacagcctcagga

SEQ ID NO: 747473 - DNA, 120 bp, Artificial Sequence
  ENSG00000205277_15 (sequence is synthesized)
ctccttgaagcatctatgcccgtccacagcagcaccagatcgccacacacaacactgtcccctgccggctctacaacccgtcagggagaatctaccacattccatagctggccaagctca

SEQ ID NO: 747474 - DNA, 120 bp, Artificial Sequence
  ENSG00000205277_16 (sequence is synthesized)
aaggacactaggcctgcacctcctactaccacatcagcctttgttgagccatctacaacctcccacggcagcccgagctcaattccaacaacccacatttctgcccgctccacaacctca

SEQ ID NO: 747475 - DNA, 120 bp, Artificial Sequence
  ENSG00000205277_17 (sequence is synthesized)
ggcctcgttgaagaatctacgacctaccacagcagcccgggctcaactcaaacaatgcacttccctgaaagcgacacaacttcaggccgtggtgaagaatcaacaacttcccacagcagc

SEQ ID NO: 747476 - DNA, 120 bp, Artificial Sequence
  ENSG00000205277_18 (sequence is synthesized)
acaacacacacaatatcttcagctcctagcaccacatctgcccttgttgaagaacctaccagctaccacagcagcccgggctcaactgcaacaacacacttccctgacagctccacaacc

SEQ ID NO: 747477 - DNA, 120 bp, Artificial Sequence
  ENSG00000205277_19 (sequence is synthesized)
tcaggccgtagtgaggaatcaacagcatcgcacagcagccaagacgcaacgggaacaatagtcctacctgcccgctccacaacctcagttcttcttggagaatctacgacctcacccatc

SEQ ID NO: 747478 - DNA, 120 bp, Artificial Sequence
  ENSG00000205277_20 (sequence is synthesized)
agttcaggctcaatggaaacgacagcgttacccggcagtaccacaacgccaggcctcagtgagagatctaccactttccatagtagccccagatcaccagccacaacactctcacctgcc

SEQ ID NO: 747479 - DNA, 120 bp, Artificial Sequence
  ENSG00000205277_21 (sequence is synthesized)
agcacgacaagctcaggcgtcagtgaagaatccaccacctcccgcagccgaccaggctcaacgcacacaacagcattccctgacagcaccaccacgccaggcctcagtcggcattctaca

SEQ ID NO: 747480 - DNA, 120 bp, Artificial Sequence
  ENSG00000205277_22 (sequence is synthesized)
acttcccacagcagcccaggctcaacggatacaacactgttacctgccagcaccaccacctcaggccccagtcaggaatcaacaacttcccacagcagctcaggttcaactgacacagca

SEQ ID NO: 747481 - DNA, 120 bp, Artificial Sequence
  ENSG00000205277_23 (sequence is synthesized)
ctgtcccctggcagtaccacagccttatcctttggtcaagaatctacaaccttccacagcaacccaggctccactcacacaacactcttccctgacagcaccacaagctcaggcatcgtt

SEQ ID NO: 747482 - DNA, 120 bp, Artificial Sequence
  ENSG00000205277_24 (sequence is synthesized)
gaagcatctacacgcgtccacagcagcactggctcaccacgcacaacactgtcccctgccagctccacaagccctggacttcagggagaatctactgccttccagacccacccagcctca

SEQ ID NO: 747483 - DNA, 120 bp, Artificial Sequence
  ENSG00000205277_25 (sequence is synthesized)
actcacacaacgccttcacctcctagcaccgcaacagcccctgttgaagaatctacaacctaccaccgcagcccaggctcgactccaacaacacacttccctgccagctccacaacttcg

SEQ ID NO: 747484 - DNA, 120 bp, Artificial Sequence
  ENSG00000205277_26 (sequence is synthesized)
ggccacagtgagaaatcaacaatattccacagcagcccagatgcaagtggaacaacaccctcatctgcccactccacaacctcaggtcgtggagaatctacaacctcacgcatcagtcca

SEQ ID NO: 747485 - DNA, 120 bp, Artificial Sequence
  ENSG00000205277_27 (sequence is synthesized)
ggctcaactgaaataacaacgttacctggcagtaccacaacaccaggcctcagtgaggcatctaccaccttctacagcagccccagatcaccaaccacaacactctcacctgccagcatg

SEQ ID NO: 747486 - DNA, 120 bp, Artificial Sequence
  ENSG00000205277_28 (sequence is synthesized)
acaagcctgggcgtcggtgaagaatccaccacctcccgtagccaaccaggttctactcactcaacagtgtcacctgccagcaccaccacgccaggcctcagtgaggaatctaccaccgtc

SEQ ID NO: 747487 - DNA, 120 bp, Artificial Sequence
  ENSG00000205277_29 (sequence is synthesized)
tacagcagcagccgaggctcaactgaaaccacagtgttccctcacagcaccacaacctcagttcatggtgaagagcctacaaccttccacagccggccagcctcaactcacacaacactg

SEQ ID NO: 747488 - DNA, 120 bp, Artificial Sequence
  ENSG00000205277_30 (sequence is synthesized)
ttcactgaggacagcaccacctcgggcctcactgaagaatctacagccttccccggcagcccagcctccacccaaacagggttacctgccacactcacaaccgcagacctcggtgaggaa

SEQ ID NO: 747489 - DNA, 120 bp, Artificial Sequence
  ENSG00000205277_31 (sequence is synthesized)
tcaactacctttcccagcagctcaggctcaactggaacaaaactctcacctgcccgctccaccacctctggcctcgttggagaatccacaccctcacgcctcagtccaagctcaaccgaa

SEQ ID NO: 747490 - DNA, 120 bp, Artificial Sequence
  ENSG00000205277_32 (sequence is synthesized)
acaacaactttacctggcagtcccacaacaccaagcctcagtgagaaatcaaccaccttctacactagccccagatcaccagatgcaacactctcacctgcaaccacaacaagctcaggc

SEQ ID NO: 747491 - DNA, 120 bp, Artificial Sequence
  ENSG00000205277_33 (sequence is synthesized)
gtcagcgaagaatccagcacatcccacagtcaaccaggctcaacgcacacaacagcattccctgacagcaccaccacctcagacctcagtcaggaacctacaacttcccacagcagccaa

SEQ ID NO: 747492 - DNA, 120 bp, Artificial Sequence
  ENSG00000205277_34 (sequence is synthesized)
ggctcaacagaggcaacactgtcccctggcagtaccacagcctcatcccttggtcaacaatctacaaccttccacagcagcccaggcgacactgaaaccacactcttacctgacgacacc

SEQ ID NO: 747493 - DNA, 120 bp, Artificial Sequence
  ENSG00000205277_35 (sequence is synthesized)
ataacctcaggcctcgtggaggcatctacacccacccacagcagcactggctcgctacacacaacactgacccctgccagctccacaagcgctggccttcaggaagaatctaccactttc

SEQ ID NO: 747494 - DNA, 120 bp, Artificial Sequence
  ENSG00000205277_36 (sequence is synthesized)
cagagctggccaagctcaagtgacacaacaccttcacctcccggcaccacagcagcccctgttgaagtatccacaacctaccacagccgcccgagctcaactccaacaacacacttttct

SEQ ID NO: 747495 - DNA, 120 bp, Artificial Sequence
  ENSG00000205277_37 (sequence is synthesized)
gccagttccacaaccttgggccgtagtgaggaatcaacaacagtccacagcagcccaggtgcaactggaacagcactcttccctacccgctctgcaacctcagttcttgttggagaacct

SEQ ID NO: 747496 - DNA, 120 bp, Artificial Sequence
  ENSG00000205277_38 (sequence is synthesized)
acaacgtcacccatcagttcaggctcaacggaaacaacagcgttacctggcagtaccacaacagcaggcctgagtgagaaatctaccaccttctacagtagccccagatcaccggacaca

SEQ ID NO: 747497 - DNA, 120 bp, Artificial Sequence
  ENSG00000205277_39 (sequence is synthesized)
acactctcacctgccagcacgacaagctcaggcgtcagtgaagaatccaccacctcccacagccgaccaggctcaacgcacacaacagcattccctggcagtaccaccatgccaggcgtc

SEQ ID NO: 747498 - DNA, 120 bp, Artificial Sequence
  ENSG00000205277_40 (sequence is synthesized)
agtcaggaatctacagcttcccacagcagcccaggctccacagacacaacattgtcccctggcagtaccacagcatcatcccttggtccagaatctactactttccacagcagcccaggc

SEQ ID NO: 747499 - DNA, 120 bp, Artificial Sequence
  ENSG00000205277_41 (sequence is synthesized)
tccactgaaacaacactcttacctgacaacaccacagcctcaggcctccttgaagcatctacgcccgtccacagcagcactggatcgccacacacaacactgtcccctgccggctctaca

SEQ ID NO: 747500 - DNA, 120 bp, Artificial Sequence
  ENSG00000205277_42 (sequence is synthesized)
acacgtcagggagaatctaccaccttccagagctggccaagctcaaaggacactatgcctgcacctcctactaccacatcagcctttgttgagctatctacaacctcccacggcagcccg

SEQ ID NO: 747501 - DNA, 120 bp, Artificial Sequence
  ENSG00000205277_43 (sequence is synthesized)
agctcaactccaacaacccacttttctgccagctccacaaccttgggccgtagtgaggaatcgacaacagtccacagcagcccagttgcaactgcaacaacaccctcgcctgcccgctcc

SEQ ID NO: 747502 - DNA, 120 bp, Artificial Sequence
  ENSG00000205277_44 (sequence is synthesized)
acaacctcaggcctcgttgaagaatctacggcgtaccacagcagcccgggctcaactcaaacaatgcacttccctgaaagctccacagcttcaggtcgtagtgaagaatcaagaacttcc

SEQ ID NO: 747503 - DNA, 120 bp, Artificial Sequence
  ENSG00000205277_45 (sequence is synthesized)
cacagcagcacaacacacacaatatcttcacctcctagcaccacatctgcccttgttgaagaacctaccagctaccacagcagcccgggctcaactgcaacaacacacttccctgacagc

SEQ ID NO: 747504 - DNA, 120 bp, Artificial Sequence
  ENSG00000205277_46 (sequence is synthesized)
tccacaacctcaggccgtagtgaggaatcaacagcatcccacagcagccaagacgcaacgggaacaatagtcctacctgcccgctccacaacctcagttcttcttggagaatctacgacc

SEQ ID NO: 747505 - DNA, 120 bp, Artificial Sequence
  ENSG00000205277_47 (sequence is synthesized)
tcacccatcagttcaggctcaatggaaacgacagcgttacccggcagtaccacaacgccaggcctcagtgagaaatctaccactttccacagtagccccagatcaccagccacaacactc

SEQ ID NO: 747506 - DNA, 120 bp, Artificial Sequence
  ENSG00000205277_48 (sequence is synthesized)
tcacctgccagcacgacaagctcaggcgtcagtgaagaatccaccacctcccacagccgaccaggctcaacgcacacaacagcattccctgacagcaccaccacgccaggcctcagtcgg

SEQ ID NO: 747507 - DNA, 120 bp, Artificial Sequence
  ENSG00000205277_49 (sequence is synthesized)
cattctacaacttcccacagcagcccaggctcaacggatacaacactgttacctgccagcaccaccacctcaggccccagtcaggaatcaacaacttcccacagcagcccaggttcaact

SEQ ID NO: 747508 - DNA, 120 bp, Artificial Sequence
  ENSG00000205277_50 (sequence is synthesized)
gacacagcactgtcccctggcagtaccacagccttatcctttggtcaagaatctacaaccttccacagcagcccaggctccactcacacaacgctcttccctgacagcaccacaagctca

SEQ ID NO: 747509 - DNA, 120 bp, Artificial Sequence
  ENSG00000205277_51 (sequence is synthesized)
ggcatcgttgaagcatctacacgcgtccacagcagcactggctcaccacgcacaacactgtcccctgccagctccacaagccctggacttcagggagaatctaccgccttccagacccac

SEQ ID NO: 747510 - DNA, 120 bp, Artificial Sequence
  ENSG00000205277_52 (sequence is synthesized)
ccagcctcaactcacacgacgccttcacctcctagcaccgcaacagcccctgttgaagaatctacaacctaccaccgcagcccaggctcgactccaacaacacacttccctgccagctcc

SEQ ID NO: 747511 - DNA, 120 bp, Artificial Sequence
  ENSG00000205277_53 (sequence is synthesized)
acaacttcgggccacagtgagaaatcaacaatattccacagcagcccagatgcaagtggaacaacaccctcatctgcccactccacaacctcaggtcgtggagaatctacaacctcacgc

SEQ ID NO: 747512 - DNA, 120 bp, Artificial Sequence
  ENSG00000205277_54 (sequence is synthesized)
atcagtccaggctcaactgaaataacaacgttacctggcagtaccacaacaccaggcctcagtgaggcatctaccaccttctacagcagccccagatcaccaaccacaacactctcacct

SEQ ID NO: 747513 - DNA, 120 bp, Artificial Sequence
  ENSG00000205277_55 (sequence is synthesized)
gccagtatgacaagcctaggcgtcggtgaagaatccaccacctcccgtagccaaccaggttctactcactcaacagtgtcacctgccagcaccaccacgccaggcctcagtgaggaatct

SEQ ID NO: 747514 - DNA, 120 bp, Artificial Sequence
  ENSG00000205277_56 (sequence is synthesized)
accaccgtctacagcagcagcccaggctcaactgaaaccacagtgttccctcgcacccccacaacctcagttcgtggtgaagagcctacaaccttccacagccggccagcctcaactcac

SEQ ID NO: 747515 - DNA, 120 bp, Artificial Sequence
  ENSG00000205277_57 (sequence is synthesized)
acaacactgttcactgaggacagcaccacctcgggcctcactgaagaatctacagccttccccggcagcccagcctccacccaaacagggttacctgccacactcacaaccgcagacctc

SEQ ID NO: 747516 - DNA, 120 bp, Artificial Sequence
  ENSG00000205277_58 (sequence is synthesized)
ggtgaggaatcaactacctttcccagcagctcaggctcaactggaacaacactctcacctgcccgctccaccacctctggcctcgttggagaatccacaccctcacgcctcagtccaagc

SEQ ID NO: 747517 - DNA, 120 bp, Artificial Sequence
  ENSG00000205277_59 (sequence is synthesized)
tcaaccgaaacaacaactttacccggcagtcccacaacaccaagcctcagtgagaaatcaaccaccttctacactagccccagatcaccagatgcaacactctcacctgcaaccacaaca

SEQ ID NO: 747518 - DNA, 120 bp, Artificial Sequence
  ENSG00000205277_60 (sequence is synthesized)
agctcaggcgtcagtgaagaatccagcacatcccacagtcaaccaggctcaacgcacacaacagcattccctgacagcaccaccacgccaggcctcagtcggcattctacaacttcccac

SEQ ID NO: 747519 - DNA, 120 bp, Artificial Sequence
  ENSG00000205277_61 (sequence is synthesized)
agcagcccaggctcaacggatacaacactgttacctgccagcaccaccacctcaggccccagtcaggaatcaacaacttcccacagcagcccaggttcaactgacacagcactgtcccct

SEQ ID NO: 747520 - DNA, 120 bp, Artificial Sequence
  ENSG00000205277_62 (sequence is synthesized)
ggcagtaccacagccttatcctttggtcaagaatctacaaccttccacagcagcccaggctccactcacacaacactcttccctgacagcaccacaagctcaggcatcgttgaagcatct

SEQ ID NO: 747521 - DNA, 120 bp, Artificial Sequence
  ENSG00000205277_63 (sequence is synthesized)
acacgcgtccacagcagcactggctcaccacgcacaacactgtcccctgccagctccacaagccctggacttcagggagaatctaccaccttccagacccacccagcctcaactcacacg

SEQ ID NO: 747522 - DNA, 120 bp, Artificial Sequence
  ENSG00000205277_64 (sequence is synthesized)
acgccttcacctcctagcaccgcaacagcccctgttgaagaatctacaacctaccaccgcagcccaggctcgactccaacaacacacttccctgccagctccacaacttcgggccacagt

SEQ ID NO: 747523 - DNA, 120 bp, Artificial Sequence
  ENSG00000205277_65 (sequence is synthesized)
gagaaatcaacaatattccacagcagcccagatgcaagtggaacaacaccctcatctgcccactccacaacctcaggtcgtggagaatctacaacctcacgcatcagtccaggctcaact

SEQ ID NO: 747524 - DNA, 120 bp, Artificial Sequence
  ENSG00000205277_66 (sequence is synthesized)
gaaataacaacgttacctggcagtaccacaacaccaggcctcagtgaggcatctaccaccttctacagcagccccagatcaccaaccacaacactctcacctgccagtatgacaagccta

SEQ ID NO: 747525 - DNA, 120 bp, Artificial Sequence
  ENSG00000205277_67 (sequence is synthesized)
ggcgtcggtgaagaatccaccacctcccgtagccaaccaggttctactcactcaacagtgtcacctgccagcaccaccacgccaggcctcagtgaggaatctaccaccgtctacagcagc

SEQ ID NO: 747526 - DNA, 120 bp, Artificial Sequence
  ENSG00000205277_68 (sequence is synthesized)
gcccaggctcaactgaaaccacagtgttccctcgcagcaccacaacctcagttcgtggtgaagagcctacaaccttccacagccggccagcctcaactcacacaacactgttcactgagg

SEQ ID NO: 747527 - DNA, 120 bp, Artificial Sequence
  ENSG00000205277_69 (sequence is synthesized)
acagcaccacctcgggcctcactgaagaatctacagccttccccggcagcccagcctccacccaaacagggttacctgccacactcacaaccgcagacctcggtgaggaatcaactacct

SEQ ID NO: 747528 - DNA, 120 bp, Artificial Sequence
  ENSG00000205277_70 (sequence is synthesized)
ttcccagcagctcaggctcaactggaacaacactctcacctgcccgctccaccacctctggcctcgttggagaatccacaccctcacgcctcagtccaagctcaaccgaaacaacaactt

SEQ ID NO: 747529 - DNA, 120 bp, Artificial Sequence
  ENSG00000205277_71 (sequence is synthesized)
tacccggcagtcccacaacaccaagcctcagtgagaaatcaaccaccttctacactagccccagatcaccagatgcaacactctcacctgcaaccacaacaagctcaggcgtcagtgaag

SEQ ID NO: 747530 - DNA, 120 bp, Artificial Sequence
  ENSG00000205277_72 (sequence is synthesized)
aatccagcacatcccacagtcaaccaggctcaacgcacacaacagcgttccctgacagcaccaccacctcaggcctcagtcaggaacctacagcttcccacagcagccaaggctcaacag

SEQ ID NO: 747531 - DNA, 120 bp, Artificial Sequence
  ENSG00000205277_73 (sequence is synthesized)
aggcaacactgtcccctggcagtaccacagcctcatcccttggtcaacaatctacaaccttccacagcagcccaggcgacactgaaaccacactcttacctgacgacaccataacctcag

SEQ ID NO: 747532 - DNA, 120 bp, Artificial Sequence
  ENSG00000205277_74 (sequence is synthesized)
gcctcgtggaggcatctacacccacccacagcagcactggctcgctacacacaacactgacccctgccagctccacaagcgctggccttcaggaagaatctaccactttccagagctggc

SEQ ID NO: 747533 - DNA, 120 bp, Artificial Sequence
  ENSG00000205277_75 (sequence is synthesized)
caagctcaagtgacacaacaccttcacctcccggcaccacagcagcccctgttgaagtatccacaacctaccacagccgcccgagctcaactccaacaacacacttttctgccagttcca

SEQ ID NO: 747534 - DNA, 120 bp, Artificial Sequence
  ENSG00000205277_76 (sequence is synthesized)
caaccttgggccgtagtgaggaatcaacaacagtccacagcagcccaggtgcaactggaacagcactcttccctacccgctctgcaacctcagttcttgttggagaacctacaacgtcac

SEQ ID NO: 747535 - DNA, 120 bp, Artificial Sequence
  ENSG00000205277_77 (sequence is synthesized)
ccatcagttcaggctcaacggaaacaacagcgttacctggcagtaccacaacagcaggcctgagtgagaaatctaccaccttctacagtagccccagatcaccggacacaacactctcac

SEQ ID NO: 747536 - DNA, 120 bp, Artificial Sequence
  ENSG00000205277_78 (sequence is synthesized)
ctgccagcacgacaagctcaggcgtcagtgaagaatccaccacctcccacagccgaccaggctcaacgcacacaacagcattccctggcagtaccaccatgccaggcgtcagtcaggaat

SEQ ID NO: 747537 - DNA, 120 bp, Artificial Sequence
  ENSG00000205277_79 (sequence is synthesized)
ctacagcttcccacagcagcccaggctccacagacacaacactgtcccctggcagtaccacagcatcatcccttggtccagaatctactaccttccacagcggcccaggctccactgaaa

SEQ ID NO: 747538 - DNA, 120 bp, Artificial Sequence
  ENSG00000205277_80 (sequence is synthesized)
caacactcttacctgacaacaccacagcctcaggcctccttgaagcatctacgcccgtccacagcagcactggatcgccacacacaacactgtcccctgccggctctacaacccgtcagg

SEQ ID NO: 747539 - DNA, 120 bp, Artificial Sequence
  ENSG00000205277_81 (sequence is synthesized)
gagaatctaccaccttccagagctggcctaactcgaaggacactacccctgcacctcctactaccacatcagcctttgttgagctatctacaacctcccacggcagcccgagctcaactc

SEQ ID NO: 747540 - DNA, 120 bp, Artificial Sequence
  ENSG00000205277_82 (sequence is synthesized)
caacaacccacttttctgccagctccacaaccttgggccgtagtgaggaatcgacaacagtccacagcagcccagttgcaactgcaacaacaccctcgcctgcccgctccacaacctcag

SEQ ID NO: 747541 - DNA, 120 bp, Artificial Sequence
  ENSG00000205277_83 (sequence is synthesized)
gcctcgttgaagaatctacgacctaccacagcagcccgggctcaactcaaacaatgcacttccctgaaagcgacacaacttcaggccgtggtgaagaatcaacaacttcccacagcagca

SEQ ID NO: 747542 - DNA, 120 bp, Artificial Sequence
  ENSG00000205277_84 (sequence is synthesized)
caacacacacaatatcttcagctcctagcaccacatctgcccttgttgaagaacctaccagctaccacagcagcccgggctcaactgcaacaacacacttccctgacagctccacaacct

SEQ ID NO: 747543 - DNA, 120 bp, Artificial Sequence
  ENSG00000205277_85 (sequence is synthesized)
caggccgtagtgaggaatcaacagcatcccacagcagccaagacgcaacgggaacaatagtcctacctgcccgctccacaacctcagttcttcttggagaatctacgacctcacccatca

SEQ ID NO: 747544 - DNA, 120 bp, Artificial Sequence
  ENSG00000205277_86 (sequence is synthesized)
gttcaggctcaatggaaacgacagcgttacccggcagtaccacaacgccaggcctcagtgagaaatctaccactttccacagtagccccagatcaccagccacaacactctcacctgcca

SEQ ID NO: 747545 - DNA, 120 bp, Artificial Sequence
  ENSG00000205277_87 (sequence is synthesized)
gcacgacaagctcaggcgtcagtgaagaatccaccacctcccacagccgaccaggctcaacgcacacaacagcattccctgacagcaccaccacgccaggcctcagtcggcattctacaa

SEQ ID NO: 747546 - DNA, 120 bp, Artificial Sequence
  ENSG00000205277_88 (sequence is synthesized)
cttcccacagcagcccaggctcaacggatacaacactgttacctgccagcaccaccacctcaggctccagtcaggaatcaacaacttcccacagcagctcaggttcaactgacacagcac

SEQ ID NO: 747547 - DNA, 120 bp, Artificial Sequence
  ENSG00000205277_89 (sequence is synthesized)
tgtcccctggcagtaccacagccttatcctttggtcaagaatctacaaccttccacagcagcccaggctccactcacacaacactcttccctgacagcaccacaagctcaggcatcgttg

SEQ ID NO: 747548 - DNA, 120 bp, Artificial Sequence
  ENSG00000205277_90 (sequence is synthesized)
aagcatctacacgcgtccacagcagcactggctcaccacgcacaacactgtcccctgccagctccacaagccctggacttcagggagaatctaccgccttccagacccacccagcctcaa

SEQ ID NO: 747549 - DNA, 120 bp, Artificial Sequence
  ENSG00000205277_91 (sequence is synthesized)
ctcacacgacgccttcacctcctagcaccgcaacagcccctgttgaagaatctacaacctaccaccgcagcccaggctcgactccaacaacacacttccctgccagctccacaacttcgg

SEQ ID NO: 747550 - DNA, 120 bp, Artificial Sequence
  ENSG00000205277_92 (sequence is synthesized)
gccacagtgagaaatcaacaatattccacagcagcccagatgcaagtggaacaacaccctcatctgcccactccacaacctcaggtcgtggagaatctacaacctcacgcatcagtccag

SEQ ID NO: 747551 - DNA, 120 bp, Artificial Sequence
  ENSG00000205277_93 (sequence is synthesized)
gctcaactgaaataacaacgttacctggcagtaccacaacaccaggcctcagtgaggcatctaccaccttctacagcagccccagatcaccaaccacaacactctcacctgccagtatga

SEQ ID NO: 747552 - DNA, 120 bp, Artificial Sequence
  ENSG00000205277_94 (sequence is synthesized)
caagcctaggcgtcggtgaagaatccaccacctcccgtagccaaccaggttctactcactcaacagtgtcacctgccagcaccaccacgccaggcctcagtgaggaatctaccaccgtct

SEQ ID NO: 747553 - DNA, 120 bp, Artificial Sequence
  ENSG00000205277_95 (sequence is synthesized)
acagcagcagcccaggctcaactgaaaccacagtgttccctcgcagcaccacaacctcagttcgtcgtgaagagcctacaaccttccacagccggccagcctcaactcacacaacactgt

SEQ ID NO: 747554 - DNA, 120 bp, Artificial Sequence
  ENSG00000205277_96 (sequence is synthesized)
tcactgaggacagcaccacctcgggcctcactgaagaatctacagccttccccggcagcccagcctccacccaaacagggttacctgccacactcacaaccgcagacctcggtgaggaat

SEQ ID NO: 747555 - DNA, 120 bp, Artificial Sequence
  ENSG00000205277_97 (sequence is synthesized)
caactacctttcccagcagctcaggctcaactggaacaaaactctcacctgcccgctccaccacctctggcctcgttggagaatccacaccctcacgcctcagtccaagctcaaccgaaa

SEQ ID NO: 747556 - DNA, 120 bp, Artificial Sequence
  ENSG00000205277_98 (sequence is synthesized)
caacaactttacccggcagtcccacaacaccaagcctcagtgagaaatcaaccaccttctacactagccccagatcaccagatgcaacactctcacctgcaaccacaacaagctcaggcg

SEQ ID NO: 747557 - DNA, 120 bp, Artificial Sequence
  ENSG00000205277_99 (sequence is synthesized)
tcagcgaagaatccagcacatcccacagtcaaccaggctcaacgcacacaacagcgttccctgacagcaccaccacctcaggcctcagtcaggaacctacaacttcccacagcagccaag

SEQ ID NO: 747558 - DNA, 120 bp, Artificial Sequence
  ENSG00000205277_100 (sequence is synthesized)
gctcaacagaggcaacactgtcccctggcagtaccacagcctcatcccttggtcaacaatctacaaccttccacagcagcccaggcgacactgaaaccacactcttacctgacgacacca

SEQ ID NO: 747559 - DNA, 120 bp, Artificial Sequence
  ENSG00000205277_101 (sequence is synthesized)
taacctcaggcctcgtggaggcatctacacccacccacagcagcactggctcgctacacacaacactgacccctgccagctccacaagcactggccttcaggaagaatctaccactttcc

SEQ ID NO: 747560 - DNA, 120 bp, Artificial Sequence
  ENSG00000205277_102 (sequence is synthesized)
agagctggccaagctcaagtgacacaacaccttcacctcccagcaccacagcagtccctgttgaagtatccacaacctaccacagccgcccgagctcaactccaacaacacacttttctg

SEQ ID NO: 747561 - DNA, 120 bp, Artificial Sequence
  ENSG00000205277_103 (sequence is synthesized)
ccagttccacaaccttgggccgtagtgaggaatcaacaacagtccacagcagcccaggtgcaactggaacagcactcttccctacccgctctgcaacctcagttcttgttggagaaccta

SEQ ID NO: 747562 - DNA, 120 bp, Artificial Sequence
  ENSG00000205277_104 (sequence is synthesized)
caacgtcacccatcagttcaggctcaacggaaacaacagcgttacctggcagtaccacaacagcaggcctgagtgagaaatctaccaccttctacagtagccccagatcaccggacacaa

SEQ ID NO: 747563 - DNA, 120 bp, Artificial Sequence
  ENSG00000205277_105 (sequence is synthesized)
cactttcacctgccagcacgacaagctcaggcgtcagtgaagaatccaccacctcccacagccgaccaggctcaatgcacacaacagcattccctagcagtaccaccatgccaggcgtca

SEQ ID NO: 747564 - DNA, 120 bp, Artificial Sequence
  ENSG00000205277_106 (sequence is synthesized)
gtcaggaatctacagcttcccacagcagcccaggctccacagacacaacactgtcccctggcagtaccacagcatcatcccttggtccagaatctactaccttccacagcagcccaggct

SEQ ID NO: 747565 - DNA, 120 bp, Artificial Sequence
  ENSG00000205277_107 (sequence is synthesized)
ccactgaaacaacactcttacctgacaacaccacagcctcaggcctccttgaagcatctacacccgtccacagcagcactggatcgccacacacaacactgtcccctgccggctctacaa

SEQ ID NO: 747566 - DNA, 120 bp, Artificial Sequence
  ENSG00000205277_108 (sequence is synthesized)
cccgtcagggagaatctaccaccttccagagctggccaaactcgaaggacactacccctgcacctcctactaccacatcagcctttgttgagctatctacaacctcccacggcagcccga

SEQ ID NO: 747567 - DNA, 120 bp, Artificial Sequence
  ENSG00000205277_109 (sequence is synthesized)
gctcaactccaacaacccacttttctgccagctccacaacattgggccgtagtgaggaatcgacaacagtccacagcagcccagttgcaactgcaacaacaccctcgcctgcccgctcca

SEQ ID NO: 747568 - DNA, 120 bp, Artificial Sequence
  ENSG00000205277_110 (sequence is synthesized)
caacctcaggcctcgttgaagaatctacgacctaccacagcagcccgggctcaactcaaacaatgcacttccctgaaagcaacacaacttcaggccgtggtgaagaatcaacaacttccc

SEQ ID NO: 747569 - DNA, 120 bp, Artificial Sequence
  ENSG00000205277_111 (sequence is synthesized)
acagcagcacaacacacacaatatcttcagctcctagcaccacatctgcccttgttgaagaacctaccagctaccacagcagcccgggctcaactgcaacaacacacttccctgacagct

SEQ ID NO: 747570 - DNA, 120 bp, Artificial Sequence
  ENSG00000205277_112 (sequence is synthesized)
ccacaacctcaggccgtagtgaggaatcaacagcatcccacagcagccaagacgcaacgggaacaatagtcctacctgcccgctccacaacctcagttcttcttggagaatctacgacct

SEQ ID NO: 747571 - DNA, 120 bp, Artificial Sequence
  ENSG00000205277_113 (sequence is synthesized)
cacccatcagttcaggctcaatggaaacgacagcgttacccggcagtaccacaacgccaggcctcagtgagaaatctaccactttccacagtagcccgagctcaactccaacaacccact

SEQ ID NO: 747572 - DNA, 120 bp, Artificial Sequence
  ENSG00000205277_114 (sequence is synthesized)
tttctgccagctccacaaccttgggccgtagtgaggaatcgacaacagtccacagcagcccagttgcaactgcaacaacaccctcgcctgcccgctccacaacctcaggcctcgttgaag

SEQ ID NO: 747573 - DNA, 120 bp, Artificial Sequence
  ENSG00000205277_115 (sequence is synthesized)
aatctacggcgtaccacagcagcccgggctcaactcaaacaatgcacttccctgaaagctccacagcttcaggtcgtagtgaagaatcaagaacttcccacagcagcacaacacacacaa

SEQ ID NO: 747574 - DNA, 120 bp, Artificial Sequence
  ENSG00000205277_116 (sequence is synthesized)
tatcttcacctcctagcaccacatctgcccttgttgaagaacctaccagctaccacagcagcccgggctcaattgcaacaacacactttcctgagagctccacaacctccggccgtagtg

SEQ ID NO: 747575 - DNA, 120 bp, Artificial Sequence
  ENSG00000205277_117 (sequence is synthesized)
aggaatcaacagcatcccacagcagcccagatacaaatggaatcacacccttacctgcccattttactacctcaggccgcattgcagaatctaccaccttctatatctctccaggctcaa

SEQ ID NO: 747576 - DNA, 120 bp, Artificial Sequence
  ENSG00000205277_118 (sequence is synthesized)
tggaaacaacattagccagcactgccacaacaccaggcctcagtgcaaaatctaccatcctttacagtagctccagatcaccagaccaaacactctcacctgccagcatgacaagctcca

SEQ ID NO: 747577 - DNA, 120 bp, Artificial Sequence
  ENSG00000205277_119 (sequence is synthesized)
gcatcagtggagaacccaccagcttgtatagccaagcagagtcaacacacacaacagcgttccctgccagcaccaccacctcaggcctcagtcaggaatcaacaactttccacagtaagc

SEQ ID NO: 747578 - DNA, 120 bp, Artificial Sequence
  ENSG00000205277_120 (sequence is synthesized)
caggctcaactgagacaacactgtcccctggcagcatcacaacttcatcttttgctcaagaatttaccacccctcatagccaaccaggctcagctctgtcaacagtgtcacctgccagca

SEQ ID NO: 747579 - DNA, 120 bp, Artificial Sequence
  ENSG00000205277_121 (sequence is synthesized)
ccacagtgccaggccttagtgaggaatctaccaccttctacagcagcccaggctcaactgaaaccacagcgttttctcacagcaacacaatgtccattcatagtcaacaatctacaccct

SEQ ID NO: 747580 - DNA, 120 bp, Artificial Sequence
  ENSG00000205277_122 (sequence is synthesized)
tccctgacagcccaggcttcactcacacagtgttacctgccaccctcacaaccacagacattggtcaggaatcaacagccttccacagcagctcagacgcaactggaacaacacccttac

SEQ ID NO: 747581 - DNA, 120 bp, Artificial Sequence
  ENSG00000205277_123 (sequence is synthesized)
ctgcccgctccacagcctcagaccttgttggagaacctacaactttctacatcagcccatcccctacttacacaacactctttcctgcgagttccagcacatcaggcctcactgaggaat

SEQ ID NO: 747582 - DNA, 120 bp, Artificial Sequence
  ENSG00000205277_124 (sequence is synthesized)
ctaccaccttccacaccagtccaagcttcacttctacaattgtgtctactgaaagcctggaaaccttagcaccagggttgtgccaggaaggacaaatttggaatggaaaacaatgcgtct

SEQ ID NO: 747583 - DNA, 120 bp, Artificial Sequence
  ENSG00000205277_125 (sequence is synthesized)
gtccccaaggctacgttggttaccagtgcttgtcccctctggaatccttccctgtagaaaccccggaaaaactcaacgccactttaggtatgacagtgaaagtgacttacagaaatttca

SEQ ID NO: 747584 - DNA, 120 bp, Artificial Sequence
  ENSG00000205277_126 (sequence is synthesized)
cagaaaagatgaatgacgcatcctcccaggaataccagaacttcagtaccctcttcaagaatcggatggatgtcgttttgaagggcgacaatcttcctcagtatagaggggtgaacattc

SEQ ID NO: 747585 - DNA, 120 bp, Artificial Sequence
  ENSG00000205277_127 (sequence is synthesized)
ggagattgctcaacggtagcatcgtggtcaagaacgatgtcatcctggaggcagactacactttagagtatgaggaactgtttgaaaacctggcagagattgtaaaggccaagattatga

SEQ ID NO: 747586 - DNA, 120 bp, Artificial Sequence
  ENSG00000205277_128 (sequence is synthesized)
atgaaactagaacaactcttcttgatcctgattcctgcagaaaggccatactgtgctatagtgaagaggacactttcgtggattcatcggtgactccgggctttgacttccaggagcaat

SEQ ID NO: 747587 - DNA, 120 bp, Artificial Sequence
  ENSG00000205277_129 (sequence is synthesized)
gcacccagaaggctgccgaaggatatacccagttctactatgtggatgtcttggatgggaagctggcctgtgtgaacaagtgcaccaaaggaacgaagtcgcaaatgaactgtaacctgg

SEQ ID NO: 747588 - DNA, 120 bp, Artificial Sequence
  ENSG00000205277_130 (sequence is synthesized)
gcacatgtcagctgcaacgcagtggcccccgctgcctgtgcccaaatacgaacacacactggtactggggagagacctgtgaattcaacatcgccaagagcctcgtgtatgggatcgtgg

SEQ ID NO: 747589 - DNA, 120 bp, Artificial Sequence
  ENSG00000205277_131 (sequence is synthesized)
gggctgtgatggcggtgctgctgctcgcattgatcatcctaatcatcttattcagcctatcccagagaaaacggcacagggaacagtatgatgtgcctcaagagtggcgaaaggaaggca

SEQ ID NO: 747590 - DNA, 120 bp, Artificial Sequence
  ENSG00000205277_132 (sequence is synthesized)
cccctggcatcttccagaagacggccatctgggaagaccagaatctgagggagagcagattcggccttgagaacgcctacaacaacttccggcccaccctggagactgttgactctggca

SEQ ID NO: 747591 - DNA, 120 bp, Artificial Sequence
  ENSG00000205277_133 (sequence is synthesized)
cagagctccacatccagaggccggagatggtagcatccactgtgtgagccaacgggggcctcccaccctcatctagctctgttcaggagagctgcaaacacagagcccaccacaagcctc

SEQ ID NO: 747592 - DNA, 120 bp, Artificial Sequence
  ENSG00000205277_134 (sequence is synthesized)
cggggcgggtcaagaggagaccgaagtcaggccctgaagccggtcctgctctgagctgacagacttggccagtcccctgcctgtgctcctgctggggaaggctgggggctgtaagcctct

SEQ ID NO: 747593 - DNA, 120 bp, Artificial Sequence
  ENSG00000205277_135 (sequence is synthesized)
ccatccgggagcttccagactcccagaagcctcggcacccctgtctcctcctgggtggctccccactctggaatttccctaccaataaaagcaaatctgaaagctcagaatgagaagtga

SEQ ID NO: 747594 - DNA, 120 bp, Artificial Sequence
  ENSG00000205277_136 (sequence is synthesized)
atgctggtgatctggattctgacgctggctctccggctctgcgcgtccgttactacagtgacaccagagggctctgctgttcacaaagccatttcccagcagggcacattgtggactggt

SEQ ID NO: 747595 - DNA, 120 bp, Artificial Sequence
  ENSG00000205277_137 (sequence is synthesized)
gaggttttggagaagcagacagtcgagcaagggaagagcactctgagaaggcagaaaaatcatttccacaggtctgcaggggagctacggtgcaggaatgccctgaaagatgagggggca

SEQ ID NO: 747596 - DNA, 120 bp, Artificial Sequence
  ENSG00000205277_138 (sequence is synthesized)
tctgctggatggagcgtgatgtttgctggggagagtgtggtggtgctggtgcatttgtggatgacaggagcacgagtgaagaacctgggcttggtggagtttgctagcccaggggacgac

SEQ ID NO: 747597 - DNA, 120 bp, Artificial Sequence
  ENSG00000205277_139 (sequence is synthesized)
ggggatggcagagccgagggctttagcctggggctcccacttagtgagcaggcaagggctgcaggagccagagagaaggagcgtcaggagacagtcataaatcatagcactttctctggt

SEQ ID NO: 747598 - DNA, 120 bp, Artificial Sequence
  ENSG00000205277_140 (sequence is synthesized)
ccgctccactctgacctcacccctgagtccagggctgaacgcacgctcctccgtggcccccgcttccaccccgtgcatgtggggggcttctgctccgctccctcctgttccggggtccag

SEQ ID NO: 747599 - DNA, 120 bp, Artificial Sequence
  ENSG00000205277_141 (sequence is synthesized)
cgtgcatgtggggggcttctgctccgctccctcctgttccggggtccagcgggcggctccccaggcaggctctgcacttacccgcagcccagtgatgcagggtcggaggggtggtcggca

SEQ ID NO: 747600 - DNA, 120 bp, Artificial Sequence
  ENSG00000205277_142 (sequence is synthesized)
gtgggaaagggcgtagggcagatgccgggctgactcttccttttgccagaggaaatcccctctgccccctagtcctccccctaccaaggctcccatcactcatcacggcctctccctaca

SEQ ID NO: 747601 - DNA, 120 bp, Artificial Sequence
  ENSG00000205279_0 (sequence is synthesized)
agacacactgctaggatactgcctctactcgctgaagcagaatcctctgaagagttgctgaggcagaactgaaatcatggctcacctcaaagaagcagcagtattggccgttaatgatgc

SEQ ID NO: 747602 - DNA, 120 bp, Artificial Sequence
  ENSG00000205279_1 (sequence is synthesized)
ctcacacagaaagacgatgctcctttaactcggggttttaatgggaagtttctaagcctgaaacaacagctttagacctggggtgtgccatcagctgccttgcagctaccactgtctact

SEQ ID NO: 747603 - DNA, 120 bp, Artificial Sequence
  ENSG00000205279_2 (sequence is synthesized)
gctttcacacagcgtggtcgggaagaatggaaactaaagaggcttgtaactacctgtaactgttccaccaggaaatggatcaagtgtttgttcagccagagccagtattaaaattagact

SEQ ID NO: 747604 - DNA, 120 bp, Artificial Sequence
  ENSG00000205279_3 (sequence is synthesized)
ctatttcctgagcacccacaaatggacctgacaaagggaagacacagatgtactgcgtgatgaggaaagcctatcaggattaaaatatggctataactcagcctctccagagtgcagcca

SEQ ID NO: 747605 - DNA, 120 bp, Artificial Sequence
  ENSG00000205279_4 (sequence is synthesized)
ccatgacctccgcagattgatgatggaagaaaagaaaaccaggatatcctgtgctctggcttccctggaccatggatggaggacagcccatcccctcatccctagtgccccttgggaacg

SEQ ID NO: 747606 - DNA, 120 bp, Artificial Sequence
  ENSG00000205279_5 (sequence is synthesized)
aatcagcagattctagcatgtccctggagcagaaaatgacatttgtttttgtgattctgttgtttattttcttgggcattctcattgtccggtgcttccggattcttttggatccatatc

SEQ ID NO: 747607 - DNA, 120 bp, Artificial Sequence
  ENSG00000205279_6 (sequence is synthesized)
ctgaggagatgaagtgctttgtgtcttggtgaggattccctttatttagtgttctcaacaaatcaaatttaaacaatatttggtcccaggaccataatccattattccataaatatgcag

SEQ ID NO: 747608 - DNA, 120 bp, Artificial Sequence
  ENSG00000205279_7 (sequence is synthesized)
ttgggttaaagacatttgaggatgttggaaatggacacttatataactaatccaacataagaaggtttaaatttttatgtttgctcaatgaatgagtactcttaaaattgtgtgattgtg

SEQ ID NO: 747609 - DNA, 120 bp, Artificial Sequence
  ENSG00000205279_8 (sequence is synthesized)
aaaccaagagcgttaatactgacatagatttgccatcaaacaaaacaccacctgatctgactaaagaataaaagactagaaaggatctcatatgaatctggtgacaaggccaggaagaga

SEQ ID NO: 747610 - DNA, 120 bp, Artificial Sequence
  ENSG00000205279_9 (sequence is synthesized)
tttccttgctctaattatgtctatatttgttttatttcatgggcacctatctgggtcctgagcagaatgaggaagattgtgctgaatggacccaaagtagtttcttgttttctcccaaag

SEQ ID NO: 747611 - DNA, 120 bp, Artificial Sequence
  ENSG00000205279_10 (sequence is synthesized)
cagggagctttgggaagcaatggaaaagcttaaaagagatgattctgtccttggtaaatgtgagtgagaatagcgttttgtttttcaagtaaaacttaattcaaaggctacaaagtttta

SEQ ID NO: 747612 - DNA, 120 bp, Artificial Sequence
  ENSG00000205279_11 (sequence is synthesized)
aaaactatttaccaagccaactacattatatgtattcatattaataacatgtgtagaggtagctatacattacttgaatttacactttacacaaatgatttaaaaaataggttgcaagtg

SEQ ID NO: 747613 - DNA, 120 bp, Artificial Sequence
  ENSG00000205279_12 (sequence is synthesized)
cagcttaaagttttttttcaatgaaaagttaattgtttagaggagaagacttttatagtcttcagaggaatgtgtatttatgattgtatatagtcaccaaataaaacttttcaagaaaca

SEQ ID NO: 747614 - DNA, 120 bp, Artificial Sequence
  ENSG00000205279_13 (sequence is synthesized)
ggcttaaaaagatgaatcgagatgcagtgtgtaggaagcatgggcaagggatgaggaacgccactttgaaaattactaaaactaaagcaagtgactaagagtgtgaatgaccctggctgc

SEQ ID NO: 747615 - DNA, 120 bp, Artificial Sequence
  ENSG00000205279_14 (sequence is synthesized)
taaaatagctgccatgtgttattatgaaggcttctgatggtggtatcaaaatcctttgaaataatagacttgcacagatttccctggtcatctaaaagaaagatgtcattattcagttaa

SEQ ID NO: 747616 - DNA, 120 bp, Artificial Sequence
  ENSG00000205279_15 (sequence is synthesized)
aagcaaacttgcacattttctaagaatcatttttaccaaaaagggacattttactgcgagacagacatttaaaaatttacatgtcttgagatatttttgtattgtggtagcaaaatgatt

SEQ ID NO: 747617 - DNA, 120 bp, Artificial Sequence
  ENSG00000205301_0 (sequence is synthesized)
gcgcgctcaaccccgtccctggcattatccgccgcctccacccgccggcctcccgcagcctggccagggccatgaggaccaagcaggtgaacttgctgatcaccctggtcgccgtcgcgt

SEQ ID NO: 747618 - DNA, 120 bp, Artificial Sequence
  ENSG00000205301_1 (sequence is synthesized)
tgttcagcttctcttgcttctccatctacaggataactcaaaccaataatcaattaattaactgtagaaaccatattttggagtttaaagaaaatatgctacacttaagaaacaaaactg

SEQ ID NO: 747619 - DNA, 120 bp, Artificial Sequence
  ENSG00000205301_2 (sequence is synthesized)
aaaaaaatacccaagagatgatgaaagttttgaatcgaatgaagtatgaaattacaaagagagaaattttgtcaggaaacttagttgcacagaaagcagacatattaaataaaaatgaaa

SEQ ID NO: 747620 - DNA, 120 bp, Artificial Sequence
  ENSG00000205301_3 (sequence is synthesized)
cagtatctaatacatttgaagacttaaagttcttttttcctcatctaaggaaagaaggtagaatttatcctgatgtaatcattggcaaagggaaaactggtgtttcttttgcgctgggta

SEQ ID NO: 747621 - DNA, 120 bp, Artificial Sequence
  ENSG00000205301_4 (sequence is synthesized)
tttccactgttaacagaggaaattatagttacctgaaacagacactgacctctgttgtctccaggatgacgctctcccaagagaaggattctgtagtgattgtcttggttgcagatagta

SEQ ID NO: 747622 - DNA, 120 bp, Artificial Sequence
  ENSG00000205301_5 (sequence is synthesized)
atgaagattatttacattctgttgttaaaatgattacaaaaaaattcaaaaggcaagtgaggtctggatccttagaggtcatttcaatacctgcctttttatactcaagcatgttaaatg

SEQ ID NO: 747623 - DNA, 120 bp, Artificial Sequence
  ENSG00000205301_6 (sequence is synthesized)
ccaagcacttagctgaggcctcacaaaaattagccagttggcgaatcaaacaggtattggatttttgcattttgttgctgtatgcccaacccaaggccaagtattatttacagctagaag

SEQ ID NO: 747624 - DNA, 120 bp, Artificial Sequence
  ENSG00000205301_7 (sequence is synthesized)
atgatatcatagctaaagagatgtactttacaaaaataacagattttgtaggtaatatcagttcaaataattggttttttattgagttttcaatgcttggattcataggaaagctgttta

SEQ ID NO: 747625 - DNA, 120 bp, Artificial Sequence
  ENSG00000205301_8 (sequence is synthesized)
gatctgaggacttaactcactttgtacggttttttttaatgttctacaaagagaaacccatagactggctcttgaatgacatttttcaggtaaaggtgtgtgacgcaggagaagatctta

SEQ ID NO: 747626 - DNA, 120 bp, Artificial Sequence
  ENSG00000205301_9 (sequence is synthesized)
aagaacaatatgaaaaaaaaatatgaagataaataagaagaaactctgtaatacctggaacctcagataaccttgatatctaatggcatgtttcagaaattgtagtaatgaaaatacata

SEQ ID NO: 747627 - DNA, 120 bp, Artificial Sequence
  ENSG00000205301_10 (sequence is synthesized)
attatctagcagataagtaaacaatgcataaactagtagacttgaaagtactaaatgacttcttatgtcaagacaaggtagaacatttatattgcttttaccctattacaatttaattta

SEQ ID NO: 747628 - DNA, 120 bp, Artificial Sequence
  ENSG00000205301_11 (sequence is synthesized)
aaaatactaaaggcaaggaagttttttttaaattaagaactgcactttattgacttcgatagtgagaccatcacataatctcaataaacagttaaaagttcgaaagcttgctattgtcag

SEQ ID NO: 747629 - DNA, 120 bp, Artificial Sequence
  ENSG00000205301_12 (sequence is synthesized)
ggagaagtttggggtgaattggtatatgccgttatccattttgttaagacacctaaagaaatagaaagcacaaatttaaacaagcctggatctgacagtgccacaatgtcttcttgtcta

SEQ ID NO: 747630 - DNA, 120 bp, Artificial Sequence
  ENSG00000205301_13 (sequence is synthesized)
ttaatagatgcatttaaaactataaacttatccctatgtgccatttgaaccgattatcaaacatcttgatatatatgtattcttatagtcatttagttctaaagatttcatagtttctct

SEQ ID NO: 747631 - DNA, 120 bp, Artificial Sequence
  ENSG00000205301_14 (sequence is synthesized)
catcattgccttcttaacacacagattatttgggagtttttttcccaaatatattggttttctccatcttttattgttaatttctaaattacttgcatagtggttatagaactttacctg

SEQ ID NO: 747632 - DNA, 120 bp, Artificial Sequence
  ENSG00000205301_15 (sequence is synthesized)
tgtgataaaattttgagaattgttgtgaatccttgtgttccatatgactttggaaagaatgtatagtttctgtatactcccttttaaatatgttatattcatttgtttttaaaagtgttg

SEQ ID NO: 747633 - DNA, 120 bp, Artificial Sequence
  ENSG00000205301_16 (sequence is synthesized)
gttttgtgctttaaaaatatctcttaaaagtattcctatctattgggtgcaaaattctcttatatcaggctttctaatttggttgttgaaaacttttcactccttactaatttctatatg

SEQ ID NO: 747634 - DNA, 120 bp, Artificial Sequence
  ENSG00000205301_17 (sequence is synthesized)
cttgatccatcagtttctacaggggcccattaaaatctatttttcttcttgatgttattctgtaaggtattacttattttgagcaataataagtgatatttatttgttatcctttaatca

SEQ ID NO: 747635 - DNA, 120 bp, Artificial Sequence
  ENSG00000205301_18 (sequence is synthesized)
aatattgtgaaattcttcatttcccattgttgccttattcttgagtgccaagatctcacacattcgcctcagtatgaactgtatcaaataccaatttataaagataatatgaaagacgaa

SEQ ID NO: 747636 - DNA, 120 bp, Artificial Sequence
  ENSG00000205301_19 (sequence is synthesized)
attcagtataaaccttctcttttccagcatgtgggtatacattcatcattccctagaaaagaacaatatgaaaaagatgtctattaggagtttcatgtttctaaagctttaaaaagtatc

SEQ ID NO: 747637 - DNA, 120 bp, Artificial Sequence
  ENSG00000205301_20 (sequence is synthesized)
aaaatcattctttggaaataatgacataataagaattagactatttctcaactttcttaagcgactacatcatattttaaaatattaatccttcaataaagtggcaagtataagaaaatt

SEQ ID NO: 747638 - DNA, 120 bp, Artificial Sequence
  ENSG00000205301_21 (sequence is synthesized)
gccaggattgggagagttggggcaatgtgtgctcacgcatttcatcagaggccaaacataaagtcactttgtgaagggagttaacattgggtttcttcaagaggaccatgaagagttcca

SEQ ID NO: 747639 - DNA, 120 bp, Artificial Sequence
  ENSG00000205301_22 (sequence is synthesized)
aatggcatgatttttataaagacactattatcttaacagtataatcagatgcaagtacctaaattccagataatgtattttcttaaccaaacttttttctagagagatcaaattgacatt

SEQ ID NO: 747640 - DNA, 120 bp, Artificial Sequence
  ENSG00000205301_23 (sequence is synthesized)
tagacacataagtcatagaaacataaaagagttaccatttattaaatgcttgctgtgagtctggcacacatgttagctgagtagctaagatgtacttttctctgctttacaagaatactg

SEQ ID NO: 747641 - DNA, 120 bp, Artificial Sequence
  ENSG00000205301_24 (sequence is synthesized)
aaactcagataattaaaattgtagagaaagggactttaactcagtcgctgcaatttccagtatgctaaagctgacagtcttaaaaaatataaaaacataataaaaattatacccaccaca

SEQ ID NO: 747642 - DNA, 120 bp, Artificial Sequence
  ENSG00000205301_25 (sequence is synthesized)
gaaaatttccaaatactatacccattatgagatcttttttactacccttccttagattttccttttaaatccttcaatttttctttcttcacttccatgcttttttctttcctttgaacc

SEQ ID NO: 747643 - DNA, 120 bp, Artificial Sequence
  ENSG00000205301_26 (sequence is synthesized)
tcaagtattaccatactgcttatattatggtgcatgacattattgattcatacaggagctcttccttatgtattctttccttttattcccaatccctacaccctcttcctgccactcttc

SEQ ID NO: 747644 - DNA, 120 bp, Artificial Sequence
  ENSG00000205301_27 (sequence is synthesized)
aatatattgttcactctaatatgttcaaaatacacttataaatatacaatatccatgtgaaatatttggtgcttttcatgtttgtatattcctattccttacatttttgtcctcaaaact

SEQ ID NO: 747645 - DNA, 120 bp, Artificial Sequence
  ENSG00000205301_28 (sequence is synthesized)
tgatttctaaattatcagcatgttgttttatgttcatttagtttattggttttttactgctacataagtgctgcataatgatggtcactgaaatttatgcattcagaattgtgcaaagtg

SEQ ID NO: 747646 - DNA, 120 bp, Artificial Sequence
  ENSG00000205301_29 (sequence is synthesized)
aggactacctgttttgcacatagagatcatgcatataaaactgtaacctgcttttaatttttttacgtcaacaatcccatgatcagctgtcttatagtcacatccaaattcacttccagc

SEQ ID NO: 747647 - DNA, 120 bp, Artificial Sequence
  ENSG00000205301_30 (sequence is synthesized)
tgtcatgtggatttatcatcagaaggcaaggcaaggcaaccacacgttttgctgtctacaagtgaactaaatctggatgcacagtgacccatcaccaaaagactttgaaagaagtgatga

SEQ ID NO: 747648 - DNA, 120 bp, Artificial Sequence
  ENSG00000205301_31 (sequence is synthesized)
cttatcacttatcactcacatttggcttatctatttcctgagtggcagaccttaattgcttccaattttctgctgccatgaaaaaatgaagtgacatatatgtcccctagagtggaccac

SEQ ID NO: 747649 - DNA, 120 bp, Artificial Sequence
  ENSG00000205301_32 (sequence is synthesized)
tgaggattcacatagctctaagtactgccaattgctttacagattggttatacggtttacgctctcataagcagtgcgtaaaagttcgtgcttccccatatgcttgacaacacttggttt

SEQ ID NO: 747650 - DNA, 120 bp, Artificial Sequence
  ENSG00000205301_33 (sequence is synthesized)
tatctattattatatgtatatatttgccattctcagtataaagcatttctgggattgctagtgagatccatctgtttttcatatactcactcgatgacttttgtttttcatgttttctgt

SEQ ID NO: 747651 - DNA, 120 bp, Artificial Sequence
  ENSG00000205301_34 (sequence is synthesized)
aaaattttaagggcccaaaggtttttcctcagccttggttaaaataagaaggaaaattattgttaacagtaatacccaaagtaaggcatgcagacaaagtaatcttgctgatggattagt

SEQ ID NO: 747652 - DNA, 120 bp, Artificial Sequence
  ENSG00000205301_35 (sequence is synthesized)
ctgagaatttaaaattctcaaaaaaatttatctttctcagcaaagtcaagtaagagacacatagagaatgcttacattctgatcacaagagcacattgaacaaggagcactatttatggg

SEQ ID NO: 747653 - DNA, 120 bp, Artificial Sequence
  ENSG00000205301_36 (sequence is synthesized)
atgccaaatcttattcaagttttaacttacaaaagtttttcttttagttatcataatagcaattcggttattcattatttgctaaaaatatgagcttgccaactagaattttacagcatg

SEQ ID NO: 747654 - DNA, 120 bp, Artificial Sequence
  ENSG00000205301_37 (sequence is synthesized)
gtgacagcaggttaggaattgaatcagctattttatacatcattaaatcacttgctttggttactacataaataggtgcaaaaaattaaaaaattaaaatacaattatacattttattaa

SEQ ID NO: 747655 - DNA, 120 bp, Artificial Sequence
  ENSG00000205301_38 (sequence is synthesized)
gtgactcatataaacttaagttctagtgaagaatgaagcatgcttacatccgactttcatatttatcaaatcattagatgtattttacattatttactttgaagtgaatatgtacctgaa

SEQ ID NO: 747656 - DNA, 120 bp, Artificial Sequence
  ENSG00000205301_39 (sequence is synthesized)
ctttgaagtgaatatgtacctgaatcttatcccttcaacttcattttaaaattaaagatgcagtatataagaaaaaaactattagacctaatggaataatatttaaaaatatagtaaatc

SEQ ID NO: 747657 - DNA, 120 bp, Artificial Sequence
  ENSG00000205301_40 (sequence is synthesized)
aaaataacatcctgttaaaataatgctcaaatactgaaatgagagtactttaataaaattaagtactaacaacgaaaaatgtagtagattgataaagtgctacaaaaatcaggtaaaaaa

SEQ ID NO: 747658 - DNA, 120 bp, Artificial Sequence
  ENSG00000205301_41 (sequence is synthesized)
tacagtttgtacaaaattaagtaaaagattacaacgcctatatatttcattctattcacttgtctttcacttgatttagacaatcaatcctcatgagttatcacaattgatttcctgaga

SEQ ID NO: 747659 - DNA, 120 bp, Artificial Sequence
  ENSG00000205301_42 (sequence is synthesized)
gtattgactattctaaacctgcttatattctccttcagatgtggtaatccttaatacttaagcagatatagtgtttaattttatcattgtctaacttcagcagtgctttaatctttattt

SEQ ID NO: 747660 - DNA, 120 bp, Artificial Sequence
  ENSG00000205301_43 (sequence is synthesized)
ctaaggaatgggacatatttaaattttaataacttttgctttttcccatgttaaaggaatgaacaactacatatgaattatttgcatctaattgtatttttttccataggaaagctgttt

SEQ ID NO: 747661 - DNA, 120 bp, Artificial Sequence
  ENSG00000205302_0 (sequence is synthesized)
gcgcagtcgttcgggtgagcgaagatggcggccgagagggaacctcctccgctgggggacgggaagcccaccgactttgaggatctggaggacggagaggacctgttcaccagcactgtc

SEQ ID NO: 747662 - DNA, 120 bp, Artificial Sequence
  ENSG00000205302_1 (sequence is synthesized)
tccaccctagagtcaagtccatcatctccagaaccagctagtcttcctgcagaagatattagtgcaaactccaatggcccaaaacccacagaagttgtattagatgatgacagagaagat

SEQ ID NO: 747663 - DNA, 120 bp, Artificial Sequence
  ENSG00000205302_2 (sequence is synthesized)
ctttttgcagaagccacagaagaagtttctttggacagccctgaaagggaacctatcctatcctcggaaccttctcctgcagtcacacctgtcactcctactacactcattgctcctaga

SEQ ID NO: 747664 - DNA, 120 bp, Artificial Sequence
  ENSG00000205302_3 (sequence is synthesized)
attgaatcaaagagtatgtctgctcccgtgatctttgatagatccagggaagagattgaagaagaagcaaatggagacatttttgacatagaaattggtgtatcagatccagaaaaagtt

SEQ ID NO: 747665 - DNA, 120 bp, Artificial Sequence
  ENSG00000205302_4 (sequence is synthesized)
ggtgatggcatgaatgcctatatggcatatagagtaacaacaaagacatctctttccatgttcagtaagagtgaattttcagtgaaaagaagattcagcgactttcttggtttgcacagc

SEQ ID NO: 747666 - DNA, 120 bp, Artificial Sequence
  ENSG00000205302_5 (sequence is synthesized)
aaattagcaagcaaatatttacatgttggttatattgtgccaccagctccagaaaagagtatagtagggatgaccaaggtcaaagtgggtaaagaagactcatcatccactgagtttgta

SEQ ID NO: 747667 - DNA, 120 bp, Artificial Sequence
  ENSG00000205302_6 (sequence is synthesized)
gaaaaacggagagcagctcttgaaaggtatcttcaaagaacagtaaaacatccaactttactacaggatcctgatttaaggcagttcttggaaagttcagagctgcctagagcagttaat

SEQ ID NO: 747668 - DNA, 120 bp, Artificial Sequence
  ENSG00000205302_7 (sequence is synthesized)
acacaggctctgagtggagcaggaatattgaggatggtgaacaaggctgccgacgctgtcaacaaaatgacaatcaagatgaatgaatcggatgcatggtttgaagaaaagcagcagcaa

SEQ ID NO: 747669 - DNA, 120 bp, Artificial Sequence
  ENSG00000205302_8 (sequence is synthesized)
tttgagaatctggatcagcaacttaggaaacttcatgtcagtgttgaagccttggtctgtcatagaaaagaactttcagccaacacagctgcctttgctaaaagtgctgccatgttaggt

SEQ ID NO: 747670 - DNA, 120 bp, Artificial Sequence
  ENSG00000205302_9 (sequence is synthesized)
aattctgaggatcatactgctttatctagagctttgtctcagcttgcagaggttgaggagaagatagaccagttacatcaagaacaagcttttgctgacttttatatgttttcagaacta

SEQ ID NO: 747671 - DNA, 120 bp, Artificial Sequence
  ENSG00000205302_10 (sequence is synthesized)
cttagtgactacattcgtcttattgctgcagtgaaaggtgtgtttgaccatcgaatgaagtgctggcagaaatgggaagatgctcaaattactttgctcaaaaaacgtgaagctgaagca

SEQ ID NO: 747672 - DNA, 120 bp, Artificial Sequence
  ENSG00000205302_11 (sequence is synthesized)
aaaatgatggttgctaacaaaccagataaaatacagcaagctaaaaatgaaataagagagtgggaggcgaaagtgcaacaaggggaaagagattttgaacagatatctaaaacgattcga

SEQ ID NO: 747673 - DNA, 120 bp, Artificial Sequence
  ENSG00000205302_12 (sequence is synthesized)
aaagaagtgggaagatttgagaaagaacgagtgaaggattttaaaaccgttatcatcaagtacttagaatcactagttcaaacacaacaacagctgataaaatactgggaagcattccta

SEQ ID NO: 747674 - DNA, 120 bp, Artificial Sequence
  ENSG00000205302_13 (sequence is synthesized)
cctgaagccaaagccattgcctagcaataagattgttgccgttaagaagaccttggatgttgttccagttatgctggattccacagtgaaatcatttaaaaccatctaaataaaccacta

SEQ ID NO: 747675 - DNA, 88 bp, Artificial Sequence
  ENSG00000205302_14 (sequence is synthesized)
cattttattacaagctgcatgtcctgaccctctttgaattaagtggactgtggcatgacattctgcaatactttgctgaattgaacac

SEQ ID NO: 747676 - DNA, 120 bp, Artificial Sequence
  ENSG00000205302_15 (sequence is synthesized)
tgtggcatgacattctgcaatactttgctgaattgaacactattgtgtcttaaatacttgcactaaatagtgcactgcaagaccagaaaattttacaatattttttctttacaatatgtt

SEQ ID NO: 747677 - DNA, 120 bp, Artificial Sequence
  ENSG00000205302_16 (sequence is synthesized)
ctgtagtatgtttaccctctttatgaagtgaattaccaatgctttgaataatgttcacttatacattcctgtacagaaattacgattttgtgattacagtaataaaatgatattccttgt

SEQ ID NO: 747678 - DNA, 120 bp, Artificial Sequence
  ENSG00000205302_17 (sequence is synthesized)
gaaatattagtaacaaattatttgggtatttaaacattaggaatcttttcaaagcatttttaataggaagaaatttttcttctagatgtatataggtgatgccatgattccttaattatt

SEQ ID NO: 747679 - DNA, 120 bp, Artificial Sequence
  ENSG00000205302_18 (sequence is synthesized)
ttaattgacaaagctgaactcattaaatgactaaatgaagcttaagttttcttatgaaaccatcataaatcaaagaacatttgactcttgattgtcttgggtaaagaagagaataattgt

SEQ ID NO: 747680 - DNA, 120 bp, Artificial Sequence
  ENSG00000205302_19 (sequence is synthesized)
ctttgcttgtttttaaccatctctattacaagtgcccaatttaagaattaggaaaaaaatgtatttatatacttttacaagtcccatggattttgttcatcttctcgttatcttcagaat

SEQ ID NO: 747681 - DNA, 120 bp, Artificial Sequence
  ENSG00000205302_20 (sequence is synthesized)
ctcgtactttgcatatatttaatttattcttgtcttttggttttttttcttttaaactaaaagtatatcatctgtgctcacagttgacaaggaatggtaccatgttaaaatataccatga

SEQ ID NO: 747682 - DNA, 120 bp, Artificial Sequence
  ENSG00000205302_21 (sequence is synthesized)
tttgatgaataagcaagcacaacacaaagcaaatttgaagtaaactgaaatttagtttgccttgggcaatgtttttacccattctgtatgctacttagacagctgttatctaatccttaa

SEQ ID NO: 747683 - DNA, 68 bp, Artificial Sequence
  ENSG00000205302_22 (sequence is synthesized)
catctctactaaaaatacaaaaattcgcctggtgtggtggggtgaggaaggtggaggttgcagtgagc

SEQ ID NO: 747684 - DNA, 64 bp, Artificial Sequence
  ENSG00000205302_23 (sequence is synthesized)
ggtgtcagagctatttttgttttttaaaaaatattcttacaaacacccctcttcttgagcttaa

SEQ ID NO: 747685 - DNA, 120 bp, Artificial Sequence
  ENSG00000205302_24 (sequence is synthesized)
taaaaaatattcttacaaacacccctcttcttgagcttaaccaccacatatcccttccataggaacaagatatggtatgtgtaactaagtcatctctagtgagtcactggatacaattta

SEQ ID NO: 747686 - DNA, 79 bp, Artificial Sequence
  ENSG00000205302_25 (sequence is synthesized)
atactcccacagcccagaagagtggctgatacataataggttaataataagggcttgatgggccaggcacagtgactca

SEQ ID NO: 747687 - DNA, 89 bp, Artificial Sequence
  ENSG00000205302_26 (sequence is synthesized)
gatgaagacttgatgagttgaacagggaaaacaaaagtttgctcttctaaaaagaaactgaagcagaaatagtacaatcatcttttgtt

SEQ ID NO: 747688 - DNA, 120 bp, Artificial Sequence
  ENSG00000205302_27 (sequence is synthesized)
aaaagaaactgaagcagaaatagtacaatcatcttttgttgcttctgggaatacttttcagaaacgaataattcatagtaatatatatcagatgctatcttgttgctccattaatattga

SEQ ID NO: 747689 - DNA, 120 bp, Artificial Sequence
  ENSG00000205302_28 (sequence is synthesized)
gcaaaagataggcttaccaagaatagtttcactataatgatgtcctagtgttatatccacaggtatattacttaacaaaggtatagtttacacataggatggttattcaagttattatta

SEQ ID NO: 747690 - DNA, 120 bp, Artificial Sequence
  ENSG00000205302_29 (sequence is synthesized)
aaatcttccattcagatgtggtacattagaatattcagtacctccaagtaaaataataaatattttcagccttgattaaactctagactcccttccagacttccatttcccttgcccaca

SEQ ID NO: 747691 - DNA, 120 bp, Artificial Sequence
  ENSG00000205302_30 (sequence is synthesized)
tttactaaaagatgagtgtgctggaaatttcaagtattatatgagcctctgatacctaccagtatttaaacaggatttaattatttcaacacttcacccatcaatcttcacttctcctgt

SEQ ID NO: 747692 - DNA, 120 bp, Artificial Sequence
  ENSG00000205302_31 (sequence is synthesized)
tcagataaaaatgctttcatcccaaataagtaaaacaagaacattaatagtgctaataatataatcttttcattggataggtctgagtttagcgtttgtttgttttcttaatgagatcaa

SEQ ID NO: 747693 - DNA, 120 bp, Artificial Sequence
  ENSG00000205302_32 (sequence is synthesized)
aagttaaagaccaaggcagcaaaatattgtgaaacaagctgaacttgggatcagcatacatttgttcagtcttgtttcatttagtatgactttgggcatatcacttaaatctcttatcta

SEQ ID NO: 747694 - DNA, 120 bp, Artificial Sequence
  ENSG00000205302_33 (sequence is synthesized)
taaaacaagtacataaaagtcttgattcctgaagtgcctttctactttaaaatattttgtttaaaatatcaaacttcaatataaatatgttggaaaacaattctaatcaaagaacttcta

SEQ ID NO: 747695 - DNA, 120 bp, Artificial Sequence
  ENSG00000205302_34 (sequence is synthesized)
ttaagtaaaacaagacaaaatgtgtgtaaaaatatgcctaacacatagatttccttgattgtattttctactgaactattttcaagtattcagctttatactaatatattaatctcaaaa

SEQ ID NO: 747696 - DNA, 120 bp, Artificial Sequence
  ENSG00000205302_35 (sequence is synthesized)
tacctttgtttcattgttgctactccttaaacttttttctttattatctagatctagtaaagttttctgcattcattgtattaatgttggttcaaaagtaattgcgtcctttgtcgttat

SEQ ID NO: 747697 - DNA, 120 bp, Artificial Sequence
  ENSG00000205302_36 (sequence is synthesized)
ataaattgttttataaatggctttaactatgacataagccttttaacataatcagctttctttaaaggaggaagtcagatgagtagagaaggaaagttatattcctttacaaatgctctt

SEQ ID NO: 747698 - DNA, 120 bp, Artificial Sequence
  ENSG00000205302_37 (sequence is synthesized)
aattttaatgtcttaagggaattatagagacttccattattctgccttaaataagggatgttacttcagttttcttgtcatggctccctgcatgggcagtcatgttaacaagagtcaggg

SEQ ID NO: 747699 - DNA, 120 bp, Artificial Sequence
  ENSG00000205302_38 (sequence is synthesized)
agatagcagatattccataatagtgactgcagataggccagtcaaagtcattttgttttaaaggaagggaggttgctggtagttaggtgggaaaataacacctgtgaaaaggaagtccaa

SEQ ID NO: 747700 - DNA, 120 bp, Artificial Sequence
  ENSG00000205302_39 (sequence is synthesized)
gtcactggctcagggactttggaggcattttcatatcatattcactagtcaagaaacgtgtagattatatgtgtgagtgacatagtctgtttcaaagtattagaaaagagacaatagaat

SEQ ID NO: 747701 - DNA, 120 bp, Artificial Sequence
  ENSG00000205302_40 (sequence is synthesized)
cacccaccctcccttcgacacacacttccttatgtaaaatcagaatcaaataattatcattcctaaccctcacagtgaaggatttggtttcatgtaacaatgaaagtagataatgggtca

SEQ ID NO: 747702 - DNA, 120 bp, Artificial Sequence
  ENSG00000205302_41 (sequence is synthesized)
gacatggaaatagcaataaaagggaattacaacaagataaatgtgagtaatagttcattttcctgcatttttgatgagggccatgaagataggtcatggtaatctatggagaaggtcctt

SEQ ID NO: 747703 - DNA, 120 bp, Artificial Sequence
  ENSG00000205302_42 (sequence is synthesized)
aagagcatagaacaatataaatataatatgggccatatatataattttaaaattttctacagccaaatgttaaaaagtaaaaaacaattttaataatccagtagctccaaaatattattt

SEQ ID NO: 747704 - DNA, 120 bp, Artificial Sequence
  ENSG00000205302_43 (sequence is synthesized)
taatatgtaatccaatatattgaagttataagatattttacattctttttttgatatctgatgtatattttacactttcatcacatctccattcagaccggctacaatttgatcagttgt

SEQ ID NO: 747705 - DNA, 120 bp, Artificial Sequence
  ENSG00000205302_44 (sequence is synthesized)
cacatgtggatgactagtggctatgataatggacagcataggtttagacaatgcctattcaactattcaacttgttttacatttataaatctcaaaatgcctttatttcattgttggtac

SEQ ID NO: 747706 - DNA, 120 bp, Artificial Sequence
  ENSG00000205302_45 (sequence is synthesized)
tcttttttattacccagatacaataaagttttccaagtttcattgtacacatgaaatgagtttactgtggaaatgaaaatgcagagtaagtccaacagctagtttatcatcctgaaccca

SEQ ID NO: 747707 - DNA, 120 bp, Artificial Sequence
  ENSG00000205302_46 (sequence is synthesized)
gtgaagaaatcaaagctgaataaaagcgactcctagttgttactctcaagggcaggtataatttatgtgcaagactttgtagcataatgttttgcaagtagtggatgttcaatatctaca

SEQ ID NO: 747708 - DNA, 120 bp, Artificial Sequence
  ENSG00000205302_47 (sequence is synthesized)
ataaatgaattgtagtactatattgcttgaaggaagtttataacctgtctagaacaactttctcaattttacaactaaactaggagatccagggcttaaatcatgattgaactgattatt

SEQ ID NO: 747709 - DNA, 120 bp, Artificial Sequence
  ENSG00000205302_48 (sequence is synthesized)
cctgttaaatttatgtgtgaaccatatgtgaacattctttgaaaatgtatgataagcatttcaagatttctgttttaattattaacatttagaattctaggaaatcttttgggatacaga

SEQ ID NO: 747710 - DNA, 120 bp, Artificial Sequence
  ENSG00000205302_49 (sequence is synthesized)
gaacttatttcttccaactgttgcttcagacgctgataagattgtagaagatagggaagctgtagtttactatctagttttttaatgcacatgaagtaatttaaaatgctcttcttcctt

SEQ ID NO: 747711 - DNA, 120 bp, Artificial Sequence
  ENSG00000205302_50 (sequence is synthesized)
tcttgtcacatacttttaaaaaattctctaaagattgaataattttaagtatttcttaactgggcaaaatggaaactttgtaactgaagccagtcaaggtgaatacacagaaaatcattt

SEQ ID NO: 747712 - DNA, 120 bp, Artificial Sequence
  ENSG00000205302_51 (sequence is synthesized)
tcttattaaggtcagttaatgggataaaccgttttaagagagttgagaaaaaataaagttctattttaaatttatacatgtaactttaataaaaactaagtcagacaaaatttaacaaaa

SEQ ID NO: 747713 - DNA, 120 bp, Artificial Sequence
  ENSG00000205302_52 (sequence is synthesized)
aaacacaacaacaggtaagccatttttgtttataacttaaacttctagaatttgtttttggtatactttcttattttaaaaagatgattaatgaactgggcatttaaactcaagaataag

SEQ ID NO: 747714 - DNA, 120 bp, Artificial Sequence
  ENSG00000205302_53 (sequence is synthesized)
accctagaggtgagaccgcgtcgctgcgggtgctgcgctgcgtagctgccgcgcgtctcacctttcccctgccccgacttgtccctccccatcccccgtgtttgcaaggaccgtcttggg

SEQ ID NO: 747715 - DNA, 120 bp, Artificial Sequence
  ENSG00000205302_54 (sequence is synthesized)
gtgacacctgtgacgcgagccccacctccggtgcctgtcagagggatgtgcttgggctgagcgcagggcctcctcaggagagcagcctgcggcccgcgggtgccgacctaatcctcagag

SEQ ID NO: 747716 - DNA, 120 bp, Artificial Sequence
  ENSG00000205302_55 (sequence is synthesized)
gggccagaaccgaaccgagcattgcagcggcgctttcccagctcagctggccttcctcggtgtctcttgcacgtcctcctcttcaagccggagaagggcttgctctgcatcccagtaaac

SEQ ID NO: 747717 - DNA, 120 bp, Artificial Sequence
  ENSG00000205302_56 (sequence is synthesized)
ctccaccgagctcttttgaaggggtgctcgcttttcctttccagagggagggtgtgccgctgccaggggagcgcaatgaagtgagcgctgaggggccgagggtctgtggggaacgaatgg

SEQ ID NO: 747718 - DNA, 120 bp, Artificial Sequence
  ENSG00000205302_57 (sequence is synthesized)
gatgcaacaaactcacatacccctttgcaacataatactttgcaatgagaagtttggtaagttatttaacctctccccactcccaccccttgccatttctctttttacgtaattatgaaa

SEQ ID NO: 747719 - DNA, 120 bp, Artificial Sequence
  ENSG00000205302_58 (sequence is synthesized)
actggatagtatatcaattttcaaaagatgaacaaaaacctttttaattattaaattgctgtaagattctaagtaattacagtgagagtagtctaatacgaggtagtgaggacacttttt

SEQ ID NO: 747720 - DNA, 120 bp, Artificial Sequence
  ENSG00000205302_59 (sequence is synthesized)
aaactatctcacgtgttttttttttttttgcctctgcttaacactaaggcagagatagacttttcccagttttaggccatcagaaacctcatgggcaactttcccctttcactgtctttc

SEQ ID NO: 747721 - DNA, 120 bp, Artificial Sequence
  ENSG00000205302_60 (sequence is synthesized)
tagtttgttttccttgttggtcagacctgtttgagtaaattctcatagtaagttcttctcttccataacaaatagaacttaagctaaacactttttcagaattaaaaaaaaaaactgtac

SEQ ID NO: 747722 - DNA, 120 bp, Artificial Sequence
  ENSG00000205302_61 (sequence is synthesized)
agaagtgggaagatttgaggcatgtataataattttgcatttatcttaacaacatggtcacattttgctgcaattttgtggtaaagttgaatttagctttctactaacggactttttaaa

SEQ ID NO: 747723 - DNA, 120 bp, Artificial Sequence
  ENSG00000205302_62 (sequence is synthesized)
gtggcttttaagactgctttaaacttttttaagaaaattacttctttcaacaaagtactgtataattgttctgtataatttttagtaatcctcatcaatagtctaacaaaataacacttg

SEQ ID NO: 747724 - DNA, 120 bp, Artificial Sequence
  ENSG00000205302_63 (sequence is synthesized)
tttttctattatatgctacaagcaggagcatataatagaaaacatataaagacatgagttagctggggatagaattgtatcataggtagtcaccaagagttactaagaaactgctaaact

SEQ ID NO: 747725 - DNA, 120 bp, Artificial Sequence
  ENSG00000205302_64 (sequence is synthesized)
caaaaattaatttttgttactgttactagttcagttttaactgtatagatttgtggatttcttagtcattcactgtcaacattttataatgtgtagacataactgaatttaagtatttca

SEQ ID NO: 747726 - DNA, 120 bp, Artificial Sequence
  ENSG00000205302_65 (sequence is synthesized)
tttatactaatcatgcatggattgaagaatgtattggtaatagttttattttctaacacttgaggatttttgtttatgtaatacagtaatgttaaatattgggtagaggccgtgtgtggt

SEQ ID NO: 747727 - DNA, 120 bp, Artificial Sequence
  ENSG00000205307_0 (sequence is synthesized)
gagcgccggagcggacgcccccagggagctggggacacccccatgggacagcccttcctggatctggagagagcagctgctgctgccccaccacctgccaggcccggccactgagcagcc

SEQ ID NO: 747728 - DNA, 120 bp, Artificial Sequence
  ENSG00000205307_1 (sequence is synthesized)
ccccggagccccagatccccgttccccccaggtggcctgggaggtggccccctcgaggatgactccactagcgccctgggaccccaagtatgaagccaaagcaggacctcggccggtgtg

SEQ ID NO: 747729 - DNA, 120 bp, Artificial Sequence
  ENSG00000205307_2 (sequence is synthesized)
gggggccaactgtagctcaggagcctcgttctcaggccggacgctgtgtcacccctcattctggccgctgtatgaagcagcctcgggcaggggtctcaggcccgtggcccctgccacagg

SEQ ID NO: 747730 - DNA, 120 bp, Artificial Sequence
  ENSG00000205307_3 (sequence is synthesized)
caaggccccccagcagatgatgggctccctgaaactgctgccgccgccccccatcatgtctgccagggtgctcccccgcccatcaccctcccggggcccctccactgcctggctcagcgg

SEQ ID NO: 747731 - DNA, 120 bp, Artificial Sequence
  ENSG00000205307_4 (sequence is synthesized)
gccggagctgatcgctctcactggcctgctgcagatgagccagggggagcctaggcccagctcctccgcggttggccccccagaccatacctctgacccacccagcccctgtggtagccc

SEQ ID NO: 747732 - DNA, 120 bp, Artificial Sequence
  ENSG00000205307_5 (sequence is synthesized)
cagcagttctcagggtgctgacctctctctcccacagaccccagacacccattgtccatagccttctcagggcagagtgggctggttgtgttgacaataaaacagtgttggtttgcaaaa

SEQ ID NO: 747733 - DNA, 120 bp, Artificial Sequence
  ENSG00000205307_6 (sequence is synthesized)
cccatgggacaggtgaggggctcggacggagccgtggggggacagcgactgggggcctccatgccttcaccacgcgctctacggaggcttctccattgtccctgctggagattgggtccc

SEQ ID NO: 747734 - DNA, 120 bp, Artificial Sequence
  ENSG00000205307_7 (sequence is synthesized)
tcggtctcccttgcaccaggcacccttgggctccaggggagggtgcgtgggggcggtgtggctgcagcctcagtccctgcccctccagcccacagcccccatcccgtagcccttcctgga

SEQ ID NO: 747735 - DNA, 120 bp, Artificial Sequence
  ENSG00000205307_8 (sequence is synthesized)
ggcctctggggtgggttcgccaggagggcacgttcgcgccgcgccgcggagggaggctgagagggccgggccgggcggcggggacacggcggtaccgtcctgcgctcgggaacgcggaat

SEQ ID NO: 747736 - DNA, 120 bp, Artificial Sequence
  ENSG00000205307_9 (sequence is synthesized)
gggacacggcggtaccgtcctgcgctcgggaacgcggaatgttgccctggtcgccgccgcggtggggcgcgggcccggaggaggcgcccgagggaccaggccttccggcgggcaaggacc

SEQ ID NO: 747737 - DNA, 120 bp, Artificial Sequence
  ENSG00000205307_10 (sequence is synthesized)
agggcgagccctggagcgccggagcggacgcccccagggagctggggacacccccatgggacagcccacagcccccatcccgtagcccttcctggatctggagagagcagctgctgctgc

SEQ ID NO: 747738 - DNA, 80 bp, Artificial Sequence
  ENSG00000205309_0 (sequence is synthesized)
ccgccccgctccccgtcccgcgctccacgcgcgccccagcgttgggggcttctcctccgcggcgggaatgtctggccggc

SEQ ID NO: 747739 - DNA, 80 bp, Artificial Sequence
  ENSG00000205309_1 (sequence is synthesized)
cgacgggccagcgcgctgggccatgatccggctgggcggctggtgtgcgcggcggctctgcagcgcggcggttcccgcgg

SEQ ID NO: 747740 - DNA, 120 bp, Artificial Sequence
  ENSG00000205309_2 (sequence is synthesized)
gcgcggggcggcgggcgggctgggcctggcgggaggccgcgccctacgggtgctggtggacatggacggcgtgctggctgacttcgagggcggattcctcaggaagttccgcgcgcgctt

SEQ ID NO: 747741 - DNA, 120 bp, Artificial Sequence
  ENSG00000205309_3 (sequence is synthesized)
tcccgaccagcccttcatcgcgctggaggaccggcgcggcttctgggtgtcggagcagtacggccgcctgcggccagggctgagcgagaaggccatcagcatttgggagtcaaagaattt

SEQ ID NO: 747742 - DNA, 120 bp, Artificial Sequence
  ENSG00000205309_4 (sequence is synthesized)
cttttttgaacttgagcctctgccaggggccgtggaagctgtcaaggagatggccagcctacaaaacactgacgtcttcatctgcacaagccccatcaagatgttcaagtactgtcccta

SEQ ID NO: 747743 - DNA, 120 bp, Artificial Sequence
  ENSG00000205309_5 (sequence is synthesized)
tgagaagtatgcctgggtggagaagtactttggccctgactttctggagcagattgtgctgaccagagacaagaccgtggtctctgctgaccttctcatagacgaccggccggacatcac

SEQ ID NO: 747744 - DNA, 120 bp, Artificial Sequence
  ENSG00000205309_6 (sequence is synthesized)
ctgggagcatgtcctcttcaccgcctgccacaaccagcacctgcagctgcagcccccccgccgcaggctgcactcgtgggcggacgactggaaggccattctggacagcaagcggccctg

SEQ ID NO: 747745 - DNA, 120 bp, Artificial Sequence
  ENSG00000205309_7 (sequence is synthesized)
ctgagctggactgtgcttcgggctcctctgtggggctctgacctcagggctcccagctcggggcctgtggggccagtatgctggtctgggagtccctcctagactcctgggccccatgac

SEQ ID NO: 747746 - DNA, 120 bp, Artificial Sequence
  ENSG00000205309_8 (sequence is synthesized)
ctcctgctgcatgtcccttcccttccccagccctgccaggccttaacctgatcacggggcagggctgggccctctgggcgcttggacatagacacgtggtcccaggccgttcagcctgac

SEQ ID NO: 747747 - DNA, 120 bp, Artificial Sequence
  ENSG00000205309_9 (sequence is synthesized)
ctcaggcagcaggcaccaagctgccagaagcccaggggctcaggacagggaggagttgaggccactgttcagggggctggtggccgtctccactccctaggcaagttctctgaggcagaa

SEQ ID NO: 747748 - DNA, 120 bp, Artificial Sequence
  ENSG00000205309_10 (sequence is synthesized)
gggggttccctgttcccagagtctgcagccatcagcaaggaggaccaggaacccggcgactgaggtgcttccaggtggggacaagcccctcttggtctcagccacagcaccccttattcc

SEQ ID NO: 747749 - DNA, 120 bp, Artificial Sequence
  ENSG00000205309_11 (sequence is synthesized)
agctgccctgcccaacctgctcaccccacatgaccttctgtgtattcagcaaacactcactaggtgacagcggccaccaggctctgtgctgggggacgatactggccctggcctcgacca

SEQ ID NO: 747750 - DNA, 120 bp, Artificial Sequence
  ENSG00000205309_12 (sequence is synthesized)
gcttagaggtttctcacacctctgttcccagggccccgctcagggcccagcagagagtccgtaggcttgaacatgtgttgagtgcatgaaaaataaatgctgttcatgtgtgtagctcaa

SEQ ID NO: 747751 - DNA, 120 bp, Artificial Sequence
  ENSG00000205309_13 (sequence is synthesized)
gccagggctgagcagctggccttgctgaacacctgagctcaacccctaccatccgactcccgaggtgttctgtccaggatggatagaggggaaagatccaaggagggacgtttacacaca

SEQ ID NO: 747752 - DNA, 120 bp, Artificial Sequence
  ENSG00000205323_0 (sequence is synthesized)
ctagtggagtgaggggtaacaagatggcgaccgagacggtggagctccataagctaaagcttgccgaactaaagcaagaatgtcttgctcgtggtttggagaccaagggaataaagcaag

SEQ ID NO: 747753 - DNA, 120 bp, Artificial Sequence
  ENSG00000205323_1 (sequence is synthesized)
atcttatccacagactccaggcatatcttgaagaacatgctgaagaggaggcaaatgaagaagatgtactgggagatgaaacagaggaagaagaaacaaagcccattgagctccctgtca

SEQ ID NO: 747754 - DNA, 120 bp, Artificial Sequence
  ENSG00000205323_2 (sequence is synthesized)
aagaggaagaaccccctgaaaaaactgttgatgtggcagcagagaagaaagtggtgaaaattacatctgaaataccacagactgagagaatgcagaagagggctgaacgattcaatgtac

SEQ ID NO: 747755 - DNA, 120 bp, Artificial Sequence
  ENSG00000205323_3 (sequence is synthesized)
tccaacaaaaggtctgtcatctgataacaaacctatggttaacttggataagctgaaggaaagagctcaaagatttggtttgaatgtctcttcaatctccagaaagtctgaagatgatga

SEQ ID NO: 747756 - DNA, 120 bp, Artificial Sequence
  ENSG00000205323_4 (sequence is synthesized)
gaaactgaaaaagaggaaggagcgatttgggattgtcacaagttcagctggaactggaaccacagaggatacagaggcaaagaagaggaaaagagcagagcgctttgggattgcctgatg

SEQ ID NO: 747757 - DNA, 120 bp, Artificial Sequence
  ENSG00000205323_5 (sequence is synthesized)
aaaagttcctgatactttctgttctccagtgttttccatttctctccttcttcttggtcacatatatgcctaaatgcacagtcatgtgcctacgtcctgcctcgcaatgagggagcatgt

SEQ ID NO: 747758 - DNA, 120 bp, Artificial Sequence
  ENSG00000205323_6 (sequence is synthesized)
accccaggtacatccatgaactgcggcagcagtttgacttattgctgtttcagctttaaggttgttgtgtttttgtttttgattatgttgcttgttaataaaaaaaaatagaaaagagaa

SEQ ID NO: 747759 - DNA, 120 bp, Artificial Sequence
  ENSG00000205323_7 (sequence is synthesized)
gtcatgtgaccatcccaaaactcagagcaccctatggccgtctttgccctctgtcacataacttgaaaactgcctgatggcctttttgcagtggttccctccaggaagccttgatctcag

SEQ ID NO: 747760 - DNA, 120 bp, Artificial Sequence
  ENSG00000205323_8 (sequence is synthesized)
ttgaagaagttctttcctggcattccaatgcccctgtcagctccatactcctcagacacccttaacaaaggctgtcatgcacacaatgtgacaaatacacaaaataaatgataattacac

SEQ ID NO: 747761 - DNA, 120 bp, Artificial Sequence
  ENSG00000205323_9 (sequence is synthesized)
taataatgatatgttcagaggggcactggccaggtccacacacatcataaggtgggagggggtgctaactcccactgggttgctgagctgtgccccccaagtcccttcactctgtgcctc

SEQ ID NO: 747762 - DNA, 120 bp, Artificial Sequence
  ENSG00000205323_10 (sequence is synthesized)
ttatgtatcttatctctttatgtgatccttagttcttggcacagggttggttagcaccttgtgaccaataagttatcatttcattcccatttacttggtgaatggaggctagtttgtttc

SEQ ID NO: 747763 - DNA, 120 bp, Artificial Sequence
  ENSG00000205323_11 (sequence is synthesized)
tatacctggaacgcttcatagaccttgaagggaaattagagtgaataaactgaatggagaaatattgtttccccacctatttatttatttatttatttacttatttaagtcgagttgggg

SEQ ID NO: 747764 - DNA, 120 bp, Artificial Sequence
  ENSG00000205323_12 (sequence is synthesized)
gagcttggagagtaagaaagctgctcgggcagctaggtttgggatttcttcagttccaacaaaaggtaagagtacagagatacttctgagaaagttacctttttattctttcttttctgg

SEQ ID NO: 747765 - DNA, 120 bp, Artificial Sequence
  ENSG00000205323_13 (sequence is synthesized)
tataacaggttttatttctccaaaataaggtaaatttgctagctgtagaaactctttaagagattgtaacattcatctcctgctttaggtaaaattatacttaggccttcctgggcaatt

SEQ ID NO: 747766 - DNA, 120 bp, Artificial Sequence
  ENSG00000205323_14 (sequence is synthesized)
aagagagatactgaatgttatgagaggataggaagtgccaacatttgtctgtcttttcttgaacatcttcaaagaagtttctctagtactttgcttacttattctggggtctcaactgca

SEQ ID NO: 747767 - DNA, 120 bp, Artificial Sequence
  ENSG00000205323_15 (sequence is synthesized)
taaaattattgcatactatctagtgttatactggctattataagtgataaaagggaaaagaatatcttctaccttaacagttttacttctaggaacgtataaggaaatagtcttgaatgt

SEQ ID NO: 747768 - DNA, 120 bp, Artificial Sequence
  ENSG00000205323_16 (sequence is synthesized)
gcataaagacttagcctcagggattatcacagcattatttatagtgatcaataactggaaacaaccaactgtacaacagagaattagttattaaatgtgtgccatggtatagcagactac

SEQ ID NO: 747769 - DNA, 120 bp, Artificial Sequence
  ENSG00000205323_17 (sequence is synthesized)
tgtgctgaaataatattgaaagatatttatcagagatattaatgaaaaaagttacaaaattatattaacagtacgttcccattttagtcatgtaagagtgcatgtatagataggaaaaaa

SEQ ID NO: 747770 - DNA, 120 bp, Artificial Sequence
  ENSG00000205323_18 (sequence is synthesized)
taaatacagtttgctgtctgtatctgagggttcaccataaccaaatgcggttcagaaatacagtattcttgggatgtgaaacctgcagatatggaggagcagcttatatctgctgcagga

SEQ ID NO: 747771 - DNA, 120 bp, Artificial Sequence
  ENSG00000205323_19 (sequence is synthesized)
cttgagtgtggtggattttggtatcagctggaggggtgggtttggatccaatcccctgaggaaatggagggacgactgtattctaaattgttaatactcttatctctggttggtggaatt

SEQ ID NO: 747772 - DNA, 120 bp, Artificial Sequence
  ENSG00000205323_20 (sequence is synthesized)
ttgaatgatttatttctttttgcttgtctgtgttattaaaatccatacaatgaatatgtatcacttttgtaatgaattagaggaaattattactattttttgagacacagtcttgctctg

SEQ ID NO: 747773 - DNA, 74 bp, Artificial Sequence
  ENSG00000205323_21 (sequence is synthesized)
tcacctctgcctcccaaaatggtgggattacaggtgtgccgagcctgaaacagttattatttttaagaaacggc

SEQ ID NO: 747774 - DNA, 76 bp, Artificial Sequence
  ENSG00000205323_22 (sequence is synthesized)
atccactcacctctgcctcccaaaatggtgggattacaggtgtgccgagcctgaaacagttattatttttaagaaa

SEQ ID NO: 747775 - DNA, 120 bp, Artificial Sequence
  ENSG00000205323_23 (sequence is synthesized)
actagcttgggaaacaaagtgacaccttgtttctacaaaaaattaaaaaattaactagacatggtggcaggtgtttgtagtcccagctacttggggcgctggggtgggagtatctcttaa

SEQ ID NO: 747776 - DNA, 89 bp, Artificial Sequence
  ENSG00000205323_24 (sequence is synthesized)
tcccagctacttggggcgctggggtgggagtatctcttaagcctgggaggtcaaggctggcagtgagtgtgatcttgccatgacactct

SEQ ID NO: 747777 - DNA, 120 bp, Artificial Sequence
  ENSG00000205327_0 (sequence is synthesized)
atgagaaaacacacagcaataacaacattcatccttctgggactgacagaagatcctcagctgcaggttctgcttttcatgtttctatttatcacctacatgttgagtgtaacagggaaa

SEQ ID NO: 747778 - DNA, 120 bp, Artificial Sequence
  ENSG00000205327_1 (sequence is synthesized)
ctgaccattatcgccctcaccatgttggatccccacctgaaaacacccatgtatttttttctccaaaatttatctttcttagaaatctcatttacagctacctgtgttccaagattctta

SEQ ID NO: 747779 - DNA, 120 bp, Artificial Sequence
  ENSG00000205327_2 (sequence is synthesized)
tacagtatctcaactgggaacaaaataataacgtataatgcatgtgtcattcagctattttttgcagacctctttggggtaactgaattttttcttttggctaccatgtcatatgatcgc

SEQ ID NO: 747780 - DNA, 120 bp, Artificial Sequence
  ENSG00000205327_3 (sequence is synthesized)
atcctcccaccacttagcttaggttttcatctagaattctgtgactctaatgtcatcaatcattttggctgtgatgcattgcctattctgaaaataccatgctcagacacatcattaatt

SEQ ID NO: 747781 - DNA, 120 bp, Artificial Sequence
  ENSG00000205327_4 (sequence is synthesized)
gagcagatggttgtagcctctgctgtattaacctttattatcactcttgtatgtgtagttctgtcctacacatatatcataagaacaattctaaaattcccttctgttcaacaaaagaaa

SEQ ID NO: 747782 - DNA, 120 bp, Artificial Sequence
  ENSG00000205327_5 (sequence is synthesized)
aaagccttttctacctgttcttcacatattactgtggtttccatcacttatggcagctgcatcttcatctatatcaagccatctgcaaaagaagaggtaaacattaataaaggtgtgtca

SEQ ID NO: 747783 - DNA, 120 bp, Artificial Sequence
  ENSG00000205327_6 (sequence is synthesized)
gtgcttatttcatccatatcacctatgttgaattctttcatatatactcttaggaatgagcaagttaaacaagcctttcatgactcactcaaaaaaattgcatttcgtttaaaaaagtaa

SEQ ID NO: 747784 - DNA, 120 bp, Artificial Sequence
  ENSG00000205328_0 (sequence is synthesized)
tgcagaataagagcaatcctagtgtatttgaaatcaaatcacgtattgacattcactcttctttttatctacagacctatcagaattcagaactaagccatgccaaatatgacatcaatt

SEQ ID NO: 747785 - DNA, 120 bp, Artificial Sequence
  ENSG00000205328_1 (sequence is synthesized)
agagaattcattcttctgggatttacagataacccagagttacaagttgtgatattcttctttatgttgatcacatacttattgagtgtaagtggaaacatgatcatcattatgttaaca

SEQ ID NO: 747786 - DNA, 120 bp, Artificial Sequence
  ENSG00000205328_2 (sequence is synthesized)
ttgtcaaatattcatttgaaaactcctatgtatttcttcctcaggaatttctctttcttagaaatttcatttacgacagtcttcattcctagatttctgatcaacattgctacaggagac

SEQ ID NO: 747787 - DNA, 120 bp, Artificial Sequence
  ENSG00000205328_3 (sequence is synthesized)
acaaccatttcctataatgcttccatggcccaagtattttttttaattcttttgggatcaacagaattttttcttctggctgtcatgtcttatgatcgctatgtggctatctgcaaacct

SEQ ID NO: 747788 - DNA, 120 bp, Artificial Sequence
  ENSG00000205328_4 (sequence is synthesized)
ttgtgactccagcactattgaccatttcatctgtgattcttcccctatgctgctgattgcttgcacagacacacagtttctagagcttatggcatttttgctagcagtattcacactcat

SEQ ID NO: 747789 - DNA, 120 bp, Artificial Sequence
  ENSG00000205328_5 (sequence is synthesized)
ggtaactttggccttggtggttctctcctacacactcatccttaaaacaattctgaagattccctctgcccagcaaaggaaaaaggctttttcaacttgttcctcccatatgattgtggt

SEQ ID NO: 747790 - DNA, 120 bp, Artificial Sequence
  ENSG00000205328_6 (sequence is synthesized)
ttctgtttcttatgggagttgcatttttatgtgtgtaaaaacatctgcaaaagaaggtatggctttgagcaaaggtgtagcagtgcttaatacctctgttgctcctatgttgaatccctt

SEQ ID NO: 747791 - DNA, 120 bp, Artificial Sequence
  ENSG00000205328_7 (sequence is synthesized)
tatttataccttaagaaaccagcaggtgaaacaggcccttagggaattcaccaaaaaaatattatcattgaacaagcaataatgataactaaatctgtggctgaaacacaaataagccaa

SEQ ID NO: 747792 - DNA, 120 bp, Artificial Sequence
  ENSG00000205329_0 (sequence is synthesized)
atgaaccacacaatggtcacagagtttgtcctcctgggcctttctgatgatcctgaccttcagattgtgatttttctctttttatttatcacgtatatattaagtgttactggaaacctg

SEQ ID NO: 747793 - DNA, 120 bp, Artificial Sequence
  ENSG00000205329_1 (sequence is synthesized)
actatcatcaccctaacctttgtggactcccatctgcagacacctatgtatttcttcctccggaacttctctttcttagaaatctcatttacaaccgtatgcatccccagatttctgggg

SEQ ID NO: 747794 - DNA, 120 bp, Artificial Sequence
  ENSG00000205329_2 (sequence is synthesized)
gcaattatcaccaggaataagactatttcctataacaactgtgcagcccaactctttttctttatcttcatgggggtgactgaattttacattttaactgccatgtcctatgaccgctat

SEQ ID NO: 747795 - DNA, 120 bp, Artificial Sequence
  ENSG00000205329_3 (sequence is synthesized)
attttcccaccccttatgcttctcctccagctggattactgtgcttccaacgtcattgatcactttgcatgtgactattttcccctcttacaactatcttgttcagatacatggctccta

SEQ ID NO: 747796 - DNA, 120 bp, Artificial Sequence
  ENSG00000205329_4 (sequence is synthesized)
gaagtaattggtttttactttgctttggttactttgctgttcactttggcattagtgattttatcttacatgtacattatcaggaccattttgagaatcccgtctgccagtcaaagaaaa

SEQ ID NO: 747797 - DNA, 120 bp, Artificial Sequence
  ENSG00000205329_5 (sequence is synthesized)
aaggctttctccacttgttcttctcacatgattgtcatttccatttcttatggaagctgtatattcatgtatgctaatccatctgcaaaagaaaaggcatcattgacaaaaggaatagct

SEQ ID NO: 747798 - DNA, 120 bp, Artificial Sequence
  ENSG00000205329_6 (sequence is synthesized)
attctcaatacatctgttgcccccatgctgaaccccttcatttacactctgagaaaccagcaagtaaaacaagccttcaaaaatgtggtccacaaagttgtgttttatgcaaatcaatga

SEQ ID NO: 747799 - DNA, 120 bp, Artificial Sequence
  ENSG00000205329_7 (sequence is synthesized)
cttccagaaatctttcatggtctataatacagcagagatgtggcctggactttgctttgttcccaggagatcaaatcttttgaggtcaaaacaaagaaacttgaaatattgtagatataa

SEQ ID NO: 747800 - DNA, 120 bp, Artificial Sequence
  ENSG00000205329_8 (sequence is synthesized)
gtatgaccagggggaacccagataccagaatctaactcataatatccaatgtgtcatatatttacctattttctctttaaatttttttttaacttctagctcaacattattgaagaggaa

SEQ ID NO: 747801 - DNA, 120 bp, Artificial Sequence
  ENSG00000205330_0 (sequence is synthesized)
ttgtaggtctggcaggggaaaaaagaaagcaactgaagaatgagaaaccatacagaaataacagagtttattcttctgggattaacagatgacccaaattttcaggttgtaatctttgtc

SEQ ID NO: 747802 - DNA, 120 bp, Artificial Sequence
  ENSG00000205330_1 (sequence is synthesized)
ttcctgctcatcacctacatgctcagcatcactgggaacctgacccttatcacaattaccctgctggattcccacctgcagacccccatgtatttcttcctcagaaatttctccatatta

SEQ ID NO: 747803 - DNA, 120 bp, Artificial Sequence
  ENSG00000205330_2 (sequence is synthesized)
gaaatttcgttcacaaccgtcagtatacccaagtttctgggtaacattatttcaggagataaaaccatttcctttaataattgcatagttcagttatttttcttcattctcttgggagtc

SEQ ID NO: 747804 - DNA, 120 bp, Artificial Sequence
  ENSG00000205330_3 (sequence is synthesized)
acagagttttaccttctggctgccatgtcctatgaccgctatgtggccatctgcaagcctctgcattgcttgagtatcatgaatcgaagagtctgcacactgcttgtttttacttcttgg

SEQ ID NO: 747805 - DNA, 120 bp, Artificial Sequence
  ENSG00000205330_4 (sequence is synthesized)
gctgcaacttgcttgttcagacacaaaattcttagaggtgatgggattttcttgtgctgcgtttactctaatgttcactttggcattaatatttctgtcctacatatacattatcagaac

SEQ ID NO: 747806 - DNA, 120 bp, Artificial Sequence
  ENSG00000205330_5 (sequence is synthesized)
aattttgagaattccttctactagtcagaggacaaaggccttttccacatgttcttcccacatggttgttgtctccatctcttatggcagctgcatttttatgtacattaaaccctcagc

SEQ ID NO: 747807 - DNA, 120 bp, Artificial Sequence
  ENSG00000205330_6 (sequence is synthesized)
aaaagatagagtgtccttgagcaagggagtggcaatactaaacacctcagtagcccccatgatgaacccctttatttacagcctaagaaatcagcaagtcaagcaagctttcattaacat

SEQ ID NO: 747808 - DNA, 120 bp, Artificial Sequence
  ENSG00000205330_7 (sequence is synthesized)
ggcaaggaagactgtatttttcacaagcacatgaaatggtatggtgtgatgaattagaggcacaggaaaggacaatatgaattttcagtagcttcttcaatcaaaatggcctccttgcag

SEQ ID NO: 747809 - DNA, 120 bp, Artificial Sequence
  ENSG00000205330_8 (sequence is synthesized)
cagttctaaaacactttcagatactttccctattttatatttttgctcctttctcactctctactatcaaagacacatattctgtctggataaaatgggaaaattaagacaaaagattga

SEQ ID NO: 747810 - DNA, 120 bp, Artificial Sequence
  ENSG00000205330_9 (sequence is synthesized)
aaataggaagaaaatttcttcaatgagaaagtgaatgttttcagaaatcctggttttactggatagcaatggcatttgctaatatctctactattccagccattctgaatgttagtgaaa

SEQ ID NO: 747811 - DNA, 120 bp, Artificial Sequence
  ENSG00000205330_10 (sequence is synthesized)
tccctaaaagtttgcaagcatatttatttaatatatttctcatttgacttaaaataattttcttgtgtcttcctgacaccccctcctttgaacaattttttgtaaaattacaagctcttc

SEQ ID NO: 747812 - DNA, 120 bp, Artificial Sequence
  ENSG00000205330_11 (sequence is synthesized)
agctcttcaagaatattttgaaaactaaaattattcttcagtttacttcaagaaataaaattatacctagatacattggaatggctttataaatatcaatatgatattctacttgttata

SEQ ID NO: 747813 - DNA, 120 bp, Artificial Sequence
  ENSG00000205330_12 (sequence is synthesized)
ttataattttaatttattcttatagaaattcccttcactatgctactgatgttctaggaaatatgtgaaagatacaatataatttttaaaaaatgtaagtgaattcatttgaaaagcaaa

SEQ ID NO: 747814 - DNA, 120 bp, Artificial Sequence
  ENSG00000205330_13 (sequence is synthesized)
aaagcaaaaaaaaatttcattactcattttaattaggtatgttggtgaaattaatctattaataaaggagcctagaccattatcaatatatacttttttgttataagtgctaagtagagc

SEQ ID NO: 747815 - DNA, 120 bp, Artificial Sequence
  ENSG00000205330_14 (sequence is synthesized)
tccatatttgtgaatcccataatattctctctgtagaatgacagatgatggatagacacatatgcaaatacatacataagttttgtcaaacatagagaatatatagtatattcctaagat

SEQ ID NO: 747816 - DNA, 120 bp, Artificial Sequence
  ENSG00000205330_15 (sequence is synthesized)
atgttaattttctgtgagtggaaaataagcttctttctatcattacctaaaagtagtatgtaaatcttcttaaattttagactagtttaaaacaggatatgtatccaaattattttatac

SEQ ID NO: 747817 - DNA, 76 bp, Artificial Sequence
  ENSG00000205336_0 (sequence is synthesized)
ggaaggggaggagcaggccacacaggcacaggccggtgagggacctgcccagacctggagggtctcgcgtaacctc

SEQ ID NO: 747818 - DNA, 80 bp, Artificial Sequence
  ENSG00000205336_1 (sequence is synthesized)
gagtagctgggattagactccccagtcgctgctgcagacgacactgttcctgctgagtctgctcttcctggtccaaggtg

SEQ ID NO: 747819 - DNA, 120 bp, Artificial Sequence
  ENSG00000205336_2 (sequence is synthesized)
acactgttcctgctgagtctgctcttcctggtccaaggtgcccacggcaggggccacagggaagactttcgcttctgcagccagcggaaccagacacacaggagcagcctccactacaaa

SEQ ID NO: 747820 - DNA, 120 bp, Artificial Sequence
  ENSG00000205336_3 (sequence is synthesized)
cccacaccagacctgcgcatctccatcgagaactccgaagaggccctcacagtccatgcccctttccctgcagcccaccctgcttcccgatccttccctgaccccaggggcctctaccac

SEQ ID NO: 747821 - DNA, 120 bp, Artificial Sequence
  ENSG00000205336_4 (sequence is synthesized)
ttctgcctctactggaaccgacatgctgggagattacatcttctctatggcaagcgtgacttcttgctgagtgacaaagcctctagcctcctctgcttccagcaccaggaggagagcctg

SEQ ID NO: 747822 - DNA, 120 bp, Artificial Sequence
  ENSG00000205336_5 (sequence is synthesized)
gctcagggccccccgctgttagccacttctgtcacctcctggtggagccctcagaacatcagcctgcccagtgccgccagcttcaccttctccttccacagtcctccccacacggccgct

SEQ ID NO: 747823 - DNA, 120 bp, Artificial Sequence
  ENSG00000205336_6 (sequence is synthesized)
cacaatgcctcggtggacatgtgcgagctcaaaagggacctccagctgctcagccagttcctgaagcatccccagaaggcctcaaggaggccctcggctgcccccgccagccagcagttg

SEQ ID NO: 747824 - DNA, 120 bp, Artificial Sequence
  ENSG00000205336_7 (sequence is synthesized)
cagagcctggagtcgaaactgacctctgtgagattcatgggggacatggtgtccttcgaggaggaccggatcaacgccacggtgtggaagctccagcccacagccggcctccaggacctg

SEQ ID NO: 747825 - DNA, 120 bp, Artificial Sequence
  ENSG00000205336_8 (sequence is synthesized)
cacatccactcccggcaggaggaggagcagagcgagatcatggagtactcggtgctgctgcctcgaacactcttccagaggacgaaaggccggagcggggaggctgagaagagactcctc

SEQ ID NO: 747826 - DNA, 120 bp, Artificial Sequence
  ENSG00000205336_9 (sequence is synthesized)
ctggtggacttcagcagccaagccctgttccaggacaagaattccagccaagtcctgggtgagaaggtcttggggattgtggtacagaacaccaaagtagccaacctcacggagcccgtg

SEQ ID NO: 747827 - DNA, 120 bp, Artificial Sequence
  ENSG00000205336_10 (sequence is synthesized)
gtgctcactttccagcaccagctacagccgaagaatgtgactctgcaatgtgtgttctgggttgaagaccccacattgagcagcccggggcattggagcagtgctgggtgtgagaccgtc

SEQ ID NO: 747828 - DNA, 120 bp, Artificial Sequence
  ENSG00000205336_11 (sequence is synthesized)
aggagagaaacccaaacatcctgcttctgcaaccacttgacctactttgcagtgctgatggtctcctcggtggaggtggacgccgtgcacaagcactacctgagcctcctctcctacgtg

SEQ ID NO: 747829 - DNA, 120 bp, Artificial Sequence
  ENSG00000205336_12 (sequence is synthesized)
ggctgtgtcgtctctgccctggcctgccttgtcaccattgccgcctacctctgctccagggtgcccctgccgtgcaggaggaaacctcgggactacaccatcaaggtgcacatgaacctg

SEQ ID NO: 747830 - DNA, 120 bp, Artificial Sequence
  ENSG00000205336_13 (sequence is synthesized)
ctgctggccgtcttcctgctggacacgagcttcctgctcagcgagccggtggccctgacaggctctgaggctggctgccgagccagtgccatcttcctgcacttctccctgctcacctgc

SEQ ID NO: 747831 - DNA, 120 bp, Artificial Sequence
  ENSG00000205336_14 (sequence is synthesized)
ctttcctggatgggcctcgaggggtacaacctctaccgactcgtggtggaggtctttggcacctatgtccctggctacctactcaagctgagcgccatgggctggggcttccccatcttt

SEQ ID NO: 747832 - DNA, 120 bp, Artificial Sequence
  ENSG00000205336_15 (sequence is synthesized)
gtggatgtggacaactatggccccatcatcttggctgtgcataggactccagagggcgtcatctacccttccatgtgctggatccgggactccctggtcagctacatcaccaacctgggc

SEQ ID NO: 747833 - DNA, 120 bp, Artificial Sequence
  ENSG00000205336_16 (sequence is synthesized)
ctcttcagcctggtgtttctgttcaacatggccatgctagccaccatggtggtgcagatcctgcggctgcgcccccacacccaaaagtggtcacatgtgctgacactgctgggcctcagc

SEQ ID NO: 747834 - DNA, 120 bp, Artificial Sequence
  ENSG00000205336_17 (sequence is synthesized)
ctggtccttggcctgccctgggccttgatcttcttctcctttgcttctggcaccttccagcttgtcgtcctctaccttttcagcatcatcacctccttccaaggcttcctcatcttcatc

SEQ ID NO: 747835 - DNA, 120 bp, Artificial Sequence
  ENSG00000205336_18 (sequence is synthesized)
tggtactggtccatgcggctgcaggcccggggtggcccctcccctctgaagagcaactcagacagcgccaggctccccatcagctcgggcagcacctcgtccagccgcatctaggcctcc

SEQ ID NO: 747836 - DNA, 120 bp, Artificial Sequence
  ENSG00000205336_19 (sequence is synthesized)
agcccacctgcccatgtgatgaagcagagattcggcctcgtcgcacactgcctgtggcccccgagcccggcccagccccaggccagtcagccgcagactttggaaagcccaacgaccatg

SEQ ID NO: 747837 - DNA, 120 bp, Artificial Sequence
  ENSG00000205336_20 (sequence is synthesized)
gagagatgggccgttgccatggtggacggactcccgggctgggcttttgaattggccttggggactactcggctctcactcagctcccacgggactcagaagtgcgccgccatgctgcct

SEQ ID NO: 747838 - DNA, 120 bp, Artificial Sequence
  ENSG00000205336_21 (sequence is synthesized)
agggtactgtccccacatctgtcccaacccagctggaggcctggtctctccttacaacccctgggcccagccctcattgctgggggccaggccttggatcttgagggtctggcacatcct

SEQ ID NO: 747839 - DNA, 120 bp, Artificial Sequence
  ENSG00000205336_22 (sequence is synthesized)
taatcctgtgcccctgcctgggacagaaatgtggctccagttgctctgtctctcgtggtcaccctgagggcactctgcatcctctgtcattttaacctcaggtggcacccagggcgaatg

SEQ ID NO: 747840 - DNA, 120 bp, Artificial Sequence
  ENSG00000205336_23 (sequence is synthesized)
gggcccagggcagaccttcagggccagagccctggcggaggagaggccctttgccaggagcacagcagcagctcgcctacctctgagcccaggccccctccctccctcagccccccagtc

SEQ ID NO: 747841 - DNA, 120 bp, Artificial Sequence
  ENSG00000205336_24 (sequence is synthesized)
ctccctccatcttccctggggttctcctcctctcccagggcctccttgctccttcgttcacagctgggggtccccgattccaatgctgttttttggggagtggtttccaggagctgcctg

SEQ ID NO: 747842 - DNA, 120 bp, Artificial Sequence
  ENSG00000205336_25 (sequence is synthesized)
gtgtctgctgtaaatgtttgtctactgcacaagcctcggcctgcccctgagccaggctcggtaccgatgcgtgggctgggctaggtccctctgtccatctgggcctttgtatgagctgca

SEQ ID NO: 747843 - DNA, 120 bp, Artificial Sequence
  ENSG00000205336_26 (sequence is synthesized)
ttgcccttgctcaccctgaccaagcacacgcctcagaggggccctcagcctctcctgaagccctcttgtggcaagaactgtggaccatgccagtcccgtctggtttccatcccaccactc

SEQ ID NO: 747844 - DNA, 120 bp, Artificial Sequence
  ENSG00000205336_27 (sequence is synthesized)
caaggactgagactgacctcctctggtgacactggcctagggcctgacactctcctaagaggttctctccaagcccccaaatagctccaggcgccctcggccgcccatcatggttaattc

SEQ ID NO: 747845 - DNA, 120 bp, Artificial Sequence
  ENSG00000205336_28 (sequence is synthesized)
tgtccaacaaacacacacgggtagattgctggcctgttgtaggtggtagggacacagatgaccgacctggtcactcctcctgccaacattcagtctggtatgtgaggcgtgcgtgaagca

SEQ ID NO: 747846 - DNA, 120 bp, Artificial Sequence
  ENSG00000205336_29 (sequence is synthesized)
agaactcctggagctacagggacagggagccatcattcctgcctgggaatcctggaagacttcctgcaggagtcagcgttcaatcttgaccttgaagatgggaaggatgttctttttacg

SEQ ID NO: 747847 - DNA, 120 bp, Artificial Sequence
  ENSG00000205336_30 (sequence is synthesized)
taccaattcttttgtcttttgatattaaaaagaagtacatgttcattgtagagaatttggaaactgtagaagagaatcaagaagaaaaataaaaatcagctgttgtaatcacctagcaaa

SEQ ID NO: 747848 - DNA, 120 bp, Artificial Sequence
  ENSG00000205336_31 (sequence is synthesized)
aatacaaataccttggggccaatcaggaaacatgaaagagagaagagggctgtgtgtgaagaaaaaaaaaaaatcgactgctggaaacctcatcaaccagggcacaggggaagataaatg

SEQ ID NO: 747849 - DNA, 120 bp, Artificial Sequence
  ENSG00000205336_32 (sequence is synthesized)
gcaacttggtgtctgtgctggggaggcaatggggagtggtggggcctgtggcgaactggagactcccaaccccatgctgagagcgtggctgctcatcagctccagctggtcactaccttg

SEQ ID NO: 747850 - DNA, 120 bp, Artificial Sequence
  ENSG00000205336_33 (sequence is synthesized)
cagggatgagggcccatgtagccagaccacctgccttttatgagaaatgggaaatccagactgtggtttgacatcccctgattttaaaattttggcgaatccaaaacattttctggccaa

SEQ ID NO: 747851 - DNA, 120 bp, Artificial Sequence
  ENSG00000205336_34 (sequence is synthesized)
agagattacagtcaaaagctgcctggtcctgggatttatgcaaccagtttactgatcactctgcagcaggtgggctgcaagaattaaatcactggacttctctcccatccctgcctttaa

SEQ ID NO: 747852 - DNA, 120 bp, Artificial Sequence
  ENSG00000205336_35 (sequence is synthesized)
agggaggagggaggagcccagctggggcaggagaggggtgtctccccaccaaacaaacccggtccctccctctccgcactagctgtctgccctgccctgccgtaggagatgggctgggag

SEQ ID NO: 747853 - DNA, 120 bp, Artificial Sequence
  ENSG00000205336_36 (sequence is synthesized)
cctcccacgctctccagctcactcggcaggcagcggggaccagggctggcaggttaagcctctgggggtggatcctgaaaggtggtccagccgcctggccctgcgtgggaccctccacct

SEQ ID NO: 747854 - DNA, 120 bp, Artificial Sequence
  ENSG00000205336_37 (sequence is synthesized)
ccagcttcaaagtctctgtcctcttgaaaaaaggtggtcgggggacattgacccaccagccccgcaggctactgcctgcaaacaagaacccctcatctgccacgcacgttcttaatgtat

SEQ ID NO: 747855 - DNA, 120 bp, Artificial Sequence
  ENSG00000205336_38 (sequence is synthesized)
aacaagagagggtggcggctgcagtggctgtggggcagccggaaatggggcgagacagacaggcggagcctcacctggggctgcccgccagcccagacaagctcagactgggtgcctgtg

SEQ ID NO: 747856 - DNA, 120 bp, Artificial Sequence
  ENSG00000205336_39 (sequence is synthesized)
ttccaggcggggcctggactgagggaggaggcaggaagaaactcacaaagagttggcagatcacggatggagggcagcatctcccaacagcctgggcggccgctgagacccagagaaccc

SEQ ID NO: 747857 - DNA, 120 bp, Artificial Sequence
  ENSG00000205336_40 (sequence is synthesized)
gagacccagagaacccaaggactcccctgggctcatccagcagcctctgcttcccaggagagaggtgctgaagtccacgaagagggtctcgctctgtcacacaggctggagtgcagtggt

SEQ ID NO: 747858 - DNA, 120 bp, Artificial Sequence
  ENSG00000205336_41 (sequence is synthesized)
gtgggaactttggggagactggccctgggaggcgacagatggaggctgaggaagcagagtgatccccggccccttcctgtccctgaacactgtctgcctggatgaggggtggtgacttcc

SEQ ID NO: 747859 - DNA, 120 bp, Artificial Sequence
  ENSG00000205336_42 (sequence is synthesized)
acttggtgagtggaagctgtgatcctccctctcctcttagaatctccctggattccagggcccttttcactgcaccagataagacccctgtttagtcccactcatcatctggtgtcctgc

SEQ ID NO: 747860 - DNA, 120 bp, Artificial Sequence
  ENSG00000205336_43 (sequence is synthesized)
caggcatggggactgggaggatgtgggggcctgaggccaggacactgggactctcacagacgtgtcacaaggttgtcatcacagggaggaggaccagtgtgtgcaaaggcttggaggtgg

SEQ ID NO: 747861 - DNA, 120 bp, Artificial Sequence
  ENSG00000205336_44 (sequence is synthesized)
ggttggtactgagcgcctgatggctgaggccctgtagcgctggggatctgcggctccagaggcagagacagccatgcctactgacagtgaaggctcactttgaaggtggtgacttccaag

SEQ ID NO: 747862 - DNA, 120 bp, Artificial Sequence
  ENSG00000205336_45 (sequence is synthesized)
ttgttgctggagaaactgaggctcagagtggtacagtcactgggcccagcaagctggggtctgctctttaggctgtgagatcagtgctcctactacacagatgggagaaccgaggctctg

SEQ ID NO: 747863 - DNA, 120 bp, Artificial Sequence
  ENSG00000205336_46 (sequence is synthesized)
aatcccagagccgtccaggtcctgtccactcaacttccacctccatcctctgaggaaatgggttttccaggagcttggcctgggcagcggtgactcgtggctccacacggaagtgactca

SEQ ID NO: 747864 - DNA, 120 bp, Artificial Sequence
  ENSG00000205336_47 (sequence is synthesized)
actcgtggctccacacggaagtgactcaggtcccccgggagaaagcgagccgtgggtccccactgcccaccgtgcagaggggcagggctgagccaggtggtgacttccaagagtgactcc

SEQ ID NO: 747865 - DNA, 120 bp, Artificial Sequence
  ENSG00000205336_48 (sequence is synthesized)
agtcgaggggaaggacaggagagaggtggcagagctgcagcagggttggtgtaggggttggcctcctggcaaggcccagcatgacaaaggcagggtctcgctctgtcacacaggctggag

SEQ ID NO: 747866 - DNA, 120 bp, Artificial Sequence
  ENSG00000205336_49 (sequence is synthesized)
aaaatgagatggttggtgaccccagaggacaaacctgggttgtgctttctgagccatctcctggtgctgagcacttggaccgcttcagctctccacgggtcaggctggacagccctgtga

SEQ ID NO: 747867 - DNA, 120 bp, Artificial Sequence
  ENSG00000205336_50 (sequence is synthesized)
ccacagcttgtcactggagtgtcttttcttcagggcccctcttgagtaggaggagaccaggctttgaaggttcctgagaggagatgtacgggacctgaatacagctttcctgacctgccc

SEQ ID NO: 747868 - DNA, 80 bp, Artificial Sequence
  ENSG00000205336_51 (sequence is synthesized)
gtggttggtactgagcgcctgatggctgaggccctgtagcgctggggatctgcggctccagaggcagagagactccccag

SEQ ID NO: 747869 - DNA, 120 bp, Artificial Sequence
  ENSG00000205336_52 (sequence is synthesized)
agctgtctgccctgccctgccgtaggagatgggctgggagcctcccacgctctccagctcactcggcaggcagcggggaccagggctggcagggtctcgctctgtcacacaggctggagt

SEQ ID NO: 747870 - DNA, 120 bp, Artificial Sequence
  ENSG00000205336_53 (sequence is synthesized)
gcttgtcttctctgggccaggcccctccatggtggctgaggactctttggaacagggaactgtcgtggaagaaagggcccggccctgccactgcctcctgtgggaccctgggccaggctc

SEQ ID NO: 747871 - DNA, 120 bp, Artificial Sequence
  ENSG00000205336_54 (sequence is synthesized)
ccctgctgtccaggcctgtttccctgtctgttccatgaaggagaggcaggggcagtggtctgtaaacccataagctgcagcagtaggcccctcccctggtctcatgggccacacacgcca

SEQ ID NO: 747872 - DNA, 120 bp, Artificial Sequence
  ENSG00000205336_55 (sequence is synthesized)
agacaactgaggtccggctgtggtttgagagggaagacagtctagaggggtcaggggagacggttcagcatcctctttgtcccttgctaccagcttggagggtctcgctctgtcacacag

SEQ ID NO: 747873 - DNA, 120 bp, Artificial Sequence
  ENSG00000205336_56 (sequence is synthesized)
agcgctggggatctgcggctccagaggcagagacagggccaatccaggagggctgaagtgacacggtggttctgctttgtccttcagccatgcctactgacagtgaaggctcactttgaa

SEQ ID NO: 747874 - DNA, 120 bp, Artificial Sequence
  ENSG00000205336_57 (sequence is synthesized)
gtgtaaagggaagaaggaagcagtggatggccaggttcgtgggtcttcccggcaggagacagcagagaggcgcctgcccgggaagggttaatcccagagccgtccaggtggtgacttcca

SEQ ID NO: 747875 - DNA, 120 bp, Artificial Sequence
  ENSG00000205336_58 (sequence is synthesized)
ggtcttggtgaaggaggatgaggtctgaatagggtgagagagcagagactggaaagggactgaagatcaagagccccaggaagaattcttcctcagcatcagtgtagactgtttatttcc

SEQ ID NO: 747876 - DNA, 120 bp, Artificial Sequence
  ENSG00000205336_59 (sequence is synthesized)
tttcacagaggaggaaactggggcacagagaggatgcccaaagctgcacagctagccaatgggagagccaggatttgaacccagcagctgattggagtggggtaggggtgaggggcggag

SEQ ID NO: 747877 - DNA, 120 bp, Artificial Sequence
  ENSG00000205336_60 (sequence is synthesized)
acacaggcacaggccggtgagggacctgcccagacctggaggagcgacgatgcctcactgcctgaccagaggcacctgacaccaggcctggcatccgagcagctgccactcagacctcac

SEQ ID NO: 747878 - DNA, 120 bp, Artificial Sequence
  ENSG00000205336_61 (sequence is synthesized)
agctgccactcagacctcacaggccagggccaagggagctgctgatgcaagaggcacaattttaggggcaagagcagcaagtaggatggtcttgaggtggtgacttccaagagtgactcc

SEQ ID NO: 747879 - DNA, 120 bp, Artificial Sequence
  ENSG00000205336_62 (sequence is synthesized)
acttgggaacaggacaagttacggagccacgttgctttgctgggtctgagccggggtgtgacgtagtccctgcagctgccaacggttgccagggcaacggttgccaggggctgctgtcac

SEQ ID NO: 747880 - DNA, 120 bp, Artificial Sequence
  ENSG00000205336_63 (sequence is synthesized)
gtctctggctgctgggttaaggctcaagcttgggagcagcttcacgtgtgagggagacgagggggaggtggcgcccagtcgaggggaaggacaggagagaggtggcagagctgcagcagg

SEQ ID NO: 747881 - DNA, 120 bp, Artificial Sequence
  ENSG00000205336_64 (sequence is synthesized)
gtgactccgtcggaggaaaatgactccccagtcgctgctgcagacgacactgttcctgctgagtctgctcttcctggtccaagccagcggaaccagacacacaggagcagcctccactac

SEQ ID NO: 747882 - DNA, 120 bp, Artificial Sequence
  ENSG00000205336_65 (sequence is synthesized)
agttgtcgccctgacctggggggtgggcggacagcatccaagggccctgttgccgtggcaaccccggcctctctgtgggaactttggggagactggccctgggaggcgacagatggaggc

SEQ ID NO: 747883 - DNA, 120 bp, Artificial Sequence
  ENSG00000205336_66 (sequence is synthesized)
cgctacctgggcagaggggcccgagcctggagtcagggaggctggtgggtgtggagtcccaggaaccaccaccaagccccgcacatccctcctaaggaggcctggctgggccctctctgc

SEQ ID NO: 747884 - DNA, 120 bp, Artificial Sequence
  ENSG00000205336_67 (sequence is synthesized)
tccgtgtgtgtagccgaaggtgtctgcggagggtgctgagcaaggcacatcccaccccatcccgctggggctggcattgctggcgggttctgtaagacacaacccccacgggttggcctc

SEQ ID NO: 747885 - DNA, 120 bp, Artificial Sequence
  ENSG00000205336_68 (sequence is synthesized)
ctgagtggccttggcagagtccactctgcttcttgaagcctcagtttcccctttgtaaagtaaagatcgaggcattcagagtcatgtcagggtggtagggggcagaatgggagggtcctg

SEQ ID NO: 747886 - DNA, 120 bp, Artificial Sequence
  ENSG00000205336_69 (sequence is synthesized)
accagtggggctgggatccaaggtcacctgggtgagttctgatgggctccctgatttgggcccttgggaggatggcgtccagctgaacccatggaaacacattgttggaagctttcttta

SEQ ID NO: 747887 - DNA, 120 bp, Artificial Sequence
  ENSG00000205336_70 (sequence is synthesized)
agactgggtgcctgtggccctgggaggaggtggaaggggaggagcaggccacacaggcacaggccggtgagggacctgcccagacctggagacagggtctcgctctgtcacacaggctgg

SEQ ID NO: 747888 - DNA, 120 bp, Artificial Sequence
  ENSG00000205336_71 (sequence is synthesized)
tttggggagactggccctgggaggcgacagatggaggctgaggaagcagagtgatccccggccccttcctgtccctgaacactgtctgcctggatgagggggtctcgctctgtcacacag

SEQ ID NO: 747889 - DNA, 120 bp, Artificial Sequence
  ENSG00000205336_72 (sequence is synthesized)
gaactttggggagactggccctgggaggcgacagatggaggctgaggaagcagagtgatccccggccccttcctgtccctgaacactgtctgcctggatgaggggtgaggctgaggtgcc

SEQ ID NO: 747890 - DNA, 120 bp, Artificial Sequence
  ENSG00000205336_73 (sequence is synthesized)
cccttgcccggcgctgagtcatgggcatcccccaggatcactgcctcagcgctctcagccctgccccctcctggtctccctctgagaaatccatgactcacatatatcgtccgtcatccc

SEQ ID NO: 747891 - DNA, 120 bp, Artificial Sequence
  ENSG00000205336_74 (sequence is synthesized)
gctatccaaggcaaagggacaccaaggggcaaaggtctgtgggtgggatgcctgtgctcgggggcgggcagtggtcactgtgtgtaaagggaagaaggaagcagtggatggccaggttcg

SEQ ID NO: 747892 - DNA, 79 bp, Artificial Sequence
  ENSG00000205336_75 (sequence is synthesized)
aagtccagggcgtgaggggactggaagtgcaggaaagagccaccagtggggctgggatccaaggtcacctggggtctcg

SEQ ID NO: 747893 - DNA, 120 bp, Artificial Sequence
  ENSG00000205339_0 (sequence is synthesized)
cctttcgcgccggttgccgctgcggagcgcggcgggtccatgtgcgcagtgagtggcgctattcctggcccagtagcacccgagccccgggtttgaccgagtccgcgctgcgatggaccc

SEQ ID NO: 747894 - DNA, 120 bp, Artificial Sequence
  ENSG00000205339_1 (sequence is synthesized)
caacaccattatcgaggccctgcggggcactatggacccagccctgcgtgaggccgcggagcgccagctcaatgaagcacacaagtctctgaattttgtctcaacactgctccagattac

SEQ ID NO: 747895 - DNA, 120 bp, Artificial Sequence
  ENSG00000205339_2 (sequence is synthesized)
tatgtcggaacagctggatttacctgtgagacaggcaggtgttatctatctgaaaaatatgataacacagtattggcctgatcgagaaacagcaccaggggatatatccccttatactat

SEQ ID NO: 747896 - DNA, 120 bp, Artificial Sequence
  ENSG00000205339_3 (sequence is synthesized)
tccagaagaagatcgccattgtattcgagaaaatattgtagaagccattatccattctcctgagctcatcagggtacagcttactacatgcattcatcacatcatcaaacatgattatcc

SEQ ID NO: 747897 - DNA, 120 bp, Artificial Sequence
  ENSG00000205339_4 (sequence is synthesized)
aagccgctggactgccattgtggacaaaattggcttttatcttcagtccgataacagtgcttgttggctaggaattcttctttgcctttatcagcttgtgaaaaattatgagtataaaaa

SEQ ID NO: 747898 - DNA, 120 bp, Artificial Sequence
  ENSG00000205339_5 (sequence is synthesized)
accagaggagcggagtccattggtagcagcaatgcagcattttctgccagttctaaaggatcgttttatccagcttctttctgaccagtctgatcagtctgtcctcatccagaaacagat

SEQ ID NO: 747899 - DNA, 120 bp, Artificial Sequence
  ENSG00000205339_6 (sequence is synthesized)
attcaagatcttctatgctcttgttcagtatacactaccactggaactgataaaccaacagaacctgacagaatggatagaaattttaaagactgttgtgaacagggatgtacctaatga

SEQ ID NO: 747900 - DNA, 120 bp, Artificial Sequence
  ENSG00000205339_7 (sequence is synthesized)
aacacttcaagttgaagaagatgatcgacctgagttaccatggtggaaatgcaagaagtgggccttacatattttagcaagactttttgaaagatatggaagccctggcaatgtttccaa

SEQ ID NO: 747901 - DNA, 120 bp, Artificial Sequence
  ENSG00000205339_8 (sequence is synthesized)
ggagtataatgaatttgctgaagtatttctgaaggcatttgctgttggtgtccagcaagttttattgaaggtgttatatcagtacaaggagaagcaatatatggctcctcgagttttaca

SEQ ID NO: 747902 - DNA, 120 bp, Artificial Sequence
  ENSG00000205339_9 (sequence is synthesized)
acagacattaaattatattaatcaaggagtttctcatgctctcacctggaagaatctgaagccccatatacaaggcattatccaagatgttatttttccattgatgtgctatacagatgc

SEQ ID NO: 747903 - DNA, 120 bp, Artificial Sequence
  ENSG00000205339_10 (sequence is synthesized)
tgatgaggaactttggcaagaagacccttacgaatatatacgcatgaagtttgatgtgtttgaagatttcatttctcctaccactgctgcccagacacttttgtttacagcctgtagtaa

SEQ ID NO: 747904 - DNA, 120 bp, Artificial Sequence
  ENSG00000205339_11 (sequence is synthesized)
gaggaaagaggtactgcaaaagactatgggattttgttaccagattcttacagaaccaaatgctgaccctcgaaaaaaagatggagccctgcatatgattggctctttagctgaaatact

SEQ ID NO: 747905 - DNA, 120 bp, Artificial Sequence
  ENSG00000205339_12 (sequence is synthesized)
tctgaagaaaaagatctataaagatcagatggaatacatgttgcagaatcatgtattccctctcttcagcagtgaactaggctacatgagagcaagggcttgctgggtacttcactattt

SEQ ID NO: 747906 - DNA, 120 bp, Artificial Sequence
  ENSG00000205339_13 (sequence is synthesized)
ttgtgaagtgaagttcaaaagtgatcagaaccttcaaacagccttagagctaacaagaagatgtctgattgatgatagagaaatgcctgtgaaagtggaagctgccattgcccttcaagt

SEQ ID NO: 747907 - DNA, 120 bp, Artificial Sequence
  ENSG00000205339_14 (sequence is synthesized)
attgatcagcaatcaagaaaaagctaaagaatatatcacaccattcatcagacctgtaatgcaggctcttcttcacattataagagaaacagaaaatgatgaccttaccaatgtaattca

SEQ ID NO: 747908 - DNA, 120 bp, Artificial Sequence
  ENSG00000205339_15 (sequence is synthesized)
gaaaatgatctgtgaatatagtgaagaagttactcctattgcagtagaaatgacacaacatttggcaatgacatttaaccaagtaatccagacggggccagatgaagaaggtagtgatga

SEQ ID NO: 747909 - DNA, 120 bp, Artificial Sequence
  ENSG00000205339_16 (sequence is synthesized)
caaagcagttactgctatgggaattctgaatacaattgatacacttcttagtgtagttgaagatcataaagagataacccaacagcttgagggaatctgcttacaggtcattggtactgt

SEQ ID NO: 747910 - DNA, 120 bp, Artificial Sequence
  ENSG00000205339_17 (sequence is synthesized)
tttacaacagcatgtcttagaattctatgaggagatcttctctttagcgcacagtttgacatgtcaacaagtgtctccacagatgtggcagctactaccccttgtatttgaagtctttca

SEQ ID NO: 747911 - DNA, 120 bp, Artificial Sequence
  ENSG00000205339_18 (sequence is synthesized)
gcaagatggctttgattactttacagatatgatgcccctccttcataattatgtaacagttgatacagacacacttctgtctgacaccaagtatcttgaaatgatatacagtatgtgcaa

SEQ ID NO: 747912 - DNA, 120 bp, Artificial Sequence
  ENSG00000205339_19 (sequence is synthesized)
aaaggttcttacaggagttgcaggagaagatgcagagtgtcatgcagcaaaattgttagaggtcatcattctgcagtgcaaagggcgtggcattgaccagtgcattcccttattcgtgga

SEQ ID NO: 747913 - DNA, 120 bp, Artificial Sequence
  ENSG00000205339_20 (sequence is synthesized)
agcagccttagaaagactgacaagagaggttaagacaagtgaacttcgaactatgtgtctgcaagttgcaattgcagctttgtattataatccacacctactactcaataccttagaaaa

SEQ ID NO: 747914 - DNA, 120 bp, Artificial Sequence
  ENSG00000205339_21 (sequence is synthesized)
tcttcgcttccctaataatgttgaaccagttacaaatcattttattacacagtggcttaatgatgttgactgtttcttggggcttcatgacagaaagatgtgtgttctcggactctgtgc

SEQ ID NO: 747915 - DNA, 120 bp, Artificial Sequence
  ENSG00000205339_22 (sequence is synthesized)
tcttattgatatggaacagataccccaagttttaaatcaggtttctggacagattttgccggcttttatccttttatttaacggattgaaaagagcatatgcctgccatgcagaacatga

SEQ ID NO: 747916 - DNA, 120 bp, Artificial Sequence
  ENSG00000205339_23 (sequence is synthesized)
gaatgacagtgatgatgatgatgaagctgaagatgatgatgaaaccgaggaactggggagtgatgaagatgatattgatgaagatgggcaagaatatttggagattctggctaagcaggc

SEQ ID NO: 747917 - DNA, 120 bp, Artificial Sequence
  ENSG00000205339_24 (sequence is synthesized)
tggtgaagatggagatgatgaagattgggaagaagatgatgctgaagagactgctctggaaggctattccacaatcattgatgatgaagataaccctgttgatgagtatcagatatttaa

SEQ ID NO: 747918 - DNA, 120 bp, Artificial Sequence
  ENSG00000205339_25 (sequence is synthesized)
tcaggcactgactcacggtcttaatgaagaacaaagaaaacagttacaggacatagcaactctggctgatcaaagaagagcagcccatgaatccaaaatgattgagaagcatggaggata

SEQ ID NO: 747919 - DNA, 120 bp, Artificial Sequence
  ENSG00000205339_26 (sequence is synthesized)
caaattcagtgctccagttgtgccaagttctttcaattttggaggcccagcaccagggatgaattgagttatctctttctttcctgctgtgtgcttgtagtgaagagcttgtgttcctcc

SEQ ID NO: 747920 - DNA, 120 bp, Artificial Sequence
  ENSG00000205339_27 (sequence is synthesized)
tagtagtggttccagaactggttcatgttatctattctaaactaataatcaatagatggacaaaagaaacaacaaccccaggagatgggacctgatcatgcaacctggcactggaaaaga

SEQ ID NO: 747921 - DNA, 120 bp, Artificial Sequence
  ENSG00000205339_28 (sequence is synthesized)
aatcagcgggattttgggggtggggggggatgggaggtaccttagagggagtattttctttattttttgaagaaagtaagatcctgactctgaagcttcaaagtgacactgtggaaatct

SEQ ID NO: 747922 - DNA, 120 bp, Artificial Sequence
  ENSG00000205339_29 (sequence is synthesized)
gaaacgaggggatgtcatgaaggcagcttttctttttctgaggaaaaaataggcatgggctacaggactatttaaaatgtctcatttacagtataaaactcaaaggtagatgtaattttt

SEQ ID NO: 747923 - DNA, 120 bp, Artificial Sequence
  ENSG00000205339_30 (sequence is synthesized)
acacctatgagtatttgtccaatttctgtctcttcctcaccattgggtatctattctttatatgtaaataagataaggtcatctgatagccttattcagtcttcatcattttcatcattg

SEQ ID NO: 747924 - DNA, 120 bp, Artificial Sequence
  ENSG00000205339_31 (sequence is synthesized)
ttcctatgtagattattggacatttattgtagcactacataactgattataaaaatctgtaaatgaattagcactttcatattgaaacaagcctgctagcctatgtataaaatagcaaaa

SEQ ID NO: 747925 - DNA, 120 bp, Artificial Sequence
  ENSG00000205339_32 (sequence is synthesized)
tgtttgctgtttataaaaagatgtaatggggtggggggcaggggtaatttcaagttattaatttaaaaatgaactagcaattttgtacctggtgactttgtggtgcactcacctctgata

SEQ ID NO: 747926 - DNA, 120 bp, Artificial Sequence
  ENSG00000205339_33 (sequence is synthesized)
gtgacttgaattcggtatgtaaaaaggggttagtggtatttcattgctgctaaaaatgacaactccctctgtgtcctgtttttcttaaagctgtcagtgtacaagtgggtatttgaatac

SEQ ID NO: 747927 - DNA, 120 bp, Artificial Sequence
  ENSG00000205339_34 (sequence is synthesized)
cagaccttactgtaaaaaataaaaaaggtggtatctagagcatgtaaattggatataaagttctgctcttaaagagttgatctaagagtatggctaaacatctatatatgcaatctatta

SEQ ID NO: 747928 - DNA, 120 bp, Artificial Sequence
  ENSG00000205339_35 (sequence is synthesized)
aaagaacttaattcggctattatgtcttgatttgattgcagttttttcctaattataacaaatttttcctcattggcctgtttttaatcctgtgcctagaaggagtacaaaatgcacact

SEQ ID NO: 747929 - DNA, 120 bp, Artificial Sequence
  ENSG00000205339_36 (sequence is synthesized)
ttacaaaattgatatttaacacttacccactcccctttccccatctcttctaccgctcttgttgatcgtggtatctgatcttgactagataggctgaaggcacatggttccctccaaaaa

SEQ ID NO: 747930 - DNA, 120 bp, Artificial Sequence
  ENSG00000205339_37 (sequence is synthesized)
ccactattgataccactacaaaaacaagccagcaaaaagatactgtagagaggttggcttgcttccctctcttcctaactgcatgttgaaaaataagccgttattgatcttaaacatcgg

SEQ ID NO: 747931 - DNA, 120 bp, Artificial Sequence
  ENSG00000205339_38 (sequence is synthesized)
tcagatgagtcatacattgggttattttttatatacatgtatacacaaaatatttcaaattgaaagcaacatcttaatggattcaaaactattacaagctgttgtctaaaacaggtgaga

SEQ ID NO: 747932 - DNA, 120 bp, Artificial Sequence
  ENSG00000205339_39 (sequence is synthesized)
aaaaaatttataactgtaaaaacaaatgcacatattgatatttaaaatgcgtaattaagaaaacccattgttgttgtgtttttcttgtataccaataattaagccactactgttggcact

SEQ ID NO: 747933 - DNA, 120 bp, Artificial Sequence
  ENSG00000205339_40 (sequence is synthesized)
gtttggttttctattttaacactgaaggagtgaaagtatttcctatatttatgaatttactactaaaatcttggcaaaaaaagaaaaaaattgtctaacgtgtgtgggtgaaaactgtta

SEQ ID NO: 747934 - DNA, 120 bp, Artificial Sequence
  ENSG00000205339_41 (sequence is synthesized)
atcaagtgtttctactcccccccgaaaatcccctgaaagttggacaccaactgtataccctaggttgcttaaagggatttcactattatataaagtcaataaaaatgaagtagttgtata

SEQ ID NO: 747935 - DNA, 120 bp, Artificial Sequence
  ENSG00000205339_42 (sequence is synthesized)
tatgcaacattgtgtacagaggggaaataatgaatagtattaaagaaacattctcgtcttcctttacctttaatcccctaatacctagtctactttttaaattttcagacttcactgctt

SEQ ID NO: 747936 - DNA, 120 bp, Artificial Sequence
  ENSG00000205339_43 (sequence is synthesized)
tttgaattcataattctaattttcacattattgttaatggaaaatcatatctaataaaggttttagttattcccatgcacagtatgaaaattctcatttgctgaggttttgtttcaagaa

SEQ ID NO: 747937 - DNA, 120 bp, Artificial Sequence
  ENSG00000205339_44 (sequence is synthesized)
aatgtattggcatgtctttgagaacatgttttattgtctcctgtgtcatataatccaaactaatctccgtttacagactttaacttgaaattagaccttataattaaactatttaaatag

SEQ ID NO: 747938 - DNA, 120 bp, Artificial Sequence
  ENSG00000205339_45 (sequence is synthesized)
tgttcaaatgatagtttctaatgcatcaaatatatacctcagttttcatgatttcctttaacattataatttggtatagatcaagaatcttaacatgtatcagtttctagatgaggctgc

SEQ ID NO: 747939 - DNA, 120 bp, Artificial Sequence
  ENSG00000205339_46 (sequence is synthesized)
aggatttttggaaaactttttgaatgtatttacaatattctcttgtaattagctacatagggacttgtctttttttctttttacatacagcttttcctacagttttattaccctgtaatt

SEQ ID NO: 747940 - DNA, 120 bp, Artificial Sequence
  ENSG00000205339_47 (sequence is synthesized)
tttttttagttgtagaagttaattctgattttgtgtggatttcagtatttgtctttgttaatggcacatattagcataaatcacttttgtaaatgtaagctttctttttttttcttgaaa

SEQ ID NO: 747941 - DNA, 120 bp, Artificial Sequence
  ENSG00000205339_48 (sequence is synthesized)
aagcctttctatttatcagtattaaataaaggaagttaatctgtttctctgcaggtaataaaatagtgacacactgtattaagatagtgactgctatactcaactctggaagagactaga

SEQ ID NO: 747942 - DNA, 120 bp, Artificial Sequence
  ENSG00000205339_49 (sequence is synthesized)
gtatagagcatgagtggcaaaaccacagcccttgggccatatgctgctattcagtcccagatgtagcccctgaagcaagcataaagaaaaatgaattaaaaattaaattaatatggaaag

SEQ ID NO: 747943 - DNA, 120 bp, Artificial Sequence
  ENSG00000205339_50 (sequence is synthesized)
ttaaaaaatggattacattagtatgactaaaccatgtctttggcaaagatctaacacaatgtcttaagtataataggtagtctctgtttgtaaaataaatgacttaaatttaaaacatca

SEQ ID NO: 747944 - DNA, 120 bp, Artificial Sequence
  ENSG00000205339_51 (sequence is synthesized)
aaaaattaaagaaaaaagaatgctagttgggataaatgggaagtgcagtgctatacaggctaatgaaaacatccaaaaagttttagaatttaagtcatcaaattccttaaagttcaatat

SEQ ID NO: 747945 - DNA, 120 bp, Artificial Sequence
  ENSG00000205339_52 (sequence is synthesized)
gagccttttgtgcaagccaagcaatggaaatgtattggagcctctttgatctgtaattttaaagtatatttatttgcagaagtttaaaatggactttttttctttgtaggcacacaagtc

SEQ ID NO: 747946 - DNA, 120 bp, Artificial Sequence
  ENSG00000205339_53 (sequence is synthesized)
tctgaattttgtctcaacactgctccagattactatgtcggaacagctggatttacctgtgagacaggcaggcaagtttcctaaattatattgagtgtatgtaatctattgtttaaaagg

SEQ ID NO: 747947 - DNA, 120 bp, Artificial Sequence
  ENSG00000205339_54 (sequence is synthesized)
ttcataatcgaatagcagaagtgtcttgggatggccctttggcaattttttccccccaggtaatttgtttaccttcagtgtttacagctaacatcaggtaccttgatatctggtggcaga

SEQ ID NO: 747948 - DNA, 62 bp, Artificial Sequence
  ENSG00000205339_55 (sequence is synthesized)
ccagctcaatgcacaacctccgcctcccggattcgggcaattctcctgcctcagcctcttga

SEQ ID NO: 747949 - DNA, 120 bp, Artificial Sequence
  ENSG00000205339_56 (sequence is synthesized)
aattaacaaagaatttcagcatttgaataatagttaacttgaaaatctacattaagtggatgattttctagcaaaatagaaattgcaaaaattataagtctaaacaagcatacttcctcc

SEQ ID NO: 747950 - DNA, 120 bp, Artificial Sequence
  ENSG00000205339_57 (sequence is synthesized)
agcaagactccatctcaaaaaaaaaaaggccagcattagtgaagcattcacatttttgtcaatctattctcatctcatgctgttcctcctatattgtattatctctatcattaaataagt

SEQ ID NO: 747951 - DNA, 120 bp, Artificial Sequence
  ENSG00000205352_0 (sequence is synthesized)
gaacgcagcaagcccaggcggcggtggaaaggctggaggacacacctaaacatgtggaatcccaatgccggtgggccccctcatcctgtgccacagccagggtatccaggatgccaaccg

SEQ ID NO: 747952 - DNA, 120 bp, Artificial Sequence
  ENSG00000205352_1 (sequence is synthesized)
ttgggtccctaccctcctccatacccaccgcctgcccctggaatccctcctgtgaatcccttggctcctggcatggttggaccagcagtgatagtagacaagaagatgcagaagaaaatg

SEQ ID NO: 747953 - DNA, 120 bp, Artificial Sequence
  ENSG00000205352_2 (sequence is synthesized)
aagaaagctcataaaaagatgcacaagcaccaaaagcaccacaagtaccacaagcatggcaagcattcctcctcttcctcctcctcttccagcagtgattctgactgaatacaggccctg

SEQ ID NO: 747954 - DNA, 120 bp, Artificial Sequence
  ENSG00000205352_3 (sequence is synthesized)
ccaccccctacctccacctgagcctcaccctgctgttgagccctgagtggctaggggaaatgggaagaggattgccatggcctggccatcttgttgctgcttggttagatcatatagcta

SEQ ID NO: 747955 - DNA, 120 bp, Artificial Sequence
  ENSG00000205352_4 (sequence is synthesized)
atgaattaggcaggggagctattttttgaagatgatgaactaaatgttgaagacaagtttgagatctgtaaaatgtgattttttacttccacttataatacttgtgattggggaggtttg

SEQ ID NO: 747956 - DNA, 120 bp, Artificial Sequence
  ENSG00000205352_5 (sequence is synthesized)
tggaaattcaattatgatgaaaaacctatcttttttgtaatgttggcatacttggggaatttagtggcaaatacattccccagcaggccttttgttggttgcactaactgcaaggttgct

SEQ ID NO: 747957 - DNA, 120 bp, Artificial Sequence
  ENSG00000205352_6 (sequence is synthesized)
gggaagtagagtccatttggttgatgagctttgactgcggttttggaaccttacctctcctccttagcccaatatgctgtcttgggtcctattcaaataaagttatttctcctggtctca

SEQ ID NO: 747958 - DNA, 120 bp, Artificial Sequence
  ENSG00000205352_7 (sequence is synthesized)
gactaggaagagccgagactgcgaaggagaacgcagcaagcccaggcggcggtggaaaggctggaggacacacctaaacatgtggaatcccaatgccgggcagccagggccaaatccata

SEQ ID NO: 747959 - DNA, 120 bp, Artificial Sequence
  ENSG00000205352_8 (sequence is synthesized)
tccccccaatattgggtgccctggaggttccaatcctgcccacccaccacctattaatccaccctttcccccaggcccctgtcctcctcccccaggagctccccatggcaatccagcttt

SEQ ID NO: 747960 - DNA, 120 bp, Artificial Sequence
  ENSG00000205352_9 (sequence is synthesized)
cacaagcaccaaaagcaccacaagtaccacaagcatggcaaggtcagtaccctctggagactggctagggaaggagtcccccctcagagggactaggtaggcaggggttgggtgaggggg

SEQ ID NO: 747961 - DNA, 120 bp, Artificial Sequence
  ENSG00000205352_10 (sequence is synthesized)
attcacattctgtggacgtgagggatgacaattgtgtcgctctggtagatgattcttcctttttataaaagattgctactgggaagaatctgattatcttgaaaataaacatcaggcttc

SEQ ID NO: 747962 - DNA, 120 bp, Artificial Sequence
  ENSG00000205352_11 (sequence is synthesized)
tcctatctggggggagttagggtgagccttagaatggattttagaatcaaaagccaaatcttttctgccctactctcccagaacttttgctcccctcccgccaggtgcatattctagcaa

SEQ ID NO: 747963 - DNA, 120 bp, Artificial Sequence
  ENSG00000205352_12 (sequence is synthesized)
acataattaccaattaggcagtagcagaggcgggtgccgaagcacggggtctgggtgactaggaagagccgagactgcgaaggagaacgcagcaagcccaggcggcggtggaaaggtgat

SEQ ID NO: 747964 - DNA, 120 bp, Artificial Sequence
  ENSG00000205352_13 (sequence is synthesized)
gtgactaggaagagccgagactgcgaaggagaacgcagcaagcccaggcggcggtggaaaggctggaggacacacctaaacatgtggaatcccaatgccggcccctgtcctcctccccca

SEQ ID NO: 747965 - DNA, 120 bp, Artificial Sequence
  ENSG00000205352_14 (sequence is synthesized)
gatggggtatctggattccataggtttttccttttccccttgctaggtcaagagtctcttcgcagcttggggctaggatcttcatttgccttttttcttttttggaggaagggggctgtg

SEQ ID NO: 747966 - DNA, 120 bp, Artificial Sequence
  ENSG00000205352_15 (sequence is synthesized)
tccacatatttaagtatttgaggttcttgggcaacttccttcttacttcgcctcgaggcgtatcctttttttagcctgaggtggggtcctccccagggagagagaaagttgtttgagatc

SEQ ID NO: 747967 - DNA, 120 bp, Artificial Sequence
  ENSG00000205352_16 (sequence is synthesized)
ctttcttactctgtgcgtggttaaaggcctccgtactcagttccagggaaagggagatgagtgatggtggggccgagactcgcgggtactgcctacttccgaagagttagacgcttccac

SEQ ID NO: 747968 - DNA, 120 bp, Artificial Sequence
  ENSG00000205352_17 (sequence is synthesized)
ctgggtggaggggccctgggaactagattcctgtgttaggaaccaagtaggtattgagggcgaagaaacaagtggaaagagacatttcttttcttttcttttctttttgagacggtgtct

SEQ ID NO: 747969 - DNA, 62 bp, Artificial Sequence
  ENSG00000205352_18 (sequence is synthesized)
agagacatttcttatgtggaagttgtggtagttctccaggctggaggacacacctaaacatg

SEQ ID NO: 747970 - DNA, 120 bp, Artificial Sequence
  ENSG00000205352_19 (sequence is synthesized)
ttgtggtagttctccaggctggaggacacacctaaacatgtggaatcccaatgccggtaggtgtttgggggttctgttccacccctaaccctttttctgatgggctctataacaggaagt

SEQ ID NO: 747971 - DNA, 120 bp, Artificial Sequence
  ENSG00000205352_20 (sequence is synthesized)
ttctgtatcagctcccctacccccgacctgctgtacccgcaaaagcaaagtccttagtctagagctgaccagtgctttttaatttaatttaatttatttattttttgagatggagtctct

SEQ ID NO: 747972 - DNA, 73 bp, Artificial Sequence
  ENSG00000205352_21 (sequence is synthesized)
cgcctcctgggttcaagcgattctcctgtttcagcctctggagtagctgagattacagacgcatgctaaattt

SEQ ID NO: 747973 - DNA, 73 bp, Artificial Sequence
  ENSG00000205352_22 (sequence is synthesized)
gcatgctaaatttggccaggctggtctcaaactcatggcctcatgagatctgtccacctcggcctcccaaagt

SEQ ID NO: 747974 - DNA, 120 bp, Artificial Sequence
  ENSG00000205352_23 (sequence is synthesized)
gaccagtgcttttgtcttcctcagagttcactgtctccctcctctccctagcccttccagggacattcccccttttctccccaactcaagtttgtctcccctaccctccattcttctttg

SEQ ID NO: 747975 - DNA, 120 bp, Artificial Sequence
  ENSG00000205352_24 (sequence is synthesized)
cgcagcaagcccaggcggcggtggaaaggtgatggggtatctggattccataggtttttccttttccccttgctaggctggaggacacacctaaacatgtggaatcccaatgccgggcag

SEQ ID NO: 747976 - DNA, 120 bp, Artificial Sequence
  ENSG00000205356_0 (sequence is synthesized)
gccgcttccggcccaccctcttgcccggtccccgggagggccggtccgctcctcccggacgccgaggacctaccaccgcgacttcgccccgcccggcgcgggcccaggaccctgatgtcg

SEQ ID NO: 747977 - DNA, 120 bp, Artificial Sequence
  ENSG00000205356_1 (sequence is synthesized)
cttttgaacagcccctgcacctggcagccagcgagctactgtagtaggcattgccgactgtttgcataccggatgggagtgacagtgtaatagaaaaacaagcaagaaaccttttaggta

SEQ ID NO: 747978 - DNA, 120 bp, Artificial Sequence
  ENSG00000205356_2 (sequence is synthesized)
ggactcctaaggctcagaggaagttacctccagccgctgccatgcccaactcagtgctgtgggcggtggacctcttcgggagagtgtacacgctgtccacagcaggccagtactgggaaa

SEQ ID NO: 747979 - DNA, 120 bp, Artificial Sequence
  ENSG00000205356_3 (sequence is synthesized)
tgtgcaaggactcccagctggagttcaagcgcgtcagcgccaccacgcagtgctgctggggcattgcctgtgacaaccaggtctacgtgtatgtgtgtgccagcgatgtccccatccgcc

SEQ ID NO: 747980 - DNA, 120 bp, Artificial Sequence
  ENSG00000205356_4 (sequence is synthesized)
gccgagaggaggcctatgagaatcagcgctggaatcccatgggcggcttctgtgagaagctcctgctgagtgaccgctgggggtggagtgacgtgagtgggctccagcaccggccgctgg

SEQ ID NO: 747981 - DNA, 120 bp, Artificial Sequence
  ENSG00000205356_5 (sequence is synthesized)
acagggtggcactgccctcgccgcactgggagtgggagtctgactggtacgtggatgagaattttggaggtgaacccactgagaaaggggggtggacgtacgccatcgactttcccgcca

SEQ ID NO: 747982 - DNA, 120 bp, Artificial Sequence
  ENSG00000205356_6 (sequence is synthesized)
cctacacgaaagacaagaagtggaattcttgtgtgcggcgccggaagtggatccggtacaggagatacaagtcccgggacatctgggccaagatcccctcgaaggatgaccccaaggagc

SEQ ID NO: 747983 - DNA, 120 bp, Artificial Sequence
  ENSG00000205356_7 (sequence is synthesized)
tgcccgaccccttcaacgacctctctgtagggggctgggagatcacggaggagcctgtgggccgcctgtcagtgtgggctgtgtctctgcagggcaaggtgtggtacagagaggacgtca

SEQ ID NO: 747984 - DNA, 120 bp, Artificial Sequence
  ENSG00000205356_8 (sequence is synthesized)
gccactccaaccccgaagggtcctcctggtccctgctggacacccccggggaggtggttcagatcagctgtgggccccacgacctcctgtgggccacactctgggagggacaggccctgg

SEQ ID NO: 747985 - DNA, 120 bp, Artificial Sequence
  ENSG00000205356_9 (sequence is synthesized)
tccgggaaggaatcaacaggagcaatcccaaaggaagttcctggtccatcgtggagcctcctggatctgaaaacggggtcatgcacatctcggtgggagtcagcgtggtctgggctgtca

SEQ ID NO: 747986 - DNA, 120 bp, Artificial Sequence
  ENSG00000205356_10 (sequence is synthesized)
ccaaggactggaaggtgtggttccgaagaggcgtcaactctcacaatccctgcggcaccagttggattgagatggttggtgagatgacgatggtgaacgtgggaatgaacgaccaggtgt

SEQ ID NO: 747987 - DNA, 120 bp, Artificial Sequence
  ENSG00000205356_11 (sequence is synthesized)
ggggcattggctgtgaggaccgagccgtgtacttccggcagggtgtcacccccagcgagctcagtgggaagacctggaaagccatcatcgcggcccgagagtgtgaccggtcacactctg

SEQ ID NO: 747988 - DNA, 120 bp, Artificial Sequence
  ENSG00000205356_12 (sequence is synthesized)
gcagctcgtctagtctcctcagtgccggctgcttcttcggtgatgaggtgaggggtagtggcgagtctgcccccagcgacaccgatgcctcctcggaagtcgagagaccagggcctggcc

SEQ ID NO: 747989 - DNA, 120 bp, Artificial Sequence
  ENSG00000205356_13 (sequence is synthesized)
agattctccctgcagaacctctagacgattccaagaatgccacagggaactcagcctcaggcctgggggctggcaggaccgcagaagataccgtggaagatgcctgcccagccgagggca

SEQ ID NO: 747990 - DNA, 120 bp, Artificial Sequence
  ENSG00000205356_14 (sequence is synthesized)
gcagggaggccagacccaacacgcaccccggcccggcccccaccccggccgagctgccctggaccaatattgacctcaaggaggccaagaaagtgcccagccactcggccgctggcttcc

SEQ ID NO: 747991 - DNA, 120 bp, Artificial Sequence
  ENSG00000205356_15 (sequence is synthesized)
ccgagaccaccagcctctcctctctggggctcctcccactgggcttggaggagccgtatggggtggatgaccacccgctgtgggcctgggtgtcgggaggcggctgcgtggtggaggcat

SEQ ID NO: 747992 - DNA, 120 bp, Artificial Sequence
  ENSG00000205356_16 (sequence is synthesized)
gtgccatgcccagatggttcactgtccaggcgggcctgtcctcctcggtacacatgctgtccctgtccatcacgccggcccagaccgctgcctggaggaagcagatcttccagcagctca

SEQ ID NO: 747993 - DNA, 120 bp, Artificial Sequence
  ENSG00000205356_17 (sequence is synthesized)
cggaaaggaccaagcgggagctggagaacttcagacactacgagcaggccgtggagcagtcggtgtgggtgaagaccggggcgctgcagtggtggtgcgactggaagccccacaagtggg

SEQ ID NO: 747994 - DNA, 120 bp, Artificial Sequence
  ENSG00000205356_18 (sequence is synthesized)
tggacgtgcgcttggccctggagcagttcacggggcacgacggcgtccgggacagcatcctcttcatctactatgtggtccacgaggagaagaagtacatccacatattcctgaatgagg

SEQ ID NO: 747995 - DNA, 120 bp, Artificial Sequence
  ENSG00000205356_19 (sequence is synthesized)
tggtggcgctggtcccagtgctgaacgagaccaagcactcctttgccctgtacacccctgagcggacacggcagaggtggccggtgcgtctggctgctgccaccgagcaggacatgaatg

SEQ ID NO: 747996 - DNA, 120 bp, Artificial Sequence
  ENSG00000205356_20 (sequence is synthesized)
actggctcgccctgctcagcctgtcttgctgcgagagccggaaggtgcagggccgcccgtccccgcaggccatctggtccatcacctgcaagggggacatcttcgtgagcgagcccagcc

SEQ ID NO: 747997 - DNA, 120 bp, Artificial Sequence
  ENSG00000205356_21 (sequence is synthesized)
cagacctggaggcccacgagcaccccctgccctgcgaccagatgttttggcggcagatgggaggccacctgcggatggtggaggccaacagccggggcgtggtgtggggcatcggctatg

SEQ ID NO: 747998 - DNA, 120 bp, Artificial Sequence
  ENSG00000205356_22 (sequence is synthesized)
accacacggcctgggtatacacaggcggctatggaggcggctgcttccaaggcctggccagcagcaccagtaacatctacacgcagtcagacgtgaagtgtgttcacatctatgagaacc

SEQ ID NO: 747999 - DNA, 120 bp, Artificial Sequence
  ENSG00000205356_23 (sequence is synthesized)
agcgctggaaccccgtcacaggctacaccagcaggggtctgcccacggaccggtacatgtggagcgatgcctcggggctgcaggagtgcacgaaggctggcacgaagcccccgtccctgc

SEQ ID NO: 748000 - DNA, 120 bp, Artificial Sequence
  ENSG00000205356_24 (sequence is synthesized)
agtgggcctgggtttccgactggttcgtggatttcagcgttccggggggcacggaccaggaggggtggcagtatgccagcgacttccctgcctcataccatgggtccaaaacgatgaagg

SEQ ID NO: 748001 - DNA, 120 bp, Artificial Sequence
  ENSG00000205356_25 (sequence is synthesized)
attttgtgaggaggaggtgctgggccagaaaatgcaagctggtgaccagtgggccctggctggaggtgccccccatcgccctcagggacgtgtccatcatcccggagagcccgggtgccg

SEQ ID NO: 748002 - DNA, 120 bp, Artificial Sequence
  ENSG00000205356_26 (sequence is synthesized)
aggggagtgggcacagcatcgccctctgggccgtcagcgacaagggggatgtgctgtgccgcctgggcgtgtcggagctcaaccctgcgggctcctcctggctgcacgttggcaccgacc

SEQ ID NO: 748003 - DNA, 120 bp, Artificial Sequence
  ENSG00000205356_27 (sequence is synthesized)
gccttctaccggggatccgtgtacccctcgcagccagccggtgactgctggtaccacatcccgtccccaccgagacagaggctgaagcaggtgtccgcggggcagacgtcggtgtatgcc

SEQ ID NO: 748004 - DNA, 120 bp, Artificial Sequence
  ENSG00000205356_28 (sequence is synthesized)
ctggatgagaatggaaacctgtggtatcgccaagggatcacgcccagctacccgcagggctccagctgggagcacgtgtccaacaacgtgtgccgagtgtccgtggggcccctggaccag

SEQ ID NO: 748005 - DNA, 120 bp, Artificial Sequence
  ENSG00000205356_29 (sequence is synthesized)
gtctgggtgatcgccaacaaagtgcagggcagccacagcctgagccgggggacagtgtgtcatcgcaccggcgtgcagcctcacgagcccaagggccacggctgggactacggcatcggg

SEQ ID NO: 748006 - DNA, 120 bp, Artificial Sequence
  ENSG00000205356_30 (sequence is synthesized)
ggaggctgggaccatatctctgtccgggccaatgccaccagggccccccggagctcgtcccaggagcaggagccgagtgccccaccagaggcccatggccccgtctgctgctgaggcccc

SEQ ID NO: 748007 - DNA, 120 bp, Artificial Sequence
  ENSG00000205356_31 (sequence is synthesized)
cccacacacctacatgcagggacggtgcccagtttgggggatcaaggctgagccattcttgtgctggagtgtgcaccgtgggagcaatgtggcccaggtggactcaggagggaacctggc

SEQ ID NO: 748008 - DNA, 120 bp, Artificial Sequence
  ENSG00000205356_32 (sequence is synthesized)
cccaaggctgcggccacttcagaggcactggctgagacggccctgaaatgtgaagctccgcggacactcccacacgtgtccccgtctgcgaggagtcccggggtgtggggcatggggtgg

SEQ ID NO: 748009 - DNA, 120 bp, Artificial Sequence
  ENSG00000205356_33 (sequence is synthesized)
ggctgcacctcccagaggcccctcccacccttcccttcccctctcccttctgcctttccaggactagaaccgggaacctggagccctccgggaacgccggccctggggcagcagagccag

SEQ ID NO: 748010 - DNA, 120 bp, Artificial Sequence
  ENSG00000205356_34 (sequence is synthesized)
gatggagccctcctgagctggcatctcagacagcacccgggcccgccacccctcaccaagagagatggccatggggctcagggcctctttaccatgtgcagtgaccatttctcagagcag

SEQ ID NO: 748011 - DNA, 78 bp, Artificial Sequence
  ENSG00000205356_35 (sequence is synthesized)
gggcctctttaccatgtgcagtgaccatttctcagagcaggacttgcaaagaggctttaatttcaaaagtgaaggaag

SEQ ID NO: 748012 - DNA, 120 bp, Artificial Sequence
  ENSG00000205356_36 (sequence is synthesized)
agcagattggaaataacactggagtggatgggatgtcctcttccctgagggggccggggtaccagacgggaggctgggagaggatgagaggctgccccatggctggaggcagtgtccgtg

SEQ ID NO: 748013 - DNA, 120 bp, Artificial Sequence
  ENSG00000205356_37 (sequence is synthesized)
tgtgcagtcaccatcatcaacccccattcggccccttccccagatgcgctggtgacaggggcttcttggatgtcaaatcatgttgtaggagggtgcagactgcgggcttctgtggggagc

SEQ ID NO: 748014 - DNA, 120 bp, Artificial Sequence
  ENSG00000205356_38 (sequence is synthesized)
agtactactgtgtctgtcggcagtggccatgggaccctcagcccgtcctgtacatggagcagggtgcacagtcaccctccatcctgtggcgagaggctggcccggcccggccaggcgagg

SEQ ID NO: 748015 - DNA, 120 bp, Artificial Sequence
  ENSG00000205356_39 (sequence is synthesized)
cagaaggtgtcggccaagtggccccgaccccatcccgcagtctctcagctgctttttattacctctgtgccccatttgggagtttgcttcctccacctggacactttgcccgggaggtca

SEQ ID NO: 748016 - DNA, 120 bp, Artificial Sequence
  ENSG00000205356_40 (sequence is synthesized)
tcagagcccaaccccaggctctgctcggttggagaggggatgacttcaccaccacctgaccttcctagggtcctggtctcactgtcagctgggggtccgttgtgtgtatttgtacagttt

SEQ ID NO: 748017 - DNA, 120 bp, Artificial Sequence
  ENSG00000205356_41 (sequence is synthesized)
tgctgtatggggtttgtcacccaaaagctgatgctgagaaaggcctccctggggcccctcccgcgggcatctgagagacctggtgttccagtgtttctggaaatgggtcccagtgccgcc

SEQ ID NO: 748018 - DNA, 120 bp, Artificial Sequence
  ENSG00000205356_42 (sequence is synthesized)
ggctgtgaagctctcagatcaatcacgggaagggcctggcggtggtggccacctggaaccaccctgtcctgtctgtttacatttcactatcaggttttctctgggcattacgatttgttc

SEQ ID NO: 748019 - DNA, 120 bp, Artificial Sequence
  ENSG00000205356_43 (sequence is synthesized)
ccctacaacagtgacctgtgcattctgctgtggcctgctgtgtctgcaggtggctctcagcgaggtacggggagggcgtcaccctgcagaacggcagagtgacgcgtcctctcgctgctg

SEQ ID NO: 748020 - DNA, 120 bp, Artificial Sequence
  ENSG00000205356_44 (sequence is synthesized)
agcaccagctgtttacctgccctgcatcacttcctcggatactttactcaataagcatttcccctggagtgtccgtgccctggtgttttttatcgatacgttgattaaaacgcgtggttc

SEQ ID NO: 748021 - DNA, 120 bp, Artificial Sequence
  ENSG00000205356_45 (sequence is synthesized)
cccgtgtgcctgaagcagacattgctgtgaaatcttttatttttgttttatgacacagcatcaatttcatgaatactttgaaagggccattagaaaaaataagagccaatttgggtcatt

SEQ ID NO: 748022 - DNA, 120 bp, Artificial Sequence
  ENSG00000205356_46 (sequence is synthesized)
tgagaaacattttcagcacaattacagtgggggcacgggccgttcggctccagctgggttttcccagatgcaacaatcgcggttctggcttctccactggtggggatggggatcgcgcct

SEQ ID NO: 748023 - DNA, 120 bp, Artificial Sequence
  ENSG00000205356_47 (sequence is synthesized)
tcggagctctcagggcgcctgtctgtcgggggctgggtgcgtccacagccccgggggatggcgcgtggcgtagcccaggaacggcatgtgggtgggtctctgacctgcttgtgcagggac

SEQ ID NO: 748024 - DNA, 120 bp, Artificial Sequence
  ENSG00000205356_48 (sequence is synthesized)
ttgagggacctcatcccgatggccgaggcaggggctccccacgggataaaaggatccggcctggccttggggtccaagaggagggccaagggagtggacctggcccctgtcccctctcct

SEQ ID NO: 748025 - DNA, 120 bp, Artificial Sequence
  ENSG00000205356_49 (sequence is synthesized)
cctcgaaacactggacaccctgaagcgagactatggctgctgaggatcctgtgtgatgtggccgcggggcgtcccctctggcctcaggggaagaaggactgggcggctcggcccaggtca

SEQ ID NO: 748026 - DNA, 120 bp, Artificial Sequence
  ENSG00000205356_50 (sequence is synthesized)
ccctctaggaagcagaggaggtgcaggtgccagttcagggcagaaagaaagagccactgaggccattgtcctgaaggcggtgacccccaggcactcctgctgccccccaggaagccctgg

SEQ ID NO: 748027 - DNA, 120 bp, Artificial Sequence
  ENSG00000205356_51 (sequence is synthesized)
gctgcgctggacaccgggccgagtctccgtcttctggaccgaggctcttctgggctttcaggctcagctcgtcggtccattcagcaagttcaggggcagactgagccctgctctggccat

SEQ ID NO: 748028 - DNA, 120 bp, Artificial Sequence
  ENSG00000205356_52 (sequence is synthesized)
agacagattcttcttgaaatgagacctttgctctggagtccggcagggctcagaccctgctcaggacaagcccctaggaccagtggacactgcctgtgggctcctcctggctgcacgttg

SEQ ID NO: 748029 - DNA, 120 bp, Artificial Sequence
  ENSG00000205356_53 (sequence is synthesized)
agagtggcgccccagctgcagcggcggccagggccgtgggaaagaatggggcgatgaagggctgggcacgccgccttccccaccacccccaggctgtttgctcgcggggagggaggaagg

SEQ ID NO: 748030 - DNA, 120 bp, Artificial Sequence
  ENSG00000205356_54 (sequence is synthesized)
cgaaggcggaaacagacactgaaacggggcgttccaggccgcagcccacatgccccacgggggagcagctaaccccagagaactgtggtcccctgataccccaggaacgcatatctgagc

SEQ ID NO: 748031 - DNA, 120 bp, Artificial Sequence
  ENSG00000205356_55 (sequence is synthesized)
agggggtacagaaatgggggtgccccaggagagggagtacagaaatgggggtgcccaggggagggggtacagaaatgggggtgcctggggagggggtaaagaaatgaagtaccaagggag

SEQ ID NO: 748032 - DNA, 120 bp, Artificial Sequence
  ENSG00000205356_56 (sequence is synthesized)
ggggcagggctgggggtgccaggagagagggtgtccgagggccagggtcccagggtgaagcacagtgggggtcaccctccagaggcctcctgccctgggtgacagccctgccgggcgcct

SEQ ID NO: 748033 - DNA, 120 bp, Artificial Sequence
  ENSG00000205356_57 (sequence is synthesized)
acaggctagcgaagttgcctggtgcaggtgacgcccccattccagcctttggactggagccataggagaagcggatcgcgggatcctggttgttttcgagaatcacgcagcaaggggcct

SEQ ID NO: 748034 - DNA, 120 bp, Artificial Sequence
  ENSG00000205356_58 (sequence is synthesized)
ggtgtgggaggaggccggggtcagggggctcgggcaggcctgctgtcctccctggacgcctcactgtgctcagcagctctgagccaggcattgcgctcctctgtggcctccagagaccag

SEQ ID NO: 748035 - DNA, 120 bp, Artificial Sequence
  ENSG00000205356_59 (sequence is synthesized)
cccgaggctgtcaggacctggaagcacggtggccagtgccccttcccctgtctgcagcccctcccctgtgctagcggtggtggctgctttccaggctgaattactgggggagagcaactc

SEQ ID NO: 748036 - DNA, 120 bp, Artificial Sequence
  ENSG00000205356_60 (sequence is synthesized)
atccaacagggcaaagggtggaaggaggcttaacagagagcgtagcttttgagctagaaagggctgatttggtggaggggagcgccgtggcttcctgcccagctgcgggcaggacagtgc

SEQ ID NO: 748037 - DNA, 120 bp, Artificial Sequence
  ENSG00000205356_61 (sequence is synthesized)
ttgaaatgagacctttgctctggagtccggcagggctcagaccctgctcaggacaagcccctaggaccagtggacactgcctgtggtccgagtgggtccctgtgccctggggcagttggc

SEQ ID NO: 748038 - DNA, 120 bp, Artificial Sequence
  ENSG00000205356_62 (sequence is synthesized)
ccaggaatgaggcgggtggggcgggggtgacagaggtgggccaaggggacactgcggctctttggcacccagtccttggtggtcagcaccccggtgaggtgcacacgcccacgggggcgc

SEQ ID NO: 748039 - DNA, 120 bp, Artificial Sequence
  ENSG00000205356_63 (sequence is synthesized)
tttccctgctcgcaggaggatgagatgcgcccaggatttcaacaagcaccgagatcaggccgggtggggctgtgtgactcccggctgtcccccagccacctatgctgcccacgcgctagg

SEQ ID NO: 748040 - DNA, 120 bp, Artificial Sequence
  ENSG00000205356_64 (sequence is synthesized)
cccatttctgctggtcctggaggtggggccctgggggtgggggccctggtgacctcagcgcccctccttgctatccccagggctcctcctggctgcacgttggcaccgaccagcccttcg

SEQ ID NO: 748041 - DNA, 120 bp, Artificial Sequence
  ENSG00000205356_65 (sequence is synthesized)
ggcagatggctttgagggtggcgagcagaccttcttcgtggaaagactgaaggttcaactcaaattcatcttgtagaaattcttggtgaattcgaggctgctgatttggaagattttcct

SEQ ID NO: 748042 - DNA, 120 bp, Artificial Sequence
  ENSG00000205356_66 (sequence is synthesized)
ccatccctctaaccctacaaaacaaacaagtcccaggatccctgaatcatggggcttcatgttccaacccccctttcaagagtcctctgacccagtgaccctgtgtaagttgcctgatca

SEQ ID NO: 748043 - DNA, 120 bp, Artificial Sequence
  ENSG00000205356_67 (sequence is synthesized)
gctcacagccagaaagtggcccatgaggagctagggggagcctcttggcagaggcagaaagaaagtgtggctgaccaaggatggttaccggatgtcaactgtagctaggaagtgacgaca

SEQ ID NO: 748044 - DNA, 85 bp, Artificial Sequence
  ENSG00000205356_68 (sequence is synthesized)
ccccatcaggcgagagccactgcgcccggcctccacttctgccttttccaaattgacgaaataaacacttagtaatagaaacaac

SEQ ID NO: 748045 - DNA, 120 bp, Artificial Sequence
  ENSG00000205356_69 (sequence is synthesized)
ccacttcgagctgagggcctcgaaggttccagagaggcagcggccagggtccaccagcatgtccagcctctcattttcagggtgttaggcctggccagcagcaccagtaacatctacacg

SEQ ID NO: 748046 - DNA, 120 bp, Artificial Sequence
  ENSG00000205358_0 (sequence is synthesized)
accacgccctccacgtgttccactgcctcttctcttctcgcttgggaactccagtctcacctcggcttgcaatggaccccaactgctcctgcgaggctggtggctcctgcgcctgcgccg

SEQ ID NO: 748047 - DNA, 120 bp, Artificial Sequence
  ENSG00000205358_1 (sequence is synthesized)
caagaagagctgctgctcctgttgccccctgggctgtgccaagtgtgcccagggctgcatctgcaaaggggcgtcagagaagtgcagctgctgtgcctgatgtcgggacagccctgctgt

SEQ ID NO: 748048 - DNA, 120 bp, Artificial Sequence
  ENSG00000205358_2 (sequence is synthesized)
cagatgaaaacagaatgacacgtaaaatccaggattttttttttctacaactccgactcatttgctacattcctttttttctgtgaaatatgtgaataataattaaacacttagacttga

SEQ ID NO: 748049 - DNA, 120 bp, Artificial Sequence
  ENSG00000205358_3 (sequence is synthesized)
tgcacctcctgcaagaagagtgagtgcggggccatctccaggaatctggggctgtggctaaggttgggagggaacccaaggctggccctgagtgcctgcttcctttgtccccctaggccg

SEQ ID NO: 748050 - DNA, 120 bp, Artificial Sequence
  ENSG00000205358_4 (sequence is synthesized)
gaaaaagctgtgccatcctgaactaaggatcctctggggctggagtctgagcttgagccaggcctgctgttgggagagggagctccctggtcaagtctgctgtgacttctctctcccttt

SEQ ID NO: 748051 - DNA, 120 bp, Artificial Sequence
  ENSG00000205359_0 (sequence is synthesized)
gcttgggcggcaagagccccttgtggccaccgagtcctccgacgccctcgccaggctggcctttgggttggcccaggcaggacgggcagccgagagcactcgggccgcgtcgccaggagc

SEQ ID NO: 748052 - DNA, 120 bp, Artificial Sequence
  ENSG00000205359_1 (sequence is synthesized)
cgcccagggtgagccatgttcgtaggcgtcgcccggcactctgggagccaggatgaagtctcaaggggagtagagccgctggaggccgcgcgggcccagcctgctaaggacaggagggcc

SEQ ID NO: 748053 - DNA, 120 bp, Artificial Sequence
  ENSG00000205359_2 (sequence is synthesized)
aagggaaccccgaagtcctcgaagcccgggaaaaaacaccggtatctgagactacttccagaggccttgataaggttcggcggtttccgaaaaaggaaaaaagccaagtcctcagtttcc

SEQ ID NO: 748054 - DNA, 120 bp, Artificial Sequence
  ENSG00000205359_3 (sequence is synthesized)
aagaagccgggagaagtggatgacagtttggagcagccctgtggtttgggctgcttagtcagcacctgctgtgagtgttgcaataacattcgctgcttcatgattttctactgcatcctg

SEQ ID NO: 748055 - DNA, 120 bp, Artificial Sequence
  ENSG00000205359_4 (sequence is synthesized)
ctcatatgtcaaggtgtggtgtttggtcttatagatgtcagcattggcgattttcagaaggaatatcaactgaaaaccattgagaagttggcattggaaaagagttacgatatttcatct

SEQ ID NO: 748056 - DNA, 120 bp, Artificial Sequence
  ENSG00000205359_5 (sequence is synthesized)
ggcctggtagcaatatttatagcattctatggagacagaaaaaaagtaatatggtttgtagcttcctcctttttaataggacttggatcacttttatgtgcttttccatccattaatgaa

SEQ ID NO: 748057 - DNA, 120 bp, Artificial Sequence
  ENSG00000205359_6 (sequence is synthesized)
gaaaataaacaaagtaaggtaggaattgaagatatttgcgaagaaataaaggttgtcagtggttgccagagcagtggtatatcattccaatcaaaatacctgtctttcttcatccttggg

SEQ ID NO: 748058 - DNA, 120 bp, Artificial Sequence
  ENSG00000205359_7 (sequence is synthesized)
cagactgtgcagggaatagcaggaatgcctctttatatccttggaataacctttattgatgagaatgttgctacacactcagctggtatctatttaggtattgcagaatgtacatcaatg

SEQ ID NO: 748059 - DNA, 120 bp, Artificial Sequence
  ENSG00000205359_8 (sequence is synthesized)
attggatatgctctgggttatgtgctaggagcaccactagttaaagtccctgagaatactacttctgcaacaaacactacagtcaataatggtagtccagaatggctatggacttggtgg

SEQ ID NO: 748060 - DNA, 120 bp, Artificial Sequence
  ENSG00000205359_9 (sequence is synthesized)
attaattttctttttgccgctgtcgttgcatggtgtacattaataccattgtcatgctttccaaacaatatgccaggttcaacacggataaaagctaggaaacgtaaacagcttcatttt

SEQ ID NO: 748061 - DNA, 120 bp, Artificial Sequence
  ENSG00000205359_10 (sequence is synthesized)
atatcaaggatttatgtgctgctctttggattctgatgaagaatccagtgctcatatgcctagctctgtcaaaagctacagaatatttagttattattggagcttctgaatttttgccta

SEQ ID NO: 748062 - DNA, 120 bp, Artificial Sequence
  ENSG00000205359_11 (sequence is synthesized)
tatatttagaaaatcagtttatattaacacccactgtggcaactacacttgcaggacttgttttaattccaggaggtgcacttggccagcttctgggaggtgtcattgtttccacattag

SEQ ID NO: 748063 - DNA, 120 bp, Artificial Sequence
  ENSG00000205359_12 (sequence is synthesized)
aaatgtcttgtaaagcccttatgagatttataatggttacatctgtgatatcacttatactgcttgtgtttattatttttgtacgctgtaatccagtgcaatttgctgggatcaatgaag

SEQ ID NO: 748064 - DNA, 120 bp, Artificial Sequence
  ENSG00000205359_13 (sequence is synthesized)
attatgatggaacagggaagttgggaaacctcacggctccttgcaatgaaaaatgtagatgctcatcttcaatttattcttctatatgtggaagagatgatattgaatatttttctccct

SEQ ID NO: 748065 - DNA, 120 bp, Artificial Sequence
  ENSG00000205359_14 (sequence is synthesized)
gctttgcagggtgtacatattctaaagcacaaaaccaaaaaaagatgtactacaattgttcttgcattaaagaaggattaataactgcagatgcagaaggtgattttattgatgccagac

SEQ ID NO: 748066 - DNA, 120 bp, Artificial Sequence
  ENSG00000205359_15 (sequence is synthesized)
ccgggaaatgtgatgcaaagtgctataagttacctttgttcattgcttttatcttttctacacttatattttctggtttttctggtgtaccaatcgtcttggccatgacgcgggttgtac

SEQ ID NO: 748067 - DNA, 120 bp, Artificial Sequence
  ENSG00000205359_16 (sequence is synthesized)
ctgacaaactgcgttctctggccttgggtgtaagctatgtgattttgagaatatttgggactattcctggaccatcaatctttaaaatgtcaggagaaacttcttgtattttacgggatg

SEQ ID NO: 748068 - DNA, 120 bp, Artificial Sequence
  ENSG00000205359_17 (sequence is synthesized)
ttaataaatgtggacacacaggacgttgttggatatataacaagacaaaaatggctttcttattggtaggaatatgttttctttgcaaactatgcactatcatcttcactactattgcat

SEQ ID NO: 748069 - DNA, 120 bp, Artificial Sequence
  ENSG00000205359_18 (sequence is synthesized)
ttttcatatacaaacgtcgtctaaatgagaacactgacttcccagatgtaactgtgaagaatccaaaagttaagaaaaaagaagaaactgacttgtaactggatcatcattgtattctcc

SEQ ID NO: 748070 - DNA, 120 bp, Artificial Sequence
  ENSG00000205359_19 (sequence is synthesized)
aagatttgtttctgtgcccaactttcagaagaggaaaatcacacattatgtttacataagtagcaaaaatatatttatggtgatctgcattttcataataaagtgtcctattgtgaaaca

SEQ ID NO: 748071 - DNA, 120 bp, Artificial Sequence
  ENSG00000205359_20 (sequence is synthesized)
cactcagctggtatctatttaggtattgcagaatgtacatcaatgattggatatgctctgggttatgtgctaggagcaccactagttaaagtccctgagaatactacttctgcaacaaag

SEQ ID NO: 748072 - DNA, 120 bp, Artificial Sequence
  ENSG00000205359_21 (sequence is synthesized)
aaatcagtttatattaacacccactgtggcaactacacttgcaggtagatttaccttcttattgtcatttcaaaaattttgcactgtcttattgtatgtacttatgaaatacttgaaata

SEQ ID NO: 748073 - DNA, 120 bp, Artificial Sequence
  ENSG00000205359_22 (sequence is synthesized)
caggatatggagaaatggggagttgtagtcctttaacaggccagcttaaactctgtcaattggctaaagattcttagtacaattgatgcaccagaaaaaaaaaatgattagccttgaatc

SEQ ID NO: 748074 - DNA, 120 bp, Artificial Sequence
  ENSG00000205359_23 (sequence is synthesized)
ctaaatgagaacactgacttcccagatgtaactgtgaagaatccaaaagttaagaaaaaagaagaaactgacttgtaactggatcatcattgtcaggattgcagatcatttgaggatcag

SEQ ID NO: 748075 - DNA, 120 bp, Artificial Sequence
  ENSG00000205362_0 (sequence is synthesized)
accaagccttccacgtgcgccttatagcctctcaacttcttgcttgggatctccaacctcaccgcggctcgaaatggaccccaactgctcctgcgccactggtggctcctgcacctgcac

SEQ ID NO: 748076 - DNA, 120 bp, Artificial Sequence
  ENSG00000205362_1 (sequence is synthesized)
ctgcaagaagagctgctgctcctgctgccccatgagctgtgccaagtgtgcccagggctgcatctgcaaaggggcatcagagaagtgcagctgctgtgcctgatgtccggacagccctgc

SEQ ID NO: 748077 - DNA, 120 bp, Artificial Sequence
  ENSG00000205362_2 (sequence is synthesized)
tcgaagatatagaaagagtgacctgcacaaacttggaattttttttccatacaaccctgacccatttactgtattttttttaatgaaatatgtgaatgataataaaagttgctgacttaa

SEQ ID NO: 748078 - DNA, 120 bp, Artificial Sequence
  ENSG00000205363_0 (sequence is synthesized)
ctgtgttcaagctcaggcagagatcagctctgcacacccacaggcacttcaagacctggaggccactcctgggacccaaggtccctccccctcctctcctgtgtcctcaccttgaccccc

SEQ ID NO: 748079 - DNA, 120 bp, Artificial Sequence
  ENSG00000205363_1 (sequence is synthesized)
tctgctagactctgtctccctctgggtgtcccactctccacccagaggcagaggaggctgggtggcagggggcaggggctggttgagggccgcccagggccagggtgggctggggggccg

SEQ ID NO: 748080 - DNA, 120 bp, Artificial Sequence
  ENSG00000205363_2 (sequence is synthesized)
ttaaaatgtggagctctgcccagccgaggggggctccgtggaggcagacgcagtgtgtgcccagctggggggagtatgggcaggcctgcggccacgtggtaaacgatgaacattcggggc

SEQ ID NO: 748081 - DNA, 120 bp, Artificial Sequence
  ENSG00000205363_3 (sequence is synthesized)
gccccggacctcgggcagcccagtgacgaccccagcagtggtggtgagcgggagcggattcgacagcgcatgaagatggtcatcgggcagcttgagggcatccttcgcgagctcaaggag

SEQ ID NO: 748082 - DNA, 120 bp, Artificial Sequence
  ENSG00000205363_4 (sequence is synthesized)
gtggccaaggagctgagggaggtggtgagccagatcgataagctaacctcggacttcgactttgaactggagccggacgactggaccacggccactgtgagcagcacctctagcagtgac

SEQ ID NO: 748083 - DNA, 120 bp, Artificial Sequence
  ENSG00000205363_5 (sequence is synthesized)
ttgacctgggccacctggacttcatgacagccgatatcctctcagacagctgggagttctgctccttcctggacgtctctaccccctcggactccgtggatggtcccgagtcgactcggc

SEQ ID NO: 748084 - DNA, 120 bp, Artificial Sequence
  ENSG00000205363_6 (sequence is synthesized)
caggggctggccctgactaccgcctcatgaatggtggcacgcccatccccaatgggccacgagtggagaccccagactcctccagtgaggaggcctttggtgctggccccacggtgaaga

SEQ ID NO: 748085 - DNA, 120 bp, Artificial Sequence
  ENSG00000205363_7 (sequence is synthesized)
gccagctgccccagcggaccccagggacacgggagagggtgcggttcagtgacaaagtgctctaccatgctctgtgctgtgacgatgaggagggggacggtgagcaggaggtggaggagg

SEQ ID NO: 748086 - DNA, 120 bp, Artificial Sequence
  ENSG00000205363_8 (sequence is synthesized)
aagaagtgggcttgccccctgagcctgcccatacagaggcccatgcaggcccccacaagccctccccagccccctacaagtcacggcgctctccactgaccagccgccactcaggctcta

SEQ ID NO: 748087 - DNA, 120 bp, Artificial Sequence
  ENSG00000205363_9 (sequence is synthesized)
ccttggcccctgaacagactcgaagggtcacgaggaacagcagcacccagacagtgtcagacaagagcacgcagacggttctgccctacacagccactagacagaaagccagggggaaaa

SEQ ID NO: 748088 - DNA, 89 bp, Artificial Sequence
  ENSG00000205363_10 (sequence is synthesized)
ctgccctacacagccactagacagaaagccagggggaaaaactaggggccggggagggggccgggggcggtgggcacatagagctataa

SEQ ID NO: 748089 - DNA, 80 bp, Artificial Sequence
  ENSG00000205363_11 (sequence is synthesized)
gagccgtgggagcggtctcgcccagggccgaccgcggggctgggctgagcagaccctcgcggccgctccggacgccgcgg

SEQ ID NO: 748090 - DNA, 120 bp, Artificial Sequence
  ENSG00000205363_12 (sequence is synthesized)
cccgggcgcccggcggtgccagctcactccgggcggggtagggcagggcagaccccagcggaacacggacccggccgatctggactggacagagcgaatcccggacggtgcagagcccgg

SEQ ID NO: 748091 - DNA, 120 bp, Artificial Sequence
  ENSG00000205363_13 (sequence is synthesized)
ggaatgccgggcgtgggctgaggggatcccggcgccctcccagccctccgactttggctcacgcgctgggacctgcccggcgtctcctcggcctccccgcgccccggtcacctgtggcct

SEQ ID NO: 748092 - DNA, 120 bp, Artificial Sequence
  ENSG00000205363_14 (sequence is synthesized)
cggagccccaaatctgccggaccctcgctcattcccgaccccgagcctggagaggcttgagaaagatttttcctgcccccttccctggagcgcggaggccccgccccctcccaccgccca

SEQ ID NO: 748093 - DNA, 120 bp, Artificial Sequence
  ENSG00000205363_15 (sequence is synthesized)
gatgtctccggtcacggctcggaggacctccctgaggcccggggccgaagggtccagagagagaagcccgccctagggagccttgggggccccccaactccgtcttggggcttggccccc

SEQ ID NO: 748094 - DNA, 120 bp, Artificial Sequence
  ENSG00000205363_16 (sequence is synthesized)
gacgctgcttggagggaaggccggtgcccccaccctcgggggctgccctcttccaatccagctccctccccagagctgcccatatccggagccccttccacatctggaagaccctggcca

SEQ ID NO: 748095 - DNA, 120 bp, Artificial Sequence
  ENSG00000205363_17 (sequence is synthesized)
ccatccctctgcaggtgtcagttgcatccagagacctctgcctttgcaactgcctaggagttgtgaggggatccctgctgccttcccccatcccaagggcatctcttacccttagtccct

SEQ ID NO: 748096 - DNA, 120 bp, Artificial Sequence
  ENSG00000205363_18 (sequence is synthesized)
ccaggaggtgtgggcaggactgcccttcctccgttctcattgcggggctcctgaagggggtatctgaaagtatgtaaaactgatgggaggtctgatcctccttttgctagcccctgaact

SEQ ID NO: 748097 - DNA, 120 bp, Artificial Sequence
  ENSG00000205363_19 (sequence is synthesized)
ctgtggtggagtctggctgatggccagggccatgtcctagaggggactcccctgcaggaggcgggctctaaagggagtggtgtccctttaggccagggttcacagtcggggtggtctgga

SEQ ID NO: 748098 - DNA, 120 bp, Artificial Sequence
  ENSG00000205363_20 (sequence is synthesized)
gactgcaggactcagggcctgggggtggcatcagtctggccaggccctgcgtcacttgcacccaccatccttctactccaaggcagacttactcggctatacacagtcctgcctcacccc

SEQ ID NO: 748099 - DNA, 120 bp, Artificial Sequence
  ENSG00000205363_21 (sequence is synthesized)
cttccatcttagggttgcctgggacataggggaatggcaagctgctcccatggcgcaggcctccgtgctgggatgctgggcatccacagagcctgaaggatcgcctgggctgggcagggg

SEQ ID NO: 748100 - DNA, 120 bp, Artificial Sequence
  ENSG00000205363_22 (sequence is synthesized)
tttgattggagggtctggaccacccccaatcctttcagctcccattctcagcctgattctgagaccaagaccaaaacctcagggcaaagcctcagccagtcctggcgtggccctaagcag

SEQ ID NO: 748101 - DNA, 120 bp, Artificial Sequence
  ENSG00000205363_23 (sequence is synthesized)
acctgagatctgtgcgaggaagtaggcagccacttccatggggctaaaaattagggccgtagacaggctcctggccaccttcaccaggtgggcagccttggaaaggagcccagtggtccc

SEQ ID NO: 748102 - DNA, 120 bp, Artificial Sequence
  ENSG00000205363_24 (sequence is synthesized)
cactccgtcccgatgtctccacacccagcccctgagcccatctcagcaggtcctgaacaaagatgaggttacagcctagaggtaccagggcttcatctggggcatggccagcacagggac

SEQ ID NO: 748103 - DNA, 120 bp, Artificial Sequence
  ENSG00000205363_25 (sequence is synthesized)
agcagctgaatatccttgggataataatgacaattatattgctcacatttattgagcaggtctctatgctacttctatgccgaatactttttatagcagcatctcatttaatcaccacaa

SEQ ID NO: 748104 - DNA, 67 bp, Artificial Sequence
  ENSG00000205363_26 (sequence is synthesized)
cacttcagcctccagagcaactgggactacaggcatgcgtcaccacgcctagctaatttttgtattt

SEQ ID NO: 748105 - DNA, 90 bp, Artificial Sequence
  ENSG00000205363_27 (sequence is synthesized)
gggtttcaccatgttgggcaggctggtctgaactcctgacctcaagtgattcgtcagcctcagcctcccaaagtcccacctatccccatt

SEQ ID NO: 748106 - DNA, 120 bp, Artificial Sequence
  ENSG00000205363_28 (sequence is synthesized)
attacaggcgtgagccactgtgcccccacctatccccatttttcaaatgagatgactgaggttcaaagtagttcagtacctgccccaaagccacaaagcctgtgctactctgcccccaag

SEQ ID NO: 748107 - DNA, 120 bp, Artificial Sequence
  ENSG00000205363_29 (sequence is synthesized)
aattagtgatttccaggctgtgcctggctctgctagctagcagctgtgtgaccttggcaagtccgtttgcctctctgagcctatctacctcctctgtataatgggtctggtagtcttcac

SEQ ID NO: 748108 - DNA, 120 bp, Artificial Sequence
  ENSG00000205363_30 (sequence is synthesized)
ctacctcaccagctgctgtggagctccgacgagatggtgactgtgaaagcacttgacaaactgaaggcactggacatgccttgtggtcagtgtggcctcaacccagatgtccagtgattt

SEQ ID NO: 748109 - DNA, 120 bp, Artificial Sequence
  ENSG00000205363_31 (sequence is synthesized)
ccagggcacaggggctttgagtgggatggccaaagaagacacctccatccaactgggagccacccctgggtcacaaacactccattgcttggtccctcgcagtagctcgaggtcagaagt

SEQ ID NO: 748110 - DNA, 120 bp, Artificial Sequence
  ENSG00000205363_32 (sequence is synthesized)
tgactgcagcttgattcacagcccctcgctcagagcagggaggtgggactggcagcacagcaaagacatcgctccttgggggcctccctgttgcatatttcaattaaggcaggtttacag

SEQ ID NO: 748111 - DNA, 120 bp, Artificial Sequence
  ENSG00000205363_33 (sequence is synthesized)
ccccccagcgtctgtccggagggggcctgagcagcaggcctggcagcacccactgctcctgcctgaagaggtgctatccagccccggctgtggacatacagtgagattgtacaggccggt

SEQ ID NO: 748112 - DNA, 120 bp, Artificial Sequence
  ENSG00000205363_34 (sequence is synthesized)
ctggagcagctgcaggggatatgatctggataagactgagcagacctaggaggctctgcaatgtagagcttattcctcaagctcatggtgagattggagccctaaagagttagccagggt

SEQ ID NO: 748113 - DNA, 120 bp, Artificial Sequence
  ENSG00000205363_35 (sequence is synthesized)
gcagccaccagtgtggaaatccagggatggcgcaggccatggccagctcttcccagctcacgtctgagaaccaagggtctgagcccctctatcagccccaggaaatcctcagccatttgg

SEQ ID NO: 748114 - DNA, 120 bp, Artificial Sequence
  ENSG00000205363_36 (sequence is synthesized)
tgctgatcagcgatagggctctggttcacaggatgagtgccaggggctcctctggggagaggggccagctgcattccgccccaccctgagagtgagaagggggcagtccccgaccaggaa

SEQ ID NO: 748115 - DNA, 120 bp, Artificial Sequence
  ENSG00000205363_37 (sequence is synthesized)
tgggcctacctggtgctaagaatggacataacagttctccctctgaggcttgcatttcatctgtcatggcaagagcactttcaggctcacagtttctcatcttttcaacagtcagggaaa

SEQ ID NO: 748116 - DNA, 120 bp, Artificial Sequence
  ENSG00000205363_38 (sequence is synthesized)
agaaacctatggaatagttcgcatttcacagaggaagaaactgagggccagagctaggggtctctgacacagccatgggatcctgcaccccacactggctctatgtgactctgtagtagt

SEQ ID NO: 748117 - DNA, 120 bp, Artificial Sequence
  ENSG00000205363_39 (sequence is synthesized)
ggctaatgtccatcagtcgccccctgctcccctgcctggccatttgcccccaaatagggcagtggtgggagtatatcctggaggagggggaagtgggatataggtagtacttggctgact

SEQ ID NO: 748118 - DNA, 120 bp, Artificial Sequence
  ENSG00000205363_40 (sequence is synthesized)
ggaagtgggatataggtagtacttggctgacttcacaattttgctacacccagtctggacctcctgacagtggagtgggatccctgtggcttcctttttcttgtttttgttttgttttgt

SEQ ID NO: 748119 - DNA, 78 bp, Artificial Sequence
  ENSG00000205363_41 (sequence is synthesized)
tctcagccacctgagtagcttggactacaggcacccgccaccaccccagctactaagttttgtatttttagtagagat

SEQ ID NO: 748120 - DNA, 120 bp, Artificial Sequence
  ENSG00000205363_42 (sequence is synthesized)
tttagtagagatggggtttcaccacatggccaggatggtcttgatctcttgactttgtgatctgcccaccttggcctcgcaaagcactgggattacaggcgtgggccactacgcctggcc

SEQ ID NO: 748121 - DNA, 120 bp, Artificial Sequence
  ENSG00000205363_43 (sequence is synthesized)
gggattacaggcgtgggccactacgcctggccaatttttttttgttttgtttttttgagatggagtcttgctccatctcccaggctggagagcaatggcgtgatctcagctcactgcaac

SEQ ID NO: 748122 - DNA, 120 bp, Artificial Sequence
  ENSG00000205363_44 (sequence is synthesized)
ggattacaggcacccaccatcatgcccgggttaatttttgtattttcttagagatggagtttcactatgttggccagcctcatctttgaactcctgacctccgatgatccacctgccttg

SEQ ID NO: 748123 - DNA, 75 bp, Artificial Sequence
  ENSG00000205363_45 (sequence is synthesized)
agtggcttcttcagacttgaaacacaaaatgtggccagctagggatagagagaattctgactttcaacactgctg

SEQ ID NO: 748124 - DNA, 120 bp, Artificial Sequence
  ENSG00000205363_46 (sequence is synthesized)
cagctagggatagagagaattctgactttcaacactgctgagtcatggcatgggctgcttctgggtagtgagctccctgtccttggggtagacacagccatcccttgggtccttcctcca

SEQ ID NO: 748125 - DNA, 120 bp, Artificial Sequence
  ENSG00000205363_47 (sequence is synthesized)
gaccttccaggtacagccctttgctgctcttccctgcctccaaacctttgccagtttttgagtttctttacccaggatgttccatcagatctctctgcttccgggaagtcctattccact

SEQ ID NO: 748126 - DNA, 120 bp, Artificial Sequence
  ENSG00000205363_48 (sequence is synthesized)
gaccacctactgtgtgcacaggcttgtgctgagtggtgctgtggaggggcagaagggagctggaacctggtgatggagagaagtcatagcatgatgaataactcatgtccactgggcacg

SEQ ID NO: 748127 - DNA, 120 bp, Artificial Sequence
  ENSG00000205363_49 (sequence is synthesized)
tgctaggcactgggcattgttctaagtgtatgtcttatctcatttactcctcacagcacgtatgagataagcaatcttacttatgtctaagtagcttccagatgaggaaactgaggctct

SEQ ID NO: 748128 - DNA, 120 bp, Artificial Sequence
  ENSG00000205363_50 (sequence is synthesized)
gggaagtgaagtaacttgcctaaggaaacacaggatgggctatggaaccaggattcaaccacaaacacagtgacttagcatcatctactgcaaacatccactgcagttaaaatgcctgga

SEQ ID NO: 748129 - DNA, 120 bp, Artificial Sequence
  ENSG00000205363_51 (sequence is synthesized)
gtgggtggcctggtcactggaggtgagggtcggggctgggtcgtctgagagccaggcgggtcttcggggtgaggggagtgttggggtgaggaaacatgtgaacatgcctcagtctttgga

SEQ ID NO: 748130 - DNA, 120 bp, Artificial Sequence
  ENSG00000205363_52 (sequence is synthesized)
gaacttagttactgttaacctgaatgtcaccacccctgactcggagactggcaccaaatggattatgggttcaataaatgtttgttgaatgaataaacgagccccatttgcagaagggta

SEQ ID NO: 748131 - DNA, 120 bp, Artificial Sequence
  ENSG00000205364_0 (sequence is synthesized)
accacgccgtccgggtgggcctagcagtcgctccatttatcgcttgagatctccagccttaccgcggctcgaaatggaccccaactgctcctgcaccactggtgtctcctgcgcctgcac

SEQ ID NO: 748132 - DNA, 120 bp, Artificial Sequence
  ENSG00000205364_1 (sequence is synthesized)
gcaagaagagctgctgctcctgctgccccgtgggctgtgccaagtgtgcccacggctgtgtctgcaaagggacgttggagaactgcagctgctgtgcctgatgtgggaacagctcttctc

SEQ ID NO: 748133 - DNA, 120 bp, Artificial Sequence
  ENSG00000205364_2 (sequence is synthesized)
ccagatgttaatagaacaagctgcacaacctggattttttttcaatacgatactgagccatttgctgcatttctttttatattaaatatgtgagtgacaataaaacaattttgacttgaa

SEQ ID NO: 748134 - DNA, 120 bp, Artificial Sequence
  ENSG00000205364_3 (sequence is synthesized)
aagaagagtgagtgcggggccatctccaggaatctggggctgtggctgagattgggagggaacccaaggctggccctgagtgcatccttctggggaactgggctttctttgccctcattg

SEQ ID NO: 748135 - DNA, 120 bp, Artificial Sequence
  ENSG00000205403_0 (sequence is synthesized)
tctttaatgggaaggccattttttggtttcagttacggtaaatctctctggatttcagccaaattctttcagagttcaaaagtacaaagctctttaggaggtttgttcttttgaaacatt

SEQ ID NO: 748136 - DNA, 120 bp, Artificial Sequence
  ENSG00000205403_1 (sequence is synthesized)
ttttcagaggttaaaaattaaatttcaaaagaatacctggagtggaaaagagttctcagcagagacaaagaccccgaacacctccaacatgaagcttcttcatgttttcctgttatttct

SEQ ID NO: 748137 - DNA, 120 bp, Artificial Sequence
  ENSG00000205403_2 (sequence is synthesized)
gtgcttccacttaaggttttgcaaggtcacttatacatctcaagaggatctggtggagaaaaagtgcttagcaaaaaaatatactcacctctcctgcgataaagtcttctgccagccatg

SEQ ID NO: 748138 - DNA, 120 bp, Artificial Sequence
  ENSG00000205403_3 (sequence is synthesized)
gcagagatgcattgagggcacctgtgtttgtaaactaccgtatcagtgcccaaagaatggcactgcagtgtgtgcaactaacaggagaagcttcccaacatactgtcaacaaaagagttt

SEQ ID NO: 748139 - DNA, 120 bp, Artificial Sequence
  ENSG00000205403_4 (sequence is synthesized)
ggaatgtcttcatccagggacaaagtttttaaataacggaacatgcacagccgaaggaaagtttagtgtttccttgaagcatggaaatacagattcagagggaatagttgaagtaaaact

SEQ ID NO: 748140 - DNA, 120 bp, Artificial Sequence
  ENSG00000205403_5 (sequence is synthesized)
tgtggaccaagataagacaatgttcatatgcaaaagcagctggagcatgagggaagccaacgtggcctgccttgaccttgggtttcaacaaggtgctgatactcaaagaaggtttaagtt

SEQ ID NO: 748141 - DNA, 120 bp, Artificial Sequence
  ENSG00000205403_6 (sequence is synthesized)
gtctgatctctctataaattccactgaatgtctacatgtgcattgccgaggattagagaccagtttggctgaatgtacttttactaagagaagaactatgggttaccaggatttcgctga

SEQ ID NO: 748142 - DNA, 120 bp, Artificial Sequence
  ENSG00000205403_7 (sequence is synthesized)
tgtggtttgttatacacagaaagcagattctccaatggatgacttctttcagtgtgtgaatgggaaatacatttctcagatgaaagcctgtgatggtatcaatgattgtggagaccaaag

SEQ ID NO: 748143 - DNA, 120 bp, Artificial Sequence
  ENSG00000205403_8 (sequence is synthesized)
ttggctgtgcaggctttgcatctgtgactcaagaagaaacagaaattttgactgctgacatggatgcagaaagaagacggataaaatcattattacctaaactatcttgtggagttaaaa

SEQ ID NO: 748144 - DNA, 120 bp, Artificial Sequence
  ENSG00000205403_9 (sequence is synthesized)
acagaatgcacattcgaaggaaacgaattgtgggaggaaagcgagcacaactgggagacctcccatggcaggtggcaattaaggatgccagtggaatcacctgtgggggaatttatattg

SEQ ID NO: 748145 - DNA, 120 bp, Artificial Sequence
  ENSG00000205403_10 (sequence is synthesized)
gtggctgttggattctgactgctgcacattgtctcagagccagtaaaactcatcgttaccaaatatggacaacagtagtagactggatacaccccgaccttaaacgtatagtaattgaat

SEQ ID NO: 748146 - DNA, 120 bp, Artificial Sequence
  ENSG00000205403_11 (sequence is synthesized)
acgtggatagaattattttccatgaaaactacaatgcaggcacttaccaaaatgacatcgctttgattgaaatgaaaaaagacggaaacaaaaaagattgtgagctgcctcgttccatcc

SEQ ID NO: 748147 - DNA, 120 bp, Artificial Sequence
  ENSG00000205403_12 (sequence is synthesized)
ctgcctgtgtcccctggtctccttacctattccaacctaatgatacatgcatcgtttctggctggggacgagaaaaagataacgaaagagtcttttcacttcagtggggtgaagttaaac

SEQ ID NO: 748148 - DNA, 120 bp, Artificial Sequence
  ENSG00000205403_13 (sequence is synthesized)
taataagcaactgctctaagttttacggaaatcgtttctatgaaaaagaaatggaatgtgcaggtacatatgatggttccatcgatgcctgtaaaggggactctggaggccccttagtct

SEQ ID NO: 748149 - DNA, 120 bp, Artificial Sequence
  ENSG00000205403_14 (sequence is synthesized)
gtatggatgccaacaatgtgacttatgtctggggtgttgtgagttggggggaaaactgtggaaaaccagagttcccaggtgtttacaccaaagtggccaattattttgactggattagct

SEQ ID NO: 748150 - DNA, 120 bp, Artificial Sequence
  ENSG00000205403_15 (sequence is synthesized)
accatgtaggaaggccttttatttctcagtacaatgtataaaattgtgatctctctcttcattctattctttttctctcaagagttccatttaatggaaataaaacggtataattaataa

SEQ ID NO: 748151 - DNA, 120 bp, Artificial Sequence
  ENSG00000205403_16 (sequence is synthesized)
ttctctaggggggaaaaatgaagcaaatctcactggatatttttaaaggtctccacagagtttatgccatattggaattttgttgtataattctcaaataaatattttggtgaagcatac

SEQ ID NO: 748152 - DNA, 120 bp, Artificial Sequence
  ENSG00000205403_17 (sequence is synthesized)
atttacctgatgcatctttgctcaattttttatttttaacctattttccccatttacttctagagagaagcaaggaacaattgaatgtcctagaagaatagttcactgtaaatcatcatc

SEQ ID NO: 748153 - DNA, 120 bp, Artificial Sequence
  ENSG00000205403_18 (sequence is synthesized)
tctaggataatacgtcactgaggaagtctcttctcacaaattctgagcaaattgagaagtccaagcaatggcacacagatgccaaaatatcaccttaatactgtcaaggctgaagtgaag

SEQ ID NO: 748154 - DNA, 120 bp, Artificial Sequence
  ENSG00000205403_19 (sequence is synthesized)
atgtagcttactgtaaaagcaaaattgacctacaggaattaaactaacctaaccttccaagtcttaggcaataattgaaccaaccagctaaagtttacagcatggggcaggcagagagat

SEQ ID NO: 748155 - DNA, 61 bp, Artificial Sequence
  ENSG00000205403_20 (sequence is synthesized)
caaccagctaaagtttacagcatggggcaggcagagagattcccaaaaggaaaagatggaa

SEQ ID NO: 748156 - DNA, 75 bp, Artificial Sequence
  ENSG00000205403_21 (sequence is synthesized)
agttttagttaatctttacaaaacccagtgaggtagttatattcccttttatagatgaaggtactgaggctcaga

SEQ ID NO: 748157 - DNA, 120 bp, Artificial Sequence
  ENSG00000205403_22 (sequence is synthesized)
gttatattcccttttatagatgaaggtactgaggctcagagtttcggtatcttgcccaagctgtaactcctatatagagaatgagaggacattactctagtttcttacctgctacagtag

SEQ ID NO: 748158 - DNA, 120 bp, Artificial Sequence
  ENSG00000205403_23 (sequence is synthesized)
attgtgggaggaaagcgagcacaactggggggaaaaatgaagcaaatctcactggatatttttaaaggtctccacagagtttatgccatattggaattttgttgtataattctcaaataa

SEQ ID NO: 748159 - DNA, 120 bp, Artificial Sequence
  ENSG00000205403_24 (sequence is synthesized)
cccaccacatcagcccccatgctttgggccctaattccctccatttggccttctggctgtagcactctcaaactctttcagtcccttccctgtagctcaggtttcttcctctaatactat

SEQ ID NO: 748160 - DNA, 120 bp, Artificial Sequence
  ENSG00000205403_25 (sequence is synthesized)
gacctagatttatatcccagcttttactaattgctagtcatgtgaccttgagcaggtttcttcatttgtaaaattgaagatcatagataaggcatctgagatgcagagcagttacataat

SEQ ID NO: 748161 - DNA, 120 bp, Artificial Sequence
  ENSG00000205403_26 (sequence is synthesized)
ttgtccaaagtcttacagacaagaggtggtacacccaggatcaaaactaaattacttttaaatacaaattcaagttatctcatctcaaatgagatgagatttacttccatttggaagtaa

SEQ ID NO: 748162 - DNA, 120 bp, Artificial Sequence
  ENSG00000205403_27 (sequence is synthesized)
atttttccctccatggaaatcacagcgcatttcttacgccacggactcctttgataacatggttaagctaattctactgcccaatacaacaatagcagctcctacttttggaggtgatac

SEQ ID NO: 748163 - DNA, 120 bp, Artificial Sequence
  ENSG00000205403_28 (sequence is synthesized)
tgattacctaacctttctgtgtattaatttccatatgtgtaacctaagaaaattaactatgtgcatcatagcattgttatgaggatgatatgcattcatgtttacccaacacttggaacc

SEQ ID NO: 748164 - DNA, 120 bp, Artificial Sequence
  ENSG00000205403_29 (sequence is synthesized)
agagacaaagaccccgaacacctccaacatgaagcttcttcatgttttcctgttatttctgtgcttccacttaaggttttgcaaggtttcagtagaagatttgagcaggcagaagaaata

SEQ ID NO: 748165 - DNA, 120 bp, Artificial Sequence
  ENSG00000205403_30 (sequence is synthesized)
gtcaacaaacttgaagatcagtccatttaattaattatccagtatgagaagcagaaagaaaaaaggatgacaaggaatgaacagagcctatgagactcgtgtgacaccataaagcatacc

SEQ ID NO: 748166 - DNA, 120 bp, Artificial Sequence
  ENSG00000205403_31 (sequence is synthesized)
aaaatatatataatggaaccccagaaggagaaaataagaaagtaagagagaatatatgaagaaataatggctgaaaaatttccacatttgatcaaatgcatggctgtccacattcaaaaa

SEQ ID NO: 748167 - DNA, 120 bp, Artificial Sequence
  ENSG00000205403_32 (sequence is synthesized)
gctcaatgcaatccaagaaggataaacacaaaaaggttcaaaccaagacacattataatcaaattgtcaaaaccaaggatgaagaaagtcttgaaaacaacatagtcatgagattccgta

SEQ ID NO: 748168 - DNA, 120 bp, Artificial Sequence
  ENSG00000205403_33 (sequence is synthesized)
tgttgaaagtaaaaaactgtcaaccaagaattctgtatctggcaaaactatccttcacaaatgaaggagaaatgaagaaattcacagataaatagaggctgaaggagttagctactaata

SEQ ID NO: 748169 - DNA, 120 bp, Artificial Sequence
  ENSG00000205403_34 (sequence is synthesized)
gacctgtcctacaggaaatgcactacaagtagctgggtgtggtggctcattgcctataatcccagcactttaggggaatgaggcaggaggactgcttaagcccaggagttcaagactatc

SEQ ID NO: 748170 - DNA, 120 bp, Artificial Sequence
  ENSG00000205403_35 (sequence is synthesized)
tgcttaagcccaggagttcaagactatcctggaaaacacagcaggagcccatctctctaaaaaataaaattagctaggtgtagtggcatgtatctgtagtctcagctactcgggaggctg

SEQ ID NO: 748171 - DNA, 120 bp, Artificial Sequence
  ENSG00000205403_36 (sequence is synthesized)
ttcaaaactgcagtgagctctgactacaccacttcattcaaacctgggcaacagagtgagatcatctctaaaataaaattaaattaaaataaagaaatacagtgcaagtcagagaaccct

SEQ ID NO: 748172 - DNA, 120 bp, Artificial Sequence
  ENSG00000205403_37 (sequence is synthesized)
gcatactgcagtgaaaggacatttggcagttacttgaagtaatatgaagaaataaagaactccagtaaaggtcacttatacatctcaagaggatctggtggagaaaaagtgcttagcaaa

SEQ ID NO: 748173 - DNA, 120 bp, Artificial Sequence
  ENSG00000205409_0 (sequence is synthesized)
atgcctatagctaacgacacccagttccatacttcttcattcctactgctgggtatcccagggctagaagatgtgcacatctggattggattcccttttttctctgtgtatcttattgca

SEQ ID NO: 748174 - DNA, 120 bp, Artificial Sequence
  ENSG00000205409_1 (sequence is synthesized)
ctcctgggaaatgctgctatcttctttgtgatccaaactgagcagagtctccatgagcccatgtactactgcctggccatgttggattccattgacctgagcttgtctacggccaccatt

SEQ ID NO: 748175 - DNA, 120 bp, Artificial Sequence
  ENSG00000205409_2 (sequence is synthesized)
cccaaaatgctgggcatcttctggttcaatatcaaggaaatatcttttggaggctacctttctcagatgttcttcatccatttcttcactgtcatggagagcatcgtattggtggccatg

SEQ ID NO: 748176 - DNA, 120 bp, Artificial Sequence
  ENSG00000205409_3 (sequence is synthesized)
gcctttgaccgctacattgccatttgcaaacctctttggtacaccatgatcctcaccagcaaaatcatcagcctcattgcaggcattgctgtcctgaggagcttgtacatggtcattcca

SEQ ID NO: 748177 - DNA, 120 bp, Artificial Sequence
  ENSG00000205409_4 (sequence is synthesized)
tcctcttaaggttgcccttctgtggacatcgtatcatccctcatacttactgtgagcacatgggcattgcccgtctggcctgtgccagcatcaaagtcaacattatgtttggtcttggca

SEQ ID NO: 748178 - DNA, 120 bp, Artificial Sequence
  ENSG00000205409_5 (sequence is synthesized)
gtatttctctcttgttattggatgtgctccttattattctctcccatatcaggatcctctatgctgtcttctgcctgccctcctgggaagctcgactcaaagctctcaacacctgtggct

SEQ ID NO: 748179 - DNA, 120 bp, Artificial Sequence
  ENSG00000205409_6 (sequence is synthesized)
ctcacattggtgttatcttagccttttctacaccagcatttttctctttctttacacactgctttggccatgatattccccaatatatccacattttcttggctaatctatatgtggttg

SEQ ID NO: 748180 - DNA, 120 bp, Artificial Sequence
  ENSG00000205409_7 (sequence is synthesized)
ttcctcccaccctcaatcctgtaatctatggggtcagaaccaaacatattagggagacagtgctgaggattttcttcaagacagatcactaaccagttggagtttggagggtctctctta

SEQ ID NO: 748181 - DNA, 120 bp, Artificial Sequence
  ENSG00000205413_0 (sequence is synthesized)
ggaaaatacttttctctagcatcgtaggaggaagaaaacaaacacatcagatattttcagcactaaaagagatggttttccccacatatatgtaaaagaaatttgcaagactactggatt

SEQ ID NO: 748182 - DNA, 120 bp, Artificial Sequence
  ENSG00000205413_1 (sequence is synthesized)
ttgatctcatggttgcagtgggtgaataggtggccttttgtgatctcctacatcaccctggaagtgagacttcttcggtttcttctagagtcagtttggtatcagaatggcaaagcaact

SEQ ID NO: 748183 - DNA, 120 bp, Artificial Sequence
  ENSG00000205413_2 (sequence is synthesized)
taaccttccagaaaatacagatgattggacaaaagaggatgtaaatcagtggttagaaagtcataagattgaccaaaaacacagggaaattttgactgaacaagacgtgaatggagcagt

SEQ ID NO: 748184 - DNA, 120 bp, Artificial Sequence
  ENSG00000205413_3 (sequence is synthesized)
cttgaagtggttaaaaaaagaacatcttgttgatatgggcatcacacatggaccagctattcaaatagaagaactattcaaagaattgcggaaaacagccattgaagattcgattcagac

SEQ ID NO: 748185 - DNA, 120 bp, Artificial Sequence
  ENSG00000205413_4 (sequence is synthesized)
atctaagatgggaaagcccagtaaaaatgctcctaaagaccaaactgtgtctcaaaaggaacgtagagaaacttcaaagcaaaaacaaaagggtaaagagaacccagatatggctaatcc

SEQ ID NO: 748186 - DNA, 120 bp, Artificial Sequence
  ENSG00000205413_5 (sequence is synthesized)
gtctgcaatgagtacaactgctaaaggttctaagtcactaaaagttgagctcatagaagataaaatagattatacaaaggaaaggcaaccatccatagacctgacatgtgtatcatatcc

SEQ ID NO: 748187 - DNA, 120 bp, Artificial Sequence
  ENSG00000205413_6 (sequence is synthesized)
atttgatgaattcagtaatccatatcgttacaagttggattttagtctacagcctgaaacaggaccaggcaatctcattgatccgatacatgaattcaaagccttcacaaatacagcaac

SEQ ID NO: 748188 - DNA, 120 bp, Artificial Sequence
  ENSG00000205413_7 (sequence is synthesized)
agccacagaagaggatgtcaagatgaaatttagcaatgaggttttccgatttgcttcagcttgtatgaattcacgtaccaatggcactattcattttggagtcaaagacaaaccccatgg

SEQ ID NO: 748189 - DNA, 120 bp, Artificial Sequence
  ENSG00000205413_8 (sequence is synthesized)
gaaaattgttggcatcaaagtcaccaatgataccaaggaagccctcattaaccatttcaatctgatgataaacaagtattttgaagaccatcaagtccaacaagcaaagaagtgcattcg

SEQ ID NO: 748190 - DNA, 120 bp, Artificial Sequence
  ENSG00000205413_9 (sequence is synthesized)
agagccaagatttgtggaagttttactgccaaatagtactctatctgacagatttgttattgaagtggacattattccacagttctctgaatgccaatatgattatttccagattaaaat

SEQ ID NO: 748191 - DNA, 120 bp, Artificial Sequence
  ENSG00000205413_10 (sequence is synthesized)
gcaaaattacaacaacaaaatatgggaacaaagtaaaaaattctcactatttgtgcgagatgggaccagctctaaggacattacgaaaaataaagttgatttcagagcatttaaagcaga

SEQ ID NO: 748192 - DNA, 120 bp, Artificial Sequence
  ENSG00000205413_11 (sequence is synthesized)
ttttaaaacactggcagagtccagaaaagcagcagaagaaaaattcagagcaaaaacaaataaaaaagaaagagagggaccaaagttggttaaattattgacaggaaatcaagatttgtt

SEQ ID NO: 748193 - DNA, 120 bp, Artificial Sequence
  ENSG00000205413_12 (sequence is synthesized)
agataattcatactatgaacagtacattcttgtaacaaataaatgccacccagatcaaacaaaacacttagatttcctgaaggaaattaaatggtttgctgtattggagtttgatcctga

SEQ ID NO: 748194 - DNA, 120 bp, Artificial Sequence
  ENSG00000205413_13 (sequence is synthesized)
gtctaacatcaatggagtggtcaaagcttacaaagaaagccgagtagcaaaccttcactttccaagtgtatatgtagaacagaaaaccacaccaaatgagacgatttctactctaaatct

SEQ ID NO: 748195 - DNA, 120 bp, Artificial Sequence
  ENSG00000205413_14 (sequence is synthesized)
ttaccatcaacccagctggattttctgcaatggcaggttagaccttgacagtgaaaaatataaaccctttgatccaagttcctggcaaagagaaagagcttctgatgtcaggaaactgat

SEQ ID NO: 748196 - DNA, 120 bp, Artificial Sequence
  ENSG00000205413_15 (sequence is synthesized)
ttcatttcttacacatgaagacataatgccaagagggaagtttttggtggtatttctattactgtcctctgtggatgacccaagagatcccctcattgagactttctgtgctttctacca

SEQ ID NO: 748197 - DNA, 120 bp, Artificial Sequence
  ENSG00000205413_16 (sequence is synthesized)
ggatctcaaaggaatggaaaatatactgtgtatttgtgtgcacccacacatatttcagggatggaaagatctacttgaagcaagattaataaaacaccaagatgaaatttcaagccaatg

SEQ ID NO: 748198 - DNA, 120 bp, Artificial Sequence
  ENSG00000205413_17 (sequence is synthesized)
tatttctgctttaagccttgaagagatcaatggcactattcttaaactaaaatctgtgactcaatcttcaaaaaggcttttgccatctattggtttatcgactgtccttctgaaaaagga

SEQ ID NO: 748199 - DNA, 120 bp, Artificial Sequence
  ENSG00000205413_18 (sequence is synthesized)
agaagatatcatgactgctctggaaattatctgtgaaaatgaatgtgagggtacactgttagagaaggacaaaaataaattccttgaattcaaggcatcaaaagaggaagacttctatcg

SEQ ID NO: 748200 - DNA, 120 bp, Artificial Sequence
  ENSG00000205413_19 (sequence is synthesized)
aggtggcaaagtgtcatggtggaacttctacttctcttctgaaagttattcttcaccttttgtcaaaagggataaatatgaaagacttgaagcaatgattcaaaactgtgcagattcttc

SEQ ID NO: 748201 - DNA, 120 bp, Artificial Sequence
  ENSG00000205413_20 (sequence is synthesized)
taaaccaacaagtaccaaaattattcatctgtatcatcatccaggctgtgggggaactaccttggctatgcacattctctgggaactaaggaagaaattcagatgtgctgtgctgaaaaa

SEQ ID NO: 748202 - DNA, 120 bp, Artificial Sequence
  ENSG00000205413_21 (sequence is synthesized)
caagacagtggatttttctgaaattggagaacaggtaaccagtttaatcacctatggggcaatgaaccgtcaggaatacgtacctgtactactccttgttgatgattttgaagaacaaga

SEQ ID NO: 748203 - DNA, 120 bp, Artificial Sequence
  ENSG00000205413_22 (sequence is synthesized)
taatgtctatcttctgcagtactctattcaaacagctatagctaaaaagtacattcgatatgaaaaacctctggtgattatcctaaattgtatgagatcacaaaatcctgaaaaaagtgc

SEQ ID NO: 748204 - DNA, 120 bp, Artificial Sequence
  ENSG00000205413_23 (sequence is synthesized)
aaggatcccagacagtattgccgtaatacagcaactctctcccaaagaacagagagcttttgagcttaaattgaaagaaatcaaagaacagcataaaaactttgaggatttttattcctt

SEQ ID NO: 748205 - DNA, 120 bp, Artificial Sequence
  ENSG00000205413_24 (sequence is synthesized)
tatgatcatgaaaaccaattttaataaagaatacatagaaaatgtggtccggaatatcctgaaagggcagaatattttcaccaaggaagcaaagctcttttcttttctggctcttcttaa

SEQ ID NO: 748206 - DNA, 120 bp, Artificial Sequence
  ENSG00000205413_25 (sequence is synthesized)
ttcatatgtgcctgataccaccatttcactatcacagtgtgaaaaattcttaggaattggaaacaagaaggctttctgggggacagaaaaatttgaagacaagatgggcacctactctac

SEQ ID NO: 748207 - DNA, 120 bp, Artificial Sequence
  ENSG00000205413_26 (sequence is synthesized)
aattctgataaaaacagaggtcatcgaatgtgggaactactgtggagtacgcatcattcactctttgattgcagagttctcactggaagaattgaagaaaagctatcacctgaataaaag

SEQ ID NO: 748208 - DNA, 120 bp, Artificial Sequence
  ENSG00000205413_27 (sequence is synthesized)
tcaaattatgttggatatgctaactgagaatttgttcttcgatactggtatgggaaaaagtaaatttttgcaagatatgcacacactcctactcacaagacaccgcgatgaacatgaagg

SEQ ID NO: 748209 - DNA, 120 bp, Artificial Sequence
  ENSG00000205413_28 (sequence is synthesized)
gtatccatcggttcaacccaaatgcattcatttgccaagcgttggcaagacatttctacattaaaaagaaggactttggcaatgctctaaactgggcaaaacaagcaaaaatcatagaac

SEQ ID NO: 748210 - DNA, 120 bp, Artificial Sequence
  ENSG00000205413_29 (sequence is synthesized)
ctgacaattcttatatctcagatacactgggtcaagtctacaaaagtaaaataagatggtggatagaggaaaacggaggaaacgggaacatttcagttgatgatctaattgctcttttgg

SEQ ID NO: 748211 - DNA, 120 bp, Artificial Sequence
  ENSG00000205413_30 (sequence is synthesized)
atttagcagaacatgcctcaagtgcattcaaagaatctcaacagcaaagtgaagatagagagtatgaagtgaaggaaagattgtatccgaagtcaaaaaggcggtatgatacttacaata

SEQ ID NO: 748212 - DNA, 120 bp, Artificial Sequence
  ENSG00000205413_31 (sequence is synthesized)
tagctggttatcaaggagagatagaagttgggctttacacaatccaaattctccagctcattcctttttttgataataaaaatgagctatctaaaagatatatggtcaattttgtatcag

SEQ ID NO: 748213 - DNA, 120 bp, Artificial Sequence
  ENSG00000205413_32 (sequence is synthesized)
gaagtagtgatattccaggggatccaaacaatgaatataaattagccctcaaaaactatattccttatttaactaaattgaaattttctttgaaaaagtcctttgatttttttgatgaat

SEQ ID NO: 748214 - DNA, 120 bp, Artificial Sequence
  ENSG00000205413_33 (sequence is synthesized)
actttgtcctgctaaaacccaggaacaatattaagcaaaatgaagaggccaaaactcggagaaaggtggctggatattttaagaaatatgtagatatattttgtctcttagaagaatcac

SEQ ID NO: 748215 - DNA, 120 bp, Artificial Sequence
  ENSG00000205413_34 (sequence is synthesized)
aaaacaacacaggtcttggatcaaagttcagtgagccacttcaagtagagagatgcaggagaaacctagtagctttaaaagcagacaagttttctgggctcttggaatatcttatcaaaa

SEQ ID NO: 748216 - DNA, 120 bp, Artificial Sequence
  ENSG00000205413_35 (sequence is synthesized)
gtcaagaggatgctataagcactatgaaatgtatagtgaacgaatatacttttctcttagaacaatgcactgtcaaaatccagtcaaaagaaaagctaaatttcatcttggccaacatta

SEQ ID NO: 748217 - DNA, 120 bp, Artificial Sequence
  ENSG00000205413_36 (sequence is synthesized)
ttctctcctgtatccaacctacctccagattagtaaagccagttgaaaaactaaaagatcagcttcgagaagtcttgcaaccaataggactgacttatcagttttcagaaccgtattttc

SEQ ID NO: 748218 - DNA, 120 bp, Artificial Sequence
  ENSG00000205413_37 (sequence is synthesized)
tagcttccctcttattctggccagaaaatcaacaactagatcaacattctgaacaaatgaaagagtatgctcaagcactaaaaaattctttcaaggggcaatataaacatatgcatcgta

SEQ ID NO: 748219 - DNA, 120 bp, Artificial Sequence
  ENSG00000205413_38 (sequence is synthesized)
caaagcaaccaattgcatatttctttcttggaaaaggtaaaagactggaaagacttgttcacaaaggaaaaattgaccagtgctttaagaagacaccagatattaattccttgtggcaga

SEQ ID NO: 748220 - DNA, 120 bp, Artificial Sequence
  ENSG00000205413_39 (sequence is synthesized)
gtggagatgtgtggaaggaggaaaaagtccaagaacttttgcttcgtttacaaggtcgagctgaaaacaattgtttatatatagaatatggaatcaatgaaaaaatcacaatacccatca

SEQ ID NO: 748221 - DNA, 120 bp, Artificial Sequence
  ENSG00000205413_40 (sequence is synthesized)
ctcccgcttttttaggtcaacttagaagtggcagaagcatagagaaggtgtctttttacctgggattttccattggaggcccacttgcttatgacattgaaattgtttaagagcctgata

SEQ ID NO: 748222 - DNA, 120 bp, Artificial Sequence
  ENSG00000205413_41 (sequence is synthesized)
ttcttcctccaagaatttgatctcagtacccatttaatttttttggactcaagatctatgctttaaaccggcaaggttatagatacagcctctagctcttcagatctgtacatgcagtat

SEQ ID NO: 748223 - DNA, 120 bp, Artificial Sequence
  ENSG00000205413_42 (sequence is synthesized)
ttaatttcctcttaaacatgttatgagttctacaaagacaatagtgaaaaaggaaggagtgagatatatgaaaagtagcaaatatgttccttggtttggttaacatcattgatgacaaaa

SEQ ID NO: 748224 - DNA, 120 bp, Artificial Sequence
  ENSG00000205413_43 (sequence is synthesized)
taataaggagctatgactggagtcaggagaagttagtgtaataagctggctacacagaaccccactacttaccaggcatggattgaagaagattgtctactcaaatggcatttagacatt

SEQ ID NO: 748225 - DNA, 120 bp, Artificial Sequence
  ENSG00000205413_44 (sequence is synthesized)
agaatgtctgggaaaatatttctcaaagacagcaaaaacctctcaaactgaggagcaacatttattcttactaagcagatcatcaatgtatcatgtgcttggcactcaaggatcttccaa

SEQ ID NO: 748226 - DNA, 120 bp, Artificial Sequence
  ENSG00000205413_45 (sequence is synthesized)
aacagaggaccaaccagtcttctgaaggtcatgcccacagaagtcatcagaccttaccaaagtaggttggagaattagattgccttttcatgcagtgagattcagttaagcaaaaatgaa

SEQ ID NO: 748227 - DNA, 120 bp, Artificial Sequence
  ENSG00000205413_46 (sequence is synthesized)
atttgtctctatagctaattagcttatcaactcccctccaaacaaacaattaaaaaaaaaacatacagacactcaaattccacaagctaatgaacaaaagggactcttgtgagaagacta

SEQ ID NO: 748228 - DNA, 120 bp, Artificial Sequence
  ENSG00000205413_47 (sequence is synthesized)
atgagtccctcatccagaagatgccaatgtactggcagattaacatacaacctatgttttgaacaaaaacaaccagcgatacgtaatcaaaatgtaattttcccctaataaaattatgga

SEQ ID NO: 748229 - DNA, 120 bp, Artificial Sequence
  ENSG00000205413_48 (sequence is synthesized)
tatgggcagtcatcaatggctgccaaaaccattaagtggaaagctgattaaaaaacaaaaatttctaatggatttatcaaactgtcccaaatcctgataaatattaacatcacagaggaa

SEQ ID NO: 748230 - DNA, 120 bp, Artificial Sequence
  ENSG00000205413_49 (sequence is synthesized)
gaccagacattatgggcctggaagtactataggagtgcacacatcacccgtgacatggtcttgccaaataattaaacctgaatttgatcaggtctctggatcttatttgcaattcaaaag

SEQ ID NO: 748231 - DNA, 120 bp, Artificial Sequence
  ENSG00000205413_50 (sequence is synthesized)
aaattttaaaaaaatcctactaacaccaccacaaatatgcaatcagcaatatccagaaaggggaaattcacaggacaaaaacctggttttcttttttggtttcttcaaccaaaaaagaaa

SEQ ID NO: 748232 - DNA, 120 bp, Artificial Sequence
  ENSG00000205413_51 (sequence is synthesized)
gaaattgcaaaggaccaaaaaaatgttggggaatctatacattataagggacttaacaactaaagggcaacatatagactttagatcctaatttgagcaaaatctaaaatcaattattag

SEQ ID NO: 748233 - DNA, 120 bp, Artificial Sequence
  ENSG00000205413_52 (sequence is synthesized)
gcaatcagaaaaatttgaacacagactagatatttgaggatattaaggtactatattattgaagattccatggttatgttttttaaagagttcatgccttttagagatacatactaaagt

SEQ ID NO: 748234 - DNA, 120 bp, Artificial Sequence
  ENSG00000205413_53 (sequence is synthesized)
atttgtaaataaatgacatgatctagaatcagtaattttgtgtttggggtgtgggggtggtgaaagggaagtagaaccgaaacaagattagtcctgagttaacaatggctgcaagctgga

SEQ ID NO: 748235 - DNA, 120 bp, Artificial Sequence
  ENSG00000205413_54 (sequence is synthesized)
tacatggaattcagcacacttttctccctcttactgattatgcttttgaaattttctcttgtaaaacatttagaaaacaaaaacaaaaaaaatgtgatttgtttctgtcttcaaaatctc

SEQ ID NO: 748236 - DNA, 120 bp, Artificial Sequence
  ENSG00000205413_55 (sequence is synthesized)
attagaattttttcactggaggaagattttcccttgcttctgcataaaattttaactccataacttataagctcactctttattgttactttctaattgacaaataaaaattgtatatta

SEQ ID NO: 748237 - DNA, 120 bp, Artificial Sequence
  ENSG00000205413_56 (sequence is synthesized)
gacagaagcagagaatacatagacttccgttaaaaccagaatgaggaaaatacttttctctagcatcgtaggaggaagaaaacaaacacatcagatattttcagcactaaaagagatggt

SEQ ID NO: 748238 - DNA, 120 bp, Artificial Sequence
  ENSG00000205420_0 (sequence is synthesized)
agtcctgcttctcttccctctctcctccagcctctcacactctcctcagctctctcatctcctggaaccatggccagcacatccaccaccatcaggagccacagcagcagccgccggggt

SEQ ID NO: 748239 - DNA, 120 bp, Artificial Sequence
  ENSG00000205420_1 (sequence is synthesized)
ttcagtgccaactcagccaggctccctggggtcagccgctctggcttcagcagcgtctccgtgtcccgctccaggggcagtggtggcctgggtggtgcatgtggaggagctggctttggc

SEQ ID NO: 748240 - DNA, 120 bp, Artificial Sequence
  ENSG00000205420_2 (sequence is synthesized)
agccgcagtctgtatggcctggggggctccaagaggatctccattggagggggcagctgtgccatcagtggcggctatggcagcagagccggaggcagctatggctttggtggcgccggg

SEQ ID NO: 748241 - DNA, 120 bp, Artificial Sequence
  ENSG00000205420_3 (sequence is synthesized)
agtggatttggtttcggtggtggagccggcattggctttggtctgggtggtggagccggccttgctggtggctttgggggccctggcttccctgtgtgcccccctggaggcatccaagag

SEQ ID NO: 748242 - DNA, 120 bp, Artificial Sequence
  ENSG00000205420_4 (sequence is synthesized)
tccaagaggtcaccgtcaaccagagtctcctgactcccctcaacctgcaaatcgatcccaccatccagcgggtgcgggctgaggagcgtgaacagatcaagaccctcaacaacaagtttg

SEQ ID NO: 748243 - DNA, 120 bp, Artificial Sequence
  ENSG00000205420_5 (sequence is synthesized)
atcgacaaggtgcggttcctggagcagcagaacaaggttctggaaacaaagtggaccctgctgcaggagcagggcaccaagactgtgaggcagaacctggagccgttgttcgagcagtac

SEQ ID NO: 748244 - DNA, 120 bp, Artificial Sequence
  ENSG00000205420_6 (sequence is synthesized)
atcaacaacctcaggaggcagctggacagcattgtcggggaacggggccgcctggactcagagctcagaggcatgcaggacctggtggaggacttcaagaacaaatatgaggatgaaatc

SEQ ID NO: 748245 - DNA, 120 bp, Artificial Sequence
  ENSG00000205420_7 (sequence is synthesized)
aacaagcgcacagcagcagagaatgaatttgtgactctgaagaaggatgtggatgctgcctacatgaacaaggttgaactgcaagccaaggcagacactctcacagacgagatcaacttc

SEQ ID NO: 748246 - DNA, 120 bp, Artificial Sequence
  ENSG00000205420_8 (sequence is synthesized)
ctgagagccttgtatgatgcagagctgtcccagatgcagacccacatctcagacacatctgtggtgctgtccatggacaacaaccgcaacctggacctggacagcatcatcgctgaggtc

SEQ ID NO: 748247 - DNA, 120 bp, Artificial Sequence
  ENSG00000205420_9 (sequence is synthesized)
gaagccgggctgaggctgagtcctggtaccagaccaagtacgaggagctgcaggtcacagcaggcagacatggggacgacctgcgcaacaccaagcaggagattgctgagatcaaccgca

SEQ ID NO: 748248 - DNA, 120 bp, Artificial Sequence
  ENSG00000205420_10 (sequence is synthesized)
tgatccagaggctgagatctgagatcgaccacgtcaagaagcagtgcgccaacctgcaggccgccattgctgatgctgagcagcgtggggagatggccctcaaggatgccaagaacaagc

SEQ ID NO: 748249 - DNA, 120 bp, Artificial Sequence
  ENSG00000205420_11 (sequence is synthesized)
tggaagggctggaggatgccctgcagaaggccaagcaggacctggcccggctgctgaaggagtaccaggagctgatgaatgtcaagctggccctggacgtggagatcgccacctaccgca

SEQ ID NO: 748250 - DNA, 120 bp, Artificial Sequence
  ENSG00000205420_12 (sequence is synthesized)
agctgctggagggtgaggagtgcaggctgaatggcgaaggcgttggacaagtcaacatctctgtggtgcagtccaccgtctccagtggctatggcggtgccagtggtgtcggcagtggct

SEQ ID NO: 748251 - DNA, 120 bp, Artificial Sequence
  ENSG00000205420_13 (sequence is synthesized)
taggcctgggtggaggaagcagctactcctatggcagtggtcttggcgttggaggtggcttcagttccagcagtggcagagccattgggggtggcctcagctctgttggaggcggcagtt

SEQ ID NO: 748252 - DNA, 120 bp, Artificial Sequence
  ENSG00000205420_14 (sequence is synthesized)
ccaccatcaagtacaccaccacctcctcctccagcaggaagagctataagcactaaagtgcgtctgctagctctcggtcccacagtcctcaggcccctctctggctgcagagccctctcc

SEQ ID NO: 748253 - DNA, 120 bp, Artificial Sequence
  ENSG00000205420_15 (sequence is synthesized)
tcaggttgcctttcctctcctggcctccagtctcccctgctgtcccaggtagagctgggtatggatgcttagtgccctcacttcttctctctctctctataccatctgagcacccattgc

SEQ ID NO: 748254 - DNA, 120 bp, Artificial Sequence
  ENSG00000205420_16 (sequence is synthesized)
tcaccatcagatcaacctctgattttacatcatgatgtaatcaccactggagcttcactgttactaaattattaatttcttgcctccagtgttctatctctgaggctgagcattataaga

SEQ ID NO: 748255 - DNA, 120 bp, Artificial Sequence
  ENSG00000205420_17 (sequence is synthesized)
aaatgacctctgctccttttcattgcagaaaattgccaggggcttatttcagaacaacttccacttactttccactggctctcaaactctctaacttataagtgttgtgaacccccaccc

SEQ ID NO: 748256 - DNA, 120 bp, Artificial Sequence
  ENSG00000205420_18 (sequence is synthesized)
aggcagtatccatgaaagcacaagtgactagtcctatgatgtacaaagcctgtatctctgtgatgatttctgtgctcttcgctgtttgcaattgctaaataaagcagatttataatacaa

SEQ ID NO: 748257 - DNA, 120 bp, Artificial Sequence
  ENSG00000205420_19 (sequence is synthesized)
ctgtttactctgatggggtctgcaaaggggagaagatgtatagggttgggtatctctgtaaatatcggaagtgaagttgatcttatgaccttctgttctgcaggagctgtcccagatgca

SEQ ID NO: 748258 - DNA, 120 bp, Artificial Sequence
  ENSG00000205420_20 (sequence is synthesized)
caacaagcgcacagcagcagagaatgaatttgtgactctgaagaaggtgagcagatgaagccgggggttcaaattcatttagaaggagagaagtggctttgtgtcctcgctcccctggga

SEQ ID NO: 748259 - DNA, 120 bp, Artificial Sequence
  ENSG00000205420_21 (sequence is synthesized)
gaggagaattggcatggagactagaagatgggtagattggaaaggtgagctcaggtaactccaggttgttggctctttccccaggatgtggatgctgcctacatgaacaaggttgaactg

SEQ ID NO: 748260 - DNA, 120 bp, Artificial Sequence
  ENSG00000205420_22 (sequence is synthesized)
taccagaggactgcagactttactggggacatcccctgacaggaagctggggtcctctcacaggacatgcactctgcactattagagtagacatttgcagaacttatgcccaagtcaaga

SEQ ID NO: 748261 - DNA, 120 bp, Artificial Sequence
  ENSG00000205420_23 (sequence is synthesized)
aggaaaaagaacccaatgcaggaggaaagctaccatagacaaggacatagtcatctctgcatttagcttcaccctgattgctggcttttagaaattggtacagaacatttctactcccta

SEQ ID NO: 748262 - DNA, 120 bp, Artificial Sequence
  ENSG00000205423_0 (sequence is synthesized)
ggggcagcggggagcggttagaggtgggagttggcgctgcgggccgggcgggggccgcggaagctgcgatgcggacagggcagcggcggtgacccgagctgccgcccgacatgaactcgc

SEQ ID NO: 748263 - DNA, 120 bp, Artificial Sequence
  ENSG00000205423_1 (sequence is synthesized)
tggagcaggcggaagatctcaaggcttttgagaggagacttactgaatatattcattgtttgcaacctgctactggacgctggagaatgcttcttatagtggtatctgtctgtacagcta

SEQ ID NO: 748264 - DNA, 120 bp, Artificial Sequence
  ENSG00000205423_2 (sequence is synthesized)
ctggtgcctggaactggttaatagaccctgagacacaaaaggtgtccttcttcacatcattatggaatcacccatttttcaccattagctgtatcactctaataggcttgttctttgctg

SEQ ID NO: 748265 - DNA, 120 bp, Artificial Sequence
  ENSG00000205423_3 (sequence is synthesized)
gaatacacaagagagtagttgcaccatcaattatagctgctcgatgtcgaacggtattagcagaatacaatatgtcttgtgatgatacaggaaaactaattttgaaacctaggcctcatg

SEQ ID NO: 748266 - DNA, 120 bp, Artificial Sequence
  ENSG00000205423_4 (sequence is synthesized)
ttcaatgacaatcttcactcattgttatgggacttaaaatagcctttcttcgaataagtgatacagcaaaaagccataaaggattccttttgcggttggatatgtaaaggtcatagcagc

SEQ ID NO: 748267 - DNA, 120 bp, Artificial Sequence
  ENSG00000205423_5 (sequence is synthesized)
aactgacaagaagtgtgcaatatttacctggattatcttgatgatggtgactcattatcagtgctttggtacttttgattacctgtgtttcagtattagtgtcactttagtacttcagat

SEQ ID NO: 748268 - DNA, 120 bp, Artificial Sequence
  ENSG00000205423_6 (sequence is synthesized)
cctgcaaatatttttgcagatgaagtatgtatgtatgttactaagttaaacttagaaacagaacctcattcagtttttataatgtatttttgcaaactactgtaaatagcaaatcaatgc

SEQ ID NO: 748269 - DNA, 120 bp, Artificial Sequence
  ENSG00000205423_7 (sequence is synthesized)
caatgttaaacaaagaggaaaacgttgtgtggactttgttctcttgcaccagtatttcaggaacatctgcttgccatccccacagctctttaaaactggctattatgtgtgcctttcatt

SEQ ID NO: 748270 - DNA, 120 bp, Artificial Sequence
  ENSG00000205423_8 (sequence is synthesized)
aaattatagatgttttgagagacactttttgttaaaccagatattgaactccagcaactattgtggttatatttttagttcattgttctcatttaatgctaaatatcctttatattgctt

SEQ ID NO: 748271 - DNA, 88 bp, Artificial Sequence
  ENSG00000205423_9 (sequence is synthesized)
ctttaataatttttaaaataccctaaaggcttgtgaatatacaagtctactgataaattatgtattgtctgggaatttgatagtcatt

SEQ ID NO: 748272 - DNA, 120 bp, Artificial Sequence
  ENSG00000205423_10 (sequence is synthesized)
actgataaattatgtattgtctgggaatttgatagtcattgttttagataactggattttacgctgtggtagacaggctgtgacactagtgttgcacaggtgtaattggtcatcctatgc

SEQ ID NO: 748273 - DNA, 120 bp, Artificial Sequence
  ENSG00000205423_11 (sequence is synthesized)
cttcaccagaataacttgggagtggtgccagaaactagagtctacaattctcactgtttagagagtgttaatgacatactgtgtatgcataatagccgcatgtactataatagcccttaa

SEQ ID NO: 748274 - DNA, 120 bp, Artificial Sequence
  ENSG00000205423_12 (sequence is synthesized)
aattaaactattgggattgctgtaaatattttaaagtactggaggtgccttttacctgtttattagattttgaaaaggtttaaattatttcatgagcaatcttttaaatttcatttaaca

SEQ ID NO: 748275 - DNA, 120 bp, Artificial Sequence
  ENSG00000205423_13 (sequence is synthesized)
taaagctgaaaattcaataacaggataaaaaagctttttaacaaggctgccatttaacttaaatgtgttcatcttagctttcacttgtataaaatttgattctttgaactgcagcaataa

SEQ ID NO: 748276 - DNA, 120 bp, Artificial Sequence
  ENSG00000205423_14 (sequence is synthesized)
aaccctcagctcctaagaagtcttaagagggtattctatatattctgctttgttttattttctgtaaattttgtaggtaaatatgtgcattaaaaataaatactttatatataactcgtg

SEQ ID NO: 748277 - DNA, 120 bp, Artificial Sequence
  ENSG00000205423_15 (sequence is synthesized)
atttaacatctttggcattgagatccatcttacagtcaatgagatctgacaaattgggagagttgacaatttaatctttcttaatgacataaaatcatgatgcatcttataactgatgca

SEQ ID NO: 748278 - DNA, 120 bp, Artificial Sequence
  ENSG00000205423_16 (sequence is synthesized)
tcttagattcagtgaagtacagtggttgtttgttattgaccaaaaatggctcagcggatattggttttataaactactgttatttatcaagtgatatgctatatatgttatttgtaaata

SEQ ID NO: 748279 - DNA, 120 bp, Artificial Sequence
  ENSG00000205423_17 (sequence is synthesized)
atgttatttgtaaatatagagtcatagattaatttgtggactatggacatatgaacctattgtgtttttaaaagtagatgatgggagactgggcatggtggctcatgcctctaatcccag

SEQ ID NO: 748280 - DNA, 120 bp, Artificial Sequence
  ENSG00000205423_18 (sequence is synthesized)
agctccctgagtccccacaaacctagagggtcgacctcctcgccagcttctatttttattttcttttcactggcagacacttgcacttcgtgcattgcagcctgctaattcatttcattt

SEQ ID NO: 748281 - DNA, 120 bp, Artificial Sequence
  ENSG00000205423_19 (sequence is synthesized)
gctgcgggccgggcgggggccgcggaagctgcgatgcggacagggcagcggcggtgacccgagctgccgcccgacatgaactcgctggagcaggcggaaggtagggaggccgcagaggat

SEQ ID NO: 748282 - DNA, 120 bp, Artificial Sequence
  ENSG00000205423_20 (sequence is synthesized)
tccctgattcctgcggtggtttccggtaactgccaaggttaggaagtgctgctcggtgttttaaagtttaaagcacaccactgcggaaaggataccccaccactcactcggagcagctta

SEQ ID NO: 748283 - DNA, 87 bp, Artificial Sequence
  ENSG00000205423_21 (sequence is synthesized)
cgcctgtaatcccagcactttaggaagcccaggcaggcggatcacctaaggtcagaagttcaagactagcgtggccgaaattagccg

SEQ ID NO: 748284 - DNA, 120 bp, Artificial Sequence
  ENSG00000205423_22 (sequence is synthesized)
tcagcaagttttcttatatgagaaattggaattaaagagccctaattttttgtcaagtgcttaaaaagctgtcatagtaaatgaaataaacagtgcagtgatacatggaagttagtgtgt

SEQ ID NO: 748285 - DNA, 120 bp, Artificial Sequence
  ENSG00000205423_23 (sequence is synthesized)
aagacctgaagcagttaagagtatctcacatgtcgtcttaatgttaggtaaatactctgacatttcgtcagacgagtaagagtggctaattagaaaattgacatctttatacctagatct

SEQ ID NO: 748286 - DNA, 120 bp, Artificial Sequence
  ENSG00000205423_24 (sequence is synthesized)
ggccaggatctctattttaacacaactattcttatttgaaatcaattacttatttgcatgtttgttgcctgctgtagcccttcctctttgcgggcaggaatcctgtctacctggctcaca

SEQ ID NO: 748287 - DNA, 120 bp, Artificial Sequence
  ENSG00000205423_25 (sequence is synthesized)
cgcgtatcaatacagtgtctagcatgttaggcaataaaatgattttgaatgaaagaatgccaccaataaatgaacaagaaggccttgtgatcaaatacaaatgtagtcaatcccttacag

SEQ ID NO: 748288 - DNA, 120 bp, Artificial Sequence
  ENSG00000205423_26 (sequence is synthesized)
atctcttcttaagttataggtatttgggcttacactttgcctcatttaggaattatgaaagctgggtgatgtgagaggaaagtaaccaagagagaagtgtttacttaaggggttggttat

SEQ ID NO: 748289 - DNA, 120 bp, Artificial Sequence
  ENSG00000205423_27 (sequence is synthesized)
ctaggataccataattaaggaaactggttatttagggttctagttagttctgtacagatttcattactccttgagatccttgaggacagaaccagctctttgatttctgtatccctcgct

SEQ ID NO: 748290 - DNA, 120 bp, Artificial Sequence
  ENSG00000205423_28 (sequence is synthesized)
agcgaccagaataatgcctggaaggtagtgggcgctcaatcaacatttgacgaatgaaagaaccaagcggggaacgggggataaatgaatgaacgaactggctccggagggctgcagttc

SEQ ID NO: 748291 - DNA, 120 bp, Artificial Sequence
  ENSG00000205423_29 (sequence is synthesized)
ctccccggggcagcaggcgacgccagcgttacgcccgcctggccgccggcagttcttggtccctccggctgaccgtccaacgctaggcgccgaggccggtgcaagagacagccaatagaa

SEQ ID NO: 748292 - DNA, 120 bp, Artificial Sequence
  ENSG00000205426_0 (sequence is synthesized)
cattggagtttccatcaggactccaggtcccctatcctgtcctctgcaacccaaacgtccaggaggatcatgacctgcggatcaggatttggtgggcgcgccttcagctgcatctcggcc

SEQ ID NO: 748293 - DNA, 120 bp, Artificial Sequence
  ENSG00000205426_1 (sequence is synthesized)
tgcgggccgcggcccggccgctgctgcatcaccgccgccccctaccgtggcatctcctgctaccgcggcctcaccgggggcttcggcagccacagcgtgtgcggaggctttcgggccggc

SEQ ID NO: 748294 - DNA, 120 bp, Artificial Sequence
  ENSG00000205426_2 (sequence is synthesized)
tcctgcggacgcagcttcggctaccgctccgggggcgtgtgcgggcccagtcccccatgcatcaccaccgtgtcggtcaacgagagcctcctcacgcccctcaacctggagatcgacccc

SEQ ID NO: 748295 - DNA, 120 bp, Artificial Sequence
  ENSG00000205426_3 (sequence is synthesized)
aacgcgcagtgcgtgaagcaggaggagaaggagcagatcaagtccctcaacagcaggttcgcggccttcatcgacaaggtgcgcttcctggagcagcagaacaaactgctggagacaaag

SEQ ID NO: 748296 - DNA, 120 bp, Artificial Sequence
  ENSG00000205426_4 (sequence is synthesized)
ctgcagttctaccagaaccgcgagtgttgccagagcaacctggagcccctgtttgagggctacatcgagactctgcggcgggaggccgagtgcgtggaggccgacagcgggaggctggcc

SEQ ID NO: 748297 - DNA, 120 bp, Artificial Sequence
  ENSG00000205426_5 (sequence is synthesized)
tcagagcttaaccacgtgcaggaggtgctggagggctacaagaagaagtatgaggaggaggtttctctgagagcaacagctgagaacgagtttgtggctctgaagaaggatgtggactgc

SEQ ID NO: 748298 - DNA, 120 bp, Artificial Sequence
  ENSG00000205426_6 (sequence is synthesized)
gcctacctccgcaagtcagacctggaggccaacgtggaggccctgatccaggagatcgacttcctgaggcggctgtatgaggaggagatcctcattctccagtcgcacatctcagacacc

SEQ ID NO: 748299 - DNA, 120 bp, Artificial Sequence
  ENSG00000205426_7 (sequence is synthesized)
tccgtggttgtcaagctggacaacagccgggacctgaacatggactgcatcattgccgagattaaggcacagtatgacgacattgtcacccgcagccgggccgaggccgagtcctggtac

SEQ ID NO: 748300 - DNA, 120 bp, Artificial Sequence
  ENSG00000205426_8 (sequence is synthesized)
tgtgaggagatgaaggccacggtgatcaggcacggggagaccctgcgccgcaccaaggaggagatcaatgagctgaaccgcatgatccaaaggctgacggccgaggtggagaatgccaag

SEQ ID NO: 748301 - DNA, 120 bp, Artificial Sequence
  ENSG00000205426_9 (sequence is synthesized)
tgccagaactccaagctggaggccgcggtggcccagtctgagcagcagggtgaggcggccctcagtgatgcccgctgcaagctggccgagctggagggcgccctgcagaaggccaagcag

SEQ ID NO: 748302 - DNA, 120 bp, Artificial Sequence
  ENSG00000205426_10 (sequence is synthesized)
gacatggcctgcctgatcagggagtaccaggaggtgatgaactccaagctgggcctggacatcgagatcgccacctacaggcgcctgctggagggcgaggagcagaggctatgtgaaggc

SEQ ID NO: 748303 - DNA, 120 bp, Artificial Sequence
  ENSG00000205426_11 (sequence is synthesized)
attggggctgtgaatgtctgtgtcagcagctcccggggcggggtcgtgtgcggggacctctgcgtgtcaggctcccggccagtgactggcagtgtctgcagcgctccgtgcaacgggaac

SEQ ID NO: 748304 - DNA, 120 bp, Artificial Sequence
  ENSG00000205426_12 (sequence is synthesized)
gtggcggtgagcaccggcctgtgtgcgccctgcggccaattgaacaccacctgcggagggggttcctgcggcgtgggctcctgtggtatcagctccctgggtgtggggtcttgcggcagc

SEQ ID NO: 748305 - DNA, 120 bp, Artificial Sequence
  ENSG00000205426_13 (sequence is synthesized)
agctgccggaaatgttaggcaccccaactcaagtcccaggccccaggcatctttcctgccctgccttgcttggcccatccagtccaggcgcctggagcaagtgctcagctacttctcctg

SEQ ID NO: 748306 - DNA, 120 bp, Artificial Sequence
  ENSG00000205426_14 (sequence is synthesized)
cactttgaaagacccctcccactcctggcctcacatttctctgtgtgatcccccacttctgggctctgccaccccacagtgggaaaggccaccctagaaagaagtccgctggcacccata

SEQ ID NO: 748307 - DNA, 120 bp, Artificial Sequence
  ENSG00000205426_15 (sequence is synthesized)
ggaaggggcctcaggagcaggaagggccaggaccagaaccttgcccacggcaactgccttcctgcctctccccttcctcctctgctcttgatctgtgtttcaataaattaatgtagccaa

SEQ ID NO: 748308 - DNA, 120 bp, Artificial Sequence
  ENSG00000205436_0 (sequence is synthesized)
cccacagggccacaacaggtttctgcatctgctcctatggccactccttcttgcccccagctctcctgctgccaagatgccatcaccacagacagacactcctgggccggagctgcagag

SEQ ID NO: 748309 - DNA, 120 bp, Artificial Sequence
  ENSG00000205436_1 (sequence is synthesized)
tcccaaggaggctgaggagccacagactccagctcagggctcccggcgaacaagcagcaggaaagagcccaatgcccaccgcaaggatggcacaaggctgggcctgggctccctgaggca

SEQ ID NO: 748310 - DNA, 120 bp, Artificial Sequence
  ENSG00000205436_2 (sequence is synthesized)
ggccttctcccgggccagccagcgggctttgacccaggtctccaaggaagatacgggcctgttccggcgaagctcctgctccctgttccggtccttccggcaagccctgaatgacggccc

SEQ ID NO: 748311 - DNA, 120 bp, Artificial Sequence
  ENSG00000205436_3 (sequence is synthesized)
agctaccggccattcccaggccactcctgaggtgccctcgggggtcatgaatggtgtcagccagcaggcatccactggggcagcgtctgaggaactgaaacccgaggcagaaggcaaatc

SEQ ID NO: 748312 - DNA, 120 bp, Artificial Sequence
  ENSG00000205436_4 (sequence is synthesized)
cgtggccgacctcattactgaacggcaactgctggcggccttcgaacagcttctgcgcctggagacgctgctggtggccgagaaggcctcgcgcacctttgagcaggaccctacggcctt

SEQ ID NO: 748313 - DNA, 120 bp, Artificial Sequence
  ENSG00000205436_5 (sequence is synthesized)
cgcgcggcgcgctatggacgtgtgcctgctttacgacgggctggcagccgagatcggcgccatcgtgcgcgagacgctggacagcgacggtgtggacgcggccgcgctggccgagctggc

SEQ ID NO: 748314 - DNA, 120 bp, Artificial Sequence
  ENSG00000205436_6 (sequence is synthesized)
ccgcgtggtgagcgcggaggaggaagcccacccttctccccccgacgacggcgacttcctgcgcacgccgcgccgctggcgccagcactgggaggaggcggtgcggcgaagcgctcagga

SEQ ID NO: 748315 - DNA, 120 bp, Artificial Sequence
  ENSG00000205436_7 (sequence is synthesized)
aggagcgcgtgcggcggccgggcgcggggtgggccttcggggaggcggagggcgcgtcgggtttggcccagcttctggccgagctgggtggcttggttcgccgcgacctgcagaaggtgc

SEQ ID NO: 748316 - DNA, 120 bp, Artificial Sequence
  ENSG00000205436_8 (sequence is synthesized)
ggaggtgcagcccgcgtatgcggcggccggcttcccagcgtgggaggtctatctgcgtgccttccacagcgccgtggcccagcgcctccaggagctcgcgcgcgacgcccgcggctgcga

SEQ ID NO: 748317 - DNA, 120 bp, Artificial Sequence
  ENSG00000205436_9 (sequence is synthesized)
ctgctggactgggccgccaacgtctacggcagtcctgacttcctgggcgccccggggctggcgctgcccgccgagccgctgcctccgctcctggcgccggacgtgtgggcccgactggag

SEQ ID NO: 748318 - DNA, 120 bp, Artificial Sequence
  ENSG00000205436_10 (sequence is synthesized)
agcgactacaccagcttcctggaggccaagatcgcaagctgcttcgacagcatcttgcagctggagcagagtcactgggcggccgccgaggtccccgaggtgctgcagggcctctaccag

SEQ ID NO: 748319 - DNA, 120 bp, Artificial Sequence
  ENSG00000205436_11 (sequence is synthesized)
gcgccgctgtccatggacgtccatatgctcgtggccgagcacgtgaaggcggccggcgccatctccgcggagctggaggccaccaccctgcgaatctgcacgcgggcgctcggcctcttc

SEQ ID NO: 748320 - DNA, 120 bp, Artificial Sequence
  ENSG00000205436_12 (sequence is synthesized)
gtgcccaggtttgaaaaggcttttctggcgtcggaggcggtgagcgagccgcacctgggcgcctacatcaacgcctgcgaggagctcaggaccagtcttctctccaggttcccaggaacc

SEQ ID NO: 748321 - DNA, 120 bp, Artificial Sequence
  ENSG00000205436_13 (sequence is synthesized)
caagaggagctggagaagcccctggtgacggccacctgcagcttccagaagcacttgcttcagggcttgcagcgtgagttgcagccgctcttcagggttgtgtgcaccagggactggctg

SEQ ID NO: 748322 - DNA, 120 bp, Artificial Sequence
  ENSG00000205436_14 (sequence is synthesized)
acgcaggactggctgcatcccctcatggacaaggtggtgaccttcgccggtcatctccagcgtgtggcccggccgcgggcacaggagactctgcaggaggtgcaccggttcgtggtccgc

SEQ ID NO: 748323 - DNA, 120 bp, Artificial Sequence
  ENSG00000205436_15 (sequence is synthesized)
gagtacctggcgcgggcgctgaggccacgggagcggttccggggcatggagcgcatgcatggctcccagaagatgagcctggatgcccaggccatcagcgacaccttccagggcctgggt

SEQ ID NO: 748324 - DNA, 120 bp, Artificial Sequence
  ENSG00000205436_16 (sequence is synthesized)
tccgaggccacatggttggaccaagccatccagtgcgtggctgagatcctgggcgagacctacaaagatgacatccagcggcacctggagactcttatccggagctaccccgacatcagg

SEQ ID NO: 748325 - DNA, 120 bp, Artificial Sequence
  ENSG00000205436_17 (sequence is synthesized)
cgggaccacatactggccattctggcgctgcgccgactgggccgccagcggaaccagcatctcttgcagcacactcaagacctgctgagagctgcggccggggcggcgggtgcggaggcc

SEQ ID NO: 748326 - DNA, 120 bp, Artificial Sequence
  ENSG00000205436_18 (sequence is synthesized)
cctcggggccgcgtgctcttcgaggagatcaaggtgcccagtgccatggctgtgctgatcacctgcgtctagttctctctggctcgagggggggccggccgctggcagggagctgtggtc

SEQ ID NO: 748327 - DNA, 120 bp, Artificial Sequence
  ENSG00000205436_19 (sequence is synthesized)
cagagctctcaatgctgcctatcgggcgggggggggcctcccgcccgactgtccagcttcaccctccagtctgaaagtgaagagcagagtatttatttaaaaaataaatgtgaattaaaa

SEQ ID NO: 748328 - DNA, 120 bp, Artificial Sequence
  ENSG00000205436_20 (sequence is synthesized)
ccaaccaacccttccgttagatgggagcctgaggccccacgcggggggaaatcggggacccccggcgcgccgacgggcagggaggctgctggatgggagtttgcgggagttgactctcca

SEQ ID NO: 748329 - DNA, 120 bp, Artificial Sequence
  ENSG00000205436_21 (sequence is synthesized)
gttgggcggctgaaagctggaggggccaagactgacaggcacagcggggcgggctggaggcgcagcgggggctaccaggggacccgcggcctcaggtcgggggctgggaggcacgctcag

SEQ ID NO: 748330 - DNA, 120 bp, Artificial Sequence
  ENSG00000205436_22 (sequence is synthesized)
tgcggggcttcgctcgcagctcgtggccgagcacgtgaaggcggccggcgccatctccgcggagctggaggccaccaccctgcgaatctgcacgcgggcgctcggcctcttcgtgcccag

SEQ ID NO: 748331 - DNA, 120 bp, Artificial Sequence
  ENSG00000205436_23 (sequence is synthesized)
ggccctgcccccaactctgacactgcagttagggaatttttgtcgtcagcagccaagcgcagctgtcaggccagaaggagcagccgtgcaggaggcatttcaggcatcgttgaggggagt

SEQ ID NO: 748332 - DNA, 120 bp, Artificial Sequence
  ENSG00000205436_24 (sequence is synthesized)
gaggttgcctgaagtcccgcactccttaaattgctccttaaattgtgtggggtcagacccgtgtccgccctgctgtgggcctccgtgctgcgggttggagggtggccgattcctgagctg

SEQ ID NO: 748333 - DNA, 120 bp, Artificial Sequence
  ENSG00000205436_25 (sequence is synthesized)
tgtttgaggagagggcggagtgccatctgggtagccgtccttcagcgttctgcaggaaggcaggaacccagctgtcagaggcttcccgggagggggtgtggcatggcagcctagaggcgc

SEQ ID NO: 748334 - DNA, 120 bp, Artificial Sequence
  ENSG00000205439_0 (sequence is synthesized)
cagacatcaccatcctcctccccagtaccagcccagccacacgccaccatgtgccacaccagctgctccccagcctgccagccaacctgctgcatacacagcccctgccaggcatcctgc

SEQ ID NO: 748335 - DNA, 120 bp, Artificial Sequence
  ENSG00000205439_1 (sequence is synthesized)
gcgcattgtgtgcgtggctccctcctgccagccctccgtgtgcgtgcccgtgagctgcaggcccatcatatatgtgactccctcttgccaatcttcggggtgctgccagcccccctgcac

SEQ ID NO: 748336 - DNA, 120 bp, Artificial Sequence
  ENSG00000205439_2 (sequence is synthesized)
cactgccctctgcagacccatctcctgcagcaccccttcctgctgctgaccagctgctcctggtacacgggggtacacacctgtatccctccgtgaataagcatctggtggacccccaga

SEQ ID NO: 748337 - DNA, 120 bp, Artificial Sequence
  ENSG00000205442_0 (sequence is synthesized)
tgtcggggagcgggggtgaagaaagaaatgggtgacctgtggttattcctgctcctgcccctctcagccttccatggagtcaaaggctgtttagaatgtgaccccaaatttatagaggat

SEQ ID NO: 748338 - DNA, 120 bp, Artificial Sequence
  ENSG00000205442_1 (sequence is synthesized)
gttggctccttgctgggaaatctgataccttcagaagtccccggccgaactcagctgcttgaacggcagattaaggagatgattcatttaagcttcaaggtctcccacagtgacaagagg

SEQ ID NO: 748339 - DNA, 120 bp, Artificial Sequence
  ENSG00000205442_2 (sequence is synthesized)
cttcgggtgttggctgttcagcaggttgttaagttgagaacatggttgaagaatgaattttataaactgggcaatgaaacatggaaaggtgtctttatctatcaaggcaagcttctcgat

SEQ ID NO: 748340 - DNA, 120 bp, Artificial Sequence
  ENSG00000205442_3 (sequence is synthesized)
actgaaagaattactaaagaacttctctgaaattgttgtggttgaaggtcccattcttgattgttggacgtgtcttcgcatgactaacaggtgcttcaaaggagaatattgtggagacga

SEQ ID NO: 748341 - DNA, 120 bp, Artificial Sequence
  ENSG00000205442_4 (sequence is synthesized)
ggatccaagaaaggctgagaatcgagagattgctctatttctcatattgctggcaacagctgtaatactgggaagtgctgtgttactattccatttttgcatctttcatcggaggaaaat

SEQ ID NO: 748342 - DNA, 120 bp, Artificial Sequence
  ENSG00000205442_5 (sequence is synthesized)
gaaggcaatacgaaggtcgctaaaggaatatgtggagaagaaacttgaagaattaatggggaagatagatgagaaggaggagaaagactttagactcagaaaataaacacatcaacatgg

SEQ ID NO: 748343 - DNA, 120 bp, Artificial Sequence
  ENSG00000205442_6 (sequence is synthesized)
ctccccagctggcagttccctctcctagaatgaaggataatagtcagtaaacaactaaagatcattaaactaaacaactaaagattgcccgatagtgggatggaaacagcgggaaaagtg

SEQ ID NO: 748344 - DNA, 120 bp, Artificial Sequence
  ENSG00000205442_7 (sequence is synthesized)
ttaagtgttgactctaagtacaaaactgggaggtaaaccctttcttggtcataaagtcatagtattttaaaactgaaatagaacttagagtttctctaatgaaaatgcttattgatatcc

SEQ ID NO: 748345 - DNA, 120 bp, Artificial Sequence
  ENSG00000205442_8 (sequence is synthesized)
tgagacaacggaagtaatgggagagcaaataatttggccagagttgtacagaaagtaatgctggtatgttgcaatgcacaggaaagataatatgctggatagtaataaataatgcatcgt

SEQ ID NO: 748346 - DNA, 120 bp, Artificial Sequence
  ENSG00000205445_0 (sequence is synthesized)
tcactcactcacacacctcccccagctcacctcctccccactccagcatggccgcctccaccatgtccatctgctccagcgcctgcaccaactcctggcaggtggacgactgcccagaga

SEQ ID NO: 748347 - DNA, 120 bp, Artificial Sequence
  ENSG00000205445_1 (sequence is synthesized)
gctgctgtgagctcccctgcggcacccccagctgctgtgccccagccccctgcctgaccctggtctgcaccccagtgagctgtgtgtccagcccctgctgccaggcggcctgtgagccca

SEQ ID NO: 748348 - DNA, 81 bp, Artificial Sequence
  ENSG00000205445_2 (sequence is synthesized)
tgtgtgtccagcccctgctgccaggcggcctgtgagcccagcgcctgccaatcaggctgcaccagctcctgcacgccctcg

SEQ ID NO: 748349 - DNA, 120 bp, Artificial Sequence
  ENSG00000205445_3 (sequence is synthesized)
gcaagcctgtgtgctgtgtgcccgtctgctgtggggcttcttcatgctgccagcagtctagctgccagccagcttgctgtgcctcttcctcctgccagcagtcctgccgtgtgcctgtct

SEQ ID NO: 748350 - DNA, 120 bp, Artificial Sequence
  ENSG00000205445_4 (sequence is synthesized)
gccagccggcttgctgcacctcctccccgtgtcagcagtcctgctgtgtgtccgtctgctgcaagcctgtctgctgcaagtccatctgctgtgtacctgtttgctctggggcttcctctc

SEQ ID NO: 748351 - DNA, 120 bp, Artificial Sequence
  ENSG00000205445_5 (sequence is synthesized)
cgtgctgccagcagtctagctgccagccagcttgctgcacctcctcctgctgcagaccctcctcctctgtgtccctcctctgccgccccgtgtgctcccgcccagcctcctgcagctttt

SEQ ID NO: 748352 - DNA, 120 bp, Artificial Sequence
  ENSG00000205445_6 (sequence is synthesized)
cctcaggccaaaagtctagctgctgatggccatgtcccccagggccagccgggctcaggccccacctccctgccagtccttggacctcccagcccacccagcctcagcacagctcagcac

SEQ ID NO: 748353 - DNA, 120 bp, Artificial Sequence
  ENSG00000205445_7 (sequence is synthesized)
agaaggagcagccccagccacagccgcccagccccggggtctcagatgctcactggctcctctctgacctcccgccgggcgggcgagccctggcttctcctcacggtgcttcctggctgc

SEQ ID NO: 748354 - DNA, 120 bp, Artificial Sequence
  ENSG00000205445_8 (sequence is synthesized)
agaccacaaccctccgctggtcgctggtcgctggttggggatgggccctcctgacctgggtctcacccccaggagcgtcaccctctgcctctgagcaccaataaagcgtctgcggcccca

SEQ ID NO: 748355 - DNA, 120 bp, Artificial Sequence; identical to SEQ ID NO: 655225
  ENSG00000205456_0 (sequence is synthesized)

SEQ ID NO: 748356 - DNA, 120 bp, Artificial Sequence; identical to SEQ ID NO: 655226
  ENSG00000205456_1 (sequence is synthesized)

SEQ ID NO: 748357 - DNA, 120 bp, Artificial Sequence
  ENSG00000205456_2 (sequence is synthesized)
tgggctggaggaggtgggacgctctggaaagaactcgggtgcgagtgggaaagaaaatcgagctgagcagcgggaagtcgaagtcgcgtgagtgaggaccagacactctcgatttaggca

SEQ ID NO: 748358 - DNA, 120 bp, Artificial Sequence; identical to SEQ ID NO: 655228
  ENSG00000205456_3 (sequence is synthesized)

SEQ ID NO: 748359 - DNA, 120 bp, Artificial Sequence; identical to SEQ ID NO: 655229
  ENSG00000205456_4 (sequence is synthesized)

SEQ ID NO: 748360 - DNA, 120 bp, Artificial Sequence; identical to SEQ ID NO: 655230
  ENSG00000205456_5 (sequence is synthesized)

SEQ ID NO: 748361 - DNA, 120 bp, Artificial Sequence; identical to SEQ ID NO: 655231
  ENSG00000205456_6 (sequence is synthesized)

SEQ ID NO: 748362 - DNA, 120 bp, Artificial Sequence
  ENSG00000205456_7 (sequence is synthesized)
agacattggagctagggcggctagtttcacctggtaattgtgacaccctgtctcctcgagctgcaggcttttatgcttgtcatgttcgaagtttgataccttgcagatcaacaaagggtc

SEQ ID NO: 748363 - DNA, 120 bp, Artificial Sequence
  ENSG00000205456_8 (sequence is synthesized)
agacgcacaagagcagaatctccgtgggacatctctctggagcatcaatattactgcagtatttggaagaaacaaatttaaataagttctaaggtaaagaatggaacatttaagacaagt

SEQ ID NO: 748364 - DNA, 120 bp, Artificial Sequence
  ENSG00000205456_9 (sequence is synthesized)
ctggaaagtcatctgcctttaataactgtcgtttgtccttaacgtcagactttctccaagacaaaaactctaagaacttatttccattcttacaaatagtaaaaatgataaatcatatca

SEQ ID NO: 748365 - DNA, 120 bp, Artificial Sequence
  ENSG00000205456_10 (sequence is synthesized)
agtcaattgaaagtcctgcctgctgctttcctaaatcacaatatggccttggtatggttttatttgtacttttgtgggggattcgtggatctttagattaaaaaaaaaaataggtttttg

SEQ ID NO: 748366 - DNA, 120 bp, Artificial Sequence
  ENSG00000205456_11 (sequence is synthesized)
aacaatttttgcaagtttgcagctgttagttattgatttatttttgcaacccatctaattcttctgtctctctcctctcctcaggctcaataattccatgggtctctaaggctgtgttta

SEQ ID NO: 748367 - DNA, 120 bp, Artificial Sequence
  ENSG00000205456_12 (sequence is synthesized)
ttttctttaaattttgttgatttacttttatactccatttgattttttctatctctcaccttttctcagactcagtcatcccacaggtctgtaaggctctgttcattttctttaaacttt

SEQ ID NO: 748368 - DNA, 120 bp, Artificial Sequence
  ENSG00000205456_13 (sequence is synthesized)
tttttttcctctcctcagattggataaattatattgctatgtctctgtttctgaactatagaaaagctcaaaattactatttttatttctcattttttatatggctattttttctctgct

SEQ ID NO: 748369 - DNA, 120 bp, Artificial Sequence
  ENSG00000205456_14 (sequence is synthesized)
gatgtttcacatctattcatttatgagaatattttcctttgccctcatgagcgtgtttataatagctgccttcaaattcttgtctgccgtttacatcttggacatcttggagatggctac

SEQ ID NO: 748370 - DNA, 120 bp, Artificial Sequence
  ENSG00000205456_15 (sequence is synthesized)
tgcctgctttttatcttgtgtatttattacattttcacgtgtcttcacgcatctcttgaattggaaattgtgccctggagactgtatacaagactggattaaaaagactggattctgttt

SEQ ID NO: 748371 - DNA, 120 bp, Artificial Sequence
  ENSG00000205456_16 (sequence is synthesized)
ttggagctagggcggctagtttcacctggctgtcacaaattctctgcaccccaggagtgccgcttggacccccgggctcgctgcgtggtccatatctaggtcgggcctctcacggagact

SEQ ID NO: 748372 - DNA, 120 bp, Artificial Sequence
  ENSG00000205456_17 (sequence is synthesized)
ttcccaccagtgtaataaagaggagaaaacgtcacagcggaagggcctgaccctgctgcatccactaaggaaacagctacggggatgggaccctggaagctgctgtgggagcctcatcca

SEQ ID NO: 748373 - DNA, 120 bp, Artificial Sequence
  ENSG00000205456_18 (sequence is synthesized)
aggcctcagggtcttagtgtggacctccgggccgtgattaatgcaggtcagcaggaccagagcgccccttggtccctcccaacacatgagggtagtttgtgtggtgaggtcagggatagt

SEQ ID NO: 748374 - DNA, 120 bp, Artificial Sequence
  ENSG00000205456_19 (sequence is synthesized)
gtctgcgcttctaccctgaatagggctcccttggaaaataatatctctttttaaatacccccttggaccacttttaatagttttctgatagaactaaacagtgatcattctcttaattca

SEQ ID NO: 748375 - DNA, 120 bp, Artificial Sequence
  ENSG00000205456_20 (sequence is synthesized)
cccgtccctagggctgggttaagggccgcggatgtggcagttctcaggcctcttgggatcgcctcaagaagccccctcacgagtgtctcgatttcctgtcagccaacaaagggccgttcg

SEQ ID NO: 748376 - DNA, 120 bp, Artificial Sequence
  ENSG00000205456_21 (sequence is synthesized)
gcagcccgtccctaggtgtagggtaatggcggccgacctggcaggtctcaggctccttgggatcccctcgagaagcccgttcatgagtgtctgaaactgtcacttgactgccagaagtga

SEQ ID NO: 748377 - DNA, 120 bp, Artificial Sequence
  ENSG00000205456_22 (sequence is synthesized)
tgggagcctcatccaccgcttctctgaccccacccaggctgcttcccaggcctcagggtcttagtgtggacctccgggccgtgattaatgcagtttttcaggttaagtactgcacgacta

SEQ ID NO: 748378 - DNA, 120 bp, Artificial Sequence; identical to SEQ ID NO: 655225
  ENSG00000205457_0 (sequence is synthesized)

SEQ ID NO: 748379 - DNA, 120 bp, Artificial Sequence; identical to SEQ ID NO: 655226
  ENSG00000205457_1 (sequence is synthesized)

SEQ ID NO: 748380 - DNA, 120 bp, Artificial Sequence; identical to SEQ ID NO: 655227
  ENSG00000205457_2 (sequence is synthesized)

SEQ ID NO: 748381 - DNA, 120 bp, Artificial Sequence; identical to SEQ ID NO: 655228
  ENSG00000205457_3 (sequence is synthesized)

SEQ ID NO: 748382 - DNA, 120 bp, Artificial Sequence; identical to SEQ ID NO: 655229
  ENSG00000205457_4 (sequence is synthesized)

SEQ ID NO: 748383 - DNA, 120 bp, Artificial Sequence; identical to SEQ ID NO: 655230
  ENSG00000205457_5 (sequence is synthesized)

SEQ ID NO: 748384 - DNA, 120 bp, Artificial Sequence; identical to SEQ ID NO: 655231
  ENSG00000205457_6 (sequence is synthesized)

SEQ ID NO: 748385 - DNA, 120 bp, Artificial Sequence; identical to SEQ ID NO: 655232
  ENSG00000205457_7 (sequence is synthesized)

SEQ ID NO: 748386 - DNA, 120 bp, Artificial Sequence
  ENSG00000205457_8 (sequence is synthesized)
agacgcacaagagcagaatctccgtgggacatctctctggagcatcaatattactgcagtatttggaagaaacaaatttaaataagttctaaggtgaagaatggaacatttaagacaagt

SEQ ID NO: 748387 - DNA, 120 bp, Artificial Sequence
  ENSG00000205457_9 (sequence is synthesized)
ctggaaagtcatctgcctttaataactgtcgtttgtccttaacgtcagactttctccaagaccaaaactctaagaacttatttccattcttacaaatagtaaaaatgataaatcatatca

SEQ ID NO: 748388 - DNA, 120 bp, Artificial Sequence
  ENSG00000205457_10 (sequence is synthesized)
agtcaattgaaagtcctgcctgctgctttcctaaattgcaatatggccttggtatggttttatttgtacttttgtgggggattcgtggatctttagattaaaaaaaaaaaaataggtttt

SEQ ID NO: 748389 - DNA, 120 bp, Artificial Sequence
  ENSG00000205457_11 (sequence is synthesized)
tgaacaatttttgcaagtttgcagctgttagttattgatttatttttccaacccatctaattcttctgtctctctcctcaggctcaataattccatgggtctctaaggctgtgtttattt

SEQ ID NO: 748390 - DNA, 120 bp, Artificial Sequence
  ENSG00000205457_12 (sequence is synthesized)
tctttaaattttgttgatttacttttatactccatttgattttttctatctctcaccttttctcagactcagtcatcccacaggtctgtaaggctctgttcattttctttaaacttcttt

SEQ ID NO: 748391 - DNA, 120 bp, Artificial Sequence
  ENSG00000205457_13 (sequence is synthesized)
tttttttcctctcctcagattggataaattatattgctatgtctctgtttctgaactatagaaaagctcaaaattattatttttatttctcattttttatatggctattttttctctgct

SEQ ID NO: 748392 - DNA, 120 bp, Artificial Sequence; identical to SEQ ID NO: 748369
  ENSG00000205457_14 (sequence is synthesized)

SEQ ID NO: 748393 - DNA, 120 bp, Artificial Sequence
  ENSG00000205457_15 (sequence is synthesized)
tgcctgctttttatcttgtgtatttattacattttcacgtgtcttcacgcatcccttgaattggaaattgtgccctggagactgtatacaagactggattaaaaagactggattctgttt

SEQ ID NO: 748394 - DNA, 120 bp, Artificial Sequence; identical to SEQ ID NO: 655241
  ENSG00000205457_16 (sequence is synthesized)

SEQ ID NO: 748395 - DNA, 120 bp, Artificial Sequence; identical to SEQ ID NO: 655242
  ENSG00000205457_17 (sequence is synthesized)

SEQ ID NO: 748396 - DNA, 120 bp, Artificial Sequence; identical to SEQ ID NO: 655243
  ENSG00000205457_18 (sequence is synthesized)

SEQ ID NO: 748397 - DNA, 120 bp, Artificial Sequence; identical to SEQ ID NO: 655244
  ENSG00000205457_19 (sequence is synthesized)

SEQ ID NO: 748398 - DNA, 120 bp, Artificial Sequence
  ENSG00000205457_20 (sequence is synthesized)
ctgtggagcctcatccaccgcttctctgaccccacccaggctgcttcccaggcctcagggtcttagtgtggacctccgggccgtgattaatgcagtttttcaggttaagtactgcacgac

SEQ ID NO: 748399 - DNA, 120 bp, Artificial Sequence
  ENSG00000205457_21 (sequence is synthesized)
gtgtagggtaatggcggccgacctggaggctccttgggatcccctcgagaagcccgttcatgagtgtctgaaactgtcacttgactgccagaagtgaaaacatcgtgtccctagtcacct

SEQ ID NO: 748400 - DNA, 120 bp, Artificial Sequence; identical to SEQ ID NO: 655245
  ENSG00000205457_22 (sequence is synthesized)

SEQ ID NO: 748401 - DNA, 120 bp, Artificial Sequence
  ENSG00000205464_0 (sequence is synthesized)
tcccggcagttttcttctgaacctttttgctaattgtcggaataacttgtagaaaatgagactttggaaagcaagggttctcaaactcgttttgaaaacagcaaaggattccaggcttgg

SEQ ID NO: 748402 - DNA, 120 bp, Artificial Sequence
  ENSG00000205464_1 (sequence is synthesized)
tctcaactccaaatggttgtctttgaagcttggtgatgctggaaaccccagaagtcttgctataagattcatccttaccaattacaacaagttgtccatccagagttggtttagtttgcg

SEQ ID NO: 748403 - DNA, 120 bp, Artificial Sequence
  ENSG00000205464_2 (sequence is synthesized)
ccgagtcgagatcatttccaacaattcaatccaagcagtctttaacccaactggcgtatatgctccctctggttactcctaccgctgccaacgcgtgggcagcctgcagcaggaccaggc

SEQ ID NO: 748404 - DNA, 120 bp, Artificial Sequence
  ENSG00000205464_3 (sequence is synthesized)
tgtgggaggtcacttttattgatttccagatccaaggttttgccatcaaggggggacgatttaccaaagcccaagactgcgcctcctccttctcgccagcttttctgatcggcctggcaa

SEQ ID NO: 748405 - DNA, 120 bp, Artificial Sequence
  ENSG00000205464_4 (sequence is synthesized)
tgtccctgatcctgctgctggtgttggcctatgccctgcacatgctcatctacctgcggtatctggaccaacaatatgatctcatcgcctctcctgcccacttctcgcagctgaaagctc

SEQ ID NO: 748406 - DNA, 120 bp, Artificial Sequence
  ENSG00000205464_5 (sequence is synthesized)
gagacacagccgaagagaaggagctgctgaggagccagggggctgaatgctataaactgagaagccaacagatcagcaaaatctatgtttagcagcacaggctggcccccaccatgtcca

SEQ ID NO: 748407 - DNA, 120 bp, Artificial Sequence
  ENSG00000205464_6 (sequence is synthesized)
taaattaaataattaaatagatgatttttacatactgtagagctatagagaaaatatagctggatgggtgatagtgacttggggatgggggtggctactctggatagggtagtttaaggt

SEQ ID NO: 748408 - DNA, 120 bp, Artificial Sequence
  ENSG00000205464_7 (sequence is synthesized)
gacatctctgtgcagatgtagaatgggctagtgctttctaagaactgaaagatcagtgaagaaggggagcatagtgactgaggagtagtgtggcattagatggggtctgagagttacaca

SEQ ID NO: 748409 - DNA, 120 bp, Artificial Sequence
  ENSG00000205464_8 (sequence is synthesized)
ggaacatgtggagcctgtaggccatggtaaagcctttttctactcttctggtgatttaaagccattgtaaagttttgagcttgggagtaggtagcaaaataagatttatatttttatggg

SEQ ID NO: 748410 - DNA, 120 bp, Artificial Sequence
  ENSG00000205464_9 (sequence is synthesized)
gttactctggctgttgagaggagaaaaagacatgaatctgggaggccacttgggaagcaaggccatcagtgaagagaaagagtgggagaaaaaggtttgaggagagaaggtataggactt

SEQ ID NO: 748411 - DNA, 120 bp, Artificial Sequence
  ENSG00000205464_10 (sequence is synthesized)
tcactaaccttggaccatatatttgccaggaagaatgtaagttctccaacatcttcaaataaagaagtggttatgaggaatgatcagaataatggagatatgaaaccattccagaatttc

SEQ ID NO: 748412 - DNA, 120 bp, Artificial Sequence
  ENSG00000205464_11 (sequence is synthesized)
acaacaataccaatcacacaggctctcaactacaatctgagcaaagaagggcatttagaaaaagaaccttggaatgcattcagccatcatggcccagttaatgtctccatcaatggaatt

SEQ ID NO: 748413 - DNA, 120 bp, Artificial Sequence
  ENSG00000205464_12 (sequence is synthesized)
ccttgcattctcttctgggccaaaagaataatgattaaatttaagaatcaaacctggctggaccttacagacgagccatttggtcagaaggtaactgtggaccctgacaactcaaattgc

SEQ ID NO: 748414 - DNA, 120 bp, Artificial Sequence
  ENSG00000205464_13 (sequence is synthesized)
agtgaagaaagtgctagaaaaaaaaagtaggctcctttgtataggaccctgacacacatctttgaggaagtatttactgtctaaaataaaggaacaagtcagaagttaacttcaaaaatt

SEQ ID NO: 748415 - DNA, 63 bp, Artificial Sequence
  ENSG00000205464_14 (sequence is synthesized)
ctaaaataaaggaacaagtcagaagttaacttcaaaaagagtggatcacctgaggtcaggagt

SEQ ID NO: 748416 - DNA, 120 bp, Artificial Sequence
  ENSG00000205464_15 (sequence is synthesized)
gaattctttttgaaccatccactggcctacttaggtagacttggggcaatcaaaaaaggcatctcagggatcccacagagacaaatatgactgttagttgcctcaaagtaccctgaaagc

SEQ ID NO: 748417 - DNA, 89 bp, Artificial Sequence
  ENSG00000205464_16 (sequence is synthesized)
aagaaggagagcaggaggaagaggaggaggaggaggaaagggagggagggagggagagggagagagagagaaagattggcaacacagag

SEQ ID NO: 748418 - DNA, 120 bp, Artificial Sequence
  ENSG00000205464_17 (sequence is synthesized)
gagggagagggagagagagagaaagattggcaacacagagaagggaaaacacacttggtcctccttgcctgtgccagtttggatgtgacaattatagaaataataaaccaagattatctg

SEQ ID NO: 748419 - DNA, 120 bp, Artificial Sequence
  ENSG00000205464_18 (sequence is synthesized)
aaaaaagttctgtacattttgtgtgttaggtgttacgtgatccaccttgaggtaacttttgagtacatatgaagtcagggtcattcctattttcatagactgcgttgtttccttttctta

SEQ ID NO: 748420 - DNA, 120 bp, Artificial Sequence
  ENSG00000205464_19 (sequence is synthesized)
tttaaagtggccgcatcatttttccttttctcaagcattgtatgagagttccagttgcttcacattctcactaacacttcgtatggtcagagtgagactagagaaagcatttttatattt

SEQ ID NO: 748421 - DNA, 120 bp, Artificial Sequence
  ENSG00000205464_20 (sequence is synthesized)
ctgcatgtttaggaatttctgaacaaatttttactgggaactgggttaaaagataagtgttagagttagtgagagatttacctcttgaaaggaatgtgttgtgttcatgtatcaaggggt

SEQ ID NO: 748422 - DNA, 120 bp, Artificial Sequence
  ENSG00000205464_21 (sequence is synthesized)
aatgaaactcaaggccatagagacgttccaggggttagaaactcagagaggcttatcttatcctcccctcggagatatttatttacataccatgggtatgagacctgcagccatttgtct

SEQ ID NO: 748423 - DNA, 120 bp, Artificial Sequence
  ENSG00000205464_22 (sequence is synthesized)
ccttatggtgagcgatttgcttccatccaaaggctaattaaagtctttcatccaaagactaatcatccctcttctcttcctaaggagaatttattgacactagaggagcaaatgtttctc

SEQ ID NO: 748424 - DNA, 120 bp, Artificial Sequence
  ENSG00000205464_23 (sequence is synthesized)
tccctctcttgggaggtgagaaggaaaccacggtctctctcctatataagctcccagattcataattttggtgttgctcatctgtattacaaatctcaatatgtgtaggatgacatctgg

SEQ ID NO: 748425 - DNA, 120 bp, Artificial Sequence
  ENSG00000205464_24 (sequence is synthesized)
ctcttctcctgctgcctgggtggaggagaattggattagaagggggaaccaatatggttgttcccatgagtaagtcaattcatctgtctttgctctgggaaatcttatgtttactcttag

SEQ ID NO: 748426 - DNA, 120 bp, Artificial Sequence
  ENSG00000205464_25 (sequence is synthesized)
gaaaacaggaataaatgtaggtattaaaagcttaagagtcagtttaaaaagtgttttagccattctgattcctgtactgtgttatctttattgtggttttattttacattttccgaatgt

SEQ ID NO: 748427 - DNA, 120 bp, Artificial Sequence
  ENSG00000205464_26 (sequence is synthesized)
ctaatggtcctaagcatcttttcatgtacttattgaccatttgtatatctttctttaaaacatgctcgagtcttctgacaatttttatgatttttacattgggctgtcttttgttgagtt

SEQ ID NO: 748428 - DNA, 120 bp, Artificial Sequence
  ENSG00000205464_27 (sequence is synthesized)
gttagtgttatttattgtattctggatagagttctttatgtatacgtgttgtgagtattttctcctgttgcgtggcttgcctttcttgttttcttaaacagtgttttttgaagagtaaaa

SEQ ID NO: 748429 - DNA, 120 bp, Artificial Sequence
  ENSG00000205464_28 (sequence is synthesized)
ctgtgggaggtcacttttattgatttccaggcacttggactagtaccctgcatgaaagttcatttcaaggcaaacagaacaatattcttggaatgggaggaaaaagcttcgagtttgaac

SEQ ID NO: 748430 - DNA, 83 bp, Artificial Sequence
  ENSG00000205464_29 (sequence is synthesized)
tgattcttataagatgagacatgggacttgaatgctgctattggtgcacatttctgcagacgtgtctctggctgtcaggatgc

SEQ ID NO: 748431 - DNA, 120 bp, Artificial Sequence
  ENSG00000205464_30 (sequence is synthesized)
gtgcacatttctgcagacgtgtctctggctgtcaggatgcagaatgttgacctctcagaaaaaggaagaaaggcttcatccgcagtgggcattaaaaaaaatcataaacatctattcatg

SEQ ID NO: 748432 - DNA, 120 bp, Artificial Sequence
  ENSG00000205464_31 (sequence is synthesized)
gtcttggaattgaatcttaaggcaaagcaggatctcagtgtctgtggccatctgaaaacgtccacatgatgccagaccatgctttactctgaaaatccaccgataaggtacgttgaagat

SEQ ID NO: 748433 - DNA, 120 bp, Artificial Sequence
  ENSG00000205464_32 (sequence is synthesized)
ggagaacaactgatgtcaagacacattttggttgtaagggacagaagtccaactccaacgagcttgccaaggatggaacctgctggcaaacataaccaaactttgggaagggcagggtat

SEQ ID NO: 748434 - DNA, 120 bp, Artificial Sequence
  ENSG00000205464_33 (sequence is synthesized)
ggttaacctcaggtttctggaagcagagtgtacagtgctgtgccgtccctcttctctctgcttctctctgcgtattggccctatcctctcagtggggcaccctccctgagcagcgaacag

SEQ ID NO: 748435 - DNA, 120 bp, Artificial Sequence
  ENSG00000205464_34 (sequence is synthesized)
cagccacaggaagctccagtgtcaatgcctcccacagctttccagagaagcagcagcctctttgttagctccgtatcaaagacatccacaggcagggctttgtgtgacccagtttgggtc

SEQ ID NO: 748436 - DNA, 120 bp, Artificial Sequence
  ENSG00000205464_35 (sequence is synthesized)
acgtctttatttggggcccggaggaaatggatacaatgactacagcccatcatagaacctcatgtttagaggaccaaatttcctctctccaaaagtgaaatgttgtcactgtccattcaa

SEQ ID NO: 748437 - DNA, 120 bp, Artificial Sequence
  ENSG00000205464_36 (sequence is synthesized)
ctgatgaaaatcttccttttcaacagaaaaactatcatgatgttgtctgttgggcttcagtttcttacagcagtcatcttaagaattaaactggtatggataatctgactatgaactcct

SEQ ID NO: 748438 - DNA, 120 bp, Artificial Sequence
  ENSG00000205464_37 (sequence is synthesized)
tgagggcagggaccatattatataatacttctgtgtcctctgctatttcttagcagaattttgaaaatgtgccaagtgttgacttggttcgatcacttgtgagaatggagggacccataa

SEQ ID NO: 748439 - DNA, 120 bp, Artificial Sequence
  ENSG00000205464_38 (sequence is synthesized)
tgttaataatcaatgaaggttgttggagttacttacccaaaaccttatgaacttagccttccctagcagatttagtttcgtaatttgtccggtataagcaaacactaaagagggattggg

SEQ ID NO: 748440 - DNA, 120 bp, Artificial Sequence
  ENSG00000205464_39 (sequence is synthesized)
gaaagttgtgagttgagtagttgggaaaaaggtagtttgcagttttatttacgtctcacagcttgacattttttgtttgccttggagggggtacttttaaaaattcctcttttgaaaaca

SEQ ID NO: 748441 - DNA, 120 bp, Artificial Sequence
  ENSG00000205464_40 (sequence is synthesized)
ataaaatcttagattttggataacagatatttctgtactatatacctcacttaagattttcaaagtaatgtttaaaagtgccttttatattttttcataccacattgtagggaaggccag

SEQ ID NO: 748442 - DNA, 120 bp, Artificial Sequence
  ENSG00000205464_41 (sequence is synthesized)
ggtcattttttaacacttaactatgctcaatacctcctcaccactataaagtaaggtcgaatgttggttaaagcaaagctgtctggaatcaccctgtcaaaagtactgatttataacctt

SEQ ID NO: 748443 - DNA, 120 bp, Artificial Sequence
  ENSG00000205464_42 (sequence is synthesized)
gctactcacatttcttactgtggtgccctccctcttgttggctcctgcatctttgaagtacagggaaaatgaactaatatggcagctccaatatgcagctaatcctgccaatgatgtctc

SEQ ID NO: 748444 - DNA, 120 bp, Artificial Sequence
  ENSG00000205464_43 (sequence is synthesized)
ccctggaagtgtttgagagaagaatttcttttcccagtatggatttatgtaaacatttgttccattcacgagtagcacattaatgcctaattctggaaaaaatacaaagaaaaaaccttt

SEQ ID NO: 748445 - DNA, 120 bp, Artificial Sequence
  ENSG00000205464_44 (sequence is synthesized)
ttttattctgcactcatccctattattgaaatcagtggtcctcagccctgaatgtcctttattttaatgtttttattttattgtaaattgacaatttataattgaatatggatgtactgt

SEQ ID NO: 748446 - DNA, 120 bp, Artificial Sequence
  ENSG00000205464_45 (sequence is synthesized)
agaatcacctgagaagcttttgaaaattctgatgcctgagccccttttctgaatattctcatttatttggttttatgttgttgagaatctctggactagatctcatttttggaatctctt

SEQ ID NO: 748447 - DNA, 120 bp, Artificial Sequence
  ENSG00000205464_46 (sequence is synthesized)
aaccactttcttctctcttttcttcactatatgaccaaagtctcatcttctttacaaagccatccttttcagctaggaggaccaaggttacactgcaattccaactcccaaatctcagtg

SEQ ID NO: 748448 - DNA, 120 bp, Artificial Sequence
  ENSG00000205464_47 (sequence is synthesized)
gatgtaaaagaacaaatagcaatgcatgtgcatcccacaggagtggaggggttctactccctgacaccttcactccatatgtcactgttacatttgcttaaggtatttgggtcagaactg

SEQ ID NO: 748449 - DNA, 120 bp, Artificial Sequence
  ENSG00000205464_48 (sequence is synthesized)
gccacctggccacacccaacttcaaggagagagaatatgccagcctatcatgttcccagaaggacaaaccaaaacatctgtgagctaccacatttgatgacaccttgccacactttgctc

SEQ ID NO: 748450 - DNA, 120 bp, Artificial Sequence
  ENSG00000205464_49 (sequence is synthesized)
tcctcttctgaattcctgctgcactcatctataccatatcaagatcgatcacttcattgtgtgcgattttgaactttagatctattttgaattttccaaggacaagaccttggaaatcat

SEQ ID NO: 748451 - DNA, 120 bp, Artificial Sequence
  ENSG00000205464_50 (sequence is synthesized)
gtggtctaacttcctagctgactttggtccttaaaacaaagaaggattccaatttcttatttttaaacaaaatcattaaaacaacaaatgttgtcaactcattttttttttctcagtgaa

SEQ ID NO: 748452 - DNA, 120 bp, Artificial Sequence
  ENSG00000205464_51 (sequence is synthesized)
agacaaaacaaactcaaagttagaatggagagctactgggaagaaatgcatttctgcatctagctgcttcagagtgcattccttatttagatggggcctcatgtgtcacagtacatttct

SEQ ID NO: 748453 - DNA, 120 bp, Artificial Sequence
  ENSG00000205464_52 (sequence is synthesized)
gaaatggttacctgtttccatttggtcttgtgcctactcgtactttagtgacattaatggctactaaggaagtaagacttttggagaaaatgatattctagtcattccaaagttgtattg

SEQ ID NO: 748454 - DNA, 120 bp, Artificial Sequence
  ENSG00000205464_53 (sequence is synthesized)
aatacatttttttttgccatgaaatagccttaggagatctgctggctaataaaccagacttgataatcgcatcatgtgtatggcagaaattatgcttattccccagtgaaataagatttc

SEQ ID NO: 748455 - DNA, 120 bp, Artificial Sequence
  ENSG00000205464_54 (sequence is synthesized)
tgcagtaatttagaagcagtgttagcagcgaagggtcaagggcaaaacaacaacaacaaaaaatgatgtgggtgggacttggatctctttactgtaagaaaaattcttcttttttggaaa

SEQ ID NO: 748456 - DNA, 80 bp, Artificial Sequence
  ENSG00000205476_0 (sequence is synthesized)
agaaccctgagagcgcccggcaccgcggccgccgacgcagcagccgcctccgctcgtcaaccccgaggcgcgcgggctcc

SEQ ID NO: 748457 - DNA, 120 bp, Artificial Sequence
  ENSG00000205476_1 (sequence is synthesized)
gccccgccatggctaagcccgcggcgacggcggcggcggcgtcggaggagctgagccaggtgccggacgaggagctgctgcgctggagcaaggaggagctggcgcggcggctgcggcgcg

SEQ ID NO: 748458 - DNA, 120 bp, Artificial Sequence
  ENSG00000205476_2 (sequence is synthesized)
ccgagggcgagaaggtgggcctcatgctggagcacggcggcctgatgcgcgacgtgaaccggcggctgcagcagcacctgctggagatccgcggcctcaaggacgtgaaccagcggctgc

SEQ ID NO: 748459 - DNA, 120 bp, Artificial Sequence
  ENSG00000205476_3 (sequence is synthesized)
aggacgacaaccaggagctgcgcgagctctgctgcttcctcgacgacgaccggcagaaggggcgcaagctggcgcgcgagtggcagcgcttcgggcgccacgcggccggcgccgtgtggc

SEQ ID NO: 748460 - DNA, 120 bp, Artificial Sequence
  ENSG00000205476_4 (sequence is synthesized)
acgaggtggcccgctcgcagcagaagctgcgcgagctcgaggcgcgccaggaggccctgctgcgcgagaacctggagctcaaggagctggtgctgctgctggacgaggagcgcgcggcac

SEQ ID NO: 748461 - DNA, 80 bp, Artificial Sequence
  ENSG00000205476_5 (sequence is synthesized)
ctcccgcagctccatcgacagccaggccagcctgagcgggccgctgtcgggtggcgcgcccggcgcgggggcccgcgacg

SEQ ID NO: 748462 - DNA, 120 bp, Artificial Sequence
  ENSG00000205476_6 (sequence is synthesized)
gcagtacgtccagcgcgggcagcggcggcagccccgaccaccaccaccacgtcccacccccgctgctgccccccgggccgcacaaggcccccgacggcaaggcaggagccacacgtcggt

SEQ ID NO: 748463 - DNA, 120 bp, Artificial Sequence
  ENSG00000205476_7 (sequence is synthesized)
gcaaggcaggagccacacgtcggtccctggacgacttgtcggcgccgccgcaccaccgcagcatccccaacggcctgcacgatccctcatccacctacatcaggcaactggagagcaaag

SEQ ID NO: 748464 - DNA, 120 bp, Artificial Sequence
  ENSG00000205476_8 (sequence is synthesized)
tgaggctgctggagggtgacaagctcctcgcacagcaggcaggctccggagagttccgcacgctgcggaaaggcttctcgccctaccactcggagtcccagcttgcgtccctgccgccct

SEQ ID NO: 748465 - DNA, 120 bp, Artificial Sequence
  ENSG00000205476_9 (sequence is synthesized)
cctaccaggactccctgcagaacggcccggcctgccccgcacctgagctgccctcgcccccctctgctggctacagccctgcaggacagaagcccgaggctgtcgtgcatgccatgaagg

SEQ ID NO: 748466 - DNA, 120 bp, Artificial Sequence
  ENSG00000205476_10 (sequence is synthesized)
tcctggaggtacacgagaatctggaccggcagctccaggacagctgtgaggaggacctgagtgagaaggagaaggccatcgttcgcgagatgtgcaacgtggtctggagaaagctgggag

SEQ ID NO: 748467 - DNA, 120 bp, Artificial Sequence
  ENSG00000205476_11 (sequence is synthesized)
atgcagccagctccaagccctccatacggcagcacctgtctgggaaccagttcaaggggcctttgtagggccactcttctgtggacgtggactggccctgctgggggtccccagggggag

SEQ ID NO: 748468 - DNA, 120 bp, Artificial Sequence
  ENSG00000205476_12 (sequence is synthesized)
tttcaggccccagacacgggcaggacctccagcccagcccctgtcttcttcctctgtggtgaactgtacataggacgctgcccgccctggcccagctgccatgggtccgatgcactggcc

SEQ ID NO: 748469 - DNA, 120 bp, Artificial Sequence
  ENSG00000205476_13 (sequence is synthesized)
caagccgccatctcccgcctcatacaccagcaacctgggaagacgagacgctgcgactgttcctgcagcagagcggcccggacgcctcattccccctctgggccctgggctccatgagca

SEQ ID NO: 748470 - DNA, 120 bp, Artificial Sequence
  ENSG00000205476_14 (sequence is synthesized)
agaggctgcaggctgcttctgagatccagcctgggaactgtccaggctcctctgtcctgcctgggatggaggggccactcatcaaaccctctactccccggctgccacccacactggaca

SEQ ID NO: 748471 - DNA, 120 bp, Artificial Sequence
  ENSG00000205476_15 (sequence is synthesized)
gagaccaccactacctgggtcttgacgcaggtggcaccacttcttgcccaaatgccgtggcctggccccaggccccccaagcactgggtccccggcatgtggacaaggccactcaccaca

SEQ ID NO: 748472 - DNA, 120 bp, Artificial Sequence
  ENSG00000205476_16 (sequence is synthesized)
tctgtggctggctggaggctgccctgggcccttcctgtgaccctcagccttggaggtcagggtgccctcacacctggggatctgtgctcagccacccgatgcccgctgctccttgctttt

SEQ ID NO: 748473 - DNA, 120 bp, Artificial Sequence
  ENSG00000205476_17 (sequence is synthesized)
ggaggtcatccccctcccccccagtctctgcaatgtccccctgccaccctgtccaggctatgcccttcttgggctcctcctgccccatgcctgaggcacgtcccttttcgtggtttacat

SEQ ID NO: 748474 - DNA, 120 bp, Artificial Sequence
  ENSG00000205476_18 (sequence is synthesized)
gacaggccagtaacaggaagggcctggggagagtttctgggctgagccacatgtgattttcctgatgggcagcactgggccacagctggggctctggttggctgtgacctcccccagggc

SEQ ID NO: 748475 - DNA, 120 bp, Artificial Sequence
  ENSG00000205476_19 (sequence is synthesized)
ctggctgcatcttgggtccctgtggacagagctgtgtaggctgcagatgagagttctgttctttttgggaaggagcgtgtctggccaggttctgcctttagtttgtggtgtgacctttag

SEQ ID NO: 748476 - DNA, 120 bp, Artificial Sequence
  ENSG00000205476_20 (sequence is synthesized)
cagttcactcagcctgtctgggctcttggtggaaacaggtctctgaggttccttttcggccatgcttatggctccaggtcatccagcgccacagggcaggggtcctcactgagggggcgt

SEQ ID NO: 748477 - DNA, 120 bp, Artificial Sequence
  ENSG00000205476_21 (sequence is synthesized)
gagccaacagccgacggctgagggcgggccgggtggagctgagttctgctgccttgcagtcgctgcgggtggagagttgcctccccactctgagcccgtgtcctcagtagtaaaatgggc

SEQ ID NO: 748478 - DNA, 120 bp, Artificial Sequence
  ENSG00000205476_22 (sequence is synthesized)
agcataaggccctcctcacaggattctggcatcaagtgagatcttcagtgtaaatgaccatgtataaactgtaaagtgcaatagaaaactgtgtgtgtgaggaaagtaaggcctagaggg

SEQ ID NO: 748479 - DNA, 120 bp, Artificial Sequence
  ENSG00000205476_23 (sequence is synthesized)
ggtgatgtgtggcacatgacagggattttgatcccacagctgcagcacggggacaggccgcttccccacatccgctcatgccactgtaagcagccctagctcttgggtccaggacctcac

SEQ ID NO: 748480 - DNA, 120 bp, Artificial Sequence
  ENSG00000205476_24 (sequence is synthesized)
caggtcctcgtcagactcctgtgctcttccaggggctgctcagccccacctgaagagcccagagaggctgtcttcctacccagcaggtctcatgcaggcccagggctggggatgcaggca

SEQ ID NO: 748481 - DNA, 120 bp, Artificial Sequence
  ENSG00000205476_25 (sequence is synthesized)
agaggagggagatggccgccctgtccctctccctagctggcggctctattctgagcagttcttgctgcccgtttgctctcaggggaaaggctcacgccccccatcttagccccagggggg

SEQ ID NO: 748482 - DNA, 120 bp, Artificial Sequence
  ENSG00000205476_26 (sequence is synthesized)
taagtgggtgctggtgatgggatggtgtggcgctcctgccgtgggtgttgccaggaggctctttgggaaggagtgtcgcccggtcaggtggtgcgctcccggtcactaggggtgtacacg

SEQ ID NO: 748483 - DNA, 120 bp, Artificial Sequence
  ENSG00000205476_27 (sequence is synthesized)
tgaagttgggtgaacacctgctgctcatggtacccagtgattcttgcccgagtgggcagctgagcagaggcccctctgggtcttgcagtccaaagaaccgcagagtagcccaagggctgt

SEQ ID NO: 748484 - DNA, 120 bp, Artificial Sequence
  ENSG00000205476_28 (sequence is synthesized)
gggtccattttgagtggcagccaagtctgggagcccgtgtgcatcatgtttgggtcaggttggcgtggccaccactgaaataagcaataagtacgggctcctggtacctgcggatctcct

SEQ ID NO: 748485 - DNA, 120 bp, Artificial Sequence
  ENSG00000205476_29 (sequence is synthesized)
gcaaacaggcccagagaacagccttgaagccacctttcccctcaaggggactgaccctgtctttaatgctgcagtggcatccagggatcagtggaacattgctttgagaaccctcctgct

SEQ ID NO: 748486 - DNA, 120 bp, Artificial Sequence
  ENSG00000205476_30 (sequence is synthesized)
gttacggaggcagcacaaagctggtgacccctgagccaacacggcactgggatggctttctaggacagaaccctgtcggcgactgtcacatctcaaactaatagctgattttaaaagcca

SEQ ID NO: 748487 - DNA, 120 bp, Artificial Sequence
  ENSG00000205476_31 (sequence is synthesized)
gcagcagcgacgccatgtacctgagtacaggtggcagttgcagagccgtgggctgtagaaggtcagatggggcttcccacaggggaaatctgggcatgctgtagctcagggtgactccca

SEQ ID NO: 748488 - DNA, 120 bp, Artificial Sequence
  ENSG00000205476_32 (sequence is synthesized)
gctccgtcactagcagggcgacccccttccttctggagccttagctctgaaagcccccagtgggggtgccctttcagatgccccctttccatttcaaaggctctgactcttgatcttgaa

SEQ ID NO: 748489 - DNA, 120 bp, Artificial Sequence
  ENSG00000205476_33 (sequence is synthesized)
gccggacgcggcactggcactcggcttcagtttccactgtgacagatggaggtctcctttcgccccagcccaggtggccaagcccatcctggcctcagaacatgctgagcacattttgta

SEQ ID NO: 748490 - DNA, 120 bp, Artificial Sequence
  ENSG00000205476_34 (sequence is synthesized)
gggtggcacctttttatccaagttactagctacacatcagtgtttaaagagaaaaaagtgacctttcattttttttttcttgaaacttgaggaaacaagatacatactactgattttttt

SEQ ID NO: 748491 - DNA, 120 bp, Artificial Sequence
  ENSG00000205476_35 (sequence is synthesized)
tttttcttaaaactaaatgcatgactgcagagcggtagaggtgtatatttttcatactgtggggcaaagtatttgtgctgctttttggagatggactggaacgtctggtttctgtccccg

SEQ ID NO: 748492 - DNA, 120 bp, Artificial Sequence
  ENSG00000205476_36 (sequence is synthesized)
ggcccggcagctacgtctattttctgtagaaggtgccacagtgagacctggagccaccccttcctgccctggcgccgtttagagctgggagcccgtggactcccggcctgtttctacctt

SEQ ID NO: 748493 - DNA, 120 bp, Artificial Sequence
  ENSG00000205476_37 (sequence is synthesized)
ctattcaaccactctgacgtggggagacaagaagaaatagaactttttgatagtgtggtaaaaacattgatttgaactattttagtaaaaggagtaacaaacaagattgtgatagtgtct

SEQ ID NO: 748494 - DNA, 120 bp, Artificial Sequence
  ENSG00000205476_38 (sequence is synthesized)
actttgagctagataaataaaggcctctttgtgagcctcctggctgggtgctcagtgcttgtttctgtcgtgggtggcagggtcagcaggcagagacagggccaaggcccctcaagcacc

SEQ ID NO: 748495 - DNA, 120 bp, Artificial Sequence
  ENSG00000205476_39 (sequence is synthesized)
gcagatgggggctcagtcggggccccttccacagacagagccgtggcccctcaaggtggacagtgaggccgctgctcctccagctgcctctgtctcatcacaggccagaagtggaaaggg

SEQ ID NO: 748496 - DNA, 120 bp, Artificial Sequence
  ENSG00000205476_40 (sequence is synthesized)
tttcaaatccaagcccccgggttcctgtgtgcgttctacgcagcaaggcttcaaagtttcaaactggtttggaactcaaccaggtcctccaaaggaaaccaaggcaggcacaggatgggg

SEQ ID NO: 748497 - DNA, 120 bp, Artificial Sequence
  ENSG00000205476_41 (sequence is synthesized)
gcaggctggcttggcaggcagctgtgcggatccacccagagtgccttgggaggcagtggggttggctgtggctgctgtgagctgcagccaggcctctcccgcgtccccagggtctggaag

SEQ ID NO: 748498 - DNA, 120 bp, Artificial Sequence
  ENSG00000205476_42 (sequence is synthesized)
gagggcctctgcacattttataagccacagactgcgaaggcctggagccccaccttccacccataacaaagaaagggatagtttcagaactgcttttatttggataactgactgaaggag

SEQ ID NO: 748499 - DNA, 120 bp, Artificial Sequence
  ENSG00000205476_43 (sequence is synthesized)
tctcatttgtaaccaagatggaattcacagtatgttgttacattcacacttaaaaaatatatctctatgtacaggaatttgcaaagagatgtaaacatacattaatttccaagtacattt

SEQ ID NO: 748500 - DNA, 120 bp, Artificial Sequence
  ENSG00000205476_44 (sequence is synthesized)
ctccccttctccctggaggaaaaaaaaaaagccatccaatgaggcaaccccttcaaaataattttaatacaaaggatgcaaacatctataaatgaaaaatgtggttcttctgccccttct

SEQ ID NO: 748501 - DNA, 120 bp, Artificial Sequence
  ENSG00000205476_45 (sequence is synthesized)
gggtgtcatgggagagaatgtcaccgaatgaaaatgacaacagcttggcttcagatggaattggactatttaaaattgagtttccaggaaaaataggcactgatttctagaaggaaatta

SEQ ID NO: 748502 - DNA, 120 bp, Artificial Sequence
  ENSG00000205476_46 (sequence is synthesized)
actccttaccgaagctatttattgagccaatatggctggttaacgtcctcactagtataaagtaacccagtgcaggactctcagacattagctgaaccaagtgtacacagtcagactgca

SEQ ID NO: 748503 - DNA, 120 bp, Artificial Sequence
  ENSG00000205476_47 (sequence is synthesized)
agggcactgatgaggctactctgaaagctggttgtccccgtcctctaggtgtgaggaccactctgattttatcccaggggcccggtccattcttcccatactgcaactgtcgtgcattat

SEQ ID NO: 748504 - DNA, 120 bp, Artificial Sequence
  ENSG00000205476_48 (sequence is synthesized)
acaaggtaccctgctgcttacccacttcaactactctgcaagtcgattagaaaatcttgttaaaaaaacaaagagggaaaaaaggctcacgttatctcatccaggctgcccgccccagcc

SEQ ID NO: 748505 - DNA, 120 bp, Artificial Sequence
  ENSG00000205476_49 (sequence is synthesized)
ccccaactggaggcatgccgggtgggggaatgggcgggggcacaggaggctgtcctccaggggggacggcaggaggtgggtagctggctggcggcaggcccaaccctggaggaggatgag

SEQ ID NO: 748506 - DNA, 120 bp, Artificial Sequence
  ENSG00000205476_50 (sequence is synthesized)
gggggactgcgtgggtaggcgggaggcgtgggggtgggggtgggaagttggggttgtaggtgggtgggggtggggggtagccaggagtagggggtgggatggcaggtggggggaaggagg

SEQ ID NO: 748507 - DNA, 120 bp, Artificial Sequence
  ENSG00000205476_51 (sequence is synthesized)
ctgggggaggaggcacaggtggcgggggcgggttgggcgggtagacatgggggtggtagggcaggtgtgcaggtgggccgtaggcggggggcagggcaccgtaggagggtccctcggtct

SEQ ID NO: 748508 - DNA, 120 bp, Artificial Sequence
  ENSG00000205476_52 (sequence is synthesized)
tcatcatggactgcaggctctggtagccctctccagacatgtaggagctggtggtggacatcccggtcatgtagctggaggggggtgggggcgggggccggtgtggcagcggcggtggct

SEQ ID NO: 748509 - DNA, 120 bp, Artificial Sequence
  ENSG00000205476_53 (sequence is synthesized)
ggtgcacaggggccgggtgggccggagggggaatctggactttggggaggtcagtggcatccacagggcccggcggctcagcctcacctaaggcagcagcgaggggaggcttccggtctg

SEQ ID NO: 748510 - DNA, 120 bp, Artificial Sequence
  ENSG00000205476_54 (sequence is synthesized)
caggagagagacgcatcagtgcccggcctccgccagcaatggttgctttttcagtgcctcctggcccttcagggccatctttacagaggagcagggagcagctgcccgcctcctctgtgg

SEQ ID NO: 748511 - DNA, 120 bp, Artificial Sequence
  ENSG00000205476_55 (sequence is synthesized)
cccaacgcatgggcccatgccccatgtcctgatgccaccagatgtctccccaccatctgtcaagaaggccctccaccctgtctgcgacgacctggggttttccctccctcagccctgacc

SEQ ID NO: 748512 - DNA, 120 bp, Artificial Sequence
  ENSG00000205476_56 (sequence is synthesized)
acaccacctacaggcagtctcggcagcacccgaagcccccttgtgccctggccccagccccctcttcctagtgcaaaacgtgtgggggctcctctgtttttctgccttcagaaactgacc

SEQ ID NO: 748513 - DNA, 120 bp, Artificial Sequence
  ENSG00000205476_57 (sequence is synthesized)
ccaggggtcagggccacactgaactcctgtctgcagcagtggcattttgcagaaaacctcagagttagtcaaatgaatgtgatggcacttaaaacaattctgtacaagtctctgacattc

SEQ ID NO: 748514 - DNA, 120 bp, Artificial Sequence
  ENSG00000205476_58 (sequence is synthesized)
ccggtgtacccatcgaagcagcaattcaggttctattctactcaagagaggctacatcaaaccccactgtgtgctctcagatagcagcctccttgagaggagtgtgtgcatgtgtgtgcg

SEQ ID NO: 748515 - DNA, 120 bp, Artificial Sequence
  ENSG00000205476_59 (sequence is synthesized)
tgtgcgtgctgcgtgcgtgctgcatgtctgtgcgtgctgcgtgtgtgtgcgtgctgcgtgtgcagcagggacaggcagcactaggtgttgagcacgcccaagatactcgtgctcagaacc

SEQ ID NO: 748516 - DNA, 120 bp, Artificial Sequence
  ENSG00000205476_60 (sequence is synthesized)
agcctcaggcccctcccacagcgcctcccaacccatgagccctcacgcccccttctgccaaagccttatttaacatgttttggcctgtgatcccgggtcaccgtcagaccactggaaaat

SEQ ID NO: 748517 - DNA, 120 bp, Artificial Sequence
  ENSG00000205476_61 (sequence is synthesized)
gacatcgcaacaccccaccacaggtagccaaacacacagaatgagtgtcctttcccaaggcagcccaggagacagaccacaggagcaacatttctggttccagagaacatagagaggaca

SEQ ID NO: 748518 - DNA, 120 bp, Artificial Sequence
  ENSG00000205476_62 (sequence is synthesized)
aagccacgaagatgcttctggttccccaggcacttgggttaggcaaggcacagcacgacatcctggttgggtagacgtggccattggcacacaacccgtttgatcttgccaaagcgagca

SEQ ID NO: 748519 - DNA, 120 bp, Artificial Sequence
  ENSG00000205476_63 (sequence is synthesized)
tgagcaggatttcatcaggtcggtaacaggtgtgccactggtgtgccacatcagcaccccgccagcctaccgggtaggaaggtcatatgtgcctggccttagataactggctttggctcc

SEQ ID NO: 748520 - DNA, 120 bp, Artificial Sequence
  ENSG00000205476_64 (sequence is synthesized)
aggtcagggccagatgccctgtggttctaggagctgactaaaaaagaggtgcagaaaagtgctgacacccttcaatgcctcctgtgtgtcactccacagccacctgggcccacaggcctg

SEQ ID NO: 748521 - DNA, 120 bp, Artificial Sequence
  ENSG00000205476_65 (sequence is synthesized)
ctcctccaccttgcagaaatcaacttttccaacactcgaccctgtagcctgaatcttcaagtcaccagtgtgcctgcccttgtgctgtgtgactgagctggaacagcaagtgggggtctc

SEQ ID NO: 748522 - DNA, 120 bp, Artificial Sequence
  ENSG00000205476_66 (sequence is synthesized)
tcctgggcaccccattccctctctgtacacttgctcctgaccaagtcccacacactgccaccaaactgctccctaaacatcactgctgacctgaatgcctcttcccatggcctagggcct

SEQ ID NO: 748523 - DNA, 120 bp, Artificial Sequence
  ENSG00000205476_67 (sequence is synthesized)
cccaggaagcgtacttccctcccttcctcacggcccagctttactgcgcctcccaggccctgctctcttcagccatggcctcctggcagtgtatctggcacccaggtcccactcaagtcc

SEQ ID NO: 748524 - DNA, 120 bp, Artificial Sequence
  ENSG00000205476_68 (sequence is synthesized)
cctactcctggctatctgtaatgggggagggagcagagctctgaggcctccacagcagctactcagtgccctggaggtagcagcacccctgtggctgccccaggctccccagataaacca

SEQ ID NO: 748525 - DNA, 120 bp, Artificial Sequence
  ENSG00000205476_69 (sequence is synthesized)
cccatctcctcagtgaaggcacagccccaggctcggaccaggggaactgcacttggcgaggaggtgctccataaatgcttcatgagcaaccacaggcatttaagtaaggttcatattgaa

SEQ ID NO: 748526 - DNA, 120 bp, Artificial Sequence
  ENSG00000205476_70 (sequence is synthesized)
ttgggggttttgggatttggccccaaagtggaaaatgacgcctctgttctcccaaagcacaaacactatcatgattgagtaggaacagaaatgtaatctgtggcacatctgttacgggca

SEQ ID NO: 748527 - DNA, 120 bp, Artificial Sequence
  ENSG00000205476_71 (sequence is synthesized)
cacagtgctgtcagccccagtgtgagccacgtgcaccgaccaacagtgagtgtagcaggctggaggagctgctgacagaggcttggaagcctccggagtatcgaccaccttttggagagc

SEQ ID NO: 748528 - DNA, 120 bp, Artificial Sequence
  ENSG00000205476_72 (sequence is synthesized)
aagcacaggtcactctggccttctctagcgcatcaccttctgaaatggtgccacaggtaaagaatgccatctactttacagcttttctcctctattgccagcggtatcagagaggctttc

SEQ ID NO: 748529 - DNA, 120 bp, Artificial Sequence
  ENSG00000205476_73 (sequence is synthesized)
cagcttaccatgtactacttgttgagaacttttcactctttcatttactctctgtacaattgcttattcttcagaatgcactaagacgacacactgccaataggaagcaggtgtaggggc

SEQ ID NO: 748530 - DNA, 120 bp, Artificial Sequence
  ENSG00000205476_74 (sequence is synthesized)
ggccggagcctagtagccacagtaaccctgcctctatctcagaaggcggggtttggctttctttcctaaaactgattctaatacaatgtgtagtttagcatttctggatgtgagaggtcg

SEQ ID NO: 748531 - DNA, 120 bp, Artificial Sequence
  ENSG00000205476_75 (sequence is synthesized)
gaaaatattcagatatacttaacaatttacaacattctcaaaatacctggtcaaaatcagaactttgagacacggtctccctctcacccaggctggagtacggtggtgcaatcatagctc

SEQ ID NO: 748532 - DNA, 88 bp, Artificial Sequence
  ENSG00000205476_76 (sequence is synthesized)
caggctggagtacgtgcccagggctcaaatgatcttcccatctcagactcctaagtagttgggactacaggtgtgtgctaccacacct

SEQ ID NO: 748533 - DNA, 120 bp, Artificial Sequence
  ENSG00000205476_77 (sequence is synthesized)
ctgcctccgcctcccaaagtgctgggatcaaaaacacaagccattgtgcccagcccaagaacaattttgcaaagattcctgcctgtggctgacattgtcaatctgggccccagtctccct

SEQ ID NO: 748534 - DNA, 120 bp, Artificial Sequence
  ENSG00000205476_78 (sequence is synthesized)
gcctgtggctgacattgtcaatctgggccccagtctcccttttctaagttcccaggacctgctgcgtccaacattcagaggcgatgtgcacagctggccaagctgcttcagcagatgctt

SEQ ID NO: 748535 - DNA, 120 bp, Artificial Sequence
  ENSG00000205476_79 (sequence is synthesized)
acctggaggtgggtgggctggaggcaacggtggatgagtggtctcaattttggggattttaggtggtggtggttctacaaagaaaaagcagattagaaaaccactcatacttcttcacat

SEQ ID NO: 748536 - DNA, 120 bp, Artificial Sequence
  ENSG00000205476_80 (sequence is synthesized)
gaataagcatgtcataaagaaaaatgtactggcagagatttctttgggagaaaaacaacagagatgaccaaggctttaagggaacttgaagaaggtttcagctaaaccattatgcatgaa

SEQ ID NO: 748537 - DNA, 120 bp, Artificial Sequence
  ENSG00000205476_81 (sequence is synthesized)
tcctgttaacaaattaaatgccacctccctccaaaagacctgcgagcttcccacaggcagcccattttccatgtctacctaagtttccttgctgaccacttcactcaagtccttccgacc

SEQ ID NO: 748538 - DNA, 120 bp, Artificial Sequence
  ENSG00000205476_82 (sequence is synthesized)
atgtgagaccagcagagcaacgtcttcatgagcatgtatgacctatctggagtcctccctggtacagaggacacaaagaagggtccagagtagcaacatcatgtcactgagtcccctgag

SEQ ID NO: 748539 - DNA, 120 bp, Artificial Sequence
  ENSG00000205476_83 (sequence is synthesized)
ggttccacaagagaatctctatcttttcattcttagacatagtttattctctctttcccaaatactgacttccagttggcagcatgtcagaagcagcacattaactggagtcagcagagc

SEQ ID NO: 748540 - DNA, 120 bp, Artificial Sequence
  ENSG00000205476_84 (sequence is synthesized)
tctggaggttgacacactgatggcaggaagaatgtgccgctcacaaaagcccagcagtcaggaccccttgaggtggaggaaacagcccacccttccggggtcaggcagcggcacgcagcc

SEQ ID NO: 748541 - DNA, 120 bp, Artificial Sequence
  ENSG00000205476_85 (sequence is synthesized)
agaatccacaatgacagcactaggtctccaaggcagcccaagggaagtccaatctcatccgtttaagaaggcagcgtgcacatcacaactgaaaaagaaccctatttttctgtttgcatg

SEQ ID NO: 748542 - DNA, 120 bp, Artificial Sequence
  ENSG00000205476_86 (sequence is synthesized)
ctgaggctttttcttcctgaaatgtactttcttctggcttgtacaccactcagatctgagtctcctctgccatcactggcctctttctctggatttcctccatctcaaatacaggctcaa

SEQ ID NO: 748543 - DNA, 120 bp, Artificial Sequence
  ENSG00000205476_87 (sequence is synthesized)
tttaagttccagggacttcctctctcttcaccctcttcctcagagtccaaagcccctctctaagtggacaactacaaacctacatttctagcgtccatcttgccaccaaaaccatggccc

SEQ ID NO: 748544 - DNA, 120 bp, Artificial Sequence
  ENSG00000205476_88 (sequence is synthesized)
atccctagacccaccaatcagcacctcacactctaccttttgcctctgtatcctataactgctattactctcacctcagggacccacctcctgcctttttccacagctggtaatagttag

SEQ ID NO: 748545 - DNA, 120 bp, Artificial Sequence
  ENSG00000205476_89 (sequence is synthesized)
ggtaatagttagctaaagccgtctacatcagggctgtccaacagcaatataactgagagccacatatctacaattttaaactttccaggagccattttattttttgagacagggtctcgc

SEQ ID NO: 748546 - DNA, 120 bp, Artificial Sequence
  ENSG00000205476_90 (sequence is synthesized)
gctggagtgtagtaatgtaatcatggctcactgcagcttcaaccaaccaggctcaagtgatcttgctgcctgagtctcccaagtagctgggaccataggtgtggcgccaccacgccgagc

SEQ ID NO: 748547 - DNA, 120 bp, Artificial Sequence
  ENSG00000205476_91 (sequence is synthesized)
gtggcgccaccacgccgagctgatttttaagttttgtgtagtgatggggtcaccctatgtggcccagtctggcctggaactcctgggctcaaagcatgccttggcctcccaaagtgctgg

SEQ ID NO: 748548 - DNA, 120 bp, Artificial Sequence
  ENSG00000205476_92 (sequence is synthesized)
ccactttaacaagaaaaaggagcactccagcctgcattaacagagcaagactctggaaataaaaggaaaaaggataaaatttatttaacccgatagatcgaaaattttatttcaacatgt

SEQ ID NO: 748549 - DNA, 120 bp, Artificial Sequence
  ENSG00000205476_93 (sequence is synthesized)
aaccaatataaagctttactaatgagatgtcttacgttctcctttcttggaaatctctgtgtattttgcattgtcagtgcttcagaatttgacccagtcacatttcgagtgcttgcagcc

SEQ ID NO: 748550 - DNA, 120 bp, Artificial Sequence
  ENSG00000205476_94 (sequence is synthesized)
ctctgcagccagtagccttcggcatggcacagtgcagctgagttcctctataaagcttcctccggatctgcccttcctgccccgcagccagcatgctgaggccaccatgtttcccatgag

SEQ ID NO: 748551 - DNA, 120 bp, Artificial Sequence
  ENSG00000205476_95 (sequence is synthesized)
tgccagcaagattctccccattcctaaccacttgccctatttactgctgccaggggactccttctcaaatgaatttagactctgccattcccctgctaaatctccaatggcttcccttgc

SEQ ID NO: 748552 - DNA, 120 bp, Artificial Sequence
  ENSG00000205476_96 (sequence is synthesized)
ctctgccaaactcacagtcctccaggtaaactctgtgatctggtcctaacccacattttagatcctatcagaagctattgcctttcaattcatcacattccagaaagactcctctccatt

SEQ ID NO: 748553 - DNA, 120 bp, Artificial Sequence
  ENSG00000205476_97 (sequence is synthesized)
tcccctgattctcaattcctttgctcacttgcgtacttccaacttattgctccatcctccccctctgctctcgctgctcaaatgcaactcttccttcaaggtcatatatagtttgtttcc

SEQ ID NO: 748554 - DNA, 120 bp, Artificial Sequence
  ENSG00000205476_98 (sequence is synthesized)
tgcctctgacagacctgcacgtcaactcaattgcatttcatgtggcatggagtgtagcccgttcttgtgtctaacatttaatgtcggtcaatttgaagctaattaaaaaattcacctgta

SEQ ID NO: 748555 - DNA, 68 bp, Artificial Sequence
  ENSG00000205476_99 (sequence is synthesized)
aattcacctgggcgagcagatcacctgaggtcgggagtttgacacctgcctgaccaacatggagaaac

SEQ ID NO: 748556 - DNA, 120 bp, Artificial Sequence
  ENSG00000205476_100 (sequence is synthesized)
tgtctcaaaaaaaaaaaaaaaattcacctgtactgaactcatcattccctcaaatatactggaaaaaaaaaaaaagtagctctatcataactggaagatttcacagcagtttaatgaatg

SEQ ID NO: 748557 - DNA, 120 bp, Artificial Sequence
  ENSG00000205476_101 (sequence is synthesized)
tcataactggaagatttcacagcagtttaatgaatggaactaagaaccgagaacatggttctaagaaccaggaactactggaactaagaaccaagtaacaaagaaagacaaatgagtcaa

SEQ ID NO: 748558 - DNA, 120 bp, Artificial Sequence
  ENSG00000205476_102 (sequence is synthesized)
tagggtctgtgccttcaaagagttcagtatgataggtggactgaccctgtgacaaaacatttctaactttctgttttgtaattgttccaattttgctcactccttctgtttatttccaat

SEQ ID NO: 748559 - DNA, 120 bp, Artificial Sequence
  ENSG00000205476_103 (sequence is synthesized)
attgacatgaactaactttgggttctagacatgtgacagcacctcaacccaagtgtgtttcaaagaggccttgcctgcaagggcagctgggctgggccgggctggtgctgtccgggcagc

SEQ ID NO: 748560 - DNA, 120 bp, Artificial Sequence
  ENSG00000205476_104 (sequence is synthesized)
acaccaccccctactgcccccccgcatctgctgtggcttggtgcttgggagaggactcctgctgctgtgatgggggtaaatagtctctaaaaataaaattgcagcaacagttctcctaca

SEQ ID NO: 748561 - DNA, 120 bp, Artificial Sequence
  ENSG00000205476_105 (sequence is synthesized)
gccataattatacttttatatatgttactgagtacatttttattgccagtaatgttttctgtactgatagcttcgtaagagcacaattttagaatctatgatcaggtgatgaacagaaag

SEQ ID NO: 748562 - DNA, 120 bp, Artificial Sequence
  ENSG00000205476_106 (sequence is synthesized)
acaatgctgatggaaaagttttgtatgagctctaaagttaagatttaaggccaatttagatctgaaaagaaacaatgttggctaagaatttaaagttttgcatataaacacataaaacta

SEQ ID NO: 748563 - DNA, 120 bp, Artificial Sequence
  ENSG00000205476_107 (sequence is synthesized)
aaaaaacatcagaacaggaaattacctgctgctttgttctcttctttgggagaaacaacctgttacaaaagaaaatacacaattgttaactgggatcctgagtatgatgagaaaaaaatg

SEQ ID NO: 748564 - DNA, 120 bp, Artificial Sequence
  ENSG00000205476_108 (sequence is synthesized)
gattatccaggtaccaccagaatcagcgacggcagtcactgtgaacagcctcggacaaaaattatttctagcctgaactttcagggcaaaccacggcacctaccagatcatcatttctgc

SEQ ID NO: 748565 - DNA, 120 bp, Artificial Sequence
  ENSG00000205476_109 (sequence is synthesized)
tcccttcctctttccatttaccaaataagacagaatgactagctttcctgaatggtgagttctgagtaaacactaagtttcaggaccacttgggtgcaggaaacggtccactgtttgggg

SEQ ID NO: 748566 - DNA, 120 bp, Artificial Sequence
  ENSG00000205476_110 (sequence is synthesized)
tcaggcagctgcacagaagcagcatgcacaacgacactgctaggacacggcaacgacaccgacaggcttcagaaccctggcagggatgaaacaggcagcagggctggagccgggcagaga

SEQ ID NO: 748567 - DNA, 120 bp, Artificial Sequence
  ENSG00000205476_111 (sequence is synthesized)
gccccctcctggttctcagaggcagcctgtccttggagcacctttgttttcaggctccccaccgacaagcagtcggactgcgagtttcggcgaacaccccctgcttccggtgttccctgt

SEQ ID NO: 748568 - DNA, 120 bp, Artificial Sequence
  ENSG00000205476_112 (sequence is synthesized)
gctcgcttagaaatgggaacagtgctcaggtgttgccgccacctggaaagcctgctctacccagggcctgctttagcccactcaccacggctcgcttaacctgtcggggagaactgggct

SEQ ID NO: 748569 - DNA, 120 bp, Artificial Sequence
  ENSG00000205476_113 (sequence is synthesized)
gcggagagggtttcttgggctgttgggctggctgctgctgctgggctggttgctgggggtccttctgctggggctgggatggttcggagctttgagacggctgtgactgctgtacttgcg

SEQ ID NO: 748570 - DNA, 120 bp, Artificial Sequence
  ENSG00000205476_114 (sequence is synthesized)
gcacttgtggtgtaggctgaagagatgggggctgttgcagctgatggggggtgtgatgaggcatctgttgttttccttgtgagtaaagatccaggatttggtggcagatgtctaaatgat

SEQ ID NO: 748571 - DNA, 120 bp, Artificial Sequence
  ENSG00000205476_115 (sequence is synthesized)
agccaacaattacattttacacaaattggtattttaaataaaattttacctggataaagaatcagttatgatacccctacgaggacctaagcatgaatcacatttacaactcaccccatc

SEQ ID NO: 748572 - DNA, 120 bp, Artificial Sequence
  ENSG00000205476_116 (sequence is synthesized)
ttcgttgtgtgcaacactggtgtgtatttttagtttaccaaaagtatgtgtttggacaaagtggaaactattagataatttaattaatgatgcttctgaaatattgctcacatatgtcta

SEQ ID NO: 748573 - DNA, 120 bp, Artificial Sequence
  ENSG00000205476_117 (sequence is synthesized)
tctgggaaaatccattcttgggactcagggtacacatggaagaatcatctcaacatggaacaccctcacgagaacgcttagcatgcctggtaccttccaaaacgtcgaccgggacatctt

SEQ ID NO: 748574 - DNA, 120 bp, Artificial Sequence
  ENSG00000205476_118 (sequence is synthesized)
gaacaaactgctcccaccatctcctatacatgggtttggaggtccattcttgtatttcaaatttgcacaaacgtcctgcgagatacatcactgctactgctatgatctctggttcccact

SEQ ID NO: 748575 - DNA, 120 bp, Artificial Sequence
  ENSG00000205476_119 (sequence is synthesized)
gcagtgacaaggtggtgcagagactagttcaacaagaaaaaaaaaggttagataatatgatctaatatttatgattaaaccagtgcatggagatgccataactaaccattaatttgctta

SEQ ID NO: 748576 - DNA, 120 bp, Artificial Sequence
  ENSG00000205476_120 (sequence is synthesized)
ttctcccctaaatttaattaaagtactataaataaataaactcaagtctttactcttctaaaggtacccgactaagttactttaaccatagttagtaatttctctattccttaaagaatc

SEQ ID NO: 748577 - DNA, 120 bp, Artificial Sequence
  ENSG00000205476_121 (sequence is synthesized)
agaagaattctagcacatccaaaaattgctacaccaatgaaaatgacttatgttatttaaactgttgaaatcctagccactcaactgtttcttcaaatgaaatcttatggaggaagtcaa

SEQ ID NO: 748578 - DNA, 120 bp, Artificial Sequence
  ENSG00000205476_122 (sequence is synthesized)
atgtaagagaagcttcactgactgcagtgggatggggctggcagcaactccattcacaggcattctgtttcccaccacggcccctcattagatccctggcctctcaaaagagtgttaagg

SEQ ID NO: 748579 - DNA, 120 bp, Artificial Sequence
  ENSG00000205476_123 (sequence is synthesized)
ctctaaaactataccaggaagtatatttttgcaaaaccaaatgggctctaagtaattagttttcaaaattctccagtgtattgttttggacttatgtttcagactggtgataaaatttca

SEQ ID NO: 748580 - DNA, 120 bp, Artificial Sequence
  ENSG00000205476_124 (sequence is synthesized)
gcacctcacaacaccatgacacggcagggcagaaggaaaccctctgccgggaagcagatgacctggacgtcagccccagctttgccattaactggctcctcaagccagggcaagtcagtt

SEQ ID NO: 748581 - DNA, 120 bp, Artificial Sequence
  ENSG00000205476_125 (sequence is synthesized)
tcttctgacacaaaatgaggggtttagatgaaatggtccataaagtctctgcctattttaaaatactgtaattaatcaacatttgaacatgtatacctgtcatttacaaatgtccatgcc

SEQ ID NO: 748582 - DNA, 120 bp, Artificial Sequence
  ENSG00000205476_126 (sequence is synthesized)
atttgaaccaacttttgaattttgtttttatcacctagaaatggggacaaaaaggtaaattaatagcaatagaaaaattcacaggcagcatcaagtatttattaaaaacctaccacgtgt

SEQ ID NO: 748583 - DNA, 120 bp, Artificial Sequence
  ENSG00000205476_127 (sequence is synthesized)
tcagcaccactcaaatacacagcaaagagcttttgcgtgggaaacaaggatgaatgatgtgggtccacatcctaccccttcttcctcctcatgacctacgctgaaccaccatgtatggaa

SEQ ID NO: 748584 - DNA, 120 bp, Artificial Sequence
  ENSG00000205476_128 (sequence is synthesized)
aacctggctccaaggctaagtttattagtccatttaaaaaattctgcctcattttcctgcctctcccatcacttggcaactggatgacagagcctgtttatacataaaaggaaacagcat

SEQ ID NO: 748585 - DNA, 120 bp, Artificial Sequence
  ENSG00000205476_129 (sequence is synthesized)
tagcagctgcaatgctgaattgactgagcaagccatgcccttggtatttcacacatcaaactttgttttccgcttttgagaagcgtaatttgagtgtcatcaaattataaagacttgatt

SEQ ID NO: 748586 - DNA, 120 bp, Artificial Sequence
  ENSG00000205476_130 (sequence is synthesized)
tcagaatgaaaaaattcttctgaaaactttcttcttacctttgagttgctttgcatattttagtaggaactggtatggatgttctacctgtaaatcaaacttgatggtctgcagtaagat

SEQ ID NO: 748587 - DNA, 120 bp, Artificial Sequence
  ENSG00000205476_131 (sequence is synthesized)
tctctccagaaccattacttcctcctaaaaatcaatcacaaatgttaggacagtaattacaattgcaggtctcaagcagcattacaaaagtgagctttcctgtctatttattctctcttc

SEQ ID NO: 748588 - DNA, 120 bp, Artificial Sequence
  ENSG00000205476_132 (sequence is synthesized)
aagttatattttagcaactgcctttccttcctttctctcccactcagacttttaacatgctcagagacactgataaattctgaaaagatctcaaacaggaagacaaagcagaggtgtaat

SEQ ID NO: 748589 - DNA, 120 bp, Artificial Sequence
  ENSG00000205476_133 (sequence is synthesized)
gtaaaaaaaaatactgaaaacaaaagatccttaaaaatattattattttcaatacatacatgagtctccctttacaaaacagatctttacgttattgataatttgactaaattgtaattt

SEQ ID NO: 748590 - DNA, 120 bp, Artificial Sequence
  ENSG00000205476_134 (sequence is synthesized)
ctttcaagacctcaaattttaaaaatgcaatcttttaggaattttcattgaaaacattttaagcaagaaagagtttatgatagccagcctcatgaaaactcagagataaattgtaccagt

SEQ ID NO: 748591 - DNA, 120 bp, Artificial Sequence
  ENSG00000205476_135 (sequence is synthesized)
gtgtgtgtatgtgtgtgtatatatactcatgtacacatatagtgtattacgtgcaaatgggggcaaatcaattttgtgtttaaatctttcatttatttgaaataaatcatcccaacaaca

SEQ ID NO: 748592 - DNA, 120 bp, Artificial Sequence
  ENSG00000205476_136 (sequence is synthesized)
agcagctccagccactttgctgaccgaattcctggaaggtgtctactgtttaggaatgtgagaccaagaggaaggggccagccctgcccatgtgactcactccgggatccctcatccacc

SEQ ID NO: 748593 - DNA, 120 bp, Artificial Sequence
  ENSG00000205476_137 (sequence is synthesized)
gtcacggggtgggagagacactctctcctcactcgctctcactggctcttcttcattcattcattcattctgtttattcagccatccaacaaatgtttacaaagcccacgttggagagtg

SEQ ID NO: 748594 - DNA, 120 bp, Artificial Sequence
  ENSG00000205476_138 (sequence is synthesized)
attcattctggctcctggtcccagccccagccccaaattctgggggtcggtggtgtttgctttgctcttaagcaaagggtctaaggccaagccttcctccctccctcctgtgtgcaggag

SEQ ID NO: 748595 - DNA, 120 bp, Artificial Sequence
  ENSG00000205476_139 (sequence is synthesized)
ttagttacaaccccacagcttgcacgagttctcagggattcagaggcagcacccaggacctgctttaggagctccctgcccatccgatgggggaggcagcctgggcggagcatcccgaga

SEQ ID NO: 748596 - DNA, 120 bp, Artificial Sequence
  ENSG00000205476_140 (sequence is synthesized)
gagccccgaacccgtgggaggtgggaggcctcgcctgtggatgtggccccatctgctgccgatggctggcccaggccctgtgagtggtgccgtctgtgcagggacccaagggcaggaagt

SEQ ID NO: 748597 - DNA, 120 bp, Artificial Sequence
  ENSG00000205476_141 (sequence is synthesized)
atccctgtgtggactccctgggcctcacaggttctcagctaagctgctggaccagcgaggcaggtcccactggtgtggttcatgagaagtgcgtggacagcaccatcctgtgctgggagg

SEQ ID NO: 748598 - DNA, 120 bp, Artificial Sequence
  ENSG00000205476_142 (sequence is synthesized)
gctgccatcctatcttgtaggaggcgaaggcagggctcagagctaagagaaggcgctgcctcaggtccgtgcctcccaccctgcctgggacttgggcagacattccttccttagccgttt

SEQ ID NO: 748599 - DNA, 120 bp, Artificial Sequence
  ENSG00000205476_143 (sequence is synthesized)
actgagcacctgttgcacaccaggccccgtttccatgctcctgggatacttccatgaagcaagacagacagaagtctcctttggaagatggataaactggcaaacaaatccatggatggg

SEQ ID NO: 748600 - DNA, 120 bp, Artificial Sequence
  ENSG00000205495_0 (sequence is synthesized)
atgttttatcacaacaagagcatatttcacccagtcacatttttcctcattggaatcccaggtctggaagacttccacatgtggatctccgggcctttctgctctgtttaccttgtggct

SEQ ID NO: 748601 - DNA, 120 bp, Artificial Sequence
  ENSG00000205495_1 (sequence is synthesized)
ttgctgggcaatgccaccattctgctagtcatcaaggtagaacagactctccgggagcccatgttctacttcctggccattctttccactattgatttggccctttctacaacctctgtg

SEQ ID NO: 748602 - DNA, 120 bp, Artificial Sequence
  ENSG00000205495_2 (sequence is synthesized)
cctcgcatgctgggtatcttctggtttgatgctcacgagattaactatggagcttgtgtggcccagatgtttctgatccatgccttcactggcatggaggctgaggtcttactggctatg

SEQ ID NO: 748603 - DNA, 120 bp, Artificial Sequence
  ENSG00000205495_3 (sequence is synthesized)
cgtcccgttttacttacacttcccatggtctatcttatctaccgcctacccttttgtcaggctcacataatagcccattcctactgtgagcacatgggcattgcaaaattgtcctgtgga

SEQ ID NO: 748604 - DNA, 120 bp, Artificial Sequence
  ENSG00000205495_4 (sequence is synthesized)
aacattcgtatcaatggtatctatgggctttttgtagtttctttctttgttctgaacctggtgctcattggcatctcgtatgtttacattctccgtgctgtcttccgcctcccatcacat

SEQ ID NO: 748605 - DNA, 120 bp, Artificial Sequence
  ENSG00000205495_5 (sequence is synthesized)
gatgctcagctaaaagccctaagcacgtgtggcgctcatgttggagtcatctgtgttttctatatcccttcagtcttctctttccttactcatcgatttggacaccaaataccaggttac

SEQ ID NO: 748606 - DNA, 120 bp, Artificial Sequence
  ENSG00000205495_6 (sequence is synthesized)
attcacattcttgttgccaatctctatttgattatcccaccctctctcaaccccatcatttatggggtgaggaccaaacagattcgagaacgagtgctctatgtttttactaaaaaataa

SEQ ID NO: 748607 - DNA, 120 bp, Artificial Sequence
  ENSG00000205496_0 (sequence is synthesized)
atgtccattatcaacacatcatatgttgaaatcaccaccttcttcttggttgggatgccagggctagaatatgcacacatctggatctctatccccatctgcagcatgtatcttattgct

SEQ ID NO: 748608 - DNA, 120 bp, Artificial Sequence
  ENSG00000205496_1 (sequence is synthesized)
attctaggaaatggcaccattctttttatcatcaagacagagccctccttgcatgggcccatgtactattttctttccatgttggctatgtcagacttgggtttgtctttatcatctctg

SEQ ID NO: 748609 - DNA, 120 bp, Artificial Sequence
  ENSG00000205496_2 (sequence is synthesized)
cccactgtgttaagcatcttcctgttcaatgcccctgaaacttcttctagtgcctgctttgcccaggaattcttcattcatggattctcagtactggagtcctcagtcctcctgatcatg

SEQ ID NO: 748610 - DNA, 120 bp, Artificial Sequence
  ENSG00000205496_3 (sequence is synthesized)
atgctcctggttcttcccttccctttcactttaagaagcttgagatattgcaagaaaaaccaattatcccattcctactgtctccaccaggatgtcatgaagttggcctgttctgacaac

SEQ ID NO: 748611 - DNA, 120 bp, Artificial Sequence
  ENSG00000205496_4 (sequence is synthesized)
agaattgatgttatctatggcttttttggagcactctgccttatggtagactttattctcattgctgtgtcttacaccctgatcctcaagactgtaccgggaattgcatccaaaaaggag

SEQ ID NO: 748612 - DNA, 120 bp, Artificial Sequence
  ENSG00000205496_5 (sequence is synthesized)
gagcttaaggctctcaatacttgtgtttcacacatctgtgcagtgatcatcttctacctgcccatcatcaacctggccgttgtccaccgctttgccgggcatgtctctcccctcattaat

SEQ ID NO: 748613 - DNA, 120 bp, Artificial Sequence
  ENSG00000205496_6 (sequence is synthesized)
gttctcatggcaaatgttctcctacttgtacctccgctgatgaaaccaattgtttattgtgtaaaaactaaacagattagagtgagagttgtagcaaaattgtgtcaatggaagatttaa

SEQ ID NO: 748614 - DNA, 120 bp, Artificial Sequence
  ENSG00000205497_0 (sequence is synthesized)
tcatagcagagccctatgaatgaatcatgtccattatcaacacatcatatgttgaaatcaccaccttcttcttggttgggatgccagggctagaatatgcacacatctggatctctatcc

SEQ ID NO: 748615 - DNA, 120 bp, Artificial Sequence
  ENSG00000205497_1 (sequence is synthesized)
ccatctgcagcatgtatcttattgctattctaggaaatggcaccattctttttatcatcaagacagagccctccttgcatgagcccatgtactattttctttccatgttggctatgtcag

SEQ ID NO: 748616 - DNA, 120 bp, Artificial Sequence
  ENSG00000205497_2 (sequence is synthesized)
acttgggtttgtctttatcatctctgcccactgtgttaagcatcttcctgttcaatgctcctgaaatttcatccaatgcctgctttgcccaggaattcttcattcatggattctcagtac

SEQ ID NO: 748617 - DNA, 120 bp, Artificial Sequence
  ENSG00000205497_3 (sequence is synthesized)
tggagtcctcagtcctcctgatcatgtcatttgatagattcctagccatccacaaccctctgagatacacctcaatcctgacaactgtcagagttgcccaaatagggatagtattctcct

SEQ ID NO: 748618 - DNA, 120 bp, Artificial Sequence
  ENSG00000205497_4 (sequence is synthesized)
gaaacttgagatattgcaagaaaaaccaattatcccattcctactgtctccaccaggatgtcatgaagttggcctgttctgacaacagaattgatgttatctatggcttttttggagcac

SEQ ID NO: 748619 - DNA, 120 bp, Artificial Sequence
  ENSG00000205497_5 (sequence is synthesized)
tctgccttatggtagactttattctcattgctgtgtcttacaccctgatcctcaagactgtactgggaattgcatccaaaaaggagcagcttaaggctctcaatacttgtgtttcacaca

SEQ ID NO: 748620 - DNA, 120 bp, Artificial Sequence
  ENSG00000205497_6 (sequence is synthesized)
tctgtgcagtgatcatcttctacctgcccatcatcaacctggccgttgtccaccgctttgcccggcatgtctctcccctcattaatgttctcatggcaaatgttctcctacttgtacctc

SEQ ID NO: 748621 - DNA, 120 bp, Artificial Sequence
  ENSG00000205497_7 (sequence is synthesized)
cactgacgaacccaattgtttattgtgtaaaaactaaacagattagagtgagagttgtagcaaaattgtgtcaacggaagatttaacagtcatatgtgacagaaaacctggaaatgtctg

SEQ ID NO: 748622 - DNA, 120 bp, Artificial Sequence
  ENSG00000205497_8 (sequence is synthesized)
tactgcgaatgagaatagaactataaacaggaagtacgttgccttatgtccccatttcagttaagcagaataaaaataaatgtcttatgatagcatctccgatacaagcaacaaattaca

SEQ ID NO: 748623 - DNA, 120 bp, Artificial Sequence
  ENSG00000205497_9 (sequence is synthesized)
accaagacagaaaaatgataatttttacagctctgacagaagttggatttctcattatctacattcaatctcttataccaagttcttttaatgctagacctaaattagctgtctctttat

SEQ ID NO: 748624 - DNA, 120 bp, Artificial Sequence
  ENSG00000205497_10 (sequence is synthesized)
ccattttaatcatcttagaatacaaccatttttttaatttaatcatttatattccatattgggatacatgtgctggatttttacatggttatatgggacccgggtagtgagcatagtacc

SEQ ID NO: 748625 - DNA, 120 bp, Artificial Sequence
  ENSG00000205497_11 (sequence is synthesized)
caatagatagtttttcagtccaatcctgcctctttcactcttgccccaccagtagtctgcagtcaccagcatttctctcataaaatattgctaagttccctgccttataattgattcaca

SEQ ID NO: 748626 - DNA, 120 bp, Artificial Sequence
  ENSG00000205497_12 (sequence is synthesized)
atgaaatgcaagagtaatctataggcaaattgaatgtgtaagtgtctcttttaaatttgaactcttcctttgttagaaatacagttaaatcaataaggaacatattctaagaccctacat

SEQ ID NO: 748627 - DNA, 120 bp, Artificial Sequence
  ENSG00000205497_13 (sequence is synthesized)
ggcctggaccctttctacttactcaacgtcgtcagatactcattaatctccagccacatcaacctactgaacagtttttgaatttacagagctctttgctttcttgagttttcacatcag

SEQ ID NO: 748628 - DNA, 120 bp, Artificial Sequence
  ENSG00000205497_14 (sequence is synthesized)
atctcttttgttaaaatgctcttgactccaattttgtataatgcatttctatttttttctttaaattttggcttaatttcctcatagattacctagccctagtttgtattatgatcttct

SEQ ID NO: 748629 - DNA, 120 bp, Artificial Sequence
  ENSG00000205497_15 (sequence is synthesized)
cttttatctcttccattgcgggtttattctttcatcttttgtctctttcattgctggtttattctttattctttattatacttaatatttgcaattacagatatattttatccttatttc

SEQ ID NO: 748630 - DNA, 120 bp, Artificial Sequence
  ENSG00000205497_16 (sequence is synthesized)
gcctaatgtctaggacacttctgatgcagagtagattttaataaataattgctaatgaatgaatttaaaaataagaccatgtttgttgaaaaagatgttcactgaggagttcagtaatat

SEQ ID NO: 748631 - DNA, 120 bp, Artificial Sequence
  ENSG00000205497_17 (sequence is synthesized)
ttcttcaaggtaggatacaagttttttaaattgtctatttcaaatataggcatatcattgatgctaatgatttttaaaacaggaaaaaaaaaagatatgatgttaaagacaaatttattg

SEQ ID NO: 748632 - DNA, 120 bp, Artificial Sequence
  ENSG00000205497_18 (sequence is synthesized)
ccttggatttgtggctgaaaaattgtccaactttccttcctaatatgacctcaaaatcttgcatattgcgaaaatcattttagccttttcattttacctacccattgaatcaagtcattt

SEQ ID NO: 748633 - DNA, 120 bp, Artificial Sequence
  ENSG00000205497_19 (sequence is synthesized)
ttatcaaccacgtcagttcaagtctcctacacttctaacctcaggtgaatcaagaaacaccttccaggaatgtcaaatgcttaaaaaataataatcagcccacaactgaccgtacttcac

SEQ ID NO: 748634 - DNA, 120 bp, Artificial Sequence
  ENSG00000205497_20 (sequence is synthesized)
aattaatggaaaatctttatagatacaaacattgtttgtaaacctctaatttatgcaggatatgcttccaggtctttttaggcattttaaaaatttgctctcaacaatgacccagctttt

SEQ ID NO: 748635 - DNA, 120 bp, Artificial Sequence
  ENSG00000205497_21 (sequence is synthesized)
tataaaaggttttttcctatttattttagttgaagagattgaggctctgagagtttgatttaatgaaattcacacagagaggaagtcaaaagctggggttcaaacctaatctctgatgct

SEQ ID NO: 748636 - DNA, 120 bp, Artificial Sequence
  ENSG00000205497_22 (sequence is synthesized)
ccaggatagtattatcttgaatacattttagtttttaaattcaggactacgtatgttttcacaaacctatcctagtgtagaaaatcctatcatcagatcagggcaagaactgttcctatg

SEQ ID NO: 748637 - DNA, 120 bp, Artificial Sequence
  ENSG00000205497_23 (sequence is synthesized)
tttgaggtgcataactgtatctatctaccttttccaaaaccttacaaatacagatatgggtttggggttgtagtacaaccaagcagtagttgacatattttattaattgaaagaaataga

SEQ ID NO: 748638 - DNA, 120 bp, Artificial Sequence
  ENSG00000205497_24 (sequence is synthesized)
agctcatattctcccagtgtgcggataggcagcccaatatgaagacttcatttccactaaaaagatgaggagtaattaggtggctttaatagcatcttattctttcaggatattgtacat

SEQ ID NO: 748639 - DNA, 120 bp, Artificial Sequence
  ENSG00000205497_25 (sequence is synthesized)
agatgtcacataaaagagtatcaaagatcatctgtattttaggggtttttgacagtcttaataaaatgaaatgaaaaataaaataaagatacataaatctcaatgggggaggtgaagatt

SEQ ID NO: 748640 - DNA, 120 bp, Artificial Sequence
  ENSG00000205497_26 (sequence is synthesized)
tatggtcagcataatgattttcacatatttctgaaatgaagaatgtagtttttggaggattaaaatctcaactctggggctccttaaacagtggttctcaactggcagcaatgttacctc

SEQ ID NO: 748641 - DNA, 120 bp, Artificial Sequence
  ENSG00000205497_27 (sequence is synthesized)
caagagacatttggcaatgtctggggacatcttcggttgttgcaacctgggggtgtgggtgtgtcactgacttccactgattagaggccggagacgctactaaccattctttaatgtaca

SEQ ID NO: 748642 - DNA, 120 bp, Artificial Sequence
  ENSG00000205497_28 (sequence is synthesized)
ggatagcccttacccaaaagaattatctagcacaaaatgtcagtggtgccaagcattaaaaaaaccttagtctaaatgtaactatcaaataacaaatgattaagccccatggttaaacaa

SEQ ID NO: 748643 - DNA, 120 bp, Artificial Sequence
  ENSG00000205497_29 (sequence is synthesized)
attaccttgagctcacctacacagcacctaggggcaatctgataccagagaagttcctcagaaaggaaaccagtgaaaaactgagaaaactgaaagacttcacttgagagatgttaaaag

SEQ ID NO: 748644 - DNA, 120 bp, Artificial Sequence
  ENSG00000205497_30 (sequence is synthesized)
acttattaatcacacatgaaagtgtacaaagatgaatgcaaaggatgtaaaccttaccaaaaggcaagttcaaatactttttaaaaagattctagtaagtcttcttattgtttcgctgtg

SEQ ID NO: 748645 - DNA, 120 bp, Artificial Sequence
  ENSG00000205497_31 (sequence is synthesized)
tttcattttgtttttctattggacattggtcatttgtgagaggtttgtgggaaaacattgtaagggatggaacactacaaaattataagggacgaaggggagcatcatttagtccaagca

SEQ ID NO: 748646 - DNA, 120 bp, Artificial Sequence
  ENSG00000205497_32 (sequence is synthesized)
gagaatatgtgaattaggtggagagaatatgcctgtatgatataggagttacatgagaacaatactgtaatttttaaagtagacaactacttgtctgtacaacctaagcatcttagtttt

SEQ ID NO: 748647 - DNA, 120 bp, Artificial Sequence
  ENSG00000205497_33 (sequence is synthesized)
actagggccaatgaattttcaatgccatgaaaaaatattctttaatatattgaattgtgtacaatcaacccaatccatttaattgaatgtgttattcttgcttgagaatttgagtcccca

SEQ ID NO: 748648 - DNA, 120 bp, Artificial Sequence
  ENSG00000205502_0 (sequence is synthesized)
gcagtactgaaggtggcgcctcggcagcgggctagaggccactggcactgagcttgcaaccagatccagagacactgaagaagagagaaaggcgcacctcttcccgccactcctagcccc

SEQ ID NO: 748649 - DNA, 120 bp, Artificial Sequence
  ENSG00000205502_1 (sequence is synthesized)
agcctccaaggatgcggctcctcgagaaactctgttcctcggccgcaggcagctccgcgccgaagcccgccttcgccaaagtgctcacgccgaatcgcatccccgaattctgcatcccgc

SEQ ID NO: 748650 - DNA, 120 bp, Artificial Sequence
  ENSG00000205502_2 (sequence is synthesized)
gctgccggccccttgcacgctcgagtctccaatccgggccgccgccgtgccccggcgctgcgccgctgaaagcgacctgtggccccgcgcggcagacgaggacgccggccgcacggactg

SEQ ID NO: 748651 - DNA, 120 bp, Artificial Sequence
  ENSG00000205502_3 (sequence is synthesized)
actgggacccgcgctcgcaggcagcgctgtcactgccgcacctgccccgtgtgcgcaccacctacggcttctgcgcgctgctcgagagcccgcacacgcgccgcaaggagtcgctcctgc

SEQ ID NO: 748652 - DNA, 80 bp, Artificial Sequence
  ENSG00000205502_4 (sequence is synthesized)
ctcgagagcccgcacacgcgccgcaaggagtcgctcctgctcgggggcccgcccgcgccccggccccgggcccacagctg

SEQ ID NO: 748653 - DNA, 120 bp, Artificial Sequence
  ENSG00000205502_5 (sequence is synthesized)
cggggccccgccgctgccgcctcctgcgcgtccccgacgggctgctgagtcgcgcgctgcgggctggaaggagtcgccgcctggcccgcgtccgctccgtctccagcgggaacgaggacg

SEQ ID NO: 748654 - DNA, 120 bp, Artificial Sequence
  ENSG00000205502_6 (sequence is synthesized)
gcgggaacgaggacgaggagcgccgcgcgggatccgagtccccggcccgggccccctcctcgagcccgctgtcatccagggccccgcttcctgagcgcctggaggccaagggcaccgtgg

SEQ ID NO: 748655 - DNA, 120 bp, Artificial Sequence
  ENSG00000205502_7 (sequence is synthesized)
gtggctctgggccgcgccggcgacgccctgcgcctggctgctgagtactgtccgggaacccggcgtctccgcctccggctgctccgcgcggagagcctgttcggaggcgcccccgggccc

SEQ ID NO: 748656 - DNA, 120 bp, Artificial Sequence
  ENSG00000205502_8 (sequence is synthesized)
ccgtccgctgccgcctcagcctcgtcctgcggccgccgggcactgcgcgttggcaatgcagcgctgtggtggggcgcagccgcaaggcctcctttgaccaggacttttgcttcgacggcc

SEQ ID NO: 748657 - DNA, 120 bp, Artificial Sequence
  ENSG00000205502_9 (sequence is synthesized)
tctcggaagacgaggtgcgccgcctggccgttcgcgtcaaggcccgggatgagggtcgcggccgggatcggggccgcctgctgggccagggtgagctgtccctgggcgccctcctgctgc

SEQ ID NO: 748658 - DNA, 120 bp, Artificial Sequence
  ENSG00000205502_10 (sequence is synthesized)
tctgagggcccagccctccccggggcgctctgccctggagactccggacactgacagccgcgtggtacagaataaacgttatttatttttttatttatgatactgctttattgacgtttt

SEQ ID NO: 748659 - DNA, 120 bp, Artificial Sequence
  ENSG00000205502_11 (sequence is synthesized)
acttcctcaccatccacatttgtcatcgtctattggtaaagaagaaaaagataatgactccctgttctgttcacaggacccccatatctctttccagaccatttttgcattccaaggaaa

SEQ ID NO: 748660 - DNA, 120 bp, Artificial Sequence
  ENSG00000205502_12 (sequence is synthesized)
aatgggttggcttgggactgggagagaaaggaagtacacccatctgcattgtttttaattccttccggttttctatcaatgttacagtttttttttaataaagcaagttattcattcaga

SEQ ID NO: 748661 - DNA, 120 bp, Artificial Sequence
  ENSG00000205517_0 (sequence is synthesized)
acccgccacccgccggcccttccgcctcactcagcggcgccactgagagggacgggcgccggccatggagcgcacagcaggcaaagagctggccctggcaccgctgcaggactggggtga

SEQ ID NO: 748662 - DNA, 120 bp, Artificial Sequence
  ENSG00000205517_1 (sequence is synthesized)
agagaccgaggacggcgcggtgtacagtgtctccctgcggcggcagcgcagtcagcgcaggagcccggcggagggccccgggggcagccaggctcccagccccattgccaataccttcct

SEQ ID NO: 748663 - DNA, 120 bp, Artificial Sequence
  ENSG00000205517_2 (sequence is synthesized)
ccactatcgaaccagcaaggtgagggtgctgagggcagcgcgcctggagcggctggtgggagagttggtgtttggagaccgtgagcaggaccccagcttcatgcccgccttcctggccac

SEQ ID NO: 748664 - DNA, 120 bp, Artificial Sequence
  ENSG00000205517_3 (sequence is synthesized)
ctaccggacctttgtacccactgcctgcctgctgggctttctgctgccaccaatgccaccgcccccacctcccggggtagagatcaagaagacagcggtacaagatctgagcttcaacaa

SEQ ID NO: 748665 - DNA, 120 bp, Artificial Sequence
  ENSG00000205517_4 (sequence is synthesized)
gaacctgagggctgtggtgtcagtgctgggctcctggctgcaggaccaccctcaggatttccgagaccaccctgcccattcggacctgggcagtgtccgaacctttctgggctgggcggc

SEQ ID NO: 748666 - DNA, 120 bp, Artificial Sequence
  ENSG00000205517_5 (sequence is synthesized)
cccagggagtgctgaggctcaaaaagcagagaagcttctggaagattttttggaggaggctgagcgagagcaggaagaggagccgcctcaggtgtggacaggacctcccagagttgccca

SEQ ID NO: 748667 - DNA, 120 bp, Artificial Sequence
  ENSG00000205517_6 (sequence is synthesized)
aacttctgacccagactcttcagaggcctgcgcggaggaagaggaagggctcatgcctcaaggtccccagctcctggacttcagcgtggacgaggtggccgagcagctgaccctcataga

SEQ ID NO: 748668 - DNA, 120 bp, Artificial Sequence
  ENSG00000205517_7 (sequence is synthesized)
cttggagctcttctccaaggtgaggctctacgagtgcttgggctccgtgtggtcgcagagggaccggccgggggctgcaggcgcctcccccactgtgcgcgccaccgtggcccagttcaa

SEQ ID NO: 748669 - DNA, 120 bp, Artificial Sequence
  ENSG00000205517_8 (sequence is synthesized)
caccgtgaccggctgtgtgctgggttccgtgctcggagcaccgggcttggccgccccgcagagggcgcagcggctggagaagtggatccgcatcgcccagcgctgccgagaactgcggaa

SEQ ID NO: 748670 - DNA, 120 bp, Artificial Sequence
  ENSG00000205517_9 (sequence is synthesized)
cttctcctccttgcgcgccatcctgtccgccctgcaatctaaccccatctaccggctcaagcgcagctggggggcagtgagccgggaaccgctatctactttcaggaaactttcgcagat

SEQ ID NO: 748671 - DNA, 120 bp, Artificial Sequence
  ENSG00000205517_10 (sequence is synthesized)
ctcagcagcagagagattcttttccaggaggaggccactgagggatcccaagaagaggacaacaccccaggcagcctgccctcaaaaccacccccaggccctgtcccctaccttggcacc

SEQ ID NO: 748672 - DNA, 120 bp, Artificial Sequence
  ENSG00000205517_11 (sequence is synthesized)
ttccttacggacctggttatgctggacacagccctgccggatatgttggagggggatctcattaactttgagaagaggaggaaggagtgggagatcctggcccgcatccagcagctgcag

SEQ ID NO: 748673 - DNA, 120 bp, Artificial Sequence
  ENSG00000205517_12 (sequence is synthesized)
aggcgctgtcagagctacaccctgagcccccacccgcccatcctggctgccctgcatgcccagaaccagctcaccgaggagcagagctaccggctctcccgggtcattgagccaccagct

SEQ ID NO: 748674 - DNA, 120 bp, Artificial Sequence
  ENSG00000205517_13 (sequence is synthesized)
gcctcctgccccagctccccacgcatccgacggcggatcagcctcaccaagcgtctcagtgcgaagcttgcccgagagaaaagctcatcacctagtgggagtcccggggacccctcatcc

SEQ ID NO: 748675 - DNA, 120 bp, Artificial Sequence
  ENSG00000205517_14 (sequence is synthesized)
cccacctccagtgtgtccccagggtcacccccctcaagtcctagaagcagagatgctcctgctggcagtcccccggcctctccagggccccagggccccagcaccaagctgcccctgagc

SEQ ID NO: 748676 - DNA, 120 bp, Artificial Sequence
  ENSG00000205517_15 (sequence is synthesized)
ctggacctgcccagcccccggcccttcgctttgcctctgggcagccctcgaatccccctcccggcgcagcagagctcggaggcccgtgtcatccgcgtcagcatcgacaatgaccacggg

SEQ ID NO: 748677 - DNA, 120 bp, Artificial Sequence
  ENSG00000205517_16 (sequence is synthesized)
aacctgtatcgaagcatcttgctgaccagtcaggacaaagcccccagcgtggtccggcgagccttgcagaagcacaatgtgccccagccctgggcctgtgactatcagctctttcaagtc

SEQ ID NO: 748678 - DNA, 120 bp, Artificial Sequence
  ENSG00000205517_17 (sequence is synthesized)
cttcctggggaccgggtgctcctgattcctgacaatgccaacgtcttctatgccatgagtccagtcgcccccagagacttcatgctgcggcggaaagaggggacccggaacactctgtct

SEQ ID NO: 748679 - DNA, 120 bp, Artificial Sequence
  ENSG00000205517_18 (sequence is synthesized)
gtctccccaagctgaggcagccctgtcctctccacaagacacaagtcccacaggcaagcttgcgactcttctcctggaaagctgccatcccccagtagaggccactgtgctgtgtatccc

SEQ ID NO: 748680 - DNA, 120 bp, Artificial Sequence
  ENSG00000205517_19 (sequence is synthesized)
aggaccaccacccaactgtagcccattggaccccatctctttttctgactctgttggtactagatccatattccaaagacatcagcccatgggtggctggtggagagctcaatcccataa

SEQ ID NO: 748681 - DNA, 120 bp, Artificial Sequence
  ENSG00000205517_20 (sequence is synthesized)
atgtagaaagaggtggggcatggatacgtcaaatccctccccagagaaatcttataaatgttagagacgcatcagaagtgacagatgcggatgaaaatagtgaccagagttatgaaacag

SEQ ID NO: 748682 - DNA, 120 bp, Artificial Sequence
  ENSG00000205517_21 (sequence is synthesized)
ctcactcagcggcgccactgagagggacgggcgccggccatggagcgcacagcaggcaaagagctggccctggggcgtggggatgcagcaggaggactcggcccgagtccgagcggccaa

SEQ ID NO: 748683 - DNA, 120 bp, Artificial Sequence
  ENSG00000205517_22 (sequence is synthesized)
tggggtcagtaatggccccaagtgactggagctttgggggctgcagaaaccacccccaggccctgtcccctaccttggcaccttccttacggacctggttatgctggacacagccctgcc

SEQ ID NO: 748684 - DNA, 120 bp, Artificial Sequence
  ENSG00000205517_23 (sequence is synthesized)
ggatatgttggaggtctgacccctgacccttgacccctgaccccagctccacttgcccccagcacaatgggcctcccaatatccacccttgatcctacctgtactcctgacaccacccca

SEQ ID NO: 748685 - DNA, 120 bp, Artificial Sequence
  ENSG00000205517_24 (sequence is synthesized)
cactcccttactacagtggggctcctgacatcccagcccctgaccttgacccttgacccttgaccctgggtgctgcaattcagacacactttgcccccagggggatctcattaactttga

SEQ ID NO: 748686 - DNA, 120 bp, Artificial Sequence
  ENSG00000205517_25 (sequence is synthesized)
cataacctccgtattctccaccctagaaccccaactgggcacccccctccacctcctcaggtgtggaacctggaaacacctcccagacccagagccctcttcctaagccccctctaggtt

SEQ ID NO: 748687 - DNA, 120 bp, Artificial Sequence
  ENSG00000205517_26 (sequence is synthesized)
cccccttcttcacctgctggggggcctcttcccagggtagagatcaagaagacagcggtacaagatctgagcttcaacaagaacctgaggtgggtccttcatccagataggggagtgcgg

SEQ ID NO: 748688 - DNA, 120 bp, Artificial Sequence
  ENSG00000205517_27 (sequence is synthesized)
gcggggagggaaatccaagaggtcaaaggttagcagtcggactggggttttgaaaattgcaggttgggtaataagagactgggagtcaggtggggcgtggtggctcatgcctgtaatccc

SEQ ID NO: 748689 - DNA, 120 bp, Artificial Sequence
  ENSG00000205517_28 (sequence is synthesized)
gcctcagttgtttctggccaggtgttgtggcacatgcctatagtcccagctacttaggatgctgagatgggaggatctcttgactccgggaaatcaaagctgccgtgagctgtgagcatg

SEQ ID NO: 748690 - DNA, 120 bp, Artificial Sequence
  ENSG00000205517_29 (sequence is synthesized)
tacaggcatgagccactgcgcccagccaatgttttcttgagattttaaatgtggggctattgaatgcaccagtggtggctggggtgttcgtgcttttctagccctcagcatctgcagatg

SEQ ID NO: 748691 - DNA, 120 bp, Artificial Sequence
  ENSG00000205517_30 (sequence is synthesized)
gtgccaggctagattttacagatgagaagtctgaagctcaggtaaggtaagtcacctgtccagggccacaaagaaaaaaaaaacgtgtgtctgaagccagaacgggagctgttgcggccc

SEQ ID NO: 748692 - DNA, 120 bp, Artificial Sequence
  ENSG00000205517_31 (sequence is synthesized)
aactccctcccctgcccccaagcggcctctgggctcgggaagggcccctgcctcctcccgccaggcacttatctctacccaggctgagtgctggccccgccccctcggggatctgccact

SEQ ID NO: 748693 - DNA, 120 bp, Artificial Sequence
  ENSG00000205531_0 (sequence is synthesized)
gttgttggaggccacggcggcgcagccccaaagcgagcgaagctagggtcgccgccactgccgcaggaggcgtgaggggataaaaacattcagatggcagatcacagtttttcagatggg

SEQ ID NO: 748694 - DNA, 120 bp, Artificial Sequence
  ENSG00000205531_1 (sequence is synthesized)
gttccttcagattccgtggaagctgctaaaaatgcaagtaacacagaaaagctcacagatcaggtgatgcagaatcctcgagttctggcagctttacaggagcgacttgacaatgtccct

SEQ ID NO: 748695 - DNA, 120 bp, Artificial Sequence
  ENSG00000205531_2 (sequence is synthesized)
cacaccccttccagctacatcgaaactttacctaaagcagtaaaaagaagaattaatgcattgaaacaacttcaggtgagatgtgctcacatagaagccaagttctatgaagaggtacat

SEQ ID NO: 748696 - DNA, 120 bp, Artificial Sequence
  ENSG00000205531_3 (sequence is synthesized)
gacttggaaagaaagtatgcagcgctataccagcctctctttgacaagagaagagaatttatcaccggcgatgttgaaccaacagatgcggaatcggaatggcacagtgaaaatgaagag

SEQ ID NO: 748697 - DNA, 120 bp, Artificial Sequence
  ENSG00000205531_4 (sequence is synthesized)
gaagagaaattggctggagacatgaaaagtaaagtagtcgtcacagaaaaagcagcggcaacggctgaagagccagatcccaaaggaattccagagttctggtttaccatcttcagaaat

SEQ ID NO: 748698 - DNA, 120 bp, Artificial Sequence
  ENSG00000205531_5 (sequence is synthesized)
gtggacatgctgagtgaattagtccaggaatatgatgaaccaatcttgaaacacctgcaggatattaaagtgaaattttctgaccctggacagcctatgtcttttgtgttagagttccac

SEQ ID NO: 748699 - DNA, 120 bp, Artificial Sequence
  ENSG00000205531_6 (sequence is synthesized)
tttgaacccaacgactactttaccaactcagtcctgacaaaaacctacaagatgaaatcagaaccagataaggctgatcccttttcctttgaaggtcctgagattgtggactgtgacggg

SEQ ID NO: 748700 - DNA, 120 bp, Artificial Sequence
  ENSG00000205531_7 (sequence is synthesized)
tgtactattgactggaagaaaggaaagaatgttactgtcaaaaccatcaagaaaaagcagaagcataagggtcgaggcactgttagaacaattacgaaacaagtacccaatgagtccttt

SEQ ID NO: 748701 - DNA, 120 bp, Artificial Sequence
  ENSG00000205531_8 (sequence is synthesized)
ttcaacttcttcaatccattgaaagcatccggggatggagaatcactggatgaagattctgaattcacattagcctctgattttgaaattggacactttttccgtgagcggatagtcccg

SEQ ID NO: 748702 - DNA, 120 bp, Artificial Sequence
  ENSG00000205531_9 (sequence is synthesized)
cgggctgtgctgtacttcactggggaggccatagaagatgatgacaattttgaagaaggtgaagaaggagaagaggaggaattagaaggtgacgaggagggagaagacgaggatgatgcg

SEQ ID NO: 748703 - DNA, 120 bp, Artificial Sequence
  ENSG00000205531_10 (sequence is synthesized)
gccagccggcggaatgcaagcagcagtaggaagcggaggcgggtgcctggcagaccggctgtcgggactccaggcctgtgggcggggcctcggtccttgccgcagcacaatcccgtggac

SEQ ID NO: 748704 - DNA, 120 bp, Artificial Sequence
  ENSG00000205531_11 (sequence is synthesized)
agagcttactccatctaactcgttttcaagtgcatgattttcactttcacttttcctttttccttattattttgcttaacttgtacagtggcaactgaaatgcatttcagaaataggagg

SEQ ID NO: 748705 - DNA, 120 bp, Artificial Sequence
  ENSG00000205531_12 (sequence is synthesized)
tttcgtccagcaccctctgcagccttggtgcctgtagctctggacttccctgggcctttccctgtgggagggccctgtagaccacatcagggtggggtgggggtcacttggcaaaaaggg

SEQ ID NO: 748706 - DNA, 120 bp, Artificial Sequence
  ENSG00000205531_13 (sequence is synthesized)
ccgaggtctggtgatgtggttcccaggatctggaacctctcccacccctcctgcagttggactgaattcttccctttcatccgaagaaacccacttgctgtttccagccgctgaatctgc

SEQ ID NO: 748707 - DNA, 120 bp, Artificial Sequence
  ENSG00000205531_14 (sequence is synthesized)
tgagtgtgcagcctgcatcacctgctgtatgccgatcatctcagaaagggctgtgtagagtagggccctgttctccttaggatgttgcttcttgatttttttttttttttaggggtgggt

SEQ ID NO: 748708 - DNA, 120 bp, Artificial Sequence
  ENSG00000205531_15 (sequence is synthesized)
cagggttgtgacacaccagcccaggtgagagctgctgcgggtcacctcatatttatttatcccttcttgcctgtgaggactgcggcttttcgctgtggctcgtccttaacgtttctgaac

SEQ ID NO: 748709 - DNA, 120 bp, Artificial Sequence
  ENSG00000205531_16 (sequence is synthesized)
caccttggtgccctgagcaggaagatgtgccacttcctagcaggcgcaaggcctgtgcggaagaaacgccgctccctgccaccagggctgaagatgcgagcccgtcctcatgacgcaggc

SEQ ID NO: 748710 - DNA, 120 bp, Artificial Sequence
  ENSG00000205531_17 (sequence is synthesized)
gccaccctgctgccggagccgggcttcggcagtcttctccactgagggactgggctgggaagtcctgcgtttcagtggagcgtatgagcgtcaagtcctgctttctcagtagccccattg

SEQ ID NO: 748711 - DNA, 120 bp, Artificial Sequence
  ENSG00000205531_18 (sequence is synthesized)
cggggccccaccattcatcctgtctgaaggtcctgggtttggtgtgaccgcttggcggctggtgggtggggttttcaagtgggtgacggcgctctccggcagccggggatggccgtgtcc

SEQ ID NO: 748712 - DNA, 120 bp, Artificial Sequence
  ENSG00000205531_19 (sequence is synthesized)
gcactgaccaggcctgtggagagtgctcggcctaaccttagaacacatttgtaactgaatacagtgttttcaatttgtacagaatagttagaatattctattaaagtggtgaaacattga

SEQ ID NO: 748713 - DNA, 120 bp, Artificial Sequence
  ENSG00000205531_20 (sequence is synthesized)
tgagggaaaagtgttttaggcttccagagtagaaatctgatattacttcgtttgattcttcgaccactatggtgataggaagtagctgatctctgcaggaaactgctgttacctggcctc

SEQ ID NO: 748714 - DNA, 120 bp, Artificial Sequence
  ENSG00000205531_21 (sequence is synthesized)
cagcttgtcgtgctcagttggctgctttgaacagcagcaactcctccttccttgggaaaccgcggacaagttcttgtgcatcatgcagacttgacggggctttgccacagaatatacatt

SEQ ID NO: 748715 - DNA, 120 bp, Artificial Sequence
  ENSG00000205531_22 (sequence is synthesized)
tcagagtcctgatgaaatgtcttgggaaaataataccattgttccagaagtctgaagttccagtggtcacacccaagttgaaagaggaccaggctgtttctctttttgccaacctccaga

SEQ ID NO: 748716 - DNA, 120 bp, Artificial Sequence
  ENSG00000205531_23 (sequence is synthesized)
atgccccttactcatgaactgaacagatatttcccgccagtccatcgttggtttttttaacctcacgctagtcttttttgcggtggagaagtttttcttgttcatggccctatctgttga

SEQ ID NO: 748717 - DNA, 120 bp, Artificial Sequence
  ENSG00000205531_24 (sequence is synthesized)
gctttcccaaaatagcttctagtaagtgttgtgtactccaagcaatctgtcctcgttatttttctattttaactggtgcttactctgaatttctacttttagtcttttgtgttagagttc

SEQ ID NO: 748718 - DNA, 120 bp, Artificial Sequence
  ENSG00000205531_25 (sequence is synthesized)
ggggcctggggcttggggcctggagcccgggcctggggcgctggcgggaggcccctcccaactcccggcgcgcctcgcccggctgcccgcctcactgaaggtcaaggcgctttgttctgc

SEQ ID NO: 748719 - DNA, 120 bp, Artificial Sequence
  ENSG00000205531_26 (sequence is synthesized)
cactgaaggtcaaggcgctttgttctgcgccgcgggcggcctcctgggcggcggccccttggaggaggcgaagacggcgagaggcggcggccgctcaaatctcccgctagcccagcccgc

SEQ ID NO: 748720 - DNA, 120 bp, Artificial Sequence
  ENSG00000205531_27 (sequence is synthesized)
tagaagatgatgacaatgtatgaggctcggggaaggggggcttccacctgggtgcttatctctgttggtgcagagtggccctgaattgtggcttaggaaacccccatgcctaatcttttt

SEQ ID NO: 748721 - DNA, 120 bp, Artificial Sequence
  ENSG00000205531_28 (sequence is synthesized)
attacatcatcagccagatatgtagtccaagctgctgtccttgttgtggggggaatacgcttgaagaggagaagtctgaggaacagagcaggaaaagcaggtgtctgtgaagcagtttca

SEQ ID NO: 748722 - DNA, 120 bp, Artificial Sequence
  ENSG00000205531_29 (sequence is synthesized)
cgtgaggtgcggagacacgggtgctgggccggtttacggggtgaaaatagacttttaaaaattctcttaccttagaaatatacaaatatgtagattaggttgttggaccttaaaggaagt

SEQ ID NO: 748723 - DNA, 120 bp, Artificial Sequence
  ENSG00000205531_30 (sequence is synthesized)
gggagaagacgaggatgatgcggaaattaaccccaagactcctcagtagagcaacttgactttccaagtgtttcattcttttaaggtgtaatttttgtctgttaatcattcatacgtttc

SEQ ID NO: 748724 - DNA, 120 bp, Artificial Sequence
  ENSG00000205531_31 (sequence is synthesized)
tttttgtgggacctcctgagagacgaggtttccccatgttgcccaggctggtctgaaactcctgagcttcaggtgatctgtgataggggggataaaaacattcagatggcagatcacagt

SEQ ID NO: 748725 - DNA, 120 bp, Artificial Sequence
  ENSG00000205531_32 (sequence is synthesized)
ttcctatcctattccttgttttgcgtgactttcaatttcctggcatgcttttaaaatgcgctgcacacaagcaaatggctcctcaggcaagcgaggcccagcaggcagcgtggctggact

SEQ ID NO: 748726 - DNA, 120 bp, Artificial Sequence
  ENSG00000205531_33 (sequence is synthesized)
tgtagtccaagctgctgtccttgttgtggggggaatacgcttgaagaggagaagtctgaggaacagagcaggaaaagcaggtgtctgtgaagcagtttcagagtttgaagaaggtgaaga

SEQ ID NO: 748727 - DNA, 120 bp, Artificial Sequence
  ENSG00000205531_34 (sequence is synthesized)
tggaataggccctggagcctgctggaggctcgttggatctgacgtgaaatggaagaatattgagaagcctttccctgcctgatgccagttagggtccttagagcggaagggcgctgcacc

SEQ ID NO: 748728 - DNA, 120 bp, Artificial Sequence
  ENSG00000205531_35 (sequence is synthesized)
gtggccacatctcatcctggctgctgcgtggcgccaggaggctgtgcacactgtgtgaactccacaccagcacagtagggcccttctaagttccaccgaagttggctctaagcaaataca

SEQ ID NO: 748729 - DNA, 120 bp, Artificial Sequence
  ENSG00000205531_36 (sequence is synthesized)
tggtgtgagctcaacaaaatgggaaatgttgataaatgaagctgcattttcatgcactacccttgttatgcaaccagtagtgataaggtggttttgcttttggtgtaagtctcatgtttg

SEQ ID NO: 748730 - DNA, 120 bp, Artificial Sequence
  ENSG00000205531_37 (sequence is synthesized)
aaacttgatttttagtctgaccaatgatgtatttggatgtaggagaaactgattcaagacaattgactaatggtggaggttcacctttgagcaccttattgatcactttaaagattaaac

SEQ ID NO: 748731 - DNA, 120 bp, Artificial Sequence
  ENSG00000205531_38 (sequence is synthesized)
accaaagttttaatatatttctactaaggtttcttttccctttgtatgagatgtaaaatgatacccagattcctgtatccaataacattatgctgctggttcgatcagccttgtagaaaa

SEQ ID NO: 748732 - DNA, 120 bp, Artificial Sequence
  ENSG00000205531_39 (sequence is synthesized)
tttaaggaaaacaaattcatcggtttacaaaaatcttttcctgtgtgcctgctcctcggtgtgagaacagccagggcagagctgtggtgccaggttcccagctgtgtccagggtacaccc

SEQ ID NO: 748733 - DNA, 120 bp, Artificial Sequence
  ENSG00000205542_0 (sequence is synthesized)
ggcaagaccggcttcggggcgcgcggcggccgctttgtgtgcggggctgcattgtgacgcgggcgatgaagccgcttttcctccgcaaccatgtctgacaaacccgatatggctgagatc

SEQ ID NO: 748734 - DNA, 120 bp, Artificial Sequence
  ENSG00000205542_1 (sequence is synthesized)
gagaaattcgataagtcgaaactgaagaagacagagacgcaagagaaaaatccactgccttccaaagaaacgattgaacaggagaagcaagcaggcgaatcgtaatgaggcgtgcgccgc

SEQ ID NO: 748735 - DNA, 120 bp, Artificial Sequence
  ENSG00000205542_2 (sequence is synthesized)
attccacaagcattgccttcttattttacttcttttagctgtttaactttgtaagatgcaaagaggttggatcaagtttaaatgactgtgctgcccctttcacatcaaagaactactgac

SEQ ID NO: 748736 - DNA, 120 bp, Artificial Sequence
  ENSG00000205542_3 (sequence is synthesized)
aacgaaggccgcgcctgcctttcccatctgtctatctatctggctggcagggaaggaaagaacttgcatgttggtgaaggaagaagtggggtggaagaagtggggtgggacgacagtgaa

SEQ ID NO: 748737 - DNA, 120 bp, Artificial Sequence
  ENSG00000205542_4 (sequence is synthesized)
gtgaaggcattccctaaatccgagcccgagtggttctccccgggaaggctactttggggagctggggggatgcgaaacaccctagatactggataatggggtggggaaatcgatgattta

SEQ ID NO: 748738 - DNA, 120 bp, Artificial Sequence
  ENSG00000205542_5 (sequence is synthesized)
agaacaaaaccgaaaaactggcgttttgccgtgccgctcggaggggacattaaaaaatttcttagtgtttgcccgcaaagcttttcctccgcaaccatgtctgacaaacccgatatggct

SEQ ID NO: 748739 - DNA, 120 bp, Artificial Sequence
  ENSG00000205542_6 (sequence is synthesized)
aggtgtcctgcaggctgtaatgcagtttaatcagagtgccatttttttttttgttcaaatgattttaattattggaatgcacaatttttttaatatgcaaataaaaagtttaaaaactta

SEQ ID NO: 748740 - DNA, 120 bp, Artificial Sequence
  ENSG00000205542_7 (sequence is synthesized)
aactcggtggtggccactgcgcagaccagacttcgctcgtactcgtgcgcctcgcttcggtgagccccagggcccctgcctccttcctcctgccgtcctgcctccgtccccgccctttca

SEQ ID NO: 748741 - DNA, 120 bp, Artificial Sequence
  ENSG00000205542_8 (sequence is synthesized)
gatatgggggaatagacaagtcctttgttctgaggttcatcttccgagccccgagcctcctcccagcctcggacggctgcgcgggctgcatctgtgcagcctggcggcggcggggctgtg

SEQ ID NO: 748742 - DNA, 120 bp, Artificial Sequence
  ENSG00000205542_9 (sequence is synthesized)
ctatgacatctttacagtccttcttgcagagacatgtgtgccagggatgccgaattgccgggagagcaggcaagaccggcttcggggcgcgcggcggccgctttgtgtgcggggctgcat

SEQ ID NO: 748743 - DNA, 120 bp, Artificial Sequence
  ENSG00000205542_10 (sequence is synthesized)
tgtgacgcgggcgatgaagccggtagggcggtggtcggaagctccagccgcggccgccgcctttgtgagaggactagaaagccggatccggcccgcatccttgcggagaggccgcggcta

SEQ ID NO: 748744 - DNA, 120 bp, Artificial Sequence
  ENSG00000205542_11 (sequence is synthesized)
ggaaatggaaacgcttttcctacctgggctccattttaggaattcttgccgatttttcccacttgaatttggaagtggctttcctcttctttccttgtcctagccagcctttaattttaa

SEQ ID NO: 748745 - DNA, 120 bp, Artificial Sequence
  ENSG00000205542_12 (sequence is synthesized)
gtggtcaatttcctttattctgcaagattcggctttgagaggcatccgccctctttggtccacagcgttttgaaatatggggaggaggggcgcggggggtgtcgcctctttttctgtaga

SEQ ID NO: 748746 - DNA, 120 bp, Artificial Sequence
  ENSG00000205542_13 (sequence is synthesized)
aagaggaagctcgtgagcgcggaacggcagcagtaggagagcgagaagggtttttttcaggctgcgggtcggagggcagaagtgcagttcccagcccagagacagcggggcgggtggctc

SEQ ID NO: 748747 - DNA, 120 bp, Artificial Sequence
  ENSG00000205544_0 (sequence is synthesized)
ctgttctacagctatggccgggccagctgcagctttccgccgcttgggcgccttgtccggagctgcggccttaggcttcgcttcctacggggcgcacggcgcccaattcccagatgccta

SEQ ID NO: 748748 - DNA, 120 bp, Artificial Sequence
  ENSG00000205544_1 (sequence is synthesized)
tctgggctgggttattgctagcttccggaacgaccttattctgcaccagcttttactaccaggctctgagtggagaccccagcatccagactttggcccctgcgggagggaccctgctac

SEQ ID NO: 748749 - DNA, 120 bp, Artificial Sequence
  ENSG00000205544_2 (sequence is synthesized)
tcttgggctggcttgccttggctctttgagctcccttttgcttaattactgggttttctgggcagttttttttttaaagagttggagtaagaagaggattaaaaaggaaaggcaaataaa

SEQ ID NO: 748750 - DNA, 120 bp, Artificial Sequence
  ENSG00000205544_3 (sequence is synthesized)
ggagctgcggccttaggcttcgcttcctacggggcgcacggcgcccaattcccagatgcctacgggaaggaggtgaagtaactgcgctggggctccctgactcctgtttgacaaggccaa

SEQ ID NO: 748751 - DNA, 120 bp, Artificial Sequence
  ENSG00000205544_4 (sequence is synthesized)
caaacaccacttcttacacagcctggccctgttaggggtgccccattgcagaaagccactctgggtaatctttccctgcgcctaaccctgaccaagccccacacactccctctcagcctg

SEQ ID NO: 748752 - DNA, 120 bp, Artificial Sequence
  ENSG00000205544_5 (sequence is synthesized)
tgggggaaggaactttggtcccttgtgtcatcaggggatctcagtacctgtattgcctacgacatcccttcgtttctgtttttcttacagctgtttgacaaggccaacaaacaccacttc

SEQ ID NO: 748753 - DNA, 120 bp, Artificial Sequence
  ENSG00000205549_0 (sequence is synthesized)
ttttccatggaattgaacaccaacattaaaagtaaaaaggggttgggaagaagaaacctaaaaccaatgaatggggcttggcccccagctagacgcgagatggctcgttttcagagaaca

SEQ ID NO: 748754 - DNA, 120 bp, Artificial Sequence
  ENSG00000205549_1 (sequence is synthesized)
aggagagggaagaagataggtgttccttgaacatctactatgtgagaaacaccacccagggcactgcacctgcctgtgttggaaagaggatgcaaccatccccaacagggaagggtggaa

SEQ ID NO: 748755 - DNA, 120 bp, Artificial Sequence
  ENSG00000205549_2 (sequence is synthesized)
aatgctgcactgtgcatgggctcacaaggaagatacataatgtacagccgaatctacagtctcctattttgtcagctgcttgtgttgattaaaacttcaataaagatcctgtgataaaac

SEQ ID NO: 748756 - DNA, 120 bp, Artificial Sequence
  ENSG00000205549_3 (sequence is synthesized)
ctgtgaatcggtgctgtggccactgcgagaagcatgattcatgagccatgggggtggacgccgtgccttccctccagacaatacagtatcaatgcaccatcctggaaacagcggctctca

SEQ ID NO: 748757 - DNA, 120 bp, Artificial Sequence
  ENSG00000205549_4 (sequence is synthesized)
aaacaccacccagggcactgcacctgcctgctcacaaggaagatacataatgtacagccgaatctacagtctcctattttgtcagctgcttgtgttgattaaaacttcaataaagatcct

SEQ ID NO: 748758 - DNA, 120 bp, Artificial Sequence
  ENSG00000205549_5 (sequence is synthesized)
gctttgtgggagagaggtctgtgtctgggcaaacaacctgcttgtagaggctggaagaggaaaaggccaaagacacctgaaaagaatggggcttggcccccagctagacgcgagatggct

SEQ ID NO: 748759 - DNA, 120 bp, Artificial Sequence
  ENSG00000205560_0 (sequence is synthesized)
gccccacgcacggacaggagtgaacccgagctgtgccgaccaacccccaggatggcggaagctcaccaggccgtggccttccagttcacggtgaccccagacggggtcgacttccggctc

SEQ ID NO: 748760 - DNA, 120 bp, Artificial Sequence
  ENSG00000205560_1 (sequence is synthesized)
agtcgggaggccctgaaacacgtctacctgtctgggatcaactcctggaagaaacgcctgatccgcatcaagaatggcatcctcaggggcgtgtaccctggcagccccaccagctggctg

SEQ ID NO: 748761 - DNA, 120 bp, Artificial Sequence
  ENSG00000205560_2 (sequence is synthesized)
gtcgtcatcatggcaacagtgggttcctccttctgcaacgtggacatctccttggggctggtcagttgcatccagagatgcctccctcaggggtgtggcccctaccagaccccgcagacc

SEQ ID NO: 748762 - DNA, 120 bp, Artificial Sequence
  ENSG00000205560_3 (sequence is synthesized)
cgggcacttctcagcatggccatcttctccacgggcgtctgggtgacgggcatcttcttcttccgccaaaccctgaagctgcttctctgctaccatgggtggatgtttgagatgcatggc

SEQ ID NO: 748763 - DNA, 120 bp, Artificial Sequence
  ENSG00000205560_4 (sequence is synthesized)
aagaccagcaacttgaccaggatctgggctatgtgtatccgccttctatccagccggcaccctatgctctacagcttccagacatctctgcccaagcttcctgtgcccagggtgtcagcc

SEQ ID NO: 748764 - DNA, 120 bp, Artificial Sequence
  ENSG00000205560_5 (sequence is synthesized)
acaattcagcggtacctagagtctgtgcgccccttgttggatgatgaggaatattaccgcatggagttgctggccaaagaattccaggacaagactgcccccaggctgcagaaatacctg

SEQ ID NO: 748765 - DNA, 120 bp, Artificial Sequence
  ENSG00000205560_6 (sequence is synthesized)
gtgctcaagtcatggtgggcaagtaactatgtgagtgactggtgggaagagtacatctaccttcgaggcaggagccctctcatggtgaacagcaactattatgtcatggaccttgtgctc

SEQ ID NO: 748766 - DNA, 120 bp, Artificial Sequence
  ENSG00000205560_7 (sequence is synthesized)
atcaagaatacagacgtgcaggcagcccgcctgggaaacatcatccacgccatgatcatgtatcgccgtaaactggaccgtgaagaaatcaagcctgtgatggcactgggcatagtgcct

SEQ ID NO: 748767 - DNA, 120 bp, Artificial Sequence
  ENSG00000205560_8 (sequence is synthesized)
atgtgctcctaccagatggagaggatgttcaacaccactcggatcccgggcaaggacacagatgtgctacagcacctctcagacagccggcacgtggctgtctaccacaagggacgcttc

SEQ ID NO: 748768 - DNA, 120 bp, Artificial Sequence
  ENSG00000205560_9 (sequence is synthesized)
ttcaagctgtggctctatgagggcgcccgtctgctcaagcctcaggatctggagatgcagttccagaggatcctggacgacccctccccacctcagcctggggaggagaagctggcagcc

SEQ ID NO: 748769 - DNA, 120 bp, Artificial Sequence
  ENSG00000205560_10 (sequence is synthesized)
gccttggaggccatcgagcgtgccgctttcttcgtggccctggatgaggaatcctactcctatgaccccgaagatgaggccagcctcagcctctatggcaaggccctgctacatggcaac

SEQ ID NO: 748770 - DNA, 120 bp, Artificial Sequence
  ENSG00000205560_11 (sequence is synthesized)
tgctacaacaggtggtttgacaaatccttcactctcatttccttcaagaatggccagttgggtctcaatgcagagcatgcgtgggcagatgctcccatcattgggcacctctgggagttt

SEQ ID NO: 748771 - DNA, 120 bp, Artificial Sequence
  ENSG00000205560_12 (sequence is synthesized)
gtcctgggcacagacagcttccacctgggctacacggagaccgggcactgcctgggcaaaccgaaccctgcgctcgcacctcctacacggctgcagtgggacattccaaaacagtgccag

SEQ ID NO: 748772 - DNA, 120 bp, Artificial Sequence
  ENSG00000205560_13 (sequence is synthesized)
gcggtcatcgagagttcctaccaggtggccaaggcgttggcagacgacgtggagttgtactgcttccagttcctgccctttggcaaaggcctcatcaagaagtgccggaccagccctgat

SEQ ID NO: 748773 - DNA, 120 bp, Artificial Sequence
  ENSG00000205560_14 (sequence is synthesized)
gcctttgtgcagatcgcgctgcagctggctcacttccgggacaggggtaagttctgcctgacctatgaggcctcaatgaccagaatgttccgggagggacggactgagactgtgcgttcc

SEQ ID NO: 748774 - DNA, 120 bp, Artificial Sequence
  ENSG00000205560_15 (sequence is synthesized)
tgtaccagcgagtccacagcctttgtgcaggccatgatggaggggtcccacacaaaagcagacctgcgagatctcttccagaaggctgctaagaagcaccagaatatgtaccgcctggcc

SEQ ID NO: 748775 - DNA, 120 bp, Artificial Sequence
  ENSG00000205560_16 (sequence is synthesized)
atgaccggggcagggatcgacaggcacctcttctgcctttacttggtctccaagtacctaggagtcagctctcctttccttgctgaggtgctctcggaaccctggcgtctctccaccagc

SEQ ID NO: 748776 - DNA, 120 bp, Artificial Sequence
  ENSG00000205560_17 (sequence is synthesized)
cagatcccccaatcccagatccgcatgttcgacccagagcagcaccccaatcacctgggcgctggaggtggctttggccctgtagcagatgatggctatggagtttcctacatgattgca

SEQ ID NO: 748777 - DNA, 120 bp, Artificial Sequence
  ENSG00000205560_18 (sequence is synthesized)
ggcgagaacacgatcttcttccacatctccagcaagttctcaagctcagagacgaacgcccagcgctttggaaaccacatccgcaaagccctgctggacattgctgatcttttccaagtt

SEQ ID NO: 748778 - DNA, 120 bp, Artificial Sequence
  ENSG00000205560_19 (sequence is synthesized)
cccaaggcctacagctgaagcccttaggtacctgtgttttgtttgggaactcggaggccctccccctcccccagctcagaccacagaggtggcaagagaagggctgaagctggaagactg

SEQ ID NO: 748779 - DNA, 120 bp, Artificial Sequence
  ENSG00000205560_20 (sequence is synthesized)
ttcatgagggacttgtgtgacctgctttgaaatgtgtgactctgctgagtgacgtaggctctgagatagctgtccacgcccacgtgtttgcttggaataaatacttgcctcagaaccttc

SEQ ID NO: 748780 - DNA, 120 bp, Artificial Sequence
  ENSG00000205560_21 (sequence is synthesized)
ccagctgccctttcgtccccacactgtggaggaagggacctgtggcagctcacaggcatgaggggtggccgtgcacaggtgcccaggctccaaggacagctccggcagcaggtcctcgct

SEQ ID NO: 748781 - DNA, 120 bp, Artificial Sequence
  ENSG00000205560_22 (sequence is synthesized)
gggcagatgctgctccctgagggcccaggtggtggaggtggggttggagcaggaagggaattttgatttttttttttcttgatagatactaataaaaataaggctgtgtaattttctctc

SEQ ID NO: 748782 - DNA, 120 bp, Artificial Sequence
  ENSG00000205560_23 (sequence is synthesized)
atctgggctgtgagcagcagccagtggaggggttcaggcacctgggttgagactctttggactcctttggggttctgagctagacgggagaggcagacagggcactggtgcctggtgtgt

SEQ ID NO: 748783 - DNA, 120 bp, Artificial Sequence
  ENSG00000205560_24 (sequence is synthesized)
ggtttgtcctggaggggctgggatggctctgagggtctcagggagttgctggttggtttccattttttccactggctcccaccccagcactctgctctgtacccccagatgtgtatccgc

SEQ ID NO: 748784 - DNA, 120 bp, Artificial Sequence
  ENSG00000205560_25 (sequence is synthesized)
ggttggaagctcccagagcaggtgtgagaccacaaagcagcaggtgggtacagccccgacgaggcctgagcctcctcctcccctgctggcctcactgcctggcccagccctcgggaaggc

SEQ ID NO: 748785 - DNA, 120 bp, Artificial Sequence
  ENSG00000205560_26 (sequence is synthesized)
aaaaaggaagctcagagccaggcgtggtggtgcatgactctaatccctgcaactcaggaggctgcagcaggaggatcacttagggcgagtaatttgaggctgcagtgagccatgcttgtt

SEQ ID NO: 748786 - DNA, 120 bp, Artificial Sequence
  ENSG00000205560_27 (sequence is synthesized)
ctccagcctgggcgacagagcaagaccctaactctaaaaaataaagaataaagcagctcaggctgaagctggagcagagggttactgcgatcagttgtgcatttctggaggttcaccccg

SEQ ID NO: 748787 - DNA, 120 bp, Artificial Sequence
  ENSG00000205560_28 (sequence is synthesized)
acttccaggggcgcctctctcccctgcccgcgccctcgctgacgccccccaactccaggctgcccttcgccgtccttggggctcctggagctttcaaggcccaaatcccctgcaccacag

SEQ ID NO: 748788 - DNA, 120 bp, Artificial Sequence; identical to SEQ ID NO: 581994
  ENSG00000205571_0 (sequence is synthesized)

SEQ ID NO: 748789 - DNA, 120 bp, Artificial Sequence; identical to SEQ ID NO: 581995
  ENSG00000205571_1 (sequence is synthesized)

SEQ ID NO: 748790 - DNA, 120 bp, Artificial Sequence; identical to SEQ ID NO: 581996
  ENSG00000205571_2 (sequence is synthesized)

SEQ ID NO: 748791 - DNA, 120 bp, Artificial Sequence; identical to SEQ ID NO: 581997
  ENSG00000205571_3 (sequence is synthesized)

SEQ ID NO: 748792 - DNA, 120 bp, Artificial Sequence; identical to SEQ ID NO: 581998
  ENSG00000205571_4 (sequence is synthesized)

SEQ ID NO: 748793 - DNA, 120 bp, Artificial Sequence; identical to SEQ ID NO: 581999
  ENSG00000205571_5 (sequence is synthesized)

SEQ ID NO: 748794 - DNA, 120 bp, Artificial Sequence
  ENSG00000205571_6 (sequence is synthesized)
ggaagtatgttaatttcatggtacatgagtggctatcatactggctattatatgggttttagacaaaatcaaaaagaaggaaggtgctcacattccttaaattaaggagtaagtctgcca

SEQ ID NO: 748795 - DNA, 120 bp, Artificial Sequence; identical to SEQ ID NO: 582001
  ENSG00000205571_7 (sequence is synthesized)

SEQ ID NO: 748796 - DNA, 120 bp, Artificial Sequence
  ENSG00000205571_8 (sequence is synthesized)
aaaaccatctgtaaaagactgaggtgggggtgggaggccagcacggtggtgaggcagttgagaaaatttgaatgtggattagattttgaatgatattggataattattggtaattttatg

SEQ ID NO: 748797 - DNA, 120 bp, Artificial Sequence; identical to SEQ ID NO: 582003
  ENSG00000205571_9 (sequence is synthesized)

SEQ ID NO: 748798 - DNA, 120 bp, Artificial Sequence; identical to SEQ ID NO: 582004
  ENSG00000205571_10 (sequence is synthesized)

SEQ ID NO: 748799 - DNA, 120 bp, Artificial Sequence
  ENSG00000205571_11 (sequence is synthesized)
gtggctatcatactggctattatatggaaatgctggcatagagcagcactaaatgacaccactaaagaaacgatcagacagatctggaatgtgaagcgttatagaagataactggcctca

SEQ ID NO: 748800 - DNA, 120 bp, Artificial Sequence; identical to SEQ ID NO: 582005
  ENSG00000205571_12 (sequence is synthesized)

SEQ ID NO: 748801 - DNA, 120 bp, Artificial Sequence; identical to SEQ ID NO: 582006
  ENSG00000205571_13 (sequence is synthesized)

SEQ ID NO: 748802 - DNA, 120 bp, Artificial Sequence
  ENSG00000205571_14 (sequence is synthesized)
taatgtaaaacaatcaatattaaagaattttgatgccaaaactattagataaaaggttaatctacatccctactagaattctcatacttaactggttggttgtgtggaagaaacatactt

SEQ ID NO: 748803 - DNA, 120 bp, Artificial Sequence
  ENSG00000205571_15 (sequence is synthesized)
tcacaataaagagctttaggatatgatgccattttatatcactagtaggcagaccagcagacttttttttattgtgatatgggataacctaggcatactgcactgtacactctgacatat

SEQ ID NO: 748804 - DNA, 72 bp, Artificial Sequence; identical to SEQ ID NO: 582010
  ENSG00000205571_16 (sequence is synthesized)

SEQ ID NO: 748805 - DNA, 120 bp, Artificial Sequence; identical to SEQ ID NO: 582017
  ENSG00000205571_17 (sequence is synthesized)

SEQ ID NO: 748806 - DNA, 120 bp, Artificial Sequence; identical to SEQ ID NO: 582011
  ENSG00000205571_18 (sequence is synthesized)

SEQ ID NO: 748807 - DNA, 120 bp, Artificial Sequence
  ENSG00000205571_19 (sequence is synthesized)
agctcactgcaacctctgctatccgggttcaagcagttctcgtgcctcacccacgtgagtagttgggattacaggcatgtggcaccatgccccactaagttttgtatttttagtagagat

SEQ ID NO: 748808 - DNA, 120 bp, Artificial Sequence; identical to SEQ ID NO: 582013
  ENSG00000205571_20 (sequence is synthesized)

SEQ ID NO: 748809 - DNA, 120 bp, Artificial Sequence; identical to SEQ ID NO: 582014
  ENSG00000205571_21 (sequence is synthesized)

SEQ ID NO: 748810 - DNA, 120 bp, Artificial Sequence; identical to SEQ ID NO: 582015
  ENSG00000205571_22 (sequence is synthesized)

SEQ ID NO: 748811 - DNA, 120 bp, Artificial Sequence; identical to SEQ ID NO: 582016
  ENSG00000205571_23 (sequence is synthesized)

SEQ ID NO: 748812 - DNA, 120 bp, Artificial Sequence; identical to SEQ ID NO: 581888
  ENSG00000205572_0 (sequence is synthesized)

SEQ ID NO: 748813 - DNA, 120 bp, Artificial Sequence; identical to SEQ ID NO: 581889
  ENSG00000205572_1 (sequence is synthesized)

SEQ ID NO: 748814 - DNA, 120 bp, Artificial Sequence
  ENSG00000205572_2 (sequence is synthesized)
aagcagaaggcagctaatgagaagaagtctatgcagacaagagaaaagtgatgactggctatttggaaaacctgggtgctactgccaactgggtgtatcataagctctaagatcaagatt

SEQ ID NO: 748815 - DNA, 120 bp, Artificial Sequence
  ENSG00000205572_3 (sequence is synthesized)
ttgtagagtggacagtcattacatatgttataacttatcctttaaaaactattttaaactttatcctttcagctttacttagtgcgatgttttagaagcagtcttcaaagaataaaacac

SEQ ID NO: 748816 - DNA, 120 bp, Artificial Sequence
  ENSG00000205572_4 (sequence is synthesized)
taaccatgcatgtgacatattggtgaacattatttttattattgaacattcatatataatttattaggtaatatgatcagataataggatctcttatataataaagaatctttgtcatca

SEQ ID NO: 748817 - DNA, 120 bp, Artificial Sequence
  ENSG00000205572_5 (sequence is synthesized)
agtcggcagagagagagctcgcgggtggttccggtccggcttttcaggccggacgggtgcctgcccctcaggtgcgagtttgtgcggtaaagaacacaccccggagatgtggacacggcc

SEQ ID NO: 748818 - DNA, 120 bp, Artificial Sequence
  ENSG00000205572_6 (sequence is synthesized)
catgaagaaaacccaggaaattagcaagggaaagaggaaagaggatagcttgactgcctctcagagaaagcagagttctggaggccagaaatctgagagcaagatgtcagctgggccaca

SEQ ID NO: 748819 - DNA, 120 bp, Artificial Sequence
  ENSG00000205572_7 (sequence is synthesized)
cctccctctgaaggctccaagggagaatccttgctttcctcttccagctgctggtggctccaggttccattctaacctaggatgatctcatttggaaatccttaatttcatctacaaaaa

SEQ ID NO: 748820 - DNA, 120 bp, Artificial Sequence
  ENSG00000205572_8 (sequence is synthesized)
ctgttttcccaaataggtcacattcacgcatatcagatggacagatgtatcattttggggtccaccattcaacccactacaaggagttttttaaacaaaaataggaaacttagatgtaac

SEQ ID NO: 748821 - DNA, 72 bp, Artificial Sequence
  ENSG00000205572_9 (sequence is synthesized)
gtgctgggattacaggcgtgagtcacagcccccggccataatttagcactttaaaaaataatagccatgacc

SEQ ID NO: 748822 - DNA, 120 bp, Artificial Sequence
  ENSG00000205572_10 (sequence is synthesized)
tactaaaaatacaaaaattagctggggcgaggggataggccgagttccgggtgtaagggggccattagggagagcagagcgaggcagctgatcttccggattgggggccttgcccggaag

SEQ ID NO: 748823 - DNA, 120 bp, Artificial Sequence
  ENSG00000205572_11 (sequence is synthesized)
cagctgatcttccggattgggggccttgcccggaagctggacctcacggagatgaaacggaagatgcacgaggatatgatctccatacagaactttctcatctacgtggccctgctgcga

SEQ ID NO: 748824 - DNA, 120 bp, Artificial Sequence
  ENSG00000205572_12 (sequence is synthesized)
gtcactccatttatcttaaagaaattggacagcatatgaagattggacatcacatgtgaatgcatgatatgaagagcctggttacagtttctactgttctctgcaagtaaataggcccag

SEQ ID NO: 748825 - DNA, 120 bp, Artificial Sequence
  ENSG00000205572_13 (sequence is synthesized)
aaaggtataagagactctttgaatggacataaaaattctgcttgttaagaacaagttgagctctggtaactgatcttaatagctaaaatataaaaatatttgggaagtctgaaatgaggt

SEQ ID NO: 748826 - DNA, 120 bp, Artificial Sequence
  ENSG00000205572_14 (sequence is synthesized)
ctcctggccctggtgtgcccttaatgcctgtgacagttggcctctgtgaatattggtataattgtaaataatgtcaaactccattttctagcaagtattaataattaagggaagtatgtc

SEQ ID NO: 748827 - DNA, 120 bp, Artificial Sequence
  ENSG00000205572_15 (sequence is synthesized)
tggggataaaggtggaaatcaacgagaacttgcccgccagaaaaacatgaagaaaacccaggaaattagcaagggaaagaggaaagaggatagcttgactgcctctcagagaaagcagag

SEQ ID NO: 748828 - DNA, 120 bp, Artificial Sequence; identical to SEQ ID NO: 581907
  ENSG00000205572_16 (sequence is synthesized)

SEQ ID NO: 748829 - DNA, 86 bp, Artificial Sequence; identical to SEQ ID NO: 581908
  ENSG00000205572_17 (sequence is synthesized)

SEQ ID NO: 748830 - DNA, 120 bp, Artificial Sequence; identical to SEQ ID NO: 581904
  ENSG00000205572_18 (sequence is synthesized)

SEQ ID NO: 748831 - DNA, 120 bp, Artificial Sequence
  ENSG00000205572_19 (sequence is synthesized)
gcagcataactcctatctctgcctttgtctttgtggtcttcttttctgtcttcttcccttctttttatgaggacttttgctgttggatttaggttccattctaacctaggatgatctcat

SEQ ID NO: 748832 - DNA, 120 bp, Artificial Sequence
  ENSG00000205581_0 (sequence is synthesized)
atccggttctcccaccgcccccgctgtgggtctcagcagctcgggcggcgggaggagtggcagcggcaaggcagcccagtttcgcgaaggctgtcggcgcgccgcggcccgcaggcaccc

SEQ ID NO: 748833 - DNA, 120 bp, Artificial Sequence
  ENSG00000205581_1 (sequence is synthesized)
ggcacgcgccttccccgcaggcacccggcacgcgccttccccgccgccacgatgcccaagaggaaggtcagctccgccgaaggcgccgccaaggaagagcccaagaggagatcggcgcgg

SEQ ID NO: 748834 - DNA, 120 bp, Artificial Sequence
  ENSG00000205581_2 (sequence is synthesized)
ttgtcagctaaacctcctgcaaaagtggaagcgaagccgaaaaaggcagcagcgaaggataaatcttcagacaaaaaagtgcaaacaaaagggaaaaggggagcaaagggaaaacaggcc

SEQ ID NO: 748835 - DNA, 120 bp, Artificial Sequence
  ENSG00000205581_3 (sequence is synthesized)
gaagtggctaaccaagaaactaaagaagacttacctgcggaaaacggggaaacgaagactgaggagagtccagcctctgatgaagcaggagagaaagaagccaagtctgattaataacca

SEQ ID NO: 748836 - DNA, 120 bp, Artificial Sequence
  ENSG00000205581_4 (sequence is synthesized)
ttattttttggtacaaccagaaaatagtgtgggatattgaattatgggaggctctgactgtctcgggtgtcagcttaacattccacagatggggggttagtttttatatcctataataca

SEQ ID NO: 748837 - DNA, 120 bp, Artificial Sequence
  ENSG00000205581_5 (sequence is synthesized)
aagcatattaaatggcaatatggagtcagtcctgcatttaatgtcttgaacattttaaattacttctattaccatgttgttttttagtagaattgtttcctaaagaaaaccactctttga

SEQ ID NO: 748838 - DNA, 120 bp, Artificial Sequence
  ENSG00000205581_6 (sequence is synthesized)
tcatggctctctctgccagaattgtgtgcactctgtaacatctttgtggtagtcctgttttcctaataactttgttactgtgctgtgaaagattacagatttgaacatgtagtgtacgtg

SEQ ID NO: 748839 - DNA, 120 bp, Artificial Sequence
  ENSG00000205581_7 (sequence is synthesized)
ctgttgagttgtgaactggtgggccgtatgtaacagctgaccaacgtgaagatactggtacttgatagcctcttaaggaaaatttgcttccaaattttaagctggaaagtcactggaata

SEQ ID NO: 748840 - DNA, 120 bp, Artificial Sequence
  ENSG00000205581_8 (sequence is synthesized)
actttaaaaaagaattacaatacatggctttttagaatttcgttacgtatgttaagatttgtgtacaaattgaaatgtctgtactgatcctcaaccaataaaatctcagttatgaaaata

SEQ ID NO: 748841 - DNA, 120 bp, Artificial Sequence
  ENSG00000205581_9 (sequence is synthesized)
ttgtcagctaaacctcctgcaaaagtggaagcgaagccgaaaaaggcagcagcgaagtgtaggtagaagtttagcactgcagtcatcagaagaggcaagattaatttccttgacattgag

SEQ ID NO: 748842 - DNA, 80 bp, Artificial Sequence
  ENSG00000205581_10 (sequence is synthesized)
ggcccgggaggcgcttggagaccggcgggcgggcaggcgagcgctcggcggccgcgggggcgggcgttctggaacgtttg

SEQ ID NO: 748843 - DNA, 120 bp, Artificial Sequence
  ENSG00000205581_11 (sequence is synthesized)
cgggcgttctggaacgtttggcggccgggggagctgagggggctattcgaacggggcggcgggaagccgtgacgtcacgcggccgggcattgttctcggggccgggcgggcccgcgagtc

SEQ ID NO: 748844 - DNA, 120 bp, Artificial Sequence
  ENSG00000205581_12 (sequence is synthesized)
aaagtggaagcgaagccgaaaaaggcagcagcgaagattcttcaaacacctaaatgaaagtgataaattcaaaactgatccttttagttcctcattatatgatatgaagggattaactgt

SEQ ID NO: 748845 - DNA, 120 bp, Artificial Sequence
  ENSG00000205581_13 (sequence is synthesized)
ttttagtagctctagaaacatttttaagaaggagggaatcccacctcatcccattttttaagtgtaaatgcttttttttaagaggtgaaatcatttgctggttgtttattttttggtaca

SEQ ID NO: 748846 - DNA, 120 bp, Artificial Sequence
  ENSG00000205581_14 (sequence is synthesized)
aggccaggagaaagggaacgtgtaagtttttatatatacagtttccaagccaacttcgggaagccttaacctttttacggggtgggggtggggaggtaaaaagttgtgatctctgagaaa

SEQ ID NO: 748847 - DNA, 120 bp, Artificial Sequence
  ENSG00000205581_15 (sequence is synthesized)
taaccgccactactctggaagtgttcatcagcagttatacaaaaccgtgattttggctgctccctaacaaattcgtgattgcatgattcgaattgcaggtctgtagaatgaagttggctt

SEQ ID NO: 748848 - DNA, 120 bp, Artificial Sequence
  ENSG00000205581_16 (sequence is synthesized)
tgggtgtacgtgtgtttgataacttgcagggtggaaaagcagaacatgtgtaaaacaagtataagctttgtgtttggatatagcattgaaacctgtaaagctctacatgttcttcgcggg

SEQ ID NO: 748849 - DNA, 120 bp, Artificial Sequence
  ENSG00000205581_17 (sequence is synthesized)
gtgattaatttttatccaaaacttaggtgagagtttgctatttgaagtctcaaaaaaaatttttgttaatgccttcacctctttcctaaaagtgtaggtagaagtttagcactgcagtca

SEQ ID NO: 748850 - DNA, 120 bp, Artificial Sequence
  ENSG00000205581_18 (sequence is synthesized)
tcagaagaggcaagattaatttccttgacattgaggagttgttggataattactaaatttgtccttgttaaataaaggtataaaacaaagatgttttttcttttttaatttaaatttttt

SEQ ID NO: 748851 - DNA, 120 bp, Artificial Sequence
  ENSG00000205581_19 (sequence is synthesized)
ggcagcagcgaaggtaagcctcgaaacgcgcattgggatgcagcggggccttaggctacactgcttcttaatgcggggcttccattttgattagctattggagctttatttatactttaa

SEQ ID NO: 748852 - DNA, 120 bp, Artificial Sequence
  ENSG00000205581_20 (sequence is synthesized)
taattacggtaaataatttttctagtggtcgaggcaaaaatgtaatggatatattcatcctggtttatagaactatatcacactaatgctgctgcagatgttaggagacttaggacgaca

SEQ ID NO: 748853 - DNA, 120 bp, Artificial Sequence
  ENSG00000205581_21 (sequence is synthesized)
tgtgatccttttaaaaataaagcttcacggaaggtatgagaatagtatttttcaactttaaatttctcattaccagaagaccatgtggtaattctctgtatacagttagaacagcacgga

SEQ ID NO: 748854 - DNA, 120 bp, Artificial Sequence
  ENSG00000205581_22 (sequence is synthesized)
aacttgaaggcctaaaaaattagctgaccttgttaaaaatgttggcgtgagcagtatattattacctatctttttttattgtgtgtgtgtgtgtgtgtgtgttttaaactaattggctga

SEQ ID NO: 748855 - DNA, 120 bp, Artificial Sequence
  ENSG00000205581_23 (sequence is synthesized)
aatatctgcctgtttccctctttacatttttcttgtttctttccttatttatctttgtccatcttgagatctactgtaaagtgaattttttaatgaaaacagttccaagttttactctca

SEQ ID NO: 748856 - DNA, 120 bp, Artificial Sequence
  ENSG00000205581_24 (sequence is synthesized)
gtgggtttgggacatcagatgtaattgagaggccaacaggtaagtcttcatgtcagtgtttgttgaggaacgagcctatgaggtcagttttcccaaaaggaaaaagggcagaagggattt

SEQ ID NO: 748857 - DNA, 120 bp, Artificial Sequence
  ENSG00000205581_25 (sequence is synthesized)
gttcatttttacatctcgtttctgtaatacacctttgacttcatggttgatcagactttgaagtctaaacagaacgtaagcacttggtgtatcgattatcatactacacagtagacatgt

SEQ ID NO: 748858 - DNA, 120 bp, Artificial Sequence
  ENSG00000205581_26 (sequence is synthesized)
tttcaaggcatatcttgtcactgtgtgtgcttctgacttgtatctttccctagaactaaatattttgaaggtccaaacattatactttgggaaacttgattgatttttttttaatctagc

SEQ ID NO: 748859 - DNA, 120 bp, Artificial Sequence
  ENSG00000205581_27 (sequence is synthesized)
tgattatgaaattaatgagaaatctttagaaacagactacaaaagagtagttcttaaatacagaagtgattgtgaaactttgtgatagcaatgtgtgtagtagcagttttgtctcaaata

SEQ ID NO: 748860 - DNA, 120 bp, Artificial Sequence
  ENSG00000205581_28 (sequence is synthesized)
catttatcatttgttactcaaaggatgttgaagtattaaaagtcattatgctgtctgtggaatcctactattagtacagaacaccctgcagtgatttttccgcccgtgttagcattgaag

SEQ ID NO: 748861 - DNA, 120 bp, Artificial Sequence
  ENSG00000205581_29 (sequence is synthesized)
ttgtgagctctacttgcttgtctttatggccctttaattcaagtaattggtcagtatccgtatgggtcttttataccacccgctgggggctaaactaatttagctgctgctgtatactta

SEQ ID NO: 748862 - DNA, 120 bp, Artificial Sequence
  ENSG00000205581_30 (sequence is synthesized)
ctaacaaggaataaatgttaagctttcttctcagtattgatggatggtatctaaaagtatttttatgtttctttaacatggcttaaattttgaacttaatgtatcaagttagtatggtca

SEQ ID NO: 748863 - DNA, 120 bp, Artificial Sequence
  ENSG00000205581_31 (sequence is synthesized)
cctgaccgtacggcatggtgctttttttcaggtgattggtcttaatgtgagggttaaggtcttgtgaggacagtattgttgaagttcacaacaaatttggggatgggtgggaatacggtc

SEQ ID NO: 748864 - DNA, 120 bp, Artificial Sequence
  ENSG00000205581_32 (sequence is synthesized)
gacgagactcctccggtattcaacttcatgacattgtcctgtcatgtggaactgtagggaatagtggatgatggcgacagtggtgaaatatagctcgggctttaggatttgtcatatgtc

SEQ ID NO: 748865 - DNA, 120 bp, Artificial Sequence
  ENSG00000205581_33 (sequence is synthesized)
taatgaggcttgacatgcaagtactattaaaatctccttagcatacattgttttcctgattactgggggggaccttaagttgtctcatgtaataggtgtatcaactgatgtgtgatagac

SEQ ID NO: 748866 - DNA, 120 bp, Artificial Sequence
  ENSG00000205581_34 (sequence is synthesized)
attaatatgacagctgttatggatacagtctatacaaaatgagatcctttcataagcttgaagattggggtttcacgctcatgtgtgagatgtccctctctcaaaccttactatgaagtc

SEQ ID NO: 748867 - DNA, 120 bp, Artificial Sequence
  ENSG00000205581_35 (sequence is synthesized)
agcaccactgggcacattacttgtctgacatgaaggggaaaaagtaaaacaaaatgtaaataaggagtaaagcatgtacttaaaatatattcttattctatcataggataaatcttcaga

SEQ ID NO: 748868 - DNA, 120 bp, Artificial Sequence
  ENSG00000205581_36 (sequence is synthesized)
aaacctcctgcaaaagtggaagcgaagccgaaaaaggcagcagcgaagaaagttctgtttttgtgatccttttaaaaataaagcttcacggaaggataaatcttcagacaaaaaagtgca

SEQ ID NO: 748869 - DNA, 120 bp, Artificial Sequence
  ENSG00000205581_37 (sequence is synthesized)
caggagaaagggaacgttgtaggtagaagtttagcactgcagtcatcagaagaggcaagattaatttccttgacattgaggagttgttggataattactaaatttgtccttgttaaataa

SEQ ID NO: 748870 - DNA, 120 bp, Artificial Sequence
  ENSG00000205581_38 (sequence is synthesized)
gcttcacgcaggcctgcgaagctggagcccctggatagcctttcttgccgacagaggcgggagaaatttgctacttcctgtataccttatccttctcccttcccagtctaagatacgaac

SEQ ID NO: 748871 - DNA, 120 bp, Artificial Sequence
  ENSG00000205581_39 (sequence is synthesized)
tataaatgttcgaacccaattcaccccggaggggaggggccagataccagtggcctgaaggcgcccaggtcagctccgccgaaggcgccgccaaggaagagcccaagaggagatcggcgc

SEQ ID NO: 748872 - DNA, 120 bp, Artificial Sequence
  ENSG00000205592_0 (sequence is synthesized)
gcacctctggggtatctcttgccacaacagttgcccctggaagcttcagcacagaagccacaacttctgtaggagaaaatggaaaaacaagaggtgaaataatcacagatactactgagg

SEQ ID NO: 748873 - DNA, 120 bp, Artificial Sequence
  ENSG00000205592_1 (sequence is synthesized)
gcacctctggcaaagttctggaacctggaagtgcccacacagaggccacaactttcccaggaggcagtgggactacccgagcaggaccaccaggaggtaccactggagaattgtctagaa

SEQ ID NO: 748874 - DNA, 120 bp, Artificial Sequence
  ENSG00000205592_2 (sequence is synthesized)
tgaccattatacctggaagttctaacacagaggccacaacttccacaaaagggactggtacttctggaactggcttcaaaactggcacctcttgggtggcgcctggcacaacagtttccc

SEQ ID NO: 748875 - DNA, 120 bp, Artificial Sequence
  ENSG00000205592_3 (sequence is synthesized)
ctggaagtttcagcacagccacaatttcccctggagcaagtagaacgactggggctgcacctgccgcagaaaccacaacttccctagaaggaggtggcaccactggagcagaaataaaat

SEQ ID NO: 748876 - DNA, 120 bp, Artificial Sequence
  ENSG00000205592_4 (sequence is synthesized)
acgacttctttaggagaaagtggaaaaacaagagttgaaacaatcacaggtactactgagggtaaaactctggcagctggaagtgcccacacagaggccacaactttctcaggaggcagc

SEQ ID NO: 748877 - DNA, 120 bp, Artificial Sequence
  ENSG00000205592_5 (sequence is synthesized)
gggagcacccgagcaggaccactgggtggcgcttctggtacatcaggaggatatgtccctggaagggaaacagagcccacaacttccattgaagaaactggaacttccagaactatattc

SEQ ID NO: 748878 - DNA, 120 bp, Artificial Sequence
  ENSG00000205592_6 (sequence is synthesized)
aaaactgtaggcatcacttcagccccagggaggcaagcaggcacctctgtggtggcgcctagcacaacagttgcccctggaagtttcagcacagcagccacaacttctcctggagcaagt

SEQ ID NO: 748879 - DNA, 120 bp, Artificial Sequence
  ENSG00000205592_7 (sequence is synthesized)
ggaatgactggggttagaaccacttcaaagactacaacttccctaggtggaactggcaccactagaactgaaataaaatcaggagccaccactggagcaccaggaattaagacagatatc

SEQ ID NO: 748880 - DNA, 120 bp, Artificial Sequence
  ENSG00000205592_8 (sequence is synthesized)
ccaaaatgccaagaatccaacagtattcatttaggagtcatgttaccaaccataatacttcaaaaacctctatttcaaacagcatccaagcactttccttgtcaaagctacaggatataa

SEQ ID NO: 748881 - DNA, 120 bp, Artificial Sequence
  ENSG00000205592_9 (sequence is synthesized)
tgcaaaacaaaaacaaaaaacttctgtatttatcctttaaacgattccttattgcccattatccttattgcccatttttcttatttttattgcccgttttaataaaataacatgctttat

SEQ ID NO: 748882 - DNA, 120 bp, Artificial Sequence
  ENSG00000205592_10 (sequence is synthesized)
tctgcattgatgaatactgccaaactagagacaaaacatctacatgtgacacttattcagaactgtcccgcctctgtgcctcagatggtcctggcacctttgaatcctggcgaagcgact

SEQ ID NO: 748883 - DNA, 120 bp, Artificial Sequence
  ENSG00000205592_11 (sequence is synthesized)
ccgatgtggtttgtggaacacaaagatgtccagaacaacatatctacaaagaatgtggaccctccaaccctgcaacttgttctaatgtggctccttttcaagacagtgaatgtgtgagcg

SEQ ID NO: 748884 - DNA, 120 bp, Artificial Sequence
  ENSG00000205592_12 (sequence is synthesized)
gctgcacctgcccagaaggttatctgttggatgacattggagagaaaggaaaatgtgtattaaaagctgaatgtccctgtgaatccagtggaacagtgtatcagccaggagaagtccgag

SEQ ID NO: 748885 - DNA, 120 bp, Artificial Sequence
  ENSG00000205592_13 (sequence is synthesized)
tggaaccactgaagcagaaatttcatcaggcaataccccaggatcaacgggagtcaccagcagccaagaaggaaccactgtggtatcaagtggaatcactggaatcccagaaacttccat

SEQ ID NO: 748886 - DNA, 120 bp, Artificial Sequence
  ENSG00000205592_14 (sequence is synthesized)
gctccaccttggttacagctggagtgccaacaagaccacaagtatcccagccagaaaccactgtcgtggcaaccagagaagtagaaaccgaaaataaaacagaatgtctagcctcacttc

SEQ ID NO: 748887 - DNA, 120 bp, Artificial Sequence
  ENSG00000205592_15 (sequence is synthesized)
caccagctccaggtaataattccacgacttcagaattgttccacattaatggttcctcttgtcaatcaaatttcagaggtcacgctaataaaagtcactagccatggaaatgttataaaa

SEQ ID NO: 748888 - DNA, 120 bp, Artificial Sequence
  ENSG00000205592_16 (sequence is synthesized)
tatgattcaaaaaaatgttgctatacatgtaagaataattgcagatcttcccttgtaaatgtgactgttatctacagtggttgcaagaaaagagttcagatggcaaaatgcacaggggaa

SEQ ID NO: 748889 - DNA, 120 bp, Artificial Sequence
  ENSG00000205592_17 (sequence is synthesized)
agaaaactatgaactcagagacattgtacttgactgtcctgatggcagtacaatcccttaccaatacaagcatatcacgacctgctcttgtttagacatatgccaactatatacgacctt

SEQ ID NO: 748890 - DNA, 120 bp, Artificial Sequence
  ENSG00000205592_18 (sequence is synthesized)
catgtacagttaatgctgacatcaccttcccagttttaacaggcctggtatttattttataagtgaggaaaaataatcatttaaaaagtgagaataaactaaacaatgtgagaataactc

SEQ ID NO: 748891 - DNA, 120 bp, Artificial Sequence
  ENSG00000205592_19 (sequence is synthesized)
aaggtcccaggcagacatgatgctggccacattcttctaagggttacaaatgtgtcactctgttgatcttttccttttctttcctgcctaggcacagctaaagtgctctctggtacgaca

SEQ ID NO: 748892 - DNA, 120 bp, Artificial Sequence
  ENSG00000205592_20 (sequence is synthesized)
gttgcctctgggagctccaactcaggatctatgaccactgcactggggagccaactctccagcagtcaaacagtgattccaggttccagtggcaccatctctcacacaactgttgcacct

SEQ ID NO: 748893 - DNA, 120 bp, Artificial Sequence
  ENSG00000205592_21 (sequence is synthesized)
gagcacaactgttgcacctggaagttccagtacagaagccacaacttccacaggagtccatagaaccactgtagtgggacagaagacaggagctaccactagagggtcagcaaagcaagg

SEQ ID NO: 748894 - DNA, 120 bp, Artificial Sequence
  ENSG00000205592_22 (sequence is synthesized)
aactagaagcacaatagaagctacgacgtcctttagaggcactgggaccacaggaagtggaatgaatacaggtactactggagtggtctctggcaacaccatctcacctagcagtttcaa

SEQ ID NO: 748895 - DNA, 120 bp, Artificial Sequence
  ENSG00000205592_23 (sequence is synthesized)
acagagtgatctcctctgaaaatctttgtccaagcccccaaatttcagaatactagtgtttcactctaatttttacatttatagacagcagaatattctctctcttttctcttctacagg

SEQ ID NO: 748896 - DNA, 120 bp, Artificial Sequence
  ENSG00000205592_24 (sequence is synthesized)
gagagagactagggtagcttctggcaacacatctaaacctgggagttcaaatacagaagctacgacgtcctttagaggcactgggaccacaggaagtggaatgaatacagactttccagg

SEQ ID NO: 748897 - DNA, 120 bp, Artificial Sequence
  ENSG00000205592_25 (sequence is synthesized)
gacttgtctctccagaatgactatcctccatttctaggtcccaaatcacaaccatgaagttgatcttatggtacttggttgtggcactttggtgcttcttcaaagatgtggaagccttac

SEQ ID NO: 748898 - DNA, 120 bp, Artificial Sequence
  ENSG00000205592_26 (sequence is synthesized)
tttaccgacaaaaatcagatggtaaaatagcagcaagcagatcaggtggcttctcttatggtagttcatcctctggtgacttggacagaaaaaagccactctttagcttggaatttggtt

SEQ ID NO: 748899 - DNA, 120 bp, Artificial Sequence
  ENSG00000205592_27 (sequence is synthesized)
ctccaggagagactgaagacaagtccagacaacgtcaggatgctgggagtccaaagtcagaagacaccccagcaggtggcttttttaacagtagttcatcctccggtgactcagacagga

SEQ ID NO: 748900 - DNA, 120 bp, Artificial Sequence
  ENSG00000205592_28 (sequence is synthesized)
caaagccattctttagcttaggacttggtgctccaggaaaggctgaagacaagtccggagacagtcaggatgctggaggttcaaagtcagaagacaccccaccaggtggctttttttatg

SEQ ID NO: 748901 - DNA, 120 bp, Artificial Sequence
  ENSG00000205592_29 (sequence is synthesized)
gtagttcatcctctggtgactcagacaaaaaaaagccactctttagctttgaatttggtgctacaggagaggatgaagacaagtccagagaacgctgggatgctgggaattcaaggtcag

SEQ ID NO: 748902 - DNA, 120 bp, Artificial Sequence
  ENSG00000205592_30 (sequence is synthesized)
aagacagcccagcagatagcaccaacacaagatatggtgctggctttagtagcagtggtgcctctctggatgtgggatttggttgggggatatctgatgaaaagggattggaagtcagta

SEQ ID NO: 748903 - DNA, 120 bp, Artificial Sequence
  ENSG00000205592_31 (sequence is synthesized)
aagctgatgggagagaaactagaggcagtggatctgctgggggtgaaaccatagtctttggacctgatgcaggtagctcagttggaactggttcttctggtttgaaacttggagcaggga

SEQ ID NO: 748904 - DNA, 120 bp, Artificial Sequence
  ENSG00000205592_32 (sequence is synthesized)
aaggtgatgctgcatttggttttgaagtttctgattcgaattcatttggtgacactggcattagtagcaaaacagttgaaggaaatcaaacgagtagttctggaggatctgtttccattg

SEQ ID NO: 748905 - DNA, 120 bp, Artificial Sequence
  ENSG00000205592_33 (sequence is synthesized)
atctaggtgataccagtttcagaagtgagaatcaatttgttggtggtggctctctaaattcgatatccaatttatgggattctggtcaagagggatttggaatcaatgaaattggaggga

SEQ ID NO: 748906 - DNA, 120 bp, Artificial Sequence
  ENSG00000205592_34 (sequence is synthesized)
atggaatgagtggcagtgtatctgctgaggctggattcaaaggttttggatctgattcaagtagctcaggtgattcaagtgcaagaaatgggtttgaaaattctagtggtatctctgaag

SEQ ID NO: 748907 - DNA, 120 bp, Artificial Sequence
  ENSG00000205592_35 (sequence is synthesized)
attcaggagtcatattggggtcatctgatcaacatgaagttgaactcagtagaactggtgggaatagaaagagaagcagtgaccctgatgaggctggaaacttgagtcctggatctgatg

SEQ ID NO: 748908 - DNA, 120 bp, Artificial Sequence
  ENSG00000205592_36 (sequence is synthesized)
tcagtgactcaggaggaaacacttggtcttctgattctggaagtggtggaggaggtgtcacaagctcgtctgaatatagtacgtctggaccactcaatactccagaaaaaggatcccaca

SEQ ID NO: 748909 - DNA, 120 bp, Artificial Sequence
  ENSG00000205592_37 (sequence is synthesized)
ttccagaagcaactccaaaatactcagaaacaaatgcaattattggtgaaatatctacctggagcaaaggagcatataaatctttcaacggccgcatctttttctttgaatcttcatgcc

SEQ ID NO: 748910 - DNA, 120 bp, Artificial Sequence
  ENSG00000205592_38 (sequence is synthesized)
catacactttctgccgtcactgcattgaatctggaggggatttcaatattgagatcaaacgaaacaatgatagtgagattgaaaaaataacagttctaattgacaataacgacgtctcta

SEQ ID NO: 748911 - DNA, 120 bp, Artificial Sequence
  ENSG00000205592_39 (sequence is synthesized)
tttttggtgacaccattttagttaatggagaaagataccatataacaataagttgattcacataaaaaaatatggagaacataatgttctgaatagccgtagaggaatcctgactttaat

SEQ ID NO: 748912 - DNA, 120 bp, Artificial Sequence
  ENSG00000205592_40 (sequence is synthesized)
gtgggacaaaaataacaaactctcgctcactcttcacaagcagtatccaacttgtggtctttgtggtaacttcaacagcactccagggcaagatattaatgagcacattgccaatagtaa

SEQ ID NO: 748913 - DNA, 120 bp, Artificial Sequence
  ENSG00000205592_41 (sequence is synthesized)
aattcctggtgattgtcccaatgctgttggtaaaagctatgaagtttgtgaagatggaatacagcactgtaacaaaattattggaacctactttgagaaatgtggaaaggttgctgctct

SEQ ID NO: 748914 - DNA, 120 bp, Artificial Sequence
  ENSG00000205592_42 (sequence is synthesized)
cacctttgatggtgttaagtacaactttcctggaaactgccacttcctggccgttcacaatgaagattggtctattagtgttgagctccgtccgtgcccaagtggtcagacaggaacgtg

SEQ ID NO: 748915 - DNA, 120 bp, Artificial Sequence
  ENSG00000205592_43 (sequence is synthesized)
cttaaatagcgttacacttctcttgaattcttctgttccagttgacaaatacgtattcaacagtgatggaacagtcacaaatgacaagattagaaatcaaggttattactattcagataa

SEQ ID NO: 748916 - DNA, 120 bp, Artificial Sequence
  ENSG00000205592_44 (sequence is synthesized)
aatacagatattcaatgcatcttcctcataccttcaagtagaaacatactttcatgtgaaactacaaatacaaattgttcctgtgatgcaattgtatgtttctatgccacccaaccaatt

SEQ ID NO: 748917 - DNA, 120 bp, Artificial Sequence
  ENSG00000205592_45 (sequence is synthesized)
cacagacactgtgggactctgtggttcctacaacaacaaagcagaggatgatttcatgtcaagtcagaatatattggagaagacatctcaggcatttgctaactcttgggaaatgatgtc

SEQ ID NO: 748918 - DNA, 120 bp, Artificial Sequence
  ENSG00000205592_46 (sequence is synthesized)
ctgtcctaaaggaaacccctcttcatgtattagtatagaaaaagaaaaatttgctgaaaggcactgtggaattcttcttgattcaagtgggcctttggcttcctgccacccaattgtgaa

SEQ ID NO: 748919 - DNA, 120 bp, Artificial Sequence
  ENSG00000205592_47 (sequence is synthesized)
ccctaaaccctatcatgaggaatgcaaaaaatatacttgcacttgtgaaaacagtcaggactgcctatgtacaattttaggcaactatgtgaaagcgtgtgctgagaaggaaacatacat

SEQ ID NO: 748920 - DNA, 120 bp, Artificial Sequence
  ENSG00000205592_48 (sequence is synthesized)
agtgggatggagaactggcctatgtgaacattcttgcccaagtggcctagtgttcaagtacaatgtaaaagcctgtaatagttcttgccgatccttgtcagaaagagataggagctgtga

SEQ ID NO: 748921 - DNA, 120 bp, Artificial Sequence
  ENSG00000205592_49 (sequence is synthesized)
tgtagaagatgttccagttgatggatgcacctgccctgatgcaatgtaccagaataatgaaggaaactgtgtactgaaatctcagtgtgactgttacataaacgacgaggtcatgcaacc

SEQ ID NO: 748922 - DNA, 120 bp, Artificial Sequence
  ENSG00000205592_50 (sequence is synthesized)
aggcaaactcatccatattgatgacaataaatgcgtctgtcgggatggaattcttctttgccagattcccattgatttaaccctacaaaattgttctggaggggctgagtatgtagactg

SEQ ID NO: 748923 - DNA, 120 bp, Artificial Sequence
  ENSG00000205592_51 (sequence is synthesized)
cagtgatcccaaggcacagagaagaaccaacagaacatgcagtactcggaacatacctgtttttgatgagaacttgccttgcaaacgtgggtgcttttgtccagaaggaatggttcgaaa

SEQ ID NO: 748924 - DNA, 120 bp, Artificial Sequence
  ENSG00000205592_52 (sequence is synthesized)
ttctaaagggatatgtgtctttcctaatgactgtccatgctcttttggtggacgagaatatgatgaaggaagtgtcacttctgttggctgcaatgaatgtacctgcattaaagggtcttg

SEQ ID NO: 748925 - DNA, 120 bp, Artificial Sequence
  ENSG00000205592_53 (sequence is synthesized)
gagttgtacccaaaatgaatgtcaaaccatctgccacatctatggggaaggtcatgttagaacttttgatgggaagagttacagttttgacggtctctgccagtattcatttcttgagga

SEQ ID NO: 748926 - DNA, 120 bp, Artificial Sequence
  ENSG00000205592_54 (sequence is synthesized)
ttattgtggtcatgaaaatggcacatttcgtattttaacggagagtgttccatgctgtgaagatgggctaacgtgctcaagaaaaattatagttgcttttcaggatcagaatattgtctt

SEQ ID NO: 748927 - DNA, 120 bp, Artificial Sequence
  ENSG00000205592_55 (sequence is synthesized)
gcaagacggtaaagtaacagcagtcaaatctacagaaagtaagaaatgtgaactcaatgcaaatgcatactccatacatactgttggcctgtacttaattctgaaatttcaaaatggaat

SEQ ID NO: 748928 - DNA, 120 bp, Artificial Sequence
  ENSG00000205592_56 (sequence is synthesized)
aatcgtgatttgggacaaaaatacaagactgtctgttattctggatccaaactggaatggcaaagtgtgtggtctttgtggaaataacaatggtgatctcaaggatgatttcacaacaag

SEQ ID NO: 748929 - DNA, 120 bp, Artificial Sequence
  ENSG00000205592_57 (sequence is synthesized)
atactcttcagtagcttctggagcactggaatttgggaatagttggaaaacaagccaagaatgttcagatacagtggctcagactttcccatgtgattcaaacccatactgtaaagcctg

SEQ ID NO: 748930 - DNA, 120 bp, Artificial Sequence
  ENSG00000205592_58 (sequence is synthesized)
ggctgtgcggaaatgtgagatcctcagagacagcaccttcagagactgccacaacaaggttgaccccagtgcttaccatgatgtgtgcattgaagaagcctgtgcatgtgacatggaggg

SEQ ID NO: 748931 - DNA, 120 bp, Artificial Sequence
  ENSG00000205592_59 (sequence is synthesized)
gaagtacctgggattctgcactgccgtggctatgtacgcagaggcgtgtagtgcagttggagtctgtgtctcatggagaaaaccaaatctgtgtcctgtctactgtgattactacaatgc

SEQ ID NO: 748932 - DNA, 120 bp, Artificial Sequence
  ENSG00000205592_60 (sequence is synthesized)
gcctggggaatgcagatggcattatgaaccttgtggcacagtgactgcaaaaacatgcaaagatcagctcgttggccagaaattttcttcacttttagaaggttgttatgctaagtgccc

SEQ ID NO: 748933 - DNA, 120 bp, Artificial Sequence
  ENSG00000205592_61 (sequence is synthesized)
agatagtgctccttacttggatgagaacaccatgaaatgtgtcagtttatctgagtgcagctgtttctataatgatgtcataccagcagggggagtgattgaagataattgtggaagaac

SEQ ID NO: 748934 - DNA, 120 bp, Artificial Sequence
  ENSG00000205592_62 (sequence is synthesized)
atgctactgcattgcagggcagttggagtgcagtgaaactgctcctaccaattcaacatttgcagtttccactacaacagctaccaccatattaagcaccggagcagcaattacactggt

SEQ ID NO: 748935 - DNA, 120 bp, Artificial Sequence
  ENSG00000205592_63 (sequence is synthesized)
taccggtggcccaagcacagcagcatccattccagcgattacaacatcaagcagtgaaacaacaggaacaactctaggtcctctcaccgaaccttttactacaggcattactgaaacttc

SEQ ID NO: 748936 - DNA, 120 bp, Artificial Sequence
  ENSG00000205592_64 (sequence is synthesized)
agttcccatcatctcaacatctggaaatgcaggcatgacaggagtagtgagccccaccgtcactggtgcttcaggcatggcaggaacaactggaggagtggatgcagccaccactggagc

SEQ ID NO: 748937 - DNA, 120 bp, Artificial Sequence
  ENSG00000205592_65 (sequence is synthesized)
tgctagtgaaaatacatctgagagagcaggcacaccgagggtatctggagaaacccctgcagtcggaggtggcagtacccctggagaagcaggccctggagccacagtttctggaagtac

SEQ ID NO: 748938 - DNA, 120 bp, Artificial Sequence
  ENSG00000205592_66 (sequence is synthesized)
aggagtttctgcaggctccatcactgccagccctggagcctcagccacaagctctgaaagcagcaaatcaggaactactggaccctcagtgggtggaaaaactggagccacaagcagtga

SEQ ID NO: 748939 - DNA, 120 bp, Artificial Sequence
  ENSG00000205592_67 (sequence is synthesized)
agcgacatcatctgaaggcatgtcaggtgtaacaggacagtctcttggatctactgctggatctgacagtgaaatcacagctaaaacatctttcactggttccagtccacctgggaaact

SEQ ID NO: 748940 - DNA, 120 bp, Artificial Sequence
  ENSG00000205592_68 (sequence is synthesized)
caccaggccaagcccgggctcacctggtcactttagtggtggaacaactgaatggggaaatgtagccaccactggagctgctggtgaaaacacttctggagcattgggttcaacagaagg

SEQ ID NO: 748941 - DNA, 120 bp, Artificial Sequence
  ENSG00000205592_69 (sequence is synthesized)
gtctgtggaagccaccaccagcgcaggcagtggaaacacagctggaacatcaggtactggggacactggccctggtaacacagcagtctcaggcacacctgtggtatcacctggagcaac

SEQ ID NO: 748942 - DNA, 120 bp, Artificial Sequence
  ENSG00000205592_70 (sequence is synthesized)
tcctggagctccaggtagcagcacccctggggaagcagacattggaaacaccagttttggaaaatcagggaccccaacagtatctgctgcctcaactaccagtagccctgtgagtaaaca

SEQ ID NO: 748943 - DNA, 120 bp, Artificial Sequence
  ENSG00000205592_71 (sequence is synthesized)
caccgatgcagcctcagccacagcagtgacaatctctggaagcaaaccaggtacacctggaacaccaggtggtgcaactagtggaggcaaaattacatctggatggtccagcagtggcac

SEQ ID NO: 748944 - DNA, 120 bp, Artificial Sequence
  ENSG00000205592_72 (sequence is synthesized)
cagcacgggcgcttcaaatacaccaggggcaacaggatcatcgaccggacagacagacacaagtggaccatcagctaaagtaacagggaattatggacaatcatctgaaataccagggac

SEQ ID NO: 748945 - DNA, 120 bp, Artificial Sequence
  ENSG00000205592_73 (sequence is synthesized)
aattaaatcatcatctgatgtttcagggacaatggggcaatcagatacaacatctggaccatcagttgcagtgacaaggacttctgaacaatcgtcaggagtcacggtggcatctgaacc

SEQ ID NO: 748946 - DNA, 120 bp, Artificial Sequence
  ENSG00000205592_74 (sequence is synthesized)
atcagttggagtatcagggacaactggaccattagctgaaatatcagggacaaccagaccattagtttcagggttaaggacaactggatcatcagctgaaggatcagggacaactggacc

SEQ ID NO: 748947 - DNA, 120 bp, Artificial Sequence
  ENSG00000205592_75 (sequence is synthesized)
ttcatcaagagaatcagtgacaactagaccattagctgaaggttcagggacaagtggacaatcggttacaggatcaagagcaactggattatcagctacagaattagggacaactgtgtc

SEQ ID NO: 748948 - DNA, 120 bp, Artificial Sequence
  ENSG00000205592_76 (sequence is synthesized)
ttttactggaggattaggtacaagtagatcatctgctagagaaacaaggacaactggaccatcagctgacgggtcaggaacaactggaccatctgttgtgagatcagggacaactagatt

SEQ ID NO: 748949 - DNA, 120 bp, Artificial Sequence
  ENSG00000205592_77 (sequence is synthesized)
atcagttggagtgacaagagcaactgaatcatcacctggagtgacaggaacaactacaccatcagctgaagaatccaggacaacaggaccatctgttctagtgacaggaacaactggaca

SEQ ID NO: 748950 - DNA, 120 bp, Artificial Sequence
  ENSG00000205592_78 (sequence is synthesized)
atcaggccaaggatcagggacaactggaaaatcttttatagaatcaggaccatctgttgtaggatcagggacaactggaccaacatctgcaggattaggaacaactgcaccatcaaccag

SEQ ID NO: 748951 - DNA, 120 bp, Artificial Sequence
  ENSG00000205592_79 (sequence is synthesized)
aagatcaagcacaacaaaaccatcagttggaagaactgggacaactggacaatcaggtgcagaatcaggaacaactgaaccatcagctagagtggcaggtgtaactggaacatcagctga

SEQ ID NO: 748952 - DNA, 120 bp, Artificial Sequence
  ENSG00000205592_80 (sequence is synthesized)
agtatcaggaagaattgaaccatcagctacagaatcaagtacaagtagaccactaggtgaaacaacagggacaactataccatcaatggaaggatcagaggcaactggaccatctgtcat

SEQ ID NO: 748953 - DNA, 120 bp, Artificial Sequence
  ENSG00000205592_81 (sequence is synthesized)
tggatcagaaacaactagactatcagttataggatcagggacaactggaacttcatctggaggttcaggtgcaacaagatcatcaggtggaggaatggggacaactggacaatcaactgc

SEQ ID NO: 748954 - DNA, 120 bp, Artificial Sequence
  ENSG00000205592_82 (sequence is synthesized)
aagatcagaaacaactggaccactttttggattgacaggaacatttgggcaatctgctacagtgactgggacatcttcaaattcagctggagtgacaacacctgaaaaatcacctggagt

SEQ ID NO: 748955 - DNA, 120 bp, Artificial Sequence
  ENSG00000205592_83 (sequence is synthesized)
ggcaatgacaacaggactgttggttgaaggatcagctacaactcaaccacgtattttagaatcagaaacaactgaatcatcagctggagtgatagtgacatctggacaatcagccagagt

SEQ ID NO: 748956 - DNA, 120 bp, Artificial Sequence
  ENSG00000205592_84 (sequence is synthesized)
gactggggcaactggaccatcagctggagagacaggaacaactgaaccatcaactgaaggatcagttgcagctgtattatttgttattggatcagaaacaactagaccattagatatagg

SEQ ID NO: 748957 - DNA, 120 bp, Artificial Sequence
  ENSG00000205592_85 (sequence is synthesized)
atcagggacaactggaactttatctggaggttcaagtacaacaagatcatcagatggaacaacagggacaaccagaaaatcaactgcaagatcagaaacaactggactttctggattgac

SEQ ID NO: 748958 - DNA, 120 bp, Artificial Sequence
  ENSG00000205592_86 (sequence is synthesized)
aggaacatctgggcaattggctggagtgactgggacatcttcaaaatcagctggagtaacagtgacatctgaaaaatcagctggagttgcagtgataacaggatcatttgttgaaagacc

SEQ ID NO: 748959 - DNA, 120 bp, Artificial Sequence
  ENSG00000205592_87 (sequence is synthesized)
agtcacaactggaccacctcttttagaatcagagacaactagaccatcaggtggagtaacagtgacatctggacaatcagccagagtgactgaaacagttggagcatcagctggagtgac

SEQ ID NO: 748960 - DNA, 120 bp, Artificial Sequence
  ENSG00000205592_88 (sequence is synthesized)
aggaacaactggaccatcaactgaaggatcaggggcaactggaccatctgttgtgggatcaggaacaactagaccattagctggtgaatcaggtacaactgagtcatcagctggagtgac

SEQ ID NO: 748961 - DNA, 120 bp, Artificial Sequence
  ENSG00000205592_89 (sequence is synthesized)
agggacaaggccatcatcatcaagagaatcagcaacaactggaccatcagatgaaggatcaggaacaactggactatcagctggagtgacagtgacatctggacaatcagttagaaagac

SEQ ID NO: 748962 - DNA, 120 bp, Artificial Sequence
  ENSG00000205592_90 (sequence is synthesized)
tgggacaactggagcaccagctggagttacagaaacaacaagaccatctgttgtcaaatcagggacaactggaccatctgttataggaacgaggacaactggaacttcatcaggaggatc

SEQ ID NO: 748963 - DNA, 120 bp, Artificial Sequence
  ENSG00000205592_91 (sequence is synthesized)
aggtgcaacaagatcatcaggtggagaaacagagacaactggccaatcagctgtaaaatcagggacaacagaatcatttactaggttgacaagaacatctgggcaatcagctggaatgac

SEQ ID NO: 748964 - DNA, 120 bp, Artificial Sequence
  ENSG00000205592_92 (sequence is synthesized)
tgggacatctgcacaatcagctggagtggcactaacaagtccttttgttgaaggattagtgacaactggatcatctactgtaggattagagacaactagaccttcagctgtaggatcagg

SEQ ID NO: 748965 - DNA, 120 bp, Artificial Sequence
  ENSG00000205592_93 (sequence is synthesized)
aaaaactggacctcctgttgtaaaagcacagacaactggaccatcagctggagtgacagtgacatccggacaatcagctagaatgactggggcaagtggaccatcagtaggagtgacagg

SEQ ID NO: 748966 - DNA, 120 bp, Artificial Sequence
  ENSG00000205592_94 (sequence is synthesized)
aacaactggaccagcaagtaaaggattagggacaattagaccatctgttgtaggattagagactactgaactatcagctgaaggatcagggacaactggaccacctattgtaggagagac

SEQ ID NO: 748967 - DNA, 120 bp, Artificial Sequence
  ENSG00000205592_95 (sequence is synthesized)
aactgtaccatcagctggagtgacagttacatctggatactcagatagagtgactggggcaactgaaccattggctggagtaacaggaaccattaaaccatctgttgcaggatcagtgac

SEQ ID NO: 748968 - DNA, 120 bp, Artificial Sequence
  ENSG00000205592_96 (sequence is synthesized)
aactggaccatctgttacaggagtagagacaactgcaaaaactacatctggaggattaagtacaactatatcgtcagttggaggaacagggaccactggacaatcacctgaaagatcagg

SEQ ID NO: 748969 - DNA, 120 bp, Artificial Sequence
  ENSG00000205592_97 (sequence is synthesized)
gacaacaggaccatttactggattgacagggacatctgcacaatcagctggagtcacaatgacatctatccaatcagctggagtgctagtaacaacaggactaaatgttgatggcttagg

SEQ ID NO: 748970 - DNA, 120 bp, Artificial Sequence
  ENSG00000205592_98 (sequence is synthesized)
gacaactggaaaagctcttataggatcaggaacaactggattatcagctgaagctacagggacaattggaccatcaactgaaggattagagaaaactggaccatctattactggatcagg

SEQ ID NO: 748971 - DNA, 120 bp, Artificial Sequence
  ENSG00000205592_99 (sequence is synthesized)
aacaaccagaccattagttacagaatcatggacagctggaacttcatctggaggacatagtacaacaagtccatcagttagaggaacagagacaactggacaatcagctgcagaatcagt

SEQ ID NO: 748972 - DNA, 120 bp, Artificial Sequence
  ENSG00000205592_100 (sequence is synthesized)
gacaacagggccagttacaggatacacagaaacctctggtccatcagctggagtgacagtgacacctcggcaatcacctacagtgactcagacaactggatcatcagctgcagtatcagg

SEQ ID NO: 748973 - DNA, 120 bp, Artificial Sequence
  ENSG00000205592_101 (sequence is synthesized)
gacaactgtacaatctcttacagtatcagggaccactagaccatcatctggacaaacagaaataactggatcgtcagttaaagaatcagggacaactgaatcatcagctgtaaggtcagg

SEQ ID NO: 748974 - DNA, 120 bp, Artificial Sequence
  ENSG00000205592_102 (sequence is synthesized)
gactactggaccaacagctggagtgacaggtacaaatggaccatcatcagctggagtgacagggataactggatcatcacctggagtgacagggacaactggatcatcacctggagtgac

SEQ ID NO: 748975 - DNA, 120 bp, Artificial Sequence
  ENSG00000205592_103 (sequence is synthesized)
agggacaactggatcatctgcaagatcagggacaagtataccatcagttggaaaaacaggaacgactagaacatcagttgaagaatcaaggacaactagaccatcagctggaataacagg

SEQ ID NO: 748976 - DNA, 90 bp, Artificial Sequence
  ENSG00000205592_104 (sequence is synthesized)
ccattagctggagtgacaaggacaactggactgtcagctggagagacagggacaactggactatcacctggagtgacaaggacaacaaga

SEQ ID NO: 748977 - DNA, 120 bp, Artificial Sequence
  ENSG00000205592_105 (sequence is synthesized)
gacaactggactatcacctggagtgacaaggacaacaagatcatcagctgggctaacagggaaaacaggactatcagctggggtgacagggaaaactggactgtcagctgaagtgacagg

SEQ ID NO: 748978 - DNA, 120 bp, Artificial Sequence
  ENSG00000205592_106 (sequence is synthesized)
atcagctggagtgacagggacaactggaccatcacctggagtaacaggtacaactggaacaccagctggggttacagggacaactgaactatcagctggagtgacagggaaaactggact

SEQ ID NO: 748979 - DNA, 120 bp, Artificial Sequence
  ENSG00000205592_107 (sequence is synthesized)
gaaaactggactatcatctgaagtgacagaaacaactggattatcatatggggtgaaaaggacaattggactatcagctgggtcgacagggacaagtggacaatcagctggagtggcagg

SEQ ID NO: 748980 - DNA, 120 bp, Artificial Sequence
  ENSG00000205592_108 (sequence is synthesized)
gacaactacactatcagctgaagtgacagggacaactagaccatcagctggggtaacagggacaacaggactatcagctgaagtgacagagataactggaatatcagctgtggtgacagg

SEQ ID NO: 748981 - DNA, 89 bp, Artificial Sequence
  ENSG00000205592_109 (sequence is synthesized)
actggaccatcagctggggtgacagagacaactggatcatcagctggagtggcagggacaacaagactatcagctggagtgacagggat

SEQ ID NO: 748982 - DNA, 120 bp, Artificial Sequence
  ENSG00000205592_110 (sequence is synthesized)
gacagggacaactggaccatcagctggggcgacagggacaactggactatcagttggagtgactgggataactgggctatcagatgtagtgacagagacaactggatcatctgcaagatc

SEQ ID NO: 748983 - DNA, 120 bp, Artificial Sequence
  ENSG00000205592_111 (sequence is synthesized)
gacaactggatcatctgcaagatcagggacaggtataccatcagttggagaaacaagaacaactagcacatcagttgaagaatcaaggacaactagaccatcagctggaataatgggtac

SEQ ID NO: 748984 - DNA, 120 bp, Artificial Sequence
  ENSG00000205592_112 (sequence is synthesized)
ctggaataatgggtacaaatggactaccagctgaagtgacagggacaactgaaccattagctggagggacagggacaactggaatattagccggggtgacagggacaactggactatcag

SEQ ID NO: 748985 - DNA, 120 bp, Artificial Sequence
  ENSG00000205592_113 (sequence is synthesized)
aattggatcatcagctggggtgacagggaaaactggatcatcagcaagagtgacaggaaaaactggaccatcagcagaagtaacagggaaaactggactatcagctggagtgacggggac

SEQ ID NO: 748986 - DNA, 120 bp, Artificial Sequence
  ENSG00000205592_114 (sequence is synthesized)
aactggactatcacctggagtgacagggacaagtggactatcagctgaagtgacagggacaactggcccatcagctgaagctacagggctacctggagtatcagctggggtgacagggac

SEQ ID NO: 748987 - DNA, 61 bp, Artificial Sequence
  ENSG00000205592_115 (sequence is synthesized)
ctacagggctacctggagtatcagctggggtgacagggacaactggatcactagctggagg

SEQ ID NO: 748988 - DNA, 86 bp, Artificial Sequence
  ENSG00000205592_116 (sequence is synthesized)
atacagtatcagctggagtaacagggacaactggactatcagctgaagcaacagagataactggactatcagctggggtgacaggg

SEQ ID NO: 748989 - DNA, 120 bp, Artificial Sequence
  ENSG00000205592_117 (sequence is synthesized)
ggggtgacagggacaactggactatctgctggggtgacagagacaattagactatcagctggggtgacagggacaattagatcatcagctggggtaacagggataactggactatcagct

SEQ ID NO: 748990 - DNA, 120 bp, Artificial Sequence
  ENSG00000205592_118 (sequence is synthesized)
agctggagtgacagggacaactggaccatcagctggtgtgacagggtcaactggactattagctggggtgacagagacaactggacagtcagctaaagtgacagggacaactggacaatc

SEQ ID NO: 748991 - DNA, 120 bp, Artificial Sequence
  ENSG00000205592_119 (sequence is synthesized)
acaactggacagtcagctaaagtgacagggacaactggacaatctgtcggagtgacagggacaactagatcatcaggtggagtgacagggataactggactatcagctggagtgacaggg

SEQ ID NO: 748992 - DNA, 120 bp, Artificial Sequence
  ENSG00000205592_120 (sequence is synthesized)
tggactatcagctgaggtgacagggacaactggactatcagttggggtgacagggatagctggactctcagctggcgtgacagggataactggaccatcagctggaataacagggacaac

SEQ ID NO: 748993 - DNA, 120 bp, Artificial Sequence
  ENSG00000205592_121 (sequence is synthesized)
taccatatcagctggagtaacagggacaagtggactatcagctgaagcaacagggataactggactatcggctggggtgacagggaaaactggactatctgctggagtgacagagacaat

SEQ ID NO: 748994 - DNA, 120 bp, Artificial Sequence
  ENSG00000205592_122 (sequence is synthesized)
tggactatcagctgaagcgacagggacaattggatcatcacctggggtgacagggacaactggatcatcaactggggtgacagggataactggattatcagctggagtgacagggacaac

SEQ ID NO: 748995 - DNA, 120 bp, Artificial Sequence
  ENSG00000205592_123 (sequence is synthesized)
tggattgtcaactgaagtgacaggaacaactggaccatcagctggggtgacaaggactactggactatcagctggagtgactgggataactgggctatcagctatagtgacagagacaac

SEQ ID NO: 748996 - DNA, 120 bp, Artificial Sequence
  ENSG00000205592_124 (sequence is synthesized)
tgaagaatcaaggacaactagaccatcagctggaataacgggtacaaatggactatcagctgaagtgacggacaattggaccattagctggagggacagggacaactggactatcagctg

SEQ ID NO: 748997 - DNA, 120 bp, Artificial Sequence
  ENSG00000205592_125 (sequence is synthesized)
tggaccatcagctgaagagacaggggcaactggaccatcagccgaagtgacagagacaactggaccatcagctggggtgacagggacaggtagactatcagctgaagtgacagggacaac

SEQ ID NO: 748998 - DNA, 120 bp, Artificial Sequence
  ENSG00000205592_126 (sequence is synthesized)
gacaggtagactatcagctgaagtgacagggacaactggcccatcagctgaagtaacagggctacctggagaatcagctgaggtgacagggacaattggatcaccagctggagtgacagg

SEQ ID NO: 748999 - DNA, 120 bp, Artificial Sequence
  ENSG00000205592_127 (sequence is synthesized)
aggtgacagggacaattggatcaccagctggagtgacagggacaactcagctatcagctgtggtgacagggataactggactatcagctgaggtgacagggacaactggactatcagctg

SEQ ID NO: 749000 - DNA, 66 bp, Artificial Sequence
  ENSG00000205592_128 (sequence is synthesized)
ctatcagctggggtgacagggacaaccacaactgaaccatcagctgggttgacagagacaactgga

SEQ ID NO: 749001 - DNA, 90 bp, Artificial Sequence
  ENSG00000205592_129 (sequence is synthesized)
tggacaatcagctgaagtgacagggacaactgaaccatcagctgggttgacagagacaactggatcatcaactggggtgacaggggcaac

SEQ ID NO: 749002 - DNA, 120 bp, Artificial Sequence
  ENSG00000205592_130 (sequence is synthesized)
gacaactggaccatcagctagggtgacagggacaactgtactatcagctggagtgactgggataactgggctatcagctatagtgacagagacaactggatcatctgcaagatcagggac

SEQ ID NO: 749003 - DNA, 120 bp, Artificial Sequence
  ENSG00000205592_131 (sequence is synthesized)
aagtacaccatcagttggagaaacaggaacaactagaacatcggttgaagaatcaagggcaaccagaccatcagcaggaataacaggtacaaatggacaatcagctgaagtgacatggat

SEQ ID NO: 749004 - DNA, 80 bp, Artificial Sequence
  ENSG00000205592_132 (sequence is synthesized)
tcagctgggctattggatcatcagctgtggtgacaggtataaatggactatcagcaggagtgacagggacaactggacca

SEQ ID NO: 749005 - DNA, 80 bp, Artificial Sequence
  ENSG00000205592_133 (sequence is synthesized)
tgacagggactattggatcatcagctgtggtgacaggtataaatggactatcagcaggacaactggaccatcagctgaag

SEQ ID NO: 749006 - DNA, 120 bp, Artificial Sequence
  ENSG00000205592_134 (sequence is synthesized)
aactggaccatcagctgaagtcacagggacaactggaccatcaggtggagtgacagggacaaatggactatcagctgaagtgacaggaacaactggcccatcagctgaagtgacagggct

SEQ ID NO: 749007 - DNA, 120 bp, Artificial Sequence
  ENSG00000205592_135 (sequence is synthesized)
acctggagtatcagctggggtgacagggacaattggatcaccagctgcagtgacagggacaattcggccatcagctgtggtgacagggataactggcctatcagctgaggtgacagggac

SEQ ID NO: 749008 - DNA, 120 bp, Artificial Sequence
  ENSG00000205592_136 (sequence is synthesized)
aactggactatcagcttgggtgacagggatagctggactctcagctggggtgacagagacaattggatcatcagctggggtgacaggtacaaatggactatcagctgaagcaacagggac

SEQ ID NO: 749009 - DNA, 65 bp, Artificial Sequence
  ENSG00000205592_137 (sequence is synthesized)
ctggactatcagctggggtgacagggacagctggactatcagctagggtgacagagagtacacaa

SEQ ID NO: 749010 - DNA, 89 bp, Artificial Sequence
  ENSG00000205592_138 (sequence is synthesized)
tcagctggggtaacagagagtttagatcatcagctgtggtgacaggtataaatggactatcagcaggagtgacagggaccactggacca

SEQ ID NO: 749011 - DNA, 120 bp, Artificial Sequence
  ENSG00000205592_139 (sequence is synthesized)
aaatggactatcagcaggagtgacagggaccactggaccatcagctgaagagacaggggcaactggaccatcagctgaagtcacagggacaactggaccatcaggtggagtgacagggac

SEQ ID NO: 749012 - DNA, 120 bp, Artificial Sequence
  ENSG00000205592_140 (sequence is synthesized)
aagtggaatatcagctgaagtgacaggaacaactggcccatcagctgaagtgacagggctacctggagtatcagctggggtgacagggacaattggatcaccagctgcagtgacagggac

SEQ ID NO: 749013 - DNA, 88 bp, Artificial Sequence
  ENSG00000205592_141 (sequence is synthesized)
tgacagggacaattggatcaccagctgcagtgacagggacaactcggccatcagctgtggtgacagggataagtggactatcagctga

SEQ ID NO: 749014 - DNA, 120 bp, Artificial Sequence
  ENSG00000205592_142 (sequence is synthesized)
ttggatcatcagctggggtgacaggtacaaatggactatcagctgaagcaacagagacaaccggaccatcagctggagttacagggacaacaggactatcagctggggtgacagggacaa

SEQ ID NO: 749015 - DNA, 89 bp, Artificial Sequence
  ENSG00000205592_143 (sequence is synthesized)
tcagctagggtgacagagagtttggatcatcagctgtggtgacagagacaactagactttcatctggagtcacagggacaattggacca

SEQ ID NO: 749016 - DNA, 120 bp, Artificial Sequence
  ENSG00000205592_144 (sequence is synthesized)
aactagactttcatctggagtcacagggacaattggaccatcagctgaagagacaggggcaactggactatcagcagaagtgacagggacaactggatcattagctgaagtgacagggac

SEQ ID NO: 749017 - DNA, 88 bp, Artificial Sequence
  ENSG00000205592_145 (sequence is synthesized)
tgacagggacaactggatcattagctgaagtgacagggacaactgggctatcagctggggtgacagggacaattggatcatcagctgt

SEQ ID NO: 749018 - DNA, 71 bp, Artificial Sequence
  ENSG00000205592_146 (sequence is synthesized)
caactggacaatcagctggggtgacagagagtactggactatcacctggggtgacagggacaattggatca

SEQ ID NO: 749019 - DNA, 120 bp, Artificial Sequence
  ENSG00000205592_147 (sequence is synthesized)
tactggactatcacctggggtgacagggacaattggatcatcggctgtggtgacagggataaagggactatcagcaggagtgacagggaccactggaccatcagctgaagagacaggggc

SEQ ID NO: 749020 - DNA, 120 bp, Artificial Sequence
  ENSG00000205592_148 (sequence is synthesized)
aactggaccatcagctgaagtcacagggacaactggaccatcgggtggagtgacagggacaagtgtactatcagttgaagtgacaggaacaactggcccatcagctgaagtgacagggct

SEQ ID NO: 749021 - DNA, 120 bp, Artificial Sequence
  ENSG00000205592_149 (sequence is synthesized)
acctggagtatcagctgggttgacagggacaattggatcaccagctgcagtgagagggacaacttggccatcagctgtggtgacagggataagtggactatcaggtgaggtgacagggac

SEQ ID NO: 749022 - DNA, 120 bp, Artificial Sequence
  ENSG00000205592_150 (sequence is synthesized)
aactggactatcagctggggtgacagggataggtggactctcagctggggtgacagggacaattggatcatcagctggggtgacaggtacaaatgcactatcagctgaagcaacagggac

SEQ ID NO: 749023 - DNA, 89 bp, Artificial Sequence
  ENSG00000205592_151 (sequence is synthesized)
agggacaactggaccatcagctggaatagcaggtacaaatggactatcagctgaatgacagggacaactggactatcagctagggtgac

SEQ ID NO: 749024 - DNA, 120 bp, Artificial Sequence
  ENSG00000205592_152 (sequence is synthesized)
actatcagctggggtgacagggacaattggatcatcagctgtggtgacagagacaactagactatcagctggagtcacagggacaattggaccatcagctgaagagacaggggcaactgg

SEQ ID NO: 749025 - DNA, 120 bp, Artificial Sequence
  ENSG00000205592_153 (sequence is synthesized)
aattggaccatcagctgaagagacaggggcaactggactatcagcagaagtgacaaggacaactggatcattagctggagtgacagggacaactggaccatcagctgtagtgacagggaa

SEQ ID NO: 749026 - DNA, 120 bp, Artificial Sequence
  ENSG00000205592_154 (sequence is synthesized)
aactgaactatcagcagaagtgacagggacaactgaactatcagctgaggtgacagagaaaactggaccatcagcagaagtgacagggaaaactgggctatcagctggagtgatggagac

SEQ ID NO: 749027 - DNA, 82 bp, Artificial Sequence
  ENSG00000205592_155 (sequence is synthesized)
tcagctggggtgacaggccccatcagctgaagcgacagggctacctggagtatcagctggggtgacagggacaattggatca

SEQ ID NO: 749028 - DNA, 120 bp, Artificial Sequence
  ENSG00000205592_156 (sequence is synthesized)
acctggagtatcagctggggtgacagggacaattggatcaccagctggagtgacagggacagctcggctatcagctgtggtgacagggataagtggactatcagctgaggtgacagggac

SEQ ID NO: 749029 - DNA, 120 bp, Artificial Sequence
  ENSG00000205592_157 (sequence is synthesized)
aactggactatcaactggggtgacagggatagctggacactcagctgcggtgacagggataactagaccatcagctggagtgacagggacaaccacagtatcagctggagtaacagggac

SEQ ID NO: 749030 - DNA, 120 bp, Artificial Sequence
  ENSG00000205592_158 (sequence is synthesized)
aattggactatcagctgaagcaacagggataactctaccatcagctggggtgacagagacaactggactatctgctggagtgacagaaacaattggactatcagctggggtgacagggac

SEQ ID NO: 749031 - DNA, 120 bp, Artificial Sequence
  ENSG00000205592_159 (sequence is synthesized)
tcagctggagtgacagggacaactggaccatcagctggtgtgacagggtcaactgtactatcagctggggtgacagcgacaactggacaatctgttggagtaacagggacaactggacca

SEQ ID NO: 749032 - DNA, 89 bp, Artificial Sequence
  ENSG00000205592_160 (sequence is synthesized)
tgacagggtcaactgtactatcagctggggtgacagcgacaactggacaatctgttggagtaacagggacaactggaccatcagctggt

SEQ ID NO: 749033 - DNA, 86 bp, Artificial Sequence
  ENSG00000205592_161 (sequence is synthesized)
ggatacagtatcagccggagtaacagggacaactggactatcagctgaagcaacagagataactggactatcagctggggtgacag

SEQ ID NO: 749034 - DNA, 120 bp, Artificial Sequence
  ENSG00000205592_162 (sequence is synthesized)
aactggactatcagctggggtgacagggatagctggactctcagctggggtgacagagacaattggatcatcagctggggtgacaggtacaaatggactatcagctgaagcaacagggaa

SEQ ID NO: 749035 - DNA, 120 bp, Artificial Sequence
  ENSG00000205592_163 (sequence is synthesized)
tcagctggagtgacagggacaactggactatctgctggggtgacagagacaattggactatcagctggtgtgacagggactattggatcatcagctggagtgaaagggacaactggacag

SEQ ID NO: 749036 - DNA, 120 bp, Artificial Sequence
  ENSG00000205592_164 (sequence is synthesized)
tattggatcatcagctggagtgaaagggacaactggacagtcagctgaagtgacaggggcaactggacaatctgttggagtgacagggacaactagatcatcaggtggagtgacagggat

SEQ ID NO: 749037 - DNA, 120 bp, Artificial Sequence
  ENSG00000205592_165 (sequence is synthesized)
aactggactatcagcaggattgagagggacaactgtttcatctgcaaaagcagggacaagtataccattaactggaaaaacaggaacaactagaacatcagttgaagaatcaacgacaac

SEQ ID NO: 749038 - DNA, 120 bp, Artificial Sequence
  ENSG00000205592_166 (sequence is synthesized)
tggaccatcagctggaataacaggtacaaatggactatcagctgaaatgacagggacaaatgaactatcagctggggtgacagggacaattggatcatcagctggagtgacagggacaac

SEQ ID NO: 749039 - DNA, 120 bp, Artificial Sequence
  ENSG00000205592_167 (sequence is synthesized)
atcagctggagtgacagggacaactgtcccattagctggggtaacatggacacctggaccatctgctggagtgacaggaatagctgcactatcagctggagtgacagggaaaagtggact

SEQ ID NO: 749040 - DNA, 120 bp, Artificial Sequence
  ENSG00000205592_168 (sequence is synthesized)
cctggaccatctgctggagtgacaggaatagctgcactatcagctggagtgacagggaaaagtggactatcagctggagtgacagggaaaacaggactatcagctggagtgacagggaca

SEQ ID NO: 749041 - DNA, 120 bp, Artificial Sequence
  ENSG00000205592_169 (sequence is synthesized)
tggactatcagctggagtgacagggatcactggaccatttgctgaagtgacagggacaactggattatcagctggggtgatagggaccactggatcatcagctgaagtgacaggaataac

SEQ ID NO: 749042 - DNA, 120 bp, Artificial Sequence
  ENSG00000205592_170 (sequence is synthesized)
tggactatcagctggggtgacagggaagactagatcatcagctggagtaacagggacaactggattatctgcaaaatctgggacaagtataccatcagctggaaaaacaggaacaaccaa

SEQ ID NO: 749043 - DNA, 120 bp, Artificial Sequence
  ENSG00000205592_171 (sequence is synthesized)
aacatcagttgaagaatcaaggacaactagaccatcagctggaataacagctacaactggagtgcctgctgcaacttccccaggagctgaaggtgaaagcatagcttccacgtcagttgc

SEQ ID NO: 749044 - DNA, 120 bp, Artificial Sequence
  ENSG00000205592_172 (sequence is synthesized)
cacgggagccatccctcggtcaacaattgcaccaggaagtaccactactggtaccactggggtaaccactggcacaactcttgcccctagaagtttcaacataggaacttctggtggaat

SEQ ID NO: 749045 - DNA, 120 bp, Artificial Sequence
  ENSG00000205592_173 (sequence is synthesized)
ttctgggaaaaccctcaaacctggaagttatgtctcagaggctacaactgctacagggactcctggagcaggaccgtcaggaggcaccactatcagttctcctgaagtcagtaccatttc

SEQ ID NO: 749046 - DNA, 120 bp, Artificial Sequence
  ENSG00000205592_174 (sequence is synthesized)
agaagtttccaacacaggtatcactggagtaggctctgagacatctattgaaacaggaatttccaacacagctacgactggggtggctcctggcacaacccttgcccctggcagttccag

SEQ ID NO: 749047 - DNA, 120 bp, Artificial Sequence
  ENSG00000205592_175 (sequence is synthesized)
tacagaggccacaacttccataggaggaagtgcatcaacaagaggaggaatagccacagaagccacaggttccacaagaggggtcaggaccactggatcagaagctccagaaggtacttc

SEQ ID NO: 749048 - DNA, 120 bp, Artificial Sequence
  ENSG00000205592_176 (sequence is synthesized)
tggagaattctctgggacaaccatttcatctggaggcttccacacagaagccacaactctcacaggaggtaggggcagtattggaactgaatccagagcagagtccacaacttccctacc

SEQ ID NO: 749049 - DNA, 120 bp, Artificial Sequence
  ENSG00000205592_177 (sequence is synthesized)
acaaagtgcaaaaacaagaggtggaatactgacagaggccacaagttccacaggaaggatcagggcgaccggatcagaagctccaggaggtacctctggtgaattcccagggacaacatt

SEQ ID NO: 749050 - DNA, 120 bp, Artificial Sequence
  ENSG00000205592_178 (sequence is synthesized)
tacatctggaggttcccacacagaggccacaactttcacaggagacaagggcagtactggaactgaatccagagcagccaccactagggcaactcctggcacaactcttgtccctggcag

SEQ ID NO: 749051 - DNA, 120 bp, Artificial Sequence
  ENSG00000205592_179 (sequence is synthesized)
ttccaatacaggggccacagcttccccaggtggaagtgcaatgacaagaggtagaataaccaccgctaccactggggctttctctggaaagactctcgaatctgagaatgacaacacagg

SEQ ID NO: 749052 - DNA, 120 bp, Artificial Sequence
  ENSG00000205592_180 (sequence is synthesized)
caagccacaagttccaccagaggggtcaggaccaccaggtcagaagcaccaggaggtacttctggtgaattccctgggacaagaattacatctggaggttcctacacagccaccaccagg

SEQ ID NO: 749053 - DNA, 120 bp, Artificial Sequence
  ENSG00000205592_181 (sequence is synthesized)
gcagctcctggcacaactcttgcccctggcagttccaacacgggggccacagcttccctaggtggaagtgcaatgacaagaggtagaataaccaccgctaccactggggctttctctgga

SEQ ID NO: 749054 - DNA, 120 bp, Artificial Sequence
  ENSG00000205592_182 (sequence is synthesized)
aagactctggaacctgggaacaacaacacagaggccacaagttccaccagaggggtcaggaccaccagatcagaagctccaggagaggccacaactctcacaggagacaggagcagtacc

SEQ ID NO: 749055 - DNA, 120 bp, Artificial Sequence
  ENSG00000205592_183 (sequence is synthesized)
ggaagtgaatccagaacagccaccactggagtagctcctggcacaactgttgcccctggcagttccaagacagaggccaccactttcctaggagtaagtggaacaacaaacattggaaga

SEQ ID NO: 749056 - DNA, 120 bp, Artificial Sequence
  ENSG00000205592_184 (sequence is synthesized)
gccacgggtgccacaacttccatagtagggagtgacaccagccaagcagaacgtccaggaggtacaactgtggtttcacctggagccagcagcacttcacagagctccaggccaggcacc

SEQ ID NO: 749057 - DNA, 120 bp, Artificial Sequence
  ENSG00000205592_185 (sequence is synthesized)
tctgtcacaccagacagttcagcatctgaaagtgaaacagttactacaaaagaattctctgggacaactgctatatctagaacttcccacaccggcacccctgcagcctcaggaggccaa

SEQ ID NO: 749058 - DNA, 120 bp, Artificial Sequence
  ENSG00000205592_186 (sequence is synthesized)
gcaactgggagcctgacagccaccactggggtagctcctggcacaactgttgcacctggcagttccaacacagaggccacaacttctgtaggagaaagagaaacaacaaaagctgaaata

SEQ ID NO: 749059 - DNA, 120 bp, Artificial Sequence
  ENSG00000205592_187 (sequence is synthesized)
atcacaggtgacactggagaattatctggaacaaccattatatctgaaaattccaccacagcaggcatcactgcagcaacagggaagcaagcaggcacctcggaggtagctccttccaca

SEQ ID NO: 749060 - DNA, 120 bp, Artificial Sequence
  ENSG00000205592_188 (sequence is synthesized)
acagttgccccaggaagtttcagcacagcagccacaacttctcctggagcaagtggaacgactggggttacaacaactacaaagaccacaacttccctaggaggaagtggcaccactgga

SEQ ID NO: 749061 - DNA, 120 bp, Artificial Sequence
  ENSG00000205592_189 (sequence is synthesized)
gcagaaataaaatcagccaccactggagcaccaggaagtaggacaggcacagctggagtgccctctgctacaacagtctcccctgggagctccaactcagaggccacaacttctgtagga

SEQ ID NO: 749062 - DNA, 120 bp, Artificial Sequence
  ENSG00000205592_190 (sequence is synthesized)
gaaagtggaaaaacaggagctgaaacaatcacagaggccaccacttccacagaagggactggtacttctggaactggattcaaaactggcacctcagaggtagctcctgccacaacggtt

SEQ ID NO: 749063 - DNA, 120 bp, Artificial Sequence
  ENSG00000205592_191 (sequence is synthesized)
gccccaggaagtttcagcacagcagccacaacttctcctggagcaagtggaatgactggggttacaacaactacaaagaccacaacttccctaggaggaagtggcaccactggagcaaaa

SEQ ID NO: 749064 - DNA, 120 bp, Artificial Sequence
  ENSG00000205592_192 (sequence is synthesized)
ataaaattagtaggaaccaccactacagcaccagaaagtaggacagctggagtgccctctggtacaagagtcacccctgggagctccaactcagaggccacaacttctgtagaagaaagc

SEQ ID NO: 749065 - DNA, 120 bp, Artificial Sequence
  ENSG00000205592_193 (sequence is synthesized)
agaataacaagagccgaagtaatcacagaggccacaactttctcaggaggcagcggggccacctgagcaggattacccagaggtaccactggagaattttctggaacgaactttatatct

SEQ ID NO: 749066 - DNA, 120 bp, Artificial Sequence
  ENSG00000205592_194 (sequence is synthesized)
ggaagttctaacacagaggccaccacttccacagaagggacaggtacttctggaactggattcaaaattgcaggcatcacttctgccccagggaaacaagcaggcacctctggggtatct

SEQ ID NO: 749067 - DNA, 120 bp, Artificial Sequence
  ENSG00000205592_195 (sequence is synthesized)
cttgccacaacagttgcccctggaagcttcagcacagccacaacttcttctggagcaagtggaataactagggctggccccaactcagagaccacaacttccctaggaggaagtggtacc

SEQ ID NO: 749068 - DNA, 120 bp, Artificial Sequence
  ENSG00000205592_196 (sequence is synthesized)
tcttctagaacgaccattctatctggaagttctaacacagaggccacaaattccattgaagagactggtacttctggaactggattcaaaactgcaggcatcactgcagcaccaggaaag

SEQ ID NO: 749069 - DNA, 120 bp, Artificial Sequence
  ENSG00000205592_197 (sequence is synthesized)
caagcaggcacctctggggtggcacctggcacaacagttgcccctggaagtttcagcacagcagctacaacttctcctggagcaagtggagtgactggcactggacccactgcagagacc

SEQ ID NO: 749070 - DNA, 120 bp, Artificial Sequence
  ENSG00000205592_198 (sequence is synthesized)
acaactttcctaggaggaagtagcaccactggagcagaaataaaatcaggagccaccactggagcaccaggaagtaagacaggcacagctaaagtgctctctggtacgacagttgcctct

SEQ ID NO: 749071 - DNA, 120 bp, Artificial Sequence
  ENSG00000205592_199 (sequence is synthesized)
acaacttctttgggcaatggtggaaccactgaggctggaagtaaaatagttaccactgggataactactggcacgaccattgtacctgggagtttcaacacaaaggctaccacttctaca

SEQ ID NO: 749072 - DNA, 120 bp, Artificial Sequence
  ENSG00000205592_200 (sequence is synthesized)
gacgttggagttgccactggagttggaatggcaactgggatcaccaacataatttcagggagaagccaacctactggaagtaaaacaggctacactgtaacaggctctggaacaacagcc

SEQ ID NO: 749073 - DNA, 120 bp, Artificial Sequence
  ENSG00000205592_201 (sequence is synthesized)
tgtactgatgcaaagactatagactgtaaacctgaggagtgcccttctccacccacatgcaaaaccggcgagaagcttgtgaagttccaatctaatgacacctgctgtgaaatcggatac

SEQ ID NO: 749074 - DNA, 120 bp, Artificial Sequence
  ENSG00000205592_202 (sequence is synthesized)
tgtgaaccaagaacatgtttatttaacaatactgactatgagattggtgcttcattcgatgaccccagcaacccctgtgtctcctactcctgcaaagacacgggctttgctgcagtagtc

SEQ ID NO: 749075 - DNA, 120 bp, Artificial Sequence
  ENSG00000205592_203 (sequence is synthesized)
aaacatggttgtccttatgtcagttataagtccaggaagtgtgttttcttgcttcaaagtcacaaatagacctactgttggccacatttttctagggtcacaaaagagttcccatgtaga

SEQ ID NO: 749076 - DNA, 120 bp, Artificial Sequence
  ENSG00000205592_204 (sequence is synthesized)
tccctctctcttctttcctacctaggcacagctggagtgccctctgctacaacagtctcccctgggagctccaactcagaggccacaacttctgtaggagaaagtggaaaaacaggagct

SEQ ID NO: 749077 - DNA, 120 bp, Artificial Sequence
  ENSG00000205592_205 (sequence is synthesized)
aactttatatctggaagttctaacacagatagcttaacaagaaatacctcttattttaatgtcagatgtcatgatttttttaaggcttctctgataaaatatcttcttccagtattctaa

SEQ ID NO: 749078 - DNA, 120 bp, Artificial Sequence
  ENSG00000205592_206 (sequence is synthesized)
attcccagcctttttcattctcctctttcttccatcagaggccaccacttccacagaagggactggtacttctggaactggattcaaaactggtgagaagaaacagcccatgatttggca

SEQ ID NO: 749079 - DNA, 120 bp, Artificial Sequence
  ENSG00000205592_207 (sequence is synthesized)
tcataagtattaggtctctcaagcttttctagagagagtttgtgtttgtgttatttagggacattgcaagtgattcaaaatagatttgctagtggaggtacgttttgttttgaaaatcca

SEQ ID NO: 749080 - DNA, 120 bp, Artificial Sequence
  ENSG00000205592_208 (sequence is synthesized)
ctaattctaaagtggatcattactgcttcatttctgaggatacgatgcacttctccatttatgttccaactctcgctagcagtttaggtggaattcagaaagtttcagtgcatgtgtgtg

SEQ ID NO: 749081 - DNA, 120 bp, Artificial Sequence
  ENSG00000205592_209 (sequence is synthesized)
aaacagaagagctctgtggaaccaggacacatacatttaacgtgtacatttgaacaaaaatgctggctcagtattttctcctacatgtgaagttcaatacattcaaactctttttcctcc

SEQ ID NO: 749082 - DNA, 120 bp, Artificial Sequence
  ENSG00000205592_210 (sequence is synthesized)
tctttctatctcacagcaggcatcactgcagcaccagggaagcaagcagctgagcattgggaaaatgcatctagtttctctcttatcaaattttcagttgtgcttgtacttggaaacatt

SEQ ID NO: 749083 - DNA, 120 bp, Artificial Sequence
  ENSG00000205592_211 (sequence is synthesized)
gtatctccttttgttatgaattgctgaaagcagacaaatacatcaaattttccacttgcctcgtgctcagagaaagaggattctgttatggcaaataaatacagaaatatagcatatacc

SEQ ID NO: 749084 - DNA, 120 bp, Artificial Sequence
  ENSG00000205592_212 (sequence is synthesized)
ggagtatttgtatttattgttgttctttgatcgatttcttagagaaaaatttttaatgagctttttatttgaaaataaatttaaattacagaaaattatcatagataatgcagagaatct

SEQ ID NO: 749085 - DNA, 120 bp, Artificial Sequence
  ENSG00000205592_213 (sequence is synthesized)
ttttaatgtggaatgtgggtttaaatttcctttgaggctgtaatatttcaagaaaacagagtttgttcttggatttggacttgtaaactcttgagaccaaaatttctaaagtctttccct

SEQ ID NO: 749086 - DNA, 120 bp, Artificial Sequence
  ENSG00000205592_214 (sequence is synthesized)
tctgagagactaacctcagggttctaggtctctggagaggagacttgcaataatagctctggttttgaaaaggttttccctttgaaaagggcatagtctgtatgccattagtgtactgat

SEQ ID NO: 749087 - DNA, 120 bp, Artificial Sequence
  ENSG00000205592_215 (sequence is synthesized)
ttctacaatgtagaaatcaccaagatgtcatattttagtttagagataaaaattcaaaattgtctttcttccttcttgttctttcttgttttctcctcttctttcttctccctttctctt

SEQ ID NO: 749088 - DNA, 120 bp, Artificial Sequence
  ENSG00000205592_216 (sequence is synthesized)
ttgattttcagtaggaaccaccactacagcaccagaaagtaggacaggtaaacttggggaaagcctttcatatgaccttcaactttgaacaaatcttggtaataatattcggggcaggaa

SEQ ID NO: 749089 - DNA, 120 bp, Artificial Sequence
  ENSG00000205592_217 (sequence is synthesized)
tattagccactgcgttacccttggctttgcaaaagcacacaataaaccggaagcctgttagtcctcatgtcagttataatttcaggaagtgtgctttcttgcttcaaagtcacaaataga

SEQ ID NO: 749090 - DNA, 120 bp, Artificial Sequence
  ENSG00000205592_218 (sequence is synthesized)
catactgttggccacatttttccaagggtcatgaaagagttcccatatccatctttctcttttcttttctaccttggcacagctggagtgccctctggtacaagagtcacccctgggagc

SEQ ID NO: 749091 - DNA, 120 bp, Artificial Sequence
  ENSG00000205592_219 (sequence is synthesized)
tccaactcaggtaaagcaccaggctgggaggaaccactgcttggaaagtgctcctcagtgaggtgtctgcctgggtgaccctaccgtactcttctcagattcttctaatctttgccctca

SEQ ID NO: 749092 - DNA, 120 bp, Artificial Sequence
  ENSG00000205592_220 (sequence is synthesized)
ttctaaattcccagcctttttcattctcctctttcttccatcagaggccaccacttccacagaagggacaggtacttctggaactggattcaaaattggtgagaagaagcaacccatgat

SEQ ID NO: 749093 - DNA, 120 bp, Artificial Sequence
  ENSG00000205592_221 (sequence is synthesized)
gtggcatcataattattaggtctctcaagcttttcttgagagagtttgtgtttattttatttagggacaatgcaagtgattcaaaatagatttgctggtggagatacttttttttaaatc

SEQ ID NO: 749094 - DNA, 120 bp, Artificial Sequence
  ENSG00000205592_222 (sequence is synthesized)
tactaattttaaaatggagcattactgttccatttccgaggatgggatggaatttctccatttgtgttacaactattgctagcagtttaggtggaattcagaaagttttcagtgtgtgta

SEQ ID NO: 749095 - DNA, 120 bp, Artificial Sequence
  ENSG00000205592_223 (sequence is synthesized)
tgtgaaacagaaaagagccccatggacccaggacacatgcatttataagtgtatatgtgaacaaaaatgccggctcagtattttctttcttatgtctcaagttttaatacatttaaaccc

SEQ ID NO: 749096 - DNA, 120 bp, Artificial Sequence
  ENSG00000205592_224 (sequence is synthesized)
ggaagtgcccacacaggtcaggaattctgaacatggccccttaagcaatatcagctttgggaaacccagaatgtcctgtccagtctttatacctccaattcctccctctctcagaggcca

SEQ ID NO: 749097 - DNA, 120 bp, Artificial Sequence
  ENSG00000205592_225 (sequence is synthesized)
caactttcccaggaggcagtgggactacccgagcaggaccaccaggaggtgagcttgtcaggctgaggcctggggctctcatcatctctctatctgggtggctgcagtgaacagtaatga

SEQ ID NO: 749098 - DNA, 120 bp, Artificial Sequence
  ENSG00000205592_226 (sequence is synthesized)
acagtaatgcagtgaaagtcttttgagggagggtcctgcattttctctgtggccacagtgtgtcatatcaacctggtcagttattctgcttgtgaattcatgacctcagatgtctcagcc

SEQ ID NO: 749099 - DNA, 120 bp, Artificial Sequence
  ENSG00000205592_227 (sequence is synthesized)
aggctgccttcagtgtcctggcttatggaaacgatttttttctgatatgaagtatgagcgtatattgcatatattccaactttccaggacttccaactctccttacccagttttcctttc

SEQ ID NO: 749100 - DNA, 120 bp, Artificial Sequence
  ENSG00000205592_228 (sequence is synthesized)
cacccacagtttgagacattttctatcatttttctcctttacttacacatgatatttctcccctcctacaaaacttagtgaaaacaactgattattaaaatcctccaagttgtatcaaag

SEQ ID NO: 749101 - DNA, 120 bp, Artificial Sequence
  ENSG00000205592_229 (sequence is synthesized)
agtcctacttataaatatagaagtgtgctttgtttctcccgtaggcacctctgtcacaccagggggctatgctcctggaagggaaataggtcagggtgatttaagccttattcgtccctt

SEQ ID NO: 749102 - DNA, 120 bp, Artificial Sequence
  ENSG00000205592_230 (sequence is synthesized)
ccctcatagagaaagggaaacccagtagcaacacacacggcccaggttggcctggaaaatcaagtacttggagactgttcattttccattctctacagggatacagtgtcctcaggaaag

SEQ ID NO: 749103 - DNA, 120 bp, Artificial Sequence
  ENSG00000205592_231 (sequence is synthesized)
ggcttccagtactttagggccacacatggatgcttccaagcttaactggggagataatgatctattgctccatttcccttttttggcattttaggtaccactggagaattgtctagaatg

SEQ ID NO: 749104 - DNA, 120 bp, Artificial Sequence
  ENSG00000205592_232 (sequence is synthesized)
accattatacctggaagttctaacacaggtagcttaacaggaagggaatgcatcttatttaatgtcagatgtcatgatatctcttttagggatgctattataaagtaataccccaatatc

SEQ ID NO: 749105 - DNA, 80 bp, Artificial Sequence
  ENSG00000205593_0 (sequence is synthesized)
gcacagggcctcgccgggctcgcggctgcctgggcgcggctggacccacgtcttcaggtcgcgcggcgcggaccccggcg

SEQ ID NO: 749106 - DNA, 120 bp, Artificial Sequence
  ENSG00000205593_1 (sequence is synthesized)
gcgccctgggcgcgcttctccgcctggctggagtgtgtgtgcgtggtcaccttcgacctggagctgggccaggcgctggagctggtgtatccgaacgacttccggctcacagacaaggag

SEQ ID NO: 749107 - DNA, 120 bp, Artificial Sequence
  ENSG00000205593_2 (sequence is synthesized)
aaaagcagcatctgctacctgtcttttcccgactcgcactcaggctgccttggagacactcagttcagcttccgcatgcgccagtgtggagggcagaggagcccctggcatgccgacgac

SEQ ID NO: 749108 - DNA, 120 bp, Artificial Sequence
  ENSG00000205593_3 (sequence is synthesized)
aggcactacaacagcagggcccctgtggcactgcagagggagccggcacactacttcggctacgtgtacttcaggcaggtgaaggacagctctgtgaagaggggctacttccagaagtct

SEQ ID NO: 749109 - DNA, 120 bp, Artificial Sequence
  ENSG00000205593_4 (sequence is synthesized)
ttggtgctggtgtcccgcttgccctttgtccggctgttccaagcgctgctaagcctcatcgcccccgagtactttgacaagctggcgccctgcctggaagcagtgtgcagtgagatcgac

SEQ ID NO: 749110 - DNA, 120 bp, Artificial Sequence
  ENSG00000205593_5 (sequence is synthesized)
cagtggccggcgcctgcacctgggcagaccctgaacctacctgtcatgggcgttgttgtccaggtgcgcatcccatccagggtggacaagtccgagtccagtcctccgaagcagtttgac

SEQ ID NO: 749111 - DNA, 120 bp, Artificial Sequence
  ENSG00000205593_6 (sequence is synthesized)
caagagaacctgctgccagccccagtggttcttgctagcgtccacgagctggacctgttcaggtgcttccggcctgtgctgactcatatgcagacactgtgggagctcatgctcctcggg

SEQ ID NO: 749112 - DNA, 120 bp, Artificial Sequence
  ENSG00000205593_7 (sequence is synthesized)
gagcccctgctagtcctggcaccctcgcccgacgtgtcctcggagatggtgctggccttgaccagctgcctgcagcccctcaggttctgctgcgacttccgtccctacttcaccatccat

SEQ ID NO: 749113 - DNA, 120 bp, Artificial Sequence
  ENSG00000205593_8 (sequence is synthesized)
gacagcgagttcaaggagttcaccacacgcacgcaggccccaccaaacgtggtcctgggagtcacaaaccctttctttatcaaaacactccagcactggccccacatcctccgagtcggg

SEQ ID NO: 749114 - DNA, 120 bp, Artificial Sequence
  ENSG00000205593_9 (sequence is synthesized)
gagcccaagatgtcaggagacctgcctaagcaagtcaagctgaaaaagccttcaaggttgaagaccctggacaccaagccaggcctctacaccgcttacacggcccacctccaccgcgac

SEQ ID NO: 749115 - DNA, 120 bp, Artificial Sequence
  ENSG00000205593_10 (sequence is synthesized)
aaggcgctgctcaaacggctgctcaagggcgtgcagaagaagcggccgtcagatgtgcagagcgccctgctgcggcggcacctcctggagctcacccagagcttcatcatccccctggag

SEQ ID NO: 749116 - DNA, 120 bp, Artificial Sequence
  ENSG00000205593_11 (sequence is synthesized)
cactacatggccagcctcatgcccctgcagaagagcatcacgccctggaagactcccccccagatccagcccttcagccaggatgacttcctgcgtagcctggagcatgctgggccccag

SEQ ID NO: 749117 - DNA, 120 bp, Artificial Sequence
  ENSG00000205593_12 (sequence is synthesized)
ctcacctgcatcctcaagggcgactggctgggtctctacaggcggtttttcaagtccccccattttgatggctggtaccggcagcggcacaaggagatggccctgaagctggaggccctg

SEQ ID NO: 749118 - DNA, 120 bp, Artificial Sequence
  ENSG00000205593_13 (sequence is synthesized)
cacctggaggctatctgtgaggcgaacatcgagacctggatgaaagacaagtccgaggtggaggtcgtggacctggtcctgaaacttcgtgagaagctggtgcgggctcagggccaccag

SEQ ID NO: 749119 - DNA, 120 bp, Artificial Sequence
  ENSG00000205593_14 (sequence is synthesized)
ctccctgtgaaggaggctacgctgcagcgggcacagctgtacatcgagacggtcatcggctccctgcccaaagacctgcaggctgtcttgtgccctccctagaacaaagccaagggccac

SEQ ID NO: 749120 - DNA, 120 bp, Artificial Sequence
  ENSG00000205593_15 (sequence is synthesized)
ggtcccagggccctaggtctgcctgagcctcccactccccagtggtggcggcactgggccaagcacacgctccccttccttggccccccgcccagactgcaggctccccttcctgcacca

SEQ ID NO: 749121 - DNA, 120 bp, Artificial Sequence
  ENSG00000205593_16 (sequence is synthesized)
ccattgtctcagcagtaaaggcgacatttggaaccacagcatggccttgaccataggggttcctcgcaggcagagccttgcctcctcctgggtcccacctggcctctgcagaccttaggc

SEQ ID NO: 749122 - DNA, 120 bp, Artificial Sequence
  ENSG00000205593_17 (sequence is synthesized)
tgggacgggggcggggacaggctgggagcccttgctgatgtgggtgcgtctaccgtctgcccctcccggtgcccatctgttggcccccgacccccctgcgctgtgtgtgatgcttccctc

SEQ ID NO: 749123 - DNA, 120 bp, Artificial Sequence
  ENSG00000205593_18 (sequence is synthesized)
agcccaacaggctgcccaggacaggagggaccctctcctgacacagcccccgtcttgtctggggatgggaggctattttgcatatagtcatcaacttgagaaagggagagaccactttgc

SEQ ID NO: 749124 - DNA, 120 bp, Artificial Sequence
  ENSG00000205593_19 (sequence is synthesized)
agtgtgaagagctctgctcaccacccctggtgctcctctggacacccacctgcttggggctgtggtttgttgggaggtaggggttgggcagggggctgtgtgcagcccagcacctctgct

SEQ ID NO: 749125 - DNA, 120 bp, Artificial Sequence
  ENSG00000205593_20 (sequence is synthesized)
cccttctgggaggtggacagggctcctgttgtccaagtgtgtccgtccatcccccacatgcagcccaaggggctctggacttcggcctgaccctgcctctggctggagcctgcatgtctc

SEQ ID NO: 749126 - DNA, 120 bp, Artificial Sequence
  ENSG00000205593_21 (sequence is synthesized)
cctttccttggtaaggggtgaacgtccctaagagccacctctgggttgtatgctccccccgtgacacctgcaggcactgaggccggtgaggtacggtgttgaccctgcacagcacacagt

SEQ ID NO: 749127 - DNA, 120 bp, Artificial Sequence
  ENSG00000205593_22 (sequence is synthesized)
gacggtactgtcagggctccggacagccaagccctgctcagcatcacgcactgtgtgcccgggagcaggtcccctgaccactcagaccctcagactcctcatctgagcgagccagccatg

SEQ ID NO: 749128 - DNA, 120 bp, Artificial Sequence
  ENSG00000205593_23 (sequence is synthesized)
cagatgcccgacagggtgctgggagggccactcatggagactgggctttgtaccctgtgaggccgggcgggtgctggccaggggacacagggctgggggagggactttttcttttttttt

SEQ ID NO: 749129 - DNA, 120 bp, Artificial Sequence
  ENSG00000205593_24 (sequence is synthesized)
tacaggcatgagccaccgcgcccggccgggacttttctttttcttctgaggcccccattcagtccgaggaatgtagccttcattcagcgcaacgtactgtttgtgttctcattggtgctc

SEQ ID NO: 749130 - DNA, 120 bp, Artificial Sequence
  ENSG00000205593_25 (sequence is synthesized)
ttgtgttctcattggtgctctcagacctccagccaggtggtggagagcgagcactgccagccacttcagtgcaggatgtgactgagccacaaggacagcggggtcaggtgtccgggcgcc

SEQ ID NO: 749131 - DNA, 120 bp, Artificial Sequence
  ENSG00000205593_26 (sequence is synthesized)
aggtagttctcagaacttggtacatgtcaacttgtccagcccaactgcagcccaggacagcctgtccctgttcccattctacagacaagacgcggaggcagccgggagggtgaccaaggg

SEQ ID NO: 749132 - DNA, 120 bp, Artificial Sequence
  ENSG00000205593_27 (sequence is synthesized)
gagctgttaagccccagatgtctggtgcagggtccaaggatgtgaccacatgaaacagaacacatagaggccgaggtggcaaacctgttctgtggcagggacaagccggggacccgaggg

SEQ ID NO: 749133 - DNA, 120 bp, Artificial Sequence
  ENSG00000205593_28 (sequence is synthesized)
tgagaaaggtcctggccccaaatgcagcttgggcctcctgactgtagcacagggggaccagcctccccactgagggcttggtctctagagggtctgcagagatgctggcacctcttgtgt

SEQ ID NO: 749134 - DNA, 120 bp, Artificial Sequence
  ENSG00000205593_29 (sequence is synthesized)
gggcagcttgaatgctgacctccataagatggggcctggggggccagtacaggccctgccatcagctgccctccaccagggccctctgcaaaagccttatgctggtgaccagccccctga

SEQ ID NO: 749135 - DNA, 120 bp, Artificial Sequence
  ENSG00000205593_30 (sequence is synthesized)
ggaccaccacttcaaggtgtcggggcagcttgggaagacaacccacctctctcacaactgtgaccccactttggggagcgcaccccaaggaccgtggcagcatgtgcttccccacagcac

SEQ ID NO: 749136 - DNA, 120 bp, Artificial Sequence
  ENSG00000205593_31 (sequence is synthesized)
agtctcgcctcacttggctttctgagggctgccgcacagcacagagggctgcagacccacatggctgcaggggaggggcttcaggctggtctctgaggagcccccagggaccctggccac

SEQ ID NO: 749137 - DNA, 120 bp, Artificial Sequence
  ENSG00000205593_32 (sequence is synthesized)
tgtgtatccagaaatgcacaagcagatttccctggagggctctggtgaggccacatagtggcgtgtgaagggggaacttgaggggggaaccgggctgggtggccagcattgccctgggca

SEQ ID NO: 749138 - DNA, 120 bp, Artificial Sequence
  ENSG00000205593_33 (sequence is synthesized)
gaagctaaggctaaggtggggggtagtgtcccagcccctcttcctcagggcctgtccccacctgtgcagaagaggcctggggtggaatgtggcctggggtggatgggtgggggctgggcg

SEQ ID NO: 749139 - DNA, 120 bp, Artificial Sequence
  ENSG00000205593_34 (sequence is synthesized)
tggagacctgccagctccatctgtccggatgcctcttgtggcccccccagtgtcagggccgctctgagttggctgagcctctgtccagggctaggccatggccctccccgccccacgcac

SEQ ID NO: 749140 - DNA, 120 bp, Artificial Sequence
  ENSG00000205593_35 (sequence is synthesized)
tccaggccaggggcagtcagtgaagaggcaggaaggtccagacagctctacccctggccagagtgccagcccccgcaggcaagagggcttgctgggcagaacttagttggcgagggtgag

SEQ ID NO: 749141 - DNA, 120 bp, Artificial Sequence
  ENSG00000205593_36 (sequence is synthesized)
gactgctgtggtcacaggcctcccgaaggacagggaccacagaacctagagggtgggaagggctgggagcaggtctggagtggggctcggggctgagggtgcacacagggggcctgctca

SEQ ID NO: 749142 - DNA, 120 bp, Artificial Sequence
  ENSG00000205593_37 (sequence is synthesized)
gggacaggaaggacagctgctcaccctcaagcttcctgctggctatttaaagactcccttttagtctagaacagtggccttcccacagttttggtattaaaatgtccttttgtgactgga

SEQ ID NO: 749143 - DNA, 120 bp, Artificial Sequence
  ENSG00000205593_38 (sequence is synthesized)
ctgctgggacggtcacagtccagcagatgctgtcgaggggtgtcgcctcctcggacagatggtgtcaccaagcactctgtcttcctctgcagctggtgtatccgaacgacttccggctca

SEQ ID NO: 749144 - DNA, 120 bp, Artificial Sequence
  ENSG00000205593_39 (sequence is synthesized)
cctggtgggctcggcagcagcttctccttggggagggtcctgatgcgggctactgcatccgcagtgtgcagtgagatcgaccagtggccggcgcctgcacctgggcagaccctgaaccta

SEQ ID NO: 749145 - DNA, 120 bp, Artificial Sequence
  ENSG00000205593_40 (sequence is synthesized)
cctgtcatgggcgttgttgtccaggtgagagccagctggctggggagtaggctctgcaggtgtgtggggatgccctactccctctggcagctgctccctccttctcccaggtgcgcatcc

SEQ ID NO: 749146 - DNA, 120 bp, Artificial Sequence
  ENSG00000205593_41 (sequence is synthesized)
ggcctgtcttgtacctggcgggtctctcgggtggggcagccaggcccccagacccctgatcctcttccaggactcagcagcagagctcagaacccttggggaggggtcgctctcttctct

SEQ ID NO: 749147 - DNA, 120 bp, Artificial Sequence
  ENSG00000205593_42 (sequence is synthesized)
tcagtgggtctcggtgtctggggggtgggtgggtgagattttcaggtgcagccaagggcatggggctgcaggcagatgagacccccaccctggctcctctgtggggctgcaggagtgtgg

SEQ ID NO: 749148 - DNA, 120 bp, Artificial Sequence
  ENSG00000205593_43 (sequence is synthesized)
ctgctcagcccctggggaggtcgttctagaaattctggccaccgtgcgtttccctccgaaggccctagggtccagccccaccggccgccacccagggagttcagtgttgggttttctcct

SEQ ID NO: 749149 - DNA, 120 bp, Artificial Sequence
  ENSG00000205609_0 (sequence is synthesized)
agtcggcgcttcccggaagtgacgcgaggacccgccttctctctcggcgtttccgctgtcagggccctgcggtgtgactcgcgggctcagctggtccggccgtagcacctccgcgccgtc

SEQ ID NO: 749150 - DNA, 120 bp, Artificial Sequence
  ENSG00000205609_1 (sequence is synthesized)
gccatgtcgcggtttttcaccaccggttcggacagcgagtccgagtcgtccttgtccggggaggagctcgtcaccaaacctgtcggaggcaactatggcaaacagccattgttgctgagc

SEQ ID NO: 749151 - DNA, 120 bp, Artificial Sequence
  ENSG00000205609_2 (sequence is synthesized)
gaggatgaagaagataccaagagagttgtccgcagtgccaaggacaagaggtttgaggagctgaccaaccttatccggaccatccgtaatgccatgaagattcgtgatgtcaccaagtgc

SEQ ID NO: 749152 - DNA, 120 bp, Artificial Sequence
  ENSG00000205609_3 (sequence is synthesized)
ctggaagagtttgagctcctgggaaaagcatatgggaaggccaaaagcattgtggacaaagaaggtgtcccccggttctatatccgcatcctggctgacctagaggactatcttaatgag

SEQ ID NO: 749153 - DNA, 120 bp, Artificial Sequence
  ENSG00000205609_4 (sequence is synthesized)
ctttgggaagataaggaagggaagaagaagatgaacaagaacaatgccaaggctctgagcaccttgcgtcagaagatccgaaaatacaaccgtgatttcgagtcccatatcacaagctac

SEQ ID NO: 749154 - DNA, 120 bp, Artificial Sequence
  ENSG00000205609_5 (sequence is synthesized)
aagcagaaccccgagcagtctgcggatgaagatgctgagaaaaatgaggaggattcagaaggctcttcagatgaggatgaggatgaggacggagtcagtgctgcaactttcttgaagaag

SEQ ID NO: 749155 - DNA, 120 bp, Artificial Sequence
  ENSG00000205609_6 (sequence is synthesized)
aaatcagaagctccttctggggagagtcgcaagttcctcaaaaagatggatgatgaagatgaggactcagaagattccgaagatgatgaagactgggacacaggttccacatcttccgat

SEQ ID NO: 749156 - DNA, 120 bp, Artificial Sequence
  ENSG00000205609_7 (sequence is synthesized)
tccgactcagaggaggaagaagggaaacaaaccgcgctggcctcaagatttcttaaaaaggcacccaccacagatgaggacaagaaggcagccgagaagaaacgggaggacaaagctaag

SEQ ID NO: 749157 - DNA, 120 bp, Artificial Sequence
  ENSG00000205609_8 (sequence is synthesized)
aagaagcacgacaggaaatccaagcgcctggatgaggaggaggaggaggacaatgaaggcggggagtgggaaagggtccggggcggagtgccgttggttaaggagaagccaaaaatgttt

SEQ ID NO: 749158 - DNA, 120 bp, Artificial Sequence
  ENSG00000205609_9 (sequence is synthesized)
gccaagggaactgagatcacccatgctgttgttatcaagaaactgaatgagatcctacaggcacgaggcaagaagggaactgatcgtgctgcccagattgagctgctgcaactgctggtt

SEQ ID NO: 749159 - DNA, 120 bp, Artificial Sequence
  ENSG00000205609_10 (sequence is synthesized)
cagattgcagcggaaaacaacctgggagagggcgtcattgtcaagatcaagttcaatatcatcgcctctctctatgactacaaccccaacctggcaacctacatgaagccagagatgtgg

SEQ ID NO: 749160 - DNA, 120 bp, Artificial Sequence
  ENSG00000205609_11 (sequence is synthesized)
gggaagtgcctggactgcatcaatgagctgatggatatcctgtttgcaaatcccaacatttttgttggagagaatattctggaagagagtgagaacctgcacaacgctgaccagccactg

SEQ ID NO: 749161 - DNA, 120 bp, Artificial Sequence; identical to SEQ ID NO: 658907
  ENSG00000205609_12 (sequence is synthesized)

SEQ ID NO: 749162 - DNA, 120 bp, Artificial Sequence; identical to SEQ ID NO: 658908
  ENSG00000205609_13 (sequence is synthesized)

SEQ ID NO: 749163 - DNA, 120 bp, Artificial Sequence; identical to SEQ ID NO: 658909
  ENSG00000205609_14 (sequence is synthesized)

SEQ ID NO: 749164 - DNA, 120 bp, Artificial Sequence; identical to SEQ ID NO: 658910
  ENSG00000205609_15 (sequence is synthesized)

SEQ ID NO: 749165 - DNA, 120 bp, Artificial Sequence; identical to SEQ ID NO: 658911
  ENSG00000205609_16 (sequence is synthesized)

SEQ ID NO: 749166 - DNA, 120 bp, Artificial Sequence; identical to SEQ ID NO: 658912
  ENSG00000205609_17 (sequence is synthesized)

SEQ ID NO: 749167 - DNA, 120 bp, Artificial Sequence; identical to SEQ ID NO: 658913
  ENSG00000205609_18 (sequence is synthesized)

SEQ ID NO: 749168 - DNA, 120 bp, Artificial Sequence; identical to SEQ ID NO: 658914
  ENSG00000205609_19 (sequence is synthesized)

SEQ ID NO: 749169 - DNA, 120 bp, Artificial Sequence; identical to SEQ ID NO: 658915
  ENSG00000205609_20 (sequence is synthesized)

SEQ ID NO: 749170 - DNA, 120 bp, Artificial Sequence; identical to SEQ ID NO: 658916
  ENSG00000205609_21 (sequence is synthesized)

SEQ ID NO: 749171 - DNA, 120 bp, Artificial Sequence; identical to SEQ ID NO: 658917
  ENSG00000205609_22 (sequence is synthesized)

SEQ ID NO: 749172 - DNA, 120 bp, Artificial Sequence; identical to SEQ ID NO: 658918
  ENSG00000205609_23 (sequence is synthesized)

SEQ ID NO: 749173 - DNA, 120 bp, Artificial Sequence; identical to SEQ ID NO: 658919
  ENSG00000205609_24 (sequence is synthesized)

SEQ ID NO: 749174 - DNA, 120 bp, Artificial Sequence
  ENSG00000205629_0 (sequence is synthesized)
gtcactgagccgcgccagctgagccaggtagggccctaccctcttctgttgctttctccctgtggctcgcgccgtcccccgccgcccgtcgaccccgcttccatgtccctggcggacaca

SEQ ID NO: 749175 - DNA, 120 bp, Artificial Sequence
  ENSG00000205629_1 (sequence is synthesized)
gctcccaggaacctccacgcccatggccactaggcagagggaatcctctatcacctcctgctgttccacctcgagctgcgacgcagacgacgagggcgtgcgcggcacctgcgaagatgc

SEQ ID NO: 749176 - DNA, 120 bp, Artificial Sequence
  ENSG00000205629_2 (sequence is synthesized)
ttccctgtgcaagaggtttgcagtaagcattggctactggcatgacccttacatacagcactttgtgagactgtctaaagagaggaaagcccctgaaatcaacagaggatattttgctcg

SEQ ID NO: 749177 - DNA, 120 bp, Artificial Sequence
  ENSG00000205629_3 (sequence is synthesized)
agtccatggtgtcagtcagcttataaaggcatttctacggaagacagaatgtcattgtcaaattgtcaaccttggggcaggcatggataccaccttctggagattaaaggatgaagatct

SEQ ID NO: 749178 - DNA, 120 bp, Artificial Sequence
  ENSG00000205629_4 (sequence is synthesized)
tctcccaagtaaatattttgaggttgactttccaatgattgtcacgagaaagctgcacagtatcaaatgcaagcctcccctatccagccccattctagaactgcattcagaggacacact

SEQ ID NO: 749179 - DNA, 120 bp, Artificial Sequence
  ENSG00000205629_5 (sequence is synthesized)
gatatgccgttattggagcagatctccgagacctgtctgaactggaagagaagctaaagaaatgtaacatgaatacacaattgccaacactcctgatagctgaatgtgtgctggtttaca

SEQ ID NO: 749180 - DNA, 120 bp, Artificial Sequence
  ENSG00000205629_6 (sequence is synthesized)
tgactccagagcagtccgcaaacctcctgaagtgggcagccaacagttttgagagagccatgttcataaactacgaacaggtgaacatgggtgatcggtttgggcagatcatgattgaaa

SEQ ID NO: 749181 - DNA, 120 bp, Artificial Sequence
  ENSG00000205629_7 (sequence is synthesized)
acctgcggagacgccagtgtgacctggcgggagtggagacctgcaagtcattagagtcacagaaagaacggctcctgtcgaatgggtgggaaacagcatcggccgtcgacatgatggagt

SEQ ID NO: 749182 - DNA, 120 bp, Artificial Sequence
  ENSG00000205629_8 (sequence is synthesized)
tgtacaacaggttacctcgagctgaagtgagcaggatagaatcacttgaattcctggatgaaatggagctgctggagcagctcatgcggcattactgcctttgctgggcaaccaaaggag

SEQ ID NO: 749183 - DNA, 120 bp, Artificial Sequence
  ENSG00000205629_9 (sequence is synthesized)
gaaatgagcttgggctgaaggagataacttattaatctgtcgaaggcttatgccgagccagaagccgaagccacttgccctcctggaggagacctgcaagctccctgagcggtgggcggg

SEQ ID NO: 749184 - DNA, 120 bp, Artificial Sequence
  ENSG00000205629_10 (sequence is synthesized)
cctcgtccgcaggtctcatcccacactcttgagaagccttggtcactacagtggtcgcacatgttcctcttcctgttcctgttgacatgtcgttgtttaaataaatctcacttgccacca

SEQ ID NO: 749185 - DNA, 120 bp, Artificial Sequence
  ENSG00000205629_11 (sequence is synthesized)
cctgatttaaaaatccttaaacactattgctcttaggtgcctagtgcttgatatgtggaagatgatcagcacatgtaagagtaaagaaataaaaagtattgtgtgtttttccccaggatg

SEQ ID NO: 749186 - DNA, 120 bp, Artificial Sequence
  ENSG00000205629_12 (sequence is synthesized)
tattttgaggttgactttccaatgattgtcacgagaaagctgcacagtatcaaatggacacatactggattcaaagagatatgccgttattggagcagatctccgagacctgtctgaact

SEQ ID NO: 749187 - DNA, 120 bp, Artificial Sequence
  ENSG00000205629_13 (sequence is synthesized)
tttgtttatggtattttttcttcttttcagtgaaaagacattaaaatggagccacaccataattactattttatagccgccttctttccacttaatctatcataaacattttttcatatc

SEQ ID NO: 749188 - DNA, 120 bp, Artificial Sequence
  ENSG00000205629_14 (sequence is synthesized)
cagaagaacaaaagccagcgagaattcagatccagctctcaagagatggcagatctgaatgccagagacttcactttagggtgttgccttccgttcactgccccccaccaactttttttt

SEQ ID NO: 749189 - DNA, 120 bp, Artificial Sequence
  ENSG00000205629_15 (sequence is synthesized)
tgccctggcactcattccagcatgttctacagtctgcaaaatgcaatatacatttccttattacagatcacaggctctatggctccccatgtaattacaattaacacgaggccaaccaaa

SEQ ID NO: 749190 - DNA, 120 bp, Artificial Sequence
  ENSG00000205629_16 (sequence is synthesized)
agcaactgaatcatgggatgctggtgtgagttactcaagtcatcaaattctatcattcaaagggatctcaaggtcgtcttgtccagtgcttcccatgtggtataccagtatgccaccaca

SEQ ID NO: 749191 - DNA, 120 bp, Artificial Sequence
  ENSG00000205629_17 (sequence is synthesized)
ctgttcagtgcctgtcagcagcacaggctgctgagcctccatgtgggccgctagttcatgatgctgggaagaccaagtcctgcttcaccatcacatttcctacaccctattattttgact

SEQ ID NO: 749192 - DNA, 120 bp, Artificial Sequence
  ENSG00000205629_18 (sequence is synthesized)
ttgtattacgcaaattttcaaacaaacataaaggtagagggaatggtgaaataaacacacacgtctcatcacctaacttcagtatttcttatattatcagtgttatttcctatattcccc

SEQ ID NO: 749193 - DNA, 120 bp, Artificial Sequence
  ENSG00000205639_0 (sequence is synthesized)
cggcgccccctgcaccagccgccaaggggtccccgcagccggagccgcacgccccagagcccggcccggggagcgccaagcgagggcgagaggacagcagagccggtcgcctctcattct

SEQ ID NO: 749194 - DNA, 120 bp, Artificial Sequence
  ENSG00000205639_1 (sequence is synthesized)
agccggtcgcctctcattctgtacaaaggtgtgctatggcattggtggggtccccaaccagatagcctccagcgccacagccttttacctgcagcttttcctgcttgatatagcacagat

SEQ ID NO: 749195 - DNA, 120 bp, Artificial Sequence
  ENSG00000205639_2 (sequence is synthesized)
ccctgccgcccaggtgtcacttgttctgtttgggggaaaagtgtctggggcggctgctgaccctgtggctgggttcttcatcaacaggagccagaggacagggtctggacggctcatgcc

SEQ ID NO: 749196 - DNA, 120 bp, Artificial Sequence
  ENSG00000205639_3 (sequence is synthesized)
ttgggtgctgggctgcacccccttcatcgccctggcctacttcttcctgtggttcctgccccccttcaccagcctgcgaggcctctggtacacgactttctactgcctgttccaggccct

SEQ ID NO: 749197 - DNA, 120 bp, Artificial Sequence
  ENSG00000205639_4 (sequence is synthesized)
ggccacgttcttccaggtgccctacacagcgctcaccatgctgctgactccctgcccaagggagcgggactcggccaccgcctaccggatgactgtggagatggcgggaacactgatggg

SEQ ID NO: 749198 - DNA, 120 bp, Artificial Sequence
  ENSG00000205639_5 (sequence is synthesized)
ggccactgtccacgggctcatcgtgtccggcgcccacagaccccacaggtgcgaggccactgcgaccccggggccagtcactgtctccccgaatgcagcccatctctactgcattgcggc

SEQ ID NO: 749199 - DNA, 120 bp, Artificial Sequence
  ENSG00000205639_6 (sequence is synthesized)
tgccgtggttgtagtgacttaccccgtgtgcatcagtttactgtgcctaggggtgaaggagcggccagacccctctgccccagcctcaggcccaggcttgagtttcctggctgggctgag

SEQ ID NO: 749200 - DNA, 120 bp, Artificial Sequence
  ENSG00000205639_7 (sequence is synthesized)
cctcactacccggcacccaccctacctgaagctggtgatctccttcctgttcatctctgctgctgttcaggtggagcagagctacctggtcctgttctgtacacatgcctcccagctaca

SEQ ID NO: 749201 - DNA, 120 bp, Artificial Sequence
  ENSG00000205639_8 (sequence is synthesized)
cgaccacgtccagggcctggtactaactgtcctggtctcagccgtgctgagcaccccgctgtgggagtgggttctccagcgctttgggaagaagacgtcagcctttgggatctttgcgat

SEQ ID NO: 749202 - DNA, 120 bp, Artificial Sequence
  ENSG00000205639_9 (sequence is synthesized)
ggtgccctttgcgatcttgctggctgctgtgcccacagcacctgtggcatatgtcgtggcctttgtatctggcgtgagcattgctgtgtccttgctgctaccctggtccatgctgccaga

SEQ ID NO: 749203 - DNA, 120 bp, Artificial Sequence
  ENSG00000205639_10 (sequence is synthesized)
cgtggtggatgactttcagctgcagcaccgtcacgggccaggcctggagaccatcttctactcctcctacgtcttcttcaccaagctgtctggcgcatgtgccctgggcatctccaccct

SEQ ID NO: 749204 - DNA, 120 bp, Artificial Sequence
  ENSG00000205639_11 (sequence is synthesized)
cacctgcatgatccttgctgggctctgcatcctcatggtcggctccactccaaagacacccagtcgggacgcctccagccggctgagccttcggaggaggaccagctacagcctggccta

SEQ ID NO: 749205 - DNA, 120 bp, Artificial Sequence
  ENSG00000205639_12 (sequence is synthesized)
aagcttaggagggcgactgtgaatggacacaggagccagcaccctcggggcctgacatcgccctcctcagccctccagcacctggtctggcagtttagtatgtgacctttctccctggga

SEQ ID NO: 749206 - DNA, 120 bp, Artificial Sequence
  ENSG00000205639_13 (sequence is synthesized)
tgtggagtcttcggcaacgtgtcctgaagggactggcccgcactccaggaccccacttggcatttcttgtctgttgccttcagactatctcagataggcctgtgcccctgactagcccag

SEQ ID NO: 749207 - DNA, 120 bp, Artificial Sequence
  ENSG00000205639_14 (sequence is synthesized)
tagcacttgtctctagaaaaaggaagctcctgcccaacctggcttgtggaccagtaatatctgtggcctaccacccattcaagaaaacgttacagccggctcactgcaaaatccgcctcc

SEQ ID NO: 749208 - DNA, 89 bp, Artificial Sequence
  ENSG00000205639_15 (sequence is synthesized)
tttcgatctcctgacctcgtgatccgccccgcctcagcctcccaaaggcatgagccaccgtactcggccggtgatcctactgcctcagc

SEQ ID NO: 749209 - DNA, 120 bp, Artificial Sequence
  ENSG00000205639_16 (sequence is synthesized)
ctcctgagtagctgggattacagacacagcccccgttcccagctctagcatttcttaaggacaaaattggtgtgtaagtaacaggaaattcacattatgctgtactcattctctaatatc

SEQ ID NO: 749210 - DNA, 120 bp, Artificial Sequence
  ENSG00000205639_17 (sequence is synthesized)
tatcacagccatgttagaacaaatttgggttttcaaaacaagcgtaactgaacagagtatatatatgtatgtatataaatatatagaaatcctaaatggtccctgtgacataagaaatac

SEQ ID NO: 749211 - DNA, 120 bp, Artificial Sequence
  ENSG00000205639_18 (sequence is synthesized)
acatttggtctctgccccaggttcctggcacagagcttctaaaatgctagtaacttcctgagtggtaggggtgaggggaacatcttttgttatacataagaagcccttttcaaacagatc

SEQ ID NO: 749212 - DNA, 120 bp, Artificial Sequence
  ENSG00000205639_19 (sequence is synthesized)
tgagtttatgctaatgatgtgactggcagaggatgggggctggttgccagagaaaccaaccatgtgattagaaggttgaaactttcagccttatcttcctaccgggaggggacaggggct

SEQ ID NO: 749213 - DNA, 120 bp, Artificial Sequence
  ENSG00000205639_20 (sequence is synthesized)
gaagactgagctcatcatcaatgatttaatcaattgtgcccatgtaatggagcctccacttccaaacgaagggtttcagagagcttctaggttggtgaacacatccatgtaccaggaggt

SEQ ID NO: 749214 - DNA, 120 bp, Artificial Sequence
  ENSG00000205639_21 (sequence is synthesized)
ctaccccactccacggggacagaaactcttgtgtaggggacccttttagatttcattctatatacctcttcagctggctgttcattttataatcaaccaataaatgttaagtaaagtgtt

SEQ ID NO: 749215 - DNA, 120 bp, Artificial Sequence
  ENSG00000205639_22 (sequence is synthesized)
gttcttcatcactaggaactggctctcctagaatacaactaataacactaaaaggatgatggacagcagcctgagagacacaatctgacggaaggacattccccaagaagggccaaacgt

SEQ ID NO: 749216 - DNA, 120 bp, Artificial Sequence
  ENSG00000205639_23 (sequence is synthesized)
aagttcagaattggcaaacaggaagtcatcaaaggttttgaagagggtgcagcccagctgggtcctctttctcctctccccatctgcccccatccctgctagatgagcttggggcagagg

SEQ ID NO: 749217 - DNA, 120 bp, Artificial Sequence
  ENSG00000205639_24 (sequence is synthesized)
gcgaagctgacctgcacccctgatgtggcatatggagccacgggccaccccggtgtcatccctcccaatgccaccctcatctttgacgtggagctgctcaacttagagtgaaggcaggaa

SEQ ID NO: 749218 - DNA, 120 bp, Artificial Sequence; identical to SEQ ID NO: 233902
  ENSG00000205639_25 (sequence is synthesized)

SEQ ID NO: 749219 - DNA, 120 bp, Artificial Sequence
  ENSG00000205639_26 (sequence is synthesized)
ggggccactgtccacgggctcatcgtgtccggcgcccacagaccccacaggtgcgaggccactgcgaccccggggccagtcactgtctccccgaatgcatcctgtcctgtcccacaggcc

SEQ ID NO: 749220 - DNA, 120 bp, Artificial Sequence
  ENSG00000205639_27 (sequence is synthesized)
ccctggtaggctgggtgtgggggcctcacgtgtgtccacagtgggtgtcacctccttcatgtaaacctgccgtcccaggccccctgcacccagcctgtgcaggagatggaggccaccagc

SEQ ID NO: 749221 - DNA, 120 bp, Artificial Sequence
  ENSG00000205639_28 (sequence is synthesized)
tccatcctcagagccctcctgagaggacatcaggcagtaggaatggcggggggccggcagggggctggcggggggtacgagcacacaggccatctgcttctctggtggccagtctggtcc

SEQ ID NO: 749222 - DNA, 120 bp, Artificial Sequence
  ENSG00000205639_29 (sequence is synthesized)
tgggcacagaactcagggatgaatccactttggcctccgtccccagagaattcacaggctgctggtggccaaggggctaggagggctaactccacacccccgccgcaggtccatgctgcc

SEQ ID NO: 749223 - DNA, 120 bp, Artificial Sequence
  ENSG00000205639_30 (sequence is synthesized)
ggaaaacaggcttagagagatgatgtgatttattcaaggtcacatagaggggtaggtgacaaaggcaggctcaagcccaggtctcctgacctgcagcttacacggccgtgctgactcagt

SEQ ID NO: 749224 - DNA, 120 bp, Artificial Sequence
  ENSG00000205639_31 (sequence is synthesized)
gcatccagccaccctgcaccccactgccatgccccggcccgtgccactacctccctctccaccccacaactgctgcctccgcctcttacacggcatcccatccttgccttctgccacctc

SEQ ID NO: 749225 - DNA, 120 bp, Artificial Sequence
  ENSG00000205639_32 (sequence is synthesized)
cctgtgcggtcaggtgccctttgaaaggagtttgagcaatgttcatcctcattgcctcctgttctgcccacgatcccctcccccaagatactctttgtggggaagaggggctggggcaat

SEQ ID NO: 749226 - DNA, 120 bp, Artificial Sequence
  ENSG00000205639_33 (sequence is synthesized)
gcaggctgggtgaccgactaccccagtcccagggaaggtggggccctgcctctaggatgctgcagcagagtgagcaagggggcccgaatcgaccataatgggtgtaggggccacctcctc

SEQ ID NO: 749227 - DNA, 120 bp, Artificial Sequence
  ENSG00000205639_34 (sequence is synthesized)
cccctgttctgttggggaggggtagccatgatttatcccagcctggggctccccctctggtttcctatttgcagttacttgaattaaaaaaaatccttttctggaaaaaaaaaaaaaaaa

SEQ ID NO: 749228 - DNA, 120 bp, Artificial Sequence
  ENSG00000205642_0 (sequence is synthesized)
atgtggatgctgggagaagtatgtgagatggaaaagttgtttcatggcatccaagaagtgaatgatcctcaaggtgtagcagaggaatttgtaggagagagggatgattgacatcttcgt

SEQ ID NO: 749229 - DNA, 120 bp, Artificial Sequence
  ENSG00000205642_1 (sequence is synthesized)
gtagccctccatccatcccagttagcatggagggattttagggctaccattggctgggtagtggagtgttgaccaatcacagctcaggggcgtgattgtctcgtcctgggatcgcgagag

SEQ ID NO: 749230 - DNA, 120 bp, Artificial Sequence
  ENSG00000205642_2 (sequence is synthesized)
gtgtatatacagggaggccaggcagcctggagttagtcgaccgttgcgagacgttgagctgcggaagatgagtccaaagccgagagcctcgggacctccggccaaggccaaggaggcagg

SEQ ID NO: 749231 - DNA, 120 bp, Artificial Sequence; identical to SEQ ID NO: 556828
  ENSG00000205642_3 (sequence is synthesized)

SEQ ID NO: 749232 - DNA, 120 bp, Artificial Sequence
  ENSG00000205642_4 (sequence is synthesized)
gcccagccaggagctccctcagcacgagctgccgccggaggagccagtgagcgaggggacccagcacgaccccctgagtcaggagagcgagctggaggaaccactgagtcaggagagcga

SEQ ID NO: 749233 - DNA, 85 bp, Artificial Sequence
  ENSG00000205642_5 (sequence is synthesized)
actgagtcaggagagcgagatggaaaccgagtgtgtagacggccaagtactcccctatctccgagagcagcgactaagttcaggc

SEQ ID NO: 749234 - DNA, 120 bp, Artificial Sequence
  ENSG00000205642_6 (sequence is synthesized)
agtactcccctatctccgagagcagcgactaagttcaggcccagccgccagacctcagagatctcaccagcggggtgcttgccattctgatgataataaaatgaatgtgttgcaaattga

SEQ ID NO: 749235 - DNA, 120 bp, Artificial Sequence
  ENSG00000205642_7 (sequence is synthesized)
acctgaggcggagagcgggccagcggcacccggccccagcgaccagcccagccaggagctccctcagcacgagctgccgccggaggagccagtgagcgaggtggaagaaccactgagtca

SEQ ID NO: 749236 - DNA, 120 bp, Artificial Sequence
  ENSG00000205643_0 (sequence is synthesized)
aggcgccttggacgcggagccgtgggacgagggcggcgatggcgtcccatgtagagtgccgtcctctgggagtgtttgagtgtgaactctgtaccttgacagctccgtacagctatgtgg

SEQ ID NO: 749237 - DNA, 120 bp, Artificial Sequence
  ENSG00000205643_1 (sequence is synthesized)
gacagaagccccccaacacccagtcgatggtcctcctggaggaaagctatgtcatgaaggatcccttcacctccgacaaggacagattcctggtcctcggctcgtgctgcagtttgtgca

SEQ ID NO: 749238 - DNA, 120 bp, Artificial Sequence
  ENSG00000205643_2 (sequence is synthesized)
gcaggctggtgtgtgtgggcccggaatgcagtttattctactccaagagattctgcctcccttgtgtccgggagaacatcaatgcttttcctcaggaaattcggcaagacttggagaaaa

SEQ ID NO: 749239 - DNA, 120 bp, Artificial Sequence
  ENSG00000205643_3 (sequence is synthesized)
ggaaagctccatcaaagaggacccccagccagcccggttctcggacgtgagtgcaactggggctaggtcatcgggcggcaccctgcacagagctcctgggccagcctgcgccagggatgc

SEQ ID NO: 749240 - DNA, 120 bp, Artificial Sequence
  ENSG00000205643_4 (sequence is synthesized)
tgctgagctgggagccgccatgcctggccttgtttctggaccactgggagcagcactgcagcccaggggagctggagtccagcttggagcagccacaggcccagggagctgtagcaagag

SEQ ID NO: 749241 - DNA, 120 bp, Artificial Sequence
  ENSG00000205643_5 (sequence is synthesized)
ggtagtccaaaggcagatgccagacaagacacagccaggaacccggccaggtccccccacatgcccctcagggcccaggcctgagtgagtgctgctcagatgtgactgagagggatgacc

SEQ ID NO: 749242 - DNA, 120 bp, Artificial Sequence
  ENSG00000205643_6 (sequence is synthesized)
ggagatgccacactgtgtcggggccatggtgcactgtaggtggctgcaatggtctctctgtaaggaaaatcactgacagcagctccttctggacccagtctggaaggtctagagggggat

SEQ ID NO: 749243 - DNA, 120 bp, Artificial Sequence
  ENSG00000205643_7 (sequence is synthesized)
agaatttttatttcatatccttatgtggtgcttggaaaatgtttttaaccttgaccatgtattatgtttataattaaaaacccaaagaaccagctcatgtttggaaaaggaatcttccac

SEQ ID NO: 749244 - DNA, 120 bp, Artificial Sequence
  ENSG00000205643_8 (sequence is synthesized)
tgaaacatttggatacccgacgttctccctggacacttggcccggcaatagttggggtctcctgggaagctgagtgctggcttctagcctctccagttccctcagactctgtcttcagct

SEQ ID NO: 749245 - DNA, 120 bp, Artificial Sequence
  ENSG00000205643_9 (sequence is synthesized)
cgggcccctccgttctgtctccctcgactccaagtcaggaataccgtgggcttcctgccctcaccccacacctcaagaccatcccactgcttgcctgcttgccccctgccatctcgcact

SEQ ID NO: 749246 - DNA, 120 bp, Artificial Sequence
  ENSG00000205643_10 (sequence is synthesized)
cagccctgggtgcctgtgaagcctggccccactgcctgccgggggttcctgcagcacccccctactccaggctccccatctccctgaagcttccagggtagcagctggtgggacactgat

SEQ ID NO: 749247 - DNA, 120 bp, Artificial Sequence
  ENSG00000205643_11 (sequence is synthesized)
ctgtgagctctggaatgtctgcttagaattctgagaggcaggaactgctctgtctttgtaactactcaaggccaactgtcacatgaaggaatgaataaagagtttttactgacttgtgca

SEQ ID NO: 749248 - DNA, 120 bp, Artificial Sequence
  ENSG00000205643_12 (sequence is synthesized)
agggatctccaggagaagggactgtcctttcatgagcacttgttgtgtgccaggtcctgtgcttgggacctgttttactgctgaggcttcattcagtcctgccccttagtcaggaatgca

SEQ ID NO: 749249 - DNA, 120 bp, Artificial Sequence
  ENSG00000205649_0 (sequence is synthesized)
gggagatttcaacgtgtttaaatacatcagccatctaggaaaggacatctcttgagacttcacttcagcttcactgacttctggattctcctcttgagtaaaaggactcagccaactatg

SEQ ID NO: 749250 - DNA, 120 bp, Artificial Sequence
  ENSG00000205649_1 (sequence is synthesized)
aagttttttgtttttgctttaatcttggctctcatgctttccatgactggagctgattcacatgcaaagagacatcatgggtataaaagaaaattccatgaaaagcatcattcacatcga

SEQ ID NO: 749251 - DNA, 120 bp, Artificial Sequence
  ENSG00000205649_2 (sequence is synthesized)
attctcatttgtcataccgcatcacactaccactgctttttgaagaattatcataaggcaatgcagaataaaagaaataccatgatttagtgaattctgtgtttcaggatacttcccttc

SEQ ID NO: 749252 - DNA, 120 bp, Artificial Sequence
  ENSG00000205649_3 (sequence is synthesized)
ctaattatcatttgattagatacttgcaatttaaatgttaagctgttttcactgctgtttctgagtaatagaaattcattcctctccaaaagcaataaaattcaagcacattattatgtg

SEQ ID NO: 749253 - DNA, 120 bp, Artificial Sequence
  ENSG00000205649_4 (sequence is synthesized)
taatcacggggcatgattatggaggtctctgcttgctatctgatctacgacaatcctgacaaaaacaagcaatgggaaaaggatctcctagtcaataaatggtactgggaaaactggcta

SEQ ID NO: 749254 - DNA, 120 bp, Artificial Sequence
  ENSG00000205649_5 (sequence is synthesized)
actcaagatggattgaaaattaaatgaaaaacccaaaaccaaaaaaagaccctagaagaaaacctaggtgatatcattcgggacataggcatggacaaagacttcatgaagaaaatgcca

SEQ ID NO: 749255 - DNA, 64 bp, Artificial Sequence
  ENSG00000205649_6 (sequence is synthesized)
taacttagagattgggagaaaatttttgcagtctacccatctgacaaaggtgtagtgtccagag

SEQ ID NO: 749256 - DNA, 82 bp, Artificial Sequence
  ENSG00000205649_7 (sequence is synthesized)
catcagagtgaacaggtaacttagagattgggagaaaatttttgcagtctacccatctgacaaaggtgtagtgaaaaacaaa

SEQ ID NO: 749257 - DNA, 120 bp, Artificial Sequence
  ENSG00000205649_8 (sequence is synthesized)
ctggagctgattcacatgcaaaggaaaagcatcattcacatcgaggctatagatcaaattatctgtatgacaattgatatcttcagtaatcacggggcatgattatggaggtttgactgg

SEQ ID NO: 749258 - DNA, 120 bp, Artificial Sequence
  ENSG00000205649_9 (sequence is synthesized)
ctggagctgattcacatgcaaaggtaagacattttcatttactggaaaacttgataattaatcatatattgaatttttaatcttttctttttatttcatagagacatcatgggtataaaa

SEQ ID NO: 749259 - DNA, 120 bp, Artificial Sequence
  ENSG00000205649_10 (sequence is synthesized)
aacaaggaaaaattaaaaaaaagccattaagccaacaatcattccagtttaagaaatgtagcgtgggttagctctttgaagtgtgttgatttatatagatgcttctgactttgtagatat

SEQ ID NO: 749260 - DNA, 120 bp, Artificial Sequence
  ENSG00000205649_11 (sequence is synthesized)
ctgtaagtatatctggaagttttaaaggatacattctcagtacttatcccaaggatctttcttattccttacgttctgccatatattcatgttcacctcaatacagctttaatatttcta

SEQ ID NO: 749261 - DNA, 120 bp, Artificial Sequence
  ENSG00000205649_12 (sequence is synthesized)
tgtaaagattttccttgaattaacctatataagttcttaaaggacttagaataaatattcattacatacctgcgaacactcaagtacaattacttgaatataaaaataaaagaaaattaa

SEQ ID NO: 749262 - DNA, 120 bp, Artificial Sequence
  ENSG00000205649_13 (sequence is synthesized)
gggactgagaactgtgaaaatatctttaaatattaaaagctctagaccacctgaagttagaaatctgaggaaagaacaaggtacacttcaatggaacctaagtattagagggtgtcaaaa

SEQ ID NO: 749263 - DNA, 120 bp, Artificial Sequence
  ENSG00000205649_14 (sequence is synthesized)
tatgaattttcaagtaatttcttgcacaaccaaactgttcaagttagcatacaatttattttactctttctaaaataaagctgcctattttaagccataaaacaaatctatatctgttaa

SEQ ID NO: 749264 - DNA, 120 bp, Artificial Sequence
  ENSG00000205649_15 (sequence is synthesized)
gtgtcatgagttcccagcttgtatcgtcatttactactgtgtaatagtagaaaaggcacttgacctctctggagctctttctccttctctactttctcatcctcttcccactcctcctct

SEQ ID NO: 749265 - DNA, 120 bp, Artificial Sequence
  ENSG00000205659_0 (sequence is synthesized)
aacatccgcgtaaggggcgtggctatacttaggggcggggctaggcaaagattgccctatgaggcgagggaatgagactgggctgcgagttggggatagggtttctctttgggggcgtgg

SEQ ID NO: 749266 - DNA, 120 bp, Artificial Sequence
  ENSG00000205659_1 (sequence is synthesized)
cttatggaacctcgttttcccgccgacggttggccacgtcacgtgacatgggttggaagatggcgtctcccacagacgggacagatctggaagcatctttgctaagttttgaaaaacttg

SEQ ID NO: 749267 - DNA, 120 bp, Artificial Sequence
  ENSG00000205659_2 (sequence is synthesized)
accgtgcctcaccagatctttggccagaacaattaccaggtgttgctgaatttgcagcttccttcaaaagtcctattactagttctccacccaaatggatggctgagatagaacgtgatg

SEQ ID NO: 749268 - DNA, 120 bp, Artificial Sequence
  ENSG00000205659_3 (sequence is synthesized)
acatcgacatgttgaaagaactggggagtctcaccacggctaatttgatggagaaggttcgaggcctacagaacctagcctatcagctggggctggatgagtccagagagatgacacggg

SEQ ID NO: 749269 - DNA, 120 bp, Artificial Sequence
  ENSG00000205659_4 (sequence is synthesized)
ggaaattcctcaatattctagagaagcccaagaagtagcagctgcttgcggacaggatgtcctggggtccgaaaccaagctcccttcccggtgcacctctaacaatgcacacctcactgc

SEQ ID NO: 749270 - DNA, 120 bp, Artificial Sequence
  ENSG00000205659_5 (sequence is synthesized)
ttgcttgggagaggccagagggtgtacctccaggactgccctctcccctgctcctggcactctacacgtctgaggacattcagcagcaagagaagaatctgctctacccaaggatcattg

SEQ ID NO: 749271 - DNA, 120 bp, Artificial Sequence
  ENSG00000205659_6 (sequence is synthesized)
cagttactcaatcaactttcagacttgaaccttcttagcctcggatattggtaacagctgagggcatatcattcttaaaggtcgaagtcctgctttctcatttctggaagtgattcagga

SEQ ID NO: 749272 - DNA, 120 bp, Artificial Sequence
  ENSG00000205659_7 (sequence is synthesized)
gccccaggatcttacggttgatttgactcagtcatggcagtcagttgtgacatgttgattggatgggttcttttgaattgttcttgatctcttagaaagtgtttacgatgtgaggagacc

SEQ ID NO: 749273 - DNA, 120 bp, Artificial Sequence
  ENSG00000205659_8 (sequence is synthesized)
agagaccaagtagattctggaccagaccatgcagcctgacctgtgaactctccagtatatactaagttcccagaatccccagctgaagaaaccagaatcttctcgaaatgtatatctgtt

SEQ ID NO: 749274 - DNA, 120 bp, Artificial Sequence
  ENSG00000205659_9 (sequence is synthesized)
ttttaaaacttctatacctcttatgatagtcccatttgcttttcattccttacttcccagccccaccttctagttctgacttcgggcagagggatccctgagtccctcctggaattagct

SEQ ID NO: 749275 - DNA, 120 bp, Artificial Sequence
  ENSG00000205659_10 (sequence is synthesized)
tgtatagtgaaaggcccatccaaggttgtctaaagaccaatgtgaaggtgacagaaaggacttttgagttctaattaatctgttacagcttcaagcaagaaagtcagtatagcctgaaag

SEQ ID NO: 749276 - DNA, 120 bp, Artificial Sequence
  ENSG00000205659_11 (sequence is synthesized)
ggtttataggagttcccatttggttgaaagctagaagccctaattgaccttaaagtaacatgctatgggatggtgggattgtcccctctgacagcacatatgaaatagttcatctatata

SEQ ID NO: 749277 - DNA, 120 bp, Artificial Sequence
  ENSG00000205659_12 (sequence is synthesized)
atagaaacgcacacacacgaaaaagaatcttctgacttaaatacaactttcatggagttcttcaccacttatctgtctctgttaaaatctgaaaatctagcccatggctaaaatctatta

SEQ ID NO: 749278 - DNA, 120 bp, Artificial Sequence
  ENSG00000205659_13 (sequence is synthesized)
tatgtgttctccatatttcttgtataagccagtccccagcatctgatgttttgagaagtgcatggagtttcctaaactttgcacaaaagaatatcctggggccgggcatggtggctcacg

SEQ ID NO: 749279 - DNA, 120 bp, Artificial Sequence
  ENSG00000205659_14 (sequence is synthesized)
aaaaaaaaaaaaaaaaaaaagaatatccctgtggcaatagtctgatggtgtttggacacaagaaaagttatggttttgagtcgtgagtgtttgctagggcatggcactcttcagtttaac

SEQ ID NO: 749280 - DNA, 120 bp, Artificial Sequence
  ENSG00000205659_15 (sequence is synthesized)
gctagggcatggcactcttcagtttaacagctgatccattaaaccttttctgacatttgtgccttgttctcatgctagaattaatgctggatttttctctcatttgaccatcaatgtagt

SEQ ID NO: 749281 - DNA, 120 bp, Artificial Sequence
  ENSG00000205659_16 (sequence is synthesized)
tttacttattgaaaggaaaaaagacttaacacaagataggaaagatgagtatgagaagtaaaacattctgctggggtgctacatagaaggttaggttgtaggggctttgattttaattta

SEQ ID NO: 749282 - DNA, 120 bp, Artificial Sequence
  ENSG00000205659_17 (sequence is synthesized)
aacttattatcgattgatatttctgtatctcactaaatgcggttgaagagtgtgtgtgtgtgtgtgcgcgcgcgcatgtggccaaaaaatagtgccataatgtcaaattcttcctttgct

SEQ ID NO: 749283 - DNA, 120 bp, Artificial Sequence
  ENSG00000205659_18 (sequence is synthesized)
ctgtttttgagagttgatgacatcaggcacttttcagtgtttggggaaattgattgggatacctcccccaaaccaactcaagtctgtaactggaagccaggtggttggttttctggtccg

SEQ ID NO: 749284 - DNA, 120 bp, Artificial Sequence
  ENSG00000205659_19 (sequence is synthesized)
ctttgtcctctttcttttaccgtcatcctattcaccagcacttaatgtaagtagatgttttagaattgcaatatttattggtttagtatttgtcatccttagaaatgttaatgatgtatt

SEQ ID NO: 749285 - DNA, 120 bp, Artificial Sequence
  ENSG00000205659_20 (sequence is synthesized)
tttatattgataatataaatttatgtacagtatgtgtgtatatgtatttcaggatgttatagtattgtactttgtatgtgatggtttttgtgtcttcataataaatatgtcccttttaca

SEQ ID NO: 749286 - DNA, 120 bp, Artificial Sequence
  ENSG00000205659_21 (sequence is synthesized)
acgtgacatgggttggaagatggcgtctcccacagacgggacagatctggaagcatctttgctaagttttgaaaaacttgaccgtgcctcaccagatctttggccagaacaatttttgtt

SEQ ID NO: 749287 - DNA, 75 bp, Artificial Sequence
  ENSG00000205659_22 (sequence is synthesized)
aagcaagtccagcgcccggccagaaatgcttttttaatataactgagattagtgtgtgtgtgtgtgtgtgtgtgt

SEQ ID NO: 749288 - DNA, 75 bp, Artificial Sequence
  ENSG00000205659_23 (sequence is synthesized)
acttgtgctttaaaaaattttattctatcttaagcattttcctgtgtcattaaaagttctaccactgaagatttt

SEQ ID NO: 749289 - DNA, 120 bp, Artificial Sequence
  ENSG00000205659_24 (sequence is synthesized)
gacatgggttggaagatggcgtctcccacagacggtaagagccggcttagagatctttgcctgcagcctccttctttgctctactgggaacatccactctgtctctgcccctcgaacata

SEQ ID NO: 749290 - DNA, 120 bp, Artificial Sequence
  ENSG00000205659_25 (sequence is synthesized)
catttctttcttgggctcttctcctttcccttttattttttttcttgagatccatcgccgtcttcagctcaccggttcttcacagcagctccggaggtgcccagtttccccgctctgtac

SEQ ID NO: 749291 - DNA, 120 bp, Artificial Sequence
  ENSG00000205659_26 (sequence is synthesized)
caggcgtgtggaggagggcactagggagggactcattctgggtaaaaggacaggggggtcgccctgtgccttccttatctctatttgggcgaggctgagggtcgaggaggagatgtttct

SEQ ID NO: 749292 - DNA, 120 bp, Artificial Sequence
  ENSG00000205659_27 (sequence is synthesized)
ggaggacgtggcttactgtagttttttccttggggtacccattgaaaggatcagttctcttctgattgagcgcacggatggaatgattctcacaaaccctcgcagggctgctggctgacc

SEQ ID NO: 749293 - DNA, 120 bp, Artificial Sequence
  ENSG00000205659_28 (sequence is synthesized)
tcatctcgatactgaaccgcaagagaaacatgatctctctcctgtctcctcagtttgggaccattgccgtggcagcaagagaagcgggggacgttctcggcccctcgccctgagagtcgc

SEQ ID NO: 749294 - DNA, 120 bp, Artificial Sequence
  ENSG00000205659_29 (sequence is synthesized)
gccgtggcagcaagagaagcgggggacgttctcggcccctcgccctgagagtcgcgaggagaatcagtattgagcttttaagtgtcgtcttgcacagatctggaagcatctttgctaagt

SEQ ID NO: 749295 - DNA, 120 bp, Artificial Sequence
  ENSG00000205667_0 (sequence is synthesized)
atgacaagaaacgccagacccaacattgtcctgctgatggcagatgaccttggagtgggggatttgtgctgctacggtaataactcagtgagcacacctaatattgaccgcctggcaagt

SEQ ID NO: 749296 - DNA, 120 bp, Artificial Sequence
  ENSG00000205667_1 (sequence is synthesized)
gaaggagtgaggcttacccagcatctcgcagctgcttccatgtgcaccccaagtcgggctgccttcctgaccggccggtaccccatcagatcagggatggtgtctgcctacaacctgaac

SEQ ID NO: 749297 - DNA, 120 bp, Artificial Sequence
  ENSG00000205667_2 (sequence is synthesized)
cgtgccttcacgtggcttggtgggtcaggtggtcttcccaccaatgaaacgacttttgccaagctgctgcagcaccgtggctaccgcacgggactcataggcaaatggcacctgggtttg

SEQ ID NO: 749298 - DNA, 120 bp, Artificial Sequence
  ENSG00000205667_3 (sequence is synthesized)
agctgcgcctctcggaatgatcactgttaccacccgctcaaccatggttttcactacttttacggggtgccttttggacttttaagcgactgccaggcatccaagacaccagaactgcac

SEQ ID NO: 749299 - DNA, 120 bp, Artificial Sequence
  ENSG00000205667_4 (sequence is synthesized)
cgctggctcaggatcaaactgtggatctccacggtagcccttgccctggttccttttctgcttctcattcccaagttcgcccgctggttctcagtgccatggaaggtcatctttgtcttt

SEQ ID NO: 749300 - DNA, 120 bp, Artificial Sequence
  ENSG00000205667_5 (sequence is synthesized)
gctctcctcgcctttctgtttttcacttcctggtactctagttatggatttactcgacgttggaattgcatccttatgaggaaccatgaaattatccagcagccaatgaaagaggagaaa

SEQ ID NO: 749301 - DNA, 120 bp, Artificial Sequence
  ENSG00000205667_6 (sequence is synthesized)
gtagcttccctcatgctgaaggaggcacttgctttcattgaaaggtacaaaagggaaccttttctcctctttttttccttcctgcacgtacatactccactcatctccaaaaagaagttt

SEQ ID NO: 749302 - DNA, 120 bp, Artificial Sequence
  ENSG00000205667_7 (sequence is synthesized)
gccctggaccaggagcgcctggccaaccacaccttggtgtacttcacctctgacaacgggggccacctggagcccctggacggggctgttcagctgggtggctggaacgggatctacaaa

SEQ ID NO: 749303 - DNA, 120 bp, Artificial Sequence
  ENSG00000205667_8 (sequence is synthesized)
ggtggcaaaggaatgggaggatgggaaggaggtatccgtgtgccagggatattccggtggccgtcagtcttggaggctgggagagtgatcaatgagcccaccagcttaatggacatctat

SEQ ID NO: 749304 - DNA, 120 bp, Artificial Sequence
  ENSG00000205667_9 (sequence is synthesized)
ccgacgctgtcttatataggcggagggatcttgtcccaggacagagtgattgacggccagaacctaatgcccctgctggaaggaagggcgtcccactccgaccacgagttcctcttccac

SEQ ID NO: 749305 - DNA, 120 bp, Artificial Sequence
  ENSG00000205667_10 (sequence is synthesized)
tactgtggggtctatctgcacacggtcaggtggcatcagaaggactgtgcaactgtgtggaaagctcattatgtgactcctaaattctaccctgaaggaacaggtgcctgctatgggagt

SEQ ID NO: 749306 - DNA, 120 bp, Artificial Sequence
  ENSG00000205667_11 (sequence is synthesized)
ggaatatgttcatgttcgggggatgtaacctaccacgacccaccactcctctttgacatctcaagagacccttcagaagcccttccactgaaccctgacaatgagccattatttgactcc

SEQ ID NO: 749307 - DNA, 120 bp, Artificial Sequence
  ENSG00000205667_12 (sequence is synthesized)
gtgatcaaaaagatggaggcagccataagagagcatcgtaggacactaacacctgtcccacagcagttctctgtgttcaacacaatttggaaaccatggctgcagccttgctgtgggacc

SEQ ID NO: 749308 - DNA, 120 bp, Artificial Sequence
  ENSG00000205667_13 (sequence is synthesized)
ttccccttctgtgggtgtgacaaggaagatgacatccttcccatggctccctgagaccatgcggaccacgtgttacccaccacaaacttactgttacaatggtcataggagcagagctca

SEQ ID NO: 749309 - DNA, 120 bp, Artificial Sequence
  ENSG00000205667_14 (sequence is synthesized)
cctgactgattcattccatttgggataaaaactgatggcccaacccattgttttatcctcagaaatcagttctttcaagagctcggtgaaattaaagtgggcccatataacagtgaacct

SEQ ID NO: 749310 - DNA, 120 bp, Artificial Sequence
  ENSG00000205669_0 (sequence is synthesized)
aggcccgcccactgactccgcggagctgggtcgcccctgttctacccagattgggatggcagcgacgctgatcctggagcccgcgggccgctgctgctgggacgagccgctgcgcatcgc

SEQ ID NO: 749311 - DNA, 120 bp, Artificial Sequence
  ENSG00000205669_1 (sequence is synthesized)
agtgcgcggcctggccccggagcagccagtcacgctgcgcacgtccctgcgcgacgaagagggcgcgctcttccgggcccacgcgcgctaccgtgccgacgcccgcgacgagctggacct

SEQ ID NO: 749312 - DNA, 120 bp, Artificial Sequence
  ENSG00000205669_2 (sequence is synthesized)
ggagcgcgcgcccgcgctgggaggcagcttcgcggggctccagcccatggggctgctgtgggcgttggagcccgagaaagccttggtgcggctggtgaagcgcgacgtgcggacgccctt

SEQ ID NO: 749313 - DNA, 120 bp, Artificial Sequence
  ENSG00000205669_3 (sequence is synthesized)
cgccgtggagctggaagtgctggacggccacgacaccgagcccgggcggctgctgtgcctggcgcagaacaagcgcgactttctccggccgggggtgcggcgcgagccggtgcgcgcggg

SEQ ID NO: 749314 - DNA, 120 bp, Artificial Sequence
  ENSG00000205669_4 (sequence is synthesized)
cccggtgcgcgccgcgctcttcctgccgccggatgaggggccctttcctgggatcattgatctgtttgggagcagcaggggcctttgtgaatacagggccagcctcctggccggacatgg

SEQ ID NO: 749315 - DNA, 120 bp, Artificial Sequence
  ENSG00000205669_5 (sequence is synthesized)
atctgaatgatgtacatctggagtactttgaagaagccgtggactttatgctgcagcatccaaaggtgaaaggtcctagtattgcgcttcttggattttccaaaggaggtgacctgtgtc

SEQ ID NO: 749316 - DNA, 120 bp, Artificial Sequence
  ENSG00000205669_6 (sequence is synthesized)
tctcaatggcttctttcttgaagggcatcacagccactgtacttatcaatgcctgtgtagccaacacagtagctcctctacattacaaggatatgattattcctaaacttgtcgatgatc

SEQ ID NO: 749317 - DNA, 120 bp, Artificial Sequence
  ENSG00000205669_7 (sequence is synthesized)
taggaaaagtaaaaatcactaagtcaggatttctcacttttatggacacttggagcaatccactggaggaacacaatcaccaaagtcttgttccattggaaaaggcgcaggtgcccttct

SEQ ID NO: 749318 - DNA, 120 bp, Artificial Sequence
  ENSG00000205669_8 (sequence is synthesized)
tgtttattgttggcatggatgatcaaagctggaagagtgaattctatgctcagatagcctctgaaaggctacaagctcatgggaaagaaagaccccagataatctgttacccagaaactg

SEQ ID NO: 749319 - DNA, 120 bp, Artificial Sequence
  ENSG00000205669_9 (sequence is synthesized)
gtcactgtattgacccaccttattttcctccttctagagcttctgtgcacgctgttttgggtgaggcaatattctatggaggtgagccaaaggctcactcaaaggcacaggtagatgcct

SEQ ID NO: 749320 - DNA, 120 bp, Artificial Sequence
  ENSG00000205669_10 (sequence is synthesized)
ggcagcaaattcaaactttcttccataaacatctcaatggtaaaaaatctgtcaagcacagcaaaatataacattgtagccacagaccagataccattaataaaaatcctattcatacaa

SEQ ID NO: 749321 - DNA, 120 bp, Artificial Sequence
  ENSG00000205669_11 (sequence is synthesized)
tatattatcattattgtttgagaaaataagacattttgttctttctctgccaatctctctacccccaatctccttggcttcaaaaacttgtttgcttactgtcttttgagaaactaaagc

SEQ ID NO: 749322 - DNA, 120 bp, Artificial Sequence
  ENSG00000205669_12 (sequence is synthesized)
acacacatgagattccatcacccaggcagcattcctgagccttgggggactggtttccaatgattcttaggcttctgtcattctttgctgcctatctgctgagagtgccacttgcttact

SEQ ID NO: 749323 - DNA, 120 bp, Artificial Sequence
  ENSG00000205670_0 (sequence is synthesized)
ccccggcaggacggtagaagtcgtggtttgtgcgcggccaggcgctggagcctccgctgccgggagcaatcagaccttccagctgcctctcatgtacttgtctgttgggggcttgtgttg

SEQ ID NO: 749324 - DNA, 120 bp, Artificial Sequence
  ENSG00000205670_1 (sequence is synthesized)
atcaggagtgaattcacagtctaccatgaattggaaggttcttgagcacgtgcccctgctgctgtatatcttggcagcaaaaacattaattctctgcctgacatttgctggggtgaaaat

SEQ ID NO: 749325 - DNA, 120 bp, Artificial Sequence
  ENSG00000205670_2 (sequence is synthesized)
gtatcaaagaaaaaggttggaggcaaaacaacaaaaactggaggctgaaaggaagaagcaatcagagaaaaaagataactgaagattctgccatgtaaatgtcagcttgagtggactcca

SEQ ID NO: 749326 - DNA, 120 bp, Artificial Sequence
  ENSG00000205670_3 (sequence is synthesized)
aagagaagaaagacttaattattgaataatttgtcagaggataaactcccaacctagacctttcacttaaaatagtgtgaatttgtatatgtttttaaaagaaccagtactggccgggta

SEQ ID NO: 749327 - DNA, 78 bp, Artificial Sequence
  ENSG00000205670_4 (sequence is synthesized)
atttgtatatgtttttaaaagaaccagtactggccgggtatgctggcttttgcctgagatcgggagtttgagaccagc

SEQ ID NO: 749328 - DNA, 120 bp, Artificial Sequence
  ENSG00000205670_5 (sequence is synthesized)
tccagcctgggtgacagagcgactgcgtctccaaaaaaaaaaaggtaaaattaaaattaaaaaaaataataataaccagtattttgtttactaaaataaaatgcctttgtaaaaaaagga

SEQ ID NO: 749329 - DNA, 120 bp, Artificial Sequence
  ENSG00000205670_6 (sequence is synthesized)
aaattccaaaagctctttgggatgctgcgatgtcgcggccggccccgcgctcgggttttccctcctagacaaaagtctgccggctcccggtcgcgccgggtcggggatccggaaggtgaa

SEQ ID NO: 749330 - DNA, 120 bp, Artificial Sequence
  ENSG00000205670_7 (sequence is synthesized)
ggccgccaggccccacctgcggggcgcccctgctggacctggccgtcgggcgccgtcaacccgttgagcagcgtgttccggctggcacgtggcccgggcggggcccaggattggttcaag

SEQ ID NO: 749331 - DNA, 120 bp, Artificial Sequence
  ENSG00000205670_8 (sequence is synthesized)
atccgcagctctgggggaagtcggggggtggggagggcgggtgttgctccctgagtgttgggggaagggtatggggagaggaccctgaactagcccccaggttacccaggaggagctgag

SEQ ID NO: 749332 - DNA, 120 bp, Artificial Sequence
  ENSG00000205670_9 (sequence is synthesized)
gcccagagaggttcagcgactcgcccagggttgcacagcgagcacaggcaccgacgtcgccctccgaggcctgggcttccagcagggagagacccggacacctgtcatcgcttctcggtg

SEQ ID NO: 749333 - DNA, 120 bp, Artificial Sequence
  ENSG00000205670_10 (sequence is synthesized)
gggagctggccagtgggttggggtgaccaatcaatgaacaagagaggtctgagacctccctgtccgtcgggtctgaagggctgcgtgggggcatgtggcctcacctgttctctaaggtag

SEQ ID NO: 749334 - DNA, 120 bp, Artificial Sequence
  ENSG00000205670_11 (sequence is synthesized)
aactgctccataaagggccaggtgtgcagatcctggtcctgggatgtgagtgctgctgagccaaggtgcacggagcattagttcatccttcttgaaacctgcggtggcaatggttcttga

SEQ ID NO: 749335 - DNA, 120 bp, Artificial Sequence
  ENSG00000205670_12 (sequence is synthesized)
caggtattgggttaagaattgaggactcagtgacagctgtggaccttcttcccagagaagcacacatactgaaaccatctgcatttgtgtgtggggagaagtttgcagatgtggggagtc

SEQ ID NO: 749336 - DNA, 120 bp, Artificial Sequence
  ENSG00000205670_13 (sequence is synthesized)
acaggtcatttgaaattccaagattaagaaaccctgttacctttaagataaagtctgactccatggtatgacaaataaatcccttcccagtctggtcttaacccagacctcatttgccac

SEQ ID NO: 749337 - DNA, 120 bp, Artificial Sequence
  ENSG00000205670_14 (sequence is synthesized)
atgtgcccactccccatccccctgcaggccattcctcagccaccatggcctttggccttgcttattaggttcttcccaaggacctcctcaccaggcctgagggtacactcatcgttgtca

SEQ ID NO: 749338 - DNA, 120 bp, Artificial Sequence
  ENSG00000205670_15 (sequence is synthesized)
cccagtgcctatcacagtgcacactggtgggcttagaacacacttggggagttacaatacatcaaggcaccagaaagttcctgttaagcccctgttacagatttaacacatgacaattca

SEQ ID NO: 749339 - DNA, 120 bp, Artificial Sequence
  ENSG00000205670_16 (sequence is synthesized)
catgacaattcacagttaccttgattccagtgtgttgatgcagtttcttcactttgcaggttgagttctgtactttaaaaatcaggggattcagccaggtgtggtgactcatgcctgtaa

SEQ ID NO: 749340 - DNA, 68 bp, Artificial Sequence
  ENSG00000205670_17 (sequence is synthesized)
gcctgtaatcccagtgctttgggaggcaaaggtgggaggatcacttgagccaataaaaaaaaaaaaca

SEQ ID NO: 749341 - DNA, 120 bp, Artificial Sequence
  ENSG00000205670_18 (sequence is synthesized)
cctactccccttggagggtccggatggagtttcccctctgcggctgcctctcactcatcctccaccactttgccgacaaggaaggaaggacaatcgggaggagggagtcttgcttggcga

SEQ ID NO: 749342 - DNA, 120 bp, Artificial Sequence
  ENSG00000205670_19 (sequence is synthesized)
ccatctggacaatatctcgcccatggcaagctggatccctgtggattactttgagctaaagacatttcataaaatgggcatgaaggattccttcaaatgaagacgtggacaaaatgattg

SEQ ID NO: 749343 - DNA, 120 bp, Artificial Sequence
  ENSG00000205670_20 (sequence is synthesized)
gttgaatggaggaggattttttttttttttccctcacacaggggttttcttggagctcaagtttggatgaccccagacagtaagataatctcatcatggtaaagttaatatgaaatatgt

SEQ ID NO: 749344 - DNA, 120 bp, Artificial Sequence
  ENSG00000205670_21 (sequence is synthesized)
ggtctccaaacagcctctcccagaggccaggatcagcaggtttgagtggataattggcttgtggtcattttctcataggatttttcttttagtagtggaaactgtttttcaaatcaaatt

SEQ ID NO: 749345 - DNA, 120 bp, Artificial Sequence
  ENSG00000205670_22 (sequence is synthesized)
tggatgccaactatgtggaacagaagtgtggctgctctggtggaagtggcaatggtagtcctagagtctccctgtcagccacaccctttgtctccccctacccaagggaccctgtggcct

SEQ ID NO: 749346 - DNA, 120 bp, Artificial Sequence
  ENSG00000205670_23 (sequence is synthesized)
ggaaccgcagtgtgaaatgctatatagtgcaatgaagtcaattcgaagacaagagttctttgcctttctcatctaatttttagttatggatatgagacgcttgttcagaagtatggaaaa

SEQ ID NO: 749347 - DNA, 120 bp, Artificial Sequence
  ENSG00000205670_24 (sequence is synthesized)
gtatatataatatgttatcttttagatgtgggtgtaaatatgcttatgtatgcaatatgcttatattttaacgcataaacaacatgaataaagcaaacactctagacttctccaaatgta

SEQ ID NO: 749348 - DNA, 120 bp, Artificial Sequence
  ENSG00000205670_25 (sequence is synthesized)
tcccctccccgctgcccactccagcagaggctgccaactgcctgggagagagaagtgggcttcctggggccacctccccaactttggagtgtttggaaggtgatggagcgaccactagga

SEQ ID NO: 749349 - DNA, 120 bp, Artificial Sequence
  ENSG00000205670_26 (sequence is synthesized)
ggcagtgtggacaggtctctgtaggactgctcaggcagacacctttgcagggacctcccaggtcgggagccctccacacttttcccatgggagcttctccctccaccccgagtcactact

SEQ ID NO: 749350 - DNA, 120 bp, Artificial Sequence
  ENSG00000205670_27 (sequence is synthesized)
atctgctttcctagaaggcacttctttacttctaattcttctccactgcccagctcctggtttgttaaggcaaacccccatctctggcttctcctggaacctcacctgggaaagaaagag

SEQ ID NO: 749351 - DNA, 120 bp, Artificial Sequence
  ENSG00000205670_28 (sequence is synthesized)
gcagccccggagctggaagctgcttcagggctcacccggaacagcagactcaacctggacccatccaggcatctcctgggagtttcacccaattgcttctgcctggcaccagctcagagg

SEQ ID NO: 749352 - DNA, 120 bp, Artificial Sequence
  ENSG00000205670_29 (sequence is synthesized)
ataaaaaagaatgaaatcacgtctcttgcagcaacatggacagaactggaggccattattctaagtgaaataattcagaaacagaaagtcagatgccacatgttctcacctttaagtggg

SEQ ID NO: 749353 - DNA, 120 bp, Artificial Sequence
  ENSG00000205670_30 (sequence is synthesized)
ctcacctttaagtgggagctaaataatgtgtacacatgggtacagaatgtaaaataatggacttcgaaagggaggctgagatgggaggaccatttgaggccaggagtttgagacaagcct

SEQ ID NO: 749354 - DNA, 75 bp, Artificial Sequence
  ENSG00000205670_31 (sequence is synthesized)
tgagacaagcctggccaacatggtgaaactgcttctctactaaaatgcaaacaaattagccagacatggtggctg

SEQ ID NO: 749355 - DNA, 120 bp, Artificial Sequence
  ENSG00000205670_32 (sequence is synthesized)
agcctggacaacagagcaagactccgtctaaaaaaagaaaaaaaaagaggataggattagggtgagggatgagaaattatttaatgagtacgatgtacactactacactcaaagcccaga

SEQ ID NO: 749356 - DNA, 120 bp, Artificial Sequence
  ENSG00000205670_33 (sequence is synthesized)
acactcaaagcccagacatcaccactgagcaatcaatccatttgacaaaactgcacacctgcacttgtaccccttaaatttatatacaaacaaaaacaaaggcaaatcaaaaataaaaat

SEQ ID NO: 749357 - DNA, 120 bp, Artificial Sequence
  ENSG00000205670_34 (sequence is synthesized)
aaaacaaaatgatctctaaacaatacaaacagtaactgatgaacctagctgcttatcatgtcagttccaaaatcacacagagttgaatttctttcaaatgaccctacaacacagtatttt

SEQ ID NO: 749358 - DNA, 120 bp, Artificial Sequence
  ENSG00000205670_35 (sequence is synthesized)
gatcatatattctccagtagagtataagctaaggacaaagaaaaacacatgaaatcttaaatggtactcggtagttttattgttaataatgatgctggtattattattttgaaactcatg

SEQ ID NO: 749359 - DNA, 120 bp, Artificial Sequence
  ENSG00000205670_36 (sequence is synthesized)
tgctggtattattattttgaaactcatgtccatttctcagctgccatttgatattaattttttttttttttgaggtggaatttcactatcactcaggctggagtgcagtggtgtgttctc

SEQ ID NO: 749360 - DNA, 77 bp, Artificial Sequence
  ENSG00000205670_37 (sequence is synthesized)
gcctagtgatttttaacctttatcaatctgatagacaaaaagatcatttcattgttttaacttctttaattatgagt

SEQ ID NO: 749361 - DNA, 120 bp, Artificial Sequence
  ENSG00000205670_38 (sequence is synthesized)
gatcatttcattgttttaacttctttaattatgagtaaatctggcaatatattatgaaaacaatgacaagaagaacttgatataaaatgcacaattcagacgtccttgaagatcatttta

SEQ ID NO: 749362 - DNA, 120 bp, Artificial Sequence
  ENSG00000205670_39 (sequence is synthesized)
tgaagtggggggtggcactggtgatgggggctgggtgtggagaaaaccagccaaaggaggactcatgggatcctggagcttttgactggggttcacttggagcccatactcaggctggtt

SEQ ID NO: 749363 - DNA, 120 bp, Artificial Sequence
  ENSG00000205670_40 (sequence is synthesized)
ctgacagcagcacctgccaggcctcagcttaggggcacaatgtgggacacatggactgggggtgtggtcccagagcctaagaggcaccaacagagaggtctccgcagagactcatctgtg

SEQ ID NO: 749364 - DNA, 120 bp, Artificial Sequence
  ENSG00000205670_41 (sequence is synthesized)
ccccccacccaccaccccgggacaggccaagccagcgtctggccaggaactgcttttgcacaaggagccagaagtagtttgccccgataaatgggggcctggactcacgcaaaccattgc

SEQ ID NO: 749365 - DNA, 120 bp, Artificial Sequence
  ENSG00000205670_42 (sequence is synthesized)
accatggatggccagagaaactcagagaaccttcctgtgcttgttaacatactctctcacgtcctctgcagcctctgccaagccaagcagccagctcctaggactcccctccctccacct

SEQ ID NO: 749366 - DNA, 120 bp, Artificial Sequence
  ENSG00000205670_43 (sequence is synthesized)
ggaagccaagccttccaggccccggtgggatgagacttccctgcccccacggttgagaggagccatgggcttattctagccaatgaatggtggatggacgtgactcgtgtctcttccagg

SEQ ID NO: 749367 - DNA, 89 bp, Artificial Sequence
  ENSG00000205670_44 (sequence is synthesized)
caatgaatggtggatggacgtgactcgtgtctcttccaggctggagcatttaattgtccaggtatgtattagtctgttctcatgctgtc

SEQ ID NO: 749368 - DNA, 86 bp, Artificial Sequence
  ENSG00000205670_45 (sequence is synthesized)
cctcaggaaacttacaatcatggcagaaaaggaagcaagcatatccttcttcgcatgatggcaggaaggagaaatacagagcaaag

SEQ ID NO: 749369 - DNA, 120 bp, Artificial Sequence
  ENSG00000205670_46 (sequence is synthesized)
agatcttgtgagaacgcaatcactatcaagagaacagcatggagatgctgggtttttgccttcaagttggctttcttcatggtggcaaaatggatccagcaattctgtcagaggttttcg

SEQ ID NO: 749370 - DNA, 120 bp, Artificial Sequence
  ENSG00000205670_47 (sequence is synthesized)
aagcagagtgactccatcttgattaaaggctgtgtaaaatgaggatgagacttgctggactgcattccaggagggtaggcattcttagtcacagggtgagacaggaggccagcaggattg

SEQ ID NO: 749371 - DNA, 89 bp, Artificial Sequence
  ENSG00000205670_48 (sequence is synthesized)
attcttagtcacagggtgagacaggaggccagcaggattgatatcacaagacacaggtcacaaagaccctgctgataaaacaagatgca

SEQ ID NO: 749372 - DNA, 120 bp, Artificial Sequence
  ENSG00000205670_49 (sequence is synthesized)
cattatatggtaattgtaatgcattagtgtggtaaaagacacttctactaactccatgacagcttacaaatgccatggcaatgtccagaagttaccctatatggtctaaaaggagaacct

SEQ ID NO: 749373 - DNA, 120 bp, Artificial Sequence
  ENSG00000205670_50 (sequence is synthesized)
atatagtctaaaagaactgagggttctgagaaatccctgaccctttcctggaaaatttatgaataatccactccttgtttagcatacaatcaagaaataaccatagtgtactcagtcaag

SEQ ID NO: 749374 - DNA, 120 bp, Artificial Sequence
  ENSG00000205670_51 (sequence is synthesized)
tctgcctatggagtagccattcttttgttctttactttcttaataaacttgctttcattttactttatggacttgccctcaattctttcttgtgcaagattcaagaaccctcccttgggg

SEQ ID NO: 749375 - DNA, 120 bp, Artificial Sequence
  ENSG00000205670_52 (sequence is synthesized)
gaaccctcccttggggtctggatcaggatcccattcccgtaacaatttcaggctcagatcggcttttaacaccatccagagcaagagaaagcttttttgttccagaattccccattaaag

SEQ ID NO: 749376 - DNA, 120 bp, Artificial Sequence
  ENSG00000205670_53 (sequence is synthesized)
ttctcctggtcactcttattgggttgtttcgcttagggtcaggtgtccatcctggtcccaagcaatgaggccaggagatgggatgcaacgactggatcaatctaggcctcttattcccac

SEQ ID NO: 749377 - DNA, 120 bp, Artificial Sequence
  ENSG00000205670_54 (sequence is synthesized)
tttttaaaacacttattattattattttttaaaaattatttttcattcagctttttcatttgaaacttattccaattcttgaactgggggtagtttcaactttcctagagctgtatgggt

SEQ ID NO: 749378 - DNA, 120 bp, Artificial Sequence
  ENSG00000205670_55 (sequence is synthesized)
cctcaaatgaaaattcggggcagctggattagagaagggggaaatgcatgctgcaggggcaaccaacaaggggagattgtgccaattcactcttcctatcctcagattcacctaagttct

SEQ ID NO: 749379 - DNA, 120 bp, Artificial Sequence
  ENSG00000205670_56 (sequence is synthesized)
gaccattcagccccatttgaatgcattctgtattcctatgactgtggattacatttttgtctacctttgtgtcttctgttttgtcctgccctataagcatctcaaacatatgcataaagc

SEQ ID NO: 749380 - DNA, 120 bp, Artificial Sequence
  ENSG00000205670_57 (sequence is synthesized)
ttttgggggatgactgcacactggttctctttttttctcagacctaaatttcgaccactcaactttcagcctgctcacccctgcttattgccatccacctttgggctgggttagacctaa

SEQ ID NO: 749381 - DNA, 120 bp, Artificial Sequence
  ENSG00000205670_58 (sequence is synthesized)
tcctccccttgacaaagccctcaaagtagccttcacaagataagagtcgagacccctaacttaccaacaaattttaatgaaacttctagtaaactcaaagcgctttgccaacatccttag

SEQ ID NO: 749382 - DNA, 120 bp, Artificial Sequence
  ENSG00000205678_0 (sequence is synthesized)
acctttcaaaggttctccagcagtatttaactgatgcaaaaggaacacacttgcaattttctacttttgacatgacagaccctcctcttagttcacacaatgttcaaaaggcacaagtcc

SEQ ID NO: 749383 - DNA, 120 bp, Artificial Sequence
  ENSG00000205678_1 (sequence is synthesized)
ctcgcttcggaacgcaagagagcattactttcccaaagagctacacggttcatactgaaggatgatatgagaaattttcactttttgtcaaaacttgtactctcagcgggccctctaaga

SEQ ID NO: 749384 - DNA, 120 bp, Artificial Sequence
  ENSG00000205678_2 (sequence is synthesized)
ccaactccagcagtcaaacattcaaaaacgactcactttgagattgaaatatttgatgctcaaacaaggaaacagatatgtattctggataaggtgacacaatcatctactattcatgat

SEQ ID NO: 749385 - DNA, 120 bp, Artificial Sequence
  ENSG00000205678_3 (sequence is synthesized)
gttaagcaaaagtttcacaaagcatgtccaaagtggtacccttctcgagttggtctgcagctagaatgtggcgggccttttttgaaggactacattaccattcaaagtattgcagcttcc

SEQ ID NO: 749386 - DNA, 120 bp, Artificial Sequence
  ENSG00000205678_4 (sequence is synthesized)
tccattgtcacactgtatgctacagacctaggtcaacaagtcagttggaccacagtgtttttggctgaatacacaggacctctgctaatatacctcctcttttatttgaggatcccatgt

SEQ ID NO: 749387 - DNA, 120 bp, Artificial Sequence
  ENSG00000205678_5 (sequence is synthesized)
atatatgatggaaaagagagtgctagaagattacgccacccagtggtacacttggcttgcttctgtcattgtatacactacatccgataccttttggaaaccttatttgttcacaaagtt

SEQ ID NO: 749388 - DNA, 120 bp, Artificial Sequence
  ENSG00000205678_6 (sequence is synthesized)
tctgcaggacacacacctttgaaaaatttgataatgagttgtgccttttactggggatttacttcttggattgcctactacattaatcatccactatatacaccaccatcatttggaaac

SEQ ID NO: 749389 - DNA, 120 bp, Artificial Sequence
  ENSG00000205678_7 (sequence is synthesized)
aggcaaatcacagtatctgctatcaattttctgatttgtgaagctgggaatcatttcatcaatgtaatgttgtctcatcccaatcacacaggaaacaatgcctgtttcccaagtccaaat

SEQ ID NO: 749390 - DNA, 120 bp, Artificial Sequence
  ENSG00000205678_8 (sequence is synthesized)
tataaccccttcacatggatgtttttcctggtttcatgtcctaactacacctatgagattggatcatggattagtttcacagtcatgacacaaacactgccagttggaatttttacactt

SEQ ID NO: 749391 - DNA, 120 bp, Artificial Sequence
  ENSG00000205678_9 (sequence is synthesized)
ctgatgagtatccagatgtctttgtgggcacaaaagaaacataagatttatctgagaaaattcaattcatatattcatagaaaatcagcaatgattccattcatattgtaaaaaaagaat

SEQ ID NO: 749392 - DNA, 120 bp, Artificial Sequence
  ENSG00000205678_10 (sequence is synthesized)
cttatctcctatagaaaacagcaacatataaattcaataaataagacttagttaaggatagttaactattatactccaacaattcatgagcaacagtatatacactgagtaaaaatataa

SEQ ID NO: 749393 - DNA, 120 bp, Artificial Sequence
  ENSG00000205678_11 (sequence is synthesized)
aatagtaaaatttcactaaatttagagaaatgcacatggtaataaaaagtataaattataaatgcaattaactaagaacagctctgaatgtatttgcatgggattggtccttgaataaaa

SEQ ID NO: 749394 - DNA, 120 bp, Artificial Sequence
  ENSG00000205678_12 (sequence is synthesized)
ttgtcttacttcattaatacttcacaatactatttgcataagacaaaataccacagcaaaaaaaaaaatctgattaacaaatgaaaaagcgatctgaacagacatttcccaaaggaagac

SEQ ID NO: 749395 - DNA, 120 bp, Artificial Sequence
  ENSG00000205678_13 (sequence is synthesized)
atgaaaaagcgatctgaacagacatttcccaaaggaagacatatacatggtcaataagtatatttttaaaatgctcaacattaactattcatacagaaatgcaaatcaaaaccacaatga

SEQ ID NO: 749396 - DNA, 120 bp, Artificial Sequence
  ENSG00000205678_14 (sequence is synthesized)
gagttcagaagtttgagatctgggcaacatattgagactctgtctctaaaaagcatattgagactctgtctctacaaaaaaattttaaaaagtaaaaattagctgggcgtggtggcacat

SEQ ID NO: 749397 - DNA, 120 bp, Artificial Sequence
  ENSG00000205678_15 (sequence is synthesized)
gggcgtggtggcacatgccagtaggtagtcccagctactcgaggttgctccagctcaggcgttcaaggctacagagagccatgattaaaccaaggcactccagcctgggtgacagagtga

SEQ ID NO: 749398 - DNA, 120 bp, Artificial Sequence
  ENSG00000205678_16 (sequence is synthesized)
aaaataacatattggtgaagatgcgggaaaaaaaaaagaactcttagacactgctggtgggaatgtaaactagagcagccatgtggagaacaacatggactttcttcaaaaattacaaat

SEQ ID NO: 749399 - DNA, 120 bp, Artificial Sequence
  ENSG00000205678_17 (sequence is synthesized)
tttcttcaaaaattacaaatagaactatcatatgatccagcaataccattactggaaaaaggaaatctgtatattaaagagacatttgaaccctatgtttactgcagcactattcacaat

SEQ ID NO: 749400 - DNA, 120 bp, Artificial Sequence
  ENSG00000205678_18 (sequence is synthesized)
aaagaaaatgtggtatatatacacaatagaatactatgcagccataaaaactgaattcctgtcattcaggacaacatggatggaattggagggcatatgttaagtgaaacaagccaggaa

SEQ ID NO: 749401 - DNA, 120 bp, Artificial Sequence
  ENSG00000205678_19 (sequence is synthesized)
gcatatgttaagtgaaacaagccaggaacagaaagttaaacattgcatgttattacttatatgtggaagctaaaaaaattgatatcatagaagtaaaaaataaaacagaggatactacag

SEQ ID NO: 749402 - DNA, 120 bp, Artificial Sequence
  ENSG00000205678_20 (sequence is synthesized)
gctgggaaagctgcagcaaagggagactagagagagatttgttaaaggatacaaagttacagcttggtaggaggaataatttctggtgttctataccactgtaggacgactatagttaag

SEQ ID NO: 749403 - DNA, 120 bp, Artificial Sequence
  ENSG00000205678_21 (sequence is synthesized)
aacattatattccatttagtttcaaatagctaaaaggagattttgtccccaacaaaaagaaatgataaatatttgaaaccatggatactctaatttctctgatctgaccactataaatta

SEQ ID NO: 749404 - DNA, 120 bp, Artificial Sequence
  ENSG00000205678_22 (sequence is synthesized)
ctctgatctgaccactataaattatatgtattgaaacattattatgtatctcccaaatatgttcaattcttatgtcgctcaaaaaataaaatttaatttaaaaagtatctgatttttaaa

SEQ ID NO: 749405 - DNA, 120 bp, Artificial Sequence
  ENSG00000205678_23 (sequence is synthesized)
atttaaattacttgaatctcattattttgacaataatttaattcttttattgttcaatctgttagtgagatgtgtcataggtattatgtcattagttcaaattcttgcggaaattatagc

SEQ ID NO: 749406 - DNA, 120 bp, Artificial Sequence
  ENSG00000205678_24 (sequence is synthesized)
tagttcaaattcttgcggaaattatagctatattaaaagtgtaacatttttatttagttgtgtacttatttgttaataatacagacattgtatgttatcatactgaaatttacaattaaa

SEQ ID NO: 749407 - DNA, 120 bp, Artificial Sequence
  ENSG00000205678_25 (sequence is synthesized)
atatatacacatacacaaatatatgcatatttcaaatggattgtatgcacttgcaaagcaaaagtacattggtaatttgggcacattcagagtggaaaaaatttgttctatttttacatc

SEQ ID NO: 749408 - DNA, 120 bp, Artificial Sequence
  ENSG00000205678_26 (sequence is synthesized)
tttaaatacctatcttctatgaaagcctatgtgcatgtgtgtgtgtgtatgagtttctatgtgagcatgcatatatacttcacaaagagatgacctatataaatcaaagtacacattatt

SEQ ID NO: 749409 - DNA, 120 bp, Artificial Sequence
  ENSG00000205678_27 (sequence is synthesized)
aaggagctctcacatgaccctctcttgcttcctctctctctacatatctttagttaagagtttaggtaagaacgtcctccactgtgttggctttgaaaaggagagatctttttttttgtc

SEQ ID NO: 749410 - DNA, 120 bp, Artificial Sequence
  ENSG00000205678_28 (sequence is synthesized)
ttttcagcatatagtttggcctagcaagaactcattacttgtttgaatagatagcacagattatttatgtatttggaatttcttcaacaatatgttgaaaatatatcacagccttgtaat

SEQ ID NO: 749411 - DNA, 120 bp, Artificial Sequence
  ENSG00000205678_29 (sequence is synthesized)
tttccaattgtgcatactgttcaaggagaggaattctgtgattcacgtgttgtaacagcgttatttaatgttgtatacagcgtactacaacccctgttgtattaagactaatgttctgat

SEQ ID NO: 749412 - DNA, 120 bp, Artificial Sequence
  ENSG00000205678_30 (sequence is synthesized)
ctaaccgtatactaaaggaccaacctaaaaactctattctaaatgacatacataaaggaataagtaaaaaatgaaacaattcattttaaattgctttcatatcatatttctttaaatgtt

SEQ ID NO: 749413 - DNA, 120 bp, Artificial Sequence
  ENSG00000205678_31 (sequence is synthesized)
tatgtaggcctacaagaccaatttgactcatatatttttatttattttgtttctacacgaaccaccaaaaatattagtaggttgtaaacctccaaaaaaacagctaataaaatgaaaaaa

SEQ ID NO: 749414 - DNA, 120 bp, Artificial Sequence
  ENSG00000205678_32 (sequence is synthesized)
ggtggtctcactgcctaagacatcaaaagaaaaagcctgacaaatttacaccatcttgttgtcaatattaatgctacaggtataatcctgtagcagccatgtacacatttttagccttta

SEQ ID NO: 749415 - DNA, 120 bp, Artificial Sequence
  ENSG00000205678_33 (sequence is synthesized)
aaacctaaccttcatttacaggttttaggagttactatacataagtatgtacacatatgcatatgtatatgggtatgtgtgtaaatgtgcacacttacaaactttaatgatactctaaat

SEQ ID NO: 749416 - DNA, 120 bp, Artificial Sequence
  ENSG00000205678_34 (sequence is synthesized)
atctaagtaacttaattttagcttatggagtattttgcaggagcagcattcaacactgcatagattagttgtaagtgtctcaattacatttacatatcagtgtgtttggtggggaaagaa

SEQ ID NO: 749417 - DNA, 120 bp, Artificial Sequence
  ENSG00000205678_35 (sequence is synthesized)
tgtgtttggtggggaaagaagatgaaaaataaaacatttgaatataaaattaaaataaataaaatatgacatttatttatgatagatgtcataatttgatcatattcataggaaaaacat

SEQ ID NO: 749418 - DNA, 120 bp, Artificial Sequence
  ENSG00000205678_36 (sequence is synthesized)
gaaaaatatatacacacattatacaaattaacaataacattactaccacagttacttattgaagtaatatgctgtctttaatatgtttcattataccatgttctctcagagttaacactc

SEQ ID NO: 749419 - DNA, 120 bp, Artificial Sequence
  ENSG00000205678_37 (sequence is synthesized)
tcatcctataaataaaagatatattctcaaattctaaaattcttgtgtgtgtattttcaacagttgttatttttaggtcaagaaaaatattatgacaatattagcaactgttaaattcta

SEQ ID NO: 749420 - DNA, 120 bp, Artificial Sequence
  ENSG00000205678_38 (sequence is synthesized)
tgctttgagacgtataggcctcatttctaatttaataaggtatgtatatatttgatattttcataaaagcaatacagggtttggccaagaagttttgccgtctgtgaaaggcatgcattt

SEQ ID NO: 749421 - DNA, 120 bp, Artificial Sequence
  ENSG00000205678_39 (sequence is synthesized)
gatgctattataagccatattaactggagaacatttctaaaatacctccatttcacatgcaaattttatactctatatattgatggatttgtttatgagattgagagtcagatgtagcaa

SEQ ID NO: 749422 - DNA, 120 bp, Artificial Sequence
  ENSG00000205678_40 (sequence is synthesized)
ttggtgagagaggaaacagttacaaggcagcctctactttttagatagttcgcttgtttaagagacaaaacaagttcaactttaattgaaatattgcatatttgcttgcttaattactgt

SEQ ID NO: 749423 - DNA, 120 bp, Artificial Sequence
  ENSG00000205678_41 (sequence is synthesized)
taaaccttaaattaaatattctttataataagcatgtcttcgaacatgaaataaaattaacaagtctgagagtgaaacttttcccattatgagagacattttagtcagcctcatcacaag

SEQ ID NO: 749424 - DNA, 120 bp, Artificial Sequence
  ENSG00000205678_42 (sequence is synthesized)
aagacttttgctttcctcaaaccatcccatatttctttttgacacttgaaagtatgcctctgcttcctgtatttcttttaaacattctggagcttttgttgttttgttgtaactgttgcc

SEQ ID NO: 749425 - DNA, 120 bp, Artificial Sequence
  ENSG00000205678_43 (sequence is synthesized)
aaatttataattgttagatgacaaatgtccttaacaagtgtttttcagtaattgtgcctaaagaaatacaattataattgccatcaaactaatttggtatgcatgcttttacctcccaaa

SEQ ID NO: 749426 - DNA, 120 bp, Artificial Sequence
  ENSG00000205678_44 (sequence is synthesized)
ccataaattgtcctcttccttcaggacactgtaaaccttgaattagaatcaaatcaacaatttccattattgtaatgtagaaatcagttcattttttaaacacaggaatcaaagactgcc

SEQ ID NO: 749427 - DNA, 120 bp, Artificial Sequence
  ENSG00000205678_45 (sequence is synthesized)
cacaggaatcaaagactgcctggcttacatatcctaaacagttttaatatgaaaaaaagatatataaatgtttagaaaaaaaattagtagaattaattaaaatcaattagaatatgtgta

SEQ ID NO: 749428 - DNA, 120 bp, Artificial Sequence
  ENSG00000205683_0 (sequence is synthesized)
atggcgactgtcattcacaaccccctgaaagcgctcggggaccagttctacaaggaagccattgagcactgccggagttacaactcacggctgtgtgcagagcgcagcgtgcgtcttccc

SEQ ID NO: 749429 - DNA, 120 bp, Artificial Sequence
  ENSG00000205683_1 (sequence is synthesized)
ttcctggactcacagactggggtggcccagaacaactgctacatctggatggagaagaggcaccgaggcccaggccttgccccgggccagctgtatacataccctgcccgctgctggcgc

SEQ ID NO: 749430 - DNA, 120 bp, Artificial Sequence
  ENSG00000205683_2 (sequence is synthesized)
aagaagagacgattgcacccacctgaagatccaaaactgcggctgctggagataaaacctgaagtggagcttcccctgaagaaggatgggttcacctcagagagcaccacgctggaagcc

SEQ ID NO: 749431 - DNA, 120 bp, Artificial Sequence
  ENSG00000205683_3 (sequence is synthesized)
ttgctccgtggcgagggggttgagaagaaggtggatgccagggaggaggaaagcatccaggaaatacagagggttttggaaaatgatgaaaatgtagaagaagggaatgaagaagaggat

SEQ ID NO: 749432 - DNA, 120 bp, Artificial Sequence
  ENSG00000205683_4 (sequence is synthesized)
cagggggcaggaggaggcacgacgccgcctctcaggaagaccacgacaaaccttacgtctgtgacatctgtggcaagcgctacaagaaccgaccggggctcagctaccactatgctcaca

SEQ ID NO: 749433 - DNA, 120 bp, Artificial Sequence
  ENSG00000205683_5 (sequence is synthesized)
ctcacctggccagcgaggagggggatgaagctcaagaccaggagactcggtccccacccaaccacagaaatgagaaccacaggccccagaaaggaccggatggaacagtcattcccaata

SEQ ID NO: 749434 - DNA, 120 bp, Artificial Sequence
  ENSG00000205683_6 (sequence is synthesized)
actactgtgacttctgcttggggggctccaacatgaacaagaagagtgggcggcctgaagagctggtgtcctgcgcagactgtggacgctctggtcacccaacctgcctgcagtttaccc

SEQ ID NO: 749435 - DNA, 120 bp, Artificial Sequence
  ENSG00000205683_7 (sequence is synthesized)
tgaacatgaccgaggctgtcaagacctacaagtggcagtgcatagagtgcaaatcctgtatcctctgtgggacctcagagaatgatgaccagctactcttctgcgatgactgtgaccgag

SEQ ID NO: 749436 - DNA, 120 bp, Artificial Sequence
  ENSG00000205683_8 (sequence is synthesized)
gctatcacatgtactgtttaaatcccccggtggctgagcccccagaaggaagctggagctgccacttatgctgggaactgctcaaagagaaagcctcagcctttggctgccaggcctagg

SEQ ID NO: 749437 - DNA, 120 bp, Artificial Sequence
  ENSG00000205683_9 (sequence is synthesized)
ttcattgcgctccttctcccttcagggcaggcaggagcagggaggcatggaggagggtgcgcttatccagtggctggagtaggccaggggtttgccccctgctctgacagtttctctgga

SEQ ID NO: 749438 - DNA, 120 bp, Artificial Sequence
  ENSG00000205683_10 (sequence is synthesized)
gtgctggtgtgccacctggaagcattcacattcggtcactttattatccagggttgccctgggagtttggcaggagagagggagcaaaatgggagagtgagggaagcatatcactggaga

SEQ ID NO: 749439 - DNA, 120 bp, Artificial Sequence
  ENSG00000205683_11 (sequence is synthesized)
caaccccttctgagaacacaatgatcagcctcctgttcctcactggcttcttctttggacctggatttccacagcagacctggaggccatgctcggggaccagttctacaaggaagccat

SEQ ID NO: 749440 - DNA, 120 bp, Artificial Sequence
  ENSG00000205683_12 (sequence is synthesized)
attctcgtcttcacccctggccactcctggagttgaaaaccaggttcgctcccggggacggtagggggttcctaacgcaaaggaatgcacagggagaatcggacgtgtttgcgccagctc

SEQ ID NO: 749441 - DNA, 120 bp, Artificial Sequence
  ENSG00000205683_13 (sequence is synthesized)
gtcgcccatcagaaatagggaaaggggtaggaaggccccaggtttcaaatatatttatatgaaagctgccgttaagaggacgttggaagctgaggctgatcagataggagctcctggctt

SEQ ID NO: 749442 - DNA, 120 bp, Artificial Sequence
  ENSG00000205683_14 (sequence is synthesized)
cagttctggctcggaagctcggatacactgcgcttgaacgccacagcgtttcacccaagaaagaaaatgttttatggcagaataaatgggcgtaacttcgccgcatcctcgctgccggtt

SEQ ID NO: 749443 - DNA, 120 bp, Artificial Sequence
  ENSG00000205683_15 (sequence is synthesized)
gctttcgctgcaacaccgctgatgctgtttctaccgaacccacaactgattttcagtttccccatttccagccgaaatcacataaccgggctgatgccacctggtaaactcaagttagag

SEQ ID NO: 749444 - DNA, 120 bp, Artificial Sequence
  ENSG00000205683_16 (sequence is synthesized)
tgcgcagactgtggacgctctgctcatttgggaggagaaggcaggaaggagaaggaggcagcggccgcagcacgtaccacggaggacttattcggttccacgtcagaaagtgacacgtca

SEQ ID NO: 749445 - DNA, 120 bp, Artificial Sequence
  ENSG00000205683_17 (sequence is synthesized)
actttccacggctttgatgaggacgatttggaagagcctcgctcctgtcgaggacgccgcagtggccggggttcgcccacagcagataaaaagggcagttgctaaacccacggaacagac

SEQ ID NO: 749446 - DNA, 120 bp, Artificial Sequence
  ENSG00000205683_18 (sequence is synthesized)
tctctgggcaattagccatccccctctgactttggtcattgtgctggttctgatatatattttttttaatgaaaggcaactttagattttccctctatccttgctttttttcccttcacc

SEQ ID NO: 749447 - DNA, 120 bp, Artificial Sequence
  ENSG00000205683_19 (sequence is synthesized)
tcccacgtgtccctccatccctccccccacccctctgttttgggtatgtacaacagaagcacaaactactgaaacaaaacaaaacagcagaatgagcgttcttccgagagatggcatcgt

SEQ ID NO: 749448 - DNA, 120 bp, Artificial Sequence
  ENSG00000205683_20 (sequence is synthesized)
gatgcgctatttattttccatagaaataggaagttagacggattgtctcttttctgaggggagggggtctttttgacaggagcagagttgatgtcctcaattttcatatttattggcaaa

SEQ ID NO: 749449 - DNA, 120 bp, Artificial Sequence
  ENSG00000205683_21 (sequence is synthesized)
aggaagagaagaggaactttgggttggaaacaaagaaccaataacattaaaacattattatttatatattctagctgttattagaatcagactttttttgcgagagagagagagagagag

SEQ ID NO: 749450 - DNA, 120 bp, Artificial Sequence
  ENSG00000205683_22 (sequence is synthesized)
agagaagggaaatcaaagaaatcgaagcaatatcctgtttagaggcaagccgcccggtggggagaatttcctcaatgggagacggttgcactattctgtgccccacggagtttgcggctc

SEQ ID NO: 749451 - DNA, 120 bp, Artificial Sequence
  ENSG00000205683_23 (sequence is synthesized)
agagaagtcggggtgcctatgcctggcctccctccacacctgggccctgaccagccgcctcctgggctcctcctcctccgtcagtagagctgctgttttgttattgctggtttttcctca

SEQ ID NO: 749452 - DNA, 120 bp, Artificial Sequence
  ENSG00000205683_24 (sequence is synthesized)
ctttcctcctggcaaagaacgacttccaaatgcagggatggaatataagcagaacgtcatgggctcagcagtgactccaccacccgaggccgaggccgtgcttctggaagatagaaggag

SEQ ID NO: 749453 - DNA, 120 bp, Artificial Sequence
  ENSG00000205683_25 (sequence is synthesized)
acatcatcgtgtgtttcccctccccttgcccctgttaagaaacgtatcaatacccattggatgatcaaggctaccgtatttcttctatttttttttatagtgcctgccaggcactttgtt

SEQ ID NO: 749454 - DNA, 120 bp, Artificial Sequence
  ENSG00000205683_26 (sequence is synthesized)
ttatgtttccaatagcacttcctgaaataaaccaaagcaacactgctcaaggcccctggggcgatggagaaggccacccacctcactgacagtcccaagaatgaccggctgcgaggtcct

SEQ ID NO: 749455 - DNA, 120 bp, Artificial Sequence
  ENSG00000205683_27 (sequence is synthesized)
agtcaaaagtcaacattatgacctggggactccagcatccttcaagcaagccatttccgaagaaggtgaaaagaagccaggatgattggcacctcctcctcctcctcctcttcttcctct

SEQ ID NO: 749456 - DNA, 120 bp, Artificial Sequence
  ENSG00000205683_28 (sequence is synthesized)
tcccttgcccagccccctcctgtgcgtgtgtttcagacaacacaggagccagcacaggagtggaaaatcctgcagcgcaactcagctcagcccacagaagccttgggaatggcctcagtt

SEQ ID NO: 749457 - DNA, 120 bp, Artificial Sequence
  ENSG00000205683_29 (sequence is synthesized)
tgtgcaataagaagattttttttttctttttaaatcttcattatattttctttgattgtctgtgagaaagtacccaggtccgcctggaattactctacagtagaaataactgaacacaaa

SEQ ID NO: 749458 - DNA, 120 bp, Artificial Sequence
  ENSG00000205683_30 (sequence is synthesized)
caaactgatggaaaaaaagagttaactattttatttatttcaatatttaaaaggaaaaaagtgctgacatggcacagtatttttgtttaaagtacctcctacttcaaaagttaagcgcaa

SEQ ID NO: 749459 - DNA, 120 bp, Artificial Sequence
  ENSG00000205683_31 (sequence is synthesized)
ttttgtgaagacatgaaatcataagagtacttaatgtaaaataaaagactgcatattaactctaaagaaaaatgccccacattttaaataagaaaataaagatcaactctgctctctcag

SEQ ID NO: 749460 - DNA, 120 bp, Artificial Sequence
  ENSG00000205683_32 (sequence is synthesized)
gctttttaaaaagccattcatgtatgtgctttaggtatttttatttctgcgagttggatgtggtaagtgaggagtgctcagtttttttttcctccttcaaaagtctattgaaagtgttgg

SEQ ID NO: 749461 - DNA, 120 bp, Artificial Sequence
  ENSG00000205683_33 (sequence is synthesized)
tgatgttaaatgattgtgtgttaagatttgactgaaataacttagccacaaatcagcagtttcccccaccctcattgccccctcaccccaggcaagccccttttatctgaatgtcagaag

SEQ ID NO: 749462 - DNA, 120 bp, Artificial Sequence
  ENSG00000205683_34 (sequence is synthesized)
cagcctgcctcctagttatcatgtctgatgaggtctagctcaggaaggaattccatctattgatggaatatatcccctcaagttcaatagattcgaacacagagagctttgtttaaaata

SEQ ID NO: 749463 - DNA, 120 bp, Artificial Sequence
  ENSG00000205683_35 (sequence is synthesized)
aaaaaaaaaaaagcaaaaataaaagcatcagctgaggtgatattagttcagtcacctaacaactcctagaagagatgaggaaagggaaccttctgctgagctggcttctggggcctgagc

SEQ ID NO: 749464 - DNA, 120 bp, Artificial Sequence
  ENSG00000205683_36 (sequence is synthesized)
cttctggggcctgagcttccagagctgtccccaagggctaggaaggccgacctgaaggatgagaacctcaaattcagttgctggtgggagccaaggaagacggcgggtgttctaacatgg

SEQ ID NO: 749465 - DNA, 120 bp, Artificial Sequence
  ENSG00000205683_37 (sequence is synthesized)
ccctttctggctgagctggcggaagtgggcgttttggccgatgggatgtatctcggcgctgtgtctgtggcccagcaaaggtgcagggctgactggctgagccactgggttctacccgca

SEQ ID NO: 749466 - DNA, 120 bp, Artificial Sequence
  ENSG00000205683_38 (sequence is synthesized)
ggctccccactgcactgggctttcacacagccatgctcttgggtttccctcccttgtaagcagagtcataataacacacgaatagtctaaggctgggtattctggtcagcagaggtcctt

SEQ ID NO: 749467 - DNA, 120 bp, Artificial Sequence
  ENSG00000205683_39 (sequence is synthesized)
gagtcacagtgttactgaaatggttctgagcctgagaatctctttggcctctgaaagggcagggcaggtgggcaccgacttcctgccagtcctttcaggtttcctgttcaaagccagtcc

SEQ ID NO: 749468 - DNA, 120 bp, Artificial Sequence
  ENSG00000205683_40 (sequence is synthesized)
tgttggtggaggggatcaccgagagtgtctgtatcattttgtagcccttttctctgacgttttctggtagaaaatgtcccttgtcaaaatgctaataattatcataataatctgctttcc

SEQ ID NO: 749469 - DNA, 120 bp, Artificial Sequence
  ENSG00000205683_41 (sequence is synthesized)
aaccaactcccacaagtgacaacctgtgtagaactgtgataaaggtttgcataatgtagggtttgtaccaagtgtgtgtaagtttctgttaaataaaaagtctgtttccaatgctcctat

SEQ ID NO: 749470 - DNA, 120 bp, Artificial Sequence
  ENSG00000205683_42 (sequence is synthesized)
atatttctgaggtggccctttgggagcaaaaagaaacattacatttacaaaagtaaacattttggccccacatagaaaagggcccctaccagcatagtctcttgttagaaaactcttctt

SEQ ID NO: 749471 - DNA, 120 bp, Artificial Sequence
  ENSG00000205683_43 (sequence is synthesized)
aggatgcttgggacgcagctctggtctcagcagaacccagacgagtggctgttgccgacggctggtttgtccctgccagtcattctttctgtgagtggcagcccagaaaggaccggatgg

SEQ ID NO: 749472 - DNA, 120 bp, Artificial Sequence
  ENSG00000205683_44 (sequence is synthesized)
acattgtagcaaaatggcgactgtcattcacaaccccctgaaagcgccctttcaagaatcctatgaaagttgtggatcatctccccggaaaacacgcatatagatgtgaacatctgccta

SEQ ID NO: 749473 - DNA, 120 bp, Artificial Sequence
  ENSG00000205683_45 (sequence is synthesized)
aggcttctccaccatttgctctctgatgttcggtgcgatttctcttctcctcaagacagtgcccctggctcctgcgacaccctcccaatccgggaacaacttaaggaacgccgaggtgcc

SEQ ID NO: 749474 - DNA, 120 bp, Artificial Sequence
  ENSG00000205683_46 (sequence is synthesized)
aagcatgtaacctgagattgatgagcctgtcagcggctccttctgcccccagccttccccctctgccgtgtgctcttcagatggatgagccaggcgggggtgggcaagaacggggagatg

SEQ ID NO: 749475 - DNA, 120 bp, Artificial Sequence
  ENSG00000205683_47 (sequence is synthesized)
tgcgcagactgtggacgctctggtgagtgtggccccttcccacaccgggtgcccgtagaccaggaatgctcctcttgcattcctcttccatcttgtggtgctggagactggagagggaag

SEQ ID NO: 749476 - DNA, 120 bp, Artificial Sequence
  ENSG00000205683_48 (sequence is synthesized)
cgatggtggcaatgctttcgagtggagaggagttttcagctcattctgatatttttcttctttgggtctcaagaaccaaaagttatgccctaggatccgggggaaagggcaaagagaagt

SEQ ID NO: 749477 - DNA, 120 bp, Artificial Sequence
  ENSG00000205683_49 (sequence is synthesized)
aggaagctcccaaattcttttctgacttaacctatcttccgaaggagtcattattgccttcacctcggttcccttccctctcttctgtctgtctatgcaaagtgaatttgttgagcctag

SEQ ID NO: 749478 - DNA, 120 bp, Artificial Sequence
  ENSG00000205683_50 (sequence is synthesized)
gcgtctgctccagctacggccacagggttttggaaaatgatgaaaatgtagaagaagggaatgaagaagaggatttggaagaggatattcccaagcgaaagaacaggactagaggacggg

SEQ ID NO: 749479 - DNA, 120 bp, Artificial Sequence
  ENSG00000205683_51 (sequence is synthesized)
agatcagtccgttggaagccctccaggagcccaccacttagaagagaccgacaaaatgaactctgctgtaaggaaggtgaagggaaaggaggccaaggagtttcaaggctgaaggtgcct

SEQ ID NO: 749480 - DNA, 120 bp, Artificial Sequence
  ENSG00000205683_52 (sequence is synthesized)
tgaagatggaaatcaatgacttagaaaccaattaaacaatccaaatagcaactgataaatggattaaccctctataatgaaattcctctagcttttgtcttccgccttccccaggtaggt

SEQ ID NO: 749481 - DNA, 120 bp, Artificial Sequence
  ENSG00000205683_53 (sequence is synthesized)
tttctattcctggaggcaaagcagaggcatggaggaagtggaggccagagggaatcacattaaagtgggtgaatccgtttatcacttactgtctggatggtatttctgctcacatctctg

SEQ ID NO: 749482 - DNA, 120 bp, Artificial Sequence
  ENSG00000205693_0 (sequence is synthesized)
atgcatgtggcagaggtagcagtgaacgtgatattgctcctaagcatggggtggacatcagactctctctgctcacccacaattttttacagagactgctggatccgtcgcttcccaggt

SEQ ID NO: 749483 - DNA, 120 bp, Artificial Sequence
  ENSG00000205693_1 (sequence is synthesized)
cttctaatcaatctggaggagtctcagaagctgggagcccagttcttgaagtattattctgaaagcactggccagaagtgcagtaggagctgctgtcttcggaaggatgtttcctgtaac

SEQ ID NO: 749484 - DNA, 120 bp, Artificial Sequence
  ENSG00000205693_2 (sequence is synthesized)
ctggctgtcttctaccacagtcctattcatgacaatatcaactgcctccatgttcactgcccaacactggagagctgcatattagagcctggaaccagtgccattttgtacaacataaca

SEQ ID NO: 749485 - DNA, 120 bp, Artificial Sequence
  ENSG00000205693_3 (sequence is synthesized)
gacggtatagatccggatttgctggtttttgaacaatctcccacatatctaaatactcgttcttcatccaatagatgggacagactaaggattctaaaagctatgaatttagataaacaa

SEQ ID NO: 749486 - DNA, 120 bp, Artificial Sequence
  ENSG00000205693_4 (sequence is synthesized)
ttggttgtaaacacaaacagtaccagttattctaaggaattaaccacagatttttgggcaagatttacttccctgaatgagtccattaccacaaagataaataaggtgtcaccaagtact

SEQ ID NO: 749487 - DNA, 120 bp, Artificial Sequence
  ENSG00000205693_5 (sequence is synthesized)
gatttcatcagcaatccagataataagactatttctcctttctttgaacccatagacacaaaactttctcatatgcctgttccacctggactcaacagtagcaaacaattactaaacaaa

SEQ ID NO: 749488 - DNA, 120 bp, Artificial Sequence
  ENSG00000205693_6 (sequence is synthesized)
accaaaggatacaatagcagaaaccacacatctgcaaatgaagatgaggtatctgtgacttcaaagacttggctggtttctgtggccctttgcacctctgtcatctttctcggctgttgt

SEQ ID NO: 749489 - DNA, 120 bp, Artificial Sequence
  ENSG00000205693_7 (sequence is synthesized)
atagtcatcctggcatctggatgctgtggaaagcagcagggccagtataaaccaggacagagaaaatcaggatccttgcaaattaaaaaccgtaaccatatgaaggagaactcttcatag

SEQ ID NO: 749490 - DNA, 120 bp, Artificial Sequence
  ENSG00000205707_0 (sequence is synthesized)
ggccggcgccccgccccctttactgacaggttgcccacctcccccaacgccaccccgcttcgcagtagacggacagaggagtcgtagcggtcgaggcttttgcggctccggcgtgccgga

SEQ ID NO: 749491 - DNA, 120 bp, Artificial Sequence
  ENSG00000205707_1 (sequence is synthesized)
aagtatgttatgcataaaagtggataatttacatgataaatgaaaatggccaattctttaagaggagaagtactaaaactttataaaaatctgctgtatcttggacgagactatccaaaa

SEQ ID NO: 749492 - DNA, 120 bp, Artificial Sequence
  ENSG00000205707_2 (sequence is synthesized)
ggagcagactattttaaaaagcgtttgaagaacattttccttaaaaacaaagatgtgaagaatccagagaagatcaaagaacttattgcacagggcgaatttgtaatgaaagagctagaa

SEQ ID NO: 749493 - DNA, 120 bp, Artificial Sequence
  ENSG00000205707_3 (sequence is synthesized)
gctttgtacttccttaggaaatacagagctatgaaacaacgctattattcagataccaacaaaactaattgatcattactactttaatttagctatcagtgccagctgtttatgtatacc

SEQ ID NO: 749494 - DNA, 120 bp, Artificial Sequence
  ENSG00000205707_4 (sequence is synthesized)
aaatccctgagctgccctactgaactaaataggtttcaacttctgttcatacggagaaagtatcagcaactttatgctcaattttgatacaaacatagcaatttagctatactaccgatc

SEQ ID NO: 749495 - DNA, 120 bp, Artificial Sequence
  ENSG00000205707_5 (sequence is synthesized)
ataaattaatgagcacccaattttgaatgaaaatataatacacttaatcctctaacttaataggacttagccaattatttttagcttatttctccattttactgacaagagaatgccatt

SEQ ID NO: 749496 - DNA, 120 bp, Artificial Sequence
  ENSG00000205707_6 (sequence is synthesized)
taccgaacatttaataagcaaaataatttcttacacacttacttctcttaacttttgaaaggaatcccttattttttcacccaatttggtatattaacagcacatactcaaggttcacta

SEQ ID NO: 749497 - DNA, 120 bp, Artificial Sequence
  ENSG00000205707_7 (sequence is synthesized)
caaaacaaacagttcctggtaatgatttaaatgtagttatagaaataaataatatgtatggagtcattacttctgaccttgaaatagcctgctggtgactggcattaacatacataacta

SEQ ID NO: 749498 - DNA, 120 bp, Artificial Sequence
  ENSG00000205707_8 (sequence is synthesized)
actattcaattatttccattattaatgttgctgctgctacctttgggcctaaaaccaagtcacctgttgtgtatcaattaccttctttgataaaaggaaataaataaataatgttatcct

SEQ ID NO: 749499 - DNA, 120 bp, Artificial Sequence
  ENSG00000205707_9 (sequence is synthesized)
gcttcgcagtagacggacagaggagtcgtagcggtcgaggcttttgcggctccggcgtgccggaaagaaaacgtcaattatgacagcaggtaattttatcggaagtgtttataactatat

SEQ ID NO: 749500 - DNA, 120 bp, Artificial Sequence
  ENSG00000205707_10 (sequence is synthesized)
tttttttgtcataaaggcagatttgttttgcatctacttctaaatatggttttaagtttaagcaaacacgcctttacataatatccacagcaccttttagaaataaaggatacttctaac

SEQ ID NO: 749501 - DNA, 120 bp, Artificial Sequence
  ENSG00000205707_11 (sequence is synthesized)
agggatgacaaactataggacatgatgcctagaagaatcatcatcaggaagcccataaatttgtgttccctcaatgtttcagtaaaaaccaattagaaggtctcaactgaaattagtaat

SEQ ID NO: 749502 - DNA, 120 bp, Artificial Sequence
  ENSG00000205707_12 (sequence is synthesized)
taatccatttatgtgactagataaaacacagaatagggatgattcaaaagcttcattaatttgtttcacaccaacattcacaattggtaagaaaaataagaagtaatcaactgcatgcac

SEQ ID NO: 749503 - DNA, 120 bp, Artificial Sequence
  ENSG00000205707_13 (sequence is synthesized)
caaaagccccaagacagaaatcttaggtattcagtttctttttcacaggcattgctagttcaaaaaccaaaactctgggaatactggcacttagaggaaaaaaaaacttccactgtcatt

SEQ ID NO: 749504 - DNA, 120 bp, Artificial Sequence
  ENSG00000205707_14 (sequence is synthesized)
gaggagaagtactaaaactttataaaaatgtaagtaattatgttgccaattttataaaaatgttattatatgacatggattgtttagaaatatataatctttctttttgaagctgctgta

SEQ ID NO: 749505 - DNA, 120 bp, Artificial Sequence
  ENSG00000205707_15 (sequence is synthesized)
gcagtagacggacagaggagtcgtagcggtcgaggcttttgcggctccggcgtgccggaaacgtacgcgtcctttttcctaagagcgccctaaacaagaattgaaaatgaagcaattcct

SEQ ID NO: 749506 - DNA, 120 bp, Artificial Sequence
  ENSG00000205707_16 (sequence is synthesized)
ggctaaaatattccttaacatgaagatcgctgaggccccaaagactcattagtttcccgaggtcacagactaattttactaaccacacaacctttagaatttcagtctcctcccacatga

SEQ ID NO: 749507 - DNA, 120 bp, Artificial Sequence
  ENSG00000205707_17 (sequence is synthesized)
caagcccgactgagttctctgtaattgtagggcatacctacaccctgttttagcattatgagacctgaaatacttttaaattactggcaccatttctcatctctgaattataagtttata

SEQ ID NO: 749508 - DNA, 120 bp, Artificial Sequence
  ENSG00000205707_18 (sequence is synthesized)
atgctctatcccttccagtgttattgactacatgcattattcatagataagtagtaggactaagctagtctttgtgggttaaagtgttattatccctattgtaacctgtaactattatag

SEQ ID NO: 749509 - DNA, 120 bp, Artificial Sequence
  ENSG00000205710_0 (sequence is synthesized)
aattcatgacaatgagcgtggcgaccaccatgacgaaaataaggaacctgaggagcccggaaggcatgacatcaccgttcctcctcccagctaccgaaggcgccgcgcgctgacctcaca

SEQ ID NO: 749510 - DNA, 120 bp, Artificial Sequence
  ENSG00000205710_1 (sequence is synthesized)
aacacggcttctcctggtacgggctggttacgccctccagctgcgccccctacacgacgacagacgcgtcccccagcccttctcctgtcctaccacttgtggcggccatgaaggggaccc

SEQ ID NO: 749511 - DNA, 120 bp, Artificial Sequence
  ENSG00000205710_2 (sequence is synthesized)
ccagctccctggacaccctgatgtggatctaccacttccacagctccaccgaggtggccctccagcccccgcttctgtcttccctggaactctccgtggccgcagcccatgaatatctgg

SEQ ID NO: 749512 - DNA, 120 bp, Artificial Sequence
  ENSG00000205710_3 (sequence is synthesized)
agcagaggttcagagagctgaagtccctggagccacccgaaccgaagatgcaggggatgctgcctgccccgaagcccaccctggggctggtgttgagagaagccacagccagcctcgtga

SEQ ID NO: 749513 - DNA, 120 bp, Artificial Sequence
  ENSG00000205710_4 (sequence is synthesized)
gcttcggcaccaccttgttagagatctcagccctgtggctgcagcaggaggcgcggcgactagacggcagcgcgggcccagccccagacggcagggatccgggtgcagcgctgagccggg

SEQ ID NO: 749514 - DNA, 120 bp, Artificial Sequence
  ENSG00000205710_5 (sequence is synthesized)
tagcccaagccgcagggcagggggttcggcaagctggggctgcggtgggcgccagcgcccggctcctagtccagggagcatggctatgcctgtgtggacggggtctgcaggggtctgcct

SEQ ID NO: 749515 - DNA, 120 bp, Artificial Sequence
  ENSG00000205710_6 (sequence is synthesized)
cattcctgcgacagtcgcaacagcagctaggcctcggaatccccggagaaccggtgagctcaggacacggggtgagttaggggccagaggcggcggggctagggaggcactgagccggac

SEQ ID NO: 749516 - DNA, 120 bp, Artificial Sequence
  ENSG00000205710_7 (sequence is synthesized)
tgtcccccaagagagctactcgggagacctccaggtgacgtccagcagcagtgaggaggacggcggaccagggactccatccccgtaccagccccacccagcgtccgaataaagcccagg

SEQ ID NO: 749517 - DNA, 120 bp, Artificial Sequence
  ENSG00000205710_8 (sequence is synthesized)
gcggggcgagacagccagagcttttcccggggtctctgggttttggccacgcccccacccttcacactggccacacccccgcgggggctccggcttcacctgcccaggagcggcacgctc

SEQ ID NO: 749518 - DNA, 120 bp, Artificial Sequence
  ENSG00000205710_9 (sequence is synthesized)
agagaagtctctgggattttctgggcaatgaggaacaagaagacggtctgggcgagcaggacgttgatggagaccgtgcatttctggccgccggctggagggagagccagtgagagcggg

SEQ ID NO: 749519 - DNA, 120 bp, Artificial Sequence
  ENSG00000205710_10 (sequence is synthesized)
ccccgcctcccgggagcgagcccgggtttgggggtaggttcggggccactgcttaccctgcgccggcaggaagtaggcgagcagcaccaggcccgagatgagcacacagggcacgatgat

SEQ ID NO: 749520 - DNA, 120 bp, Artificial Sequence
  ENSG00000205710_11 (sequence is synthesized)
gttaatgacgtagaagagcggcttccggcggatgatgagcgagtagatgacgtcagtctcccctgggccgtcggtggcgccaccgtggtggcggcggatcacccccgggcagaagtcgat

SEQ ID NO: 749521 - DNA, 120 bp, Artificial Sequence
  ENSG00000205710_12 (sequence is synthesized)
ggcccactcgccgttctctgcgggacgggggcacggtcagctggctgtcagagcggggcgcccgccgagctgacagcgggctgaagaggaggctgcggctgtctgcaccagggtcatggg

SEQ ID NO: 749522 - DNA, 120 bp, Artificial Sequence
  ENSG00000205710_13 (sequence is synthesized)
caatcgagaatgatttcaggacaggggtaagctaaacccagttgtggaagtcatcctccagtgtcgttggtccggggcaagcccaccgtggaagtcccctctctggaccccgtctagaag

SEQ ID NO: 749523 - DNA, 120 bp, Artificial Sequence
  ENSG00000205710_14 (sequence is synthesized)
cgggtttttctgagcaggcaggggcttcaccagtataggcctctgtgtcgatgtcgatcttgttgatggtcttgccgtcgttgtctacggcaaaagtgaactccacctcttcggcattgt

SEQ ID NO: 749524 - DNA, 120 bp, Artificial Sequence
  ENSG00000205710_15 (sequence is synthesized)
acgtctgagagctgcggagccagggccgggagcccaccccagaagctctgacctgggccccggcctcaggcccagccctggaagctgggatctagcggggccgcgatcccaagcccaccc

SEQ ID NO: 749525 - DNA, 120 bp, Artificial Sequence
  ENSG00000205710_16 (sequence is synthesized)
cttcacccaagcccagcccgcacgcctctgttcccatctgtacctccggccgcgctggagcgtcccacccagtgcctacgcctggctccgcctccagcgcgaagccccgccccgagggcg

SEQ ID NO: 749526 - DNA, 120 bp, Artificial Sequence
  ENSG00000205710_17 (sequence is synthesized)
gtgcttcccggttggccccgccccataaggcccccccccaacaataatcgtccgggcctcggagtagctcttcccaccggaaaataagcgaacagttctgccaatcgaaggggaagtagg

SEQ ID NO: 749527 - DNA, 120 bp, Artificial Sequence
  ENSG00000205710_18 (sequence is synthesized)
tgacctccactgcgcagacgctgcggtagatggccggaggcagccacgtcacggagccgccctcgtagacgagcacgttggcgtcgtaggccactccgaactggccatcaatactgtggg

SEQ ID NO: 749528 - DNA, 120 bp, Artificial Sequence
  ENSG00000205710_19 (sequence is synthesized)
ctcggggaaaccgagctttttgcacaggtctgcaccctctcagagtacccccttccccaaccaagtccagcccgcaccccaggccggcttccctccagcctggcgtctggcccggttctc

SEQ ID NO: 749529 - DNA, 120 bp, Artificial Sequence
  ENSG00000205710_20 (sequence is synthesized)
acttgttttccagcacaatctctggcagccacacgagttctgaagggactcgcagggtttctatacccccaaagtcgtccttgctgtagttgagtcggtaatcctgccaatcctaagggg

SEQ ID NO: 749530 - DNA, 120 bp, Artificial Sequence
  ENSG00000205710_21 (sequence is synthesized)
tgggggatggaaggccgcgtgccctgcatctcccacctggcgctgcctgggaggggtttgggggaaaaggggtgccctggacaagacctcacaccattccccagatttgactcacgattc

SEQ ID NO: 749531 - DNA, 120 bp, Artificial Sequence
  ENSG00000205710_22 (sequence is synthesized)
caatccagacgctagtggtgagagtctcctctttttcattctgcagatgggagatggggatgattgaagtgagatttcagggccagaagtgagctttaggacagagctcagcggttgggg

SEQ ID NO: 749532 - DNA, 120 bp, Artificial Sequence
  ENSG00000205710_23 (sequence is synthesized)
ccagaagtgggatttttggcttaagatgagggtgggggtagcttaccagtgagatgagattcgtcagggtgaccttgaggctgatggtgacagtatcctcaggctcccgcactggccggc

SEQ ID NO: 749533 - DNA, 120 bp, Artificial Sequence
  ENSG00000205710_24 (sequence is synthesized)
ttcctgggtcatagttgttgaagagatggtgataaagacgcagttcctcgttcttccccacacccctgcctgcgatggggtcaagaaggaagggtcattggcaatgaagaggctggagca

SEQ ID NO: 749534 - DNA, 120 bp, Artificial Sequence
  ENSG00000205710_25 (sequence is synthesized)
cctctctcccctctgcctcccctgggtcctcacaggcctctgaggctgtgtactatcagtatctgtctcctaaaccaattatgctgtgcctgggaacgaaatactgtgtctaagtctcca

SEQ ID NO: 749535 - DNA, 120 bp, Artificial Sequence; identical to SEQ ID NO: 645480
  ENSG00000205718_0 (sequence is synthesized)

SEQ ID NO: 749536 - DNA, 120 bp, Artificial Sequence; identical to SEQ ID NO: 645481
  ENSG00000205718_1 (sequence is synthesized)

SEQ ID NO: 749537 - DNA, 120 bp, Artificial Sequence; identical to SEQ ID NO: 645482
  ENSG00000205718_2 (sequence is synthesized)

SEQ ID NO: 749538 - DNA, 120 bp, Artificial Sequence
  ENSG00000205718_3 (sequence is synthesized)
ggacagagctggtgctgagcgtgtgcgcatcccgcttgagcccacccctgggcggtttccagctgtggcaggggggccaaccccaggaatgggttgtcagctcccaccgcccctctctgg

SEQ ID NO: 749539 - DNA, 120 bp, Artificial Sequence; identical to SEQ ID NO: 645484
  ENSG00000205718_4 (sequence is synthesized)

SEQ ID NO: 749540 - DNA, 120 bp, Artificial Sequence; identical to SEQ ID NO: 645485
  ENSG00000205718_5 (sequence is synthesized)

SEQ ID NO: 749541 - DNA, 120 bp, Artificial Sequence
  ENSG00000205726_0 (sequence is synthesized)
gtagagaagagtggaggcgccaggggagggagcgtagcttggttgctccgtagtacggcggctcgcgaggaagaatcccgagcgggctccgggacggacagagaggcgggcggggatggt

SEQ ID NO: 749542 - DNA, 120 bp, Artificial Sequence
  ENSG00000205726_1 (sequence is synthesized)
gtgcggggctgcggctcctgcgtccctcccagcggcgcgtgagcggcactgatttgtccctggggcggcagcgcggacccgcccggagatgaggcgtcgattagcaaggtaaaagtaaca

SEQ ID NO: 749543 - DNA, 120 bp, Artificial Sequence
  ENSG00000205726_2 (sequence is synthesized)
gaaccatggctcagtttccaacaccttttggtggcagcctggatatctgggccataactgtagaggaaagagcgaagcatgatcagcagttccatagtttaaagccaatatctggattca

SEQ ID NO: 749544 - DNA, 120 bp, Artificial Sequence
  ENSG00000205726_3 (sequence is synthesized)
ttactggtgatcaagctagaaactttttttttcaatctgggttacctcaacctgttttagcacagatatgggcactagctgacatgaataatgatggaagaatggatcaagtggagtttt

SEQ ID NO: 749545 - DNA, 120 bp, Artificial Sequence
  ENSG00000205726_4 (sequence is synthesized)
ccatagctatgaaacttatcaaactgaagctacaaggatatcagctaccctctgcacttccccctgtcatgaaacagcaaccagttgctatttctagcgcaccagcatttggtatgggag

SEQ ID NO: 749546 - DNA, 120 bp, Artificial Sequence
  ENSG00000205726_5 (sequence is synthesized)
gtatcgccagcatgccaccgcttacagctgttgctccagtgccaatgggatccattccagttgttggaatgtctccaaccctagtatcttctgttcccacagcagctgtgccccccctgg

SEQ ID NO: 749547 - DNA, 120 bp, Artificial Sequence
  ENSG00000205726_6 (sequence is synthesized)
ctaacggggctccccctgttatacaacctctgcctgcatttgctcatcctgcagccacattgccaaagagttcttcctttagtagatctggtccagggtcacaactaaacactaaattac

SEQ ID NO: 749548 - DNA, 120 bp, Artificial Sequence
  ENSG00000205726_7 (sequence is synthesized)
aaaaggcacagtcatttgatgtggccagtgtcccaccagtggcagagtgggctgttcctcagtcatcaagactgaaatacaggcaattattcaatagtcatgacaaaactatgagtggac

SEQ ID NO: 749549 - DNA, 120 bp, Artificial Sequence
  ENSG00000205726_8 (sequence is synthesized)
acttaacaggtccccaagcaagaactattcttatgcagtcaagtttaccacaggctcagctggcttcaatatggaatctttctgacattgatcaagatggaaaacttacagcagaggaat

SEQ ID NO: 749550 - DNA, 120 bp, Artificial Sequence
  ENSG00000205726_9 (sequence is synthesized)
ttatcctggcaatgcacctcattgatgtagctatgtctggccaaccactgccacctgtcctgcctccagaatacattccaccttcttttagaagagttcgatctggcagtggtatatctg

SEQ ID NO: 749551 - DNA, 120 bp, Artificial Sequence
  ENSG00000205726_10 (sequence is synthesized)
tcataagctcaacatctgtagatcagaggctaccagaggaaccagttttagaagatgaacaacaacaattagaaaagaaattacctgtaacgtttgaagataagaagcgggagaactttg

SEQ ID NO: 749552 - DNA, 120 bp, Artificial Sequence
  ENSG00000205726_11 (sequence is synthesized)
aacgtggcaacctggaactggagaaacgaaggcaagctctcctggaacagcagcgcaaggagcaggagcgcctggcccagctggagcgggcggagcaggagaggaaggagcgtgagcgcc

SEQ ID NO: 749553 - DNA, 120 bp, Artificial Sequence
  ENSG00000205726_12 (sequence is synthesized)
aggagcaagagcgcaaaagacaactggaactggagaagcaactggaaaagcagcgggagctagaacggcagagagaggaggagaggaggaaagaaattgagaggcgagaggctgcaaaac

SEQ ID NO: 749554 - DNA, 120 bp, Artificial Sequence
  ENSG00000205726_13 (sequence is synthesized)
gggaacttgaaaggcaacgacaacttgagtgggaacggaatcgaaggcaagaactactaaatcaaagaaacaaagaacaagaggacatagttgtactgaaagcaaagaaaaagactttgg

SEQ ID NO: 749555 - DNA, 120 bp, Artificial Sequence
  ENSG00000205726_14 (sequence is synthesized)
aatttgaattagaagctctaaatgataaaaagcatcaactagaagggaaacttcaagatatcagatgtcgattgaccacccaaaggcaagaaattgagagcacaaacaaatctagagagt

SEQ ID NO: 749556 - DNA, 120 bp, Artificial Sequence
  ENSG00000205726_15 (sequence is synthesized)
tgagaattgccgaaatcacccatctacagcaacaattacaggaatctcagcaaatgcttggaagacttattccagaaaaacagatactcaatgaccaattaaaacaagttcagcagaaca

SEQ ID NO: 749557 - DNA, 120 bp, Artificial Sequence
  ENSG00000205726_16 (sequence is synthesized)
gtttgcacagagattcacttgttacacttaaaagagccttagaagcaaaagaactagctcggcagcacctacgagaccaactggatgaagtggagaaagaaactagatcaaaactacagg

SEQ ID NO: 749558 - DNA, 120 bp, Artificial Sequence
  ENSG00000205726_17 (sequence is synthesized)
agattgatattttcaataatcagctgaaggaactaagagaaatacacaataagcaacaactccagaagcaaaagtccatggaggctgaacgactgaaacagaaagaacaagaacgaaaga

SEQ ID NO: 749559 - DNA, 120 bp, Artificial Sequence
  ENSG00000205726_18 (sequence is synthesized)
tcatagaattagaaaaacaaaaagaagaagcccaaagacgagctcaggaaagggacaagcagtggctggagcatgtgcagcaggaggacgagcatcagagaccaagaaaactccacgaag

SEQ ID NO: 749560 - DNA, 120 bp, Artificial Sequence
  ENSG00000205726_19 (sequence is synthesized)
aggaaaaactgaaaagggaggagagtgtcaaaaagaaggatggcgaggaaaaaggcaaacaggaagcacaagacaagctgggtcggcttttccatcaacaccaagaaccagctaagccag

SEQ ID NO: 749561 - DNA, 120 bp, Artificial Sequence
  ENSG00000205726_20 (sequence is synthesized)
ctgtccaggcaccctggtccactgcagaaaaaggtccacttaccatttctgcacaggaaaatgtaaaagtggtgtattaccgggcactgtacccctttgaatccagaagccatgatgaaa

SEQ ID NO: 749562 - DNA, 120 bp, Artificial Sequence
  ENSG00000205726_21 (sequence is synthesized)
tcactatccagccaggagacatagtcatggttaaaggggaatgggtggatgaaagccaaactggagaacccggctggcttggaggagaattaaaaggaaagacagggtggttccctgcaa

SEQ ID NO: 749563 - DNA, 120 bp, Artificial Sequence
  ENSG00000205726_22 (sequence is synthesized)
actatgcagagaaaatcccagaaaatgaggttcccgctccagtgaaaccagtgactgattcaacatctgcccctgcccccaaactggccttgcgtgagacccccgcccctttggcagtaa

SEQ ID NO: 749564 - DNA, 120 bp, Artificial Sequence
  ENSG00000205726_23 (sequence is synthesized)
cctcttcagagccctccacgacccctaataactgggccgacttcagctccacgtggcccaccagcacgaatgagaaaccagaaacggataactgggatgcatgggcagcccagccctctc

SEQ ID NO: 749565 - DNA, 120 bp, Artificial Sequence
  ENSG00000205726_24 (sequence is synthesized)
tcaccgttccaagtgccggccagttaaggcagaggtccgcctttactccagccacggccactggctcctccccgtctcctgtgctaggccagggtgaaaaggtggaggggctacaagctc

SEQ ID NO: 749566 - DNA, 120 bp, Artificial Sequence
  ENSG00000205726_25 (sequence is synthesized)
aagccctatatccttggagagccaaaaaagacaaccacttaaattttaacaaaaatgatgtcatcaccgtcctggaacagcaagacatgtggtggtttggagaagttcaaggtcagaagg

SEQ ID NO: 749567 - DNA, 120 bp, Artificial Sequence
  ENSG00000205726_26 (sequence is synthesized)
gttggttccccaagtcttacgtgaaactcatttcagggcccataaggaagtctacaagcatggattctggttcttcagagagtcctgctagtctaaagcgagtagcctctccagcagcca

SEQ ID NO: 749568 - DNA, 120 bp, Artificial Sequence
  ENSG00000205726_27 (sequence is synthesized)
agccggtcgtttcgggagaagaatttattgccatgtacacttacgagagttctgagcaaggagatttaacctttcagcaaggggatgtgattttggttaccaagaaagatggtgactggt

SEQ ID NO: 749569 - DNA, 120 bp, Artificial Sequence
  ENSG00000205726_28 (sequence is synthesized)
ggacaggaacagtgggcgacaaggccggagtcttcccttctaactatgtgaggcttaaagattcagagggctctggaactgctgggaaaacagggagtttaggaaaaaaacctgaaattg

SEQ ID NO: 749570 - DNA, 120 bp, Artificial Sequence
  ENSG00000205726_29 (sequence is synthesized)
cccaggttattgcctcatacaccgccaccggccccgagcagctcactctcgcccctggtcagctgattttgatccgaaaaaagaacccaggtggatggtgggaaggagagctgcaagcac

SEQ ID NO: 749571 - DNA, 120 bp, Artificial Sequence
  ENSG00000205726_30 (sequence is synthesized)
gtgggaaaaagcgccagataggctggttcccagctaattatgtaaagcttctaagccctgggacgagcaaaatcactccaacagagccacctaagtcaacagcattagcggcagtgtgcc

SEQ ID NO: 749572 - DNA, 120 bp, Artificial Sequence
  ENSG00000205726_31 (sequence is synthesized)
aggtgattgggatgtacgactacaccgcgcagaatgacgatgagctggccttcaacaagggccagatcatcaacgtcctcaacaaggaggaccctgactggtggaaaggagaagtcaatg

SEQ ID NO: 749573 - DNA, 120 bp, Artificial Sequence
  ENSG00000205726_32 (sequence is synthesized)
gacaagtggggctcttcccatccaattatgtgaagctgaccacagacatggacccaagccagcaatggtgttcagacttacatctcttggatatgttgaccccaactgaaagaaagcgac

SEQ ID NO: 749574 - DNA, 120 bp, Artificial Sequence
  ENSG00000205726_33 (sequence is synthesized)
aaggatacatccacgagctcattgtcaccgaggagaactatgtgaatgacctgcagctggtcacagagatttttcaaaaacccctgatggagtctgagctgctgacagaaaaagaggttg

SEQ ID NO: 749575 - DNA, 120 bp, Artificial Sequence
  ENSG00000205726_34 (sequence is synthesized)
ctatgatttttgtgaactggaaggagctgattatgtgtaatatcaaactactaaaagcgctgagagtccgcaagaagatgtccggggagaagatgcctgtgaagatgattggagacatcc

SEQ ID NO: 749576 - DNA, 120 bp, Artificial Sequence
  ENSG00000205726_35 (sequence is synthesized)
tgagcgcacagctgccgcacatgcagccctacatccgcttctgcagccgccagctcaacggggctgccctgatccagcagaagacggatgaggccccagacttcaaggagttcgtcaaaa

SEQ ID NO: 749577 - DNA, 120 bp, Artificial Sequence
  ENSG00000205726_36 (sequence is synthesized)
gattggcaatggatcctcggtgtaaagggatgccactctctagttttatactgaagcctatgcaacgggtaacaagatacccactgatcattaaaaatatcctggaaaacacccctgaaa

SEQ ID NO: 749578 - DNA, 120 bp, Artificial Sequence
  ENSG00000205726_37 (sequence is synthesized)
accacccggaccacagccacttgaagcacgccctggagaaggcggaagagctctgttcccaggtgaacgaaggggtgcgggagaaggagaactctgaccggctggagtggatccaggccc

SEQ ID NO: 749579 - DNA, 120 bp, Artificial Sequence
  ENSG00000205726_38 (sequence is synthesized)
acgtgcagtgtgaaggcctgtctgagcaacttgtgttcaattcagtgaccaattgcttggggccgcgcaaatttctgcacagtgggaagctctacaaggccaagagcaacaaggagctgt

SEQ ID NO: 749580 - DNA, 120 bp, Artificial Sequence
  ENSG00000205726_39 (sequence is synthesized)
atggcttccttttcaacgacttcctcctgctgactcagatcacgaagcctttggggtcttctggcaccgacaaagtcttcagccccaaatcaaacctgcagtataaaatgtataaaacac

SEQ ID NO: 749581 - DNA, 120 bp, Artificial Sequence
  ENSG00000205726_40 (sequence is synthesized)
ctattttcctaaatgaggttctagtaaaattacccaccgacccttctggagacgagcccatcttccacatctcccacattgaccgcgtctatactctccgagcagaaagcataaatgaaa

SEQ ID NO: 749582 - DNA, 120 bp, Artificial Sequence
  ENSG00000205726_41 (sequence is synthesized)
ggactgcctgggtgcagaaaatcaaagctgcttctgaactctacatagagactgagaaaaagaagcgcgagaaagcgtacctggtccgttcccaaagggcaacaggcattggaaggttga

SEQ ID NO: 749583 - DNA, 120 bp, Artificial Sequence
  ENSG00000205726_42 (sequence is synthesized)
tggtgaacgtggttgaaggcatcgagttgaaaccctgtcggtcacatggaaagagcaacccgtactgtgaggtgaccatgggttcccagtgccacatcaccaagacgatccaggacactc

SEQ ID NO: 749584 - DNA, 120 bp, Artificial Sequence
  ENSG00000205726_43 (sequence is synthesized)
tgaaccccaagtggaattccaactgccagttcttcatccgagacctggagcaggaagtcctctgcatcactgtgttcgagagggaccagttctcaccagatgattttttgggtcggacgg

SEQ ID NO: 749585 - DNA, 120 bp, Artificial Sequence
  ENSG00000205726_44 (sequence is synthesized)
agatccgtgtggcggacatcaagaaagaccagggctccaaaggtccagttacgaagtgtcttctgctgcacgaagtccccacgggagagattgtggtccgcttggacctgcagttgtttg

SEQ ID NO: 749586 - DNA, 120 bp, Artificial Sequence
  ENSG00000205726_45 (sequence is synthesized)
atgagccgtaggcagcgggctcagggtgtgctcagcagggtcccagcccacggccacacatgctgtctggaaattgtattccttttctaagaaaccaccatttggtattcagtcacaggg

SEQ ID NO: 749587 - DNA, 120 bp, Artificial Sequence
  ENSG00000205726_46 (sequence is synthesized)
atatgggatggcaaagacaggcccctcaaagctcctaggaatcattctcgacaatcctccctgccccgaaacaatttcctgtttcatgaaacaaagctgtgttttcctttgtcctcacta

SEQ ID NO: 749588 - DNA, 120 bp, Artificial Sequence
  ENSG00000205726_47 (sequence is synthesized)
caggtctcattatggcttctagggtcgctgaaatcccatagccctcaacagggtgcagctgggagtctagccccttcccgggcttgagggatgggtctggttactataaaatagatttat

SEQ ID NO: 749589 - DNA, 120 bp, Artificial Sequence
  ENSG00000205726_48 (sequence is synthesized)
aaatgcaatgtctatatttttggagaactcatgtaaccctcctgtttcttacatccaccagtccccaagtagacttcttggcctacaatgcccagtccttggtgtgagtttagaaacaat

SEQ ID NO: 749590 - DNA, 120 bp, Artificial Sequence
  ENSG00000205726_49 (sequence is synthesized)
tatgacggtcctgtcattgcttcagaatcccatctctcctgcagggaaatgctgcctagagctgatcactcggtgagacggtctgatcaggccctggcttagctctttgaagagctggtc

SEQ ID NO: 749591 - DNA, 120 bp, Artificial Sequence
  ENSG00000205726_50 (sequence is synthesized)
tatggaagtttccagcatgtgcaccgttatagccgttccttccccctctaggccttgtattaatatatgtcaatgaaaacacactggtgtattgttgcgtggattcagttctgattccca

SEQ ID NO: 749592 - DNA, 120 bp, Artificial Sequence
  ENSG00000205726_51 (sequence is synthesized)
gcatgcttagaatatggtcacagaaagtcattatctagaaagtcacccctctgctggatcagatcactacaggtcactggaaaggcaactttacaatgttgggtcactgggtctcggttg

SEQ ID NO: 749593 - DNA, 120 bp, Artificial Sequence
  ENSG00000205726_52 (sequence is synthesized)
gcagccatgttggaaaaatctcttttggctcggaggcctgtgatatttcatagcagcagtcgttgctggtgacctgttctgtgcttgaatgtgctgaatcctgattgttgtaggacattt

SEQ ID NO: 749594 - DNA, 120 bp, Artificial Sequence
  ENSG00000205726_53 (sequence is synthesized)
caacagctctttttggtacgttccccaaaaagccatgtcctagatccccaaggcgtgaaaaggaaaaatatcaagctggaggttgggaaagaaaatgaaggcagtccattatgtggtggg

SEQ ID NO: 749595 - DNA, 120 bp, Artificial Sequence
  ENSG00000205726_54 (sequence is synthesized)
tgaaagaccctaggaggatgcaagccccgcacatcccggggcaaagacctaagacacttttccaccctccaccaccccaacctcacataatatgcttgttgcaagagtcaggactttatg

SEQ ID NO: 749596 - DNA, 120 bp, Artificial Sequence
  ENSG00000205726_55 (sequence is synthesized)
actatgtgccaagctgtttggtttgagttctttaatttttttttcccttaaatgccaggagatcatctggttagttagatagtaacttgatttgctaatgaaaagtgggggccgtgtttt

SEQ ID NO: 749597 - DNA, 120 bp, Artificial Sequence
  ENSG00000205726_56 (sequence is synthesized)
gtttgcatgttaatattctcataatcctagtttgttgtggtcatgaaatgtcctttgcatgttctgttggtactggagtctagctttcctgtactagatggtgttctctttgattgtagg

SEQ ID NO: 749598 - DNA, 120 bp, Artificial Sequence
  ENSG00000205726_57 (sequence is synthesized)
tccttagactttaattagggttatcaaagtgctttctaaatgatagcatcagcgttgtggcagagtacctcctttgctgggaactgaatgtgtagtgttatcatttcccatgagagcccg

SEQ ID NO: 749599 - DNA, 120 bp, Artificial Sequence
  ENSG00000205726_58 (sequence is synthesized)
gtcatacttcaagcaatttttttaaaagtgtgtgttggaaaggacaacaaagtttacatttcatacttttaagaaatactttattatttatttattgaagatagtgtagaattttgtatc

SEQ ID NO: 749600 - DNA, 120 bp, Artificial Sequence
  ENSG00000205726_59 (sequence is synthesized)
aagaacaacagacataagtattttttgaaacaagcaaatataccctgtagttagaaactttcaactgaacatgttagagaccaagtttaacttcaggcatgcatttgtttaccatttccc

SEQ ID NO: 749601 - DNA, 120 bp, Artificial Sequence
  ENSG00000205726_60 (sequence is synthesized)
agcagaaaacatggttaaaatactttaagtttatattttttgatgttgttaagaaacttttaaattaaatctataaatagacatgcaactcatgctttcctatttctataaccaacaccg

SEQ ID NO: 749602 - DNA, 120 bp, Artificial Sequence
  ENSG00000205726_61 (sequence is synthesized)
tttgtttagtgtatttatgaaagatatgctaccatggtagaaagaaaagtattcaatgtgtaaatggggtagtgtgggtcaccattccgatctctttttgttttctgtcctgtcttttct

SEQ ID NO: 749603 - DNA, 120 bp, Artificial Sequence
  ENSG00000205726_62 (sequence is synthesized)
tcattgactttatttgcgtgttaatgttggacatcattgttcatgtaggtagcgtatggtatgcacaatgacaaacaatcgttttaggtcccaggtcacccactcatagtgtcctattat

SEQ ID NO: 749604 - DNA, 120 bp, Artificial Sequence
  ENSG00000205726_63 (sequence is synthesized)
tggaattaatgtagcatgagaaagcaatatgtgactctttttcctcaagtgactctgttgagcatccttgagatgctcctgccatgtagcaagttctggattagtgtccttgtatttact

SEQ ID NO: 749605 - DNA, 120 bp, Artificial Sequence
  ENSG00000205726_64 (sequence is synthesized)
ggtgtaatttgtaatgtaaccaattgtccgtatggaggagtcgggctggccctcggacccagctgtgattcatgagttgtgtcacagggattgagaaacatgggtgatgcatggagtctc

SEQ ID NO: 749606 - DNA, 120 bp, Artificial Sequence
  ENSG00000205726_65 (sequence is synthesized)
aaaccattgggcctctctgttccttcacctctaccttcttgaccacctgggctatatttcatagaaattaaatgctccttgccaacaaggagtctgtctcctagctctttgttttctaaa

SEQ ID NO: 749607 - DNA, 120 bp, Artificial Sequence
  ENSG00000205726_66 (sequence is synthesized)
tataggagttctctaggccactgcatcccggcatcctgatcccagccttttagacacccctgcaagcgttcctctgctctgagccacactgctagcttctcctgcacactctgatctcct

SEQ ID NO: 749608 - DNA, 120 bp, Artificial Sequence
  ENSG00000205726_67 (sequence is synthesized)
ttagcccaagaaggggctgtgctggtcatagggttatgctgtaaccctcagtcttccctgagaactgaactatcctgggacctcttgggctgagccttcttcacagagcagttctctaga

SEQ ID NO: 749609 - DNA, 120 bp, Artificial Sequence
  ENSG00000205726_68 (sequence is synthesized)
aggcagagtccacatcctggtccctctggggcagggcctgtctggctgctggcatcaccctggcaggtggatggacagcatcatctcctggaaccaggtttgctgtgaccatgagagcct

SEQ ID NO: 749610 - DNA, 120 bp, Artificial Sequence
  ENSG00000205726_69 (sequence is synthesized)
gaagatgtggctcattcggatccaggcctggactaatctggaaagagggactttctaggtgcaggtcaccagggatgcttgagaaactagagccagacttccttgtttgtttggataata

SEQ ID NO: 749611 - DNA, 120 bp, Artificial Sequence
  ENSG00000205726_70 (sequence is synthesized)
atgtaagaggaggcatttttttcttctttgctttttttaaacaacctaaagtatgacctaagtgtatgaaactaactgatttctttgggtagagtagccctgaatttaactggggaaaaa

SEQ ID NO: 749612 - DNA, 120 bp, Artificial Sequence
  ENSG00000205726_71 (sequence is synthesized)
atcccatcagactatgagtaaattgaccacccacattaagtcttatctcggtgacctggtaccaaagcccaggtgtcctccaggggagtattctggggtggcagggggattaggtgctag

SEQ ID NO: 749613 - DNA, 120 bp, Artificial Sequence
  ENSG00000205726_72 (sequence is synthesized)
cgccagcagggaaggacacttgcaggtctgccttccaaggctaagcaggccggctgtctctccaggaactggctaggacaagtgtaaagccactgaccacacagaaccaggatgttctag

SEQ ID NO: 749614 - DNA, 120 bp, Artificial Sequence
  ENSG00000205726_73 (sequence is synthesized)
aatctgatggggctgaagatgaagggagaaatggacaaggcacttctggctttattgaaaaggtgaagctcttggagtatattttagagtaggccagtaccttgtataagcagaaaaaga

SEQ ID NO: 749615 - DNA, 120 bp, Artificial Sequence
  ENSG00000205726_74 (sequence is synthesized)
cttctctatctccactccaagtcgtttttttctagttgattgggcctttttgattgataagaagaaaatgtgttttgtacgtgtaacaactttaagaatttccattggaaacaaagtatg

SEQ ID NO: 749616 - DNA, 120 bp, Artificial Sequence
  ENSG00000205726_75 (sequence is synthesized)
atttgatttgatttgatttctaagttctcccttccttttcaaggttagcgatgtgctttatagcagacactagcacttttacatgaatacctggtgtgctttggatgtaacagggtcatt

SEQ ID NO: 749617 - DNA, 120 bp, Artificial Sequence
  ENSG00000205726_76 (sequence is synthesized)
ttgggctcgaggtgagtgtgcaattagcagcaggtctgcttggtccagatatgcttgtttacaagtttagagcatcctatgccagaaagtgagatgaaaacaaaggcacctggattgctt

SEQ ID NO: 749618 - DNA, 120 bp, Artificial Sequence
  ENSG00000205726_77 (sequence is synthesized)
tgttttgcttttagataaaagagctttagctcacaccaggcagaagcataaccagtagccccagaaaccggtagcatgatgaagccctcagacagtatagtctgagccaccataagaggc

SEQ ID NO: 749619 - DNA, 120 bp, Artificial Sequence
  ENSG00000205726_78 (sequence is synthesized)
attagggaaaactaacacctccttctttttgcaccgtggggtgctgaaattcctgctagagacttccccttacttccatgaatggcccaggggctgcttagtatatcattagaatgttca

SEQ ID NO: 749620 - DNA, 120 bp, Artificial Sequence
  ENSG00000205726_79 (sequence is synthesized)
ttctcctccttttccctggagtggaccagtgagaccaaatgcttgtgtttctctatgttttcagttcatttgttcaaatgacccagaagatgaatccatttctgggaaggctgagctcag

SEQ ID NO: 749621 - DNA, 120 bp, Artificial Sequence
  ENSG00000205726_80 (sequence is synthesized)
atgaggattgctaggccagcctaggttctggggcggatctcagggacagaaacaggcttgtattaagtatgagtggcaggtacttctctagaacagccctaacctgcactagtgaggggg

SEQ ID NO: 749622 - DNA, 120 bp, Artificial Sequence
  ENSG00000205726_81 (sequence is synthesized)
gctcaggaattcccatgacattgatctagcagcctcctgcacgtagacactcagttcattttagggacgttcaatgcttgatcaaatggggggcattttctttctttctttttttcccca

SEQ ID NO: 749623 - DNA, 120 bp, Artificial Sequence
  ENSG00000205726_82 (sequence is synthesized)
gctacagtgtaattgcctacctgcctgggccccttctagaggaaggtgggctttccttgtccgtcaggctgcactcatgaggtgatatcgtaaagcagcagaaagactgagggtgcaaag

SEQ ID NO: 749624 - DNA, 120 bp, Artificial Sequence
  ENSG00000205726_83 (sequence is synthesized)
aaaccacagctgccattcacggggcagctccctctagctcttctgcccagtgaccttacaggctttagaggagcctgatgagagctatcctgggggccaagggatgcattccctgcagct

SEQ ID NO: 749625 - DNA, 120 bp, Artificial Sequence
  ENSG00000205726_84 (sequence is synthesized)
tcctcctgggggacccacaggtcagcccattccaggagaagcagtcttaggcccgtttgcatcccctgccactgccatgtgcctgccagcccggtttctgatgaagacgtggctcagtcc

SEQ ID NO: 749626 - DNA, 120 bp, Artificial Sequence
  ENSG00000205726_85 (sequence is synthesized)
ctgctctccttgtcgcagtggcttgtacttcatgtgcagtagcccagggcccgccttctagagtgaatgtttccctcgagcccttggatatttttattctattttgaatggttccgatca

SEQ ID NO: 749627 - DNA, 85 bp, Artificial Sequence
  ENSG00000205726_86 (sequence is synthesized)
cccttggatatttttattctattttgaatggttccgatcaattaatgttgctttgtgtggggttcttcagagaaataatgcaaac

SEQ ID NO: 749628 - DNA, 81 bp, Artificial Sequence
  ENSG00000205726_87 (sequence is synthesized)
gtccttctcaaaacaaacaaaaaaagagctaatgcagacctcttctggttagacctgacacggaggaagtaattggctggt

SEQ ID NO: 749629 - DNA, 120 bp, Artificial Sequence
  ENSG00000205726_88 (sequence is synthesized)
cttctggttagacctgacacggaggaagtaattggctggtcaacttaatggcgccccacagcttcctctggatcctgcttctttgtacttggaacacagtttatttgagctagaggaaag

SEQ ID NO: 749630 - DNA, 120 bp, Artificial Sequence
  ENSG00000205726_89 (sequence is synthesized)
gaaagttctagaattcctgtttcctcagcctgcactgtatcagatccaggatatgtctgcatttcatcaggatcaagtaagatacataaccttatatctgtaggagccagaaaaaaaaaa

SEQ ID NO: 749631 - DNA, 120 bp, Artificial Sequence
  ENSG00000205726_90 (sequence is synthesized)
atctattcctgataggcatggaaacttagtccacatgaaagacagaagacatctaacagctgtctgtcttgggagcattaaaacccagacaccaagacacactagacagtccatctctgg

SEQ ID NO: 749632 - DNA, 120 bp, Artificial Sequence
  ENSG00000205726_91 (sequence is synthesized)
gttgtgatctctcagaaacatcttagtagttaatgcactgttcatttagggagtccccatcctggtccaggccaccctcctagaagctgggcggcagctggacgggcctgccttggtggc

SEQ ID NO: 749633 - DNA, 120 bp, Artificial Sequence
  ENSG00000205726_92 (sequence is synthesized)
attcaagcaagcctaattggattaggttggtgcaaaagtgattgcggtttttgccattgcttttgatggcaaactaactttaagtcattaaaataagacccaacgcttataaaagagttc

SEQ ID NO: 749634 - DNA, 120 bp, Artificial Sequence
  ENSG00000205726_93 (sequence is synthesized)
atatccacctcccaataacttctttagttccatgcagcctcaatcagttcctccattcaaaggaaccctctttaccctggccctgggggagccatattacacccacatcataatttttct

SEQ ID NO: 749635 - DNA, 120 bp, Artificial Sequence
  ENSG00000205726_94 (sequence is synthesized)
gacactatgtgtgcttgtcaaatttcagggtcagtttccccttattggatgtcaggggtgttttgtgagttgtgttttaataggattctgttcgattttctataccagcctatattgtta

SEQ ID NO: 749636 - DNA, 120 bp, Artificial Sequence
  ENSG00000205726_95 (sequence is synthesized)
ctatcatctgcctagtatgaatattttagtattcaaagcccaccagataaagctgtgttcagaagtggactttttggtcagccttgaaaaaaaaaaaatcagcatttctctgatatttcc

SEQ ID NO: 749637 - DNA, 120 bp, Artificial Sequence
  ENSG00000205726_96 (sequence is synthesized)
tgaggattaaccagaaactaaggtttctttttaggcagtggtaagaatgcgtattttcttcttccagaagttctggttttatacttttatcttttgaaagaataacattcctgtgcgact

SEQ ID NO: 749638 - DNA, 120 bp, Artificial Sequence
  ENSG00000205726_97 (sequence is synthesized)
ctgcttctcttcgcttttgcatttctcttttttaactcaaatctcttatttcctgccgttcctgtatctaaacagaatgggggcctcaggcagacaggaaccaaagaaagggtgtagtgg

SEQ ID NO: 749639 - DNA, 120 bp, Artificial Sequence
  ENSG00000205726_98 (sequence is synthesized)
ctttgcagcgttgggtgagcagcagccgctgccattctgtgcactgtcaccggcgggggtggagggtctccctgtaggaggaggaaactcgctgttttcactggcagatttcaaggtgcc

SEQ ID NO: 749640 - DNA, 120 bp, Artificial Sequence
  ENSG00000205726_99 (sequence is synthesized)
ggctccacctaccgcagctgctaggcattgctcttgtgtagatcgcagaaggagttattggtgatgtggggtgtaggggaagacaggaaaacggactcagagctaggaatgtgggcctgg

SEQ ID NO: 749641 - DNA, 120 bp, Artificial Sequence
  ENSG00000205726_100 (sequence is synthesized)
cagagaccgaaggctgggtgggaaggaagctcgcggcgagcctagggttcaagcctagcgcgccaggggtctccagtgagaccttgctcttccctgccgctgaggctggggctgcacgga

SEQ ID NO: 749642 - DNA, 120 bp, Artificial Sequence
  ENSG00000205726_101 (sequence is synthesized)
ggtcctcaggcttcccaccctttctgcatcagctttagtgtctgtcggctgggtggactgcagggcaggtgacctggaggaggccctgctccccagcaagcgttctaggagttacggtgt

SEQ ID NO: 749643 - DNA, 120 bp, Artificial Sequence
  ENSG00000205726_102 (sequence is synthesized)
gctctattgggattggattacagtctctacttgtagactttgacttctggaattttaggtggaagggaatttttgttggtgggacgcagcagctcagtgcgtggtgtgtgcatgcgtgtt

SEQ ID NO: 749644 - DNA, 120 bp, Artificial Sequence
  ENSG00000205726_103 (sequence is synthesized)
tgtgcgtgcgtgtgcatgtatgtgtttgtgcgtgcacgtgtgcgtgtgtgtgcatgggtttgcgtgcatgcatgtgtgtgcgtgcgcgtgtttgtgtgtgcatgtgtgtgtgtctacgtg

SEQ ID NO: 749645 - DNA, 120 bp, Artificial Sequence
  ENSG00000205726_104 (sequence is synthesized)
tgtgtgcacgcatgtgtgtgcgtgtatgtgtgcgtgtgtgcatgtttgtgagtgcatgtgtttgtgcgtgtgtgcgtatttgtgtgtgtgcgtgtgtgtgcgtgtgtatgtgcgtgtatg

SEQ ID NO: 749646 - DNA, 120 bp, Artificial Sequence
  ENSG00000205726_105 (sequence is synthesized)
catgtgcatgtttgtgtgtgcgtgcatatgtgtatgtgtgtgcgcgtgcgtgtgcgtgcatgtgtgcgcatgcgtgtgtacctacccacacctagggggatgcatggctctgtgccttgg

SEQ ID NO: 749647 - DNA, 120 bp, Artificial Sequence
  ENSG00000205726_106 (sequence is synthesized)
agagggaaacaggaaatacgttgctccacagtcctgtcatcctggtcaggactagtcgcgtggtttgcggacagagtgcaaaatgaaaatgcgaggccccttgttcaggtgatgaagcat

SEQ ID NO: 749648 - DNA, 120 bp, Artificial Sequence
  ENSG00000205726_107 (sequence is synthesized)
ttctagacagtgagaggagagcattaagccaagctcaggtcccttctgagtgcatagccccttgtggctgccaggcagcacacccaggaggccggccctgaccacactgttctctgctgg

SEQ ID NO: 749649 - DNA, 120 bp, Artificial Sequence
  ENSG00000205726_108 (sequence is synthesized)
ttcccgaagctgatgggctctgtcttaggtcttcttactttgaaaggtctcccggcaggctgtggcaagctgcgcggatacacttttctaaacgtctgcatttatttcctaaaagcacaa

SEQ ID NO: 749650 - DNA, 120 bp, Artificial Sequence
  ENSG00000205726_109 (sequence is synthesized)
atggcctggactagctagtgggtgtggaaccgagcccctagttcacagctgtaccccaaggctggagagggggttgccggtggtggcaggagctctgggctcccagttcaggatgggcca

SEQ ID NO: 749651 - DNA, 120 bp, Artificial Sequence
  ENSG00000205726_110 (sequence is synthesized)
cagggcgtcaagcagctgtgagcctttaccattgagctcactgcttggaaataaaacccttcctctgggccttgggcatccactgggagcttttctcccctttcctgggaggacagcaag

SEQ ID NO: 749652 - DNA, 120 bp, Artificial Sequence
  ENSG00000205726_111 (sequence is synthesized)
ccttttccaaccttctgccttcaaagagaagcagggtcatagaagtgctcagtgtcccttccccagtggctggacacttgctcctccagccttcaccccctggagagaaggggagtctgc

SEQ ID NO: 749653 - DNA, 120 bp, Artificial Sequence
  ENSG00000205726_112 (sequence is synthesized)
ggagccagtgcctccctgcccagctgggccacacgatctggtctgcgggtgtctgggaggaacctgcttcggagaggctgcgacctcccagctagactctccccttaggatcccatgtat

SEQ ID NO: 749654 - DNA, 120 bp, Artificial Sequence
  ENSG00000205726_113 (sequence is synthesized)
ggggatggtaggagagaaaagatccctctgtgtaagtagcctcaagttctagaagaccatggccccgggaggcagctgaccatgaagctgggcttcctgttgttgctttctttcacgagc

SEQ ID NO: 749655 - DNA, 120 bp, Artificial Sequence
  ENSG00000205726_114 (sequence is synthesized)
ttttacttttcctgggctggacgctccaaaatgtttgcagttccatttgctttttgcaagtaggtccccatctccatatacattgagcaataatcctcactatgtttcctgattctgtct

SEQ ID NO: 749656 - DNA, 120 bp, Artificial Sequence
  ENSG00000205726_115 (sequence is synthesized)
gggattatatttgctaagtaaaaatgttgacagaaattgcaaactcatctcacctggatttgattgagtcaccttgaatgacataacaaattatggctttgttttcatgcgtcatgcaat

SEQ ID NO: 749657 - DNA, 120 bp, Artificial Sequence
  ENSG00000205726_116 (sequence is synthesized)
cttccggactacgggaagttctgcaagtgttctccaggggcatttcattaatagcgtgtcagcattagttttaatgaatgaacatttgaggtacattctataaatcaatatccttaaaat

SEQ ID NO: 749658 - DNA, 120 bp, Artificial Sequence
  ENSG00000205726_117 (sequence is synthesized)
gtcatctgctaaacattcactgtgacagaaagtagatattttagcaagatctatgttaatgctacttaattttagacatgcatttaaagcctacatggccaatagcccaagtatctttga

SEQ ID NO: 749659 - DNA, 120 bp, Artificial Sequence
  ENSG00000205726_118 (sequence is synthesized)
actgtgaaatcaacctcagatctcatctgctgtagccccgcaagccggagtctgtgccctccatgacccttcttatcccttggtggccctgcatagataggggagttggcccctgcccac

SEQ ID NO: 749660 - DNA, 120 bp, Artificial Sequence
  ENSG00000205726_119 (sequence is synthesized)
cccgtgttgtattgccttagctccatcagctttgtaccctcacacgtataggtggtgaacttatgtgtaaatacatgtgtacagatgagaaactgcaacaaaaatgtcctgtggatgata

SEQ ID NO: 749661 - DNA, 120 bp, Artificial Sequence
  ENSG00000205726_120 (sequence is synthesized)
atcagctcagtttccggttttctacattctgtgctgtttccagctaagaaaaaggcgaactcccactatataaagggaaaaggttgtattcatttcatgttcctcatgaaatctctgctg

SEQ ID NO: 749662 - DNA, 120 bp, Artificial Sequence
  ENSG00000205726_121 (sequence is synthesized)
tatgtttatggaatggccatgactaaatgtatatatggtatgtaagaggccatgctgttaaatgttgcataaactaacacagattctgtagtcaaaaatatttaacttgttattgtaaaa

SEQ ID NO: 749663 - DNA, 120 bp, Artificial Sequence
  ENSG00000205726_122 (sequence is synthesized)
tgtgatttgtcattgagagattatttttctgtatgtatatgagagtattttaggaatctaatttaagtgcataaaactatagaaaaaaatttaaaacctattccaagagtagaaaatgct

SEQ ID NO: 749664 - DNA, 120 bp, Artificial Sequence
  ENSG00000205726_123 (sequence is synthesized)
taatgagattacttgggttcaactcaactaaatttcttatattaaaaaaaaattccaagttgtatatgttagaaatcaaatgagtcattttttttcctgcaggaaatatgataaatttca

SEQ ID NO: 749665 - DNA, 120 bp, Artificial Sequence
  ENSG00000205726_124 (sequence is synthesized)
gtgtaatggatggtggcgtgatcaaatgaaaagtatcctgtagctatgacctcgcatgggaccttggtgttgcattaaaaatggatttttgcagatcacatatctgagagggtacttgtg

SEQ ID NO: 749666 - DNA, 120 bp, Artificial Sequence
  ENSG00000205726_125 (sequence is synthesized)
tcaggaaggatgagaggatagggagcctgtttttcatcagatccatgtgccacgcaggcttccttgggttctagtggatttgttagggatctggggctgacgcagctatcccactagaga

SEQ ID NO: 749667 - DNA, 120 bp, Artificial Sequence
  ENSG00000205726_126 (sequence is synthesized)
ggccactctctgacttccaggtcgccctttctacttctgtatctggattgattcagtttatccctaattagcgtttgcgttttccatgaaatttcctgatgcatcctcactgtcttcaac

SEQ ID NO: 749668 - DNA, 120 bp, Artificial Sequence
  ENSG00000205726_127 (sequence is synthesized)
tgttgcatagccaggtgggtggatggatggtttagggtttctgagttaagccgttttggggcaggcttctggatgcccatgtttccatggagaccccagggggaagatgccttcctcccg

SEQ ID NO: 749669 - DNA, 120 bp, Artificial Sequence
  ENSG00000205726_128 (sequence is synthesized)
tctgcattcccagaaaaggatcagaagtccaggctgcttctggggcacagactttctgtacttggccaccagaagtgccccttaggccacctaaggaggattctgtgaaactcaatgtct

SEQ ID NO: 749670 - DNA, 120 bp, Artificial Sequence
  ENSG00000205726_129 (sequence is synthesized)
aaacccctgagaaaggcattcagaaatgatttcaggagggggcaaccccaggagtccagcctcccctggcagcctggaaatactgcagtaacaaaaagagctggtttctggtgatctgaa

SEQ ID NO: 749671 - DNA, 120 bp, Artificial Sequence
  ENSG00000205726_130 (sequence is synthesized)
tgcattgtgtttgggggtgacaccgctggtggaaggttgagggcctgtggtctgaaaagacatctgaagaatgtgttaggttttcaacatttctttgaacaggctgcgtgcatcttaatg

SEQ ID NO: 749672 - DNA, 120 bp, Artificial Sequence
  ENSG00000205726_131 (sequence is synthesized)
ctgtcaaccagcaactggagccccttttttgagaggcccgaaccagtaaagctgctgacttcaggagtatgggaagctgtgatttctggaagcttcctggaatctatttaggtgcatgaa

SEQ ID NO: 749673 - DNA, 120 bp, Artificial Sequence
  ENSG00000205726_132 (sequence is synthesized)
taatctgcaaatcacttagaggcactgtccatgtggtccataactggctttattcccaaagatggagctgttcagagatttctttgttcaggcgcagccttggaaggccacctaaggcct

SEQ ID NO: 749674 - DNA, 120 bp, Artificial Sequence
  ENSG00000205726_133 (sequence is synthesized)
gccagcagaggagatgagctctggtctaccaaccccaaacaggccctgactctccttccttagaacgatgccctctggctggggtggcaagagggctgtgagtggaaacaagtcagccag

SEQ ID NO: 749675 - DNA, 120 bp, Artificial Sequence
  ENSG00000205726_134 (sequence is synthesized)
tcaactgtcccttgggccttggttgtttcaaaaaagtctggggacaagaaaagctagaacatggggccctcccttcccaggagtgctagcgaaccctcccagatagcctttgcctgtttg

SEQ ID NO: 749676 - DNA, 120 bp, Artificial Sequence
  ENSG00000205726_135 (sequence is synthesized)
gaaaagaatgtaatccatcagaacgtgagctccttgtgcttccagtgacaagcgggccacagtgctggtggcatgttgcttccctcacagccctgcccaggggtaggaccaggcccgccc

SEQ ID NO: 749677 - DNA, 120 bp, Artificial Sequence
  ENSG00000205726_136 (sequence is synthesized)
cttgatggatgtgctgttgattgtaatatacttctgttgccaaataatggtactgtttaattttccataaaagagagactatattgtctgatatgtaatgttaatggaattctaagaatt

SEQ ID NO: 749678 - DNA, 120 bp, Artificial Sequence
  ENSG00000205726_137 (sequence is synthesized)
actagacactattataaattgtagacttacgtatttgtctaaaggtttgatgaagcagggccaaaacattgtttcttcttttttgtttgaaagaagctgaggtttgtttttgctgtttga

SEQ ID NO: 749679 - DNA, 120 bp, Artificial Sequence
  ENSG00000205726_138 (sequence is synthesized)
gtgttcctttggcaacttattatgtgtgaaatgttaaattttaccgattaagatgatggtaactgagacctttctttaaaccagtagcaacatcagtacaaattgctcttcctgtgtatc

SEQ ID NO: 749680 - DNA, 120 bp, Artificial Sequence
  ENSG00000205726_139 (sequence is synthesized)
ttgaacctaaaaagaacaatctcttcaaaaacaaaaacaaaaacaaaaaacaactctttggtcattttgacctgtgtggtttaaattcaaatagttcatgaataaaaggagaaaagccaa

SEQ ID NO: 749681 - DNA, 120 bp, Artificial Sequence
  ENSG00000205726_140 (sequence is synthesized)
ccctgccatgatttgcacctgatattcagggatcactctcaaaatgtgagccataaagaagaaggctgtgtcgttgggagtgagaatctgcagcaacaacatagaaataagcccctgccg

SEQ ID NO: 749682 - DNA, 120 bp, Artificial Sequence
  ENSG00000205726_141 (sequence is synthesized)
ggctcccagtggtttctgaggaaaatgggcttctctttctactgtacttggcagctagaaaagctattgagtcctttagtcacttcaaagtagcactttagccattgggtgctactgtgc

SEQ ID NO: 749683 - DNA, 120 bp, Artificial Sequence
  ENSG00000205726_142 (sequence is synthesized)
tggggtgggtggtgaatgaggccccacccttggcctcagggcattctgggtaattatgggaggggtgtgacagaaggtgccaggagtgggcaaggagcggacttcgtggagggaagttgg

SEQ ID NO: 749684 - DNA, 120 bp, Artificial Sequence
  ENSG00000205726_143 (sequence is synthesized)
taagtaagtttcacgggatgacaagggagtctgcagcccactgagggctcaaggatcagccaggcccttgaatgccgtgtctgcctggtagctctgggaacgggcgattcagggagcctt

SEQ ID NO: 749685 - DNA, 120 bp, Artificial Sequence
  ENSG00000205726_144 (sequence is synthesized)
ttttagtttgattttactacataaattttccttcttggcgtgtcagtaaataagaaggagcatttttagttagcacatcaagcattcttgaaggcataaagaatggaattctaatgggga

SEQ ID NO: 749686 - DNA, 120 bp, Artificial Sequence
  ENSG00000205726_145 (sequence is synthesized)
aataatcctgtcatcttacgtaaatatagtattatgtaaatataatacccagttctgtgtattccctttattcccatagaaggaatactgtatttttatgtaattttttgttttctaatg

SEQ ID NO: 749687 - DNA, 120 bp, Artificial Sequence
  ENSG00000205726_146 (sequence is synthesized)
ctagatggtcagacaatgactttgtgaagaggctggaaggctttggcctccacttttggaaataaacaattgttgggaaacagtgaagcatccagccctcctgctgtgctgcctcagggc

SEQ ID NO: 749688 - DNA, 120 bp, Artificial Sequence
  ENSG00000205726_147 (sequence is synthesized)
cctttgtggctgtgtgtgcttgtctggcctgtgcttgttggagaggtgccatgctcacgtctgccctaattgataacaaagcgcaacataacgagaggtcctttatgttattccacacaa

SEQ ID NO: 749689 - DNA, 120 bp, Artificial Sequence
  ENSG00000205726_148 (sequence is synthesized)
ttcccatccaattatgtgaagctgaccacagacatggacccaagccagcaatgaatcatatgttgtccatccccccctcaggcttgaaagtcctcaaagagacccactatcccatatcac

SEQ ID NO: 749690 - DNA, 120 bp, Artificial Sequence
  ENSG00000205726_149 (sequence is synthesized)
tgcccagagggatgatgggagatgcagccttgatcatgtgacttccagcatgatcacctactgccttctgagtagaagaactcactgcagagcagtttacctcattttaccttagttgca

SEQ ID NO: 749691 - DNA, 120 bp, Artificial Sequence
  ENSG00000205726_150 (sequence is synthesized)
tgtgatcgcaatgtttgagttattacttgcagagataggagcaaaaattacaaaaacacacagggtagtgggtccttttgtggctttcctagttactcaaattgactttcccccaccttt

SEQ ID NO: 749692 - DNA, 120 bp, Artificial Sequence
  ENSG00000205726_151 (sequence is synthesized)
gcacaggtgctttcaatagttttaaaattatttttaaatatatattttagctttttaataaacaaaataaataaatgacttctttgctattttggttttgcaaaaagacccactatcaag

SEQ ID NO: 749693 - DNA, 120 bp, Artificial Sequence
  ENSG00000205726_152 (sequence is synthesized)
gaatgctgcatgtgctattaaaaattgttccaaatgtccataaatctgagacttgatgtattttttcattttgtccagtgttaccaactaaattgtgcagtttggggcttttccccctta

SEQ ID NO: 749694 - DNA, 120 bp, Artificial Sequence
  ENSG00000205726_153 (sequence is synthesized)
ccatagaagtgcagaggagttcagtatctctgttttaaagacgtatagaatgagcccaattaaagcgaaggtgtttgtgcttgtttgtgtgtatcagctgtaccttgttgagcatgtaat

SEQ ID NO: 749695 - DNA, 120 bp, Artificial Sequence
  ENSG00000205726_154 (sequence is synthesized)
acatcctgtacataagaaattagttctttccatggcaaagctattaccttgtacgatgctctaatcatattgcatttaattttattttgcacagtgaccttgtagccacatgagaaagca

SEQ ID NO: 749696 - DNA, 120 bp, Artificial Sequence
  ENSG00000205726_155 (sequence is synthesized)
ctctgtgtttttgttcggtctcagatttatctggttgagttggtgttttgtttggggtttttaattttgcgtgtttgcatagcataaaatcagtagacaacaccactgaggtcgttacga

SEQ ID NO: 749697 - DNA, 120 bp, Artificial Sequence
  ENSG00000205726_156 (sequence is synthesized)
tcaacgatatccacagtctctttttagtctctgttacatgaagttttattccagttacttttcatggaatgacctattttgaacaagtaattttcttgacaagaaagaatgtatagaagt

SEQ ID NO: 749698 - DNA, 120 bp, Artificial Sequence
  ENSG00000205726_157 (sequence is synthesized)
ctccctgcaattaatttccaatgtttacattttttaactagactgtggaatttctacagattaatatgaaatggagctcatggtccgtttgtgtgttagatatgctgtagctgaagccct

SEQ ID NO: 749699 - DNA, 120 bp, Artificial Sequence
  ENSG00000205726_158 (sequence is synthesized)
gtttgtcttttaaacactagttggaagctctcaataaaaatgcctgctgctcacagcacagaaaatggggcagggggagcctcaagcacaatctagctgtcctcctaaagactctgtaat

SEQ ID NO: 749700 - DNA, 120 bp, Artificial Sequence
  ENSG00000205726_159 (sequence is synthesized)
gctcactcccctcgcgttctcccggcgctgtcgggaggctgtgctggtggtcgtgtagaggtccttctcctttcacatggtgcagagagcgaggacctctcctcctcgttcagttgcact

SEQ ID NO: 749701 - DNA, 120 bp, Artificial Sequence
  ENSG00000205726_160 (sequence is synthesized)
tcagtattttcacggatatgaatgtaaaatatataaatatataaacctgcggctttaacaactgtaatacaaccttttgaattagttccgtgtatagataattaaattcttcatacaaaa

SEQ ID NO: 749702 - DNA, 120 bp, Artificial Sequence
  ENSG00000205726_161 (sequence is synthesized)
cgcggacccgcccggagatgaggtttaagctgtcaccttcccaaatgcggcatctgtgtagccccagagggagcattctaaaaggcagcacttagatgagttgatcccttcacaccccac

SEQ ID NO: 749703 - DNA, 120 bp, Artificial Sequence
  ENSG00000205726_162 (sequence is synthesized)
ttcgggagaagggctctggaactgctgggaaaacagggagtttaggaaaaaaacctgaaattgcccaggttattgcctcatacaccgccaccggccccgagcagctcactctcgcccctg

SEQ ID NO: 749704 - DNA, 120 bp, Artificial Sequence
  ENSG00000205726_163 (sequence is synthesized)
ccggaccccctgcagtgttccacctcgaggcttttgcccatgctgcgccctcggcctggagtgcccttcctccgaagccctagctgtcaaagtccttctcatccttcaaggcccatctca

SEQ ID NO: 749705 - DNA, 120 bp, Artificial Sequence
  ENSG00000205726_164 (sequence is synthesized)
gagggttggtgcagaagtacccacagcagaatagatcatgtgtcccaccagtggcagagtgggctgttcctcagtcatcaagactgaaatacaggcaattattcaatagtcatgacaaaa

SEQ ID NO: 749706 - DNA, 89 bp, Artificial Sequence
  ENSG00000205726_165 (sequence is synthesized)
agactgaaatacaggcaattattcaatagtcatgacaaaactatgagtggacacttaacagatggagcttcactcttgttgcccaggcc

SEQ ID NO: 749707 - DNA, 120 bp, Artificial Sequence
  ENSG00000205726_166 (sequence is synthesized)
tagtaggaactcctttttagtatatttcattctgccaggtggtacacttggttgtttttatctctgtcttccccattacttgtgaattacctgctagtaatactgcccatctttatagtg

SEQ ID NO: 749708 - DNA, 120 bp, Artificial Sequence
  ENSG00000205726_167 (sequence is synthesized)
ctttgtggttaataaagtgcttttccctaaattatctgggggaggcagagactgtttttttcatctgtaatctcatggggcagtgcatgtagatgtacaataaatggtaattacaatgaa

SEQ ID NO: 749709 - DNA, 120 bp, Artificial Sequence
  ENSG00000205726_168 (sequence is synthesized)
aatgtcattttgaagcaagccttgttatgtgtgtcttggttggctggcagtatgggaatccagtgcaggagccagaaatctgctgtgaatagttgggagttgggggtgggggtgggacac

SEQ ID NO: 749710 - DNA, 120 bp, Artificial Sequence
  ENSG00000205726_169 (sequence is synthesized)
agtcaacttctcctgcctgggttgatgaaggaagcttcattgcagaagtggcacttgagctgcatcttgaccagtgggtaagatcttactagaaaatggagagagcctgcctgtcagaca

SEQ ID NO: 749711 - DNA, 120 bp, Artificial Sequence
  ENSG00000205726_170 (sequence is synthesized)
gaaactgctgggaaggctcgaaggcagacagtcagaatgtatttaaggaaaatcacatacccctccatttgtctagaccattgagttttttttggaaaaggtagaccaattaaaggttaa

SEQ ID NO: 749712 - DNA, 120 bp, Artificial Sequence
  ENSG00000205726_171 (sequence is synthesized)
cctgggatgtaaagtaatcaaaatgaaagcagagatgcaggccgccagtcaggggaaaaggaagaaacttacagtccgctgctgcagcttctgggtttttttttttttttctcttccatt

SEQ ID NO: 749713 - DNA, 120 bp, Artificial Sequence
  ENSG00000205726_172 (sequence is synthesized)
atccttcaggttgttgcatacttccttttgattttcggtttccataatgtctgtttctccttgtgcataaacaattcctttggattatggcatctagaaatatatatattttgaatcaca

SEQ ID NO: 749714 - DNA, 120 bp, Artificial Sequence
  ENSG00000205726_173 (sequence is synthesized)
tcaatacattggttttgatgtgttcatctgtgaacctgggaggcgcctgcatcttcttggccttttctcctgctgactcttaacagtgcactgccgtgtttgatcttgtttttcagaaat

SEQ ID NO: 749715 - DNA, 120 bp, Artificial Sequence
  ENSG00000205730_0 (sequence is synthesized)
ctgtgcgcatgctgggcttgggtcgccgccggggcttgccccctgggctgctcggccaccgccgccccgggcgcccggcatgtcggtgcactacaccctcaatctacgcgtcttctggcc

SEQ ID NO: 749716 - DNA, 120 bp, Artificial Sequence
  ENSG00000205730_1 (sequence is synthesized)
cctggtgaccggcctgtgcaccgccctggtgtgcctctaccatgtcctgcggggaagcgggggcgcccgggccgagcccgccgacggcgtggatggcggcttcccgttgcttaaggtggc

SEQ ID NO: 749717 - DNA, 120 bp, Artificial Sequence
  ENSG00000205730_2 (sequence is synthesized)
cgtcctgctcctcctcagctatgtcctcctgcgctgtcgccacgctgtccggcagcgcttcctgcccgggtctccccgtctggagggtcacgccgccttctcctcgagacacttccgaga

SEQ ID NO: 749718 - DNA, 120 bp, Artificial Sequence
  ENSG00000205730_3 (sequence is synthesized)
gccgggcctcagcatcctgctggagagttactacgagcatgaggtgcgcctgtctccgcacgtgttgggccacagcaaggcgcacgtgagccggatcgtgggcgagctggtgcgggctgg

SEQ ID NO: 749719 - DNA, 120 bp, Artificial Sequence
  ENSG00000205730_4 (sequence is synthesized)
ccgcgcccgggggtcccccggtctcattcctgggggagcgctggccttggccttccgcggagacttcatccaggtgggcagcgcctacgagcaacataaaatccgccggcccgacagctt

SEQ ID NO: 749720 - DNA, 120 bp, Artificial Sequence
  ENSG00000205730_5 (sequence is synthesized)
cgacgtgctggtgccactgcgcctcccgccgcttgtggcgctggagccacggagcctgggcgaggagccagcgctggccccggccttccgcggctgcttcttgtgcgccctcaaggcacc

SEQ ID NO: 749721 - DNA, 120 bp, Artificial Sequence
  ENSG00000205730_6 (sequence is synthesized)
accctcaccatcgggggcctcggggggccactggcttcgggactgcaaaccctttgctgatgccttctgcgtggatgtgcgcgggcggcgtcacctctctgctactctggtgctgcgctg

SEQ ID NO: 749722 - DNA, 120 bp, Artificial Sequence
  ENSG00000205730_7 (sequence is synthesized)
gttccagtcgcatctgcagcgctccttggccactgtgcgttacagcctggaggggcgctgtcgggtcaccttgaccccaggtggcctggaacagccccccaccttacacatcttgccctg

SEQ ID NO: 749723 - DNA, 120 bp, Artificial Sequence
  ENSG00000205730_8 (sequence is synthesized)
ccgcactgactacggctgctgccgcctttctatggctgtgcgtctcatccccgctgtccatctgggagatggggtcttccttgtggcgccaccaccgccacccttgcccagcgcgcccct

SEQ ID NO: 749724 - DNA, 120 bp, Artificial Sequence
  ENSG00000205730_9 (sequence is synthesized)
gttggagctccctgagggcctgcgtgcggaggcactgtggggtgtgaacacagcacgccaggagcagaagctgctgagttggctgcaggaacgggcagctccaggtgcctgctacctcaa

SEQ ID NO: 749725 - DNA, 120 bp, Artificial Sequence
  ENSG00000205730_10 (sequence is synthesized)
gtgcctgcagttgcttaaggctctgcgcgatctgggggcccgtgggctggactcagcggccgccacccagtggggacgcatcctatcctcatatgtgctcaagacagtgctgctggcagt

SEQ ID NO: 749726 - DNA, 120 bp, Artificial Sequence
  ENSG00000205730_11 (sequence is synthesized)
gctgctgcgcaagggggcccctgggcaaggctgggacgaggagcacctgggaaggtgtttggaggagttggtgcagttccttagggactgcctgctgcgacgccatacgctcttccactg

SEQ ID NO: 749727 - DNA, 120 bp, Artificial Sequence
  ENSG00000205730_12 (sequence is synthesized)
cgtcctgggccctggtggggcggctgccgaggtgggtcccctgcccaaggcactgagggaagccgccccagttgacctcctggccgctttcgacgggcacgcccgggaacttgcagcagc

SEQ ID NO: 749728 - DNA, 120 bp, Artificial Sequence
  ENSG00000205730_13 (sequence is synthesized)
gcggttgctgtccacgtggcaaaggctgccccagcttctccgggcctacgggggtccccgctaccttgccaggtgccccccaccccggagtcagcgcacccagggcttccttgaaggtga

SEQ ID NO: 749729 - DNA, 120 bp, Artificial Sequence
  ENSG00000205730_14 (sequence is synthesized)
accgtaaaccctgacagcacccccacctgaccaaatgctcctaaagcctttcccactgggtgggggtgggaatggcggtgaagccagttaaatgcaagattgcagaaggcattggaaaat

SEQ ID NO: 749730 - DNA, 120 bp, Artificial Sequence
  ENSG00000205730_15 (sequence is synthesized)
ttggtggctgccacaagctttagtggcttaaatatcaccttctcgcttcacagtccagtataatatgacatcttcacacccactagagtgtcctgggcaaaccatgggaagacatccaac

SEQ ID NO: 749731 - DNA, 120 bp, Artificial Sequence
  ENSG00000205730_16 (sequence is synthesized)
aggagacccaagaattggttcaaatattgttctgtgtagacggattctgtagaaggatgtggcttttagagaagtccagtagaagaagcaagaactagctgcagggaaagttccttctgt

SEQ ID NO: 749732 - DNA, 120 bp, Artificial Sequence
  ENSG00000205730_17 (sequence is synthesized)
cggtttttagacacagatctctctgcccaaattaaaaaaaaacaaaacaaaacactaaagtttttgacacaattacttgctaggtactgggttcctgattgtctttaaaaagaaaaatct

SEQ ID NO: 749733 - DNA, 120 bp, Artificial Sequence
  ENSG00000205730_18 (sequence is synthesized)
gaatctttatttgcaactggaattgaagttctattttaggggctaatgtttagaggaacataatttccactgttcaaattaatattaatgtatttttaaaatggtgcaatcacaggtgtt

SEQ ID NO: 749734 - DNA, 120 bp, Artificial Sequence
  ENSG00000205730_19 (sequence is synthesized)
tgacaagattgtcaacaagttaagtcacatagatggaaaggcaatcgagagttggttagagaagcttccagagaaaatagcactttatattgatcaattcactcattttgtggtaattgc

SEQ ID NO: 749735 - DNA, 120 bp, Artificial Sequence
  ENSG00000205730_20 (sequence is synthesized)
tagcaccaagcattgcatctgaaagggaagccagttatatttattattaaatgtacaaccttgaaaagcagccagcatgcttgcctaactaacatcgccgcaggccacaagctgggatat

SEQ ID NO: 749736 - DNA, 120 bp, Artificial Sequence
  ENSG00000205730_21 (sequence is synthesized)
gtacctgtccgtcaacatccattcattaaactacctactaccagccagagatgtctggaaccaaagtagcaaccaaatacatattcaagacaacactggtgaaggcataaaacatgttgg

SEQ ID NO: 749737 - DNA, 120 bp, Artificial Sequence
  ENSG00000205730_22 (sequence is synthesized)
ctttggagaaagatgtgttttaggctttgcctgtaaaggtgtttctccaaggctggctgctggctggagacagaaaacttttttgttttaaggtttttagcaaactccttcacaaagaga

SEQ ID NO: 749738 - DNA, 120 bp, Artificial Sequence
  ENSG00000205730_23 (sequence is synthesized)
tttctttctgagcttaatgagctaatgaagaggaaatgcctgctgcttagcatgtggtttgtgctgggtctctaaccattgatggttcttccttgtccaggcagtcttacgtggtccaag

SEQ ID NO: 749739 - DNA, 120 bp, Artificial Sequence
  ENSG00000205730_24 (sequence is synthesized)
agacctgttgattcagcacaggtcttgcaaaacatttcacttatagttcagtatcttgggctctgtgcttgaagatcagttactccctggtcgtgggcagaggagacaaattaggaaaag

SEQ ID NO: 749740 - DNA, 120 bp, Artificial Sequence
  ENSG00000205730_25 (sequence is synthesized)
agcaagggagacagcccttgacggcagtctgtctcttttctctttaggtgtcagtatcaccaggttgggtgtattttgcagctgggaggagccggtcctggaattcttccttgttctccc

SEQ ID NO: 749741 - DNA, 120 bp, Artificial Sequence
  ENSG00000205730_26 (sequence is synthesized)
aaatttataacagtcctcaattgcagtttaagttcagcatggcccctcatctgcttgcctgattggaaatgcagccagtccaagtgttacaaattgggatttttttgttttctaaataaa

SEQ ID NO: 749742 - DNA, 120 bp, Artificial Sequence
  ENSG00000205730_27 (sequence is synthesized)
aacatgtacttcctcagactcttaaagctaaaatttggaagacagaaatgcctatgtgaatagaatcattgttgaagttctgagctcttttgagggaactctataagccttctttcttta

SEQ ID NO: 749743 - DNA, 120 bp, Artificial Sequence
  ENSG00000205730_28 (sequence is synthesized)
ggggatccacttgcctgctgtgggaaatcatagtgagtgatttacaggaatccttctcctccaagctgcattggcttcttatatcctttgcgaccttgggctgaaagagaaacagctgca

SEQ ID NO: 749744 - DNA, 120 bp, Artificial Sequence
  ENSG00000205730_29 (sequence is synthesized)
aatgttgtgctgtctctttgaggttgtcttggggacagttccccgcaaaggtcattcctagcttttgaggtcaatgttgggtcataaggtactgcattgtgcaaagaagtcagtctgcta

SEQ ID NO: 749745 - DNA, 120 bp, Artificial Sequence
  ENSG00000205730_30 (sequence is synthesized)
ttaaaataaatgccaagagtagatcttatatatatatatatgtatacatattttatatatatatatatttccatactcaaccacaacttcctctgtactcattgtttactacagtggggg

SEQ ID NO: 749746 - DNA, 69 bp, Artificial Sequence
  ENSG00000205730_31 (sequence is synthesized)
ccacaacttcctctgtactcattgtttactacagtgggggacatcaagggttggaaggattataaagct

SEQ ID NO: 749747 - DNA, 84 bp, Artificial Sequence
  ENSG00000205730_32 (sequence is synthesized)
actccagcctgggtgacctttaaaaagctgaattttagaaatatttctagcagtgtcagtgagttcctcttttaatagtgtttt

SEQ ID NO: 749748 - DNA, 120 bp, Artificial Sequence
  ENSG00000205730_33 (sequence is synthesized)
ttctagcagtgtcagtgagttcctcttttaatagtgttttaaagtataaatctggtaacatactgttcttgtagttttttgttagttttgtttttcaggttaattacccaaagcctcatc

SEQ ID NO: 749749 - DNA, 120 bp, Artificial Sequence
  ENSG00000205730_34 (sequence is synthesized)
catcctcaaggtttttaaattttatttttttaaaataaattgtgcattgtatttgtgaatttttaaaatattactgttttatttaaatgccatgctgagcaattgttctctgtacatggt

SEQ ID NO: 749750 - DNA, 120 bp, Artificial Sequence
  ENSG00000205730_35 (sequence is synthesized)
aaccaaaacttagagatttcgatcaattttgatcaatgtttagtaaaccaaaacatgtactgtgtacaacggaaataatatggcatattagccaggcatgatggttgcccaagacagtta

SEQ ID NO: 749751 - DNA, 120 bp, Artificial Sequence
  ENSG00000205730_36 (sequence is synthesized)
aattaagctcaattctgtattttattagggctctgttatgtccttcatctgaaatgtacacatttttggtgtatgcttggtactggagattcatatatgcaaatattctcatgcaagaag

SEQ ID NO: 749752 - DNA, 120 bp, Artificial Sequence
  ENSG00000205730_37 (sequence is synthesized)
ttccacagtaacaacagcaaaaagaaaaaattagttgtccagccagtgctggaggaaaatgtttctggggaagatgactcagtcattttgtggcgagacaccctttggtaactcccactg

SEQ ID NO: 749753 - DNA, 120 bp, Artificial Sequence
  ENSG00000205730_38 (sequence is synthesized)
accagtcttgggagccttcctggaatgatcgtgggctgagcggagatgttttttgcaaaatgaaactgaagctgaaagaaaggagaattcgagtgaaccaagagaaatccaaagacctgg

SEQ ID NO: 749754 - DNA, 120 bp, Artificial Sequence
  ENSG00000205730_39 (sequence is synthesized)
ggaaggaggacttaagatgaaagtgaagcaagagagggaaggggaaatgaagtgaaaatggcgtgagggtgtgagagaggtttgggttaggaaacatgtttttagtgctatttccaacca

SEQ ID NO: 749755 - DNA, 120 bp, Artificial Sequence
  ENSG00000205730_40 (sequence is synthesized)
ggggtcgcaaactcagcagcctgtagaaacaggggtgggaggtgggggggaagctgtgcccacctttaaagagggggccattgctcagccatgcagaaaaaaatggggcaacaagctgga

SEQ ID NO: 749756 - DNA, 120 bp, Artificial Sequence
  ENSG00000205730_41 (sequence is synthesized)
aatcaggttttttttttttaaagtgaaacttgatgatttttaaacaagtaattaaaaaaatgtccaaaacaccatgtgggccaaacatttgtttgagcctgggggccaccagtttgcgac

SEQ ID NO: 749757 - DNA, 120 bp, Artificial Sequence
  ENSG00000205730_42 (sequence is synthesized)
cactgccttacgtagttaacaccctgagtatgtatacagtcatattttttgttttggatatggtagtgttatatatacttgggggcgtgatatttgaagtcatctttatctctcagagtt

SEQ ID NO: 749758 - DNA, 120 bp, Artificial Sequence
  ENSG00000205730_43 (sequence is synthesized)
aagctttattgtagaagaaaaaaaaaaaagttaacacagccatagataacacttaactcacagttcccaggaggacacttgatctcgaagctgctctttttgagtcagatcctacatcaa

SEQ ID NO: 749759 - DNA, 120 bp, Artificial Sequence
  ENSG00000205730_44 (sequence is synthesized)
accacttagggccagtttttggcatttccttcctggtgatttggggtaaacttctttgctctgtcggagtttgcagatgagtaatcagaaggattgcagaataacttgtttctttgtatt

SEQ ID NO: 749760 - DNA, 120 bp, Artificial Sequence
  ENSG00000205730_45 (sequence is synthesized)
ttattcttacatttaaattaattttggggggttagtggtatcctagctcgtgcctttacagggatgattggtggctagatttggggtgcaagcttcttaggctcataccatttcaactac

SEQ ID NO: 749761 - DNA, 67 bp, Artificial Sequence
  ENSG00000205730_46 (sequence is synthesized)
ttggggtgcaagcttcttaggctcataccatttcaactaccaagaacacaggtttttgtttttgttg

SEQ ID NO: 749762 - DNA, 89 bp, Artificial Sequence
  ENSG00000205730_47 (sequence is synthesized)
ctagctgggaccacaggtatgtgccactacacccagcgaatttttaaattatttgtagagtcagggtctccctatgttgcccaggctgg

SEQ ID NO: 749763 - DNA, 90 bp, Artificial Sequence
  ENSG00000205730_48 (sequence is synthesized)
ggcctcccaaagtgttgggattataggcgcgagccaccacacctggcctaaaagcgtcgttctgatcagacttcacccctgaatgtttcc

SEQ ID NO: 749764 - DNA, 120 bp, Artificial Sequence
  ENSG00000205730_49 (sequence is synthesized)
ttcttttctttttttttttttttcgagacagagttttgctcttgttttacaggctggggtgcggtgggatgatcttggctcactgcaatctcctcctcccaggttcaagtgattcttggg

SEQ ID NO: 749765 - DNA, 80 bp, Artificial Sequence
  ENSG00000205730_50 (sequence is synthesized)
gagccaccgcggccggcctctatcattttctgactcagcagctccaccaaaattgacatcctagcaaacactgtgaagga

SEQ ID NO: 749766 - DNA, 120 bp, Artificial Sequence
  ENSG00000205730_51 (sequence is synthesized)
gctccaccaaaattgacatcctagcaaacactgtgaaggaattaacctaagtgcttccagagcatctcatgtaacctctatggagtaagtcactttttctgtaacatgtggcttttgacc

SEQ ID NO: 749767 - DNA, 120 bp, Artificial Sequence
  ENSG00000205730_52 (sequence is synthesized)
ttgatgaagactttgacttctcatccctgtctacatggaggaagatgattcagtggtggggaaaatgaacctcggtaacatttccaatgtccttcaagagggaaacaagttcagtgttat

SEQ ID NO: 749768 - DNA, 120 bp, Artificial Sequence
  ENSG00000205730_53 (sequence is synthesized)
catcgtggcattcgttagtttttttttttttaaatcacttgtttagatacaactttatttttttatacctacatagcacatgactggggggataaagcatgtataagttgggagagggta

SEQ ID NO: 749769 - DNA, 120 bp, Artificial Sequence
  ENSG00000205730_54 (sequence is synthesized)
aagaatgtgtgactatgtatacagaaaatagactaaaatgtgcagcaaaatgatatatactgtaatctggtttttgaagtatctactattctggaatattgttaaacaactttttgcttt

SEQ ID NO: 749770 - DNA, 120 bp, Artificial Sequence
  ENSG00000205730_55 (sequence is synthesized)
tgaaaaaaaaaggtgccttgattcagttgcgtgacttagaacattcatcctattttattgtgatttttaatgtcttctgaccccaaactgtgtttttggttgcagtctggcggctgcagg

SEQ ID NO: 749771 - DNA, 120 bp, Artificial Sequence
  ENSG00000205730_56 (sequence is synthesized)
catagcgtcggttttgttccaataacagagaccaaagagttaatcagatatggttcagctgctacaattgtatgattcaaaggcaatttaatcaccccaaatttccatggcccccacagt

SEQ ID NO: 749772 - DNA, 120 bp, Artificial Sequence
  ENSG00000205730_57 (sequence is synthesized)
caagacctgccattcgttttctcttgcaggttggagtaaatttgcactttgaatcatgtgggtcatttggggaccttgttcttttctattttgctttattaataaaggaacttgtagaaa

SEQ ID NO: 749773 - DNA, 120 bp, Artificial Sequence
  ENSG00000205730_58 (sequence is synthesized)
gtcgctttaaggcggaggcccgggagggggccgacccggctcgccagctccacgctcggctccagactccggcatttcctccccgctagctggcgcggcctcgcctccccctcggaagag

SEQ ID NO: 749774 - DNA, 120 bp, Artificial Sequence
  ENSG00000205744_0 (sequence is synthesized)
acacaggaagctgagccggcttggggcccagcatacacaggcccccaggacccctggggagagggccccgctgggctggccctgcagggaccatggaatccagagctgaagggggctccc

SEQ ID NO: 749775 - DNA, 120 bp, Artificial Sequence
  ENSG00000205744_1 (sequence is synthesized)
ctgctgtgtttgattggttcttcgaagcggcctgccctgcctccctgcaggaggatccccccatcctgcggcagttccctccagacttcagggaccaggaagctatgcagatggtgccta

SEQ ID NO: 749776 - DNA, 120 bp, Artificial Sequence
  ENSG00000205744_2 (sequence is synthesized)
aattctgcttcccttttgatgtggaaagggagccccccagccccgccgtgcagcatttcaccttcgccctcacagaccttgccggcaaccgcagatttggtttctgccgcctgcgggcgg

SEQ ID NO: 749777 - DNA, 120 bp, Artificial Sequence
  ENSG00000205744_3 (sequence is synthesized)
gtacccagagctgtctctgcatcctcagccacctgccttggttcgaggtgttttacaagctattgaacacagtgggagacctcctagcccaggaccaagtcaccgaggcagaggaacttc

SEQ ID NO: 749778 - DNA, 120 bp, Artificial Sequence
  ENSG00000205744_4 (sequence is synthesized)
ttcaaaatctgtttcagcagtccctgtctgggccccaggcctcagtggggcttgagctgggcagcggagtgacggtctccagcgggcagggtatccccccccctacccgggggaatagca

SEQ ID NO: 749779 - DNA, 120 bp, Artificial Sequence
  ENSG00000205744_5 (sequence is synthesized)
agccgctttcctgcttcgtggccccggactccggccgcctgccatccatccctgagaacaggaacctaacggagctggtggtggccgtgactgacgagaacatcgtggggctgttcgcgg

SEQ ID NO: 749780 - DNA, 120 bp, Artificial Sequence
  ENSG00000205744_6 (sequence is synthesized)
cgctcctggccgagagaagagtcctgctcaccgccagcaaactcagcaccctgacctcgtgcgtccacgcgtcctgcgcgctcctgtaccccatgcgctgggagcacgtgctgatcccca

SEQ ID NO: 749781 - DNA, 120 bp, Artificial Sequence
  ENSG00000205744_7 (sequence is synthesized)
cgctgcccccacacctgctggactactgctgcgcgcccatgccctacctcattggagtgcacgccagtctcgccgagagagtacgagaaaaagccctggaggacgtcgtggtgctgaacg

SEQ ID NO: 749782 - DNA, 120 bp, Artificial Sequence
  ENSG00000205744_8 (sequence is synthesized)
tggacgccaataccttggagacgacctttaacgacgtgcaggcgctgcctccagacgtggtgtccctgctgaggctccggctcaggaaggtcgccctggcccccggggaaggggtgtccc

SEQ ID NO: 749783 - DNA, 120 bp, Artificial Sequence
  ENSG00000205744_9 (sequence is synthesized)
gtctcttcctcaaagcccaggccctgctcttcggggggtaccgcgacgcactcgtctgcagcccgggccagccagtgaccttcagtgaggaagtcttcttggcccagaagcctggggcac

SEQ ID NO: 749784 - DNA, 120 bp, Artificial Sequence
  ENSG00000205744_10 (sequence is synthesized)
ctctgcaggccttccaccggcgggctgtgcacctgcagctgttcaaacagttcatcgaagcccggctggagaagctcaacaagggggagggcttctcagatcaattcgagcaggagatca

SEQ ID NO: 749785 - DNA, 120 bp, Artificial Sequence
  ENSG00000205744_11 (sequence is synthesized)
tatcagctctgggccgacaatctaaagaaaggtggtggcgccctcctgcactcagtcaaggccaagacccaaccagccgtcaagaacatgtaccgctcggccaagagtggcttgaagggg

SEQ ID NO: 749786 - DNA, 120 bp, Artificial Sequence
  ENSG00000205744_12 (sequence is synthesized)
gtgcagagccttctaatgtataaggatggggactctgtcctgcagagggggggctctctgagggccccagccctccccagccgctcagaccgcctgcagcaacgcctcccaatcactcag

SEQ ID NO: 749787 - DNA, 120 bp, Artificial Sequence
  ENSG00000205744_13 (sequence is synthesized)
cactttggaaagaaccggccccttcgccccagcaggagacgccagctggaagagggaacttccgagcccccaggggcggggacacccccactgagccctgaggatgaggggtgcccgtgg

SEQ ID NO: 749788 - DNA, 120 bp, Artificial Sequence
  ENSG00000205744_14 (sequence is synthesized)
gcagaagaagctctggacagcagcttcttggggtctggagaagaactggatttgttgagcgagattctggacagtcttagcatgggagccaagagcgcaggcagcctgagaccgagccag

SEQ ID NO: 749789 - DNA, 120 bp, Artificial Sequence
  ENSG00000205744_15 (sequence is synthesized)
agtttagactgctgtcacagaggagacctggacagctgcttcagcctgcccaacataccaagatggcaaccagacgataagaaactaccagagccggagccccagcccctttccctgcca

SEQ ID NO: 749790 - DNA, 120 bp, Artificial Sequence
  ENSG00000205744_16 (sequence is synthesized)
tccctgcaaaatgcctcgtctttggatgccaccagctcttcaaaggactccaggtcccagctgataccctcagagtccgaccaagaagtcacgtctccatcccagtcctcaacagcttct

SEQ ID NO: 749791 - DNA, 120 bp, Artificial Sequence
  ENSG00000205744_17 (sequence is synthesized)
gcagacccaagcatctggggggaccccaaaccctctcctctcacagagcccctaattcttcatctcaccccttcccacaaggcagctgaagattctacagcccaggaaaaccccactccc

SEQ ID NO: 749792 - DNA, 120 bp, Artificial Sequence
  ENSG00000205744_18 (sequence is synthesized)
tggctctccactgcacccactgagcccagccctccagaaagcccccaaattctggcccccacaaagcccaactttgatatagcctggacgtcccagccccttgatccttcctcagacccc

SEQ ID NO: 749793 - DNA, 120 bp, Artificial Sequence
  ENSG00000205744_19 (sequence is synthesized)
agttctctggaggaccccagagcccggcctcccaaagccctgctggcagagcgcgctcacctccagccacgggaggaaccaggagccctgaattcccctgctacacccaccagcaactgt

SEQ ID NO: 749794 - DNA, 120 bp, Artificial Sequence
  ENSG00000205744_20 (sequence is synthesized)
caaaagtcccagcccagcagccggcccagagtcgctgatcttaagaagtgctttgagggttaagaatcaggggtccaagagagaccccagtccctcaataaagccacaagagcccaaaaa

SEQ ID NO: 749795 - DNA, 120 bp, Artificial Sequence
  ENSG00000205744_21 (sequence is synthesized)
agctggtttttttcctggtgaatttctctggtgccctcactctgctcggaaatccatcccacccacctctgtccctccaagggcagcctctctaactggctcctagcagggaattccagg

SEQ ID NO: 749796 - DNA, 120 bp, Artificial Sequence
  ENSG00000205744_22 (sequence is synthesized)
aagcctcctggtcttctagaatcctggcaaccttacaattcctctcggcatttgtcacttccatctcagctaatgcacccaccagctcaaacacaccaataaagcttttgttacatctca

SEQ ID NO: 749797 - DNA, 120 bp, Artificial Sequence
  ENSG00000205744_23 (sequence is synthesized)
acacaggaagctgagccggcttggggcccagcatacacaggcccccaggacccctggggagagggccccgctgggctggccctgcagggaccatggaatccagagctgagaagctatgca

SEQ ID NO: 749798 - DNA, 120 bp, Artificial Sequence
  ENSG00000205744_24 (sequence is synthesized)
gtggagtcagtggaggctcagtccttgctctacctgcatggggaagactcaggggtgttgcctattaactgcgccccttacagagagggatcaggacggtatgagtcctggcttcacccg

SEQ ID NO: 749799 - DNA, 120 bp, Artificial Sequence
  ENSG00000205744_25 (sequence is synthesized)
cttaaagcactgtaagtggccaaattcctggtctccacatgatttctaaaggggttcgagttgtcactcattatccagcagtggatggggagggggaacaggagactggggacgtgggaa

SEQ ID NO: 749800 - DNA, 120 bp, Artificial Sequence
  ENSG00000205744_26 (sequence is synthesized)
gagcacgtgctgatccccacgctgcccccacacctgctggactactgctgatgccctcctctgccaaggactcccgggctctgagcggccgaccccgcttttccgcagagagtacgagaa

SEQ ID NO: 749801 - DNA, 120 bp, Artificial Sequence
  ENSG00000205744_27 (sequence is synthesized)
cacagccacacacacacagtcacactttctcactccatcctgtacttgtgtgttcaattaacactgctgcacacacagcctcacacaaccacacactcacagccacaaacccccagagtc

SEQ ID NO: 749802 - DNA, 120 bp, Artificial Sequence
  ENSG00000205744_28 (sequence is synthesized)
atgcacatgccgacgcaccttgtggcacatgcacacacaaccacacttgtgtgcaaagtggcagacacaaccacacatgcatagaagcaagtctctggaccccttctgcatcccacagag

SEQ ID NO: 749803 - DNA, 120 bp, Artificial Sequence
  ENSG00000205744_29 (sequence is synthesized)
ctctctcagccacacaggaagctgagccggcttggggcccagcatacacaggcccccaggacccctggggagagggccccgctgggctggccctgcagggaccatggaatccagagctga

SEQ ID NO: 749804 - DNA, 120 bp, Artificial Sequence
  ENSG00000205744_30 (sequence is synthesized)
aaaaaaaaaactcccaggactgacctgagcccttggctcctcccagaccactcaaccttagtcatagccctcggaatccccaatccccacatctggctcagccacccccgcccctccacg

SEQ ID NO: 749805 - DNA, 120 bp, Artificial Sequence
  ENSG00000205744_31 (sequence is synthesized)
tcccacccaggtcaccgaggcagaggaacttcttcaaaatctgtttcagcagtccctgtctgggccccaggcctcagtggggcttgagctggtgagtagctcccattccctgggcgctgg

SEQ ID NO: 749806 - DNA, 120 bp, Artificial Sequence
  ENSG00000205744_32 (sequence is synthesized)
tgagaacaggtcccgaaacccggaccggggatgcaagatccaggggcccgtccacgcccagagcgactctctgatcctcagaggaacctaacggagctggtggtggccgtgactgacgag

SEQ ID NO: 749807 - DNA, 120 bp, Artificial Sequence
  ENSG00000205744_33 (sequence is synthesized)
aacatcgtggggctgttcgcggcgctcctggccgagagaagagtcctgctcaccgccagcaaactcagcaccgggttcgagttgtcactcattatccagcagtggatggggagggggaac

SEQ ID NO: 749808 - DNA, 120 bp, Artificial Sequence
  ENSG00000205744_34 (sequence is synthesized)
gcagtccctgtctgggccccaggcctcagtggggcttgagctgcggagtgacggtctccagcgggcagggtatccccccccctacccgggggaatagcaagccgctttcctgcttcgtgg

SEQ ID NO: 749809 - DNA, 120 bp, Artificial Sequence
  ENSG00000205744_35 (sequence is synthesized)
ctgagaacgaacctaacggagctggtggtggccgtgactgacgagaacatcgtggggctgttcgcggcgctcctggccgagagaagagtcctgctcaccgccagcaaactcagcaccgtg

SEQ ID NO: 749810 - DNA, 120 bp, Artificial Sequence
  ENSG00000205744_36 (sequence is synthesized)
aggcggggtccgccgggccggggtgggagcagggcctggctccgccccggggggcgggacaagggggctgattcctggctctaaccctactgcgcgagacccgagggcgaagtcctggcc

SEQ ID NO: 749811 - DNA, 120 bp, Artificial Sequence
  ENSG00000205744_37 (sequence is synthesized)
ccgccccttcgaaggtcttggagagttgaactctggccccgccctcgtgggagggggctgcgctgcagctcctcctttttgggagtactgtgctcaggctccacccactatgggccgcaa

SEQ ID NO: 749812 - DNA, 120 bp, Artificial Sequence
  ENSG00000205744_38 (sequence is synthesized)
cacgtctggctccacccctccggaccctcagggacactgagaactagggacttatacacgtgggaatccagggacccagggacccagggactcagggactcagagatctgaggacccagg

SEQ ID NO: 749813 - DNA, 120 bp, Artificial Sequence
  ENSG00000205744_39 (sequence is synthesized)
aaaagggaacagcagtgttgaaagtgggaggccaggactgatggggaggagggttcccaaactccagagcagcctgaccagggctgggggtcttgggcaaatatctgaggctgcccatcc

SEQ ID NO: 749814 - DNA, 120 bp, Artificial Sequence
  ENSG00000205754_0 (sequence is synthesized)
atgaaaatatcaaccactcaaatagaaaggagatttgagatatcctcttctcttgttggtttaattgatggaagcttcgaaataggaaatttgtttgtgattgtatttgtaagttacttt

SEQ ID NO: 749815 - DNA, 120 bp, Artificial Sequence
  ENSG00000205754_1 (sequence is synthesized)
ggatctaaactacacagaccgaagttaattggaattggttgttttcttatgggaactggaagtattttgatggctttaccacatttcttcatgggatattacaggtattctaaagaaacc

SEQ ID NO: 749816 - DNA, 120 bp, Artificial Sequence
  ENSG00000205754_2 (sequence is synthesized)
aatattgatccatcagaaaattcaacatcaaacttaccaaactgtttaattaatcaaatgttatcactcaatagaacaccgtctgagataatagaaagaggttgtgtgaaggaatctggg

SEQ ID NO: 749817 - DNA, 120 bp, Artificial Sequence
  ENSG00000205754_3 (sequence is synthesized)
tcacacatgtggatctatgtcttcatgggtaatatgcttcgtggcataggggaaacccccatagtaccattggggatttcttacattgatgattttgcaaaagaaggacattcttccttg

SEQ ID NO: 749818 - DNA, 120 bp, Artificial Sequence
  ENSG00000205754_4 (sequence is synthesized)
tatttaggtactgtgaatgtaatgggaatgactggtctagtttttgcctttatgctgggatctctgtttgctaaaatgtatgtggatatcggatatgtggatctgagcactatcaggata

SEQ ID NO: 749819 - DNA, 120 bp, Artificial Sequence
  ENSG00000205754_5 (sequence is synthesized)
actcctaaggactctcgttgggttggagcttggtggcttggtttccttgtgtctggaatagtatccattatttcttctataccattctttttcttgcctctaaatccaaataaaccacag

SEQ ID NO: 749820 - DNA, 120 bp, Artificial Sequence
  ENSG00000205754_6 (sequence is synthesized)
aaagaaaggaaagtttcactatttttgcatgtgctaaaaactaatgataaaaggaatcaaatagctaatttgaccaaccgaagaaaatatattaccaaaaatgtgactggctttttccag

SEQ ID NO: 749821 - DNA, 120 bp, Artificial Sequence
  ENSG00000205754_7 (sequence is synthesized)
tctttgaaaagcatccttaccaatcccctgtatgttatatttgtaatttttacattgttacacatgagcagctacattgcttctcttacttatatcattaaaatggtggagcaacagtat

SEQ ID NO: 749822 - DNA, 120 bp, Artificial Sequence
  ENSG00000205754_8 (sequence is synthesized)
tggtctgcatctaagactaactttttgttgggagtcctcgccctacctgctgttgcaattggcatgttttcaggaggatatatcattaaaaaattcaaattgtctttagttggacttgcc

SEQ ID NO: 749823 - DNA, 120 bp, Artificial Sequence
  ENSG00000205754_9 (sequence is synthesized)
aaattggcattttgttctgcaacagtgcatctcttatctcaagttttatatttctttctaatctgtgaaagcaaatcagttgccggcctaaccttgacctatgatggaaatagtccagta

SEQ ID NO: 749824 - DNA, 120 bp, Artificial Sequence
  ENSG00000205754_10 (sequence is synthesized)
agatctcatgtagatgtaccactttcttattgcaactcagagtgcaattgtgatgaaagtcaatgggaacccgtctgtggaaacaatggaataacttacctgtcaccttgtctagcagga

SEQ ID NO: 749825 - DNA, 120 bp, Artificial Sequence
  ENSG00000205754_11 (sequence is synthesized)
tgcaaatcttcaagtggtaataaagagcccatagtgttttataactgtagctgtgtggaagtaattggtctccagaacaaaaattactcagcgcacttgggtgaatgcccaagagatgat

SEQ ID NO: 749826 - DNA, 120 bp, Artificial Sequence
  ENSG00000205754_12 (sequence is synthesized)
gcttgtacaaggaaatcttacgtttattttgtaattcaagtcttagatgctttcctctgtgcagttggacttacctcatattccgtgctggtgattaggattgttcaacctgaattgaaa

SEQ ID NO: 749827 - DNA, 120 bp, Artificial Sequence
  ENSG00000205754_13 (sequence is synthesized)
gcacttgcaatcggcttccattcaatgattatgcgatcgctaggaggtattctagttccaatatattttggggctctgattgatacaacgtgtatgaagtggtccaccaacagctgtgga

SEQ ID NO: 749828 - DNA, 120 bp, Artificial Sequence
  ENSG00000205754_14 (sequence is synthesized)
gcacgaggggcttgtaggatatataattccacatatttgggaagagccttcttcggcttgaaggtagccctaatatttccagtacttgttttacttactgtatttatttttgttgtaagg

SEQ ID NO: 749829 - DNA, 120 bp, Artificial Sequence
  ENSG00000205754_15 (sequence is synthesized)
aaaaaatcccatggaaaggataccaaagtattagaaaatgaaagacaagtaatggatgaagcaaacttagaattcttaaacgacagtgaacattttgtaccttctgctgaagaacagtaa

SEQ ID NO: 749830 - DNA, 120 bp, Artificial Sequence
  ENSG00000205754_16 (sequence is synthesized)
tcggcttccattcaatgattatgcgatcgctaggtgctcctgagtttttgaaatctgcaaatttctcacccattttgtcagcactagattgcttcagatacattggcctcagacaccatt

SEQ ID NO: 749831 - DNA, 120 bp, Artificial Sequence
  ENSG00000205754_17 (sequence is synthesized)
cccttgtcattctaatatttcttactgtcagaaattgagaatgattaaaaataagcagaatcagtaaagtgccatatataaatcactgtcatgttttgtgacaaaatctgaaaagtatga

SEQ ID NO: 749832 - DNA, 120 bp, Artificial Sequence
  ENSG00000205754_18 (sequence is synthesized)
tgtccttcaaaattttgaccaaattacctatgcttaaaactaggagttaatctcagaatgtatacttctcctataaacaatgtatgtattcctggaatgctgtaccttccgtgaaaccat

SEQ ID NO: 749833 - DNA, 120 bp, Artificial Sequence
  ENSG00000205754_19 (sequence is synthesized)
gcactacagataaaaattgacttagggacagaccactgaaatgtatgcaccgttgtgataagaccactaacagaaacaaaatttagcagcgaacctgacctgtacagcctaggctgcttt

SEQ ID NO: 749834 - DNA, 120 bp, Artificial Sequence
  ENSG00000205754_20 (sequence is synthesized)
atggactaaaatcaacatttgaataagacagcagaggcacaatcttgagagaataagaaaacaaggcactgtgatgggttcaagatcttcttgacactcctgtcattcagctatgttgct

SEQ ID NO: 749835 - DNA, 120 bp, Artificial Sequence
  ENSG00000205754_21 (sequence is synthesized)
cttgaaggttgattccatgccttggataatatgaatacatgccttggataatatgaacagtgctgcaataaacatgaaagtgcagaatgactcttcaacatatttatttcattttctttg

SEQ ID NO: 749836 - DNA, 87 bp, Artificial Sequence
  ENSG00000205754_22 (sequence is synthesized)
gccatagatctatttttaaatttttgaggagcttccatactgtttttcataacccctgtactaatttacattaacaactgtgtataa

SEQ ID NO: 749837 - DNA, 120 bp, Artificial Sequence
  ENSG00000205755_0 (sequence is synthesized)
ggcatggggcggctggttctgctgtggggagctgccgtctttctgctgggaggctggatggctttggggcaaggaggagcagcagaaggagtacagattcagatcatctacttcaattta

SEQ ID NO: 749838 - DNA, 120 bp, Artificial Sequence
  ENSG00000205755_1 (sequence is synthesized)
gaaaccgtgcaggtgacatggaatgccagcaaatactccaggaccaacctgactttccactacagattcaacggtgatgaggcctatgaccagtgcaccaactaccttctccaggaaggt

SEQ ID NO: 749839 - DNA, 120 bp, Artificial Sequence
  ENSG00000205755_2 (sequence is synthesized)
cacacttcggggtgcctcctagacgcagagcagcgagacgacattctctatttctccatcaggaatgggacgcaccccgttttcaccgcaagtcgctggatggtttattacctgaaaccc

SEQ ID NO: 749840 - DNA, 120 bp, Artificial Sequence
  ENSG00000205755_3 (sequence is synthesized)
agttccccgaagcacgtgagattttcgtggcatcaggatgcagtgacggtgacgtgttctgacctgtcctacggggatctcctctatgaggttcagtaccggagccccttcgacaccgag

SEQ ID NO: 749841 - DNA, 120 bp, Artificial Sequence
  ENSG00000205755_4 (sequence is synthesized)
tggcagtccaaacaggaaaatacctgcaacgtcaccatagaaggcttggatgccgagaagtgttactctttctgggtcagggtgaaggctatggaggatgtatatgggccagacacatac

SEQ ID NO: 749842 - DNA, 120 bp, Artificial Sequence
  ENSG00000205755_5 (sequence is synthesized)
ccaagcgactggtcagaggtgacatgctggcagagaggcgagattcgggatgcctgtgcagagacaccaacgcctcccaaaccaaagctgtccaaatttattttaatttccagcctggcc

SEQ ID NO: 749843 - DNA, 120 bp, Artificial Sequence
  ENSG00000205755_6 (sequence is synthesized)
ctctttgagatacaccaagggaacttccaggagtggatcacagacacccagaacgtggcccacctccacaagatggcaggtgcagagcaagaaagtggccccgaggagcccctggtagtc

SEQ ID NO: 749844 - DNA, 120 bp, Artificial Sequence
  ENSG00000205755_7 (sequence is synthesized)
cagttggccaagactgaagccgagtctcccaggatgctggacccacagaccgaggagaaagaggcctctgggggatccctccagcttccccaccagcccctccaaggcggtgatgtggtc

SEQ ID NO: 749845 - DNA, 120 bp, Artificial Sequence
  ENSG00000205755_8 (sequence is synthesized)
acaatcgggggcttcacctttgtgatgaatgaccgctcctacgtggcgttgtgatggacacaccactgtcaaagtcaacgtcaggatccacgttgacatttaaagacagaggggactgtc

SEQ ID NO: 749846 - DNA, 120 bp, Artificial Sequence
  ENSG00000205755_9 (sequence is synthesized)
ccggggactccacaccaccatggatgggaagtctccacgccaatgatggtaggactaggagactctgaagacccagcctcaccgcctaatgcggccactgccctgctaactttcccccac

SEQ ID NO: 749847 - DNA, 120 bp, Artificial Sequence
  ENSG00000205755_10 (sequence is synthesized)
atgagtctctgtgttcaaaggcttgatggcagatgggagccaattgctccaggagatttactcccagttccttttcgtgcctgaacgttgtcacataaaccccaaggcagcacgtccaaa

SEQ ID NO: 749848 - DNA, 120 bp, Artificial Sequence
  ENSG00000205755_11 (sequence is synthesized)
atgctgtaaaaccatcttcccactctgtgagtccccagttccgtccatgtaccattcccatagcattggattctcggaggattttttgtctgtttgagactccaaaccacctctacccct

SEQ ID NO: 749849 - DNA, 120 bp, Artificial Sequence
  ENSG00000205755_12 (sequence is synthesized)
atggggcggctggttctgctgtggggagctgccgtctttctgctgggaggctggatggctttggggcaaggaggagcagattcaacggtgatgaggcctatgaccagtgcaccaactacc

SEQ ID NO: 749850 - DNA, 120 bp, Artificial Sequence
  ENSG00000205755_13 (sequence is synthesized)
aaaatcgatggtgacctctgcttatgagtcatgagtgatctgttcgttgtaggtccctgaggacctcactctccactcctgtttcaggcatggggcggctggttctgctgtggggagctg

SEQ ID NO: 749851 - DNA, 82 bp, Artificial Sequence
  ENSG00000205755_14 (sequence is synthesized)
ctggtctcgaacttggttgggtttacaggagtgagccactgtgtccggcctcgcggctccattcttgaagtcagcgagactg

SEQ ID NO: 749852 - DNA, 120 bp, Artificial Sequence
  ENSG00000205758_0 (sequence is synthesized)
gacgaaggactggaaggtggcggtggtgaaggtgcaggccgttggggcggctcagaggcaggtgactatgaaaggcttatatttccaacagagttccacagatgaagaaataacatttgt

SEQ ID NO: 749853 - DNA, 120 bp, Artificial Sequence
  ENSG00000205758_1 (sequence is synthesized)
atttcaagaaaaggaagatcttcctgttacagaggataactttgtgaaacttcaagttaaagcttgtgctctgagccagataaatacaaagcttctggcagaaatgaagatgaaaaagga

SEQ ID NO: 749854 - DNA, 120 bp, Artificial Sequence
  ENSG00000205758_2 (sequence is synthesized)
tttatttcctgttgggagagaaattgctggaattgtattagatgttggaagcaaggtatcattctttcaaccagatgatgaagtagttggaattttgcccctggactctgaagaccctgg

SEQ ID NO: 749855 - DNA, 120 bp, Artificial Sequence
  ENSG00000205758_3 (sequence is synthesized)
actttgtgaagttgttagagtacatgagcattacttggttcataaaccagaaaaggtcacatggacggaagcagcaggaagcattcgggatggagtgcgtgcctatacagctctgcatta

SEQ ID NO: 749856 - DNA, 120 bp, Artificial Sequence
  ENSG00000205758_4 (sequence is synthesized)
tctttctcatctctctcctggaaaatcagtgctgataatggatggagcaagtgcatttggtacaatagctattcagttagcacatcatagaggagccaaagtgatttcaacagcatgcag

SEQ ID NO: 749857 - DNA, 120 bp, Artificial Sequence
  ENSG00000205758_5 (sequence is synthesized)
ccttgaagataagcagtgccttgaaagattcagacctcccatagcccgagtgattgatgtatctaatgggaaagttcatgttgctgaaagctgtttggaagaaacaggtggcctgggagt

SEQ ID NO: 749858 - DNA, 120 bp, Artificial Sequence
  ENSG00000205758_6 (sequence is synthesized)
aagatgatgaaccagctgtaaaactacaactactaccacataaacatgatatcatcacacttcttggtgttggaggccactgggtaacaacagaagaaaaccttcagttggatcctccag

SEQ ID NO: 749859 - DNA, 120 bp, Artificial Sequence
  ENSG00000205758_7 (sequence is synthesized)
atagccactgccttttcctcaagggagcaacgttagctttcctgaatgatgaagtttggaatttgtcaaatgtacaacagggaaaatatctttgtatcttaaaggatgtgatggagaagt

SEQ ID NO: 749860 - DNA, 120 bp, Artificial Sequence
  ENSG00000205758_8 (sequence is synthesized)
tatcaactggtgttttcagacctcagttggatgaacccattccactgtatgaggcaaaagtttccatggaagctgttcagaaaaatcaaggaagaaaaaagcaagttgttcaattttaat

SEQ ID NO: 749861 - DNA, 120 bp, Artificial Sequence
  ENSG00000205758_9 (sequence is synthesized)
tttcttctttctcagacctcagtcggatgaacatattccagtatttgaagccagaattttctttggaaattgttgagaaaaaccaaggaagataaaacaagttgcatttttaagcacgtt

SEQ ID NO: 749862 - DNA, 120 bp, Artificial Sequence
  ENSG00000205758_10 (sequence is synthesized)
tctctgctaagacaagatgctcagttgacacatttgaaaagtgtttgaaaaattcttgtgcaaatgatcaagataattctataattaacatcttaagggaatttttctaaaaaccttttc

SEQ ID NO: 749863 - DNA, 120 bp, Artificial Sequence
  ENSG00000205758_11 (sequence is synthesized)
attgtttctatatattttgcccctgctataaaattccttccatgaagaaaactgctgctttcagcaaaagtcacactactcttgataaaagctgttgcaggcctttgctaagctatcaaa

SEQ ID NO: 749864 - DNA, 120 bp, Artificial Sequence
  ENSG00000205758_12 (sequence is synthesized)
gtaacgtattaattttgtatcaactccgttctcaacaccttccttaagtctttgctgtcataatttaagcatttgagtatattttgaagtcttaaaagacttagcccataggcacttaaa

SEQ ID NO: 749865 - DNA, 120 bp, Artificial Sequence
  ENSG00000205758_13 (sequence is synthesized)
taatggttttgttaagaaacagacaagcatacagtaaacttaggaaatttagcaatgagccatccatttgctaatataattctttgccaatagcttattgattgactttttttccagtgt

SEQ ID NO: 749866 - DNA, 120 bp, Artificial Sequence
  ENSG00000205758_14 (sequence is synthesized)
cctattttgttataataagcagcttttatcaatagaagatcaaagttagatttagtgtgattagtttatgactttgaatctgctggtacattaaaaagacaagccatttttattcattcc

SEQ ID NO: 749867 - DNA, 120 bp, Artificial Sequence
  ENSG00000205758_15 (sequence is synthesized)
gcagggggcgggctctctgacgaaggactggaaggtggcggtggtgaaggtgcaggccgttggggcggctcagaggcagccacttctttcttcctcatcactttgctgttttcggaaagc

SEQ ID NO: 749868 - DNA, 120 bp, Artificial Sequence
  ENSG00000205758_16 (sequence is synthesized)
agttagtagttattcgctgtatgtggcttttgagccagatcggccctcttcattatgctaaacggcggaatcatctggagcgagatgtgactatgaaaggcttatatttccaacagagtt

SEQ ID NO: 749869 - DNA, 120 bp, Artificial Sequence
  ENSG00000205758_17 (sequence is synthesized)
tttaaacattaaaacagccttttgagatgtaagtactgttatcatccccatttcacaggtgaagaaacagaagcacagagatgttgatacagactcaaggacgcagcaagtggcggagca

SEQ ID NO: 749870 - DNA, 120 bp, Artificial Sequence
  ENSG00000205758_18 (sequence is synthesized)
agaatcacactcaggcagtctctctcctttctgaacagagatgagccctaagatacctggaagattttgtttttaacctcacattaaggaaagcacacatcaccttgaaaggttgcacac

SEQ ID NO: 749871 - DNA, 120 bp, Artificial Sequence
  ENSG00000205758_19 (sequence is synthesized)
ttactcctatgatggtgccattgcacagaaacatttcagaatacttttctaaattaaagagtttgtggagtgttttataaatatcaatgctaggaaatctttatcaaatgaagataggtt

SEQ ID NO: 749872 - DNA, 120 bp, Artificial Sequence
  ENSG00000205758_20 (sequence is synthesized)
tgactttttgaaacaaaagtcattcagagataagtctggtgtgattgaagccaaatcattccagttgagtaaaaataataaaaagtttggaatatacaaacaatttcaaaaagaaaggtg

SEQ ID NO: 749873 - DNA, 120 bp, Artificial Sequence
  ENSG00000205758_21 (sequence is synthesized)
caaacctctttagagtagggtcaacttaagaattccttttatttctaaaatgactggcttagaggcagcagcacttggtaaaagttttaatgtattggataaaaaaaaagttatcattac

SEQ ID NO: 749874 - DNA, 120 bp, Artificial Sequence
  ENSG00000205758_22 (sequence is synthesized)
ttgatagagcatatgtgtgtgtctgaagaaagatttacatagccttacacttctctctactgaatatcatacgttacttttcttaaatgtgtctagtcatatatgtgtgatatgtataaa

SEQ ID NO: 749875 - DNA, 120 bp, Artificial Sequence
  ENSG00000205758_23 (sequence is synthesized)
gtgtctagtcatatatgtgtgatatgtataaaggccagttccctccaggagcaatgacagtctttattcggagctttaaggtagttatgtaggccgggcatggtggcacatgcctgtaat

SEQ ID NO: 749876 - DNA, 120 bp, Artificial Sequence
  ENSG00000205758_24 (sequence is synthesized)
gtatactgcatgtgttaagttttaaggagtagatttcaaaaccccttcatgtagtgaatgtatgagtttaaagttatttctgattaaatatttcctattaaatttgaaaattagatttaa

SEQ ID NO: 749877 - DNA, 120 bp, Artificial Sequence
  ENSG00000205758_25 (sequence is synthesized)
ccgttccacgggattagcaaaactgcctccccgctgacagaactgagaatttctagaggcatttgtttgtatgggatttgctgttattatctaccctcttcattggccttgcctttatta

SEQ ID NO: 749878 - DNA, 120 bp, Artificial Sequence
  ENSG00000205758_26 (sequence is synthesized)
tctgtacgttttgatcaagaggagcagcaagagaagaatgccaacagacaagcacaaagaaacgcatctggccggagcctgcatgtatctaaatttccaggttgctgctgccctcagaat

SEQ ID NO: 749879 - DNA, 120 bp, Artificial Sequence
  ENSG00000205758_27 (sequence is synthesized)
tctagaggaaactttcatattgaagaggctataaaaatctctatagcctccaactccacagagaagccgctaatctatttcttccaaagcaaagccttcttgagtctgaatcacaacaaa

SEQ ID NO: 749880 - DNA, 120 bp, Artificial Sequence
  ENSG00000205758_28 (sequence is synthesized)
agattgcccataggaaatgtaatctccgaagttgttttctaatcccaaggcaagcagaagcgcaggaaggtgcggccgattcctcgccggtttcctttttttgggaattcggattgcatt

SEQ ID NO: 749881 - DNA, 120 bp, Artificial Sequence
  ENSG00000205758_29 (sequence is synthesized)
cgtgcaagcaagggactgcaattgtgtcttgggtccacaccacaaaaccgtgtcggtgactatgaaaggcttatatttccaacagagttccacagatgaagaaataacatttgtatttca

SEQ ID NO: 749882 - DNA, 120 bp, Artificial Sequence
  ENSG00000205758_30 (sequence is synthesized)
gggggtcctggaaccaatccctcatggatgcgtgagggatgactgtatatcatacacacataaagtttactggcttctgcaaacaaattttgagcccattaaccaaccagcctggtcaac

SEQ ID NO: 749883 - DNA, 120 bp, Artificial Sequence
  ENSG00000205758_31 (sequence is synthesized)
gaatgtacatctaaagtaagatatatacgtgctaaaattgtttttaactaaaaatgccatatgtagtgtagaaatgaaaactagacactatttcattcgcatccattgagataatagtgg

SEQ ID NO: 749884 - DNA, 120 bp, Artificial Sequence
  ENSG00000205758_32 (sequence is synthesized)
tgagcacttaggataagcaccaggcttgacttgctgctcttgtcacttgtccttggaaatttaggctctattacaccaccaactctcaaatcatttccctgttgtagagctaaacttgac

SEQ ID NO: 749885 - DNA, 120 bp, Artificial Sequence
  ENSG00000205758_33 (sequence is synthesized)
gtcctacagaatttctctaacttaacatgttgagtctctgagagtgcaaaacttgaaacaagagaaagtggcctgcctggcatcctctgcttattgaatggttttatttaattctccttt

SEQ ID NO: 749886 - DNA, 65 bp, Artificial Sequence
  ENSG00000205758_34 (sequence is synthesized)
acgaccaccacacatctatatatgctaaaatatggtattttacaaaaaaaaaagtcttccatttt

SEQ ID NO: 749887 - DNA, 120 bp, Artificial Sequence
  ENSG00000205758_35 (sequence is synthesized)
acatgatggctgatatgcaaataccgtaattctcacctaccaatcttcactgattttccaacaccctcatgaagatggccagaaaagacacacacacacccctaccacttcaccaccagg

SEQ ID NO: 749888 - DNA, 60 bp, Artificial Sequence
  ENSG00000205758_36 (sequence is synthesized)
gctgaaactccagcctggttgacaagagcagaactccatctcaaaaaaaaaatgaataaa

SEQ ID NO: 749889 - DNA, 120 bp, Artificial Sequence
  ENSG00000205758_37 (sequence is synthesized)
gacaagagcagaactccatctcaaaaaaaaaatgaataaagtcaactaaataggcaaagagagagatacttctcctggtcacaataatcgcatggcccaaatatctagagaatccagatt

SEQ ID NO: 749890 - DNA, 120 bp, Artificial Sequence
  ENSG00000205758_38 (sequence is synthesized)
aatccacagattttaaaaatgtattttaatagataagaattatatttaataaacttgtaatattaactattaattttcttcactctttagttggaagcaaggtatcattctttcaaccag

SEQ ID NO: 749891 - DNA, 120 bp, Artificial Sequence
  ENSG00000205758_39 (sequence is synthesized)
actggccccgcccaccgtgcgaacccaaagagggtgagccaaagaaatgtaagacaacagagtgacaagccgaatgagccaatcagcaggggctgtgtgggggcaggattagcactctcc

SEQ ID NO: 749892 - DNA, 120 bp, Artificial Sequence
  ENSG00000205758_40 (sequence is synthesized)
ccctcctccccatgtaggcgtaacaggagatttatggtctgaggttgcctatcgtggtttatggagattttgttgcacgatttcggtgcatctgctcgttgccgtgagagacactagata

SEQ ID NO: 749893 - DNA, 120 bp, Artificial Sequence
  ENSG00000205758_41 (sequence is synthesized)
ggatgcacttaattgacttaattattggaggttttcaaggagagaataatgtggaaaggaaaaaggcgaagcacaacccaaaggggttggccgggcctatggttggaatgaggaagggtg

SEQ ID NO: 749894 - DNA, 120 bp, Artificial Sequence
  ENSG00000205758_42 (sequence is synthesized)
tggtcttcggctaaaatttgcataaaacggaacccatccgggcgattccaacttcgcccatttattggtagtccttggggcggggcctcgcctctttctccgcccccgagcggaacatga

SEQ ID NO: 749895 - DNA, 120 bp, Artificial Sequence
  ENSG00000205765_0 (sequence is synthesized)
ggggcgcacccgccgattgtggccatggcggccgcagtctctagtgtggtgagacgagtggaagagctcggggatctggctcaggcccacatacagcaacttagcgaagctgccggtgaa

SEQ ID NO: 749896 - DNA, 120 bp, Artificial Sequence
  ENSG00000205765_1 (sequence is synthesized)
gatgatcactttttaattcgggcctctgcagcattagaaaaattgaaactcctgtgtggagaagagaaagaatgttcaaatccatcaaatcttctagaactttacacacaggctattttg

SEQ ID NO: 749897 - DNA, 120 bp, Artificial Sequence
  ENSG00000205765_2 (sequence is synthesized)
gacatgacatattttgaggagaacaagctagtagatgaagattttcctgaagactcttcttcacagaaagtaaaagagctgattagttttctttcagaaccagaaattttagtaaaggaa

SEQ ID NO: 749898 - DNA, 120 bp, Artificial Sequence
  ENSG00000205765_3 (sequence is synthesized)
aataatatgcatccaaaacactgcaatttgcttggggatgagctactggaatgtctctcttggagacgaggagccctgctgtatatgtattgtcattctcttaccaaaagaagagagtgg

SEQ ID NO: 749899 - DNA, 120 bp, Artificial Sequence
  ENSG00000205765_4 (sequence is synthesized)
ctcttaagaaaatccagtttgcttaaaaagtaccttcttgatggaatcagttacttgctacagatgctaaattatcgatgtcctatccagttaaatgaaggagtttctttccaagatcta

SEQ ID NO: 749900 - DNA, 120 bp, Artificial Sequence
  ENSG00000205765_5 (sequence is synthesized)
gacacagctaaattactgagtgcaggaatatttagtgacattcatctgctggctatgatgtacagtggagaaatgtgttactggggatcgaagtattgtgctgatcagcaaccagaaaat

SEQ ID NO: 749901 - DNA, 120 bp, Artificial Sequence
  ENSG00000205765_6 (sequence is synthesized)
catgaagtggatactagtgtgtctggagcgggctgcactacatacaaggaacccttggatttccgagaagtaggagaaaaaatcttgaaaaagtatgtatctgtgtgtgaaggacccctg

SEQ ID NO: 749902 - DNA, 120 bp, Artificial Sequence
  ENSG00000205765_7 (sequence is synthesized)
aaagaacaagaatggaatacaacgaatgcaaaacaaattttaaacttctttcatcatcgctgtaactagtaagttcatctagtccttttcaaatagaaaaacaacaaaacccatgaaatg

SEQ ID NO: 749903 - DNA, 120 bp, Artificial Sequence
  ENSG00000205765_8 (sequence is synthesized)
gaaaagagagttccaaaaaagaagacctgttgatactgaatatgagaacattacactgcataaagatatccagcttgggtaccctactaaaacaacatcaccatctttttcattatatat

SEQ ID NO: 749904 - DNA, 120 bp, Artificial Sequence
  ENSG00000205765_9 (sequence is synthesized)
tagtaaacctatgaagggatgattctttaatttctaaagtgttgttcaaactcaccttaaaatacagatgttatgtcactaataatgagtagtaacccaatttagctttacaaagatttt

SEQ ID NO: 749905 - DNA, 120 bp, Artificial Sequence
  ENSG00000205765_10 (sequence is synthesized)
ttctattactttttttttttattgtggtatatgtaacacaagtttaccatttttatcatctttagattatttttaaatctcactaccttgaagtttgccatgcttcagaaattaaagtca

SEQ ID NO: 749906 - DNA, 120 bp, Artificial Sequence
  ENSG00000205765_11 (sequence is synthesized)
agttacttcactgctttgaatacatactatggatataaatgtaggcaaaatgaaagattatgactaatattcagattccattttcaataaggtaaataatgaaagatctcacaaaggaat

SEQ ID NO: 749907 - DNA, 120 bp, Artificial Sequence
  ENSG00000205765_12 (sequence is synthesized)
cattgtgtttaattattttgccatgtattactaattgtatttaaaatttctacttcccttaggcattttataaaaatttaaaaattatttttctattttgtttaaaagacaatgcatggc

SEQ ID NO: 749908 - DNA, 120 bp, Artificial Sequence
  ENSG00000205765_13 (sequence is synthesized)
ttttcaagtgagtaatgaagataaaaaccaagctaggttagtctaccattagttcatatgtttttgtagcacatcttttcataacatactgaaattttaatgttttttgcctttaataat

SEQ ID NO: 749909 - DNA, 120 bp, Artificial Sequence
  ENSG00000205765_14 (sequence is synthesized)
aggggtgagtgttaaaggccagagagcctaacttgatatcttgctcatggtctttctgtctacctcaactcctgttgtcatctttggatgatctttctgataccttgctgataccttgga

SEQ ID NO: 749910 - DNA, 120 bp, Artificial Sequence
  ENSG00000205765_15 (sequence is synthesized)
cttctgcccagtgactttattacattccagcagcttactcccgtggccgcactttgaatgtcaccaccttgagtttctctttctggtaaaatttcagtaactgataactgccctcttttc

SEQ ID NO: 749911 - DNA, 120 bp, Artificial Sequence
  ENSG00000205765_16 (sequence is synthesized)
agttttttcacttccttattttattgacttttctctcctttatgctcattccacattcttcagttccttcttacccccttttcttgactgctccccttcctcctaaactgtcagcccctt

SEQ ID NO: 749912 - DNA, 120 bp, Artificial Sequence
  ENSG00000205765_17 (sequence is synthesized)
tcaggctttcttccctatccaccctcagctttatgggatactatatgaactaatctcaccagttattcttctttccctggtcttttagtctagtcctttggcaagccctcaacctcagat

SEQ ID NO: 749913 - DNA, 120 bp, Artificial Sequence
  ENSG00000205765_18 (sequence is synthesized)
taatcctatttattatctaccttttcggggatgctgagttctttgtgatgggtagtccttcaaagtagaatcactacaagtgtctcacttcagccttagaaaagccctcaatgtaaacct

SEQ ID NO: 749914 - DNA, 120 bp, Artificial Sequence
  ENSG00000205765_19 (sequence is synthesized)
tatgtttgttactagggtggcctctctcccatttcccgctgtggctgagccaaacttcattactttccttaggccctctgcccctcccctagcatatggctctttctcctattgaacaga

SEQ ID NO: 749915 - DNA, 120 bp, Artificial Sequence
  ENSG00000205765_20 (sequence is synthesized)
aaattgagactatgaagaggtcaacttgtatttaccaactttactcattttcccattttagaggaaaagaggttgcctgcttcctatcaaaggcgactctgtgctacatgttggtttcat

SEQ ID NO: 749916 - DNA, 120 bp, Artificial Sequence
  ENSG00000205765_21 (sequence is synthesized)
ctctctctcttttttttttttactttacatattttatacaatgtcattcataactatggcttcttttaccacctgtaataacagactgagtctcaaacctgtaacttgtatcctgactta

SEQ ID NO: 749917 - DNA, 120 bp, Artificial Sequence
  ENSG00000205765_22 (sequence is synthesized)
tctcttgctttctaaaccttgtttctaactgtctatcaaatatcttcattagacatcccacagtaattttaagctcagtgtttccaaacgtcaagtcctcatctgttatataaaatcctt

SEQ ID NO: 749918 - DNA, 120 bp, Artificial Sequence
  ENSG00000205765_23 (sequence is synthesized)
tctgctttgtaagttttctctttttgggattttccgcagatcagggcaacacagaatgactaccttcccagccatgtctctgcagtcatcctgtgtaatcatgttctagtccagtgttgc

SEQ ID NO: 749919 - DNA, 120 bp, Artificial Sequence
  ENSG00000205765_24 (sequence is synthesized)
tcaaacagttaaaatccaggctgcttttggtaaacatacaaattctgatatagagcctctgtggcaaagggaatttctcagttcctgccccagcccccttgtttatcattacacagctaa

SEQ ID NO: 749920 - DNA, 120 bp, Artificial Sequence
  ENSG00000205765_25 (sequence is synthesized)
gatttttatttaacttagcattttagcaagttttcttatgaaaatacctttgtgctttctaagtataaagatttaaattatttttaatacggtttttagaaccacagactatccctcttt

SEQ ID NO: 749921 - DNA, 120 bp, Artificial Sequence
  ENSG00000205765_26 (sequence is synthesized)
ttagagcatcctgatcaattgcaagtacttccacttcttccctaaatgcgctttgtgtgttttccacctcagtagccttgcacacatcattacttctgcatccttctttgtgaccaagtg

SEQ ID NO: 749922 - DNA, 120 bp, Artificial Sequence
  ENSG00000205765_27 (sequence is synthesized)
aatacctacctacctcttaggactcagcttcagtgattctgttttcataggctttttaaagcccttttcagtcaaattagatgctcctttgttctggtcctttactcttcccctcccatg

SEQ ID NO: 749923 - DNA, 120 bp, Artificial Sequence
  ENSG00000205765_28 (sequence is synthesized)
ttgtcgcactgatcacactgctttgtaattattttctttattgttggtaaactccatattttaaaaatttacctgtatacatagtgcttaatgcatggtaggcccttagtaatgtttttg

SEQ ID NO: 749924 - DNA, 120 bp, Artificial Sequence
  ENSG00000205765_29 (sequence is synthesized)
aattaatgaggcatgattctaaatgccaaactttgcacaaaaagttgttgctattggattccaaactgctatgccctctataccagtggctgacaaggcatatagggatatatgccatcc

SEQ ID NO: 749925 - DNA, 120 bp, Artificial Sequence
  ENSG00000205765_30 (sequence is synthesized)
tgagaggagtaaagtgtttagattctgaacctgagaaaagagaactttctcttaagaagttggaaacttcattttaccttcgtgaccctggtagaccacttggtctcactggttggtaca

SEQ ID NO: 749926 - DNA, 120 bp, Artificial Sequence
  ENSG00000205765_31 (sequence is synthesized)
attatgagggtagtactgggtgctttttatacaactttccatcccccacacagttggagaataatttgtagaccatggcagttaaaatgctttttactctggtgtattatagaataatga

SEQ ID NO: 749927 - DNA, 120 bp, Artificial Sequence
  ENSG00000205765_32 (sequence is synthesized)
acacatttttatatatgttaaagcctgctaaatcattcacttagaatgaagtaacctcaaggtaccaaataccccacataaggaaagtactacactaaattcactcaactattgtatgcc

SEQ ID NO: 749928 - DNA, 120 bp, Artificial Sequence
  ENSG00000205765_33 (sequence is synthesized)
taccatatgccagattttatcctagaccctgaggatatagctttttaaaaccccctcctgtttcagagcttatattctagtggaggaagttagacaagcattttaagtaataaatgtata

SEQ ID NO: 749929 - DNA, 120 bp, Artificial Sequence
  ENSG00000205765_34 (sequence is synthesized)
gagagtgtcaagtgatgagtaccatgaagaagaataaatgagggtaaggggctagtgtgatagggagaggggtgggatgccatcatatttaggggtggttgggaactgtctactgcttta

SEQ ID NO: 749930 - DNA, 120 bp, Artificial Sequence
  ENSG00000205765_35 (sequence is synthesized)
gcatttgtgtcttcaaatttctctcctttggttatataccttgcgtattccgcacattgataaagtttctttcttacagaagttctgatattgaattaaggaatgggtcactacttaaga

SEQ ID NO: 749931 - DNA, 120 bp, Artificial Sequence
  ENSG00000205765_36 (sequence is synthesized)
ctttatcatttcagctacacataaaaggtttctctcccctatggattttgctaatggttgagtgatacctaaaggccttgttgcattttttacacttggggtttctcttcggtttgaatt

SEQ ID NO: 749932 - DNA, 120 bp, Artificial Sequence
  ENSG00000205765_37 (sequence is synthesized)
ctctcatggttaccaaaactctgttaaaggacttttcacagtcgttaaatgtgtatggctctttcccaatatgaatttttttgatgttaactaggcttttagacttagttaaagacctgt

SEQ ID NO: 749933 - DNA, 120 bp, Artificial Sequence
  ENSG00000205765_38 (sequence is synthesized)
gtgctctgctgcatttatagggttttgggctgctgagaataattgatgctgattaaggtgcaaatcatgactaaagacttttctttcttcttttgcatatagtagagtgaggtgagggtc

SEQ ID NO: 749934 - DNA, 120 bp, Artificial Sequence
  ENSG00000205765_39 (sequence is synthesized)
gtggctaaaaccccacaataactttacattcctagctttacagtcttgctgtgaattctctggtgttcattaaagtgtgagctgtgttaaaaggcattcttagattcattttaaccacat

SEQ ID NO: 749935 - DNA, 120 bp, Artificial Sequence
  ENSG00000205765_40 (sequence is synthesized)
ttttaaaaactcacagttggttaacatgatggtttcagattgcttgcctcttttctctttctaccttacagggctccttttctagcttaaataagggtactccatctgccacagaatcca

SEQ ID NO: 749936 - DNA, 120 bp, Artificial Sequence
  ENSG00000205765_41 (sequence is synthesized)
ggattctatagttttttagtttcacttccctatgttctttttttttttttaatttttaacaatgagatgataccatgttacagcggtattacattaagatacatttaatatagccacaat

SEQ ID NO: 749937 - DNA, 120 bp, Artificial Sequence
  ENSG00000205765_42 (sequence is synthesized)
taaagtatgtattatgtatttatgctggtgttctttcatgttatttcttctagtgaaaatttccaagtaaactgttattgagcatatacatttttaaaaaaataaaaccatacaccccta

SEQ ID NO: 749938 - DNA, 120 bp, Artificial Sequence
  ENSG00000205765_43 (sequence is synthesized)
gtccaggagggaaaaatgacccggaaagacctttgccggcctgggccagccctcttccggagctgatgtctcctcccaccaaccaggagagatcactttttaattcgggcctctgcagca

SEQ ID NO: 749939 - DNA, 120 bp, Artificial Sequence
  ENSG00000205765_44 (sequence is synthesized)
ttagaaaaattgaaactcctgtgtggagaagagaaagaatgttcaaatccatcaaatcttctagaactttacacacaggctgctgtgtggacaacacctttttttcttggttttctgaaa

SEQ ID NO: 749940 - DNA, 120 bp, Artificial Sequence
  ENSG00000205765_45 (sequence is synthesized)
gacatttagaggtttcaaaaagctgtctttgttgtactactaagagtagtggatcaaagggtctgagtttgtattctgtgtcttttatttactagctgggtaatcataaataaattgggc

SEQ ID NO: 749941 - DNA, 69 bp, Artificial Sequence
  ENSG00000205777_0 (sequence is synthesized)
gaaggggaaccagcaactcaacgtcaggatcctgcagctgctcaggatagccaggaacagggtcaccca

SEQ ID NO: 749942 - DNA, 120 bp, Artificial Sequence
  ENSG00000205777_1 (sequence is synthesized)
acgcctgaagaaggtgaagggcaatcacagtgttaaaagaagacatgctgaaatgttgcaggctgctcctatgttggaaaattcttcattgaagttctcccaataaagctttacagcctt

SEQ ID NO: 749943 - DNA, 120 bp, Artificial Sequence
  ENSG00000205777_2 (sequence is synthesized)
tgaatcttttgtcaattttatttctagctatttgatgctgtgaaatgtttcattctttgcaattttgtattctatctccttgagctgtgtgtagaggcataattctcatgtattgatttt

SEQ ID NO: 749944 - DNA, 120 bp, Artificial Sequence
  ENSG00000205777_3 (sequence is synthesized)
ctatccagcaaccttgttaaatatgcttatgaattttaaaagtttacttctaggttttttcagttttcaacctacagaatcatatcatttttgaataagaacaattttgtttctgccttt

SEQ ID NO: 749945 - DNA, 120 bp, Artificial Sequence
  ENSG00000205777_4 (sequence is synthesized)
cttttgtatttttcgtagaggtgggattttggcctgtgtcctaggctttttttgaactcctgagcgcaagtaatccactctccttggcctttcaaagtgttgggattacaggcatgggcc

SEQ ID NO: 749946 - DNA, 120 bp, Artificial Sequence
  ENSG00000205777_5 (sequence is synthesized)
ctgtttttgccattttaaacccttttatttccttttctgattttatggcattgagcagatctaccggatacaattgtgatagtggaaatttttgtgttattcctgatgagaaatggaaaa

SEQ ID NO: 749947 - DNA, 120 bp, Artificial Sequence
  ENSG00000205777_6 (sequence is synthesized)
atttcaacatttcacgacaatatttagtgtactttttttgtagatggactttttcagagtaagtcaagccattctgttttagtttgttgagagtgttcattttgaatatatgttgaattt

SEQ ID NO: 749948 - DNA, 120 bp, Artificial Sequence
  ENSG00000205777_7 (sequence is synthesized)
catcaaacactgacctgagtcatcttaaaacatgtgaattgagatttctttgctactaagaaagtgagcgggcactctgcttcatgtttacttttgtcatgttgcatgaaaaacattttg

SEQ ID NO: 749949 - DNA, 120 bp, Artificial Sequence
  ENSG00000205777_8 (sequence is synthesized)
cttcatgtttgattctgtatgttgaaaactgaaatcatctattgtgattaccacagggttttttcccccagtaatctgtttatgtagtcaattacgttgataaatctgtactttttaaat

SEQ ID NO: 749950 - DNA, 120 bp, Artificial Sequence
  ENSG00000205777_9 (sequence is synthesized)
ctcagtagctaggactataggtacatgccaccatgccaagctaatttttctgttttagagatggtattttttcatgttgcccaggctggttttatactcctaatctcaagccatccacta

SEQ ID NO: 749951 - DNA, 120 bp, Artificial Sequence
  ENSG00000205777_10 (sequence is synthesized)
caaagtgctgggattacaggaatgagtcacggtgcctggaaattttgtacatttaaaccaacaatttggtcatgggtaatctatgtcctaataatttatttaaggatttttatgtatatc

SEQ ID NO: 749952 - DNA, 120 bp, Artificial Sequence
  ENSG00000205777_11 (sequence is synthesized)
tttatgtatatcctcatgagtgacattacctgtacttttatttcatatgctcatttgttggacgttgttatcaaggttcctctagcttcataaaacgggttggtatgtaaaacctctttt

SEQ ID NO: 749953 - DNA, 120 bp, Artificial Sequence
  ENSG00000205777_12 (sequence is synthesized)
tccattcactggaactcaagtctcctcaaggctgtgagtaatgcagggctaggctttcccataatgagcttttctagaatgcttctctcagatttggaccctacttaaacagcagtgacc

SEQ ID NO: 749954 - DNA, 120 bp, Artificial Sequence
  ENSG00000205777_13 (sequence is synthesized)
aaacgggcagctccaggtacctatcccctcaaactttgtgagggtcgcgttctctgaagatgcctcttcaatttgaaagctatctgttcctgtttctctgctgatattaactctctgtgc

SEQ ID NO: 749955 - DNA, 120 bp, Artificial Sequence
  ENSG00000205777_14 (sequence is synthesized)
acagaaagttaaacgtcactggttattaatttccctagattttgatctgtgctgtgtggctgagaatgggctgactgaccctagatctgtgtataattatgacaatggctccatttattt

SEQ ID NO: 749956 - DNA, 120 bp, Artificial Sequence
  ENSG00000205777_15 (sequence is synthesized)
ttaaaataagaggaattattataaaattcctatttactggatgtgtactatctatgaattacttctttgtgctaggttgtgtacatgtatgacctctttagatcctcacaagataaggca

SEQ ID NO: 749957 - DNA, 120 bp, Artificial Sequence
  ENSG00000205777_16 (sequence is synthesized)
gaattttcatgaaattgatgactgactccagtaagaagcagatttggggggatttcaatttctaagctcaaagcccttgcacttttctcaaagtaaagcttttgaaagtgttaaatgtac

SEQ ID NO: 749958 - DNA, 120 bp, Artificial Sequence
  ENSG00000205777_17 (sequence is synthesized)
acgaactgatggtgtatatgatgattttagttgtaatctgatgttttctttaaaaatttacatatacaaaagtgtttgactcaaaaggctttgttcttcccttaaaggaagcatctacca

SEQ ID NO: 749959 - DNA, 120 bp, Artificial Sequence
  ENSG00000205777_18 (sequence is synthesized)
aaatgtggcacacaaaccttgcatggtgtctctagggcctcctaccccgcatttcccctgctttttctcttgttctgactgaaaaacaaagtgctttgactgtgctgtgacccagccagc

SEQ ID NO: 749960 - DNA, 120 bp, Artificial Sequence
  ENSG00000205777_19 (sequence is synthesized)
tgcatgtttacccagcatgcttgaacccaagctggagccttgaacataaaggtgtttaagttgttgctcaaaatatggaaagaatctagctctggccttgaaccaaatcccttaaactct

SEQ ID NO: 749961 - DNA, 120 bp, Artificial Sequence
  ENSG00000205777_20 (sequence is synthesized)
cctataaaactccataacctgaccccctcagtgcggatatacctaggcatgacattcttgttgcctgttgcgaggatgctttagcctactctaagttctcccaataaatgctttggactg

SEQ ID NO: 749962 - DNA, 120 bp, Artificial Sequence
  ENSG00000205784_0 (sequence is synthesized)
atgggggacagagaggaatgtctctctaccccccaaccccccatgtctgtggtgaagtcgatcgaattagtgctgcccgaggatagaatctacctggctggctccagcataaaagggcag

SEQ ID NO: 749963 - DNA, 120 bp, Artificial Sequence
  ENSG00000205784_1 (sequence is synthesized)
gtgatcttaaccctgaacagcaccctggtggaccccatagtgaaggtggagctcgtgggaaggggttacgtcgaatggagtgaagaagccggggcatcctgtgattatagcagaaatgtt

SEQ ID NO: 749964 - DNA, 120 bp, Artificial Sequence
  ENSG00000205784_2 (sequence is synthesized)
atttgcaacaacaaggcagactacgtgcataagacaaagacattcccagtggaggataattggttaagtgcaggcagccacacctttgacttccatttcaacttacctcccaggcttcct

SEQ ID NO: 749965 - DNA, 120 bp, Artificial Sequence
  ENSG00000205784_3 (sequence is synthesized)
tctaccttcaccagcaaatttggccatgtcttctatttcgtacaagcttcctgcatgggcagggaacacattttagccaagaagaggatgtacttattggttcaaggaacttccaccttc

SEQ ID NO: 749966 - DNA, 120 bp, Artificial Sequence
  ENSG00000205784_4 (sequence is synthesized)
cacaaagaaaccccattccagaaccccttgttcgtggaggctgaggagaaagtctcctacaactgctgccgccagggcactgtctgtttgcaaatccagatggaaaggaacaccttcacg

SEQ ID NO: 749967 - DNA, 120 bp, Artificial Sequence
  ENSG00000205784_5 (sequence is synthesized)
ccaggagagaaggtcgtcttcacaacagagatcaacaaccagaccagcaaatgcatcaagacggtcgtattcgccctgtatgcccacatacagtacgagggcttcacgcccagtgcagag

SEQ ID NO: 749968 - DNA, 120 bp, Artificial Sequence
  ENSG00000205784_6 (sequence is synthesized)
gttgtcagcaccttcaacctgccgttgctgctgtccgtgagcagcagcacgcaggacggtgagatcatgcacactcgctacgagctggtcaccaccgtgcacctgccctggtccctgacc

SEQ ID NO: 749969 - DNA, 120 bp, Artificial Sequence
  ENSG00000205784_7 (sequence is synthesized)
agcctcaaggccaaagttcccatcatcatcaccagcgcctcagtggactctgccatctgccagctgtcagaggacggagtgttacccgtgaacccagatcaccagaattaagtgcccgaa

SEQ ID NO: 749970 - DNA, 120 bp, Artificial Sequence
  ENSG00000205784_8 (sequence is synthesized)
cttttaaatattaaaagctttattagtctctaccaggaggaagccctctctcttgcacaggtgactctcagaggagtcgaggagtgggcaacaggttgtctgcaacctccccaagctcta

SEQ ID NO: 749971 - DNA, 120 bp, Artificial Sequence
  ENSG00000205784_9 (sequence is synthesized)
gcggtttaggtatctgtgtctcccctccctagaactatcactgaatgcctggaatggacaaaggaaaccgggaaggtctcccaggacccaaacccggcataacctgccttttccaccctg

SEQ ID NO: 749972 - DNA, 120 bp, Artificial Sequence
  ENSG00000205784_10 (sequence is synthesized)
agtctgccccagcctactggggtctcacagtgccaagaccaggggtcctacttggggagaattctcccctctgctaatgtctggttgtattggctgtcacaactgcaggggatcggggga

SEQ ID NO: 749973 - DNA, 120 bp, Artificial Sequence
  ENSG00000205784_11 (sequence is synthesized)
gaagagtcttattggcgtggagagggtggaggccagggacgctgttcagcaccctgcagtgtccaggacggcccccacaatcaggaattgtttatcctgaatgtcaacagtaccaagggg

SEQ ID NO: 749974 - DNA, 120 bp, Artificial Sequence
  ENSG00000205784_12 (sequence is synthesized)
tcaggaattgtttatcctgaatgtcaacagtaccaagggggctgagcatggtggctcattcctgtaatcccaggactttaggaggccatggctggaggatcacttgagaccaggagtttg

SEQ ID NO: 749975 - DNA, 80 bp, Artificial Sequence
  ENSG00000205795_0 (sequence is synthesized)
gctcgcacccccgtcctccggccgcgacccccgcccgggaaccctagcccctggccgcggtcgcttcccggacctcgccc

SEQ ID NO: 749976 - DNA, 80 bp, Artificial Sequence
  ENSG00000205795_1 (sequence is synthesized)
cgggaggcggcgggcgcgccatgggcagcggcagcagccggagcagccggactctgaggcggcggcgcagccccgagagc

SEQ ID NO: 749977 - DNA, 80 bp, Artificial Sequence
  ENSG00000205795_2 (sequence is synthesized)
ccagccccgtggcgccccccgacggcagggacgagacgctgcgcctgctggacgagctgctggccgagtcggcggcctgg

SEQ ID NO: 749978 - DNA, 120 bp, Artificial Sequence
  ENSG00000205795_3 (sequence is synthesized)
gacccaccgcggtcgcggggagcgcggtgtgcgcagagcagagcacagagggccacccggggagcggcaatgtctctgaagccccaggcagcggtcgcaagaagcccgagaggccggcag

SEQ ID NO: 749979 - DNA, 120 bp, Artificial Sequence
  ENSG00000205795_4 (sequence is synthesized)
ccatctcctacgaccactcggaagaggggctgatggcgagcatcgagcgggagtactgccgctgaggacagcatgctccacccccgccaggcctcggaggcacctgctggctggggcacc

SEQ ID NO: 749980 - DNA, 120 bp, Artificial Sequence
  ENSG00000205795_5 (sequence is synthesized)
ctctgcttgcacagagctctagcaggagctgaaccacctccaaaacgcagtcactcccggatattcaaagctgccctttcaaatccactttcagaccgcgctgacctgggccagccactg

SEQ ID NO: 749981 - DNA, 120 bp, Artificial Sequence
  ENSG00000205795_6 (sequence is synthesized)
gcggtcatggttgctggtgggggcgattagctgtgtagacccacaggtgcgtgggcctgggccgccggcgcctcctccccaacgcggggagcctgcccagttcttctggagcctgaaatg

SEQ ID NO: 749982 - DNA, 120 bp, Artificial Sequence
  ENSG00000205795_7 (sequence is synthesized)
cgtgcccctcttggttgcccgctctccacagtggggagggctcacgaggactaggtgacacaagcgagcccctcctggcatccgcgccacaacacttccggaaggttctgctgtggaagg

SEQ ID NO: 749983 - DNA, 120 bp, Artificial Sequence
  ENSG00000205795_8 (sequence is synthesized)
tgcacccgcgctgctccctcagtctcgggcccatctctccaggggtggccgggtcagcttagtgcttctcaactttaactccctaatgagcagcctgggggtgctgttgacttgcagggc

SEQ ID NO: 749984 - DNA, 120 bp, Artificial Sequence
  ENSG00000205795_9 (sequence is synthesized)
ctgaggttctgtacgtctaaccagctcccagcccaggcccgagctccgaagccccaactgcactttgaggagcgagaaccccagctctgatctgccttgcagtgggaggtagagctcgtc

SEQ ID NO: 749985 - DNA, 120 bp, Artificial Sequence
  ENSG00000205795_10 (sequence is synthesized)
ctggtcccctgccccaggcacagcagtgccttccctgcggggagccagcgcccaggtccaaccgggagagggtctgcctgatactggctttccagttctccctctcacaggcagcctggc

SEQ ID NO: 749986 - DNA, 120 bp, Artificial Sequence
  ENSG00000205795_11 (sequence is synthesized)
cagtgcctgcggggcttttaaattctcttcctgcctgggtggaaggtgggaaaccacagcagtgaggcaggaagagccttggaatgttcctggttgacagatgggaaaactgacctgccc

SEQ ID NO: 749987 - DNA, 120 bp, Artificial Sequence
  ENSG00000205795_12 (sequence is synthesized)
aggacgccctgggaacagggggcggagctccggctagaggggactcctgtgtgggcgggcaggtctggagcctgggcccaggtgtggcctgctgggggacagctccgggggagagctgtg

SEQ ID NO: 749988 - DNA, 120 bp, Artificial Sequence
  ENSG00000205795_13 (sequence is synthesized)
gggagaacagcggtctagggaggcaggaggcaggcggcaggctcctccccagcagcctgcagggcatcaggacagagggggaaggaggagacagaagggaaagaaggagatagaggggga

SEQ ID NO: 749989 - DNA, 120 bp, Artificial Sequence
  ENSG00000205795_14 (sequence is synthesized)
aggaggaaacagcgcggcttctgctgaagccagtacaagcctggttatctggcttgacccgcccacacggaggcctccccagcgttttctttttcccgagaagagctccagctcgcaggt

SEQ ID NO: 749990 - DNA, 120 bp, Artificial Sequence
  ENSG00000205795_15 (sequence is synthesized)
ccttagaacacagcagagcaggagcatctcaggaaccaacggccagctccttggcgctgtccccagccccacaggcctgctgcggccatccgcaaacgggcatttccttgaacttttgag

SEQ ID NO: 749991 - DNA, 120 bp, Artificial Sequence
  ENSG00000205795_16 (sequence is synthesized)
agtgcctttgaccagctgttcgcagctgggaaactccaacttttgaagtcagagcttggagcggcccccgcaagggcgtggctcaaaccctccccagagctgggagccattgcttatgca

SEQ ID NO: 749992 - DNA, 120 bp, Artificial Sequence
  ENSG00000205795_17 (sequence is synthesized)
agcccgtttcttttgatgtaaagatggaagtcgttactatattttaataatgcaaatacatcttttaaaataagttaacatttcttaccaccagatggatcaggctttgaatttaaacat

SEQ ID NO: 749993 - DNA, 120 bp, Artificial Sequence
  ENSG00000205795_18 (sequence is synthesized)
gtaaatgtttgtaattttatgtcattttgttaaaatgggacgctttcaattggtttccaagaaagatgatacctctgcattttctggtggaaaaggtgtaatacccttaatgagatcaaa

SEQ ID NO: 749994 - DNA, 120 bp, Artificial Sequence
  ENSG00000205795_19 (sequence is synthesized)
gtgttaggggaaaaaaattccaaaagtagttacaagctatatcaatgtcaaagtaaatgcacttcatcaaagctaagaagtcacaggaattgttctcaggtttttaaaaaaatttttcct

SEQ ID NO: 749995 - DNA, 120 bp, Artificial Sequence
  ENSG00000205795_20 (sequence is synthesized)
gaattcaggaagtgtcttctgaatagcagctagccaaataaagcggtgtgtgtgtactgcagctgtaggtgaacttaaaaataataataaaaagaacaaataaagcagtgtgtaccagcc

SEQ ID NO: 749996 - DNA, 120 bp, Artificial Sequence
  ENSG00000205795_21 (sequence is synthesized)
agtctccgctggggcaacagagggaaggagaaggccggagggggctgttggtgcccggaggatcgccccttccctcccggggcgtctcaggcctggcggacactgaaaggtgtgcgcaga

SEQ ID NO: 749997 - DNA, 120 bp, Artificial Sequence
  ENSG00000205808_0 (sequence is synthesized)
agtgcggaagcggaagaggctgcagggccgggaagcctctgtttggtccggccaggtcccgggatccgggccgccagctgcgatgccaagtccccggaggagcatggagggacggccgct

SEQ ID NO: 749998 - DNA, 120 bp, Artificial Sequence
  ENSG00000205808_1 (sequence is synthesized)
gggcgtctccgcttcgagcagcagcagcagccccggcagcccagcccatggcggcggtggcggcggcagcaggtttgagttccagtccctgctcagcagccgcgccacggccgtggaccc

SEQ ID NO: 749999 - DNA, 120 bp, Artificial Sequence
  ENSG00000205808_2 (sequence is synthesized)
cacctgcgcccggctccgtgcatcggagagcccagttcaccgccgcggctccttccccctggccgcggcgggcccctcgcagtcgcccgcgcctccgctgcccgaggaggaccgcatgga

SEQ ID NO: 750000 - DNA, 120 bp, Artificial Sequence
  ENSG00000205808_3 (sequence is synthesized)
cttgaacccgtccttcctgggcatcgccctgcgctccctgctggccatcgacctgtggctgtccaagaagctgggggtgtgcgcgggagagagctcgtcgtggggcagcgtgcgacccct

SEQ ID NO: 750001 - DNA, 120 bp, Artificial Sequence
  ENSG00000205808_4 (sequence is synthesized)
tatgaagctgctggagatctcgggacacggcatcccctggctgctgggcaccctctactgcctgtgcaggagcgacagctgggccgggcgcgaggtgctgatgaacctgctcttcgccct

SEQ ID NO: 750002 - DNA, 120 bp, Artificial Sequence
  ENSG00000205808_5 (sequence is synthesized)
gctgttggacctgctgctggtggccttgatcaaagggctggtccgcaggcgccgcccggcccacaaccagatggacatgtttgtcactctctcggtggacaagtactccttcccctcggg

SEQ ID NO: 750003 - DNA, 120 bp, Artificial Sequence
  ENSG00000205808_6 (sequence is synthesized)
ccatgccacaagggccgccctgatgtcgaggttcatcctgaaccacctggtgctggccattccactgagggtgctggtggttctgtgggccttcgtcttgggcctatccagggtcatgct

SEQ ID NO: 750004 - DNA, 120 bp, Artificial Sequence
  ENSG00000205808_7 (sequence is synthesized)
ggggcggcacaatgtcaccgacgtagcttttggcttttttctgggctacatgcagtacagcatcgtggactattgctggctctcaccccataatgctccggtcctctttttactgtggag

SEQ ID NO: 750005 - DNA, 120 bp, Artificial Sequence
  ENSG00000205808_8 (sequence is synthesized)
tcaacgatgacaccatctcattgattatggcaccaggaagtctgaaggtttccacattcgatgatgtcaacctaaaccagcagccatcccgcttgtccctcttaggcatttcaggcttcc

SEQ ID NO: 750006 - DNA, 120 bp, Artificial Sequence
  ENSG00000205808_9 (sequence is synthesized)
tttgggatttcaggtgtcccatgatcttgatgtgctgctaggctggagcacacactggccattactgaacacagccatattagggaaagcaaaaaaacccaaaaaatcctctattgtata

SEQ ID NO: 750007 - DNA, 120 bp, Artificial Sequence
  ENSG00000205808_10 (sequence is synthesized)
tttattcaacaactgtttatgtttccaggacaactgcaaagaaaacaagctgaggtggttatactgttgctgttaaaagttggtatcagtaagatttgtgttttgtgataatccctaaat

SEQ ID NO: 750008 - DNA, 120 bp, Artificial Sequence
  ENSG00000205808_11 (sequence is synthesized)
caacataccacttgtaaactgaacttcgagaaagaaacatgatgttcattctgtaaatatacatgcagacaggtcatgtactaatcctagtccttttcctgaggtagattttaaacagta

SEQ ID NO: 750009 - DNA, 120 bp, Artificial Sequence
  ENSG00000205808_12 (sequence is synthesized)
ttggtaagcttttttactttattatctctataatttattatctctatccatatttgtggatcgggtagtgggaaaagagattataatacttgtctttctctcctctccctccatccctca

SEQ ID NO: 750010 - DNA, 120 bp, Artificial Sequence
  ENSG00000205808_13 (sequence is synthesized)
aaagatctttatgcatttcccactactcccttactgtcttttagcattcagagaaaaagccaacttgcttaaagaggaatcacttaaaaggtaggcatatctaagatgctcatagaagag

SEQ ID NO: 750011 - DNA, 120 bp, Artificial Sequence
  ENSG00000205808_14 (sequence is synthesized)
gaagaatgggacatggccccatgcttatttttgtttacaacgtaacatggcatgagagagggcagagaaactaagttgctggggaaagttagaggaactgaaagtttgggaataggctga

SEQ ID NO: 750012 - DNA, 120 bp, Artificial Sequence
  ENSG00000205808_15 (sequence is synthesized)
ccacatattatgccagtgaccagtatgacaggagatggggccctgctgccagtcatctccactgaataaagaataatgctcctctttcagggtaataaagtggggaaaaggaacgtcttc

SEQ ID NO: 750013 - DNA, 120 bp, Artificial Sequence
  ENSG00000205808_16 (sequence is synthesized)
tcaatgcaagaacataagctttctcgtatatacctgtatgctacagtttttcacatggaattccgttttctgaggtacagcacattttaggtaacagtatttaacttgaaattcatcatg

SEQ ID NO: 750014 - DNA, 120 bp, Artificial Sequence
  ENSG00000205808_17 (sequence is synthesized)
ggagtctgctgctataccaggcacaagataaaactccaaaatttctgtttacattgacctttacatttaaagctgttcatccatggtgcctccccaaatcataagaccaaagaccaccaa

SEQ ID NO: 750015 - DNA, 120 bp, Artificial Sequence
  ENSG00000205808_18 (sequence is synthesized)
acgcagggtggactctgctcattattctttgacccagaaagactggagaaggtatgtgctttaagtgctgctctacctgaaaagaaatcctttaaattacctatggaagtgatgtcctca

SEQ ID NO: 750016 - DNA, 120 bp, Artificial Sequence
  ENSG00000205808_19 (sequence is synthesized)
gataatcttaatgactattttggcatttataaatagaaatgattatggactttgatctgccatacggaggttcggaacctggagaacggctgtgataagtaggttttgattgagtgaaag

SEQ ID NO: 750017 - DNA, 120 bp, Artificial Sequence
  ENSG00000205808_20 (sequence is synthesized)
catgagcttgttcagagtgaggggcatagtgaaaaaggaacagccatgcctcaaaatcaaatcatttgcattcccacagcatcctgaataccgactacctcttcacttgctaaagcagct

SEQ ID NO: 750018 - DNA, 120 bp, Artificial Sequence
  ENSG00000205808_21 (sequence is synthesized)
aaactgtgaagctctaagtggtttgggtttgttgtttaaccttagcgagatcctttaactgcagcaatattcaagccagatatttggaagcaaatgatatttcctcttgcagtgtccaca

SEQ ID NO: 750019 - DNA, 120 bp, Artificial Sequence
  ENSG00000205808_22 (sequence is synthesized)
aatctgaatattaggggcatgaaattaggcttaccatctgatttgtaattacaattttggaattctctgttttagttgctgaggcctgagttttctggctcttaaagcatagatcatttc

SEQ ID NO: 750020 - DNA, 120 bp, Artificial Sequence
  ENSG00000205808_23 (sequence is synthesized)
acctgatgtttttgaagcatcctaagtacagtagagtagaaaactgatttctttgttaattgtacactgaataatgccttttaaaaatcaaaataaaattaacaaataatggtgaatgaa

SEQ ID NO: 750021 - DNA, 120 bp, Artificial Sequence
  ENSG00000205809_0 (sequence is synthesized)
tgcagagatgaataaacaaagaggaaccttctcagaagtgagtctggcccaggacccaaagcggcagcaaaggaaacctaaaggcaataaaagctccatttcaggaaccgaacaggaaat

SEQ ID NO: 750022 - DNA, 120 bp, Artificial Sequence
  ENSG00000205809_1 (sequence is synthesized)
attccaagtagaattaaatcttcaaaatccttccctgaatcatcaagggattgataaaatatatgactgccaaggtttactgccacctccagagaagctcactgccgaggtcctaggaat

SEQ ID NO: 750023 - DNA, 120 bp, Artificial Sequence
  ENSG00000205809_2 (sequence is synthesized)
catttgcattgtcctgatggccactgtgttaaaaacaatagttcttattcctttcctggagcagaacaatttttccccgaatacaagaacgcagaaagcacgtcattgtggccattgtcc

SEQ ID NO: 750024 - DNA, 120 bp, Artificial Sequence
  ENSG00000205809_3 (sequence is synthesized)
tgaggagtggattacatattccaacagttgttattacattggtaaggaaagaagaacttgggaagagagtttgctggcctgtacttcgaagaactccagtctgctttctatagataatga

SEQ ID NO: 750025 - DNA, 120 bp, Artificial Sequence
  ENSG00000205809_4 (sequence is synthesized)
agaagaaatgaaatttctggccagcattttaccttcctcatggattggtgtgtttcgtaacagcagtcatcatccatgggtgacaataaatggtttggctttcaaacataagataaaaga

SEQ ID NO: 750026 - DNA, 120 bp, Artificial Sequence
  ENSG00000205809_5 (sequence is synthesized)
ctgtgcagtgctacaagtaaatcgacttaaatcagcccagtgtggatcttcaatgatatatcattgtaagcataagctttagaagtaaagcatttgcgtttgcagtgcatcagatacatt

SEQ ID NO: 750027 - DNA, 120 bp, Artificial Sequence
  ENSG00000205809_6 (sequence is synthesized)
ttatatttcttaaaatagaaatattatgattgcataaatctgaaaatgaattatgttatttgctctgatacaaaaattctaaatcaattattgaaataggatgcacacaattactaaagt

SEQ ID NO: 750028 - DNA, 120 bp, Artificial Sequence
  ENSG00000205809_7 (sequence is synthesized)
acagacatcctagcatttgtgtcgggctcattttgctcaacatggtatttgtggttttcagcctttctaaaagttgcatgttatgtgagtcagcttataggaagtaccaagaacagtcaa

SEQ ID NO: 750029 - DNA, 120 bp, Artificial Sequence
  ENSG00000205809_8 (sequence is synthesized)
acccatggagacagaaagtagaatagtggttgccaatgtctcagggaggttgaaataggagatgaccactaattgatagaacgtttctttgtgtcgtgatgaaaactttctaaatttcag

SEQ ID NO: 750030 - DNA, 120 bp, Artificial Sequence
  ENSG00000205809_9 (sequence is synthesized)
tagtggtgatggttgtaactctgcgaatatactaaacatcattgatttttaatcattttaagtgcatgaaatgtatgctttgtacatgacacttcaataaagctatccagaaaaaaaaaa

SEQ ID NO: 750031 - DNA, 120 bp, Artificial Sequence
  ENSG00000205809_10 (sequence is synthesized)
aaacttgttaatttaatacaatttacaacacacctgctggcactttgatctgggacctccctgttgtctgaactaggtaacctgacctctccactgaagggcgtgtggctttctgatgac

SEQ ID NO: 750032 - DNA, 120 bp, Artificial Sequence
  ENSG00000205810_0 (sequence is synthesized)
atgagtaaacaaagaggaaccttctcagaagtgagtctggcccaggacccaaagtggcagcaaaggaaacctaaaggcaataaaagctccatttcaggaaccgaacaggaaatattccaa

SEQ ID NO: 750033 - DNA, 120 bp, Artificial Sequence
  ENSG00000205810_1 (sequence is synthesized)
gtagaattaaaccttcaaaatgcttctctgaatcatcaagggattgataaaatatatgactgccaaggtttactgccacctccagaaaagctcactgccgaggtcctaggaatcatttgc

SEQ ID NO: 750034 - DNA, 120 bp, Artificial Sequence
  ENSG00000205810_2 (sequence is synthesized)
attgtcctgatggccactgtgttaaaaacaatagttcttattcctttcctggagcagaacaattcttccccgaatgcaagaacccagaaagcacgtcattgtggccattgtcctgaggag

SEQ ID NO: 750035 - DNA, 120 bp, Artificial Sequence
  ENSG00000205810_3 (sequence is synthesized)
tcaaagaactcttctagtctgctttgtatagataatgaagaagaaatgaaatttctggccagcattttaccttcctcatggattggtgtgtttcgtaacagcagtcatcatccatgggtg

SEQ ID NO: 750036 - DNA, 120 bp, Artificial Sequence
  ENSG00000205810_4 (sequence is synthesized)
acaataaatggtttggctttcaaacatgagataaaagactcagatcatgctgaacgtaactgtgcaatgctacatgtacgtggacttatatcagaccagtgtggatcttcaagaatcatt

SEQ ID NO: 750037 - DNA, 120 bp, Artificial Sequence
  ENSG00000205810_5 (sequence is synthesized)
gtgagcataagctttagaattaaagcgcttgagcttgcagtgcatcagataaaattttatatttgttcaaacagaaatgatattatgattgcataagccttaaaatgaattgtgttattt

SEQ ID NO: 750038 - DNA, 120 bp, Artificial Sequence
  ENSG00000205810_6 (sequence is synthesized)
ttggcctcccaagttgctgggattactgacacaagccaccgcccctgagtgctcatgtaccatttagcttgtgttttaaaaatctactttttctgccctccctatttttaactagatgat

SEQ ID NO: 750039 - DNA, 120 bp, Artificial Sequence
  ENSG00000205810_7 (sequence is synthesized)
gttttaaaaattacttttccctctctatatagtttgatttaagcattagtcatttacaacaaatattaatattaaaatgcagaccgttatgattggaaaataaatcaatgaacaatataa

SEQ ID NO: 750040 - DNA, 120 bp, Artificial Sequence
  ENSG00000205832_0 (sequence is synthesized)
atgagcttctcactcacgttcaccgagctggccaacatcgccatcccacagtgcggggtgctgaacttcaaggccctgcacctcctgctgcacggcatcttggagcacatccacatggcc

SEQ ID NO: 750041 - DNA, 120 bp, Artificial Sequence
  ENSG00000205832_1 (sequence is synthesized)
gagctcaagaaagtcctctcaggcgatgaggacttcctgcagacctcgcaggtggtcatcatgcccagggaaggagacgcccagcctatcctcaaccccatgaagaggctcagcaatgtc

SEQ ID NO: 750042 - DNA, 120 bp, Artificial Sequence
  ENSG00000205832_2 (sequence is synthesized)
ttcgaccacgtggtgagccgcctcgacaagttggagaaccagctggccctgctgcaggacctgccctccactgcccagctgctggaagccagccagggcactgcccggcccgtccaggac

SEQ ID NO: 750043 - DNA, 120 bp, Artificial Sequence
  ENSG00000205832_3 (sequence is synthesized)
ctgtggcatctgatcaagctccggaagatggtggagggtcatgatgaagtcatggccaagtcaatgcagaccctgcaggacttgctcactgatcttcatgcactccaggtcaccatcaca

SEQ ID NO: 750044 - DNA, 120 bp, Artificial Sequence
  ENSG00000205832_4 (sequence is synthesized)
gccctcagaaaagaagtggacatgctgaagaacatgcttgacaaggtacacccagaaagaatggacatctttgctgaagacttcaaaatacagaactggaagatggttgcactgcagcgg

SEQ ID NO: 750045 - DNA, 120 bp, Artificial Sequence
  ENSG00000205832_5 (sequence is synthesized)
gaagtggcttctctccagaataagtttaaaaccatccccaaaaccgaggacatggtgctctggagtggccttcatgatgccatgttcacctcagaaattggttcatcaccactggacctg

SEQ ID NO: 750046 - DNA, 120 bp, Artificial Sequence
  ENSG00000205832_6 (sequence is synthesized)
tggcagtctgtagagcagctcccagaggctgccctggcccagaccaccaagtaccttgaagctactcgtgccatccaggtctccgagcccgtccaaaacccccagctactgcagactgtc

SEQ ID NO: 750047 - DNA, 120 bp, Artificial Sequence
  ENSG00000205832_7 (sequence is synthesized)
tggcattatgaggtcccagagctcctcccggagggctcatctgcccaagcagtttcactcagcagagcccaggagccagcgcagcctccggccctcacgcctgagtctgcacctgggtgc

SEQ ID NO: 750048 - DNA, 120 bp, Artificial Sequence
  ENSG00000205832_8 (sequence is synthesized)
acaactgaatttgcacctgggcctgcacctgggactgaacctgtgccaggactggagctggggctggagctggagcctgtgcctgccctggggcctgtcccagggcccagtgtgacacct

SEQ ID NO: 750049 - DNA, 120 bp, Artificial Sequence
  ENSG00000205832_9 (sequence is synthesized)
gggtccttgccagcaccttggcctgtgcttggacctgtgcctgccccaggtgcccagcctccaccactgggagactggcctgcactcccaagacgctggcctcttccccaaggctggccc

SEQ ID NO: 750050 - DNA, 120 bp, Artificial Sequence
  ENSG00000205832_10 (sequence is synthesized)
agggtgggctcttggcctctgtgggacttaggtgtcctgcggccaactcagccccaaccctccagggccccaccaccagccactgagtttggctcattgtggcctcgaccactccagcca

SEQ ID NO: 750051 - DNA, 120 bp, Artificial Sequence
  ENSG00000205832_11 (sequence is synthesized)
tatcagtctcgccagggagaagccctccagctcgcagctgtccaagtaaagggggaggaaaatgatgtccccagcctaaggggccttcgggagagggcccgcaaggatggggcccccaag

SEQ ID NO: 750052 - DNA, 120 bp, Artificial Sequence
  ENSG00000205832_12 (sequence is synthesized)
gatagaactcgcaaggatggggtccccaaagatagaggtggcaaggatgtggaccccaaggatagagctcacaaggatgatgtccccaaagatagaggtggcaaggatgtggaccccaag

SEQ ID NO: 750053 - DNA, 120 bp, Artificial Sequence
  ENSG00000205832_13 (sequence is synthesized)
gatagagctcacaaggatgatgtccccaaagatagaggtggcaaagatggggaccccaaggatagagttggcaaggatggggcccccaaggaagcacagcctaaggctccccagtctgcc

SEQ ID NO: 750054 - DNA, 120 bp, Artificial Sequence
  ENSG00000205832_14 (sequence is synthesized)
cttcaccggctgaaaaccaccgctgccatcgccgccgctgccgccgcagcctacgccgctgccacatcctccgctgcccaggcagccaaagttgctgccaagtttgtcaaggatgcccca

SEQ ID NO: 750055 - DNA, 120 bp, Artificial Sequence
  ENSG00000205832_15 (sequence is synthesized)
cccagatcttgggcgatgattccgaaatctacgaaatcctctctccctcctactctgctgccagcatcggtcccgatccagccctgtcccaggccatggtggctaccaagcaggccatga

SEQ ID NO: 750056 - DNA, 120 bp, Artificial Sequence
  ENSG00000205832_16 (sequence is synthesized)
gccctgaagacaagaagagggctgtcaagtattccatgagccacatagcccagatacctgtcaaacacgactctctgaaggaagaatttgcccagctgtcctgtaacctgaaccagcgct

SEQ ID NO: 750057 - DNA, 120 bp, Artificial Sequence
  ENSG00000205832_17 (sequence is synthesized)
tgagttatctagccaatatgggaggtccttccagcctcgggacaacagtggacatattgcagaaaaagattggcagcctccagaaatctaggctcaaggaggaagaacttgagagaattt

SEQ ID NO: 750058 - DNA, 120 bp, Artificial Sequence
  ENSG00000205832_18 (sequence is synthesized)
ggggcaaccaaatagagatgatgaaggatcgctacatcactttggacaaggcggtggagaacctgcagattcgcatggatgagttcaagactctccaggctcaaatcaaaagactggaaa

SEQ ID NO: 750059 - DNA, 120 bp, Artificial Sequence
  ENSG00000205832_19 (sequence is synthesized)
tgaacaaggtgaataagagcacgatggaggaggagctgagagagaaagctgacaggagtgccctggcaggcaaggcaagccgcgttgacctggagactgtggccttggagctgaacgaga

SEQ ID NO: 750060 - DNA, 120 bp, Artificial Sequence
  ENSG00000205832_20 (sequence is synthesized)
tgattcagggcatactcttcaaggtcacgatccatgaggacagctggaagaaggctatggaggagctcagcaaggacgtgaacaccaagttagtccacagtgatctggatcccttgaaga

SEQ ID NO: 750061 - DNA, 120 bp, Artificial Sequence
  ENSG00000205832_21 (sequence is synthesized)
aagaaatggaagaggtctggaaaatcgtccggaagctgctgattgagggcttaagactggatcctgacagtgctgctggctttaggaggaagctgttcaagcgcgtgaagtgcatctcct

SEQ ID NO: 750062 - DNA, 120 bp, Artificial Sequence
  ENSG00000205832_22 (sequence is synthesized)
gtgaccggcctgtggagatgatgactggcccacagctgatcaccatccgcaaagcccacctgctgtcccggctgcggccagccagcgccaacagctgcgagtacttgcagcggcaacaga

SEQ ID NO: 750063 - DNA, 120 bp, Artificial Sequence
  ENSG00000205832_23 (sequence is synthesized)
tgagggaacagcagtggctgcagctccaggacctcggtatccaggaggattgtcagcaggactggggtgatggcccccaaaacgccaccagcctcaagtgcaagtcctgcaacctgttga

SEQ ID NO: 750064 - DNA, 120 bp, Artificial Sequence
  ENSG00000205832_24 (sequence is synthesized)
cgctctatccctacggggatccccacgtgatcgactatgacagcgccgaggtggacatcctgggcgtggatgggatcctgtacaaaggccgcgtgaacagccagcgtggggctcagccct

SEQ ID NO: 750065 - DNA, 120 bp, Artificial Sequence
  ENSG00000205832_25 (sequence is synthesized)
tggccgtcgcaaaggagctggcagctgtgaaggctccatctcccccgtcacaaagcctgtatgaccgtgtgcactccagtgccctatttggcgccatctgcccccccctgtgcccccgct

SEQ ID NO: 750066 - DNA, 120 bp, Artificial Sequence
  ENSG00000205832_26 (sequence is synthesized)
ccagtgcctgctcagctgcctcgggccctcacctgacgatgccagctcgaccaccttccctgccacctctgctgctgctgccaccgctgattccatccctaagggacccccagcaggccc

SEQ ID NO: 750067 - DNA, 120 bp, Artificial Sequence
  ENSG00000205832_27 (sequence is synthesized)
cagggtccaccaggctctcaagagctccacacattgagtcccgagtcggcaggaagccccccgaggagcccgccaacccgtgagccccaccccgctgcgccccccatcgccaagtcccct

SEQ ID NO: 750068 - DNA, 120 bp, Artificial Sequence
  ENSG00000205832_28 (sequence is synthesized)
ccacgtccgaggctgaggcccatgtggccctcccactcccaccaagtcccctccacatcggaggctgaggcctatgtggccccccacccccacccccaccaagtcccctccatgtccgag

SEQ ID NO: 750069 - DNA, 120 bp, Artificial Sequence
  ENSG00000205832_29 (sequence is synthesized)
gctgaggctcatgcgcccccccccatccctaccaagtcccctccacgtccgaggctgagacccatatgccccccccacccccaccaagtcccgtccccggctgagacccagggccctgag

SEQ ID NO: 750070 - DNA, 120 bp, Artificial Sequence
  ENSG00000205832_30 (sequence is synthesized)
cctggcccagaaagggtgctggggccctggatagaggggaggggtctgtgtaggggacccccatgctgacccagtggctgttttatcctgtgcatataaatacaaacagcacagtgcaca

SEQ ID NO: 750071 - DNA, 120 bp, Artificial Sequence
  ENSG00000205835_0 (sequence is synthesized)
agtctcatttaaagctcccactggttttactgaaaaattgagtgggctcagtttctgcagcgctttcttccactgcaagatgaacaccattctgccttgccaagaccagtactttgtagg

SEQ ID NO: 750072 - DNA, 120 bp, Artificial Sequence
  ENSG00000205835_1 (sequence is synthesized)
aggccagagctataattgcccgtattccactacaacgtcagaatctagtgttgacgtttccacggagacttgggtctctttctgggctgctggtctcctggacaacagagagctccaaca

SEQ ID NO: 750073 - DNA, 120 bp, Artificial Sequence
  ENSG00000205835_2 (sequence is synthesized)
agcaccacaggcacaggaatcattcagtgactcaaattttcctcttccggacttgtgctcatgggaagaggctcagctttcctctcagctctacagaaataagcagctgcaagataccct

SEQ ID NO: 750074 - DNA, 120 bp, Artificial Sequence
  ENSG00000205835_3 (sequence is synthesized)
ggtgcagaaggaagaagaactcgccaggttacacgaagagaataatcacctcagacaatacctgaattctgctttggttaaatgtcttgaagaaaaggccaagaaattgctctcatctga

SEQ ID NO: 750075 - DNA, 120 bp, Artificial Sequence
  ENSG00000205835_4 (sequence is synthesized)
tgagttctccaaagcatatggaaaattcaggaaggggaagagaaaatccaaagagcaaagatactctcctgctgagattccccatcccaaaaatgccaaaagaaacctctctagtgaatt

SEQ ID NO: 750076 - DNA, 120 bp, Artificial Sequence
  ENSG00000205835_5 (sequence is synthesized)
tgctaactgtgaagaacaagctgggccccctgtggatccctgggtccttcaaacacttgggttaaaagaccttgacactatcgatgacacctcatcagctaactacagtgccctcgcatc

SEQ ID NO: 750077 - DNA, 120 bp, Artificial Sequence
  ENSG00000205835_6 (sequence is synthesized)
tcatcccagaagagtcgccagcacattttcccagtttccggatgatgcagttgattataaaaatatccccagagaggatatgccaattgactatagaggtgacagaacaacccccttgca

SEQ ID NO: 750078 - DNA, 120 bp, Artificial Sequence
  ENSG00000205835_7 (sequence is synthesized)
cagcactgccactcatggagaagatttccacatcctttctcaactttcaaatcccccagtggggctgaaaactcttccttactatactgctcatgtgtcacccaacaagacagagatggc

SEQ ID NO: 750079 - DNA, 120 bp, Artificial Sequence
  ENSG00000205835_8 (sequence is synthesized)
attttccacatccctgagccctcattgtaatgtgaaaactcattccttccaccagggacaagcctttgtgcgtcgagatgaggagggaggctggaagtttacctgggtccctaagcagtc

SEQ ID NO: 750080 - DNA, 120 bp, Artificial Sequence
  ENSG00000205835_9 (sequence is synthesized)
ttagtgacccctcttttatcacaaagcactgccacgaactctgtttacaaagacctctcttgcacttgaatttgactatgtggaacacagaagctgttgcttagactgtctcctgccact

SEQ ID NO: 750081 - DNA, 120 bp, Artificial Sequence
  ENSG00000205835_10 (sequence is synthesized)
ttaaatgtcactctcaattacccacttaaatctgcagggaatggcttccaagaatccataatgaaacgtgtccgcgcttcttttacctaaatttgacttgtttacacaccaatacctgct

SEQ ID NO: 750082 - DNA, 120 bp, Artificial Sequence
  ENSG00000205835_11 (sequence is synthesized)
attgacatcctctctttgccctatacttgataaggtattttccactcacttctatattcctttaagacctagatacatttttccaattttaaccagtttaacagattttcctcttttaag

SEQ ID NO: 750083 - DNA, 120 bp, Artificial Sequence
  ENSG00000205835_12 (sequence is synthesized)
tagttgaaatattcacagcccttttacttttctccctttgtcatttctgaaaactgtctttagaatgagccctatttttgcttcaagtacttgctactgcatgttcaaatagctgagggt

SEQ ID NO: 750084 - DNA, 120 bp, Artificial Sequence
  ENSG00000205835_13 (sequence is synthesized)
ggggttgaaacaagtgtctttgcccatcaccactactcctgaagacataatgtggatgtgtgtagcattatgttcatggcagttcaaaaagttcagtgccccatagtggcattgacaaag

SEQ ID NO: 750085 - DNA, 120 bp, Artificial Sequence
  ENSG00000205835_14 (sequence is synthesized)
cctcttaaaacaactgtaactccactaataatcaatatcacagataaactttaaaattacaaagaatttaaattatttttaaatgcctcatgatgtatcagcttctatatgtacccagca

SEQ ID NO: 750086 - DNA, 120 bp, Artificial Sequence
  ENSG00000205835_15 (sequence is synthesized)
ggactgtggtaacaaaactagtcatcatctgcaactacccagatgctgacaaactcctattgctgaaaatagactaacctagctcagccattgtctcattcattcattcattcgcgtatt

SEQ ID NO: 750087 - DNA, 120 bp, Artificial Sequence
  ENSG00000205835_16 (sequence is synthesized)
cattttttcattgatcagtccacccaagaaatctgtagaatacctaatgcctactttgtaccaggcactatgctatgtgatggtgataaaatacaagcaatttagacactgtggccacca

SEQ ID NO: 750088 - DNA, 120 bp, Artificial Sequence
  ENSG00000205835_17 (sequence is synthesized)
tcatgagacttagacctactcatctgctatgactttgcgaaaacgacttcccttttgtgaaggttcagtttcccaactgtagaatacagaagttggactagataattactaatattctat

SEQ ID NO: 750089 - DNA, 120 bp, Artificial Sequence
  ENSG00000205835_18 (sequence is synthesized)
gaattgaggctgggtcctatcagatttactccaacatggcagtttcaggtcactgaagaaactaaagagaagtctttagataggcactgcaagtattaggtagggtaaactttatgtaca

SEQ ID NO: 750090 - DNA, 120 bp, Artificial Sequence
  ENSG00000205835_19 (sequence is synthesized)
attaataaaattcaaaaacataagtcatttgaagttaacattagaaatcattgctctgatcacagtactctttttctagagcccattttgcagttaactcggcgtaactgtgtaagaata

SEQ ID NO: 750091 - DNA, 120 bp, Artificial Sequence
  ENSG00000205835_20 (sequence is synthesized)
atttgcctctaaaaatagatacatattaatttttaaataagtgcggatagattgcatataaatattgctatcaaggacttcatatttctaaatttgaaacaatatattttcagtgcttgt

SEQ ID NO: 750092 - DNA, 120 bp, Artificial Sequence
  ENSG00000205835_21 (sequence is synthesized)
gctagttttcttctttcccatctctcaagacccctatcattcccagaataatttgcacatcctgcatgtgcacctatgttttttggacaaacttcaattaatgatgaaatctttcatgtt

SEQ ID NO: 750093 - DNA, 120 bp, Artificial Sequence
  ENSG00000205835_22 (sequence is synthesized)
gaaacctgttctcatttttctcttttccacatctcaataagtcatcttgcacaatcaatatctcgtaggtcaactgtgttggttaggattctttgtaacagagacatgcctttcattgtt

SEQ ID NO: 750094 - DNA, 120 bp, Artificial Sequence
  ENSG00000205835_23 (sequence is synthesized)
gtttctgtttggttgttgctttattttggtgatgtaagcaaagggtctgttttataaagttttgttgccacccacttttaaaaataatttatgaagaaaatccaatatagtaattaatat

SEQ ID NO: 750095 - DNA, 120 bp, Artificial Sequence
  ENSG00000205835_24 (sequence is synthesized)
tactctctggagtactttaagaagtagaacacattccattttctaaaaaataaaataaaataaataactgtgccttttacattctggtatctgggcccctggtcggtgaaatttgtcgct

SEQ ID NO: 750096 - DNA, 120 bp, Artificial Sequence
  ENSG00000205835_25 (sequence is synthesized)
ttttagaataagagatttaaggattcgaattattgtactttatgacactaggaattgagaaagtaatataactaattttgaaagtctaataatcaagctgtaaaaggaaatgtatgagtt

SEQ ID NO: 750097 - DNA, 120 bp, Artificial Sequence
  ENSG00000205835_26 (sequence is synthesized)
aacaaatatttattttgcattctttgtgtgccttatcatgtgttaagtaccatgagggtacacccaggcttagcacaatgcatttggtatacaaaaccatgtaaaatgtcatagcttttg

SEQ ID NO: 750098 - DNA, 120 bp, Artificial Sequence
  ENSG00000205835_27 (sequence is synthesized)
atagcttttaaatgaaacttaattttggcccagtttaaagatattaccgaacatttgggataaaatgtgatggtttcctggcttctatcatggacgatgttatggaagacaattaccacg

SEQ ID NO: 750099 - DNA, 120 bp, Artificial Sequence
  ENSG00000205835_28 (sequence is synthesized)
atcatgtctataaatatttaatatccatttaaattatgtatagaaaattattttgttcatgttttagaaattaaacatttctttcacctgagtatatgttttacttgtatggcttcacca

SEQ ID NO: 750100 - DNA, 120 bp, Artificial Sequence
  ENSG00000205835_29 (sequence is synthesized)
cttcaccatgtctctctggtaaaccacagttaatattttaagctatagtgggaaataaaaactcttttgtgattgcggtaactatttttataccatgcttaacattccctaatagcagat

SEQ ID NO: 750101 - DNA, 120 bp, Artificial Sequence
  ENSG00000205835_30 (sequence is synthesized)
atgtagatttaatttaggcctctcaggatgagggctccctgtgcttgtgttcatacaacaaacaatcatcaagtttaaggcagttaaggagcagtggcattattataaggttacaaagtc

SEQ ID NO: 750102 - DNA, 120 bp, Artificial Sequence
  ENSG00000205838_0 (sequence is synthesized)
attgtctccttggccggacctgggctgcggaaggtaactggggacgtcgcaggctgtgcagctttcgcgaggcaccgctttggcgcccggaccgaggaagaagatgcaagccagccccat

SEQ ID NO: 750103 - DNA, 120 bp, Artificial Sequence
  ENSG00000205838_1 (sequence is synthesized)
ccgtatcccaactgttagcaatgacatcgactgggatttctgcttccatatgtcacagcaaaccgagatcccagctcaccagcaaacagatgagttgtatcccactggtgggtgtggaga

SEQ ID NO: 750104 - DNA, 120 bp, Artificial Sequence
  ENSG00000205838_2 (sequence is synthesized)
gagtgaagaggaaactaaagctaaagagaaggagaaggccatagactgtatgtctcatcccaaagagaaattagcccaatcccagaagaaagtagctcagctgattaaggaaaaaatgaa

SEQ ID NO: 750105 - DNA, 120 bp, Artificial Sequence
  ENSG00000205838_3 (sequence is synthesized)
tactcaagcaaacaaggagctgattcgatgtgtcatcctttctcggattatttttggggaccatcactggaaatgtgcacgagctctggccaacctagcttatggctacttgacactgag

SEQ ID NO: 750106 - DNA, 120 bp, Artificial Sequence
  ENSG00000205838_4 (sequence is synthesized)
aggcctcccagttcaggccaagaaacatgctacatcagccaagaatacactgttgacctggaaggcaaatacgacctcaaataaggagaaagaggaaatcctggaagctctggtcaagct

SEQ ID NO: 750107 - DNA, 120 bp, Artificial Sequence
  ENSG00000205838_5 (sequence is synthesized)
gaaccgtggcagagaagcctatttcaacctgcagaaggcagagagaaacatgaaggagctgaaagaattatataaaggaggtgtttgtgaattacaagtctctgagaacgacctaacact

SEQ ID NO: 750108 - DNA, 120 bp, Artificial Sequence
  ENSG00000205838_6 (sequence is synthesized)
tgctttgggcagagcctccttggccatccacagactgaacctagctctggcatactttgaaaaggcaattggcgatgttattgctgccaagggtgataggacgtcagatctgatcagcct

SEQ ID NO: 750109 - DNA, 120 bp, Artificial Sequence
  ENSG00000205838_7 (sequence is synthesized)
gtacgaggaagctgctcagatagagcagctgaggaggaaccacaaccaggccatccagtacttgcagcaggctcattctgtctgtgtttctttgttcactgaagtcagccccaaaactgc

SEQ ID NO: 750110 - DNA, 120 bp, Artificial Sequence
  ENSG00000205838_8 (sequence is synthesized)
agaaatgagtgcgttactggccaaagcttatgccatgtctggagaggcccagcacagggatgctgttgagatatatttcataagaagtatcaatgcatatcgagcaacattgggctcaga

SEQ ID NO: 750111 - DNA, 120 bp, Artificial Sequence
  ENSG00000205838_9 (sequence is synthesized)
ggattttgaaacactgagcaccactgaagaattttgcaaatggcttgtccaaaatggagaaaaacaggacaagtagcagttcatccagatggagaagagaagccattcctggaagaagga

SEQ ID NO: 750112 - DNA, 120 bp, Artificial Sequence
  ENSG00000205838_10 (sequence is synthesized)
actctacatacaaaggcacagaagcatgacagagggcagtgtatggaggaatggtcttctgttatcaaattgaaaacctctatacaggatagccaacaataaagacaaccttgttgatga

SEQ ID NO: 750113 - DNA, 120 bp, Artificial Sequence
  ENSG00000205838_11 (sequence is synthesized)
agtagggagacaaagagcctccttaccctgtggcagaggacaagtagcagttcatccagatggagaagagaagccattcctggaagaaggaactctacatacaaaggcacagaagcatga

SEQ ID NO: 750114 - DNA, 120 bp, Artificial Sequence
  ENSG00000205838_12 (sequence is synthesized)
cacaaccaggccatccagtacttgcagcaggtcagtgggttggccagagcccaggctgggttgccttgtttggccccaggcttggttctcagggccagggaagcatgggcttctcagaag

SEQ ID NO: 750115 - DNA, 120 bp, Artificial Sequence
  ENSG00000205838_13 (sequence is synthesized)
aacaagggctggaattgattctgttttaaccctgactttcctccagatccacctaagagcccttgatcaaaccttaaatgaccaggccagagaacactgactcaggtgggcgaatgtgct

SEQ ID NO: 750116 - DNA, 120 bp, Artificial Sequence
  ENSG00000205838_14 (sequence is synthesized)
gtgtcattggctgtgcagacagcacttccccctccccctcttatctctgttggtgctgtaaaaaagaagcaaaatgtgagtctactccaaggaaaaaagatacagggacaaccgaactta

SEQ ID NO: 750117 - DNA, 120 bp, Artificial Sequence
  ENSG00000205838_15 (sequence is synthesized)
aatcttcagcaaaaacaaaaggcctttttaaatgaaaaatcatggtattttagggtaatgctgtcatttgtactttaaactagtctagctgattatatttccaaacctaaggttaaacta

SEQ ID NO: 750118 - DNA, 120 bp, Artificial Sequence
  ENSG00000205838_16 (sequence is synthesized)
acaaaagggtgtttcacttggaggtaactaacttgacaaatgcccgggggaaaacaaaacaaaacataggaaggaatggtgagtctattatattagggtacttttatgtatcatgtactt

SEQ ID NO: 750119 - DNA, 120 bp, Artificial Sequence
  ENSG00000205838_17 (sequence is synthesized)
gaagctgctaaattcaccttttctctctccgaaggagaatgctgcctgtggcttcaggtatctcccacagtgacaaacatcaaaatactggatatcctgtatcatagaaaaggtgcaatg

SEQ ID NO: 750120 - DNA, 120 bp, Artificial Sequence
  ENSG00000205838_18 (sequence is synthesized)
caatctaacagtatacatgaaaacagactctgaagaaaaggcattgcaaacaatctgacagtccacaattataaacatcacacagtggagagatgtcagagaatgctgctgtgaaggcag

SEQ ID NO: 750121 - DNA, 120 bp, Artificial Sequence
  ENSG00000205838_19 (sequence is synthesized)
ggagtccactgcttacagagaaagccagtctggtttttgtgttcaagactttctcaaagcagtggtcagatcagaatgaataaaacaataaatagcagtgtttcccaaaagcaccaaaag

SEQ ID NO: 750122 - DNA, 120 bp, Artificial Sequence
  ENSG00000205838_20 (sequence is synthesized)
ataagagttaaaatgtatggaatgctttttctacgttccctagaggatatatcgattcatttaatctgtacaatagctctatgaagtaggtaccattattattttatctcattttaagga

SEQ ID NO: 750123 - DNA, 120 bp, Artificial Sequence
  ENSG00000205838_21 (sequence is synthesized)
ctaagaaatagtaaagcagggatttgaactccacatctgaccctacagcctgtattcataacaactctgctctgtgtcttggctccaaagtcttctctgataacccctcagctctttgaa

SEQ ID NO: 750124 - DNA, 120 bp, Artificial Sequence
  ENSG00000205838_22 (sequence is synthesized)
acacctcacagtatttggcctatgaaatattaagcacaggtggttcttttgtggctggtgggtgtggactcaatgtttttctctttctcttttctaagtgttactccttccattttagca

SEQ ID NO: 750125 - DNA, 120 bp, Artificial Sequence
  ENSG00000205838_23 (sequence is synthesized)
caaataatataaaatctaacacttttttagtgcttactatatgctgggtggtgttctaaccactttacatatattaaccattaatttatttaatatttacaacaactttttataacaaat

SEQ ID NO: 750126 - DNA, 120 bp, Artificial Sequence
  ENSG00000205838_24 (sequence is synthesized)
actattcttattatccctgatttacatttacaagactgccttcaagactggagttcagtccagtgagactgagctaaggttatgactttatttttgctatgaaatctaataaaaattata

SEQ ID NO: 750127 - DNA, 120 bp, Artificial Sequence
  ENSG00000205838_25 (sequence is synthesized)
ctagccaacatttattgagaacttaccacgtgatgagcaccgtgccctgtgctttgcatataccatctcacttaatccttcccaaaccctaatcagtgggaattatatattccttctacg

SEQ ID NO: 750128 - DNA, 120 bp, Artificial Sequence
  ENSG00000205838_26 (sequence is synthesized)
aatgaaggtgaaattacttgcacaagactcatagctaggaagtggcagagctgggactcaaactcacctctcatctaaatccacagtgaacactgtcattgggtgcttaccttgtcatga

SEQ ID NO: 750129 - DNA, 120 bp, Artificial Sequence
  ENSG00000205838_27 (sequence is synthesized)
ttttctttattccaggctcattctgtctgtgtttctttgttcactgaagtcagccccaaaactgcagaaatgagtgcgttactggccaaagcttatgccatgtctggagaggcccagcac

SEQ ID NO: 750130 - DNA, 120 bp, Artificial Sequence
  ENSG00000205838_28 (sequence is synthesized)
aggggtaggtaaaagaggtagccttgaagttatttcccagtcacatgagggaagcacattggcaaacagcctatctaagattctaattagctatttattcctgtaatggaaaaattaggt

SEQ ID NO: 750131 - DNA, 120 bp, Artificial Sequence
  ENSG00000205838_29 (sequence is synthesized)
gggtcacagtctcatacaaaatcaattacacattaatttaaacctgataatatacccccacattcgttggaatgtcagtaacaaataaatcatctgatttctacatcctctatttatttt

SEQ ID NO: 750132 - DNA, 120 bp, Artificial Sequence
  ENSG00000205838_30 (sequence is synthesized)
gaatctcagtgagattcaccttcttaactaatagatatcacacatactgtgaatgtggcctgtgcagtatcggttgataaggacatccagtgataaatgggtagagctttacctcctcca

SEQ ID NO: 750133 - DNA, 120 bp, Artificial Sequence
  ENSG00000205838_31 (sequence is synthesized)
ctttcagtctccttgactcttttcctctggctgacaagagagaatgtttgttagcagaattttcttgacccatattcaatagttagatactgggggttgcagagaaagccaactgattaa

SEQ ID NO: 750134 - DNA, 120 bp, Artificial Sequence
  ENSG00000205838_32 (sequence is synthesized)
tttatgcttcaacaatagttctttgtctggcaaggtcatctttttgaaagtgggtggctttgggagagacacaaatgaaccaatgagggaggacaatgtatcattctgtgctggcttgat

SEQ ID NO: 750135 - DNA, 120 bp, Artificial Sequence
  ENSG00000205838_33 (sequence is synthesized)
cagattaatggacactgatggattcagtggcctgtcaggaggaatttaggcttcatgaagaatataatttgatcattttaaaactgtctattttctttgcttataaaagtaacctttttg

SEQ ID NO: 750136 - DNA, 120 bp, Artificial Sequence
  ENSG00000205838_34 (sequence is synthesized)
tgtatgttattttccagttagagagagggacagaattatagagaaagctttccatcctacttttttcaatgcttgtattccccatgtcattaaataaacattttttttcagtttgcaaaa

SEQ ID NO: 750137 - DNA, 120 bp, Artificial Sequence
  ENSG00000205838_35 (sequence is synthesized)
gccgaatacagcccgcacacgtcgcagctttaaataagtagggccgtggggcccggcgctcccttccatccttggacggaatgtatcttctcttcctacgccttcacctccgaggggaag

SEQ ID NO: 750138 - DNA, 120 bp, Artificial Sequence
  ENSG00000205838_36 (sequence is synthesized)
agctttcgcgaggcaccgctttggcgcccggaccgaggtgcgccagggtcaggaggccgacgcagcgggaggaagccgcgccgtcgggctcagggagctgggaggctggttccggggcgt

SEQ ID NO: 750139 - DNA, 120 bp, Artificial Sequence
  ENSG00000205846_0 (sequence is synthesized)
aatgttggaagtctcttagtcctataagagtgtgtagcagtttgtccctgagctctagcttctttaaatgaagctgagtctctgggcaacatctttagggagagaggtacaaaaggttcc

SEQ ID NO: 750140 - DNA, 120 bp, Artificial Sequence
  ENSG00000205846_1 (sequence is synthesized)
tggaccttctcaacacagggagcctgcataatgatgcaagagcagcaacctcaaagtacagagaaaagaggctggttgtccctgagactctggtctgtggctgggatttccattgcactc

SEQ ID NO: 750141 - DNA, 120 bp, Artificial Sequence
  ENSG00000205846_2 (sequence is synthesized)
ctcagtgcttgcttcattgtgagctgtgtagtaacttaccattttacatatggtgaaactggcaaaaggctgtctgaactacactcatatcattcaagtctcacctgcttcagtgaaggg

SEQ ID NO: 750142 - DNA, 120 bp, Artificial Sequence
  ENSG00000205846_3 (sequence is synthesized)
acaaaggtgccagcctggggatgttgcccagcttcttggaagtcatttggttccagttgctacttcatttccagtgaagagaaggtttggtctaagagtgagcagaactgtgttgagatg

SEQ ID NO: 750143 - DNA, 120 bp, Artificial Sequence
  ENSG00000205846_4 (sequence is synthesized)
ggagcacatttggttgtgttcaacacagaagcagagcagaatttcattgtccagcagctgaatgagtcattttcttattttctggggctttcagacccacaaggtaataataattggcaa

SEQ ID NO: 750144 - DNA, 120 bp, Artificial Sequence
  ENSG00000205846_5 (sequence is synthesized)
tggattgataagacaccttatgagaaaaatgtcagattttggcacctaggtgagcccaatcattctgcagagcaatgtgcttcaatagtcttctggaaacctacaggatggggctggaat

SEQ ID NO: 750145 - DNA, 120 bp, Artificial Sequence
  ENSG00000205846_6 (sequence is synthesized)
agaattactgacgtaattttttccctgacgtctttaaaattgaaccctatcatgaaatgataatttcttcctgaatttacacataatccttatgttatagaggttcacagaaatggaaag

SEQ ID NO: 750146 - DNA, 120 bp, Artificial Sequence
  ENSG00000205846_7 (sequence is synthesized)
atacctgtttccctttaatcaatcttctcgtttcctcttttccattaatgatagaatgcacccttcctctctttgttccattctttcacttgttattcatttttttctttcttcacactt

SEQ ID NO: 750147 - DNA, 120 bp, Artificial Sequence
  ENSG00000205846_8 (sequence is synthesized)
cattacacaaatatttattgtttcagagactgtactattttgtttgttagaagatttataaggcagtatcttttgaaaattatgactttccttcctcaatataccataaagaaatctttt

SEQ ID NO: 750148 - DNA, 120 bp, Artificial Sequence
  ENSG00000205846_9 (sequence is synthesized)
tggtcaagatggtagttggaactacaatcatctgaaggcctgacaagagttgaaagacatgttttctagatggctcactcacatggctggcaacttggtgttggctattaatgtaacctg

SEQ ID NO: 750149 - DNA, 120 bp, Artificial Sequence
  ENSG00000205846_10 (sequence is synthesized)
gaaataaattttattctgcagttagggatttggcattttatatatgttgattcaatcaagtttggcaagcagggtgttcgatactgctatatcctgtattcttggtttatttgttttatt

SEQ ID NO: 750150 - DNA, 120 bp, Artificial Sequence
  ENSG00000205846_11 (sequence is synthesized)
tctgagaaatatgtgttaagatctctcgctgattgggaatttgtctatttctcatttaaattttgtcaaatctttctttgcttgcaagcatttcttgttacccaaatctaatctattcct

SEQ ID NO: 750151 - DNA, 120 bp, Artificial Sequence
  ENSG00000205846_12 (sequence is synthesized)
gaaaatatgatggttagcaaagtttgagataactagagcctgtaatccatcattttaaatggcaatgataatgacagtttatttttatgttatataaaaacctcaacaaattttccaaac

SEQ ID NO: 750152 - DNA, 120 bp, Artificial Sequence
  ENSG00000205856_0 (sequence is synthesized)
agtcggtagctggccgtagaaggaggaggagctccgactacattctgtccttgtgcctcttggacttttttgtgtgtttaggtgcccaatggggagcaaactgacttgctgcctgggccc

SEQ ID NO: 750153 - DNA, 120 bp, Artificial Sequence
  ENSG00000205856_1 (sequence is synthesized)
cagcgggggcctcaactgtgactgctgcaggccagatgtgggaccctgccatgagtgtgagattcctgagactgtggcagccacagcaccagcatccaccactgcaaagcctgccaaatt

SEQ ID NO: 750154 - DNA, 120 bp, Artificial Sequence
  ENSG00000205856_2 (sequence is synthesized)
ggatttgaaagctaagaaggcccaactcatgcagtacctcagcctcccgaagacgccgaagatgctgaagatgtccaaaggtttggacgcccgctccaagcgctggttaaaaataatatg

SEQ ID NO: 750155 - DNA, 120 bp, Artificial Sequence
  ENSG00000205856_3 (sequence is synthesized)
gagacggcacgggatttggcctctagaaaatataggtcccactgaagatgtgcaggcgtctgcacacggcggtgtggaggagaatatgacatcagatattgaaatacctgaggccaagca

SEQ ID NO: 750156 - DNA, 120 bp, Artificial Sequence
  ENSG00000205856_4 (sequence is synthesized)
cgaccaccgtcccactgaagatgtgcaggtgtctgcacacggcggtgtggaggagaatataacgtcagatattgaaatatctgaggccaagcacgaccaccatttggtcgaagatctcag

SEQ ID NO: 750157 - DNA, 120 bp, Artificial Sequence
  ENSG00000205856_5 (sequence is synthesized)
tctgtctctcttgaagacttcatgacatcaggtctcagtgaaagcctatctgtctctcttgaagacctcatgacaccggagatggcaaaggagagatatgaagattacctctgctgggtt

SEQ ID NO: 750158 - DNA, 120 bp, Artificial Sequence
  ENSG00000205856_6 (sequence is synthesized)
aagatggcacggtctcggctcaatgaacccatcagcagccaggttctaggacttctccggctttagtgttccaagtagctgggattacagacgcctgccatcacgcccagctcaaatcat

SEQ ID NO: 750159 - DNA, 120 bp, Artificial Sequence
  ENSG00000205856_7 (sequence is synthesized)
tttatgaatgcatatttccatctgggtgaaaaaaaaatcacaagcctctctctcttcctactgagcacctgtgaacagtgacctgcagtttgtggctgcagccagtcctcttgcagcctg

SEQ ID NO: 750160 - DNA, 120 bp, Artificial Sequence
  ENSG00000205856_8 (sequence is synthesized)
gtgttcttacatttcattctgaggctcacattctcagtcaccatgcagaagaacacccgccccatcctgggtcattacagagtgggtcaatccatctgctgcatctgaagagctgggtcc

SEQ ID NO: 750161 - DNA, 120 bp, Artificial Sequence
  ENSG00000205856_9 (sequence is synthesized)
agcttctacagtgaatccatatatttctgtatttcctggataaggaagagcaaaggagctgagctggtggaggaagaagaactaatattaactgactccttattttgtgctagtactgtg

SEQ ID NO: 750162 - DNA, 120 bp, Artificial Sequence
  ENSG00000205856_10 (sequence is synthesized)
ctagttacatattttatctcatgtaattcttaccaaactgtaagggggtttcggagtgatggagacaatattgatgttatctccattttagggtgagaaaataaaggctcagaaatgtta

SEQ ID NO: 750163 - DNA, 120 bp, Artificial Sequence
  ENSG00000205856_11 (sequence is synthesized)
gtacgtatttttttttaaacagctttatttacgtgtagttgacatgcaaaacattcacccatttaacgtaagtgattcagcgtttttactatattcacagggttgtgcaaccattgttac

SEQ ID NO: 750164 - DNA, 120 bp, Artificial Sequence
  ENSG00000205856_12 (sequence is synthesized)
aatctaatcttagaacctctttattccccctcaaagaaaccccactagtagtcactcctctgtctttcccaactcccacacccctggatctaggcagccacgaatgtacttcctgtttct

SEQ ID NO: 750165 - DNA, 120 bp, Artificial Sequence
  ENSG00000205856_13 (sequence is synthesized)
ctttgccttccttcagcaccaaggagaatggtccagcagcagctcagtccatgcctgtcaaccgcccacctgcacatgatccagccctggtccacatcccccaaggctccttgtgggatt

SEQ ID NO: 750166 - DNA, 120 bp, Artificial Sequence
  ENSG00000205856_14 (sequence is synthesized)
cctcagcagcaccaatgcactgactgtcactatgttctcctagatttggtcgaagatctcagtgaaagcctatctgtctgtcttgaagacttcatgacatcggatctcagtgaaagccta

SEQ ID NO: 750167 - DNA, 120 bp, Artificial Sequence
  ENSG00000205856_15 (sequence is synthesized)
acatcgtctatgcttcattcggggggccagtgacttgatcactgtttgacatgttgttttctacgtcaccaagtgaataatagacctgtgccaacagggcccagcatgatccgatcctca

SEQ ID NO: 750168 - DNA, 72 bp, Artificial Sequence
  ENSG00000205857_0 (sequence is synthesized)
atctaccttatctggtcggtcatctctgtaacctccctaccaaggactaattggtctttaaaactcctcaat

SEQ ID NO: 750169 - DNA, 120 bp, Artificial Sequence
  ENSG00000205857_1 (sequence is synthesized)
atcacgaggtcaggaaatcgagaccatcttggctaacaagaaacaatcagctatgccttgggatcaagatccagaacaatcaactggaaattacagtgaagatgaacaaaatggaaagca

SEQ ID NO: 750170 - DNA, 120 bp, Artificial Sequence
  ENSG00000205857_2 (sequence is synthesized)
aaatggaaagcagaaatggagagaagaaggagaagcaggcagaaagagagaacgagaaaaagaagaaaaaaacgaaaaggagctgcaagatgaacaggaaaacaaaaggaaaagggaaaa

SEQ ID NO: 750171 - DNA, 120 bp, Artificial Sequence
  ENSG00000205857_3 (sequence is synthesized)
aagtttaagttaaacaggtgccccactatacaagagagtctatcactgtcatttgaatttgacatgacacataaacagataagtcaatggttttgtaaaacgaggaagaaatataataaa

SEQ ID NO: 750172 - DNA, 120 bp, Artificial Sequence
  ENSG00000205857_4 (sequence is synthesized)
gaaatgtccaagagaaagcataagaaaaaacatatgagatggagatctctgtgttgccaaggctggtctcgaactcctgccctcaagtgatcttcctattttggcctccagaaatgctgt

SEQ ID NO: 750173 - DNA, 120 bp, Artificial Sequence
  ENSG00000205857_5 (sequence is synthesized)
gattacaagcatgagccatcgcactggctaagacattttacatgacaccattctcaccaataaatggagttctgaaaggataaacaagaaaacattaacagtcgttgattccgtggagta

SEQ ID NO: 750174 - DNA, 120 bp, Artificial Sequence
  ENSG00000205857_6 (sequence is synthesized)
gaactaaatgaggggtatgcaaaggagtttttatgtgttttatttttaccctactgtagatttaaagtttttataatggatgttaattgattttatttaagaaaaaaaatcgagtcaagg

SEQ ID NO: 750175 - DNA, 120 bp, Artificial Sequence
  ENSG00000205857_7 (sequence is synthesized)
caggaaaggatggtgttcaggaagtgggagaataaactctttcaatgtggagagagatcccgatacttcagaagcccctgatcattcaaaaacaatcagctatgccttgggatcaagatc

SEQ ID NO: 750176 - DNA, 120 bp, Artificial Sequence
  ENSG00000205858_0 (sequence is synthesized)
agtcaacgggaatgcggtaactgttggtaacagaacaacgagctgtgcaccaagccaagtctctcttcggtgccaccggcgggcgaggccggattaatcaccgctgcttcggccgcccat

SEQ ID NO: 750177 - DNA, 120 bp, Artificial Sequence
  ENSG00000205858_1 (sequence is synthesized)
gtgtcctgatgtcctgggacccgaaccccgtgccccgtaccttgcgatgctggcgcctacggagggcatccgaaactgccctacagagcagtcgccgggcagttgaagatcagctaaaga

SEQ ID NO: 750178 - DNA, 120 bp, Artificial Sequence
  ENSG00000205858_2 (sequence is synthesized)
tatgtggccacaggagggatgctgatgtctttgagctgttcctttctaaaaaggaactgacagaggtcattgatctttctaggtttaaaaaattaaaatacttatggcttcatcataaca

SEQ ID NO: 750179 - DNA, 120 bp, Artificial Sequence
  ENSG00000205858_3 (sequence is synthesized)
agctccatggaataacatttctaactagaaactattgtctgacagaactatatctaaacaacaatgcaatatttgagatagaaggtctgcattatttgccttcattgcatatactcctgc

SEQ ID NO: 750180 - DNA, 120 bp, Artificial Sequence
  ENSG00000205858_4 (sequence is synthesized)
atcgtttatatatcatctaccaccttccaggagtggagctgcttgaccgaaatcaagttacagaaaaagaaagaagatcaatgattaccatttttaaccataaaaaggctcatatcgttc

SEQ ID NO: 750181 - DNA, 120 bp, Artificial Sequence
  ENSG00000205858_5 (sequence is synthesized)
aatcaatagcattcggaggaaaagtggatgcttcatgggatcctaaatcaccatttaagcaaaaaccagcccagagagtaccttcagattttgcatttgcaaataatgtagacaaaactg

SEQ ID NO: 750182 - DNA, 120 bp, Artificial Sequence
  ENSG00000205858_6 (sequence is synthesized)
tgcttgatgacccagaagatgctgtttttgtgaggtccatgaagagatcagtgatgactttgacctctatgaactgggacacagttccaacacgagaggaaaggtaccttgaagaggaag

SEQ ID NO: 750183 - DNA, 120 bp, Artificial Sequence
  ENSG00000205858_7 (sequence is synthesized)
gcacagaaacagctcaaatgctcacagttacactgagataagccctggtatttctagatatcttagtggttttcagttgtatattaaacttccctgtgacttagcatattacatacttac

SEQ ID NO: 750184 - DNA, 120 bp, Artificial Sequence
  ENSG00000205858_8 (sequence is synthesized)
tgagctgttcctttctaaaaaaaataagagatccaactactccaggccacatcaatcaaatggaccaactatcctcagacagtgccctctcccaaacccacatctgcccctttgatgagt

SEQ ID NO: 750185 - DNA, 120 bp, Artificial Sequence
  ENSG00000205858_9 (sequence is synthesized)
gagctgccttagcaacaagaaccaagaccacttggataggtggaatctcacacagttcaagagaagtgggtaatattttaatcctataattaataaataaagggagaataaagcacttca

SEQ ID NO: 750186 - DNA, 120 bp, Artificial Sequence
  ENSG00000205858_10 (sequence is synthesized)
tttgagctgttcctttctaaaaagactgggtaggactccaattattttaccacttcctggaatccacagttttctattggagagacaagatactgaaattgattaaaaaaaaaaaaatta

SEQ ID NO: 750187 - DNA, 120 bp, Artificial Sequence
  ENSG00000205858_11 (sequence is synthesized)
tggagacaggctgtttgaatcccagctctgtctcttccagctgggtgatcttggggaactgacagaggtcattgatctttctaggtttaaaaaattaaaatacttatggcttcatcataa

SEQ ID NO: 750188 - DNA, 120 bp, Artificial Sequence
  ENSG00000205863_0 (sequence is synthesized)
ttcagtctgtcatctgaaccatgaggatctggtggcttctgcttgccattgaaatctgcacagggaacataaactcacaggacacctgcaggcaagggcaccctggaatccctgggaacc

SEQ ID NO: 750189 - DNA, 120 bp, Artificial Sequence
  ENSG00000205863_1 (sequence is synthesized)
ccggtcacaatggtctgcctggaagagatggacgagacggagcgaagggtgacaaaggcgatgcaggagaaccaggatgtcctggcagcccggggaaggatgggacgagtggagagaagg

SEQ ID NO: 750190 - DNA, 120 bp, Artificial Sequence
  ENSG00000205863_2 (sequence is synthesized)
gagaacgaggagcagatggaaaagttgaagcaaaaggcatcaaaggtgatcaaggctcaagaggatccccaggaaaacatggccccaaggggcttgcagggcccatgggagagaaaggcc

SEQ ID NO: 750191 - DNA, 120 bp, Artificial Sequence
  ENSG00000205863_3 (sequence is synthesized)
tccgaggagagactgggcctcaggggcagaaggggaataagggtgacgtgggtcccactggtcctgaggggccaaggggcaacattgggcctttgggcccaactggtttaccgggcccca

SEQ ID NO: 750192 - DNA, 120 bp, Artificial Sequence
  ENSG00000205863_4 (sequence is synthesized)
tgggccctattggaaagcctggtcccaagggagaagctggacccacggggccccagggtgagccaggagtccggggaataagaggctggaaaggagatcgaggagagaaagggaaaatcg

SEQ ID NO: 750193 - DNA, 120 bp, Artificial Sequence
  ENSG00000205863_5 (sequence is synthesized)
tcttgccaaaaagtgctttcactgtggggctcacggtgctgagcaagtttccttcttcagatgtgcccattaaatttgataagatcctgtataatgaattcaaccattatgatacagcag

SEQ ID NO: 750194 - DNA, 120 bp, Artificial Sequence
  ENSG00000205863_6 (sequence is synthesized)
tggggaaattcacgtgccacattgctggggtctattacttcacctaccacatcactgttttctccaggaatgttcaggtgtctttggtcaaaaacggagtaaaaatactgcacaccagag

SEQ ID NO: 750195 - DNA, 120 bp, Artificial Sequence
  ENSG00000205863_7 (sequence is synthesized)
atgcttacgtgagctctgaggaccaggcctctggcagcattgtcctgcagctgaagctcggggatgagatgtggctgcaggtgacaggaggagagaggttcaatggcttgtttgctgatg

SEQ ID NO: 750196 - DNA, 120 bp, Artificial Sequence
  ENSG00000205863_8 (sequence is synthesized)
aggacgatgacacaactttcacagggttccttctgttcagcagccagtgacagaggagagtttataaatctgccagaccatccatcagaatcagcttgggatgaacttattcagatggtt

SEQ ID NO: 750197 - DNA, 120 bp, Artificial Sequence
  ENSG00000205863_9 (sequence is synthesized)
ttactttattaattcctccaattattacaataatcataaaaaggtgaaaacggaaaagttattcccaaaactgattctatgtaacttactatttttccaggagtaaatatttaaaatagc

SEQ ID NO: 750198 - DNA, 120 bp, Artificial Sequence
  ENSG00000205863_10 (sequence is synthesized)
tcattttagtgctctgaggagtcatatgaagatgtatccctcatctgtgtttctgaggacattaaggggaaattagagggaaatgtttattccatttagtactagtaacagctttaagct

SEQ ID NO: 750199 - DNA, 120 bp, Artificial Sequence
  ENSG00000205863_11 (sequence is synthesized)
ggtgatgctgtcacactccagaaagctgtagacactgctcattttgtctttttttaaaaaatgtatttttaagttctggaatacatatgcagaacgtgcaggtttgttacataaaaatgt

SEQ ID NO: 750200 - DNA, 84 bp, Artificial Sequence
  ENSG00000205863_12 (sequence is synthesized)
cggtgctttccctcccattttgctcattttctaacctaggttttaatcaccattctatccaacaaatcattgtttgatcattat

SEQ ID NO: 750201 - DNA, 120 bp, Artificial Sequence
  ENSG00000205863_13 (sequence is synthesized)
aatcaccattctatccaacaaatcattgtttgatcattatttgccagacatgaatctctacttgttttctaggatcgccctaataaagtacacaaactgggagtctttaaacaacagaaa

SEQ ID NO: 750202 - DNA, 120 bp, Artificial Sequence
  ENSG00000205863_14 (sequence is synthesized)
caactacgaacatggacatctgttctagtccttgctttcaattattttgtgtagatgcacagcagtggaattgctggatcagatgcttgaagagtggttccaatcacaagtgttaccttc

SEQ ID NO: 750203 - DNA, 120 bp, Artificial Sequence
  ENSG00000205863_15 (sequence is synthesized)
tagtaaatcttccattccactctcctcaagagtaatggaagagaaacagagtgaggaaacctcctcgcacctccaacattcagaccacgtcccaagtccttgtcgcaggagaggaacaca

SEQ ID NO: 750204 - DNA, 120 bp, Artificial Sequence
  ENSG00000205864_0 (sequence is synthesized)
cctccctctcacctgctcctctacctgctccaccctcaatccaccagaaccatgggctgctgtggctgctctggaggctgtggctccggctgtgggggctgtggctctggctgtgggggc

SEQ ID NO: 750205 - DNA, 120 bp, Artificial Sequence
  ENSG00000205864_1 (sequence is synthesized)
tgtgggtccagctgctgtgtgcccatctgctgctgcaagcccgtgtgctgctgtgtgccagcctgttcctgcaccagctgtggctcttgtgggggctccaaggggtgctgtggctcttgt

SEQ ID NO: 750206 - DNA, 120 bp, Artificial Sequence
  ENSG00000205864_2 (sequence is synthesized)
tgcaagccctgctactgttcctcaggctgtgggtcatcctgctgccagtccagctgctgcaagccctgctgttcccaggccagctgctgtgtccccatttgctgccagtgcaaaatctga

SEQ ID NO: 750207 - DNA, 120 bp, Artificial Sequence
  ENSG00000205864_3 (sequence is synthesized)
ggctctgactttggacctcaggtgagtccagcatatccacaccacccaagaagtgaccagtgctgcatttcagttctggctgtcccacagctccaggagttgtgtcccctgaattttgca

SEQ ID NO: 750208 - DNA, 120 bp, Artificial Sequence
  ENSG00000205867_0 (sequence is synthesized)
ctcacctgctcctctacctgctccaccctcaatccaccagaaccatgggctgctgtggctgctccagaggctgtggctccggctgtgggggctgtggctccagctgtgggggttgtggct

SEQ ID NO: 750209 - DNA, 120 bp, Artificial Sequence
  ENSG00000205867_1 (sequence is synthesized)
ctggctgtgggggctgtggctccggccgtgggggctgtggctctggctgtgggggctgcagctccagctgtgggggatgtggctccagatgttatgtgcctgtctgctgctgcaagcccg

SEQ ID NO: 750210 - DNA, 120 bp, Artificial Sequence
  ENSG00000205867_2 (sequence is synthesized)
tgtgctcctgggtgccagcctgttcctgcaccagctgtggctcctgtgggggctccaaggggggctgtggctcctgtgggggctccaaggggggctgtggctcctgtgggggttccaagg

SEQ ID NO: 750211 - DNA, 120 bp, Artificial Sequence
  ENSG00000205867_3 (sequence is synthesized)
ggggctgtggttcttgtggctgctcccagtccagctgttgtaagccctgttgctgctcctcaggctgtggatcatcctgctgccagtccagctgctgcaagccctgctgctgccagtcca

SEQ ID NO: 750212 - DNA, 120 bp, Artificial Sequence
  ENSG00000205867_4 (sequence is synthesized)
aagccctgttgctgccagtccaactgttgtgtccctgtgtgctgccagtgtaagatctgaggctctggacccagaccttcaggtttctcctgtttggtgaaagcatttcttatggttccc

SEQ ID NO: 750213 - DNA, 120 bp, Artificial Sequence
  ENSG00000205867_5 (sequence is synthesized)
tgagtcagttcgtcccacacatcctccctgaggcacctgcacctgctctagctcaccatccatgcacacacctccttccatggctcagctctcctctgggccctgccttcagcctcctca

SEQ ID NO: 750214 - DNA, 120 bp, Artificial Sequence
  ENSG00000205867_6 (sequence is synthesized)
ctccagaaacgtgtgtttccctgatgcgggaggtgtcctcgcctggacgcaggcacccagccgactgccacgatgttccctgcacttgggtgtggaccatcttcttcttctccctgggct

SEQ ID NO: 750215 - DNA, 120 bp, Artificial Sequence
  ENSG00000205867_7 (sequence is synthesized)
gactgagatgcaaggtctgaccccacaaggccaggccgacgtttctgagtgatcactaagaaccagcttctcaaccaccatcaggaccctggatcctcctgggccgctgcctgttctcct

SEQ ID NO: 750216 - DNA, 120 bp, Artificial Sequence
  ENSG00000205867_8 (sequence is synthesized)
gtggcccaagtgtgaccaggaaggtctctttccttcctgttgtctccatctgtttaaaaaaaaataacaaaataatgaatgaatttccttgcaataaagcctctcatgtctgtaaatcaa

SEQ ID NO: 750217 - DNA, 120 bp, Artificial Sequence
  ENSG00000205869_0 (sequence is synthesized)
cctctacctgctccaccctcaatccaccagaaccatgggctgttgcggctgctccggaggctgtggctccagctgtgggggctgtggctccggctgtgggggctgtggctccggctgtgg

SEQ ID NO: 750218 - DNA, 120 bp, Artificial Sequence
  ENSG00000205869_1 (sequence is synthesized)
gggctgtggctctggctgtggaggttctggctccagctgctgtgtgcccgtctgctgctgcaagcccgtgtgctgccgtgtgccaacctgttcctgctccagctgtggcaaagggggctg

SEQ ID NO: 750219 - DNA, 120 bp, Artificial Sequence
  ENSG00000205869_2 (sequence is synthesized)
tggctcttctgggggctccaaggggggctgtggctcctgtggaggctgcaaggggggctgtggctcttgtgggggatccaaggggggttgtggctcctgtgggggctccaaggggggctg

SEQ ID NO: 750220 - DNA, 120 bp, Artificial Sequence
  ENSG00000205869_3 (sequence is synthesized)
tgtgccagcttgttcctgctccagctgtggcaaagggggctgtggctcctgtgggtgctccaagggggcctgtggttcttgtgggggctccaaggggggctgtggctcctgtggaggctg

SEQ ID NO: 750221 - DNA, 120 bp, Artificial Sequence
  ENSG00000205869_4 (sequence is synthesized)
caaggggggctgcggttcttgtgggggatccaaggggggttgtggctccggctgtgggggctgtggctccggctgcggtgtgcccgtgtgttgctgttcctgttccagttgtggctcttg

SEQ ID NO: 750222 - DNA, 120 bp, Artificial Sequence
  ENSG00000205869_5 (sequence is synthesized)
cgcggggtctaagggaggctgcgggtcatcctgctcccagtgcagttgctgtaagccctgctgctgttcctcaggctgtgggtcatcctgttgccaatccagctgctgcaagccctgctg

SEQ ID NO: 750223 - DNA, 120 bp, Artificial Sequence
  ENSG00000205869_6 (sequence is synthesized)
ctcccagtccagttgctgtgtccccgtgtgctgccagtgcaagatctgatttctggctttgcaggactcttaccatggccaggcattcctgcccagcctttacctccttttcctggcacc

SEQ ID NO: 750224 - DNA, 120 bp, Artificial Sequence
  ENSG00000205882_0 (sequence is synthesized)
ctgttccctgacagccgatgtcagaccctgccactagcctccttaacagaagttcccagccatgaagcctctccttgttgtgtttgtctttcttttcctttgggatccagtgctggcagg

SEQ ID NO: 750225 - DNA, 120 bp, Artificial Sequence
  ENSG00000205882_1 (sequence is synthesized)
gtgaaatgttagttgcctactgtatgtttcagctggagtgctgtgtcaaaggaaatcctgcaccctgacataagaaaccaatgaatggccactatcctgtaggcccttgattctgccatc

SEQ ID NO: 750226 - DNA, 120 bp, Artificial Sequence
  ENSG00000205882_2 (sequence is synthesized)
gtccatgactactggtttttagcatttttataggccagcagactcttgtggtcttaaatttaaagagctgagctgtagccttctttaaaagagctcggtttttcacaaaaacaatgtaga

SEQ ID NO: 750227 - DNA, 120 bp, Artificial Sequence
  ENSG00000205882_3 (sequence is synthesized)
cttttgacacctaagtcgtgtcctaccttcgcttcagcttcgcatttcccatttctgtgaaattcccaactttagagaagcagatttgccatggccttctgacaaccttgtacatctctc

SEQ ID NO: 750228 - DNA, 120 bp, Artificial Sequence
  ENSG00000205882_4 (sequence is synthesized)
acataaaccgcataggcagggcttaactacaggctggcccgagtctgcactgagtctgaccctgaagttcctttggaacaggagaggccatcttgtgatgggctggaacaaggtaatttc

SEQ ID NO: 750229 - DNA, 120 bp, Artificial Sequence
  ENSG00000205882_5 (sequence is synthesized)
tcatccacctccctagtttcagttgagcaatggaacttcccacctgagcccctagggttcagctacaggctataagactgccgtcctgtggtttagtgttggttccttagcagcagagtg

SEQ ID NO: 750230 - DNA, 120 bp, Artificial Sequence
  ENSG00000205882_6 (sequence is synthesized)
atgccacctctgctgcccgtcatctgactcctctggatgggtgttatcctgtggcttaagagctaacaccatgctgatcttgctttgctatatgtgtaactaataaactgcctaaatgca

SEQ ID NO: 750231 - DNA, 120 bp, Artificial Sequence
  ENSG00000205883_0 (sequence is synthesized)
cgactgcaaggtacttgccggccaaaatgtctaaaaaacgaacaatatcgtattttgtgtgatactatacatttgtgctgtgtaaacccaaaatatttacctatactgactgggaaatag

SEQ ID NO: 750232 - DNA, 120 bp, Artificial Sequence
  ENSG00000205884_0 (sequence is synthesized)
tgtttcttcgggtgtccgccaggatacaggtggattgcgttctgccacaatattctgtcttgctgtaaaaatatgacacgttttcaacccccgcaagccaaagatccatgggttcattaa

SEQ ID NO: 750233 - DNA, 120 bp, Artificial Sequence
  ENSG00000205899_0 (sequence is synthesized)
catgctgcggggcgcgccaggactaggcctcacggcgcggaagggggccgaggactctgcggaggacttggggggcccctgccccgagcccgggggcgattcgggggtgctgggggcgaa

SEQ ID NO: 750234 - DNA, 120 bp, Artificial Sequence
  ENSG00000205899_1 (sequence is synthesized)
gcttcctgcagccggggcgaggcggaggagccggcgggcaggaggcgcgcgcggccggtgcggtccaaggcgcggcgcatggccgccaacgtgcgggagcgcaagcgcatcctagactac

SEQ ID NO: 750235 - DNA, 120 bp, Artificial Sequence
  ENSG00000205899_2 (sequence is synthesized)
tagactacaacgaggccttcaacgcgctgcgccgggcgctgcggcacgacctgggcggcaagaggctctccaagatcgccacgctgcgcagggccatccaccgcatcgccgcgctctccc

SEQ ID NO: 750236 - DNA, 80 bp, Artificial Sequence
  ENSG00000205899_3 (sequence is synthesized)
ctgcggacacctggagtgccacggcccggccgcgcgcggggacaccggggacacaggcgccagccccccgccgcctgcag

SEQ ID NO: 750237 - DNA, 80 bp, Artificial Sequence
  ENSG00000205899_4 (sequence is synthesized)
aggggccgggcctagcacaggcctccgggggaagctggcgccgctgtccgggggcttcctctgccgggccgcctccctgg

SEQ ID NO: 750238 - DNA, 120 bp, Artificial Sequence
  ENSG00000205899_5 (sequence is synthesized)
ccgcggggctacctgcgatccgcccccgggatgggccatccgcgctcctgaccggcctcgaggcaccggctgggctgcagggaggccgggctggcagctggactataaaacccgggactg

SEQ ID NO: 750239 - DNA, 120 bp, Artificial Sequence
  ENSG00000205899_6 (sequence is synthesized)
caaaggcgtcttggacagagcagaactggaccggctgagacctggcgtggaagagaaggagctcgccagagagaaggagctccgggacccggggttgcgcccccacatcccagcctgggg

SEQ ID NO: 750240 - DNA, 80 bp, Artificial Sequence
  ENSG00000205903_0 (sequence is synthesized)
acttccggtgcccacgcgccgccgtcgcgcagctcccgggccgtcactttgtgtagcgcggggtccgccgccggcccgca

SEQ ID NO: 750241 - DNA, 120 bp, Artificial Sequence
  ENSG00000205903_1 (sequence is synthesized)
ggcccgcgcggtctctgcaggaggaggcggctccggacgccccctggggggcgggaggcgctcggcccgtcgccccaggagcccgctttgtgaccttgggggccttatccgggctttccc

SEQ ID NO: 750242 - DNA, 120 bp, Artificial Sequence
  ENSG00000205903_2 (sequence is synthesized)
tcatctgcagaaggagccccggtgggctgctcggctgtcttctgctgccggcaggagctggtcctccaccttctctggtcatccgtgggtggacttcttgggagaaagaactcagtgtcg

SEQ ID NO: 750243 - DNA, 120 bp, Artificial Sequence
  ENSG00000205903_3 (sequence is synthesized)
tctttggaggcagagactctccactgcttctggggaagaagcctgacctgccggcttcctggcacctgtctctcctcctagccccgttgtgccttgcaagtgcctgcatcctgtctgtgc

SEQ ID NO: 750244 - DNA, 120 bp, Artificial Sequence
  ENSG00000205903_4 (sequence is synthesized)
tgagacctcttggcgttccctgctggcctggttcatgtgtgttgaggaccaggccacgtggaggctcgctcccagggaggatggcggcgctccacacgactcccgactccccagctgccc

SEQ ID NO: 750245 - DNA, 120 bp, Artificial Sequence
  ENSG00000205903_5 (sequence is synthesized)
agctggagcgggcagaggacgggtcagagtgcgaccctgaccaggaagaagaggaggaggaggaggaaaagggggaagaggtgcaggaggtggaagaagaggaggaggagatagtggtgg

SEQ ID NO: 750246 - DNA, 120 bp, Artificial Sequence
  ENSG00000205903_6 (sequence is synthesized)
aggaggaggaggagggtgtggcagaggtagtgcaggatgcgcaggtggaggcggtggccgaggtggaggtggaggcggacgtggaggaggaggatgtgaaggaggtgctggcagaggagg

SEQ ID NO: 750247 - DNA, 120 bp, Artificial Sequence
  ENSG00000205903_7 (sequence is synthesized)
agtgtccggcgttggggacccaggagcgacttagccgtggtggtgatgccaagtccccagttcttcaggaaaagggcctgcaggcctcccgggctccagccactcctagggatgaggacc

SEQ ID NO: 750248 - DNA, 120 bp, Artificial Sequence
  ENSG00000205903_8 (sequence is synthesized)
tggaggaggaggaagaggaggaggaggatgaggacgaggatgatttgctgacggctgggtgtcaggagctggtgacgtttgaagatgtggctgtgtacttctccctggaggagtgggaaa

SEQ ID NO: 750249 - DNA, 120 bp, Artificial Sequence
  ENSG00000205903_9 (sequence is synthesized)
ggctggaagcagaccagcggggcctctaccaggaagtcatgcaggagaactatgggattctcgtgtccttgggatacccaattcccaagcccgatctgatcttccggctggaacaagggg

SEQ ID NO: 750250 - DNA, 120 bp, Artificial Sequence
  ENSG00000205903_10 (sequence is synthesized)
aagaaccttgggtcccagatagtccccgacctgaggaaggagacatcgtcactggcgtctacacaggagcctggttctggacggacgacatagaggaccacgaggaggaagacgacgagg

SEQ ID NO: 750251 - DNA, 120 bp, Artificial Sequence
  ENSG00000205903_11 (sequence is synthesized)
acttcctggcggaggtggccgaggaggagaacgagcccccagggctctggtcggcggcctacggcgtgggggacgtgcctgggacgtgggggcccgacgactcggattcggcgcagactc

SEQ ID NO: 750252 - DNA, 120 bp, Artificial Sequence
  ENSG00000205903_12 (sequence is synthesized)
cagaggggtggggacccgacccaggcggcctgggggtcctggccgacggctctgaagcgaagcctttcctgcccggccgggagccgggtgcgaacctgctgtcgccctgggcgttccccg

SEQ ID NO: 750253 - DNA, 120 bp, Artificial Sequence
  ENSG00000205903_13 (sequence is synthesized)
ccgcagtggccccgccggccgggaggccggagaccacgtgcgacgtgtgcggcaaggtcttcccgcaccgctcgcggctggccaagcaccagcgctaccacgcggccgtcaagcccttcg

SEQ ID NO: 750254 - DNA, 120 bp, Artificial Sequence
  ENSG00000205903_14 (sequence is synthesized)
gctgcgaggagtgcggcaagggcttcgtgtaccgctcgcacttggccatccaccagcgcacgcacaccggcgagaagcccttcccgtgcccggactgcggcaagcgcttcgtctacaagt

SEQ ID NO: 750255 - DNA, 120 bp, Artificial Sequence
  ENSG00000205903_15 (sequence is synthesized)
cgcacctggttacgcaccgacgcatccatactggcgagcggccctaccgctgcgccttctgcggcgcgggcttcgggcgccgctcctacctggtcacgcaccagcgcacgcacaccggcg

SEQ ID NO: 750256 - DNA, 120 bp, Artificial Sequence
  ENSG00000205903_16 (sequence is synthesized)
agcgaccctacccgtgttcgcactgcggccgcagcttcagccagagctcggcgctggcacggcaccaggcggtgcacacggccgaccgcccgcactgctgtcccgactgcggccaggcct

SEQ ID NO: 750257 - DNA, 80 bp, Artificial Sequence
  ENSG00000205903_17 (sequence is synthesized)
ccaggccttccgcctgcgcgccgacttccagcgccaccgacgcggcgggggctgcgcggaggcgggtggtgacggccccc

SEQ ID NO: 750258 - DNA, 120 bp, Artificial Sequence
  ENSG00000205903_18 (sequence is synthesized)
accctgggccagagggatctgaagttggcgaggcggacggagaggcggaggccgcggccgaggagagagaggaggcggcggtggcggcgcccacccccagcggcaaggtggaccccgcgc

SEQ ID NO: 750259 - DNA, 120 bp, Artificial Sequence
  ENSG00000205903_19 (sequence is synthesized)
cggaacggcgcttcctggagctgggcaacggcctgggggagggcgaaggcccctcctcccacccgctgggcttccacttccccgtgcaccccaagtcctggctgcacccggacagcttcc

SEQ ID NO: 750260 - DNA, 120 bp, Artificial Sequence
  ENSG00000205903_20 (sequence is synthesized)
cgatcctgggcctacccgacttccgagagcggctgccggtcgacgggcgcccgctcccggcgcccctggggggcccgctctccctggtggagggtaccgggctggcgtgcgaccctttcg

SEQ ID NO: 750261 - DNA, 120 bp, Artificial Sequence
  ENSG00000205903_21 (sequence is synthesized)
ggcggaggcggcctgcgcgcgttcgggcccgccatcgggggtctgctggcggagcccgcgccggccgcgctggcggaggaggagagcccgtggatctgctcggactgcggcaagacgttt

SEQ ID NO: 750262 - DNA, 120 bp, Artificial Sequence
  ENSG00000205903_22 (sequence is synthesized)
cggactgcggcaagacgtttgggcgccgggccgcgctggccaagcaccagcgctaccacgcgggcgagcggccgcatcgctgcgccgactgcggcaagagcttcgtgtacggctcgcacc

SEQ ID NO: 750263 - DNA, 120 bp, Artificial Sequence
  ENSG00000205903_23 (sequence is synthesized)
caccggcgcacacacaccggcgagcggcccttcccgtgccccgagtgcggcgcgcggttcgcccgcggctcgcacttggcggcgcacgtgcgcggccacacgggcgagaagccgttcgtg

SEQ ID NO: 750264 - DNA, 120 bp, Artificial Sequence
  ENSG00000205903_24 (sequence is synthesized)
cgttcgtgtgcggcgtgtgcggtgcggggttcagccgtcgcgcgcacttgacggcgcacgggcgcgcgcacaccggggagcggccttacgcgtgtggagagtgcggccggcgcttcgggc

SEQ ID NO: 750265 - DNA, 120 bp, Artificial Sequence
  ENSG00000205903_25 (sequence is synthesized)
agagcgcggcgctgacgcggcatcagtgggcgcacgccgaggagaagccgcaccgctgccccgactgcggcaagggcttcggccacagctcggacttcaagcggcatcggcgcacgcaca

SEQ ID NO: 750266 - DNA, 120 bp, Artificial Sequence
  ENSG00000205903_26 (sequence is synthesized)
cgggcgagaagcccttccgctgcgccgactgcggccgcggcttcgcgcagcgctccaacctggccaagcaccggcgcggccacacgggcgaacgccccttcccgtgccctgagtgcggca

SEQ ID NO: 750267 - DNA, 120 bp, Artificial Sequence
  ENSG00000205903_27 (sequence is synthesized)
agcgcttttcgcagcgctcggtgctggtcacgcaccagcgcacacatacgggcgagcggccctacgcctgcgccaactgcggccgccgcttctcgcagagctcgcacttgctcacccaca

SEQ ID NO: 750268 - DNA, 120 bp, Artificial Sequence
  ENSG00000205903_28 (sequence is synthesized)
ctcgcacttgctcacccacatgaagacgcaccgcggagccaccgcagcgccgggctcgggttcggccccagcccccgcgcccaagcccgaggcggccgccaaggggccgtccagtgccgg

SEQ ID NO: 750269 - DNA, 120 bp, Artificial Sequence
  ENSG00000205903_29 (sequence is synthesized)
ccctgctggagttcgcgggcggcacaagcttcggctccgagcaccaggccgcgttcgccgggccctcgggcgcctaccgggagggcgtcctgtgaggggcccggggccgacagcagcgca

SEQ ID NO: 750270 - DNA, 120 bp, Artificial Sequence
  ENSG00000205903_30 (sequence is synthesized)
gctcctcgggccccgggaggctgagggtcccagtcctgggtgcggtgccttccctcagccctcgccctgcggccccgggtctcatgcccgccgggtccgtgtgctcagccggagacgtgg

SEQ ID NO: 750271 - DNA, 120 bp, Artificial Sequence
  ENSG00000205903_31 (sequence is synthesized)
gggagctctggggagaagagcagcgcggaggcagcgaggccaggacgtcacccccacggagactgcgatatcccctgggtgggcccgggctgtgaagcagggcggtagttggcgggcgat

SEQ ID NO: 750272 - DNA, 120 bp, Artificial Sequence
  ENSG00000205903_32 (sequence is synthesized)
gctatttatttcactcggattccgacttgggtggtctggggagcaagggatttgtgtgtttgcaaccgggtgtggcggcgagggaggggcccggccacccaggtgggccagcgggatgcc

SEQ ID NO: 750273 - DNA, 120 bp, Artificial Sequence
  ENSG00000205903_33 (sequence is synthesized)
tgggaggccggtgggtttggctgaccacttcttcccattcctcagtgagagacttgggccctcccggtcatccgagtctgtcccgaaggtttaactgcgcgcggcgaggggaggccttgt

SEQ ID NO: 750274 - DNA, 120 bp, Artificial Sequence
  ENSG00000205903_34 (sequence is synthesized)
aggtttccaaagggcggagctccagtgggaaaacttgaaacttgtcgtctgcggatatttatttccacttcttgtatggcctgaagaatctaggaggagaaaaagccagataccaaactt

SEQ ID NO: 750275 - DNA, 120 bp, Artificial Sequence
  ENSG00000205903_35 (sequence is synthesized)
acggccaggcagacgggtcgcgggtgttgacagggtcctgagggagtttgaagccttattctcgagccgcctcctcttctctacccacacttgcaccgaggtcaccccggcaccctccgc

SEQ ID NO: 750276 - DNA, 120 bp, Artificial Sequence
  ENSG00000205903_36 (sequence is synthesized)
accggttcggttttggtctctgcttgtcctctcagtccttggtactttcgtctccctcagccggaggtggcaaactcagacatctacgggcgcccgaggccctcgcagccctgagcccca

SEQ ID NO: 750277 - DNA, 120 bp, Artificial Sequence
  ENSG00000205903_37 (sequence is synthesized)
gctttcacttccctgggctgcccctctccgggagcaggcagacgccccgttctcggagcccagcgctcacttagagcgactgaggttggtcgaaggatctttccccacatcccataatca

SEQ ID NO: 750278 - DNA, 120 bp, Artificial Sequence
  ENSG00000205903_38 (sequence is synthesized)
gggccctaggacactcgcaggtccctttaactctgcttctgtcattacactagaacaagtagtgtttctgtttagagtcccatttcacaaattggttagtggaggcacccgtggcctggc

SEQ ID NO: 750279 - DNA, 120 bp, Artificial Sequence
  ENSG00000205903_39 (sequence is synthesized)
agcttgcacagtggctgtccacctcgggggggtgtggacctgagccgtggctcagtgacaaaccaggcacccaactatgcaaggcccctgcctggtgggcatcctaccctctggactggg

SEQ ID NO: 750280 - DNA, 120 bp, Artificial Sequence
  ENSG00000205903_40 (sequence is synthesized)
cccatggaagccactgggcgggcagctggggtgtagttcatgtgaagccccattcccctcacgcttttggggccactgtgaatggggccaggaaacggatttttggtgcagctgcattcc

SEQ ID NO: 750281 - DNA, 120 bp, Artificial Sequence
  ENSG00000205903_41 (sequence is synthesized)
ctaatagacctagttccctccacgttagtgtagacatggccttgggggctgagcgcagcagccaggctgccagggctgggggcgggtaggaggcacggtagttggtgggtgggaagaggg

SEQ ID NO: 750282 - DNA, 120 bp, Artificial Sequence
  ENSG00000205903_42 (sequence is synthesized)
cctgggtggtggcggtcagttagcctggctgggtgaggttggtgaggttgcggggcggggtggtgaggagagcaggggtcccagggaggcattggggtgctgggtaatgacctcggccct

SEQ ID NO: 750283 - DNA, 120 bp, Artificial Sequence
  ENSG00000205903_43 (sequence is synthesized)
gggtttctcctctccctgcgggacaggagcctcagaaagggccaagggcaaggtgggcttggggggctctgggaatctcagctctagccctgtatggccaggatctgctgtctccgtccc

SEQ ID NO: 750284 - DNA, 120 bp, Artificial Sequence
  ENSG00000205903_44 (sequence is synthesized)
tcctgggccccagcagctgtcctgcagctgtcagcaggagggcctggctttaataaagagtggacaaactgaacttctgactggactccatgctgtcgccactcctgggaacccgtcggg

SEQ ID NO: 750285 - DNA, 120 bp, Artificial Sequence
  ENSG00000205903_45 (sequence is synthesized)
gaggctctgcgcggcctcaggtccaacttgtttctgcaaacattttttaaaagattttctcttttaagaaattagaatgggtcctaggatggcccatgaggagttggccccaggccagtg

SEQ ID NO: 750286 - DNA, 120 bp, Artificial Sequence
  ENSG00000205903_46 (sequence is synthesized)
tggccccgtgctgcccatgcccaccgtattccttggtggcccccacgctgccccacacttgatgtagtgtaaacacctgacttggggcattactttttgtgaatatgttggccaggcttc

SEQ ID NO: 750287 - DNA, 120 bp, Artificial Sequence
  ENSG00000205903_47 (sequence is synthesized)
cagaggccagagtgaggggccaggtacccttcgtggtggtccaaacacatccccagccctttcttcagaggccccagcaccatgtggctcatccagggctcacctactccagtaccaggg

SEQ ID NO: 750288 - DNA, 120 bp, Artificial Sequence
  ENSG00000205903_48 (sequence is synthesized)
caaggtgtacagccccaggacccaaaatgcctcccttaaagctgattggttgatttctttattcttatcacatggtagcccacgatcagatctgactctcctgtcctttctttgtgggtc

SEQ ID NO: 750289 - DNA, 120 bp, Artificial Sequence
  ENSG00000205903_49 (sequence is synthesized)
tgaaaaataagaactgctgtaatcaaatgtgatctggaggcatcagaacagagcaatctaatgcttcttttcttgcccaggctggagtgcagggcgtgatctcggctcactgcaacctct

SEQ ID NO: 750290 - DNA, 74 bp, Artificial Sequence
  ENSG00000205903_50 (sequence is synthesized)
gtatttttagtagagatgggatttcagcatattggccaggctggtcttgagctcctgatcttgtgatctcgcgc

SEQ ID NO: 750291 - DNA, 78 bp, Artificial Sequence
  ENSG00000205903_51 (sequence is synthesized)
ctgagaccagaaattcaaggccaacctgggcaacgtatcaagactccatgtctgaaacagacgtttgagtggcagaca

SEQ ID NO: 750292 - DNA, 120 bp, Artificial Sequence
  ENSG00000205903_52 (sequence is synthesized)
caagactccatgtctgaaacagacgtttgagtggcagacaaatacaaagacctagttaaaaaatggagccccttgaggatcttacagtctattcagaaaagttaaatgaggctgggtgcg

SEQ ID NO: 750293 - DNA, 120 bp, Artificial Sequence
  ENSG00000205903_53 (sequence is synthesized)
atcccagcactatgggaggccaaggcggatcccttgagctcagatggattccttgagctcaggagttcgaggccagctgggacaacacggcaaaactcttgtctctataaaaaatacaaa

SEQ ID NO: 750294 - DNA, 120 bp, Artificial Sequence
  ENSG00000205903_54 (sequence is synthesized)
aattagctgggtgtggtggcgcacgtctatagtcccagctactctggaggctgagcctgggaggcagaggctgcagtgaactatgatttttccattgcactccagcctgggtgacagaac

SEQ ID NO: 750295 - DNA, 120 bp, Artificial Sequence
  ENSG00000205903_55 (sequence is synthesized)
aaaaaaaaaaaaaaaaaaaaaaggttccccgatagaacttatagttgactgtccagccaaatacttaaaaaaaaagtttatagggagaaaaataccctcccccatccaatggtcatagga

SEQ ID NO: 750296 - DNA, 120 bp, Artificial Sequence
  ENSG00000205903_56 (sequence is synthesized)
gagaaaaataccctcccccatccaatggtcataggaaaaaaagtagacaccctttattgccaaggaggaattaaaccctagtgacttgtgaaatgtgagtcacgaaaggtggcacttaga

SEQ ID NO: 750297 - DNA, 120 bp, Artificial Sequence
  ENSG00000205903_57 (sequence is synthesized)
gggtccctcagccctgagcgtcactttcccctccatctacctttgttatttcctttctcttttgccggtttccccaacctccttccttttctgattcattccttttatcctgatcttttc

SEQ ID NO: 750298 - DNA, 120 bp, Artificial Sequence
  ENSG00000205903_58 (sequence is synthesized)
acttaatctcgtccaacatttccttctatctcccttttttctttctctaattggctacatatggaataaagtattttgaattactgggttatatctattaaataaagctttatgatcttt

SEQ ID NO: 750299 - DNA, 120 bp, Artificial Sequence
  ENSG00000205903_59 (sequence is synthesized)
tgcaagtgcctgcatcctgtctgtgctgagacctcttggcgttccctgctggcctggttcatgtgtgttgaggaccaggtaagcgtctctttgtcctgtgtatcaggtgctggcagagga

SEQ ID NO: 750300 - DNA, 120 bp, Artificial Sequence
  ENSG00000205903_60 (sequence is synthesized)
ggcgttccctgctggcctggttcatgtgtgttgaggaccaggtaagcgtctctttgtcctgtgtatcaggtgggcttttccttctggctaaacatgggccaccctcgggctgtgtgatgc

SEQ ID NO: 750301 - DNA, 120 bp, Artificial Sequence
  ENSG00000205903_61 (sequence is synthesized)
ttccttgtggataaagactgggataaatgcctgatttactccaggaaagagcagcagttcacaccaggcacgtagttcttggtgaaaaggagctgagactggcatcccaggggtcacgcg

SEQ ID NO: 750302 - DNA, 120 bp, Artificial Sequence
  ENSG00000205903_62 (sequence is synthesized)
gaggggccattggggcagcctttctgggtacagaatgtcttgatggtgcagggtaagatcgtgggaaggcccggtcctccctcatctccattgccttcaactacataacaggaggagtaa

SEQ ID NO: 750303 - DNA, 120 bp, Artificial Sequence
  ENSG00000205903_63 (sequence is synthesized)
atcctgctccctgcgcccccgccaggctgcgggagaccctgtgaggggaccgtgtggtgtgctgagagcagcccgtcactggcgtccatctgcatttcaggccacgtggaggctcgctcc

SEQ ID NO: 750304 - DNA, 120 bp, Artificial Sequence
  ENSG00000205916_0 (sequence is synthesized)
atgtctgctgcaaatcctgagactccaaactcaaccatctccagagaggccagcacccagtcttcatcagctgcagctagccaaggctgggtgttaccagaaggcaaaatcgtgccaaac

SEQ ID NO: 750305 - DNA, 120 bp, Artificial Sequence
  ENSG00000205916_1 (sequence is synthesized)
actgtttttgttggtggaattgatgctaggatggatgaaactgagattggaagctgctttggtagatacggttcagtgaaagaagtgaagataatcacgaatcgaactggtgtgtccaaa

SEQ ID NO: 750306 - DNA, 120 bp, Artificial Sequence
  ENSG00000205916_2 (sequence is synthesized)
ggtgtgtccaaaggctatggatttgtttcgtttgttaatgacgtggatgtccagaagatagtaggatcacagatacatttccatggtaaaaagctgaagctgggccctgcaatcaggaaa

SEQ ID NO: 750307 - DNA, 120 bp, Artificial Sequence
  ENSG00000205916_3 (sequence is synthesized)
gctcgtcatgtgcagccacgtcctttggtagttaatcctcctcctccaccacagtttcagaacgtctggcggaatccaaacactgaaacctacctgcagccccaaatcacgccgaatcct

SEQ ID NO: 750308 - DNA, 120 bp, Artificial Sequence
  ENSG00000205916_4 (sequence is synthesized)
gtaactcagcacgttcagtctgctgcaaatcctgagactccaaactcaaccatctccagagaggccagcacccagtcttcatcagctgcagctagccaaggctgggtgttaccagaaggc

SEQ ID NO: 750309 - DNA, 120 bp, Artificial Sequence
  ENSG00000205916_5 (sequence is synthesized)
aaaatcgtgccaaacactgtttttgttggtggaattgatgctaggatggatgaaactgagattggaagctgctttggtagatacggttcagtgaaagaagtgaagataatcacgaatcga

SEQ ID NO: 750310 - DNA, 120 bp, Artificial Sequence
  ENSG00000205916_6 (sequence is synthesized)
actggtgtgtccaaaggctatggatttgtttcgtttgttaatgacgtggatgtccagaagatagtaggatcacagatacatttccatggtaaaaagctgaagctgggccctgcaatcagg

SEQ ID NO: 750311 - DNA, 120 bp, Artificial Sequence
  ENSG00000205916_7 (sequence is synthesized)
aaacaaaagttatgtgctcgtcatgtgcagccacgtcctttggtagttaatcctcctcctccaccacagtttcagaacgtctggcggaatccaaacactgaaacctacctgcagccccaa

SEQ ID NO: 750312 - DNA, 120 bp, Artificial Sequence
  ENSG00000205916_8 (sequence is synthesized)
gaatcctgtaactcagcacgttcaggcttactctgcttatccacattcaccaggtcaggtcatcactggatgtcagttgcttgtatataattatcaggaatatcctacttatcccgattc

SEQ ID NO: 750313 - DNA, 70 bp, Artificial Sequence
  ENSG00000205916_9 (sequence is synthesized)
cccgattcaatttcctgcttatccaagatcaccatttcaggtcactgctggatatcagttgcctgtatat

SEQ ID NO: 750314 - DNA, 120 bp, Artificial Sequence; identical to SEQ ID NO: 689747
  ENSG00000205916_10 (sequence is synthesized)

SEQ ID NO: 750315 - DNA, 120 bp, Artificial Sequence; identical to SEQ ID NO: 689748
  ENSG00000205916_11 (sequence is synthesized)

SEQ ID NO: 750316 - DNA, 120 bp, Artificial Sequence
  ENSG00000205916_12 (sequence is synthesized)
tcagtcggcctgcgctcctcagcctggcggttctacctccgagggttcgcccgcccttggttttccttacaccttagcctttggctcctttgaccactcgaagccccacagcgtgttcca

SEQ ID NO: 750317 - DNA, 120 bp, Artificial Sequence
  ENSG00000205916_13 (sequence is synthesized)
gtattattagactctctagttttatcttaacactgaaactgttcttcattagatgtttatttagaacctggttctgtgtttaatatatagtttaaagtaacaaataatcgagactgaaag

SEQ ID NO: 750318 - DNA, 120 bp, Artificial Sequence
  ENSG00000205916_14 (sequence is synthesized)
aatgttaagatttatctgcaaggatttttaaaaaattgaaacttgcattttaagtgtttaaaagcaaatactgactttcaaaaaagtttttaaaacctgatttgaaagctaacaattttg

SEQ ID NO: 750319 - DNA, 120 bp, Artificial Sequence
  ENSG00000205916_15 (sequence is synthesized)
atagtctgaacacaagcatttcacttctccaagaagtacctgtgaacagtacaatatttcagtattgagctttgcatttatgatttatctagaaatttacctcaaaagcagaatttttaa

SEQ ID NO: 750320 - DNA, 120 bp, Artificial Sequence
  ENSG00000205916_16 (sequence is synthesized)
aactgcatttttaatcagtggaactcaatgtatagttagctttattgaagtcttatccaaacccagtaaaacagattctaagcaaacagtccaatcagtgagtcataatgtttattcaaa

SEQ ID NO: 750321 - DNA, 120 bp, Artificial Sequence
  ENSG00000205916_17 (sequence is synthesized)
gtattttatcttttatctagaatccacatatgtatgtccaatttgattgggatagtagttaggataactaaaattctgggcctaattttttaaagaatccaagacaaactaaactttact

SEQ ID NO: 750322 - DNA, 120 bp, Artificial Sequence
  ENSG00000205916_18 (sequence is synthesized)
gggtatataaccttctcaatgagttaccattcttttttataaaaaaaattgttccttgaaatgctaaacttaatggctgtatgtgaaatttgcaaaatactggtattaaagaacgctgca

SEQ ID NO: 750323 - DNA, 120 bp, Artificial Sequence
  ENSG00000205916_19 (sequence is synthesized)
gcttttttatgtcactcaaaggttaatcggagtatctgaaaggaattgtttttataaaaacattgaagtattagttacttgctataaatagatttttatttttgttttttagcctgttat

SEQ ID NO: 750324 - DNA, 120 bp, Artificial Sequence
  ENSG00000205916_20 (sequence is synthesized)
atttccttctgtaaaataaaatatgtccagaagaggcatgttgtttctagattaggtagtgtcctcattttatattgtgaccacacagctagagcaccagagcccttttgctatactcac

SEQ ID NO: 750325 - DNA, 120 bp, Artificial Sequence
  ENSG00000205916_21 (sequence is synthesized)
agtcttgttttcccagcctcttttactagtctttcaggaggtttgctcttagaactggtgatgtaaagaatggaagtagctgtatgagcagttcaaaggccaagccgtggaatggtagca

SEQ ID NO: 750326 - DNA, 120 bp, Artificial Sequence
  ENSG00000205916_22 (sequence is synthesized)
atgggatataatacctttctaagggaaacatttgtatcagtatcatttgatctgccatggacatgtgtttaaagtggctttctggcccttctttcaatggcttcttccctaaaacgtgga

SEQ ID NO: 750327 - DNA, 120 bp, Artificial Sequence
  ENSG00000205916_23 (sequence is synthesized)
gactctaagttaatgtcgttactatgggccatattactaatgcccactggggtctatgatttctcaaaattttcattcggaatccgaaggatacagtctttaaactttagaattcccaag

SEQ ID NO: 750328 - DNA, 120 bp, Artificial Sequence
  ENSG00000205916_24 (sequence is synthesized)
aaggctttattacacctcagaaattgaaagcaccatgactttgtccattaaaaaattatccatagtttttttagtgcttttaacattccgacatacatcattctgtgattaaatctccag

SEQ ID NO: 750329 - DNA, 120 bp, Artificial Sequence
  ENSG00000205916_25 (sequence is synthesized)
atttctgtaaatgatacctacattctaaagagttaattctaattattccgatatgaccttaaggaaaagtaaaggaataaatttttgtctttgttgaagtatttaatagagtaaggtaaa

SEQ ID NO: 750330 - DNA, 120 bp, Artificial Sequence
  ENSG00000205916_26 (sequence is synthesized)
gaagatattaagtccctttcaaaatggaaaattaattctaaactgagaaaaatgttcctactacctattgctgatactgtctttgcataaatgaataaaaataaactttttttcttcaaa

SEQ ID NO: 750331 - DNA, 80 bp, Artificial Sequence
  ENSG00000205922_0 (sequence is synthesized)
gccgcgcagcctggcagcctcgcgcgcagccaccggggagcgggcgggagtcatgcagcggccttgagcactaggggccg

SEQ ID NO: 750332 - DNA, 120 bp, Artificial Sequence
  ENSG00000205922_1 (sequence is synthesized)
cactaggggccggcgctgaggagcgcgcgcggcgggagggcagccgagcatggagctgagcctggagagcctggggggcctgcacagcgtggcccacgcgcaggcgggcgagctgctgag

SEQ ID NO: 750333 - DNA, 120 bp, Artificial Sequence
  ENSG00000205922_2 (sequence is synthesized)
gcggacttccgcggggaactggcgggcccgctgcacccggcaatgggcatggcctgcgaggcgccgggcctgggcggcacctacacgacgctcacgcccctgcagcacctgccgccgctc

SEQ ID NO: 750334 - DNA, 80 bp, Artificial Sequence
  ENSG00000205922_3 (sequence is synthesized)
cacgcccctgcagcacctgccgccgctcgcggccgtggccgacaagttccaccagcacgcggcggccgcggccgtggccg

SEQ ID NO: 750335 - DNA, 120 bp, Artificial Sequence
  ENSG00000205922_4 (sequence is synthesized)
gcgccgcccccgccacccccgccgcagcgtctggcggccagcgtgagcggcagcttcaccctcatgcgcgacgagcgggcggcgctcgcctccgtgggccacctctacggaccctacggc

SEQ ID NO: 750336 - DNA, 80 bp, Artificial Sequence
  ENSG00000205922_5 (sequence is synthesized)
cctacggcaaggagctgcccgccatggggtcgccgctgtcgccgctgcccaacgcgctgccgcccgcgctgcacggcgcc

SEQ ID NO: 750337 - DNA, 80 bp, Artificial Sequence
  ENSG00000205922_6 (sequence is synthesized)
cggcccgccaggccacctggctggggacaagctgctgccgcccgccgccttcgagccgcacgccgcgctgctgggacgcg

SEQ ID NO: 750338 - DNA, 120 bp, Artificial Sequence
  ENSG00000205922_7 (sequence is synthesized)
cggcggcggccccagcgcgggcgcagcggccgaggagatcaacaccaaggaggtggcgcagcgcatcacggcggagctgaagcgctacagcatcccgcaggcaatcttcgcgcagcggat

SEQ ID NO: 750339 - DNA, 120 bp, Artificial Sequence
  ENSG00000205922_8 (sequence is synthesized)
cctgtgtcgctctcagggcacgctctccgacctgctgcgcaaccccaagccgtggagcaagctcaaatccggccgcgagaccttccgcaggatgtggaagtggctgcaggagccagagtt

SEQ ID NO: 750340 - DNA, 120 bp, Artificial Sequence
  ENSG00000205922_9 (sequence is synthesized)
ccagcgcatgtcggcgctgcgcttggcagcctgcaagcgcaaggaacaggagcagcagaaggagcgcgccctgcagcccaagaagcagcgcctggtgttcaccgacctgcagcgacgcac

SEQ ID NO: 750341 - DNA, 120 bp, Artificial Sequence
  ENSG00000205922_10 (sequence is synthesized)
gctgatcgccatcttcaaggagaacaagcggccgtccaaggagatgcaggtcaccatctcgcagcagctcggcttggagctcaacaccgtcagcaacttcttcatgaacgcgcggcgccg

SEQ ID NO: 750342 - DNA, 120 bp, Artificial Sequence
  ENSG00000205922_11 (sequence is synthesized)
cttcttcatgaacgcgcggcgccgctgcatgaaccgctgggctgaggagcccagcacggcccccgggggccccgccggcgccacggccactttctccaaggcctgaggcgccccggcccc

SEQ ID NO: 750343 - DNA, 120 bp, Artificial Sequence
  ENSG00000205922_12 (sequence is synthesized)
gggcgctgtgcccccacgtcacctccccacatcctgccggcccggagacccgcccccagggggcacctggagggggtgctatccgggccccccacacccggggagggggaagcagcacac

SEQ ID NO: 750344 - DNA, 120 bp, Artificial Sequence
  ENSG00000205922_13 (sequence is synthesized)
cccccagcccaagtgcacaaaaagggccccccttcctccctccatgcccactccctccaggccaaaggaagccctccacccccccccggaggggagggagtgacagaaaggggtttccca

SEQ ID NO: 750345 - DNA, 120 bp, Artificial Sequence
  ENSG00000205922_14 (sequence is synthesized)
gccccctctccattcaggacgcccagagggcctcgagaaaaaccagggctcactgtgttgtcccctaaagcgggtcaagaagcacatactagaaatataaaccgggtatttaaaaatgga

SEQ ID NO: 750346 - DNA, 120 bp, Artificial Sequence
  ENSG00000205922_15 (sequence is synthesized)
attttaaagaataacccctcctccgtcagatcccctgccccaccgagggaggtagtagaaaacttccttcctccccacccgccccggccccctccccagggacctcagccctttccaaag

SEQ ID NO: 750347 - DNA, 120 bp, Artificial Sequence
  ENSG00000205922_16 (sequence is synthesized)
tcgccaaaaacccacatcaagccggatccttacggtcccccaccctctccaaaaccaaccccacccgctggcaggacggcccctgcggccgagaactgagctgcccctctctgcggccag

SEQ ID NO: 750348 - DNA, 120 bp, Artificial Sequence
  ENSG00000205922_17 (sequence is synthesized)
gattcctcgtgccaagaatcgcctgccttaaagtctggggaggggcctgcggcgggcgcccagcacctacgggcgagcacccttcccaccccatcccaggccgcaggggacggggggctc

SEQ ID NO: 750349 - DNA, 120 bp, Artificial Sequence
  ENSG00000205922_18 (sequence is synthesized)
ccacgtgcgggtaaattccagacgcccccgccccgccccgtctgttgagttcactttacctttaggcaccttcgtggagcgcaaggaaggacgcagctccggacacgggagaccacgccc

SEQ ID NO: 750350 - DNA, 120 bp, Artificial Sequence
  ENSG00000205922_19 (sequence is synthesized)
aggctcccaggagaaggggacccggccggagaaggcgccgctggggccgcccggaggagcccctctgcacgggcccgtggagacgcttcctgcgtggaaccttctggaatccaccgcccc

SEQ ID NO: 750351 - DNA, 120 bp, Artificial Sequence
  ENSG00000205922_20 (sequence is synthesized)
cctttccgcccgcgtcagggtctgaactgggcttgcaggggggcagcggggttgaacgtggtgttggtttccactctcgccaaagagagaagacgccgaggaaggtggattccgcttgct

SEQ ID NO: 750352 - DNA, 120 bp, Artificial Sequence
  ENSG00000205922_21 (sequence is synthesized)
ccattttttgccaaaaatatttacaaatgggaagggtcggaaatgaagatgagcgcccccctcccaccccgcgctctcccccgctcctctcatctggtctgggtgacctccgagactggc

SEQ ID NO: 750353 - DNA, 120 bp, Artificial Sequence
  ENSG00000205922_22 (sequence is synthesized)
cggccgcgggatcccaggagcccgcctcctccgggggttcaagatccgagtctagaaggaacctcctccctgaaatccccccactcatcggctgcctcccagggaggaggcggcccccct

SEQ ID NO: 750354 - DNA, 120 bp, Artificial Sequence
  ENSG00000205922_23 (sequence is synthesized)
accccccttgaaaatgcaaaagacatttctagtgaaatgcccctcccctcccccaggtaaaggctacctcactcaagctcatgtctgtgattggaaaatcacgcctgataccaaagattt

SEQ ID NO: 750355 - DNA, 120 bp, Artificial Sequence
  ENSG00000205922_24 (sequence is synthesized)
ctcccaaggatttgtgctggatgacaggattccctggcctgggacccggctcggggccccgcctgccgagtgccaccccttcccgaacctgagagcgaaagagagagagagagagaggga

SEQ ID NO: 750356 - DNA, 120 bp, Artificial Sequence
  ENSG00000205922_25 (sequence is synthesized)
gagagagggagagaaagggagagagggagggagaggatcgtgaggtcgaagagtgccttcttcttgaaccaaagacgtgtatggagtgttctcttgtccttatcgacttgctctgctccc

SEQ ID NO: 750357 - DNA, 120 bp, Artificial Sequence
  ENSG00000205922_26 (sequence is synthesized)
agctttccaagcgaccggatctgagtgatgcttctagaacatttgggtgttggggggttcccaatagtagaaagggtccccattcctgctcagcaccgcacctctctacccccccacaga

SEQ ID NO: 750358 - DNA, 120 bp, Artificial Sequence
  ENSG00000205922_27 (sequence is synthesized)
gacacgcaggcacacatgcacacatgcaaagacacgcatgcaggcacacgcagacgcacacagagacacacatgcagatacacatgcacacacacatacacacactggcccctgtttttc

SEQ ID NO: 750359 - DNA, 120 bp, Artificial Sequence
  ENSG00000205922_28 (sequence is synthesized)
tgtggtgtcactgggtgccagcaactcggtatctcccacctcccactaaaacctgggccttaatttctctcccgtccccacccctaaattcctgatggatgaacctagagctgtcctgtc

SEQ ID NO: 750360 - DNA, 120 bp, Artificial Sequence
  ENSG00000205922_29 (sequence is synthesized)
cactccaggccggactgacgtagcctatgggcccagcaggtccagggcccacgttttaatttctttttaaaaagctttaggtcttgccgggcgcggtggttcacgcctggaatcccagca

SEQ ID NO: 750361 - DNA, 120 bp, Artificial Sequence
  ENSG00000205922_30 (sequence is synthesized)
ctcaaaaaaaaaaaaaaaaaaaaaaactttaggtccaagaagatgcaccccattcaacataccatattatttgtctttataccaaggtagcctatagatatacaatgttttaaatttctt

SEQ ID NO: 750362 - DNA, 65 bp, Artificial Sequence
  ENSG00000205922_31 (sequence is synthesized)
ttataccaaggtagcctatagatatacaatgttttaaatttcttttttagaaacagggttcgacc

SEQ ID NO: 750363 - DNA, 120 bp, Artificial Sequence
  ENSG00000205922_32 (sequence is synthesized)
gtgatcctcctgcctcagcctcccagtagctggggccacaagcacaccccaccatgcccatttaattttttaagggatttcttgtagatatggggtctcactatgctgcccaggctggtc

SEQ ID NO: 750364 - DNA, 120 bp, Artificial Sequence
  ENSG00000205922_33 (sequence is synthesized)
gcctccaaaagtgctaggattacaggtagatagacatttagtggaggaagaggctctcaaaggcaataaaatgcttctgatccaagagaatcacgctgcagccctggcccagtgagcttc

SEQ ID NO: 750365 - DNA, 120 bp, Artificial Sequence
  ENSG00000205922_34 (sequence is synthesized)
tgagcttcttagaaaatcgatgcctgggcttcaggcactggccggagcacgggcctggcggggtgctgggtctcctagatgccctctgcttggccttcaaggccccaagggtaacacgct

SEQ ID NO: 750366 - DNA, 120 bp, Artificial Sequence
  ENSG00000205922_35 (sequence is synthesized)
agggggcctccagttttgtcccctgctggaaatttaggacttggcttgggatcgttctggttgtggaatgttttagctatgctgaactgtggtcagatcaggtcaagcctcttggtcaca

SEQ ID NO: 750367 - DNA, 67 bp, Artificial Sequence
  ENSG00000205922_36 (sequence is synthesized)
cttctacaaaaaaaaataaataaagtggcccaggactcctggatccttttcagatatcttcgtatca

SEQ ID NO: 750368 - DNA, 73 bp, Artificial Sequence
  ENSG00000205922_37 (sequence is synthesized)
cagcaagaccccacttctacaaaaaaaaataaataaagtggcccaggactcctggatccttttcagatatctt

SEQ ID NO: 750369 - DNA, 120 bp, Artificial Sequence
  ENSG00000205922_38 (sequence is synthesized)
cagacccccacagaaggctctatccccgacctgcccgccggcccctcaggccctctcctgcctccccgcatgcccacttggctgtcacataccaaagagcatgcgttctccatgcaggga

SEQ ID NO: 750370 - DNA, 120 bp, Artificial Sequence
  ENSG00000205922_39 (sequence is synthesized)
tcaacacctccagcacaattccttcgagcctttgacaattttctctgaaatacctcaaaatatttaatgtatagtttatgtgattaaaaaaaaatccttagctagtttttggaatacgtg

SEQ ID NO: 750371 - DNA, 120 bp, Artificial Sequence
  ENSG00000205922_40 (sequence is synthesized)
acttgaagctttataccgttaaattataattttgcagacgatggcatgtcgtttctttgacgagttccgtgggagacgcattgaatgtcagggctggagaccagagggaaagttagaggg

SEQ ID NO: 750372 - DNA, 120 bp, Artificial Sequence
  ENSG00000205922_41 (sequence is synthesized)
agcgtgatcgcgagagagactgcggcagaaaggaccagtggcgtttacagatttcttatttaaatgagtcctttaggaaagaaaggaagagagagagagagcgagcgcaagagagagaga

SEQ ID NO: 750373 - DNA, 120 bp, Artificial Sequence
  ENSG00000205922_42 (sequence is synthesized)
gagggagagagagggagagggagagagagaggcagaggtatacctttctgttctctggcttgttctgtttcttgttttctggagtcatgtcttataagagtatttattattctctgtgtt

SEQ ID NO: 750374 - DNA, 120 bp, Artificial Sequence
  ENSG00000205922_43 (sequence is synthesized)
ctgtgttcaaatgtaatttaagaaaaaaaaaggaagaaaaatgcaaaaaaaaaagacaaaatggaatttgagttggtgcatgactaatgtactctttcttgacgctaattgtaataaagt

SEQ ID NO: 750375 - DNA, 120 bp, Artificial Sequence
  ENSG00000205922_44 (sequence is synthesized)
ggtcagggtggggggcggggggcgtggcccggttccgtgtcgcatctgtgtgtctggtgcctgatcggtgctgttcagtggtttttcgttactgtttctttcctcctttctaaggaactg

SEQ ID NO: 750376 - DNA, 120 bp, Artificial Sequence
  ENSG00000205922_45 (sequence is synthesized)
tgtccagccgggacaggtggacggggccccaggtagagggggcgggaacagagcctcagtagccgggtctcctccacctgcctgtccatctccacccgagatgccacctgcctgccccag

SEQ ID NO: 750377 - DNA, 120 bp, Artificial Sequence
  ENSG00000205922_46 (sequence is synthesized)
ccaggcgggagccaccgagcgtccccccctcagttcctggttcttgggggcactctggtgtcatcgatatcttagacccccccaaccccccatcacccggttgctttcactctagcatga

SEQ ID NO: 750378 - DNA, 120 bp, Artificial Sequence
  ENSG00000205922_47 (sequence is synthesized)
attcccaagtgtcttgttcagaggagacagacaatcagcctattcttgtcttgttgcccagggtggtgggggacgggagtgtgccccaacttcctgagatctgaaggaccctcctgaggg

SEQ ID NO: 750379 - DNA, 120 bp, Artificial Sequence
  ENSG00000205922_48 (sequence is synthesized)
ccccaacagcaggcaccagcaccccctccccccccacctccacccagacagcctcggcctccctccctgggctgggcatgagtccgcctttctgtccagcccgggaggcagggggtgtac

SEQ ID NO: 750380 - DNA, 120 bp, Artificial Sequence
  ENSG00000205922_49 (sequence is synthesized)
gcctgcagagacccctccctcccagcccactttcggagcctacagaacagaggactccccaaaatcatcaaagggggctctgggacaatgtcctctgcctctgactcctcttgtgccatg

SEQ ID NO: 750381 - DNA, 120 bp, Artificial Sequence
  ENSG00000205922_50 (sequence is synthesized)
aggccacgtccctgagccatccccagatagtccctggaggtggaaaggggcacagatgtgccagcttgggaacagaggctggaggagagggcggcaggggagagatgagaggggccgctt

SEQ ID NO: 750382 - DNA, 120 bp, Artificial Sequence
  ENSG00000205922_51 (sequence is synthesized)
ttgggacaggccccagtaggggggggcggggtagctaaacggggtgcttctcaccccataaagcagcaagccctggtctggagggctgggcctggggctgagggctcagctgacctcaaa

SEQ ID NO: 750383 - DNA, 120 bp, Artificial Sequence
  ENSG00000205922_52 (sequence is synthesized)
tctgaaatgatgccggggccaggatgctccttgcaccagcaggagcttgggccatttcacattctctgccccaagcggtttaagcaaaatcaggccagtagactcctggggctcctcctc

SEQ ID NO: 750384 - DNA, 120 bp, Artificial Sequence
  ENSG00000205922_53 (sequence is synthesized)
gtggccctgtcagaccacgcaggggctggttttggtggaatgagctcagccgggggtgacggaagagccaggaggccctgcggccttgagtgttttgaatagactggaactgagggctgc

SEQ ID NO: 750385 - DNA, 120 bp, Artificial Sequence
  ENSG00000205922_54 (sequence is synthesized)
tttcaggggagacaccacttggaccctccaaagtcccctcccctccagggacaggggagagaagcccttttccaccttcacccttgggcgacaggcttaaaagctaaaaaaaaaaaaaaa

SEQ ID NO: 750386 - DNA, 120 bp, Artificial Sequence
  ENSG00000205923_0 (sequence is synthesized)
ttacttttgttatgtattttaccacaatttttaaaaagcaaaccaaaaccaaccaagagtgcttcccccacacctcaaaatcatcctgcagcagctccctggcccagctctctctcaccc

SEQ ID NO: 750387 - DNA, 120 bp, Artificial Sequence
  ENSG00000205923_1 (sequence is synthesized)
tgaccctgggcccctctcccaccacccagggctagccctgtggaccaaccatctctgccagcccctccccgaccctccagccagggaggtggggcgctggccggtgaatggggcaggcca

SEQ ID NO: 750388 - DNA, 120 bp, Artificial Sequence
  ENSG00000205923_2 (sequence is synthesized)
ggcccaaaggctggcccagggctcaccagctctggactgggcgtcccgtctgaggtggggatgaccaacatgccagctctgggttttagctgaggatgggcacatcaagcactgacagcc

SEQ ID NO: 750389 - DNA, 120 bp, Artificial Sequence
  ENSG00000205923_3 (sequence is synthesized)
agcaagctgggcacaggcgatgctcaacctctaacacatcggctgagaacctcacctgcctctccctgcctgggagccctggcaagacagctcctctcccaggcccagcacaggcaggcg

SEQ ID NO: 750390 - DNA, 120 bp, Artificial Sequence
  ENSG00000205923_4 (sequence is synthesized)
ctggacagccacttcctaaggggtgcgcggccgtcaaggcagaggtgggtatccctgcacctcacacctctcaggaggtcaggatccacatccgtcgcctgctttcctgggctgcccctg

SEQ ID NO: 750391 - DNA, 120 bp, Artificial Sequence
  ENSG00000205923_5 (sequence is synthesized)
cgaggccctgcccaggcaggtggttcttccctggctgttcccttccaacaggtggggcccagaccatcctatctctttggacctggagacatttccttaactgggctttgcagcagaggg

SEQ ID NO: 750392 - DNA, 120 bp, Artificial Sequence
  ENSG00000205923_6 (sequence is synthesized)
aagagaacagtggcagagccaggcgcgtacctcctgtgcccaggacagcacctgtaagcaagggggaagggagccacccaccccagaactcaaatggagagaaagtcaagacaatcaccc

SEQ ID NO: 750393 - DNA, 120 bp, Artificial Sequence
  ENSG00000205923_7 (sequence is synthesized)
ctgacgtggggctgcaccaatccctgacgtctgaccccactgtggctgtcctcagagccaagagggctccagaagcccacccgcctcgaagctgttcagggagcctcacggcccgtgttt

SEQ ID NO: 750394 - DNA, 120 bp, Artificial Sequence
  ENSG00000205923_8 (sequence is synthesized)
gccacatgggtgtgtgccagggccaaggggacacagaagatggcaggatgacactaatggggtgagcagggcacactggtgcctcccatactgccctccagcaccaggcagggtcaccac

SEQ ID NO: 750395 - DNA, 120 bp, Artificial Sequence
  ENSG00000205923_9 (sequence is synthesized)
agccggcaagcactgggcctggggatgtgtgaagagatagggttattgagaagagaaaacagaacgctggtcatccgtggcactcagggctaggcagtccagggagcagaaaacaggggt

SEQ ID NO: 750396 - DNA, 120 bp, Artificial Sequence
  ENSG00000205923_10 (sequence is synthesized)
cccgggcccagtctccctcctggaggtcagagcggagcccctggcactgtgccctggcccagaaccaggctgtgggctccacgctgcacaccccaactcaggagcagaaagcaaacccct

SEQ ID NO: 750397 - DNA, 120 bp, Artificial Sequence
  ENSG00000205927_0 (sequence is synthesized)
ggatgcttattatagatcgacgcgacaccagcgcccggtgccaggttctcccctgaggcttttcggagcgagctcctcaaatcgcatccagagtaagtgtccccgccccacagcagccgc

SEQ ID NO: 750398 - DNA, 120 bp, Artificial Sequence
  ENSG00000205927_1 (sequence is synthesized)
agcctagatcccagggacagactctcctcaactcggctgtgacccagaatgctccgatacagggggtctggatccctactctgcgggccatttctccagagcgactttgctcttctgtcc

SEQ ID NO: 750399 - DNA, 120 bp, Artificial Sequence
  ENSG00000205927_2 (sequence is synthesized)
tccccacactcaccgctgcatctccctcaccaaaagcgagaagtcggagcgacaacagctctttctgcccaagccccagtcagctggtgagctccccgtggtctccagatgcagcacatg

SEQ ID NO: 750400 - DNA, 120 bp, Artificial Sequence
  ENSG00000205927_3 (sequence is synthesized)
gactctgggccccgcgccggctctgggtgcatgtgcgtgtgcgtgtgtttgctgcgtggtgtcgatggagataaggtggatccgtttgaggaaccaaatcattagttctctatctagatc

SEQ ID NO: 750401 - DNA, 120 bp, Artificial Sequence
  ENSG00000205927_4 (sequence is synthesized)
tccattctccccaaagaaaggccctcacttcccactcgtttattccagcccgggggctcagttttcccacacctaactgaaagcccgaagcctctagaatgccacccgcaccccgagggt

SEQ ID NO: 750402 - DNA, 120 bp, Artificial Sequence
  ENSG00000205927_5 (sequence is synthesized)
caccaacgctccctgaaataacctgttgcatgagagcagaggggagatagagagagcttaattataggtacccgcgtgcagctaaaaggagggccagagatagtagcgagggggacgagg

SEQ ID NO: 750403 - DNA, 120 bp, Artificial Sequence
  ENSG00000205927_6 (sequence is synthesized)
ggacgaggagccacgggccacctgtgccgggaccccgcgctgtggtactgcggtgcaggcgggagcagcttttctgtctctcactgactcactctctctctctctccctctctctctctc

SEQ ID NO: 750404 - DNA, 120 bp, Artificial Sequence
  ENSG00000205927_7 (sequence is synthesized)
tctcttttctcctcctctcctggaagttttcgggtccgagggaaggaggaccctgcgaaagctgcgacgactatcttcccctggggccatggactcggacgccagcctggtgtccagccg

SEQ ID NO: 750405 - DNA, 120 bp, Artificial Sequence
  ENSG00000205927_8 (sequence is synthesized)
cccgtcgtcgccagagcccgatgacctttttctgccggcccggagtaagggcagcagcggcagcgccttcactgggggcaccgtgtcctcgtccaccccgagtgactgcccgccggagct

SEQ ID NO: 750406 - DNA, 120 bp, Artificial Sequence
  ENSG00000205927_9 (sequence is synthesized)
gagcgccgagctgcgcggcgctatgggctctgcgggcgcgcatcctggggacaagctaggaggcagtggcttcaagtcatcctcgtccagcacctcgtcgtctacgtcgtcggcggctgc

SEQ ID NO: 750407 - DNA, 120 bp, Artificial Sequence
  ENSG00000205927_10 (sequence is synthesized)
gtcgtccaccaagaaggacaagaagcaaatgacagagccggagctgcagcagctgcgtctcaagatcaacagccgcgagcgcaagcgcatgcacgacctcaacatcgccatggatggcct

SEQ ID NO: 750408 - DNA, 120 bp, Artificial Sequence
  ENSG00000205927_11 (sequence is synthesized)
ccgcgaggtcatgccgtacgcacacggcccttcggtgcgcaagctttccaagatcgccacgctgctgctggcgcgcaactacatcctcatgctcaccaactcgctggaggagatgaagcg

SEQ ID NO: 750409 - DNA, 120 bp, Artificial Sequence
  ENSG00000205927_12 (sequence is synthesized)
atgaagcgactggtgagcgagatctacgggggccaccacgctggcttccacccgtcggcctgcggcggcctggcgcactccgcgcccctgcccgccgccaccgcgcacccggcagcagca

SEQ ID NO: 750410 - DNA, 120 bp, Artificial Sequence
  ENSG00000205927_13 (sequence is synthesized)
caccccatcctgccgcccgccgccgcagcggctgctgccgccgctgcagccgcggctgtgtccagcgcctctctgcccggatccgggctgccgtcggtcggctccatccgtccaccgcac

SEQ ID NO: 750411 - DNA, 120 bp, Artificial Sequence
  ENSG00000205927_14 (sequence is synthesized)
catccgtccaccgcacggcctactcaagtctccgtctgctgccgcggccgccccgctggggggcgggggcggcggcagtggggcgagcgggggcttccagcactggggcggcatgccctg

SEQ ID NO: 750412 - DNA, 120 bp, Artificial Sequence
  ENSG00000205927_15 (sequence is synthesized)
caggtgccgccgccgcaccaccacgtgtcggctatgggcgccggcagcctgccgcgcctcacctccgacgccaagtgagccgactggcgccggcgcgttctggcgacaggggagccaggg

SEQ ID NO: 750413 - DNA, 120 bp, Artificial Sequence
  ENSG00000205927_16 (sequence is synthesized)
gccgcggggaagcgaggactggcctgcgctgggctcgggagctctgtcgcgaggaggggcgcaggaccatggactgggggtggggcatggtggggattccagcatctgcgaacccaagca

SEQ ID NO: 750414 - DNA, 120 bp, Artificial Sequence
  ENSG00000205927_17 (sequence is synthesized)
atgggggcgcccacagagcagtggggagtgaggggatgttctctccgggacctgatcgagcgctgtctggctttaacctgagctggtccagtagacatcgttttatgaaaaggtaccgct

SEQ ID NO: 750415 - DNA, 120 bp, Artificial Sequence
  ENSG00000205927_18 (sequence is synthesized)
gtgtgcattcctcactagaactcatccgacccccgacccccacctccgggaaaagattctaaaaacttctttccctgagagcgtggcctgacttgcagactcggcttgggcagcacttcg

SEQ ID NO: 750416 - DNA, 120 bp, Artificial Sequence
  ENSG00000205927_19 (sequence is synthesized)
gggggggagggggtgttatgggagggggacacattggggccttgctcctcttcctcctttcttggcgggtgggagactccgggtagccgcactgcagaagcaacagcccgaccgcgccct

SEQ ID NO: 750417 - DNA, 120 bp, Artificial Sequence
  ENSG00000205927_20 (sequence is synthesized)
ccagggtcgtccctggcccaaggccaggggccacaagttagttggaagccggcgttcggtatcagaagcgctgatggtcatatccaatctcaatatctgggtcaatccacaccctcttag

SEQ ID NO: 750418 - DNA, 120 bp, Artificial Sequence
  ENSG00000205927_21 (sequence is synthesized)
aactgtggccgttcctccctgtctctcgttgatttgggagaatatggttttctaataaatctgtggatgttccttcttcaacagtatgagcaagtttatagacattcagagtagaaccac

SEQ ID NO: 750419 - DNA, 120 bp, Artificial Sequence
  ENSG00000205927_22 (sequence is synthesized)
ttgtggattggaataacccaaaactgccgatttcaggggcgggtgcattgtagttattattttaaaatagaaactaccccaccgactcatctttccttctctaagcacaaagtgatttgg

SEQ ID NO: 750420 - DNA, 120 bp, Artificial Sequence
  ENSG00000205927_23 (sequence is synthesized)
ttattttggtacctgagaacgtaacagaattaaaaggcagttgctgtggaaacagtttgggttatttgggggttctgttggctttttaaaattttcttttttggatgtgtaaatttatca

SEQ ID NO: 750421 - DNA, 120 bp, Artificial Sequence
  ENSG00000205927_24 (sequence is synthesized)
atgatgaggtaagtgcgcaatgctaagctgtttgctcacgtgactgccagccccatcggagtctaagccggctttcctctattttggtttatttttgccacgtttaacacaaatggtaaa

SEQ ID NO: 750422 - DNA, 120 bp, Artificial Sequence
  ENSG00000205927_25 (sequence is synthesized)
ctcctccacgtgcttcctgcgttccgtgcaagccgcctcggcgctgcctgcgttgcaaactgggctttgtagcgtctgccgtgtaacacccttcctctgatcgcaccgcccctcgcagag

SEQ ID NO: 750423 - DNA, 120 bp, Artificial Sequence
  ENSG00000205927_26 (sequence is synthesized)
agtgtatcatctgttttatttttgtaaaaacaaagtgctaaataatatttattacttgtttggttgcaaaaacggaataaatgactgagtgttgagattttaaataaaatttaaagtaaa

SEQ ID NO: 750424 - DNA, 120 bp, Artificial Sequence
  ENSG00000205929_0 (sequence is synthesized)
attccaccctggcttgcagattaaaccagctgtcaagccagggtgaaggatccgtggccaggcagaggtctgtggagtggagaggcgaggcctcacggtggaactctcagatgacagcat

SEQ ID NO: 750425 - DNA, 120 bp, Artificial Sequence
  ENSG00000205929_1 (sequence is synthesized)
gcaggcaccaagagagtggacgcacatacagaagacagccatgcactgagctggggacatgcaacaataacaggccatacaatgaaagtcgctgaagaagaatatgaattttgcctgcgg

SEQ ID NO: 750426 - DNA, 120 bp, Artificial Sequence
  ENSG00000205929_2 (sequence is synthesized)
atttgctaacactcgacaatcctaggaggtgagttccaacaaattggttcaaaaagaggggggataaacacgctggcccatgctgggcaagcatggcaccaccttccaggcactgtcttc

SEQ ID NO: 750427 - DNA, 120 bp, Artificial Sequence
  ENSG00000205929_3 (sequence is synthesized)
ttctgatcagcactctgggtgtctttgcacttaactgcttcaccaaaggtcagaagaacagcacgctcatcttcacaagggaaaacaccattcggaactgcagctgttctgcggacatcc

SEQ ID NO: 750428 - DNA, 120 bp, Artificial Sequence
  ENSG00000205929_4 (sequence is synthesized)
gggattgtgactacagtttggccaacctgatgtgcaactgtaaaaccgtcctgccccttgcagtagagcgaaccagctacaatggccatctgaccatctggttcacggacacatctgcgc

SEQ ID NO: 750429 - DNA, 120 bp, Artificial Sequence
  ENSG00000205929_5 (sequence is synthesized)
tgggccacctgctgaacttcacgctggtccaagacctgaagctttccctgtgcagcaccaacactctccccactgaatacctggctatttgtggtctgaagaggctgcgcatcaacatgg

SEQ ID NO: 750430 - DNA, 120 bp, Artificial Sequence
  ENSG00000205929_6 (sequence is synthesized)
aggccaagcatcccttcccagagcagagcttactcatccatagcggtggggacagtgactccagagagaagcccatgtggttacacaaaggctggcagccatgtatgtatatctcattct

SEQ ID NO: 750431 - DNA, 120 bp, Artificial Sequence
  ENSG00000205929_7 (sequence is synthesized)
tagatatggctcttttcaacagggactcagccttaaaatcatatagtattgaaaacgttaccagcattgccaacaactttcctgacttttcttactttagaaccttcccaatgccaagca

SEQ ID NO: 750432 - DNA, 120 bp, Artificial Sequence
  ENSG00000205929_8 (sequence is synthesized)
acaaaagctatgttgtcacatttatttactagcataataactgtgtccagctgcctggaactttggcaaatgatgaataatttgcagaaggaatctggaaataaggccgtgagataggta

SEQ ID NO: 750433 - DNA, 120 bp, Artificial Sequence
  ENSG00000205929_9 (sequence is synthesized)
tccctacccacaactgtgcctctctccgcaggctccatttgcaacacagccacacataccaataaccagctctctgttctgctctgtgcccaactgcgagaacacttttgaaaaacaaaa

SEQ ID NO: 750434 - DNA, 120 bp, Artificial Sequence
  ENSG00000205929_10 (sequence is synthesized)
gaaaaagaaaccaaaaaaccaacttgattccgtccagggacatgtcttgggagccagctaggcttggtctctgcaactagaagcctgcagggaaatgtcccgtcagaaatggagaaagca

SEQ ID NO: 750435 - DNA, 120 bp, Artificial Sequence
  ENSG00000205929_11 (sequence is synthesized)
atacaccctagagactgcttagtggagctcctcctagaaggtgacccccaagaaacatatcttctttcaaaatactgccttaatttttttctgtttcattttgtgaaattgcttggaatt

SEQ ID NO: 750436 - DNA, 120 bp, Artificial Sequence
  ENSG00000205929_12 (sequence is synthesized)
ttttttctgtttcattttgtgaaattgcttggaattcccctaagtagagaataatcaatttcagaggtttggggactatgagttttataaaatggtcgggcacagtggctcacacctgta

SEQ ID NO: 750437 - DNA, 120 bp, Artificial Sequence
  ENSG00000205929_13 (sequence is synthesized)
aaactccatctcaaaaaaaaaaaaaataataataataaaatgattaggttctcttaaactgatcttttctaaataccttgctaagaatagatgcaccaagaaataagaggttggagactg

SEQ ID NO: 750438 - DNA, 120 bp, Artificial Sequence
  ENSG00000205929_14 (sequence is synthesized)
ggttggagactgtgtttgttggggtggaggtaccacaggcatggatagggtaagaccttaggatcaaatggggggaccagtgttccagagagagggatgcagcagtgaaaattggaggac

SEQ ID NO: 750439 - DNA, 120 bp, Artificial Sequence
  ENSG00000205929_15 (sequence is synthesized)
caaaacacatttgcatctatctcaaaattttgcttagagcacagcctaactgcaaggaaagttcttcacttctagcctttcacattcttttccttttctttctttgcatggtctgtcttt

SEQ ID NO: 750440 - DNA, 120 bp, Artificial Sequence
  ENSG00000205929_16 (sequence is synthesized)
gcccctgctataccatttcaccaatttctcttctcattttcatcttctttctcctactccttttcctcttgctccaaaaatcagaacttagatgaataccattcaagctatgtttaacta

SEQ ID NO: 750441 - DNA, 120 bp, Artificial Sequence
  ENSG00000205929_17 (sequence is synthesized)
cattaggggctagcctgggaatttactcaccacttacaacattatttctattgttaaaagtgctcaaattattaacagataattaacaaaaaaacatctaaggctcaatccatttggaag

SEQ ID NO: 750442 - DNA, 120 bp, Artificial Sequence
  ENSG00000205929_18 (sequence is synthesized)
gttaagattgcaaagtgaaggcattttatatgacacggttaacacaaaatgattttatgtgtgctgataaaaggaaccaaagcaacatacttttgaaaaaattaaatggattcattattg

SEQ ID NO: 750443 - DNA, 120 bp, Artificial Sequence
  ENSG00000205929_19 (sequence is synthesized)
ttgaaaaaattaaatggattcattattgtacaaagaaaattttccctcatagagacgcaacttgccattaaagtggactgtaaagaatccatggcttgggaggccgaggcaggcggatca

SEQ ID NO: 750444 - DNA, 120 bp, Artificial Sequence
  ENSG00000205929_20 (sequence is synthesized)
atgtctaaacctggagtggaatgaatttgaaacattattgcattcatgataccataatgataagaaatagtccatgacttaacaggatatcctggggttgatgactttagatcacataca

SEQ ID NO: 750445 - DNA, 120 bp, Artificial Sequence
  ENSG00000205929_21 (sequence is synthesized)
tcacttttttttttttttcacttaaccttaacatagagtaactgaaataatctgcaatttctacatttgcttaattggtgggggatttagccattcaggctaattagcatgagcccatgt

SEQ ID NO: 750446 - DNA, 120 bp, Artificial Sequence
  ENSG00000205929_22 (sequence is synthesized)
cagtgtttaaattaggccaaaacaaagaccaaagtatgaattttaatagaaaaatgtgacctcattactgacattgtactgcagataatgttaaagtgaaagaaaaaataaggaaaaggg

SEQ ID NO: 750447 - DNA, 120 bp, Artificial Sequence
  ENSG00000205929_23 (sequence is synthesized)
aggggaaaaaggaggaaaaaggaaagcaagaaaagacaagtgaaaagattagtaatatattcattgtcattagttactgaaaatataacaaattgaattttaataatttttattaataaa

SEQ ID NO: 750448 - DNA, 120 bp, Artificial Sequence
  ENSG00000205929_24 (sequence is synthesized)
aaaattaaatgatgatagaaagtatatgcctcctataaatatcttccatttggtagcttttaatagtttcaaagccctttcacatatgttttaagtaagtcttttgagaaatacttgtga

SEQ ID NO: 750449 - DNA, 120 bp, Artificial Sequence
  ENSG00000205929_25 (sequence is synthesized)
gttaatgggacttaaaccaacagaaaaggaaagctaatttagttataaatcaagcctgaggtttcagatttctggactaaaaatatggttcagtttgtgctgctgtgggatgaagaatgg

SEQ ID NO: 750450 - DNA, 120 bp, Artificial Sequence
  ENSG00000205929_26 (sequence is synthesized)
gcagagaaaatccacagtgcaggcatggggattaatggcatttggcacttagctgcagggtttgggggacaacagggagtggtgggatggtggttaagtaagggtgcatgccccacctga

SEQ ID NO: 750451 - DNA, 120 bp, Artificial Sequence
  ENSG00000205929_27 (sequence is synthesized)
agctctacagtggctcagctccaactgagtgttgccatgggaaaatctgatggggccagatctgatccttcagagaatgaggaattccaggttgttatgtgaattctcacaatttgtaaa

SEQ ID NO: 750452 - DNA, 120 bp, Artificial Sequence
  ENSG00000205929_28 (sequence is synthesized)
tgtcggcttgccattcagcttttttgtttgtttgttttaaataatatcatgtgggtcaaacaaactatgttaatggtagccatctggcctggggctagtagcttattgcctctggccagt

SEQ ID NO: 750453 - DNA, 120 bp, Artificial Sequence
  ENSG00000205929_29 (sequence is synthesized)
ggtgtgctaacaaaagtttaaccagcagctctccaacaaaaaagggaggtgggctgctctgcctatgcagtagccatgcttttattcctttactttgttaataaacttgctttcacttta

SEQ ID NO: 750454 - DNA, 120 bp, Artificial Sequence
  ENSG00000205937_0 (sequence is synthesized)
agagcggcgccggcctcggcggctgaggaaagcaggaggaggtggcggcggcgggaagatgacgcgcacctttccggaggatgggggaggtaaccgaggtcctgagccggtacctgaact

SEQ ID NO: 750455 - DNA, 120 bp, Artificial Sequence
  ENSG00000205937_1 (sequence is synthesized)
tgggctgctctttggcgtaaattgcaatcgattagggatcgtttctcagaatcaagttagaagtgagagttcagataagtgaggccgccattgctgctttgaacacctcagaaggggaga

SEQ ID NO: 750456 - DNA, 120 bp, Artificial Sequence
  ENSG00000205937_2 (sequence is synthesized)
atggatttatcaggagtgaaaaagaagagcttgctaggagtcaaagaaaataataaaaagtccagcactagggctccttcacctaccaaacgcaaagaccgctcagatgagaagtccaag

SEQ ID NO: 750457 - DNA, 120 bp, Artificial Sequence
  ENSG00000205937_3 (sequence is synthesized)
gatcgctcaaaagataaaggggccaccaaggagtcgagtgagaaggatcgcggccgggacaaaacccgaaagaggcgcagcgcttccagtggtagcagcagtaccaggtctcggtccagc

SEQ ID NO: 750458 - DNA, 120 bp, Artificial Sequence
  ENSG00000205937_4 (sequence is synthesized)
tcgacttccagctcaggctccagcaccagcactggctcaagcagtggctccagctcttcctcagcatccagccgctcaggaagctccagcacctcccgcagctccagctctagcagctct

SEQ ID NO: 750459 - DNA, 120 bp, Artificial Sequence
  ENSG00000205937_5 (sequence is synthesized)
gagatgaaaaggagaggaaaaggcggagcccatctcctaagcccaccaaagtgcacattgggagactcacccggaatgtgacaaaggatcacatcatggagatattttccacctatggga

SEQ ID NO: 750460 - DNA, 120 bp, Artificial Sequence
  ENSG00000205937_6 (sequence is synthesized)
aaattaaaatgattgacatgcccgtggaaaggatgcatccccatctgtccaaaggctatgcgtacgtagagtttgagaatccagatgaagccgagaaggcgctgaagcacatggatggag

SEQ ID NO: 750461 - DNA, 120 bp, Artificial Sequence
  ENSG00000205937_7 (sequence is synthesized)
gacaaattgatggccaggagatcactgccaccgccgtgctggccccctggcctaggccaccccccaggagattcagccctcccaggagaatgttgccaccaccgcctatgtggcgcaggt

SEQ ID NO: 750462 - DNA, 120 bp, Artificial Sequence
  ENSG00000205937_8 (sequence is synthesized)
ctcccccacggatgaggagaaggtcccgctccccgaggcgcaggtcccccgtgcgccggagatcacggtccccgggccgccgccgccacaggagccgctccagctccaactcctcccgat

SEQ ID NO: 750463 - DNA, 120 bp, Artificial Sequence
  ENSG00000205937_9 (sequence is synthesized)
aaacaggccactgaagctctcgcccctgtaacttataccccacccagctcagttttgtcacttttctagccaaaggaagaccagtaggaaagcaaacccttgactctggcaggatttgca

SEQ ID NO: 750464 - DNA, 120 bp, Artificial Sequence
  ENSG00000205937_10 (sequence is synthesized)
aggcagcacccctctgccagccgggccccggctgcagaagtgctgttggtttggatgctgtgtgcctgtcaagattccctccggttttctggctagaaagctcatccgtttccggtttct

SEQ ID NO: 750465 - DNA, 120 bp, Artificial Sequence
  ENSG00000205937_11 (sequence is synthesized)
aagagtcagttcagtggcagagccaccagggaaaagtgaggctcttgggggtggtttgaccctgcttacctgggagcacacttttcccttccccgatgacctgggatggtggccaggccg

SEQ ID NO: 750466 - DNA, 120 bp, Artificial Sequence
  ENSG00000205937_12 (sequence is synthesized)
tgcccttgctgttgctgggcagtgtccttttggaaagggagctgccccaggctttagtgcagctgccaaccctgttaggcctggcctctcgaggcctcttctgacctcaagggtcacacc

SEQ ID NO: 750467 - DNA, 120 bp, Artificial Sequence
  ENSG00000205937_13 (sequence is synthesized)
ccctcaaagatcctctcacccatggtagttgctgctcgtggttctgtctgtccgtgcaccgatgcacacaccgcaccccaccactgtactctgaaattggcgagtgagtggagagccagc

SEQ ID NO: 750468 - DNA, 120 bp, Artificial Sequence
  ENSG00000205937_14 (sequence is synthesized)
tctgcggagtcatcacgcagccatggttgtgcctgccgttcatggtggtctttcaggttatcttggcaacatgtacattgcttttattttttttcttttttgctttcattgtacagtcag

SEQ ID NO: 750469 - DNA, 120 bp, Artificial Sequence
  ENSG00000205937_15 (sequence is synthesized)
tactataaaatttctcttttgagttttatacctttgtagcattttagatgacattgtgtttgtactttgttgtgtagagtggaagaattgtgttgaataaacccaagatcggaatgcaaa

SEQ ID NO: 750470 - DNA, 80 bp, Artificial Sequence
  ENSG00000205937_16 (sequence is synthesized)
gctgcggacggaagggcgcctgtgcttcgtccgctcggcggtggcccagccaggcccgcgggactcagaccagcggggag

SEQ ID NO: 750471 - DNA, 120 bp, Artificial Sequence
  ENSG00000205937_17 (sequence is synthesized)
cggagtttctttgtgggatgcggtggaaggtcggccgatccccccttcggagtcattaattcaaacgtgtactccgcgaacgtttcccggactcccgtgtgcaattatcggcgctaggcc

SEQ ID NO: 750472 - DNA, 120 bp, Artificial Sequence
  ENSG00000205937_18 (sequence is synthesized)
gtggggatacggcccactatggaccgagcacggtggccgagctcagtttgatgggttaccccagaggggcggatacgggaaggttaagtttgttggaggagaaacgtggagtaggctttt

SEQ ID NO: 750473 - DNA, 120 bp, Artificial Sequence
  ENSG00000205937_19 (sequence is synthesized)
tgtcttgattccgcatgaactgtgcctgaaatgtacttttaaatggggaaggtgctctgaagatttgtgccgaaacgccctctcctcgagatttaactaattgttctctcctctctctgg

SEQ ID NO: 750474 - DNA, 120 bp, Artificial Sequence
  ENSG00000205937_20 (sequence is synthesized)
acgggcgcgttaacaccctccgcgccggaggacgagcctcggtcatcgcgctgccctcccaggttcaacaggctacccatgtgcccgctccagtaagcgtgcaaccagcccggtcagtcc

SEQ ID NO: 750475 - DNA, 120 bp, Artificial Sequence
  ENSG00000205937_21 (sequence is synthesized)
cagggactttaccggctaggagacaccttgaacgtccccagcgcgactcccacaaactgccttgactctttaacgcttcctcgctggcgcccattgggccaggcgtttacgtcatcgctg

SEQ ID NO: 750476 - DNA, 120 bp, Artificial Sequence
  ENSG00000205937_22 (sequence is synthesized)
cgcgccgggcggcggcgacttcccgctccttgactctgacgtcagagcggcgccggcctcggcggctgaggaaagcaggaggaggtggcggcggcgggaagatggctccttcacctacca

SEQ ID NO: 750477 - DNA, 120 bp, Artificial Sequence
  ENSG00000205937_23 (sequence is synthesized)
cggcgggaagatgtaagttggggcggaatccgactgcatccgtgtttcgggggctgcccggcaggcccggcaggacgcctcgtgaagccggtccactcctcagccccgcagtgcggcggt

SEQ ID NO: 750478 - DNA, 120 bp, Artificial Sequence
  ENSG00000205937_24 (sequence is synthesized)
gtaaccgaggtcctgagccggtacctgaacttgggtgaacagagaacctcaacttttgctttctagcactcgaccgcacccagcaaggcgtccgcttactcagtggttcttagtgtttgg

SEQ ID NO: 750479 - DNA, 120 bp, Artificial Sequence
  ENSG00000205937_25 (sequence is synthesized)
agtgcttaagaataactggtggtgtttgatttcaccaagtacattcgggcagatcttagttcttgggggggtggggctggaatctgcgggtgtgacctccactctaggtctgtgctgtcc

SEQ ID NO: 750480 - DNA, 120 bp, Artificial Sequence
  ENSG00000205937_26 (sequence is synthesized)
agccaagtagccattggccacatgtggctgctaagcatgtgaaatacagctaatcaagactgaaatattaaaacacacaccagttttagaagactaggaaaaaagcaaacttttattaga

SEQ ID NO: 750481 - DNA, 120 bp, Artificial Sequence
  ENSG00000205937_27 (sequence is synthesized)
tgtttatgttgattatatgttggaaagataatattttggatgtgtcaaacgttaaaaattaatttcacccatttttgtgacgtggctactaaggaatttcaggtgatgcttgtggctcct

SEQ ID NO: 750482 - DNA, 120 bp, Artificial Sequence
  ENSG00000205937_28 (sequence is synthesized)
cacacggtttctattggacagtgctgctgcaggtgattcgaaggcgggtgggtgcaggaacccagctgagagttcagaaattagtgtaactttggagacaagtgtctgtgggggaaggag

SEQ ID NO: 750483 - DNA, 120 bp, Artificial Sequence
  ENSG00000205937_29 (sequence is synthesized)
cctccggacgtggagatacaactcttgctcctaacatttatcgagtctttaattaatgccctgggtaactataaggttggaactgtaattgtcaccatattgatgatgagaaacttgaga

SEQ ID NO: 750484 - DNA, 120 bp, Artificial Sequence
  ENSG00000205937_30 (sequence is synthesized)
cacagtaaaacctcaaatcaaacccaggccctctggctccagactctaaattatactctgaatgatactcactgattgtccgaggacacaaagagtgtcgaggcactatctgctgggtgt

SEQ ID NO: 750485 - DNA, 120 bp, Artificial Sequence
  ENSG00000205937_31 (sequence is synthesized)
ctgcagaaccttactgttctaaagcaaaacattttacccctggacaagagcagcaaaggtggcgttcggccctccttggctctcatttgactgttcaaagccaggtgcttttctttcttg

SEQ ID NO: 750486 - DNA, 120 bp, Artificial Sequence
  ENSG00000205937_32 (sequence is synthesized)
ggtcagaacgtattttcagcagcattttgaagcacccctggcgtgcactgcacagggaaaccaggaccacattggtgtgctgtgtcctccttaccaactggctcttggagaaggtgagac

SEQ ID NO: 750487 - DNA, 120 bp, Artificial Sequence
  ENSG00000205937_33 (sequence is synthesized)
agaagtagctgagactccattcctgagatcttcacttaacaactcctgcagcttgtgcagagccttactagaaatactgaaggcagaagtccctggaaaatagggcccataactaattag

SEQ ID NO: 750488 - DNA, 120 bp, Artificial Sequence
  ENSG00000205937_34 (sequence is synthesized)
taatttgtttttgagtaatttgttaccgttatttgagcacattctgcagtccaggcattttgctaaactcttacatggcaggcagtctctcacgcaatttcaatgcctactttttttctc

SEQ ID NO: 750489 - DNA, 120 bp, Artificial Sequence
  ENSG00000205937_35 (sequence is synthesized)
tttttctccatcttatttttgaaaaatgttaaaaaaaacacaggaaggtcgagttatacagttaatactcacataaagaccacttaagggccgggtctggtggctcacgcctgtaatccc

SEQ ID NO: 750490 - DNA, 120 bp, Artificial Sequence
  ENSG00000205937_36 (sequence is synthesized)
catttgatgttgattcaggcccctctcagtgctgcagagccctcctaagagaacttctcccacttctcttagccccagacccagcttcccttggttggaggagaaggaagcgcaaacgcg

SEQ ID NO: 750491 - DNA, 120 bp, Artificial Sequence
  ENSG00000205937_37 (sequence is synthesized)
gatactgcctgcatggtcctgcgaggaagccccaccctggccctggggccttctgtttgcctgtcactcgctctcgatgctaccttctctcaccagtgctttgggtccttcccagcacag

SEQ ID NO: 750492 - DNA, 120 bp, Artificial Sequence
  ENSG00000205937_38 (sequence is synthesized)
ggcccagcatagcccttctcttccacctagcagattccagcacattctttacttttcttttttttttcttgagacggagtctcagttgttgcccaggctagagtgccgtggcatgatgtc

SEQ ID NO: 750493 - DNA, 120 bp, Artificial Sequence
  ENSG00000205937_39 (sequence is synthesized)
agccaggctggtctcgaactcctgacattgtgatccgcctgcctggcttcccagagcactgggattacaggcgtgagcctccgcgtctggcctccagcacattctttagctcttgacttg

SEQ ID NO: 750494 - DNA, 120 bp, Artificial Sequence
  ENSG00000205937_40 (sequence is synthesized)
tttagctcttgacttggatgactcttgacctgggaggctgcctcgacacgtggagattggtgtgtcctgttagtttttatgcctcttttcctcatgaaacattagtcatgatgttatttc

SEQ ID NO: 750495 - DNA, 74 bp, Artificial Sequence
  ENSG00000205937_41 (sequence is synthesized)
cagcctcccgagtagctggtactataggcgcccgccacctcgcacagctgatttattgtctttttagtagagac

SEQ ID NO: 750496 - DNA, 120 bp, Artificial Sequence
  ENSG00000205937_42 (sequence is synthesized)
caggagtgagccaccatgcccggccctgtttctgtgattatcttacattgtcattgtccccccaggcctgtctttcactgtggcatgcattgtctagggtagatgcttgttagatatttt

SEQ ID NO: 750497 - DNA, 120 bp, Artificial Sequence
  ENSG00000205937_43 (sequence is synthesized)
cacagctacacccccactccccacagatggctcggttttcttgattatttacaaagaaaacacatcctctgattgttagtagagaccctaatttatggcagactggctaggtgcagtggt

SEQ ID NO: 750498 - DNA, 66 bp, Artificial Sequence
  ENSG00000205937_44 (sequence is synthesized)
gggcctggagttcaagaccagcatgggcaacaaaacaagagctcgtctctacaaaaaaaaaaaaaa

SEQ ID NO: 750499 - DNA, 120 bp, Artificial Sequence
  ENSG00000205937_45 (sequence is synthesized)
gtgttttgatgctggtaccagtcgcttttgaaatgatttttgcttccagtcacatccagtgtatcctaaggggaaattgcaataaaacaggagatctaatcctatctggagaccaccctt

SEQ ID NO: 750500 - DNA, 120 bp, Artificial Sequence
  ENSG00000205937_46 (sequence is synthesized)
gagttaggtttttctctgttctgcatgtgaatgtggtgctgtggcattttgaaaggactgcaggggctcatcaaacttgtgggtgaaaactgaattgttcagcctgtaaaataacagtga

SEQ ID NO: 750501 - DNA, 120 bp, Artificial Sequence
  ENSG00000205937_47 (sequence is synthesized)
tggtctccaccatctccattttttaagaaaaagatacgctggggcgacagttgtacctgtgcctcctctgcggggtagagacgcctccaggagcacatggggactgtccctatgtgttcc

SEQ ID NO: 750502 - DNA, 120 bp, Artificial Sequence
  ENSG00000205937_48 (sequence is synthesized)
tgactgtgtggacacttattgcttaccgtgctcccttgctgcctttttgtgtgctcagcttttgactgcaaagtagacttgttgccttgccaattcgttcactctttaaacccttttatc

SEQ ID NO: 750503 - DNA, 87 bp, Artificial Sequence
  ENSG00000205937_49 (sequence is synthesized)
atggattccagttcttagtgggtgtgtgattaccgaaaagatgttttaggaacaccttttttttgtagctccagtttaaaggaacac

SEQ ID NO: 750504 - DNA, 120 bp, Artificial Sequence
  ENSG00000205937_50 (sequence is synthesized)
aggaacaccttttttttgtagctccagtttaaaggaacactattcttgggggaaaaaaattagcaaatatgcgtagattaacattttagagagtttccaatctgttaaaagcttaaggat

SEQ ID NO: 750505 - DNA, 120 bp, Artificial Sequence
  ENSG00000205937_51 (sequence is synthesized)
caaattcagttttcttacatagaatacatttggctttttatatgggaatatttcctttaatcatttctgagaaccagaagtttcccagtatttcagcatttttagtttattttgctgagt

SEQ ID NO: 750506 - DNA, 120 bp, Artificial Sequence
  ENSG00000205937_52 (sequence is synthesized)
gactggatttactgaatctatacagtttatttcttaaacacttgtatctcataaccactcatgacgtttatagctatttgtatctggcagaatggttttaaaagcacatggacccttgtg

SEQ ID NO: 750507 - DNA, 120 bp, Artificial Sequence
  ENSG00000205937_53 (sequence is synthesized)
aatagtttcgggtggcattttgtcctcagtgcagcattttgaggcatgtggagtcatctctgctccactccctgctgctgtgactgaggccgctggcactgagaacacagcccacagtgc

SEQ ID NO: 750508 - DNA, 120 bp, Artificial Sequence
  ENSG00000205937_54 (sequence is synthesized)
tgtctgggctgccaggcctggtggggagtggagtgtgcgtgccccagaactttccgtcttccgaggccctgttacaaactgtataagtagcttagctggtttttttcagtaattgccctt

SEQ ID NO: 750509 - DNA, 120 bp, Artificial Sequence
  ENSG00000205937_55 (sequence is synthesized)
caggcattaggaaagtttccttgatatttggctaacttttctttcaagtttcttaagtcctgaaatgggttaggagctctgtgcgctcacatcagctgttggccttgtaagtcacacctt

SEQ ID NO: 750510 - DNA, 120 bp, Artificial Sequence
  ENSG00000205937_56 (sequence is synthesized)
tgctgtggagtctgctgattatctgctgtttgacagtctgagtgcttgctgagctaaaaacccaggggacccgggtaccttctgggtgggcgtgattacagacattccaacttttcgtaa

SEQ ID NO: 750511 - DNA, 120 bp, Artificial Sequence
  ENSG00000205937_57 (sequence is synthesized)
gattctggtaggattttttttgtgtgtctccccttctgtctttgaatggagtgagtccatgctgtctccataggagatgagaaggggttggcctttactggcagctacacagaagatgga

SEQ ID NO: 750512 - DNA, 120 bp, Artificial Sequence
  ENSG00000205937_58 (sequence is synthesized)
tttttcttcattattatagagtcagtgctgtgaaatccctaatttgggctaacttaggctgagtttactgaagttaaacctcttaagtatgttctgaatacatagccacatgccggagtt

SEQ ID NO: 750513 - DNA, 120 bp, Artificial Sequence
  ENSG00000205937_59 (sequence is synthesized)
agtccccatgtgccttaaaggtagttgagaaaacaaaagagccctttaccccttagggcacagaaggggctgcgcttgggctcccagtatccccagctaccagacaattcttgaggtcgg

SEQ ID NO: 750514 - DNA, 120 bp, Artificial Sequence
  ENSG00000205937_60 (sequence is synthesized)
catggcgtgtgtttcagtgccatctacatgcagagccacctctctgagactgcttgtttccaaacacaaagtctttggcatctcctaaaatttccttcatgcagcttcccaccgcagccc

SEQ ID NO: 750515 - DNA, 120 bp, Artificial Sequence
  ENSG00000205944_0 (sequence is synthesized)
attggctcaggccgataccacgcgccccgatacccggcacaggagccacctcccagagccccgcagtccatgcctcagtcggcctgcgctcctcagcctggcggttctacctccgagggt

SEQ ID NO: 750516 - DNA, 120 bp, Artificial Sequence
  ENSG00000205944_1 (sequence is synthesized)
tcgcccgcccttggttttccttacaccttagcctttggctcctttgaccactcgaagccccacagcgtgttccagcggacttcaccagcagacccagaagtggtgggtgaaacactgcct

SEQ ID NO: 750517 - DNA, 120 bp, Artificial Sequence
  ENSG00000205944_2 (sequence is synthesized)
ctgttcctccttgagcctgtcgggagctgctgcctgccaccaccatgtctgctgcaaatcctgagactccaaactcaaccatctccagagaggccagcacccagtcttcatcagctgcag

SEQ ID NO: 750518 - DNA, 120 bp, Artificial Sequence
  ENSG00000205944_3 (sequence is synthesized)
ctagccaaggctgggtgttaccagaaggcaaaatcgtgccaaacactgtttttgttggtggaattgatgctaggatggatgaaactgagattggaagctgctttggtagatacggttcag

SEQ ID NO: 750519 - DNA, 120 bp, Artificial Sequence
  ENSG00000205944_4 (sequence is synthesized)
tgaaagaagtgaagataatcacgaatcgaactggtgtgtccaaaggctatggatttgtttcgtttgttaatgacgtggatgtccagaagatagtaggatcacagatacatttccatggta

SEQ ID NO: 750520 - DNA, 120 bp, Artificial Sequence
  ENSG00000205944_5 (sequence is synthesized)
ccctgcaatcaggaaacaaaagttatgtgctcgtcatgtgcagccacgtcctttggtagttaatcctcctcctccaccacagtttcagaacgtctggcggaatccaaacactgaaaccta

SEQ ID NO: 750521 - DNA, 120 bp, Artificial Sequence
  ENSG00000205944_6 (sequence is synthesized)
caaacactgaaacctacctgcagccccaaatcacgccgaatcctgtaactcagcacgttcaggcttattctgcttatccacattcaccaggtcaggtcatcactggatgtcagttgcttg

SEQ ID NO: 750522 - DNA, 78 bp, Artificial Sequence
  ENSG00000205944_7 (sequence is synthesized)
cattcaccaggtcaggtcatcactggatgtcagttgcttgtatataattatcaggaatatcctacttatcccgattca

SEQ ID NO: 750523 - DNA, 120 bp, Artificial Sequence
  ENSG00000205944_8 (sequence is synthesized)
cttatccaaattcagcagttcaggtcaccactggatatcagttccatgtatacaattaccagatgccaccgcagtgccctgttggggagcaaaggagaaatctgtggaccgaagcataca

SEQ ID NO: 750524 - DNA, 120 bp, Artificial Sequence; identical to SEQ ID NO: 689748
  ENSG00000205944_9 (sequence is synthesized)

SEQ ID NO: 750525 - DNA, 120 bp, Artificial Sequence; identical to SEQ ID NO: 683732
  ENSG00000205944_10 (sequence is synthesized)

SEQ ID NO: 750526 - DNA, 120 bp, Artificial Sequence; identical to SEQ ID NO: 683733
  ENSG00000205944_11 (sequence is synthesized)

SEQ ID NO: 750527 - DNA, 120 bp, Artificial Sequence; identical to SEQ ID NO: 683734
  ENSG00000205944_12 (sequence is synthesized)

SEQ ID NO: 750528 - DNA, 120 bp, Artificial Sequence; identical to SEQ ID NO: 683735
  ENSG00000205944_13 (sequence is synthesized)

SEQ ID NO: 750529 - DNA, 120 bp, Artificial Sequence; identical to SEQ ID NO: 683736
  ENSG00000205944_14 (sequence is synthesized)

SEQ ID NO: 750530 - DNA, 120 bp, Artificial Sequence; identical to SEQ ID NO: 683737
  ENSG00000205944_15 (sequence is synthesized)

SEQ ID NO: 750531 - DNA, 120 bp, Artificial Sequence; identical to SEQ ID NO: 683738
  ENSG00000205944_16 (sequence is synthesized)

SEQ ID NO: 750532 - DNA, 120 bp, Artificial Sequence; identical to SEQ ID NO: 683739
  ENSG00000205944_17 (sequence is synthesized)

SEQ ID NO: 750533 - DNA, 120 bp, Artificial Sequence; identical to SEQ ID NO: 683740
  ENSG00000205944_18 (sequence is synthesized)

SEQ ID NO: 750534 - DNA, 120 bp, Artificial Sequence; identical to SEQ ID NO: 683741
  ENSG00000205944_19 (sequence is synthesized)

SEQ ID NO: 750535 - DNA, 120 bp, Artificial Sequence; identical to SEQ ID NO: 683742
  ENSG00000205944_20 (sequence is synthesized)

SEQ ID NO: 750536 - DNA, 120 bp, Artificial Sequence; identical to SEQ ID NO: 683743
  ENSG00000205944_21 (sequence is synthesized)

SEQ ID NO: 750537 - DNA, 120 bp, Artificial Sequence; identical to SEQ ID NO: 683744
  ENSG00000205944_22 (sequence is synthesized)

SEQ ID NO: 750538 - DNA, 120 bp, Artificial Sequence; identical to SEQ ID NO: 683745
  ENSG00000205944_23 (sequence is synthesized)

SEQ ID NO: 750539 - DNA, 120 bp, Artificial Sequence; identical to SEQ ID NO: 683746
  ENSG00000205944_24 (sequence is synthesized)

SEQ ID NO: 750540 - DNA, 76 bp, Artificial Sequence
  ENSG00000205944_25 (sequence is synthesized)
caaattcaccagccatttcctgcttatccaagatcaccatttcaggtcactgctggatatcagttgcctgtatata

SEQ ID NO: 750541 - DNA, 120 bp, Artificial Sequence
  ENSG00000205978_0 (sequence is synthesized)
caaccccgggcaggaagagctcgtcgcggtagcagcggtcgaaggggaccaagctccagagggcgggcgcccgagccgtgcggggagcgggcggggcagccatgctcctgtctgggggcg

SEQ ID NO: 750542 - DNA, 120 bp, Artificial Sequence
  ENSG00000205978_1 (sequence is synthesized)
atcctccggcgcaggaatggttcatggtgcagacaaaatcgaagcctcgggtgcagcggcagcggctgcaagtgcagcgcatctttagggtcaagctgaacgccttccagagccgcccgg

SEQ ID NO: 750543 - DNA, 120 bp, Artificial Sequence
  ENSG00000205978_2 (sequence is synthesized)
acaccccctacttctggctacagctcgaggggccccgagagaacatgggcaaagccaaggaatacctgaagggcctgtgcagcccagagctgtggaaagaggttcgctacccaccgatcc

SEQ ID NO: 750544 - DNA, 120 bp, Artificial Sequence
  ENSG00000205978_3 (sequence is synthesized)
tgcactgtgccttccttggggcccaaggcctcttcctggactgcctctgctggagcacccttgcctacctggtgcctggcccccctggctccctgatggtgggcgggctgactgagtctt

SEQ ID NO: 750545 - DNA, 120 bp, Artificial Sequence
  ENSG00000205978_4 (sequence is synthesized)
tcatcatgacacagaactggctggaggagctggtggggcgactgcgctggggccctgcccctctgctgaccccccgggggatctgggaggctgaggtgacccgggcctttggggccctgg

SEQ ID NO: 750546 - DNA, 120 bp, Artificial Sequence
  ENSG00000205978_5 (sequence is synthesized)
tctggatccgtggtgaccagcatgcaggggacctactgcagctgcccccagcggtccaggagctgctgctgagcctggtgcgggatgctgcgggcaaggaagacatcatcgagtggctca

SEQ ID NO: 750547 - DNA, 120 bp, Artificial Sequence
  ENSG00000205978_6 (sequence is synthesized)
gccgcttcggcatctctgactcccactccgatccggaggttctaatctgccctccccagcagcagaaggaagccccagccatggtgtccgtgggagagagtcctggaccctttgtggaca

SEQ ID NO: 750548 - DNA, 120 bp, Artificial Sequence
  ENSG00000205978_7 (sequence is synthesized)
tggggaccctccagaacaggggcccagaaaattcaaagagattatctagcctgggagccactgggtccctgatcacagcccagagcacaccgcaggaggcagcaaaccagctggtacggg

SEQ ID NO: 750549 - DNA, 120 bp, Artificial Sequence
  ENSG00000205978_8 (sequence is synthesized)
tcggttccaacaaccaagatggtatggacagtgctcaagaggaagggacagtgcaagccaccagcagccaggactccacgaaccacacacaagccttgttgaagcaaaggcaggtccaga

SEQ ID NO: 750550 - DNA, 120 bp, Artificial Sequence
  ENSG00000205978_9 (sequence is synthesized)
agatagaagataaactcctcttccaacctccagtatcagccctgggtgtgtgcccaccctggaaggcctggaccccggggccagcctttgggccattgtggccgggggctattgctgcaa

SEQ ID NO: 750551 - DNA, 120 bp, Artificial Sequence
  ENSG00000205978_10 (sequence is synthesized)
ccttctggaggatcaatgagctgcattctctacatctggcctggctcctgtcccaggcgtgcttcaatttccccttctggcagagacctctgggccccattcagttgaagctgccagggc

SEQ ID NO: 750552 - DNA, 120 bp, Artificial Sequence
  ENSG00000205978_11 (sequence is synthesized)
agaatcctttgcccttaaatctggagtggaagcagaaggagctggctcctctgcctagtgcagaaagcccagctggtagaccagatggggggctgggaggagaagcagccctgcagaatt

SEQ ID NO: 750553 - DNA, 120 bp, Artificial Sequence
  ENSG00000205978_12 (sequence is synthesized)
gcccaaggccagagatttccccaaaagttacgagtttattggtggtccctgggagctcagatgtaaaagacaaagttagctcggatctcccacagatagggccacccttgacctctacac

SEQ ID NO: 750554 - DNA, 120 bp, Artificial Sequence
  ENSG00000205978_13 (sequence is synthesized)
cccaactacaggctggaggtgagccgggggatcaagggagtatgcagttagattttaagggactggaagagggacccgctccagtgctgccaacagggcaagggaagcccgtggctcaag

SEQ ID NO: 750555 - DNA, 120 bp, Artificial Sequence
  ENSG00000205978_14 (sequence is synthesized)
gggggctgacagatcagtcagtacctggagctcaaacagtgcctgaaactctcaaagtgcccatggctgcagcagtgcccaaagctgaaaatccctccagaactcaagtgccatctgcag

SEQ ID NO: 750556 - DNA, 120 bp, Artificial Sequence
  ENSG00000205978_15 (sequence is synthesized)
ctcccaaactgcctacatctcgaatgatgctggcagtgcacacagagcctgcagctcccgaagtgcctttggctccaacaaagccaacagctcaactgatggccacagctcaaaaaacag

SEQ ID NO: 750557 - DNA, 120 bp, Artificial Sequence
  ENSG00000205978_16 (sequence is synthesized)
ttgtgaatcaaccagtgttggtagctcaagtggaacccacaactccaaaaactccccaggctcagaagatgcctgtagcaaaaacatcacctgcaggtcccaaaacacccaaagctcaag

SEQ ID NO: 750558 - DNA, 120 bp, Artificial Sequence
  ENSG00000205978_17 (sequence is synthesized)
ccgggcctgcagctacagtttccaaagcacctgcagcttccaaagcacctgcagctcccaaagtacctgtgacccccagagtctccagagctcccaaaacacctgcagctcagaaggtgc

SEQ ID NO: 750559 - DNA, 120 bp, Artificial Sequence
  ENSG00000205978_18 (sequence is synthesized)
ccacggatgcagggccaaccttggatgtagccagacttctgagtgaggtccagcctacatcaagggctagtgtctccttactgaagggccaggggcaggctggaaggcagggtccccagt

SEQ ID NO: 750560 - DNA, 120 bp, Artificial Sequence
  ENSG00000205978_19 (sequence is synthesized)
ccagtggcaccttggccctcagcagtaagcaccagtttcagatggaggggctcctgggggcttgggagggggccccaaggcagccacctcgccacctgcaagcgaacagcacagtgacca

SEQ ID NO: 750561 - DNA, 120 bp, Artificial Sequence
  ENSG00000205978_20 (sequence is synthesized)
gcttccagaggtaccacgaggccctgaatacacccttcgagctgaacctgtcaggggaacctggaaaccaggggttgcggcgagtggtcatcgatggcagcagtgtggccatggtgcatg

SEQ ID NO: 750562 - DNA, 120 bp, Artificial Sequence
  ENSG00000205978_21 (sequence is synthesized)
gcctgcagcacttcttctcctgccgaggaattgccatggcagtgcagtttttctggaaccggggacaccgagaggtcactgtgtttgtacccacctggcagctgaagaagaaccggaggg

SEQ ID NO: 750563 - DNA, 120 bp, Artificial Sequence
  ENSG00000205978_22 (sequence is synthesized)
tgagagagagccactttctgacgaagctacactcgctcaagatgctttcaatcacaccctcccagcttgagaatggcaagaagatcaccacctacgattataggttcatggtaaagctgg

SEQ ID NO: 750564 - DNA, 120 bp, Artificial Sequence
  ENSG00000205978_23 (sequence is synthesized)
cagaggagacagatggcatcattgtcaccaatgagcagattcacatcctgatgaatagttccaagaaactgatggtcaaagatcgcttgctgcctttcacctttgcggggaatctcttca

SEQ ID NO: 750565 - DNA, 120 bp, Artificial Sequence
  ENSG00000205978_24 (sequence is synthesized)
tggtgcctgatgaccccctgggccgtgatggccccaccttggatgagtttctgaagaagccaaacaggttggacactgacattggcaacttcctgaaggtgtggaagacccttcctccca

SEQ ID NO: 750566 - DNA, 120 bp, Artificial Sequence
  ENSG00000205978_25 (sequence is synthesized)
gctcagccagtgtcactgagctgagtgatgacgctgactctgggcccctggagagtctgccgaatatggaagaagtcagggaagagaaggaggagaggcaggatgaggagcagagacagg

SEQ ID NO: 750567 - DNA, 120 bp, Artificial Sequence
  ENSG00000205978_26 (sequence is synthesized)
ggcagggcacacagaaggcggctgaggaggacgaccttgactcttcgctggcgtcagtgttcagggtggagtgcccgtccctttcggaggagatcctgcggtgcctcagcctccatgatc

SEQ ID NO: 750568 - DNA, 120 bp, Artificial Sequence
  ENSG00000205978_27 (sequence is synthesized)
cccctgatggggccctggacatcgacctcctgccaggggcagcttctccctacctgggcatcccctgggatggaaaggctccctgccagcaggttcttgcccacctggcccagctcacca

SEQ ID NO: 750569 - DNA, 120 bp, Artificial Sequence
  ENSG00000205978_28 (sequence is synthesized)
tccccagcaacttcaccgcactctccttcttcatgggcttcatggactcccacagggatgccatccctgactatgaagccctagtgggccccctgcacagcctcctcaagcagaagcctg

SEQ ID NO: 750570 - DNA, 120 bp, Artificial Sequence
  ENSG00000205978_29 (sequence is synthesized)
actggcagtgggaccaggagcatgaggaggccttcctggccctgaagcgagccctggtgtctgccctctgcctgatggcccccaactcccagctgcccttccgcctggaggtgaccgtga

SEQ ID NO: 750571 - DNA, 120 bp, Artificial Sequence
  ENSG00000205978_30 (sequence is synthesized)
gccacgtggccctgacggccatcctccatcaggagcactcagggaggaagcaccccatagcctatacctcaaaacccctcctccctgatgaggagagccagggcccccagtcagggggtg

SEQ ID NO: 750572 - DNA, 120 bp, Artificial Sequence
  ENSG00000205978_31 (sequence is synthesized)
tttcctatgcctcccggaccactgcggaccctgaggtgcgggagggccgcagggtttccaaagcttggttgatccgatggtccctcttggttcaggacaaaggcaagagggccctggaat

SEQ ID NO: 750573 - DNA, 120 bp, Artificial Sequence
  ENSG00000205978_32 (sequence is synthesized)
tggccctcctccagggcctgctgggggagaaccgcctgctcacccccgcggcctccatgcctcgcttcttccaggttctgccgcctttctctgacctgtccacgttcgtctgcatccaca

SEQ ID NO: 750574 - DNA, 120 bp, Artificial Sequence
  ENSG00000205978_33 (sequence is synthesized)
tgtcgggctactgcttctaccgtgaggatgagtggtgtgctggctttggtctctatgttctatcgcccaccagcccccctgtctccctttccttctcctgctccccttacacgccaacct

SEQ ID NO: 750575 - DNA, 120 bp, Artificial Sequence
  ENSG00000205978_34 (sequence is synthesized)
atgcccacctggcagccgtggcctgcggcctggagcgctttggccagtccccactcccagtggttttcctcactcactgcaactggatcttcagcctcctgtgggagctcctgcccctct

SEQ ID NO: 750576 - DNA, 120 bp, Artificial Sequence
  ENSG00000205978_35 (sequence is synthesized)
ggagggctcggggcttcctctcctctgatggggctccactccctcacccaagcctgctctcctacattatatccctcacctctggcctctcatcccttccgtttatctaccgaacctcct

SEQ ID NO: 750577 - DNA, 120 bp, Artificial Sequence
  ENSG00000205978_36 (sequence is synthesized)
accggggctctctgtttgctgtgacagtggacaccctggccaagcagggtgcccaggggggtgggcagtggtggagtttgccaaaggatgtgccagcccctacagtgagtccccatgcca

SEQ ID NO: 750578 - DNA, 120 bp, Artificial Sequence
  ENSG00000205978_37 (sequence is synthesized)
tgggcaagaggcccaatttgctggcattacagctgagtgacagcaccctggccgacatcattgccaggctgcaggctgggcagaaactgtctggctcctcaccgtttagttctgccttta

SEQ ID NO: 750579 - DNA, 120 bp, Artificial Sequence
  ENSG00000205978_38 (sequence is synthesized)
actcactcagcctcgacaaggagagtggcctgcttatgttcaagggagataagaagcccagggtctgggtagtcccgacgcaactccggagggatctgattttctctgtgcatgacattc

SEQ ID NO: 750580 - DNA, 120 bp, Artificial Sequence
  ENSG00000205978_39 (sequence is synthesized)
ccttgggggcccaccagaggcccgaagagacctacaagaagttgcgtttgctggggtggtggcctgggatgcaggagcatgtgaaagattactgcaggagctgcttgttctgcatccccc

SEQ ID NO: 750581 - DNA, 120 bp, Artificial Sequence
  ENSG00000205978_40 (sequence is synthesized)
gaaatctcataggcagcgagttgaaggttattgagtccccatggcccctcaggtcgaccgccccctggtcgaacctgcagatcgaggtggtgggcccggtcaccataagtgaggagggcc

SEQ ID NO: 750582 - DNA, 120 bp, Artificial Sequence
  ENSG00000205978_41 (sequence is synthesized)
ataagcatgtacttattgtggctgacccaaacaccaggtgggtggaggcattccccctgaagccctacacacacacggctgtggcccaggtgctgcttcagcatgtgtttgcaaggtggg

SEQ ID NO: 750583 - DNA, 120 bp, Artificial Sequence
  ENSG00000205978_42 (sequence is synthesized)
gtgttcctgtgaggctggaggcagcccaggggccccagtttgcccggcacgtccttgtgagctgtgggctggccctgggagcccaggtggcctccctgagtcgggacctccagttcccct

SEQ ID NO: 750584 - DNA, 120 bp, Artificial Sequence
  ENSG00000205978_43 (sequence is synthesized)
gcctgacgagctcaggggcctactgggaattcaagagggccctcaaggagttcatcttcctgcatgggaagaagtgggcggcctccctgcctttgctgcacctggccttcagggcctcct

SEQ ID NO: 750585 - DNA, 120 bp, Artificial Sequence
  ENSG00000205978_44 (sequence is synthesized)
ccactgatgccacaccgttcaaggtcctgaccgggggtgagtcaaggctcacggagcccctgtggtgggagatgagcagcgcaaacattgaagggctcaagatggacgtcttcctgctac

SEQ ID NO: 750586 - DNA, 120 bp, Artificial Sequence
  ENSG00000205978_45 (sequence is synthesized)
agctggtgggggagctgctggagctccactggagggtggctgacaaggcgagtgaaaaggccgagaacaggcgtttcaagcgggagagccaggagaaggagtggaatgtgggtgaccagg

SEQ ID NO: 750587 - DNA, 120 bp, Artificial Sequence
  ENSG00000205978_46 (sequence is synthesized)
tccttttgctgtccctccccaggaatggcagcagtgccaaatgggtgggtcccttctatatcggggaccggctgagcctgtcactctataggatatggggcttcccaaccccagagaagc

SEQ ID NO: 750588 - DNA, 120 bp, Artificial Sequence
  ENSG00000205978_47 (sequence is synthesized)
tggggtgcatctatcccagcagtctgatgaaggcctttgccaagagtggcaccccgctgtccttcaaggtcttggagcagtgagcgggagcagcgggggtgccccctgccccagggccgt

SEQ ID NO: 750589 - DNA, 120 bp, Artificial Sequence
  ENSG00000205978_48 (sequence is synthesized)
gggtttctgctgctaggcctccccctgtcccagcagtgctctcagtccactgggggccctcagttgtgccttttgtagagaacttgcttcataaagctttgctgaattgccttgaactag

SEQ ID NO: 750590 - DNA, 120 bp, Artificial Sequence
  ENSG00000205978_49 (sequence is synthesized)
ggaccagcatccccatggaaacatccccagtttggggtacttggagaatttgccaaaggctgtcagatatgggtccctggcagttttacactgggaaatggagtgctcctctaggctata

SEQ ID NO: 750591 - DNA, 120 bp, Artificial Sequence
  ENSG00000205978_50 (sequence is synthesized)
ccaggctcagtgtcttctccccaagtatcctctttccccttcacatgtaggtgtgtggtggtgtgcacacacactcacgaaagaatctatcttggccatgaaactgtggctgttgacctt

SEQ ID NO: 750592 - DNA, 120 bp, Artificial Sequence
  ENSG00000205978_51 (sequence is synthesized)
ggaattggaaccacagtcctttcccatacagaaaccccaaatgtgggctcctccctccaacctgttcttttggggaccctttgcccttagagctgtcacagatgacataagcctgggcag

SEQ ID NO: 750593 - DNA, 120 bp, Artificial Sequence
  ENSG00000205978_52 (sequence is synthesized)
gctgtggggaggccgctgcctcctagcctcacggtcagctttctcaagccaggtgtggcctgcacagctctcagggcagggctggccatcctcccaggcctcaagggcagtgtcttggag

SEQ ID NO: 750594 - DNA, 120 bp, Artificial Sequence
  ENSG00000205978_53 (sequence is synthesized)
tgggaggatggccagccacaagccaccagcttgtcagcatgggaagggcaagggggaaatgggttggcctacctcatttgactccagccaatggagacaattcctgacccctgctttgat

SEQ ID NO: 750595 - DNA, 120 bp, Artificial Sequence
  ENSG00000205978_54 (sequence is synthesized)
ggtgttgaccccacaggaatcaaggatcttgatgccaagtgtggcatctctatctgaagagctgcttctgttagacccaggggccccggcctctgttttaagggggcagggcgtctgcaa

SEQ ID NO: 750596 - DNA, 120 bp, Artificial Sequence
  ENSG00000205978_55 (sequence is synthesized)
caggagtggcacacggtgaagtgctggcatggctctacctcccaacccctcccaaccccatcccaaagcctacagtcctctgctccttctacctccactgtatcctgcatcccagaccct

SEQ ID NO: 750597 - DNA, 120 bp, Artificial Sequence
  ENSG00000205978_56 (sequence is synthesized)
acagattgtgtgattgcttcatctgtatcaccccccgagtcctgtggacctgccttctgtgtagagcaaaacccaggctccctcacagccattctttgcagagatcacccttgcagtgag

SEQ ID NO: 750598 - DNA, 120 bp, Artificial Sequence
  ENSG00000205978_57 (sequence is synthesized)
tgtgagttccttccaggtgtgtgcgcgtacactcaccctctgaattgctgccgctgccaaggaagtgggctccaggtgaaggccagtgccacgtcactctggctggccttcttagtagtt

SEQ ID NO: 750599 - DNA, 120 bp, Artificial Sequence
  ENSG00000205978_58 (sequence is synthesized)
tcatttctccggaagctgagccagtctcctggtctagcccaggttgccagaacgcttggcattgcagagtgctagagccagtggagaacttgccaacttgattgttttacagcagaggaa

SEQ ID NO: 750600 - DNA, 120 bp, Artificial Sequence
  ENSG00000205978_59 (sequence is synthesized)
agaggatcacagagggaaaatgattcacccaaagtcacacagcaagttcatggctgagctgagaccaggattaagcttcctgactcccagttcaccatgaaaagggttctggcaacaggt

SEQ ID NO: 750601 - DNA, 120 bp, Artificial Sequence
  ENSG00000205978_60 (sequence is synthesized)
tcaagctggagaatccttcaaaatgctacacccacattctctccaactcttcatctccctgatcttccagacaaactacctggatgttgcccttaaaccatttctagctgttaaccctgt

SEQ ID NO: 750602 - DNA, 120 bp, Artificial Sequence
  ENSG00000205978_61 (sequence is synthesized)
ccagaaaaatgattgagtgatagctgagaagtggaaagtgtgggatttttggcaggtgctctctttcctccgccccccgcgccattctttctcttcctcctctctgtaatggtatgtcca

SEQ ID NO: 750603 - DNA, 120 bp, Artificial Sequence
  ENSG00000205978_62 (sequence is synthesized)
gcctcactctccctccctggtgctgtatgcgttccccctgttagctacatttgtgatcacatacccttcttttaagtgaatttttttcatttgatttgtcaataaacgaatcaaactgga

SEQ ID NO: 750604 - DNA, 120 bp, Artificial Sequence
  ENSG00000205981_0 (sequence is synthesized)
gtgttgcgtagggcgcctgtgcttgaggttgggggttgcgtcgctctctggtaaaggcgtgcaggtgttggccgcggcctctgagctgggatgagccgtgctcccggtggaagcaaggga

SEQ ID NO: 750605 - DNA, 120 bp, Artificial Sequence
  ENSG00000205981_1 (sequence is synthesized)
gcccagccggagccatggccagtacagtggtagcagttggactgaccattgctgctgcaggatttgcaggccgttacgttttgcaagccatgaagcatatggagcctcaagtaaaacaag

SEQ ID NO: 750606 - DNA, 120 bp, Artificial Sequence
  ENSG00000205981_2 (sequence is synthesized)
tttttcaaagcctaccaaaatctgccttcagtggtggctattatagaggtgggtttgaacccaaaatgacaaaacgggaagcagcattaatactaggtgtaagccctactgccaataaag

SEQ ID NO: 750607 - DNA, 120 bp, Artificial Sequence
  ENSG00000205981_3 (sequence is synthesized)
ggaaaataagagatgctcatcgacgaattatgcttttaaatcatcctgacaaaggaggatctccttatatagcagccaaaatcaatgaagctaaagatttactagaaggtcaagctaaaa

SEQ ID NO: 750608 - DNA, 120 bp, Artificial Sequence
  ENSG00000205981_4 (sequence is synthesized)
aatgaagtaaatgtatgatgaattttaagttcgtattagtttatgtatatgagtactaagtttttataataaaatgcctcagagctacaattttaaaaaatgatttagcacaagctaaat

SEQ ID NO: 750609 - DNA, 120 bp, Artificial Sequence
  ENSG00000205981_5 (sequence is synthesized)
ccttctgaatagaaatattgttcattactcatttagcagataatttgggacctatgtctacttttcaaggcaaagtgaagatgacagtccttgctctcagggagcccccactttaatggg

SEQ ID NO: 750610 - DNA, 120 bp, Artificial Sequence
  ENSG00000205981_6 (sequence is synthesized)
agactgataaactggtaattagactgtgataaatagtatgatggaaattagcttaagctgtttaagtagggactcttcttattcggtggaaaggctgttccaggtacaggcaactggcct

SEQ ID NO: 750611 - DNA, 120 bp, Artificial Sequence
  ENSG00000205981_7 (sequence is synthesized)
ggcaacttggatacttggaaccttgtatttaaaagtgaatttaaccacaactgagacctaagaaattgacctaggggtgtgtgtgtgtgtgtattctatgtacatataaaccatttttat

SEQ ID NO: 750612 - DNA, 120 bp, Artificial Sequence
  ENSG00000205981_8 (sequence is synthesized)
ttcatgcattaaaaatagtatgataaagatttcagagtacaggtctggtacaatcacagttcattgcagcctcaacctcctgggtttaagcagtcctcccgcctcagcctcccaaagtac

SEQ ID NO: 750613 - DNA, 120 bp, Artificial Sequence
  ENSG00000205981_9 (sequence is synthesized)
tgggattacaggcatgagtatttacattgtattcagctagccccttaaaggtaatgaccatttataaattattccttcagttggctatttcttgacataatcaaacttctgcaattgtta

SEQ ID NO: 750614 - DNA, 120 bp, Artificial Sequence
  ENSG00000205981_10 (sequence is synthesized)
tgattaagcttaaaccctgttagcaaaactgaaaactgaaatgttctcaatatcaacatatttaatttggactctttagaatttatacactaataaatttaaatgatgtttaaaggcaaa

SEQ ID NO: 750615 - DNA, 120 bp, Artificial Sequence
  ENSG00000205981_11 (sequence is synthesized)
cctagagccacacttagggaagggtaaatttccaaatatccatgaagttctaagtgattgctttggacccattctcctgcttcctgcaaggagagtatagaagttctgaactttgtgatg

SEQ ID NO: 750616 - DNA, 120 bp, Artificial Sequence
  ENSG00000205981_12 (sequence is synthesized)
gtgctaccctgaaacatcagatgttatatgtgacagagttggatggggttttgacaattctagtaccccactagacccaagtttcactttttcacataccatcaccttcagcatcatctg

SEQ ID NO: 750617 - DNA, 120 bp, Artificial Sequence
  ENSG00000205981_13 (sequence is synthesized)
tacatattcttgttttccttcatctgctctgcatcgcacacacagaggtatatgattctaaagtgatccgatctgaccatgtggccctggcactcccaaacatcatacataggtagcact

SEQ ID NO: 750618 - DNA, 120 bp, Artificial Sequence
  ENSG00000205981_14 (sequence is synthesized)
ctagttaattaggctatagggtttggcttgatgttatggtcatactctctgtggtcacagttaagaatagatttggctgtgatcacctgttgaatatgttgtgattaagtgtaacagaat

SEQ ID NO: 750619 - DNA, 120 bp, Artificial Sequence
  ENSG00000205981_15 (sequence is synthesized)
ctgtatatatatcttaaagtcttgtttcaaatacacttgaacctcttgtctcaaaagacttctgttcttgagccacttcttgcagatttttatctagaatatggctaatttggaatgatc

SEQ ID NO: 750620 - DNA, 120 bp, Artificial Sequence
  ENSG00000205981_16 (sequence is synthesized)
tttcctttactcccggaagacctggctttcagacactgttattttgtcttatatttctaagatagttcatattgactggaaaaaaatgaatctgtttaatgatcattaaaatactacttg

SEQ ID NO: 750621 - DNA, 120 bp, Artificial Sequence
  ENSG00000205981_17 (sequence is synthesized)
ttgctacttatttataaactttattcagctttagctaaaatacctcgggaattgcactaaaagtcctctgaaatgtcttagtttttcttagttctgtgaatatttccagacgtctttttt

SEQ ID NO: 750622 - DNA, 120 bp, Artificial Sequence
  ENSG00000205981_18 (sequence is synthesized)
aaagcaactttattttattaacctttctttacaaatgcatttcttctttcaggccttcagtggtggctattatagaggtgggtttgaacccaaaatgacaaaacgggaagcagcattaat

SEQ ID NO: 750623 - DNA, 120 bp, Artificial Sequence
  ENSG00000205981_19 (sequence is synthesized)
actaggtgtaaggtaaaataatctctaatatttttagcatttttctaccactgtagagccatgaggaaatataagaaagaccttctctcctttaataggagagggtcatgggggattttg

SEQ ID NO: 750624 - DNA, 120 bp, Artificial Sequence
  ENSG00000205981_20 (sequence is synthesized)
tcctaggaagattgatattaccaattctaatcaatgaaactgtactgttccttcatgttatttttaagatgtaaacaatccttcaaatgagaaggcacactagcacttaagcactttttc

SEQ ID NO: 750625 - DNA, 120 bp, Artificial Sequence
  ENSG00000205981_21 (sequence is synthesized)
ttttttcctagagtgtttactaaaacacaggcactttttcatttatttaaagatagactcctcagcagattatcacagtgttcagtgttgttctctgtaactgacattttttttgtggtg

SEQ ID NO: 750626 - DNA, 120 bp, Artificial Sequence
  ENSG00000205981_22 (sequence is synthesized)
gtgaccaatagttattaatgggataattttatctcaaattcctggctattagaaaggtaacacttaaatctgtaagtcctgtctcctaggctggagccatatatttttggtgtcttaaaa

SEQ ID NO: 750627 - DNA, 120 bp, Artificial Sequence
  ENSG00000205981_23 (sequence is synthesized)
gaaattaagtgaaaactttacttacagaatgagcagatgtaagtgctactattactatgttttgtgggtttttctggcctacatttattataattaaaacgttaaatttcgtaaaactaa

SEQ ID NO: 750628 - DNA, 120 bp, Artificial Sequence
  ENSG00000205981_24 (sequence is synthesized)
aatgtaatttttccttatccattttagataccttgaaacggagattacctagatagaaacttatgggatttatttattcgtttgtgatagacttctatgcagccttggctgtgttgaagg

SEQ ID NO: 750629 - DNA, 120 bp, Artificial Sequence
  ENSG00000205981_25 (sequence is synthesized)
aaagcaagaatttctttgaataccaaaaaatagaccacagaattcatgttctagtgtttgtatccttttacttatacaggagagggctttcattaataaaaagggttttgacattttaaa

SEQ ID NO: 750630 - DNA, 120 bp, Artificial Sequence
  ENSG00000205981_26 (sequence is synthesized)
aagttgtgctccttagtgcgactgcgggcgggaggtttcggttattggggagtcacactcaccaggacacaaccctgttggctcgctctcttgggggtttgtgtttttacatcgtctttc

SEQ ID NO: 750631 - DNA, 120 bp, Artificial Sequence
  ENSG00000205981_27 (sequence is synthesized)
ttggggatggaagtgaagtcggggagattggagatttagtttacttattctgttgcttttggttttaggccgttacgttttgcaagccatgaagcatatggagcctcaagtaaaacaagt

SEQ ID NO: 750632 - DNA, 120 bp, Artificial Sequence
  ENSG00000206013_0 (sequence is synthesized)
accagtctgagtgtggaagagacggcgctggaacccatggacacggcgtatccccgcgaggacacccgggcccccacgcccagcaaggccggtgcccacacagccctcacactgggggcc

SEQ ID NO: 750633 - DNA, 120 bp, Artificial Sequence
  ENSG00000206013_1 (sequence is synthesized)
ccgcaccccccgcctcgagaccacttgatctggtcggtgttcagcaccctctacctgaatctgtgttgcctcggcttcctggcgctggcctactccatcaaggcccgagatcagaaggtg

SEQ ID NO: 750634 - DNA, 120 bp, Artificial Sequence
  ENSG00000206013_2 (sequence is synthesized)
gttggtgacctggaagcggcccggcgttttggctccaaagccaagtgctacaacatcctggccgcgatgtggacgctggtgccgccactgctgctcctggggctggtggtgactggtgcc

SEQ ID NO: 750635 - DNA, 120 bp, Artificial Sequence
  ENSG00000206013_3 (sequence is synthesized)
tggccaaggactctgccgccttcttcagcaccaagtttgatgacgcggactatgactgacaggctgggtcctgatctggggcactagccccaggacactgaccccaggctgctgcccctg

SEQ ID NO: 750636 - DNA, 120 bp, Artificial Sequence
  ENSG00000206013_4 (sequence is synthesized)
gggcccaatactgactccccggagcctggccctccttctgtggggcctccatccctgccccatcctgatcctggggccctccagccccaacatgggcacctaaggctgaaccagtcagac

SEQ ID NO: 750637 - DNA, 120 bp, Artificial Sequence
  ENSG00000206013_5 (sequence is synthesized)
cccggggtcttcaccctaacccgagagttcccgggccctaactctgcccccgatcctgcccctccctcctcacactccaggcccctcggttccacgattaaaagtgcctggttccagaaa

SEQ ID NO: 750638 - DNA, 120 bp, Artificial Sequence
  ENSG00000206026_0 (sequence is synthesized)
aatacccagatcttcaaggttggcaaagaagagaaaagctccttgggaacttagttaccaggtcttatagcaccagctctgtgtcctcagagtcgctgtcatcaaggagacctctcactg

SEQ ID NO: 750639 - DNA, 120 bp, Artificial Sequence
  ENSG00000206026_1 (sequence is synthesized)
gtcaccgccgcagcccccacatggaccagtatgtgtccacagctcctccccgattccctatagcacagctgggaacatttaaacaagactctgcaggaatgggacggatattcaagggga

SEQ ID NO: 750640 - DNA, 120 bp, Artificial Sequence
  ENSG00000206026_2 (sequence is synthesized)
atttgctgcagaagaaagcacttaccacatttgaaaatgaacaccatattcgtttcttcacattgttggttcttttccatgtgatggtgttgctgaggaatcatagcaggatacaagggg

SEQ ID NO: 750641 - DNA, 120 bp, Artificial Sequence
  ENSG00000206026_3 (sequence is synthesized)
tttctgaagactggaaaagggccaacagcatatttcgaaactttctacgtttgaagtcatccaggaacacagcagaagcagaataaatgacactacgtttctctctcatggccttcatac

SEQ ID NO: 750642 - DNA, 120 bp, Artificial Sequence
  ENSG00000206026_4 (sequence is synthesized)
catggatttcccctgctcaagatgaaaagaaattaagaggaaatcagattgcttagagatagcagattattgctcactttttaaaaggagctccacagagagaatgaagaacgtgtaact

SEQ ID NO: 750643 - DNA, 120 bp, Artificial Sequence
  ENSG00000206026_5 (sequence is synthesized)
ttttgcaatgataatgtctgctttgttcttgaggggcactcttcctttttctgttcaggaatattccggaggagagctgcagatgccacccaaccctgcgaaatctgccctgcgtgtcga

SEQ ID NO: 750644 - DNA, 120 bp, Artificial Sequence
  ENSG00000206026_6 (sequence is synthesized)
aacagatccagcagtgcaaagaacttcttcattaggacatcaagcctgtagtcatattttcaattgctgctgtaactttttccttgcaagtgctttcacttatttcgggaccacctaagg

SEQ ID NO: 750645 - DNA, 120 bp, Artificial Sequence
  ENSG00000206026_7 (sequence is synthesized)
tttctgtgatgttctgtatatcatatagttgctaacaacctgtcaaagtcatcctgacaccaaactgagaagctgatggtttgggtaacatattagaggagatgaaaaaaccgacagtcc

SEQ ID NO: 750646 - DNA, 120 bp, Artificial Sequence
  ENSG00000206026_8 (sequence is synthesized)
tcattactgtaataaaaccagcagagacacactgagaatcaattactgattgtgacctaatgaactaaccctcagtcaagtagaaaactgcaccaagcctcttacattatcaaatgattt

SEQ ID NO: 750647 - DNA, 120 bp, Artificial Sequence
  ENSG00000206026_9 (sequence is synthesized)
aggatggagcactgtctgaagacgggcaacaagtcgaggcagatgagttttcttatattgtggctgacttaattaccttgttcctgagtgcagagatcaaattgagcaacttaaggtgct

SEQ ID NO: 750648 - DNA, 120 bp, Artificial Sequence
  ENSG00000206026_10 (sequence is synthesized)
aaagctctgtgccagctggaaatgaaaaggaaataattaacaccaacaagagctacgtctaaggttgtggcacctcctgacagaagcaaggagactcaaagttaaggcggctgcaaagtc

SEQ ID NO: 750649 - DNA, 120 bp, Artificial Sequence
  ENSG00000206026_11 (sequence is synthesized)
cttgacgaggtgagccctgctctatccgcctggctggattcgtccaggttgcctgtggcagctgtgcactgaagagtccggctggggagccagggattcagaactcacagtgcagcctga

SEQ ID NO: 750650 - DNA, 120 bp, Artificial Sequence
  ENSG00000206026_12 (sequence is synthesized)
cgaccaaagggcaaatccacctgaggacctgagtgcagatggctgggctccccggaacaaagtggaggaatgacagaggtgtaactcttacaccacagcctccatctgtgtgtcgcagag

SEQ ID NO: 750651 - DNA, 120 bp, Artificial Sequence
  ENSG00000206026_13 (sequence is synthesized)
cacacatacacacacacacacacacacagagttcttgtcaccgatggaacagtctgtctttgtctttcatctcccacattcatgtccagatcccattgcgctgcatcacacgtgaaccca

SEQ ID NO: 750652 - DNA, 120 bp, Artificial Sequence
  ENSG00000206026_14 (sequence is synthesized)
ccattgcgctgcatcacacgtgaacccagtgaggtcaacaatgaatggatggtgttcacaaagaaaccagcttatggaaggggacctgttacaattctttgaattaagttcttggaagcc

SEQ ID NO: 750653 - DNA, 120 bp, Artificial Sequence
  ENSG00000206026_15 (sequence is synthesized)
ccaacagcatatttcgaaagtaaaaaactccttctttctcccactgtaggctttttgtgttttcaacatacccagcctcactcggaaaaataaaaataaaaataaagcacccactcacat

SEQ ID NO: 750654 - DNA, 120 bp, Artificial Sequence
  ENSG00000206026_16 (sequence is synthesized)
gagcagccaagtttcagataccagtgggcacaagctcttccaaatgtctcctgttctggagatgttcacagtcctcacatcaaaactgaaacaagcaaacaaaaaaataaaaagcttact

SEQ ID NO: 750655 - DNA, 120 bp, Artificial Sequence
  ENSG00000206026_17 (sequence is synthesized)
accaaataccctaggaataagacttaaactctatttggaaattgaatttcttccatagtcaatcaatatttaataaagagagaaaaggagctcattacaaagaccatcttgtttctccac

SEQ ID NO: 750656 - DNA, 120 bp, Artificial Sequence
  ENSG00000206026_18 (sequence is synthesized)
aagtcatctatgtgagattccagaatttcagggcgataagttcttaattggaacattatatattctctttgcagccagtaagtacgcatcacttcacgagaaagcactgcggccaacatt

SEQ ID NO: 750657 - DNA, 120 bp, Artificial Sequence
  ENSG00000206026_19 (sequence is synthesized)
tctcctggtctgctctgggtttcagtgaagggcaggcctggaagcaccttgggaaatgaggtagagccaagctaaccctagagagccgttgagcttacggagggttgagtgattacgcag

SEQ ID NO: 750658 - DNA, 120 bp, Artificial Sequence
  ENSG00000206026_20 (sequence is synthesized)
gcatagtcttgagttttattttcagtttgaatactgctaactagtctgtacagtcacaggcttactatagggagtttattctacatcagctatattctctcttccttagcagcacttaat

SEQ ID NO: 750659 - DNA, 120 bp, Artificial Sequence
  ENSG00000206026_21 (sequence is synthesized)
gagttggctggaaagttgttcccagccaagccaatatcccatgagttataaatgacatttcatgctcatatgcagattttctgcaccgaagtgaattatttacaaggtaggccttatgga

SEQ ID NO: 750660 - DNA, 120 bp, Artificial Sequence
  ENSG00000206026_22 (sequence is synthesized)
ccgttctctctactctcttgctgggagaatgtgacgtctcccactgccctttaacatctgaagatttagcgggagctgcccttcctgaggcaggtgctcccttgcttgagatggcaactg

SEQ ID NO: 750661 - DNA, 120 bp, Artificial Sequence
  ENSG00000206026_23 (sequence is synthesized)
gaaaggccatgcaccctggaagctggaaggtaaactgaggctctcccagaggtgcttctcctgcccggggaggatgctgtccgcatgcaaatgcacacgaggagcaccaggaagaattta

SEQ ID NO: 750662 - DNA, 120 bp, Artificial Sequence
  ENSG00000206026_24 (sequence is synthesized)
agttctggggaggccttcctgcccattaacagggattttattaccttgggttttagctacttagtttaataatttcttcctgaatgtgcgaaaatccaaattttctcctaaaggaagctc

SEQ ID NO: 750663 - DNA, 120 bp, Artificial Sequence
  ENSG00000206026_25 (sequence is synthesized)
tgtgttcagcagtgtgctctgtcctctgtggaacagaagaaccaacatgtcgtttctacctcccaggaactccaggggttgaaaagcctcccaacttacagcaaggatgatgaaaatata

SEQ ID NO: 750664 - DNA, 120 bp, Artificial Sequence
  ENSG00000206026_26 (sequence is synthesized)
agtaagagttcggcaccagacaaatccaccaatggaacaaaaaaagcagcacagacaccagacaccaagttaagtacacaagggtctctaatctatgataaaatcagcatttaaaattag

SEQ ID NO: 750665 - DNA, 120 bp, Artificial Sequence
  ENSG00000206026_27 (sequence is synthesized)
caaaaagtatggttttttaaatatgttgaatgagaacaactgactatgcatttggaaaaagtaagatgaagatccctaccttatattatcaacaaaaatacatgtatgttgaatcaaaga

SEQ ID NO: 750666 - DNA, 120 bp, Artificial Sequence
  ENSG00000206026_28 (sequence is synthesized)
cctaaatgtaaaaataaaatccaaagaatactggaagaaaagatggaggaacatttctgtagccttgcagtgagagtaaacaaaaggaaagaagggacttaccaaattttataaactttt

SEQ ID NO: 750667 - DNA, 120 bp, Artificial Sequence
  ENSG00000206026_29 (sequence is synthesized)
tcccaataaaaaccagactaaacaaaattaaaacgtaagtgacaaacaagggagggaaaacatttacaactgactattaatatcccatattcagagaaatccaactcattggaagaaaat

SEQ ID NO: 750668 - DNA, 120 bp, Artificial Sequence
  ENSG00000206026_30 (sequence is synthesized)
gacagacaataccctaaagggataaagaatacttataggcaaaaaagaagtacacacggcaaataaatctgtgaaaagatgctcaaccacggtattgattaaaggaataaggaagtgaat

SEQ ID NO: 750669 - DNA, 120 bp, Artificial Sequence
  ENSG00000206026_31 (sequence is synthesized)
aacaacaaaatagtttttgccaaatctgattgtcaacatgtcatatattgttaacattgattgctgtcgaggctgtgaaaaactaggcagcttcataattgttggcaggaacaaccaact

SEQ ID NO: 750670 - DNA, 120 bp, Artificial Sequence
  ENSG00000206026_32 (sequence is synthesized)
gctacaaacattttgggggcaatttggaattatctaataaaatatatttgcataccctttggccatgccatttcacttttacggatctaacaaaaaataaaataaaaacattataaaggt

SEQ ID NO: 750671 - DNA, 120 bp, Artificial Sequence
  ENSG00000206043_0 (sequence is synthesized)
actccgatgaaggcagggcacgcggggcgagccgggagcgtctcctgagggcagcgaggagggagctgaggcacgcgggctctcaatcgacgccccacagagaccaagaggcctggcctt

SEQ ID NO: 750672 - DNA, 120 bp, Artificial Sequence
  ENSG00000206043_1 (sequence is synthesized)
ggggggcagctgcttgaaggaggcagagcggaagcgagggagactgctggaggccctgccgcccacccgccctttcctccccctgaggagacgcctgacgcatctgcagtgcaggaggcc

SEQ ID NO: 750673 - DNA, 120 bp, Artificial Sequence
  ENSG00000206043_2 (sequence is synthesized)
gtgggcgttagaagtgttgcttttccagtttgcctgattgctgagacactcagtcaggaaagtatgaatgattctaggcagcagtctctgttcttcatcacacttccagatttaaacaaa

SEQ ID NO: 750674 - DNA, 120 bp, Artificial Sequence
  ENSG00000206043_3 (sequence is synthesized)
ctctgtgctgtcagaataatactgagtaataaggtggcagatactgagattaggactatacaaatgaagatgtgcaggcaattgctgtttttgcatcaagatattcttacatcacctgtg

SEQ ID NO: 750675 - DNA, 120 bp, Artificial Sequence
  ENSG00000206043_4 (sequence is synthesized)
tctggaatattaaaccaaatctgggtggtgatggcgataccattttataaagcaagaaaacttaatgcctatgttgaaaaatatggagctaagatggaggctccacaaagagtaattcct

SEQ ID NO: 750676 - DNA, 120 bp, Artificial Sequence
  ENSG00000206043_5 (sequence is synthesized)
gtaattcttcagaactgcctgtcatattcattcatggctagacttgctccagcctggaatagaactggtcatctcttgatacaaggaagagattttctttctcagatgggaaaacaaagt

SEQ ID NO: 750677 - DNA, 120 bp, Artificial Sequence
  ENSG00000206043_6 (sequence is synthesized)
gctgttgtattaaacatcaatgtaacagaaactcaagtttgtctaagtatagaagcttgcacaatcagactgccagcacctgagctaaaagagtttgagatttcccagagtattataaag

SEQ ID NO: 750678 - DNA, 120 bp, Artificial Sequence
  ENSG00000206043_7 (sequence is synthesized)
gattttcatgctaacaagcatgctgtcattgagagacattccattttaagcaactggtgctacgttttgccaagtatgaaaatgggacaaattataaatatttttcatgccatccccgct

SEQ ID NO: 750679 - DNA, 120 bp, Artificial Sequence
  ENSG00000206043_8 (sequence is synthesized)
gcctgtccttttcactcatatggagatttccagagacactgggatgccctgtatggctataaacttccaggtgattgtggaaaaattaaaatatactgcaacatctatttcaaaatgctc

SEQ ID NO: 750680 - DNA, 120 bp, Artificial Sequence
  ENSG00000206043_9 (sequence is synthesized)
ggagaaaggaccttcacatatcctctcagttgcatcagaagtcagcccatgcagttctttccaagggtagattcggaagttgtgttgaaaagttttctttcagatttaaaatctaaactg

SEQ ID NO: 750681 - DNA, 120 bp, Artificial Sequence
  ENSG00000206043_10 (sequence is synthesized)
ccccatatatgtggatttcccataaagatgacaagtaaaccatgctactacacacaagaactaactaaacctaatatacaggaacacaaagtcaagccacccaatttgaccactaaaaaa

SEQ ID NO: 750682 - DNA, 120 bp, Artificial Sequence
  ENSG00000206043_11 (sequence is synthesized)
atgcttagggcatctctgactcaagccacttccagaaagcctgcctgtgctcaaagtcttctaccatgttcagtagcagtggaccacaaggtggagctttcagtcagccagccaacatca

SEQ ID NO: 750683 - DNA, 120 bp, Artificial Sequence
  ENSG00000206043_12 (sequence is synthesized)
ggcattttctcagctttgcatctccagccagagtctgttcagggtagaaagaaatccctgtctatcagggctccacaagtacattcagaagtattaatgcccaacagaggaaatactcaa

SEQ ID NO: 750684 - DNA, 120 bp, Artificial Sequence
  ENSG00000206043_13 (sequence is synthesized)
gttcagcacacaaatcttagctcccaaagcaacatcacccctaagtttgtaccagttttcaaaaatagattgttacaaatgaacaaaaatacctcagtacttggcagcccaaaaagaaaa

SEQ ID NO: 750685 - DNA, 120 bp, Artificial Sequence
  ENSG00000206043_14 (sequence is synthesized)
cagcatgatgtgacacaatctaaattgttttcactcaaaactagtatgatccagcatgacaaactgaatttaggtccagctataaaaaaccgttatagtagtaacattcagatgcaggct

SEQ ID NO: 750686 - DNA, 120 bp, Artificial Sequence
  ENSG00000206043_15 (sequence is synthesized)
gctaacaatttaaatcaggagaattccagacctctgcaagaaaaaaatacagagtcttctgaaaatatgacaaaatttccctcttctcgtggaaaatcgactgtgagtttaaacaaaaat

SEQ ID NO: 750687 - DNA, 120 bp, Artificial Sequence
  ENSG00000206043_16 (sequence is synthesized)
aagcaactatctaatagtgcagtatttgtggtgtcaaataacaatttaggggtggtaaaaagtgctgttgacttccaaatgaaaggaaaagaaaatttaacaggcaaaggtataacacaa

SEQ ID NO: 750688 - DNA, 120 bp, Artificial Sequence
  ENSG00000206043_17 (sequence is synthesized)
attttagggaaaagccatgggtcactaaaactgaaaagacagccacacatttttgaatcagatggagaaaccgaagatccacgactgctacagcagcaatcagaaaatcaagctaaagaa

SEQ ID NO: 750689 - DNA, 120 bp, Artificial Sequence
  ENSG00000206043_18 (sequence is synthesized)
gttggtacaagtgaccacaggttgatagtaagcaaaatagcccacaggtctaaaagaaaattatgtccagagtcttccaaaacttcaaagaagcatcattccgatactgtgcactatggc

SEQ ID NO: 750690 - DNA, 120 bp, Artificial Sequence
  ENSG00000206043_19 (sequence is synthesized)
caatccagttcttctaagaagcagatacttgactcggataaatcaaaacttaagaaatctctcatcattcataatgcttagaacatggacctgaaagaaggaaatgtctaccagagatga

SEQ ID NO: 750691 - DNA, 120 bp, Artificial Sequence
  ENSG00000206043_20 (sequence is synthesized)
gcattctgaatataggatgaacactcttccagatgcctctcacactcctgtgaccatgaaatcagctctacttactgctgtggaacctcctttttcacttgacagtttctttttattgtt

SEQ ID NO: 750692 - DNA, 120 bp, Artificial Sequence
  ENSG00000206043_21 (sequence is synthesized)
agttcttcccaacttttcactattacaacatcatgtagtctgcagatctttgcaaaatatccaatgatcttatacagtagttttgatagttgaaaatatctttattttgcccttattgaa

SEQ ID NO: 750693 - DNA, 120 bp, Artificial Sequence
  ENSG00000206043_22 (sequence is synthesized)
attatcaaaccacataaagcacagataagagtatgaagaacctctaagtacctatcacccagatctaccagttattaatattttgccactgtttcatctgttcctcacagacatgctttt

SEQ ID NO: 750694 - DNA, 120 bp, Artificial Sequence
  ENSG00000206043_23 (sequence is synthesized)
agacatgcttttttttgctataatcttttaaagcaaattcaagacatcatataattttacccataaacaccaaagtgtatatatttctaacataagatatagtatattttttaagaaaaa

SEQ ID NO: 750695 - DNA, 120 bp, Artificial Sequence
  ENSG00000206043_24 (sequence is synthesized)
atatatattacattttggggatctctactatatctctgcaggctcactaaatttcacttttgcttttatatgcaaattaacaggaagccctgaataaatgtaaaagctatttctcaacaa

SEQ ID NO: 750696 - DNA, 120 bp, Artificial Sequence
  ENSG00000206043_25 (sequence is synthesized)
aactggagcctttattggggtggagatttctgtttccaccagtactcattagcatcttctgtgtgccaggcagtggggacaacactgtgtccatggcagaaatggatgagacagccgtgg

SEQ ID NO: 750697 - DNA, 120 bp, Artificial Sequence
  ENSG00000206043_26 (sequence is synthesized)
cctgagcccctgagtgctggtggtctagtctcaagcaaattcattctgggttcctggcacagacttagggatatgtatgtattgaagcatatgtccagaatgaccttctagtccatatta

SEQ ID NO: 750698 - DNA, 120 bp, Artificial Sequence
  ENSG00000206043_27 (sequence is synthesized)
caaataaattatctaacatttgaaaaaaagagaaacagaagtggagcttctcagacaatgaatattattctggctttcaaacattttatatgtttgatatacgaaatattatataattgt

SEQ ID NO: 750699 - DNA, 120 bp, Artificial Sequence
  ENSG00000206043_28 (sequence is synthesized)
tgtaatatatttaaaagaaaccaaaatcttcattggctattccactgaaacaataattacataaaaatagccactagagatccaagtataagttgaactctgattttgtaaatgtgattt

SEQ ID NO: 750700 - DNA, 120 bp, Artificial Sequence
  ENSG00000206043_29 (sequence is synthesized)
attgtctccaccactttactaaaccattgcaattaaaagcaaaagtaaacaaactctccttcaaacgttaaatgttaactcctgctcctgaaattgtgtttagttaattaatttgctata

SEQ ID NO: 750701 - DNA, 120 bp, Artificial Sequence
  ENSG00000206043_30 (sequence is synthesized)
tacctttattgtaagcatttctgttttccagaattatctctatttcccaattattttaccattttcataaggataagcattttgtctgaagcccattttgagtgtgcttttctcattcca

SEQ ID NO: 750702 - DNA, 120 bp, Artificial Sequence
  ENSG00000206043_31 (sequence is synthesized)
aagtttgtattatagatatctagtagactgttataaagagtggtatgtcattttgtttatgaggctatggtgaaaataacattagtaaatatgcatttttgatgagcacagtcatccaca

SEQ ID NO: 750703 - DNA, 120 bp, Artificial Sequence
  ENSG00000206043_32 (sequence is synthesized)
gcatgtaatcattcctaaaaccagccttccccactgttccatacattcccaggccaccttcctgctactgcccagtcactatgcctcaggtaatggacacttactttattattacactga

SEQ ID NO: 750704 - DNA, 120 bp, Artificial Sequence
  ENSG00000206043_33 (sequence is synthesized)
gcaaaataatgaaaaccatacatccactgctgaagtggtattaacatcttccagttctttatataaataatcttgatagcccctcctatactccattagtgtctaaaatttagaatatat

SEQ ID NO: 750705 - DNA, 120 bp, Artificial Sequence
  ENSG00000206043_34 (sequence is synthesized)
agtatagtacttgagtttagatcaatgttaacctacatggcaaaacctgccatgtttagtgtatttttttgtataaagtaggtttgatttttatcttacaatatttatcctaatgaaagt

SEQ ID NO: 750706 - DNA, 120 bp, Artificial Sequence
  ENSG00000206043_35 (sequence is synthesized)
tataaaaatatatgcatatatttatatgtgagatttaatatagataggtatatagattgttgatttcatatttcatgttccaagaagaggttctagatcaaatttctgtgttcagaatca

SEQ ID NO: 750707 - DNA, 120 bp, Artificial Sequence
  ENSG00000206043_36 (sequence is synthesized)
ccagagaaatcaattaagattttggttcattttaaacattgcaatttttgaaagccaagataattccaaatctaattagggaaagctacattttacttctttgtgtaagttattggtgat

SEQ ID NO: 750708 - DNA, 120 bp, Artificial Sequence
  ENSG00000206043_37 (sequence is synthesized)
ttatatgcagtatggaccatcctccccccagaaattattcttatattccaattgtgcattagttttagaaccattttaattttaaaaccataagaaaataattttatgtttgcctatgtc

SEQ ID NO: 750709 - DNA, 120 bp, Artificial Sequence
  ENSG00000206043_38 (sequence is synthesized)
caggagctgaagaaatcagcgattactttaaaaaatatatggcaatgtcaaaataaatgccaagaatcatatttctaggaatgcaaaagtgcttctcatatactcatatattaggtttca

SEQ ID NO: 750710 - DNA, 120 bp, Artificial Sequence
  ENSG00000206043_39 (sequence is synthesized)
ttcacagtattggttgcttactatatttgtttttatttttattatatatcataattacacatttttatttgcatttgttgcttattgtagtaaaaaggtaaaaaaaaaatgaacttgtta

SEQ ID NO: 750711 - DNA, 120 bp, Artificial Sequence
  ENSG00000206043_40 (sequence is synthesized)
ttagcttttatttgactaaccagttgaccaattttgctctgttttcaaattgcatatgatggggtattatgctgaaactgctaatatattgggtatttattgatacttaggaatagtcag

SEQ ID NO: 750712 - DNA, 120 bp, Artificial Sequence
  ENSG00000206043_41 (sequence is synthesized)
tatttataaatatttaagaatgtcatggtccttatgttttgatgtttaaaatgttcactttgttgtacgttacatagtgtcttattcaaaattgaaaataataaaggtatttctaataga

SEQ ID NO: 750713 - DNA, 120 bp, Artificial Sequence
  ENSG00000206047_0 (sequence is synthesized)
atgaggaccctcgccatccttgctgccattctcctggtggccctgcaggcccaggctgagccactccaggcaagagctgatgaggttgctgcagccccggagcagattgcagcggacatc

SEQ ID NO: 750714 - DNA, 120 bp, Artificial Sequence
  ENSG00000206047_1 (sequence is synthesized)
agcatccaggctcaaggaaaaacatggcctgctattgcagaataccagcgtgcattgcaggagaacgtcgctatggaacctgcatctaccagggaagactctgggcattctgctgctgag

SEQ ID NO: 750715 - DNA, 120 bp, Artificial Sequence
  ENSG00000206047_2 (sequence is synthesized)
cttgcagaaaaagaaaaatgagctcaaaatttgctttgagagctacagggaattgctattactcctgtaccttctgctcaatttcctttcctcatcccaaataaatgccttgttacaaga

SEQ ID NO: 750716 - DNA, 80 bp, Artificial Sequence
  ENSG00000206052_0 (sequence is synthesized)
cggtgggggctcccgcagctggcggaggcgcgggccgcggcgctgggctcgcggcggggagcgaaggtgagcgccagaac

SEQ ID NO: 750717 - DNA, 80 bp, Artificial Sequence
  ENSG00000206052_1 (sequence is synthesized)
tcgcggcggggagcgaaggtgagcgccagaacgcggagggctggcgcggctcgcggcgccgggccccgttccccgtccgc

SEQ ID NO: 750718 - DNA, 120 bp, Artificial Sequence
  ENSG00000206052_2 (sequence is synthesized)
ggcgctgctgctggcggcggccggctggatgcgagacccgcgcagacccggcggcggacggcggctctcgactccggagagcggatcgcggggcgcaggagcccgatcgcgctggccatg

SEQ ID NO: 750719 - DNA, 120 bp, Artificial Sequence
  ENSG00000206052_3 (sequence is synthesized)
gcctccaactttaacgacatagtcaagcagggctacgtgaaaatccgcagcaggaagcttgggattttcagacgatgctggttggttttcaagaaggcttctagcaaaggacccagaagg

SEQ ID NO: 750720 - DNA, 120 bp, Artificial Sequence
  ENSG00000206052_4 (sequence is synthesized)
ttagaaaaatttccagatgaaaaggcagcttatttcagaaactttcataaggtaactgaactgcacaatatcaaaaatataaccagactgccccgagagacaaagaagcatgcggtggca

SEQ ID NO: 750721 - DNA, 120 bp, Artificial Sequence
  ENSG00000206052_5 (sequence is synthesized)
atcatctttcacgatgaaacatcgaagacatttgcctgtgagtcagagctggaggccgaggagtggtgcaagcacctctgcatggagtgtctggggaccaggctcaatgatatcagcctt

SEQ ID NO: 750722 - DNA, 120 bp, Artificial Sequence
  ENSG00000206052_6 (sequence is synthesized)
ggggagcccgaccttctggccgcaggagtgcagcgggaacagaatgagagattcaacgtgtatcttatgcctacaccaaacctggatatttatggtgaatgcacaatgcagatcactcat

SEQ ID NO: 750723 - DNA, 120 bp, Artificial Sequence
  ENSG00000206052_7 (sequence is synthesized)
gaaaatatctatctctgggatatccacaatgccaaggtcaaactggtgatgtggcctctcagctcactgaggagatacggtcgggactcaacgtggttcacgtttgagtcaggaagaatg

SEQ ID NO: 750724 - DNA, 120 bp, Artificial Sequence
  ENSG00000206052_8 (sequence is synthesized)
tgtgacacaggagaaggactattcacttttcaaacaagggaaggagaaatgatctatcagaaggttcattctgcgacactggccatagctgagcaacatgaaagattaatgctagaaatg

SEQ ID NO: 750725 - DNA, 120 bp, Artificial Sequence
  ENSG00000206052_9 (sequence is synthesized)
gaacagaaggcccggcttcagacaagcttgactgaaccaatgacattatccaaatcaatatctcttcctcgcagcgcgtactggcatcacatcactcgtcagaacagcgttggtgaaatc

SEQ ID NO: 750726 - DNA, 120 bp, Artificial Sequence
  ENSG00000206052_10 (sequence is synthesized)
tacagtttgcaaggtcatgggtttggttcgtcaaagatgtctcgtgcacagacatttcccagctacgccccagaacagagtgaagaggcccagcagccgttgtcgcggtccagcagctat

SEQ ID NO: 750727 - DNA, 120 bp, Artificial Sequence
  ENSG00000206052_11 (sequence is synthesized)
ggattcagctacagctccagcctcatccaatgacacacagagagccgctgttgactagagagacagtctgtcctggacccgtctgtggggtcattaccctctgcctcctggaagaccaat

SEQ ID NO: 750728 - DNA, 120 bp, Artificial Sequence
  ENSG00000206052_12 (sequence is synthesized)
tgcagtacaaattgaaatgggtcggctctagccccagtcccattggaaggttaaaaactggagttctgcttccttgattcagtggctaagtcctttatttattgaatttctttgggggaa

SEQ ID NO: 750729 - DNA, 120 bp, Artificial Sequence
  ENSG00000206052_13 (sequence is synthesized)
tctatgttttacataaatagaatccaaatcgtatgaacagttatttaaataaacaaaattctttgggtctgacagtaacagaaacctcagcactgggaaaagttgcccacactggggtat

SEQ ID NO: 750730 - DNA, 120 bp, Artificial Sequence
  ENSG00000206052_14 (sequence is synthesized)
gcctgggtgatgggcacctctcactgacctcacagcgcagtccgcccatctgagcacagggtctgtccttagacataatggtgaccctccacaagctctgtggcttttaaagttctgaca

SEQ ID NO: 750731 - DNA, 120 bp, Artificial Sequence
  ENSG00000206052_15 (sequence is synthesized)
gggataaatacagtaagctctgcaaatgacatcgtagctgcatataaataaacccagtgacaattaaaggaacatgaaattcagaacacactattaagcagggccctgtagctctactcg

SEQ ID NO: 750732 - DNA, 120 bp, Artificial Sequence
  ENSG00000206052_16 (sequence is synthesized)
tgtgtgtgcgtgtgtgtgtgtgtgtgtagacaaatggatattgctatatccatctatatataacaagtatatatcaaacatgtgctgagggtgacaggatatgctcacttaaattgttga

SEQ ID NO: 750733 - DNA, 120 bp, Artificial Sequence
  ENSG00000206052_17 (sequence is synthesized)
ttgaaaaccataatttggtgcattaaagttaagattgttatgttgaatagctatttttaaaatagtgctgtaaaaaaaaaaaaaaaaaaggcttcttattagcaaaagtatatgtaatcc

SEQ ID NO: 750734 - DNA, 120 bp, Artificial Sequence
  ENSG00000206052_18 (sequence is synthesized)
agtctgttcctaacaagtgtaagcaaaaatgtgagaaggggaacattcagaagcaaaagaaccagtctagctgtcctacacatcatgtcataccctgtctttctggtgagcgtttccttg

SEQ ID NO: 750735 - DNA, 120 bp, Artificial Sequence
  ENSG00000206052_19 (sequence is synthesized)
ttgctgacaatgttgctccctgtggccatccatctgagctacgtgaggaggattccatgtgaacgccgatcagcttccatttaaccttgagagaaaagagaggttctaaatgaagaactc

SEQ ID NO: 750736 - DNA, 120 bp, Artificial Sequence
  ENSG00000206052_20 (sequence is synthesized)
tttaagaaagaaagaatacacccataaagaactcagctattttgcagtaaagagaagaacaaaatgggtacaggattgtggatatcatagatgctgttctcacacaaccactgggggctt

SEQ ID NO: 750737 - DNA, 120 bp, Artificial Sequence
  ENSG00000206052_21 (sequence is synthesized)
gtaatttactgtgtaaccagaacttgcagggctttattttttcttttactggacacaggttgtctgagattataagaaataaaatagatcaataattttcatcatccctgacactgatta

SEQ ID NO: 750738 - DNA, 120 bp, Artificial Sequence
  ENSG00000206052_22 (sequence is synthesized)
caaacctacagtgtttaaagggaggtagtgaattccacggaaactgagtttggctaattcaggtcaacaaagatatatttgcccttaattctggagttaagtaaaaataaaaattatcct

SEQ ID NO: 750739 - DNA, 120 bp, Artificial Sequence
  ENSG00000206052_23 (sequence is synthesized)
gcctgaatcatctgatgctttgtgcctaagatggttatctctcaaatactctagggtgggtttaaagaacagtgagctcaggtcacgcaagatgaaaacccaggttttttttttcttaat

SEQ ID NO: 750740 - DNA, 120 bp, Artificial Sequence
  ENSG00000206052_24 (sequence is synthesized)
aggaaaattttttaaactatccaaattagtctgttgaaagggtaccttttttgctgatctctgatgagttgtcttttcatccctatctgtagcttgagtgcagattgacaattcatttca

SEQ ID NO: 750741 - DNA, 120 bp, Artificial Sequence
  ENSG00000206052_25 (sequence is synthesized)
gtgaattactaccgaataaaagtggttccggatccctcctagataaatgtgcacttacagcaactacctaggctctccaaatcactccactcggtatgaaaaccccatcaagatactaat

SEQ ID NO: 750742 - DNA, 120 bp, Artificial Sequence
  ENSG00000206052_26 (sequence is synthesized)
cgtaagagttaatgtggctgcaaaaaataattatcctaagctttcagggataaaaagaaaattacccaggttctctgcactgtgaattttgctgacacagcggaggagcagatgactggt

SEQ ID NO: 750743 - DNA, 120 bp, Artificial Sequence
  ENSG00000206052_27 (sequence is synthesized)
tcctacaactgtacagccttccttgaaatcatagcttttggggttaaacacttgtgaatttcttttgcacatggcatttgcttttgaaatgcctttagtcaaatacaccagagcaactcc

SEQ ID NO: 750744 - DNA, 120 bp, Artificial Sequence
  ENSG00000206052_28 (sequence is synthesized)
cagctgagaccatttgagcacagttcctagtggggccacattcagagcaagcctctcgccggctcactcagttgagctgttgcttagacaccacaagtttctacaagggacttatgggga

SEQ ID NO: 750745 - DNA, 120 bp, Artificial Sequence
  ENSG00000206052_29 (sequence is synthesized)
acggccctcaggggtcctggttcacatctcagctttattcatgtgctggaagcacaaacagcgagtccagggagggattctgctaatcagatgagtctgctcttgtgtctctttcttagg

SEQ ID NO: 750746 - DNA, 120 bp, Artificial Sequence
  ENSG00000206052_30 (sequence is synthesized)
agacaaatacctgtatgtaattgcttcaagaactccatttggttctgatcattaccaatgaatataactgaaggagcaccaaagatcaggcataacctcgggccagttcattctgaaaat

SEQ ID NO: 750747 - DNA, 120 bp, Artificial Sequence
  ENSG00000206052_31 (sequence is synthesized)
gatgtcgtaaaaagagtatgtgtgagagaaatctccttcccaagtttttaaccagatctcgtcacaatgaggagaatgctataatctatctcatggtacatttttggagcttaattctag

SEQ ID NO: 750748 - DNA, 120 bp, Artificial Sequence
  ENSG00000206052_32 (sequence is synthesized)
catactcctccaagtacactcacaattgtagctgagtcaagactgctaaatgaacagataggagaacttatattagactaatatccttgacacgaagcagggttcattgtaataaaaacg

SEQ ID NO: 750749 - DNA, 120 bp, Artificial Sequence
  ENSG00000206052_33 (sequence is synthesized)
gcaaacagataaatcttctaccaaaaccaaagatggaaagtcactgcaccagtctcctggaacttcataaaatcaatttcactggagcaaccagaagggtcatggagatgtataccactc

SEQ ID NO: 750750 - DNA, 120 bp, Artificial Sequence
  ENSG00000206052_34 (sequence is synthesized)
gcttgggctcgtaggtttttgactggggatgcctctacactttgtaagtcatttctcccttcaaaaattgtattatatctttaatatatgtgtatttttcaatgcgagggaggaattact

SEQ ID NO: 750751 - DNA, 120 bp, Artificial Sequence
  ENSG00000206052_35 (sequence is synthesized)
atgaaccaaagatatcttttggctccttctgaaagtgactcagtttgaattccattcagatttgtacagataaatagatggtcaccatttctgcatcaggttggaagagaccaatgataa

SEQ ID NO: 750752 - DNA, 120 bp, Artificial Sequence
  ENSG00000206052_36 (sequence is synthesized)
aggaacccaacgtaaggaatagcagttctgaaaatagacaaagcctagaggaggtatctatttcactgagagattacacgaggggacttattttttatgttcccaattttttcttctgat

SEQ ID NO: 750753 - DNA, 120 bp, Artificial Sequence
  ENSG00000206052_37 (sequence is synthesized)
gtacaaaacaaccttgatccaatagtttcctattctggggggtgggggcagaggcggaaaagaaaacacatctttcacttacttattgaacaaacaataagcactcagaactaatttatt

SEQ ID NO: 750754 - DNA, 120 bp, Artificial Sequence
  ENSG00000206052_38 (sequence is synthesized)
tatgcaggttgcaaatatgtatgaagcaataggttctggccactgccacaatttgaaatcaataaaataagaaatatatatttatatatgagggaagatgctgtttgatagagcatgtga

SEQ ID NO: 750755 - DNA, 120 bp, Artificial Sequence
  ENSG00000206052_39 (sequence is synthesized)
aatcaatggaaacatatttattaaaagtaaacctcacctttttcaccaaatagtaactagagaactagtcctagtatcttgcgtaattcttctctgtcttcattgggaaattatgtttga

SEQ ID NO: 750756 - DNA, 120 bp, Artificial Sequence
  ENSG00000206052_40 (sequence is synthesized)
aaatctttcatcacctataaaatggtgagcctcttgtactttctattcagtgtagaaagagtggactgataaataactttacattgttggtagtagtttctacagatccagtttattgca

SEQ ID NO: 750757 - DNA, 120 bp, Artificial Sequence
  ENSG00000206052_41 (sequence is synthesized)
tgtcgtatctttattgtagatattaaaaacacatgataaaaattgatgtgtgcccctccttgtttggccagtatcacagaaaactttgtaaaaaagcatggggaccctactccctagatt

SEQ ID NO: 750758 - DNA, 120 bp, Artificial Sequence
  ENSG00000206052_42 (sequence is synthesized)
atttgagccatttactaaaattggccattagtgatacagtgaaaacaagctaaggaaatgatattctcctaaaaagttatattccagttttgattattataacacagcacaataaatggg

SEQ ID NO: 750759 - DNA, 120 bp, Artificial Sequence
  ENSG00000206052_43 (sequence is synthesized)
cagtatacgtctaatggaactgagatttaaggctttaacaattcgtgttttaaaatattatattgaagactgcacaaagagaaaattatacatgtttctccaatcctgtgatcatgtctg

SEQ ID NO: 750760 - DNA, 120 bp, Artificial Sequence
  ENSG00000206052_44 (sequence is synthesized)
taaataccttgcaatttcaaattacttcatccgtcattaactatatgatctcccaaacacagccttctcaaaatcgataaaaatttgccactgaatatgcattaatagctataacaatgg

SEQ ID NO: 750761 - DNA, 120 bp, Artificial Sequence
  ENSG00000206052_45 (sequence is synthesized)
gtgacatgccacacaaatttagcttatgcaatttatggggtgtgtgtttgcagactatgaaatgtatgaagtgcagtctcccatggagagaatagagaggcaggatggcaactagtcatg

SEQ ID NO: 750762 - DNA, 120 bp, Artificial Sequence
  ENSG00000206052_46 (sequence is synthesized)
aacgcaacaatttaggttaaatgataaagaatacaatgaaatgtccagagtaacacttggtctctacctttctaacattctaacccaaggccagtgtcatgggcttggctttcttccctg

SEQ ID NO: 750763 - DNA, 120 bp, Artificial Sequence
  ENSG00000206052_47 (sequence is synthesized)
tcgcctcatactgagtatgcaatttacagaggacatctgttgctttatgtcttaaggccactagaggaagtcactacattcccaacaaagatgtgtctttcggcttagtgaaaaacattt

SEQ ID NO: 750764 - DNA, 120 bp, Artificial Sequence
  ENSG00000206052_48 (sequence is synthesized)
aacaagaaacaatgtgtaaccaagtccccacagtaaaatgtgtcttcagaaacatgagaatcacttttatatagccaacctcatttgaattttatcatgaacataaattatcggtgagac

SEQ ID NO: 750765 - DNA, 120 bp, Artificial Sequence
  ENSG00000206052_49 (sequence is synthesized)
tggtgtgcggggctggatctgtgagacaagctcacactctcatgtgtgcattctctattaacatatttggaagattgcccacattttctctgcagacctgccacaaatccttaccttctt

SEQ ID NO: 750766 - DNA, 120 bp, Artificial Sequence
  ENSG00000206052_50 (sequence is synthesized)
actgaagaatgtgactattgtagcattcgtgcaattatgccagcagaggaggcactagacagtttatagactcttatggaagttgggcacatttcccaggcaggtggaatgctagctaga

SEQ ID NO: 750767 - DNA, 120 bp, Artificial Sequence
  ENSG00000206052_51 (sequence is synthesized)
tctagaagcacccttaaaggtcatgtagaatcaaggtcccactttatgtttcccttgggagaaaactgaaacccatggatgctgtaatttgtttaacggcaaagaaagagccaagaattg

SEQ ID NO: 750768 - DNA, 120 bp, Artificial Sequence
  ENSG00000206052_52 (sequence is synthesized)
tttctcgtagttccagggtcctgatctaggaatgtttccttggctccatggcatctcccagtttgacatagtgggagctgagaaatgccatatggcctcaaaataaataaacccttgtac

SEQ ID NO: 750769 - DNA, 120 bp, Artificial Sequence
  ENSG00000206052_53 (sequence is synthesized)
atttaagtgttttcccagattttcagatgcctctactcttgctgaactcatcaccagctgtatcagtagagaggtgttatggggcaattcattagatttctggtaggtcatgaatggttg

SEQ ID NO: 750770 - DNA, 120 bp, Artificial Sequence
  ENSG00000206052_54 (sequence is synthesized)
gtataagctttatttactcatatattgtcatccagttctttgaaattcaatcttatcctaaagtggtagtcaaagtaaaacacattaagtaggtgtttgtgtttagcagtcctactaatt

SEQ ID NO: 750771 - DNA, 120 bp, Artificial Sequence
  ENSG00000206052_55 (sequence is synthesized)
catcacaatcacatagtaattgtgattataatttttggaatctttatcactttctagcactttacggtgtcattatttatggcatttttaacaactttgttgcataattgataacatcag

SEQ ID NO: 750772 - DNA, 120 bp, Artificial Sequence
  ENSG00000206052_56 (sequence is synthesized)
ggctacatttttttcatgtgagcctcaagaagcttccattatcaacaagaattggggaaatgacttttttacattataataccttatatattaggtttttcctgataatcttcagtagac

SEQ ID NO: 750773 - DNA, 120 bp, Artificial Sequence
  ENSG00000206052_57 (sequence is synthesized)
cagtagacaatgatttaaattaactgaagtttaaataagaaatatgttaaaattactaaataatatgaaaaccacattatacttgtaattttcagacacttttctcctaccttaagattt

SEQ ID NO: 750774 - DNA, 120 bp, Artificial Sequence
  ENSG00000206052_58 (sequence is synthesized)
tgtaaatattaatatttgaaggggagaggaaaaatacatttgtagtagaaatattccctctaacaattctgtttaactagtaagttttttttaagttatcttccatgcctgcttccctag

SEQ ID NO: 750775 - DNA, 120 bp, Artificial Sequence
  ENSG00000206052_59 (sequence is synthesized)
tctgaactccacattccagttgtcagaagaatgaatggatttaaattttctaatcattattttgggcccatgttagcagttgaaacaattaagttcctcactctttcctgcttttaggat

SEQ ID NO: 750776 - DNA, 120 bp, Artificial Sequence
  ENSG00000206052_60 (sequence is synthesized)
gattttagactgtgagcataaaatcaaccctttctgtcagcacagaattgaacatcgaatggagcaaggtctacactctcagcctgtagctgtgctaatgttaggattgaattgttctat

SEQ ID NO: 750777 - DNA, 120 bp, Artificial Sequence
  ENSG00000206052_61 (sequence is synthesized)
taattccctcaagagacccacagcctcaaaagagttgcttattatcagatgtccgaaattcagaaacccaaagtcaggcaaagaaggaaactgagataatgatttaatttttttaagtca

SEQ ID NO: 750778 - DNA, 120 bp, Artificial Sequence
  ENSG00000206052_62 (sequence is synthesized)
ctgcaggatttctctcaaagaaaacatctgaaaatggttgagaaagtagttccagatcattaactattttacagagggactgaaagccagggaaaataaagaacagaatgatagtagtat

SEQ ID NO: 750779 - DNA, 120 bp, Artificial Sequence
  ENSG00000206052_63 (sequence is synthesized)
cttgatattaaatttgcatcagaaatgagcaaaatatgtcaatatgaaataatttgaaatcaaattcagattcacatgtatagtgcatagttcaagaaataatgcttactcttgtaaaaa

SEQ ID NO: 750780 - DNA, 120 bp, Artificial Sequence
  ENSG00000206052_64 (sequence is synthesized)
aaaaaaatatatatatatgtatcagcaggtagagtgtgggagctccaactttgttgtgaaagctgataacagagtatgattctttccagttacaaaatactgtattactttagttatagc

SEQ ID NO: 750781 - DNA, 120 bp, Artificial Sequence
  ENSG00000206052_65 (sequence is synthesized)
aagcagtacataaatgacatcaacaactcaggctgctccctgacataaaagccagttccatctttactgcagatgacaggagactttccaagacctgcagaggccccctccaccccaacc

SEQ ID NO: 750782 - DNA, 120 bp, Artificial Sequence
  ENSG00000206052_66 (sequence is synthesized)
cacacacacacacacacacatttttggcttttgacccactctgtgtgttccactgaagttatcttttccttaatagattcacacagaattaccccatcctgcaaaatccttatccctatg

SEQ ID NO: 750783 - DNA, 120 bp, Artificial Sequence
  ENSG00000206052_67 (sequence is synthesized)
acacagaattaccccatcctgcaaaatccttatccctatgaatctctaaaatatattaaataatgtgttatatatttgctttttgtaaatctttatttaattaatttatatatactttgt

SEQ ID NO: 750784 - DNA, 120 bp, Artificial Sequence
  ENSG00000206052_68 (sequence is synthesized)
tcttatactgtacatcataaagcgatgtcatctgtagttggttcaatataatgtttatgatcattttgataagaaataactttggacattaggcccttgttaagaaataaaacacccatt

SEQ ID NO: 750785 - DNA, 120 bp, Artificial Sequence
  ENSG00000206052_69 (sequence is synthesized)
ataaatttgcttctgttggaaaatacatgatttggcatacttcatttttagtaacaatctattctagataaatgataatttggggacatctgtacttaaaaactagctgaactacgtttt

SEQ ID NO: 750786 - DNA, 120 bp, Artificial Sequence
  ENSG00000206052_70 (sequence is synthesized)
gggatgagatgcaaagcaacagctgtccctggaactgaaatgtgaatttctagcagaacagaaaatattataataatgaggcaataataaaattaggaaattaaattatttttaaatctg

SEQ ID NO: 750787 - DNA, 120 bp, Artificial Sequence
  ENSG00000206052_71 (sequence is synthesized)
tctgtgtgatttttccccttggtaaaaatacatgaaatacataattgaaaaattaccttcttctgaagtcgtagtttttaatcttaaccatcaataaataaacctattgttaacaatgtc

SEQ ID NO: 750788 - DNA, 120 bp, Artificial Sequence
  ENSG00000206052_72 (sequence is synthesized)
ttattcataattctaaaaaatttacaaatgatattgctatgaggttgtgcactattaaagtttgctccatcacttaaaggtaaagcagttcaaaaatactactttacatcacaactttgc

SEQ ID NO: 750789 - DNA, 120 bp, Artificial Sequence
  ENSG00000206052_73 (sequence is synthesized)
atggctgagattttgaacaactaaattgatggttttacccacaagttatttcataaagctaacactgtaatattacttggttttcttatacttttgttatcatgtgatgaaatgtaacta

SEQ ID NO: 750790 - DNA, 120 bp, Artificial Sequence
  ENSG00000206052_74 (sequence is synthesized)
tgtaattaaacaaaattctgacaatcatattctgctaatgtttaaaatgttacttattccttcacttattagcttgctattttgaaaataaagtgaaagaaggccctttattaaatgaaa

SEQ ID NO: 750791 - DNA, 120 bp, Artificial Sequence
  ENSG00000206052_75 (sequence is synthesized)
ccatttgggagcctttagaaataaaactgctatagatattcatgtgcaggatttatgtggacatgttttcatttatccaagataaatgctcaaggggctaattgctgattcttaaggacc

SEQ ID NO: 750792 - DNA, 120 bp, Artificial Sequence
  ENSG00000206052_76 (sequence is synthesized)
ctggaagtcccacagcttgcaaattctaaactgctagttgaaagcacgtcacttccagtaggtgaccccttaagtccatgaagatgcaaacaaacagccaagagatctgaaagtaaatgg

SEQ ID NO: 750793 - DNA, 120 bp, Artificial Sequence
  ENSG00000206052_77 (sequence is synthesized)
gatttcttgaagaaaatgcacccttggttatgtatggcatcactcaccatctgttcatggatacttctacatgcaaagttgtacatgacttggaataaaccagctctagttttatcatca

SEQ ID NO: 750794 - DNA, 120 bp, Artificial Sequence
  ENSG00000206052_78 (sequence is synthesized)
tttagaaataaaactgctatagatattcatgtgcaggatttatgtggacatgttttcatttatccaagataaatgctcaaggggctaattgctgattcttaagagctggaggccgaggag

SEQ ID NO: 750795 - DNA, 120 bp, Artificial Sequence
  ENSG00000206053_0 (sequence is synthesized)
ggcgcgcggcgagctgagggtggcggcggtcgacatgttccaggtcccggatagcgagggcggccgcgccggctccagggccatgaagcccccaggaggagaatcgagcaatctttttgg

SEQ ID NO: 750796 - DNA, 120 bp, Artificial Sequence
  ENSG00000206053_1 (sequence is synthesized)
aagtccagaagaagctactccttccagcaggcctaataggatggcatctaatatttttggaccaacagaagaacctcagaacatacccaagaggacaaatcccccagggggtaaaggaag

SEQ ID NO: 750797 - DNA, 120 bp, Artificial Sequence
  ENSG00000206053_2 (sequence is synthesized)
tggtatctttgacgaatcaacccccgtgcagactcgacagcacctgaacccacctggagggaagaccagcgacatttttgggtctccggtcactgccacttcacgcttggcacacccaaa

SEQ ID NO: 750798 - DNA, 120 bp, Artificial Sequence
  ENSG00000206053_3 (sequence is synthesized)
caaacccaaggatcatgttttcttatgtgaaggagaagaaccaaaatcggatcttaaagctgcaaggagcatcccggctggagcagagccaggtgagaaaggcagcgccagaaaagcagg

SEQ ID NO: 750799 - DNA, 120 bp, Artificial Sequence
  ENSG00000206053_4 (sequence is synthesized)
ccccgccaaggagcaggagcccatgcccacagtcgacagccatgagccccggctggggccgcggcctcgctctcacaacaaggtcctgaacccaccgggaggcaaatccagcatctcctt

SEQ ID NO: 750800 - DNA, 120 bp, Artificial Sequence
  ENSG00000206053_5 (sequence is synthesized)
ctactaagagaagccactgctccacccggagccagaccagaaactcaagagatagggtagccatgttttcatttccttttgcccaaatgagcggggtgggaagagggttagtcttatgtg

SEQ ID NO: 750801 - DNA, 120 bp, Artificial Sequence
  ENSG00000206053_6 (sequence is synthesized)
agcctggctgctcagcgtctcctggccgtcatgacagctgcttggagacccgtgccttccagatggctgggagatgcctctgtggggatgaaatggggcacccctggccatcactcatgt

SEQ ID NO: 750802 - DNA, 120 bp, Artificial Sequence
  ENSG00000206053_7 (sequence is synthesized)
gtagtccaggtttgagaggaactggaaggggggtgagggtggggaggtggggcagggcatggtccttggatcaacagcccgccagctgattggatgtctaggaatgactgaaagaaacca

SEQ ID NO: 750803 - DNA, 120 bp, Artificial Sequence
  ENSG00000206053_8 (sequence is synthesized)
aaacagcctgtccactgctgctgtgggatggaggaggcgtaagcagaaacactaacagtatattgacctcttagcagaaccgcttccattctggagatcacggctgctaaatccagcatc

SEQ ID NO: 750804 - DNA, 120 bp, Artificial Sequence
  ENSG00000206053_9 (sequence is synthesized)
cccacttcattttacccccagcatattgttctgtagtcttttcttgaaacatcttgattgcttttcctcggcagctttcaaaaaaccaaataataatagttatccgtcttctacttcatg

SEQ ID NO: 750805 - DNA, 120 bp, Artificial Sequence
  ENSG00000206053_10 (sequence is synthesized)
gaagattgttttggtgccctgaccctctgaagtgcccagttcctgccatctgaaacctcggcctgatctgatctcatgttggaatctgcctgtctttcacacagggctggtcttggtcct

SEQ ID NO: 750806 - DNA, 120 bp, Artificial Sequence
  ENSG00000206053_11 (sequence is synthesized)
ttacatgccagttttgcttgtgaattcttgcttttttcctctcatcagccttaagtttaggcgtttgttgttctccagtgatgtagacagttcccttcacaagtcacagttcttcccata

SEQ ID NO: 750807 - DNA, 120 bp, Artificial Sequence
  ENSG00000206053_12 (sequence is synthesized)
aatgaggcccgctgacctctgcgggactttaaaaatctattcagatatttccgagtaagtggcttgtttaaattcttcctgtgtctttctttattccttaattggttggtggaaagaaga

SEQ ID NO: 750808 - DNA, 120 bp, Artificial Sequence
  ENSG00000206053_13 (sequence is synthesized)
gatgcttgggaaccttgggttcttaggtttggattctttaataatatctaaaaagctaaattttaaataccagctttacataaatgattgttgactctggtctgtttctgacacctttcc

SEQ ID NO: 750809 - DNA, 120 bp, Artificial Sequence
  ENSG00000206053_14 (sequence is synthesized)
agaaaaaagtcaattgttcaggtacaccaaagaggaagaagagctgtggaggccaccctctacaaagctttatagaacttctggatctaactcacaaacaagcttccagaagagactaga

SEQ ID NO: 750810 - DNA, 120 bp, Artificial Sequence
  ENSG00000206053_15 (sequence is synthesized)
gtggtgctttcatcttcaggcagaagcctctgcccatccccctcaagggctgcaggcccagttctcatgctgcccttgggtgggcatctgttaacagaggagaacgtctgggtggcggca

SEQ ID NO: 750811 - DNA, 120 bp, Artificial Sequence
  ENSG00000206053_16 (sequence is synthesized)
gcagctttgctctgagtgcctacaaagctaatgcttggtgctagaaacatcatcattattaaacttcagaaaagcagcagccatgttcagtcaggctcatgctgcctcactgcttaagtg

SEQ ID NO: 750812 - DNA, 120 bp, Artificial Sequence
  ENSG00000206053_17 (sequence is synthesized)
cctgcaggagccgcctgccaagctccccttcctacacctggcacactggggtctgcacaaggctttgtcaaccaaagacagcttcccccttttgattgcctgtagactttggagccaaga

SEQ ID NO: 750813 - DNA, 120 bp, Artificial Sequence
  ENSG00000206053_18 (sequence is synthesized)
aacactctgtgtgactctacacacacttcaggtggtttgtgcttcaaagtcattgatgcaacttgaaaggaaacagtttaatggtggaaatgaactaccatttataacttctgttttttt

SEQ ID NO: 750814 - DNA, 120 bp, Artificial Sequence
  ENSG00000206053_19 (sequence is synthesized)
attgagaaaatgattcacgaattccaaatcagattgccaggaagaaataggacgtgacggtactgggccctgtgattctcccagcccttgcagtccgctaggtgagaggaaaagctcttt

SEQ ID NO: 750815 - DNA, 120 bp, Artificial Sequence
  ENSG00000206053_20 (sequence is synthesized)
acttccgcccctggcagggacttctgggttatgggagaaaccagagatgggaatgaggaaaatatgaactacagcagaagcccctgggcagctgtgatggagcccctgacattactcttc

SEQ ID NO: 750816 - DNA, 120 bp, Artificial Sequence
  ENSG00000206053_21 (sequence is synthesized)
ttgcatctgtcctgccttctttccctctgcgaggcagtggggtgggattcagagtgcttagtctgctcactgggagaagaagagttcctgcgcatgcaagccctgctgtgtggctgtcgt

SEQ ID NO: 750817 - DNA, 120 bp, Artificial Sequence
  ENSG00000206053_22 (sequence is synthesized)
ttacatttgggaggtgtcctgtatgtctgtacgttggggactgcctgtatttggaagatttaaaaacctagcatcctgttctcaccctctaagctgcattgagaaatgactcgtctctgt

SEQ ID NO: 750818 - DNA, 120 bp, Artificial Sequence
  ENSG00000206053_23 (sequence is synthesized)
atttgtattaagccttaacacttttcttaagtgcattcggtgccaacattttttagagctgtaccaaaacaaaaagcctgtactcacatcacaatgtcattttgataggagcgttttgtt

SEQ ID NO: 750819 - DNA, 120 bp, Artificial Sequence
  ENSG00000206053_24 (sequence is synthesized)
atttttacaaggcagaatggggtgtaacagttgaattaaacttagcaatcacgtgctcagagcttttgcctgtcagttgtgtgtgtcccttatagtcccttcccccacagctcttgctga

SEQ ID NO: 750820 - DNA, 120 bp, Artificial Sequence
  ENSG00000206053_25 (sequence is synthesized)
aagagtttgccttgttttgttttgttgttttgtatttagccagaggatgccaaaattagtcttctcaaagctttgagtagagtaagtgtgggaataagccagtttttttttttctgtttc

SEQ ID NO: 750821 - DNA, 120 bp, Artificial Sequence
  ENSG00000206053_26 (sequence is synthesized)
tgtaacttaaatgaacgggtttttttcccttgtatgccacttgtcctaacatgtccttaaggtgtttaacctgcctctgacctggcttgcaatgcataggtgaggagaagcagagagctt

SEQ ID NO: 750822 - DNA, 120 bp, Artificial Sequence
  ENSG00000206053_27 (sequence is synthesized)
tgcataggtgaggagaagcagagagcttgtcatatgcaagtcctgtcaagaaaacaggtgggcatggtggctcaggtctgtagtctttgggtctttgggaggccagggtgggaggatcac

SEQ ID NO: 750823 - DNA, 64 bp, Artificial Sequence
  ENSG00000206053_28 (sequence is synthesized)
aggagtttgagaccagcctagacaacatactacgaccctgtctatacaaaaaaaaacttctctt

SEQ ID NO: 750824 - DNA, 120 bp, Artificial Sequence
  ENSG00000206053_29 (sequence is synthesized)
gaccaggaggttgtggctgtagtgagtgatgatcatgccactgcacttcagcctggaccacagagcaagaccctgtgtaaaaaaataaaataaaaaacagattggatgtctttcttctga

SEQ ID NO: 750825 - DNA, 120 bp, Artificial Sequence
  ENSG00000206053_30 (sequence is synthesized)
atattgactttcacgctccagaagttagctgcacagggccgcactaaagtcatactcacactaccctgggggactggtttctggacaaggtgttgagaaagggagaaaactcttcctttt

SEQ ID NO: 750826 - DNA, 120 bp, Artificial Sequence
  ENSG00000206053_31 (sequence is synthesized)
gcgcgcggcgagctgagggtggcggcggtcgacatgttccaggaaatggcaactgctgacaggaagtttggcatccacctcccccagcctcctgagtggacaggggccctgggcaccact

SEQ ID NO: 750827 - DNA, 120 bp, Artificial Sequence
  ENSG00000206053_32 (sequence is synthesized)
tctcagactgtgagcctgagagttcctctctaggaggctccacaccattctgcctgctagatcggggccagatgagatgaaagtcaacgcttgagaaagaaaaccaacatgcattaactg

SEQ ID NO: 750828 - DNA, 120 bp, Artificial Sequence
  ENSG00000206053_33 (sequence is synthesized)
ggactgcattcagacgtgacagcgcagcagcgggtatgccaggtgctctttccaaaaaggctccaaggcagatgcgacatgtttttagggagaatcatggtgggtgccgtagattatcct

SEQ ID NO: 750829 - DNA, 120 bp, Artificial Sequence
  ENSG00000206053_34 (sequence is synthesized)
ggatgcaagcattagtcatcgagtttggaagttcccctgagtcacccaggaaacagtccagccttgtgctgactgaagccgtgggggaagctcttctgtgctggtggcggacgcccactg

SEQ ID NO: 750830 - DNA, 120 bp, Artificial Sequence
  ENSG00000206053_35 (sequence is synthesized)
cagacgggctgtggcggctcctcactgcagtgctgcggggcgcggagaagcggtggggagcggaacgtgccgcagacgagctgggcccttgtccgtcttccactcttcctgtttcacctt

SEQ ID NO: 750831 - DNA, 120 bp, Artificial Sequence
  ENSG00000206053_36 (sequence is synthesized)
gcagaggaaaagtgacagttcttttctgatgggcttttccccgcacagtcaaggtcctcggctggttacctgtggagattgtcagcacttgactgaagcgtagctgacgcctctgaccca

SEQ ID NO: 750832 - DNA, 120 bp, Artificial Sequence
  ENSG00000206053_37 (sequence is synthesized)
aggatggtgaggaaggaaagccggtctgaactggatgatgaggtatcactggaagcttctgcttggggtccaccagacgctgcacatttgccactcatctgaacggggtcgagtcgcagg

SEQ ID NO: 750833 - DNA, 120 bp, Artificial Sequence
  ENSG00000206069_0 (sequence is synthesized)
atgttgagcagtgtgtgggtagctctggggctctctctgacctgcacctcagccttcagcctcatctcccctgcctggttccagaccccgaccttctcctttggcatcctcacctactgc

SEQ ID NO: 750834 - DNA, 120 bp, Artificial Sequence
  ENSG00000206069_1 (sequence is synthesized)
tcctggcctcagggcaacagttggaaccagagctgcgtgaccttcagttccctggaggatattcctgactttgcctggaaggtctcagctgtgatgctcctcggaggctggctcctgttg

SEQ ID NO: 750835 - DNA, 120 bp, Artificial Sequence
  ENSG00000206069_2 (sequence is synthesized)
ggcagctactgccatgattgtgggtctgctgattttcccaatcggccttgcctccccattcatcaaggaagtgtgcgaagcctcctccatgtattatggtgggaagtgccggctgggttg

SEQ ID NO: 750836 - DNA, 120 bp, Artificial Sequence
  ENSG00000206069_3 (sequence is synthesized)
gggttacatgactgctatcctcaatgcagtcctggccagcctcctgcccatcatcagctggccccacacaaccaaggtccaagggaggaccatcatcttctccagtgccaccgagagaat

SEQ ID NO: 750837 - DNA, 120 bp, Artificial Sequence
  ENSG00000206069_4 (sequence is synthesized)
catctttgtgccagaaatgaacaaataaaaatctcctgggagtagcacaaagggcacactccagagttttatgaaatcatcatgtagccaacttcaaatcccatctctgctccttcttgc

SEQ ID NO: 750838 - DNA, 120 bp, Artificial Sequence
  ENSG00000206069_5 (sequence is synthesized)
attgttctacaagctaaattattccttcaaaggagaggagaattgtataaggtcacagacgtggatccaaagccggagcctgagcagaggtggccacgctggagggtcttgacctaaagt

SEQ ID NO: 750839 - DNA, 120 bp, Artificial Sequence
  ENSG00000206069_6 (sequence is synthesized)
ttctggaaaatgaaagttgaaatcatacctacctcataaggttgttctgagaattcactggagatgctctgtgtaaataaagcactttgcaccatgtctggcacatagcgttcaataaat

SEQ ID NO: 750840 - DNA, 120 bp, Artificial Sequence
  ENSG00000206069_7 (sequence is synthesized)
attggctactattattacaatccttacctcaaggactgtgctgagaagtcaacatctttaagaaaactgcccaggctaattctgagttcatggttgtcactcaaaaactaaattgtttaa

SEQ ID NO: 750841 - DNA, 85 bp, Artificial Sequence
  ENSG00000206072_0 (sequence is synthesized)
gctgtactttccaaccagcaggtgaagagctgaatcactaagggcacaaatgaaaagggaggggcaaaatatgaaggctttatat

SEQ ID NO: 750842 - DNA, 120 bp, Artificial Sequence
  ENSG00000206072_1 (sequence is synthesized)
acaaatgaaaagggaggggcaaaatatgaaggctttatatttccttttgagggacgcagctccagtctaacttgccactctgtgaacttcactactggaaagcaacaaaggcagtcggca

SEQ ID NO: 750843 - DNA, 120 bp, Artificial Sequence
  ENSG00000206072_2 (sequence is synthesized)
taaaaatgggttctctcagcacagctaacgttgaattttgccttgatgtgttcaaagagctgaacagtaacaacataggagataacatcttcttttcttcgctgagtctgctttatgctc

SEQ ID NO: 750844 - DNA, 120 bp, Artificial Sequence
  ENSG00000206072_3 (sequence is synthesized)
taagcatggtcctccttggtgccaggggagagactgaagagcaattggagaaggtgcttcattttagtcatactgtagactcattaaaaccagggttcaaggactcacctaagtgcagcc

SEQ ID NO: 750845 - DNA, 120 bp, Artificial Sequence
  ENSG00000206072_4 (sequence is synthesized)
aagctggaagaattcattccgagtttggtgtcgaattctctcaaatcaaccagccagactctaactgtaccctcagcattgccaacaggctctacgggacaaagacgatggcatttcatc

SEQ ID NO: 750846 - DNA, 120 bp, Artificial Sequence
  ENSG00000206072_5 (sequence is synthesized)
agcaatatttaagctgttctgagaaatggtatcaagccaggttgcaaactgtggattttgaacagtctacagaagaaacgaggaaaacgattaatgcttgggttgaaaataaaactaatg

SEQ ID NO: 750847 - DNA, 120 bp, Artificial Sequence
  ENSG00000206072_6 (sequence is synthesized)
gaaaagtcgcaaatctctttggaaagagcacaattgacccttcatctgtaatggtcctggtgaatgccatatatttcaaaggacaatggcaaaataaatttcaagtaagagagacagtta

SEQ ID NO: 750848 - DNA, 120 bp, Artificial Sequence
  ENSG00000206072_7 (sequence is synthesized)
cgttaacaacaaattaagcatgattattctgcttccagtaggcatagctaatctgaaacagatagaaaagcagctgaattcggggacgtttcatgagtggacaagctcttctaacatgat

SEQ ID NO: 750849 - DNA, 120 bp, Artificial Sequence
  ENSG00000206072_8 (sequence is synthesized)
ggaaagagaagttgaagtacacctcccccgattcaaacttgaaactaagtatgagctaaattccctgttaaaatctctaggggtgacagatctcttcaaccaggtcaaagctgatctttc

SEQ ID NO: 750850 - DNA, 120 bp, Artificial Sequence
  ENSG00000206072_9 (sequence is synthesized)
tggaatgtcaccaaccaagggcctatatttatcaaaagccatccacaagtcatacctggatgtcagcgaagagggcacggaggcagcagcagccactggggacagcatcgctgtaaaaag

SEQ ID NO: 750851 - DNA, 120 bp, Artificial Sequence
  ENSG00000206072_10 (sequence is synthesized)
cctaccaatgagagctcagttcaaggcgaaccaccccttccttttctttataaggcacactcataccaacacgatcctattctgtggcaagcttgcctctccctaatcagatggggttga

SEQ ID NO: 750852 - DNA, 120 bp, Artificial Sequence
  ENSG00000206072_11 (sequence is synthesized)
gcaaggctcagagttgcagatgaggtgcagagacaatcctgtgactttcccacggccaaaaagctgttcacacctcacacacctctgtgcctcagtttgctcatctgcaaaataggtcta

SEQ ID NO: 750853 - DNA, 120 bp, Artificial Sequence
  ENSG00000206072_12 (sequence is synthesized)
ggatttcttccaaccatttcatgagttgtgaagctaaggctttgttaatcatggaaaaaggtagatttatgcagaaagcctttctggctttcttatctgtggtgtctcatttgagtgctg

SEQ ID NO: 750854 - DNA, 120 bp, Artificial Sequence
  ENSG00000206072_13 (sequence is synthesized)
tccagtgacatgatcaagtcaatgagtaaaattttaagggattagattttcttgacttgtatgtatctgtgagatcttgaataagtgacctgacatctctgcttaaagaaaaccagctga

SEQ ID NO: 750855 - DNA, 120 bp, Artificial Sequence
  ENSG00000206072_14 (sequence is synthesized)
agggcttcaactttgcttggatttttaaatattttccttgcatatgtaaatagaatgtggtgagttttagttcaaaattctctgttgagaataataaatgcatgaaataccttaaagctc

SEQ ID NO: 750856 - DNA, 120 bp, Artificial Sequence
  ENSG00000206072_15 (sequence is synthesized)
tcagctaagtgaggtaagtattttattttcagactcatgacaaatgttggaggatacaataatcatttaaggacaatttagaaagatgtagtgatttagtgaaaatattggtctaggttt

SEQ ID NO: 750857 - DNA, 120 bp, Artificial Sequence
  ENSG00000206072_16 (sequence is synthesized)
ctgttggttctttttattgtattttctacagattttcatttttcctttattaagtgacaataacttttatcacagagcacctaactggagacttgggatactaagattctctggcagagg

SEQ ID NO: 750858 - DNA, 120 bp, Artificial Sequence
  ENSG00000206072_17 (sequence is synthesized)
agaaaacccattcttttcttaatgctctcttggcttattctttccatatatactgtggttatgttctccagcagcacactaaggctatctgtgttatttttttttctagagagtttcttg

SEQ ID NO: 750859 - DNA, 120 bp, Artificial Sequence
  ENSG00000206072_18 (sequence is synthesized)
aggaaagattaaaaagaaaatgatttaatgatatatcctttttcttcccactaaaatcatgttagctaaaaatcctgactttgtttttggtagaccaagctatctctatatattattaga

SEQ ID NO: 750860 - DNA, 120 bp, Artificial Sequence
  ENSG00000206072_19 (sequence is synthesized)
agtctaacttgccactctgtgaacttcactactggaaagcaacaaagagacggggttttcgccacgttgcccaggctggcttcaaactcctgggctcaagggatccacctgcctccgcct

SEQ ID NO: 750861 - DNA, 120 bp, Artificial Sequence
  ENSG00000206072_20 (sequence is synthesized)
cccaaagctgatgttaagtattatctaacataacttcatttatgaaaatttaaaaatgcgtaagataaagaaatcaatgttttacaggagcacatatacataaaagaatatgctttaaac

SEQ ID NO: 750862 - DNA, 120 bp, Artificial Sequence
  ENSG00000206072_21 (sequence is synthesized)
caagaaccagagcatgtgatgacctcaaccttgtgtacttgtggttataaaagaagaaacaatcaaataaacagactaataaaagtgtctggcacacaataagtggcctatcagtgtatt

SEQ ID NO: 750863 - DNA, 120 bp, Artificial Sequence
  ENSG00000206072_22 (sequence is synthesized)
ccaaactcttttcttaggtgctctagtaactgcagggctacaatagttatgatatgtgaataggcgattttataacaacaacaggacataaatttaagataaataaattcacgttacttt

SEQ ID NO: 750864 - DNA, 120 bp, Artificial Sequence
  ENSG00000206072_23 (sequence is synthesized)
agtacacctcccccgattcaaacttgaaactaagtgcagggagaagcctgggatctagaagagaggggtggttgttccctcacccacctgctatttctgactcctaaggataagcagtaa

SEQ ID NO: 750865 - DNA, 120 bp, Artificial Sequence
  ENSG00000206072_24 (sequence is synthesized)
ggttttcatgagggaaaacaactccagtaaggtttgaaaagcagagagggaaatagtctcatatgtcacaaacagaattatatttcaaatttagaagatacggtattaagtgattcatct

SEQ ID NO: 750866 - DNA, 120 bp, Artificial Sequence
  ENSG00000206072_25 (sequence is synthesized)
tattttggacatttttcctcaaggagaatttttctggaagaaaaagtacatttatatgtgggcttattaagagaaagagagaaaggcatgctattttaatcattaaattcttgatgatga

SEQ ID NO: 750867 - DNA, 120 bp, Artificial Sequence
  ENSG00000206072_26 (sequence is synthesized)
cgatcatcatcaagatgagaaagaaaagaaatatgagccaagagaatctgttgttgccagcaatcagtttaccagaacatctgcaggtgaacattttccaaatggagtgacagactaatt

SEQ ID NO: 750868 - DNA, 120 bp, Artificial Sequence
  ENSG00000206072_27 (sequence is synthesized)
gcatctacggggatgagaatctgccatagaagaggatgctgttggtcttattttgccttatgaagaataggaaagggtgattacaatggaactcttcattagttgaagtaggtgatgatc

SEQ ID NO: 750869 - DNA, 120 bp, Artificial Sequence
  ENSG00000206072_28 (sequence is synthesized)
cgaatcctactacagcggtggcagctgcagcttctgctccctcctctgtaacctccacaaaggccttgtgtaggactccagatagcacgagaccgcggctcccggtcatgcctgagaggt

SEQ ID NO: 750870 - DNA, 120 bp, Artificial Sequence
  ENSG00000206073_0 (sequence is synthesized)
agacacacacagcctctctgcccacctctgcttcctctaggaacacaggagttccagatcacatcgagttcaccatgaattcactcagtgaagccaacaccaagttcatgttcgatctgt

SEQ ID NO: 750871 - DNA, 120 bp, Artificial Sequence
  ENSG00000206073_1 (sequence is synthesized)
tccaacagttcagaaaatcaaaagagaacaacatcttctattcccctatcagcatcacatcagcattagggatggtcctcttaggagccaaagacaacactgcacaacaaattagcaagg

SEQ ID NO: 750872 - DNA, 120 bp, Artificial Sequence
  ENSG00000206073_2 (sequence is synthesized)
ttcttcactttgatcaagtcacagagaacaccacagaaaaagctgcaacatatcatgttgataggtcaggaaatgttcatcaccagtttcaaaagcttctgactgaattcaacaaatcca

SEQ ID NO: 750873 - DNA, 120 bp, Artificial Sequence
  ENSG00000206073_3 (sequence is synthesized)
ctgatgcatatgagctgaagatcgccaacaagctcttcggagaaaagacgtatcaatttttacaggaatatttagatgccatcaagaaattttaccagaccagtgtggaatctactgatt

SEQ ID NO: 750874 - DNA, 120 bp, Artificial Sequence
  ENSG00000206073_4 (sequence is synthesized)
ttgcaaatgctccagaagaaagtcgaaagaagattaactcctgggtggaaagtcaaacgaatgaaaaaattaaaaacctatttcctgatgggactattggcaatgatacgacactggttc

SEQ ID NO: 750875 - DNA, 120 bp, Artificial Sequence
  ENSG00000206073_5 (sequence is synthesized)
ttgtgaacgcaatctatttcaaagggcagtgggagaataaatttaaaaaagaaaacactaaagaggaaaaattttggccaaacaagaatacatacaaatctgtacagatgatgaggcaat

SEQ ID NO: 750876 - DNA, 120 bp, Artificial Sequence
  ENSG00000206073_6 (sequence is synthesized)
acaattcctttaattttgccttgctggaggatgtacaggccaaggtcctggaaataccatacaaaggcaaagatctaagcatgattgtgctgctgccaaatgaaatcgatggtctgcaga

SEQ ID NO: 750877 - DNA, 120 bp, Artificial Sequence
  ENSG00000206073_7 (sequence is synthesized)
aattgatggaatggacaagtttgcagaatatgagagagacatgtgtcgatttacacttacctcggttcaaaatggaagagagctatgacctcaaggacacgttgagaaccatgggaatgg

SEQ ID NO: 750878 - DNA, 120 bp, Artificial Sequence
  ENSG00000206073_8 (sequence is synthesized)
tgaatatcttcaatggggatgcagacctctcaggcatgacctggagccacggtctctcagtatctaaagtcctacacaaggcctttgtggaggtcactgaggagggagtggaagctgcag

SEQ ID NO: 750879 - DNA, 120 bp, Artificial Sequence
  ENSG00000206073_9 (sequence is synthesized)
ctgccaccgctgtagtagtagtcgaattatcatctccttcaactaatgaagagttctgttgtaatcaccctttcctattcttcataaggcaaaataagaccaacagcatcctcttctatg

SEQ ID NO: 750880 - DNA, 120 bp, Artificial Sequence
  ENSG00000206073_10 (sequence is synthesized)
gcagattctcatccccatagatgcaattagtctgtcactccatttagaaaatgttcacctagaggtgttctggtaaactgattgctggcaacaacagattctcttggctcatatttcttt

SEQ ID NO: 750881 - DNA, 120 bp, Artificial Sequence
  ENSG00000206073_11 (sequence is synthesized)
tctatctcatcttgatgatgatagtcatcatcaagaatttaatgattaaaatagcatgcctttctctctttctcttaataagcccacatataaatgtacttttccttccagaaaaatttc

SEQ ID NO: 750882 - DNA, 120 bp, Artificial Sequence
  ENSG00000206073_12 (sequence is synthesized)
ccttgaggaaaaatgtccaagataagatgaatcatttaataccgtgtcttctaaatttgaaatataattctgtttctgacctgttttaaatgaaccaaaccaaatcatactttctcttca

SEQ ID NO: 750883 - DNA, 120 bp, Artificial Sequence
  ENSG00000206073_13 (sequence is synthesized)
aatttagcaacctagaaacacacatttctttgaatttaggtgatacctaaatccttcttatgtttctaaattttgtgattctataaaacacatcatcaataaaataatgacataaaatca

SEQ ID NO: 750884 - DNA, 120 bp, Artificial Sequence
  ENSG00000206073_14 (sequence is synthesized)
agctttagatccctgaacaggtcatagtttaaacctggaacttcacaaaaactaagaaaaggccagttttagggaaaatcttggacacaaagattgagacatacagagtgggttggcatt

SEQ ID NO: 750885 - DNA, 120 bp, Artificial Sequence
  ENSG00000206073_15 (sequence is synthesized)
tcatggcacataattattattcctcatttctgcgttactaaaagacagtcagcactgtacctcagagcataggtctggatcaggataggctgggttcagactccagctttgctcttcaca

SEQ ID NO: 750886 - DNA, 120 bp, Artificial Sequence
  ENSG00000206075_0 (sequence is synthesized)
agacacggtcgcctccacatccaggtctttgtgctcctcgcttgcctgttccttttccacgcattttccaggataactgtgactccaggcccgcaatggatgccctgcaactagcaaatt

SEQ ID NO: 750887 - DNA, 120 bp, Artificial Sequence
  ENSG00000206075_1 (sequence is synthesized)
cggcttttgccgttgatctgttcaaacaactatgtgaaaaggagccactgggcaatgtcctcttctctccaatctgtctctccacctctctgtcacttgctcaagtgggtgctaaaggtg

SEQ ID NO: 750888 - DNA, 120 bp, Artificial Sequence
  ENSG00000206075_2 (sequence is synthesized)
acactgcaaatgaaattggacaggttcttcattttgaaaatgtcaaagatgtaccctttggatttcaaacagtaacatcggatgtaaacaaacttagttccttttactcactgaaactaa

SEQ ID NO: 750889 - DNA, 120 bp, Artificial Sequence
  ENSG00000206075_3 (sequence is synthesized)
tcaagcggctctacgtagacaaatctctgaatctttctacagagttcatcagctctacgaagagaccgtatgcaaaggaattggaaactgttgacttcaaagataaattggaagaaacga

SEQ ID NO: 750890 - DNA, 120 bp, Artificial Sequence
  ENSG00000206075_4 (sequence is synthesized)
aaggtcagatcaacaactcaattaaggatctcacagatggccactttgagaacattttagctgacaacagtgtgaacgaccagaccaaaatccttgtggttaatgctgcctactttgttg

SEQ ID NO: 750891 - DNA, 120 bp, Artificial Sequence
  ENSG00000206075_5 (sequence is synthesized)
gcaagtggatgaagaaattttctgaatcagaaacaaaagaatgtcctttcagagtcaacaagacagacaccaaaccagtgcagatgatgaacatggaggccacgttctgtatgggaaaca

SEQ ID NO: 750892 - DNA, 120 bp, Artificial Sequence
  ENSG00000206075_6 (sequence is synthesized)
ttgacagtatcaattgtaagatcatagagcttccttttcaaaataagcatctcagcatgttcatcctactacccaaggatgtggaggatgagtccacaggcttggagaagattgaaaaac

SEQ ID NO: 750893 - DNA, 120 bp, Artificial Sequence
  ENSG00000206075_7 (sequence is synthesized)
aactcaactcagagtcactgtcacagtggactaatcccagcaccatggccaatgccaaggtcaaactctccattccaaaatttaaggtggaaaagatgattgatcccaaggcttgtctgg

SEQ ID NO: 750894 - DNA, 120 bp, Artificial Sequence
  ENSG00000206075_8 (sequence is synthesized)
aaaatctagggctgaaacatatcttcagtgaagacacatctgatttctctggaatgtcagagaccaagggagtggccctatcaaatgttatccacaaagtgtgcttagaaataactgaag

SEQ ID NO: 750895 - DNA, 120 bp, Artificial Sequence
  ENSG00000206075_9 (sequence is synthesized)
atggtggggattccatagaggtgccaggagcacggatcctgcagcacaaggatgaattgaatgctgaccatccctttatttacatcatcaggcacaacaaaactcgaaacattattttct

SEQ ID NO: 750896 - DNA, 120 bp, Artificial Sequence
  ENSG00000206075_10 (sequence is synthesized)
gccgatttctgtaaactctgcatccagagattcattttctagatacaataaattgctaatgttgctggatcaggaagccgccagtacttgtcatatgtagccttcacacagatagacctt

SEQ ID NO: 750897 - DNA, 120 bp, Artificial Sequence
  ENSG00000206075_11 (sequence is synthesized)
ttttttttttccaattctatcttttgtttccttttttcccataagacaatgacatacgcttttaatgaaaaggaatcacgttagaggaaaaatatttattcattatttgtcaaattgtcc

SEQ ID NO: 750898 - DNA, 120 bp, Artificial Sequence
  ENSG00000206075_12 (sequence is synthesized)
ggggtagttggcagaaatacagtcttccacaaagaaaattcctataaggaagatttggaagctcttcttcccagcactatgctttccttctttgggatagagaatgttccagacattctc

SEQ ID NO: 750899 - DNA, 120 bp, Artificial Sequence
  ENSG00000206075_13 (sequence is synthesized)
gcttccctgaaagactgaagaaagtgtagtgcatgggacccacgaaactgccctggctccagtgaaacttgggcacatgctcaggctactataggtccagaagtccttatgttaagccct

SEQ ID NO: 750900 - DNA, 120 bp, Artificial Sequence
  ENSG00000206075_14 (sequence is synthesized)
ggcaggcaggtgtttattaaaattctgaattttggggattttcaaaagataatattttacatacactgtatgttatagaacttcatggatcagatctggggcagcaccctataaatcaac

SEQ ID NO: 750901 - DNA, 120 bp, Artificial Sequence
  ENSG00000206075_15 (sequence is synthesized)
accttaatatgctgcaacaaaatgtagaatattcagacaaaatggatacataaagactaagtagcccataaggggtcaaaatttgctgccaaatgcgtatgccaccaacttacaaaaaca

SEQ ID NO: 750902 - DNA, 120 bp, Artificial Sequence
  ENSG00000206075_16 (sequence is synthesized)
cttcgttcgcagagcttttcagattgtggaatgttggataaggaattatagacctctagtagctgaaatgcaagaccccaagaggaagttcagatcttaatataaattcactttcatttt

SEQ ID NO: 750903 - DNA, 120 bp, Artificial Sequence
  ENSG00000206075_17 (sequence is synthesized)
tgatagctgtcccatctggtcatttggttggcactagactggtggcaggggcttctagctgacttgcacagggattctcacaatagccgatatcagaatttgtgttgaaggaacttgtct

SEQ ID NO: 750904 - DNA, 120 bp, Artificial Sequence
  ENSG00000206075_18 (sequence is synthesized)
cttcatctaatatgatagcgggaaaaggagaggaaactactgcctttagaaaatataagtaaagtgattaaagtgctcacgttaccttgacacatagtttttcagtctatgggtttagtt

SEQ ID NO: 750905 - DNA, 120 bp, Artificial Sequence
  ENSG00000206075_19 (sequence is synthesized)
actttagatggcaagcatgtaacttatattaatagtaatttgtaaagttggttggataagctatccgtgttgcaggttcatggattacttctctataaaaaatatgtatttaccaaaaat

SEQ ID NO: 750906 - DNA, 120 bp, Artificial Sequence
  ENSG00000206075_20 (sequence is synthesized)
tttgtgacattccttctcccatctcttccttgacctgcattgtaaataggttcttcttgttctgagattcaatattgaatttttcctatgctattgacaataaaatattattgaactaca

SEQ ID NO: 750907 - DNA, 120 bp, Artificial Sequence
  ENSG00000206075_21 (sequence is synthesized)
cattctgggttctcacaaataggaggaggatgccactggcatctagtaggtcagcgatgctgctaagcatcctgcagtgcccaggacagccccacaaagactcatccagcctgaatgtca

SEQ ID NO: 750908 - DNA, 120 bp, Artificial Sequence
  ENSG00000206075_22 (sequence is synthesized)
atagtgctgaggttgaggagccttactttacgggaactaggcaggaggagtctgtatgcccaaggacgttggtcattatcacgtgtccacttcagtacagcactactcagaggcaatgct

SEQ ID NO: 750909 - DNA, 120 bp, Artificial Sequence
  ENSG00000206075_23 (sequence is synthesized)
tgtactgactgaggaagttctaacaggacagtaactgcaggatgagaacatgggaagaacagggtctctggagtcattcagcacctaggttcaaatccagacactggccactttgagaac

SEQ ID NO: 750910 - DNA, 120 bp, Artificial Sequence
  ENSG00000206075_24 (sequence is synthesized)
ggggcagcatgtagcagtaaaaggagcccaattatagatgtgaaaaatgatagggacagagtggggcataaatccattccaatgaggaacctgagggcacggccggcaaagtgcctttcc

SEQ ID NO: 750911 - DNA, 120 bp, Artificial Sequence
  ENSG00000206075_25 (sequence is synthesized)
tgagatgaacagctggaaggtaagtggtacaaaaagagccagaatccagaggccccccctcctcttttccataatgtcttcaaggatctgagctgagtgaaactttatagaatttgtaac

SEQ ID NO: 750912 - DNA, 120 bp, Artificial Sequence
  ENSG00000206075_26 (sequence is synthesized)
ccagcgaggaaagctaagtcaccagctgaaaaatagctacaaacatctgagaactttagcagaaaaggaaaagaccaaactctgttatcagaggactttggattatcatgaaaccttgac

SEQ ID NO: 750913 - DNA, 120 bp, Artificial Sequence
  ENSG00000206075_27 (sequence is synthesized)
atctaggaatcttgttcctgattgattaacttctctaacatctcatttccttatcggttgatagcgaagtatattgttctgggattttaatttataatttataagatgctttgatggctg

SEQ ID NO: 750914 - DNA, 120 bp, Artificial Sequence
  ENSG00000206075_28 (sequence is synthesized)
ctctgtctctgtactgactgaggaagttctaacaggacagtaactgcaggatgagaacatgggaagaacagggtctctggagtcattcagcacctaggccactttgagaacattttagct

SEQ ID NO: 750915 - DNA, 120 bp, Artificial Sequence
  ENSG00000206075_29 (sequence is synthesized)
atggtgaacaaaatggacttaggtccattttggggctgttttcaaagacgggctgttgggttgagtactgtcgcctctcatcccccatgttggcagtatttccagctcccaaccctttga

SEQ ID NO: 750916 - DNA, 120 bp, Artificial Sequence
  ENSG00000206077_0 (sequence is synthesized)
gcacttggtcgcgcgcggccgggtcgcgggggagcctccgctgcagttgctgcgtctccaagaggaggagacccacccggtggacttgagctcgctctccagtaagctactcccaggctt

SEQ ID NO: 750917 - DNA, 120 bp, Artificial Sequence
  ENSG00000206077_1 (sequence is synthesized)
caccacgctgggcttcaaagacgagagaagaaacaaagtcacctttctctccagtgccactactgcgctttcgatgcagaataattcagcatttggcgacttgaagtcggacgagttgga

SEQ ID NO: 750918 - DNA, 120 bp, Artificial Sequence
  ENSG00000206077_2 (sequence is synthesized)
gctgctctactcagcctacggagatgagacaggcgtgcagtgtgcgccgagatggacacccgctccgggagccagtgttccgtcaccccagaagccatacgcaacaatgaagagctggtc

SEQ ID NO: 750919 - DNA, 120 bp, Artificial Sequence
  ENSG00000206077_3 (sequence is synthesized)
ttgccgccccgcatctccagagtgaacggctggtcgttacccctgcactacttccgggtggtgacttgggctgtcttcgttggcctttccttggccaccttcaggatcttcattcccctc

SEQ ID NO: 750920 - DNA, 120 bp, Artificial Sequence
  ENSG00000206077_4 (sequence is synthesized)
ctgcctcactcgtggaaatacatcgcctatgtggtgaccggggggatcttctcgttccacctcgtcgtccacctgatcgcgtcctgcatcgacccggccgactccaatgtcagactcatg

SEQ ID NO: 750921 - DNA, 120 bp, Artificial Sequence
  ENSG00000206077_5 (sequence is synthesized)
aagaactattctcagcccatgcccctcttcgacagatcaaaacatgcacacgtgatccagaatcagttctgccacctgtgcaaggtcaccgtgaacaagaaaaccaaacactgcatttcc

SEQ ID NO: 750922 - DNA, 120 bp, Artificial Sequence
  ENSG00000206077_6 (sequence is synthesized)
tgcaataagtgtgtgtccggcttcgaccaccactgcaaatggatcaacaactgcgtgggaagccggaattattggttcttcttcagcactgtggcctcggccacagctggcatgctctgc

SEQ ID NO: 750923 - DNA, 120 bp, Artificial Sequence
  ENSG00000206077_7 (sequence is synthesized)
tatgaacacgtggctgctgttcctccccctgttcccggtgcaggtgcagactctgatagtcgtgatcatcaggatgctcgtgctcctgctggaccttcttggcttggtgcagctgggcca

SEQ ID NO: 750924 - DNA, 120 bp, Artificial Sequence
  ENSG00000206077_8 (sequence is synthesized)
gctgctcatcttccacatctacctgaaggccaagaagatgaccacctttgagtatctcattaatacccgcaaagaagagagttcaaaacatcaagcagtgaggaaagatccatacgtgca

SEQ ID NO: 750925 - DNA, 120 bp, Artificial Sequence
  ENSG00000206077_9 (sequence is synthesized)
aatggacaaaggatttctccagcaaggagctggcgccctgggctcatctgcacagggagtcaaggccaagagctccctgctgatttacaaatgcccatgtcacttctgcacttcagtaaa

SEQ ID NO: 750926 - DNA, 120 bp, Artificial Sequence
  ENSG00000206077_10 (sequence is synthesized)
ccaggacggggattcgaaggcacaggaagcagatgatgccccgagtacatctacacttgggctgcaacaagaaacaacagagcccatgaaaactgacagtgctgaaagtgaagactgaga

SEQ ID NO: 750927 - DNA, 120 bp, Artificial Sequence
  ENSG00000206077_11 (sequence is synthesized)
ttcgggagctcaggtgcccctgtgatccaggtcttctaccctgaaaccccaccctccatcaaggtcctgcctgtagagtctaccttgcaaagcctcctgctcctacccatgctacaggcc

SEQ ID NO: 750928 - DNA, 120 bp, Artificial Sequence
  ENSG00000206077_12 (sequence is synthesized)
aggaaccagagcccatcatctcagaggcccctggatgtccttcgaaggaaccaggaccctcagagcccagcatccatctctgtcatcatcttcatcacacccaaagaagagccagccttg

SEQ ID NO: 750929 - DNA, 120 bp, Artificial Sequence
  ENSG00000206077_13 (sequence is synthesized)
caggagggtttacatctccaggaagatgggctgccagcaactgcagaggatgcagccacctgcttaactgtgctgtccagccagccagccagctgcagggcctcttgctgcttaagagct

SEQ ID NO: 750930 - DNA, 120 bp, Artificial Sequence
  ENSG00000206077_14 (sequence is synthesized)
gatgggccgggcatgttggctcacacctgtgagcacagtactgggaaatgggagcatagtactgggaaatgggagcacagtactgagaaatgggagcacagtactgggaaatggtagcac

SEQ ID NO: 750931 - DNA, 120 bp, Artificial Sequence
  ENSG00000206077_15 (sequence is synthesized)
gcacttggtcgcgcgcggccgggtcgcgggggagcctccgctgcagttgctgcgtctccaagcaacatggctgacaaggccaagcctgccaaagctgccaacaggacgccccccaagtcc

SEQ ID NO: 750932 - DNA, 120 bp, Artificial Sequence
  ENSG00000206077_16 (sequence is synthesized)
ccgggggacccctcgaaggactgggcagccaagaagctgtcgctggagttggaggacatgtgcaccgagtggtgtggacggccgtctcgcggggctgtggtgctgaggaggagacccacc

SEQ ID NO: 750933 - DNA, 120 bp, Artificial Sequence
  ENSG00000206077_17 (sequence is synthesized)
ggggcagggccgcctcaccgcacttccccaggatttcagggaacaggctcctgtgacttggaaatgaaaatggatcacccaacctggaggaacagtgaggctggtgtccaagacttgccc

SEQ ID NO: 750934 - DNA, 120 bp, Artificial Sequence
  ENSG00000206077_18 (sequence is synthesized)
cttgcctgcacttccagcaaagatttggagacactcagtggaaaccaatcgagcccccagcccacccccgcccagactcagccaccaaagttccctcactgcatgtggcacacgggctca

SEQ ID NO: 750935 - DNA, 120 bp, Artificial Sequence
  ENSG00000206077_19 (sequence is synthesized)
tgggagtttctctgcctgcgattgtccacgttgacaccttctgcacaggtgcatttgtgagtcccctcggtgtctctgcagcatctatgtgtggatgaatagtgaagccacatgaggcct

SEQ ID NO: 750936 - DNA, 120 bp, Artificial Sequence
  ENSG00000206077_20 (sequence is synthesized)
ggtctgaagcagagaagatccgctcagcatcacgttgaatcccaagcccgcatctccgtgggctccaggacaatcctatgaaaatgacaccgtcggttcattgttcacatcggggaggag

SEQ ID NO: 750937 - DNA, 120 bp, Artificial Sequence
  ENSG00000206077_21 (sequence is synthesized)
aattccgtctgaaaatgagcgtgacttcactgacacccaagtccgtggcacagccctgtgctgagctccacagacctacagtccatcgcctccccttcgagtgggcccagggctgcagac

SEQ ID NO: 750938 - DNA, 120 bp, Artificial Sequence
  ENSG00000206077_22 (sequence is synthesized)
agcattgtccaaagaagacaccctgactcgatgaatggaacaaactggaaactccagaaacaagcccttctttacatttctggtgtttggcctaaatggaaggtgccaaggaagcagatg

SEQ ID NO: 750939 - DNA, 120 bp, Artificial Sequence
  ENSG00000206077_23 (sequence is synthesized)
actgggaaatgggagcaaacagcactgggagataggagtatacagcactgggaaatgggagcacggcactgggaaatgggagcacagtactgggaaatgggagcacagtgctaggaaatg

SEQ ID NO: 750940 - DNA, 120 bp, Artificial Sequence
  ENSG00000206077_24 (sequence is synthesized)
agagcacagttttgggaaatgggagcacagtactgggaaatatgagcacagtactgggaaatggaagcacatggcactgggaaataggagtatacagcactgggaaatgggagcacagta

SEQ ID NO: 750941 - DNA, 120 bp, Artificial Sequence
  ENSG00000206077_25 (sequence is synthesized)
ctgggaattgggagcacagcactgggaaatgggagcacagtactaggaaatgggagctcacagcactgggaaatgggaacatagtactgggaaatgggagcacagtactgggaaagggga

SEQ ID NO: 750942 - DNA, 120 bp, Artificial Sequence
  ENSG00000206077_26 (sequence is synthesized)
gcccacagtactgggaattgggagcacagtactgggaaatgggagttcacagcactaggaaatgggagcacagtattgggaaatgggagcacagtactgggaaaggggagggcacagcac

SEQ ID NO: 750943 - DNA, 120 bp, Artificial Sequence
  ENSG00000206077_27 (sequence is synthesized)
tgggaaatgggagcatagtactgggaaagcggagcacagtactgggaaaggggagcccatagtactgggaaatgggagcacagtactggaaaatgggagctcacagcactgggaaatggg

SEQ ID NO: 750944 - DNA, 120 bp, Artificial Sequence
  ENSG00000206077_28 (sequence is synthesized)
agcatagcattgggaaatgggagcacagtactgggaattgggagcacagcgctgagaaatgggagctcacagtactgggaaatggagcacagtatttggaaatgggagcacagtactggg

SEQ ID NO: 750945 - DNA, 120 bp, Artificial Sequence
  ENSG00000206077_29 (sequence is synthesized)
aaatgggagctcacagcactgggaaatgggagcatagcattgggaaatgggagcacagtactgggaattgggagcacagtactgggaaatgggagctcacagtactgggaaatgggagct

SEQ ID NO: 750946 - DNA, 120 bp, Artificial Sequence
  ENSG00000206077_30 (sequence is synthesized)
cacagtactgggaaatgggagcacagtattcggaaatgggagcacagtactgggaaatgggagctcacagcactgggaaatggagcatagcattgggaaatgggagcacagtactgggaa

SEQ ID NO: 750947 - DNA, 120 bp, Artificial Sequence
  ENSG00000206077_31 (sequence is synthesized)
atggaagctcacagtcctgggaaatgggagcatagtgctgggaaatgggagcacagtactgagaaatgggagcacagtactgggaaatgggagcccagtactgagaaatgggagcacaca

SEQ ID NO: 750948 - DNA, 120 bp, Artificial Sequence
  ENSG00000206077_32 (sequence is synthesized)
gtactgtgaaatgggagcacagtactgggaaatgggagcatagtactgagaaaccccagacctggattctgagtttttcagtctagcccagacttcttatcttagtagacaaaaagagtc

SEQ ID NO: 750949 - DNA, 120 bp, Artificial Sequence
  ENSG00000206077_33 (sequence is synthesized)
aataccagagaaccagaggcatcctctgtattttaatgaactctgcgttttagtctgtttagtagtcatattttaaaagataatcagttttctaaatatatctataagttactacatgca

SEQ ID NO: 750950 - DNA, 120 bp, Artificial Sequence
  ENSG00000206077_34 (sequence is synthesized)
gcacttggtcgcgcgcggccgggtcgcgggggagcctccgctgcagttgctgcgtctccaaggtggggctgtcagaccgccccccgcagagcctccagctgccccgggccttggctactg

SEQ ID NO: 750951 - DNA, 120 bp, Artificial Sequence
  ENSG00000206077_35 (sequence is synthesized)
tccgcgggcctgtggcgatggagaggcgctgccgggacaccttcccgcacccctgggagcagcgcccgaggatctgaggagccctttattctgcggtttcggttacgtaaacggagccga

SEQ ID NO: 750952 - DNA, 120 bp, Artificial Sequence
  ENSG00000206102_0 (sequence is synthesized)
ttgacctccaaacacatctacagttgctgaaccatgagctactacagaagctattatggaggcctgggctatggctatggaggctttggtggctggggctatggctatggctgcggctat

SEQ ID NO: 750953 - DNA, 120 bp, Artificial Sequence
  ENSG00000206102_1 (sequence is synthesized)
ggatatggattctctgccttctactgaagagtgaactcattctttggatcactagaatctgtctatcatcctgacttaattctcctttcaggtctttttaccccctctgtgaattgcgca

SEQ ID NO: 750954 - DNA, 120 bp, Artificial Sequence
  ENSG00000206104_0 (sequence is synthesized)
ggctagagacttaaatcctgacacaatgagctactatggcaactactacggaggactgggctatggctatgactgtaaatatagttatacctctggctttggtgcctttagaatcctgga

SEQ ID NO: 750955 - DNA, 120 bp, Artificial Sequence
  ENSG00000206104_1 (sequence is synthesized)
gatttgactgctgccaccaatatgattatgctacatgcttattatcaggcactgactgaataatatctacaattgggtccattttcttatgagacaggggtgctgttctactacactttt

SEQ ID NO: 750956 - DNA, 120 bp, Artificial Sequence
  ENSG00000206105_0 (sequence is synthesized)
tggctgtggctgagtatggcaggtgcagacatggctgccactcatcttactctgccaggtaatgacaccatggattccactgaggaacacctagagcagttcagtctactgcactcctcc

SEQ ID NO: 750957 - DNA, 120 bp, Artificial Sequence
  ENSG00000206106_0 (sequence is synthesized)
attgaactccatcttctgacaccatgtgctactaccacaactattatggtagcctggactatggttgcagctatggctctgaatatggtaactctggatatgcctgcaactttccgtgct

SEQ ID NO: 750958 - DNA, 120 bp, Artificial Sequence
  ENSG00000206106_1 (sequence is synthesized)
ttgagccattttcttgtgatgcactaattgcatcaacagggttatttatggattcgttattgtctctccaattttaactaactctaattattgattaccacaggtcatatttgcattgga

SEQ ID NO: 750959 - DNA, 120 bp, Artificial Sequence
  ENSG00000206107_0 (sequence is synthesized)
gaccatctttaaggatttttagcaatatgcctcatagccactgccattcactcaggagcttccacaatgccccaccactctctgccatcacacatggcactaatcctataacctttgaag

SEQ ID NO: 750960 - DNA, 120 bp, Artificial Sequence
  ENSG00000206107_1 (sequence is synthesized)
acagattgtgtttgcccagcagcttccatagcagaacctgtttcctggacaactttcaagaaacctgcaatgaaaccaccagctgccaaatgaccaattgtgaacaggacttattcacag

SEQ ID NO: 750961 - DNA, 120 bp, Artificial Sequence
  ENSG00000206107_2 (sequence is synthesized)
gtgccaatcagaaagttcttcagcagggctggcttgtgtttctcagccttgccaatcagaaagcactcagcagatgggttttgtagcccagagctgccaacctgcaagcctcaagggaaa

SEQ ID NO: 750962 - DNA, 120 bp, Artificial Sequence
  ENSG00000206107_3 (sequence is synthesized)
cagttgcccacccaagacttctaagtctaaaaatttcgaaactctggaacgtgcatctagccaatgtcagtgtcagtctcagaaccctgaatccagttcctgtagacctctggtcaatgt

SEQ ID NO: 750963 - DNA, 120 bp, Artificial Sequence
  ENSG00000206107_4 (sequence is synthesized)
tgcacctgagccacaactcctggaatcttctccaggagttgaaccaacttgctgtgttactggtggttctcaattgcctagtaagtgaagatctgtaggggagatggcttatattctcat

SEQ ID NO: 750964 - DNA, 120 bp, Artificial Sequence
  ENSG00000206113_0 (sequence is synthesized)
atggcctactatggaaaatgcattgaaactgtgatcgagcaactcgacaaatttacacccaagagggacaaccctgagcagttcctggaggctgcggccacctccctgcaggctctgagc

SEQ ID NO: 750965 - DNA, 120 bp, Artificial Sequence
  ENSG00000206113_1 (sequence is synthesized)
ccccagaagcagagctttgttttggaggttctgtctgggtgcctcgagtaccggaagctgctgaccgtcgtggtggatgccttctacgtggaggatggccgactctgcctgcgggttgac

SEQ ID NO: 750966 - DNA, 120 bp, Artificial Sequence
  ENSG00000206113_2 (sequence is synthesized)
cacagccgcttcgaggtgatctgctacctagccacattcctgctggaggaactcggcttccagctattctgtaacatcatcaagtcccagcccgtggataagatgtgcaagttcctcagg

SEQ ID NO: 750967 - DNA, 120 bp, Artificial Sequence
  ENSG00000206113_3 (sequence is synthesized)
ttcttcttcaaccccctgcacctgtgctcatggatcaaggatgagtggagcctcatctacgagccagcccacgtgaaggagaactggatcgaccccctgatgagatggcagccagaggtc

SEQ ID NO: 750968 - DNA, 120 bp, Artificial Sequence
  ENSG00000206113_4 (sequence is synthesized)
caggagctgatcaaccacctggagggcgtgtctgccagtcaatcctctcctttaaagaccaaggccaaggtcacagagcccaaggaattcaacctgactgcccccaggccccgcaccatt

SEQ ID NO: 750969 - DNA, 120 bp, Artificial Sequence
  ENSG00000206113_5 (sequence is synthesized)
ccagcgcccgaaccagtcccggtcgtggccaagccgagacccgtcccccagagcacctaccagccacccaaggagcagcagcagctggagacagtcaagaggtacaaccgccgaaaggcc

SEQ ID NO: 750970 - DNA, 120 bp, Artificial Sequence
  ENSG00000206113_6 (sequence is synthesized)
gaggagctgctgctgagggcaaacatcgaggaactgcgctgcgccatgcccaggtcctgcagggagcgagtgcagggctccaagcagcagctgcggcttcagttcccaccccgaatccga

SEQ ID NO: 750971 - DNA, 120 bp, Artificial Sequence
  ENSG00000206113_7 (sequence is synthesized)
aagactccgaagctgaccttctataggcctgacaacatcctggtcaagctgaacaccacagccatcctgcgagaaggggccttgtaccagcggcaggtggagcaggagctgcagagggtt

SEQ ID NO: 750972 - DNA, 120 bp, Artificial Sequence
  ENSG00000206113_8 (sequence is synthesized)
ggggacttctctgagttcttcgagtggcagaagaagatgcaggcgaaggaccgggaggagcagctggctgcaagcgagtgccggcggttgcaagggaagcttagccatgaggaggccgtc

SEQ ID NO: 750973 - DNA, 120 bp, Artificial Sequence
  ENSG00000206113_9 (sequence is synthesized)
ctagcccggcagagcctcatgcaggagaacaagcagagggtggagcagcagaaggagcagatggccaagctgatgctgcagcgtgcagagagacggctccgggaggacaggtccaggaag

SEQ ID NO: 750974 - DNA, 120 bp, Artificial Sequence
  ENSG00000206113_10 (sequence is synthesized)
gagctggtggagcaggtgatagaggggcagaagaacgccaaggcggcccagacgaagctcgcgaagggccgacagcagacagttcaggaggcgatcgaggagagcagggggctgctgcag

SEQ ID NO: 750975 - DNA, 120 bp, Artificial Sequence
  ENSG00000206113_11 (sequence is synthesized)
cgcagggcgcaggcagcccaggaggagcagcggcgccgttgtgaactcatctcccagctgcgcgcactcgagacacagcccacgcgcaagggcaagctcgtggacctgacccagatcccc

SEQ ID NO: 750976 - DNA, 120 bp, Artificial Sequence
  ENSG00000206113_12 (sequence is synthesized)
ggctacggcctggaaggagagatgtccatagtggagctgcgagagcggctggccctgctcaaagagaatcagcggcgcaaggaggaagaaaagcgggatcaaatcattcagggcaagcac

SEQ ID NO: 750977 - DNA, 120 bp, Artificial Sequence
  ENSG00000206113_13 (sequence is synthesized)
accaagagccaggaactgcagaacatggtggagcagatctcgctgtgccgtgcagccatggggagatccgcagccttgaggtgggaggaaaagaaggcccttgcggcggccccggcggcg

SEQ ID NO: 750978 - DNA, 120 bp, Artificial Sequence
  ENSG00000206113_14 (sequence is synthesized)
ccctcgcaggacgagcgcgtgcagcagctgcggcgcaggatctcggagagggcggccgagcgcagcaggcaggcggccttgctgcacgtgtcggcgccgcggaccgcgcgccccaagccc

SEQ ID NO: 750979 - DNA, 120 bp, Artificial Sequence
  ENSG00000206113_15 (sequence is synthesized)
ccaagccccgggcgcagctagaggcgcagcactggctggagctggagcggagccgcgagcgcaggctgcaggcgctgcagcagggaggctcaggacccgggcccgcgcgccgcctggagg

SEQ ID NO: 750980 - DNA, 120 bp, Artificial Sequence
  ENSG00000206113_16 (sequence is synthesized)
ctgcctaccgggagctgacggacgacgactgccaacaccttagccccagctggcccaggaaactgctgcggtggcaggtggcggcggcaggagggctcggctgccccgagcgcccgccag

SEQ ID NO: 750981 - DNA, 120 bp, Artificial Sequence
  ENSG00000206113_17 (sequence is synthesized)
ggccgggagatacgcagcggcgggcgcgggaggcggtgggggcgtccctgcccgcgccgacgcgttccccggcctgcaggcgcagctagaggcgcagcactggctggagctggagcggag

SEQ ID NO: 750982 - DNA, 120 bp, Artificial Sequence
  ENSG00000206113_18 (sequence is synthesized)
cgcagctagaggcgcagcactggctggagctggagcggagccgcgagcgcaggctgcaggcgctgcagcagggaggctcaggacccgggcccgcgcgccgcctggaggccgcctgagccg

SEQ ID NO: 750983 - DNA, 120 bp, Artificial Sequence
  ENSG00000206113_19 (sequence is synthesized)
tgcaggtaccgcccagctctctcaagacccatcatcgaggtgccatcttctcaagccatcagaaagttcctcccaacgccatcgcagtgaccacttatgtagccttttcccactgagggc

SEQ ID NO: 750984 - DNA, 120 bp, Artificial Sequence
  ENSG00000206113_20 (sequence is synthesized)
cggggaggggcggattcccagtagcactgggaaagtgtgccttgagcccactgcgatgtggcccctaagcaggcgggtgtagacgcgcacccacatcccccaggaggaagctcacgggaa

SEQ ID NO: 750985 - DNA, 120 bp, Artificial Sequence
  ENSG00000206113_21 (sequence is synthesized)
agcacctgcaggtgctgcctctgggtatctccagatgttccgtgacaagcatttcatgtctctgtaaggaaaaaacaaacccaggtatgtttgccaataaagaaaaagcaaggtaatgac

SEQ ID NO: 750986 - DNA, 120 bp, Artificial Sequence
  ENSG00000206113_22 (sequence is synthesized)
ccctgcagctgaccgtgttttccacagagacctgctcttcgtatggggaggtgctcctggcacccagaatgtgtgtcaggccaggctctggtgaaagaagccttggccgggacccgggat

SEQ ID NO: 750987 - DNA, 120 bp, Artificial Sequence
  ENSG00000206113_23 (sequence is synthesized)
atgacatccacactgcggttccatcctcagtcaacacagatgagaagggtcagccctggagcgcccccatgccccacccccactttggggggcatcttatctcgggaaatgggtcctcca

SEQ ID NO: 750988 - DNA, 120 bp, Artificial Sequence
  ENSG00000206113_24 (sequence is synthesized)
tcccccaggcgccccagggctgtggcagtgagggtgcgcaaggccacaacttgtgctgtatttgtggtaaccgagacttgggaatcactgactgggtctccgacagaggcaggggctggc

SEQ ID NO: 750989 - DNA, 120 bp, Artificial Sequence
  ENSG00000206113_25 (sequence is synthesized)
ctgggcagtgaggctcccggggagccgagggctgcaggcttctgtacacacctccttcatcttcctacccacacctggaagaagtcacaggcccacctggaggctgcccaactcctcagc

SEQ ID NO: 750990 - DNA, 120 bp, Artificial Sequence
  ENSG00000206113_26 (sequence is synthesized)
tcctgtcctcccatccctgggttttcctcacagctccatcctggtcctggcaccccctgcaacctcggcagccctgccccactcaggggcctccctgtcacctggtctcagctcccacca

SEQ ID NO: 750991 - DNA, 120 bp, Artificial Sequence
  ENSG00000206113_27 (sequence is synthesized)
cgaggtgctgatctcacatccaccacctgtcagtggcatgtgcctggggaacaggagcttggattgcagggcccctgcctctaggaatgtgggacttggtctccattggatggggcctcc

SEQ ID NO: 750992 - DNA, 120 bp, Artificial Sequence
  ENSG00000206113_28 (sequence is synthesized)
agaggaagctgagcccaccaggggaaatcctggggggctgtcacatgggccatcaccaacccatcattgcccaggagcagggagcgggcactcgccccctggaaagagggcgctcatagc

SEQ ID NO: 750993 - DNA, 120 bp, Artificial Sequence
  ENSG00000206113_29 (sequence is synthesized)
aagtgtgctaattcaggctgcctgcctgtccttgcaggccacagccctctgtgccgctgtgctctggatgaacttggcctatgtgcgctgcttttctgcacggcccctgggggctgccct

SEQ ID NO: 750994 - DNA, 120 bp, Artificial Sequence
  ENSG00000206113_30 (sequence is synthesized)
ggccatgctccagctcccgctctcactacctgctcaggtgcacctgtgctgttcccccaggccacagtctgagcccaccttcccttggggtagaatgaggggttcatccttcattagcta

SEQ ID NO: 750995 - DNA, 120 bp, Artificial Sequence
  ENSG00000206113_31 (sequence is synthesized)
gggaggtggtgtgagtgggttacaaaggctacaggggttggggccaaggcctctgccgtaagagaaggcctggggcccccacccatccctgctcccagcttctggaagaggcgcctcctc

SEQ ID NO: 750996 - DNA, 120 bp, Artificial Sequence
  ENSG00000206113_32 (sequence is synthesized)
cggctggggcctggcagccagcaggggctggagaggggagcagggcctgtgtgcagagctgcaggcctccgtgggcacctctccctccacttcagcaccctctggcccccagctctttcc

SEQ ID NO: 750997 - DNA, 120 bp, Artificial Sequence
  ENSG00000206113_33 (sequence is synthesized)
ctgagcccctgagcactgtggggaagtgatgcaaacagctcgggcccaggttcatccacactcctcttcccagctaaggcctcagcacgacgggcacacctctcatcccgccggcctgcc

SEQ ID NO: 750998 - DNA, 120 bp, Artificial Sequence
  ENSG00000206113_34 (sequence is synthesized)
ctcgccttgcacgtccaaaacagacaatagcgaaggcccaggtccccttggccagaagcccgtcctgggagctggcgtcacccaccccactgcctgggcccacctgtagcccggcccctc

SEQ ID NO: 750999 - DNA, 120 bp, Artificial Sequence
  ENSG00000206113_35 (sequence is synthesized)
tggccagcccaagagcagctccagcagctcctcctatccgtccccctcatttccctcaggatctttcccgtcagccacccgtgctgctacgtctctcaccctaaaaacattttttttaag

SEQ ID NO: 751000 - DNA, 120 bp, Artificial Sequence
  ENSG00000206113_36 (sequence is synthesized)
tcctctgtactcccctgaggctcccgcggtccttcccttctatctaacagattcctcgaagtccctgccaccagcggcagctcttcctccatcctccctcacacccctccctgcggactt

SEQ ID NO: 751001 - DNA, 120 bp, Artificial Sequence
  ENSG00000206113_37 (sequence is synthesized)
cccccacccctccacccacagcgccagtctgggtcaccccgcacccccttgttgccaaatccagtggggcagcctcagctcctctgacccagctgaccccgcccccagctccggggcctt

SEQ ID NO: 751002 - DNA, 120 bp, Artificial Sequence
  ENSG00000206113_38 (sequence is synthesized)
ccgatcagcttcctgggtaccccctgcgccaggcctgcatctcacctggcagccactccttctcaggctcgggcctcccctgtcgggtgtgcggggtgcacgggctcagcggctgctctc

SEQ ID NO: 751003 - DNA, 120 bp, Artificial Sequence
  ENSG00000206113_39 (sequence is synthesized)
tgctctctttgctatacacactcctggtcccctcgcctgctgacagctcctgctcctccctccatccttgacctctcccgagcctggactcacatctccttgggtgtccagtgggcacct

SEQ ID NO: 751004 - DNA, 120 bp, Artificial Sequence
  ENSG00000206113_40 (sequence is synthesized)
cccgtgtgacacgtcagtagatgaatgaatccatgtgacctcccccagagctgctgatccgggcatccccagttcagccggcagccgctccgtctccccttgctccagtgggaaccctgg

SEQ ID NO: 751005 - DNA, 120 bp, Artificial Sequence
  ENSG00000206113_41 (sequence is synthesized)
cgcctcctgggcacccccattcctctagaccacatctgttcatcatcagctctgccttcgactctgccatgtgtgcactctgctccagctgcactggtctcctagtgtttctggaacatt

SEQ ID NO: 751006 - DNA, 120 bp, Artificial Sequence
  ENSG00000206113_42 (sequence is synthesized)
ccacgcgctccccactgcactagctgttgcctccacctgggaaactttccccctgatgctgtcttggcctgcgcagccacatagcaccttggcagggaaaggggtgtgtgtttacccctt

SEQ ID NO: 751007 - DNA, 120 bp, Artificial Sequence
  ENSG00000206127_0 (sequence is synthesized)
agtcacacagctgcctggtaggtgactggaggccttgatcggttcttattgggattttgctgctgtggccccaacccttcctccctccccaccctgcaatggcagaagaaactcaacaca

SEQ ID NO: 751008 - DNA, 120 bp, Artificial Sequence
  ENSG00000206127_1 (sequence is synthesized)
acaaattggctgcagccaagaaaaagttaaaagaatattggcagaaaaacagacctagagttccagcaggagtgaacaggaacaggaaaacaaatggcagtatccctgagacagccactt

SEQ ID NO: 751009 - DNA, 120 bp, Artificial Sequence
  ENSG00000206127_2 (sequence is synthesized)
ccggtggttgccagccacctggggattcagcaacaggtttccacagggaaggccctacatcatctgctaccctgaaagatctggagagcccgtgccaagaacgagcagtagtcctggatt

SEQ ID NO: 751010 - DNA, 85 bp, Artificial Sequence
  ENSG00000206127_3 (sequence is synthesized)
ctggagagcccgtgccaagaacgagcagtagtcctggattcaacgtccgtaaaaatcagtcgactgaagaacaccatcaaatctt

SEQ ID NO: 751011 - DNA, 120 bp, Artificial Sequence
  ENSG00000206127_4 (sequence is synthesized)
aaagggagctagaggttcaaatccagacattgatcatacagaaagaggaactaaatacggacctgtaccacatggaacgttctctcagatactttgaagaagagtccaaggacctggctg

SEQ ID NO: 751012 - DNA, 120 bp, Artificial Sequence
  ENSG00000206127_5 (sequence is synthesized)
tccgcctgcaacattcattgcagtgtaaaggagagttagagagcgctctgtctgctgtcatcgccacagagaagaagaaggcaaaccagttgtccagctgcagcaaagcacatacagagt

SEQ ID NO: 751013 - DNA, 120 bp, Artificial Sequence
  ENSG00000206127_6 (sequence is synthesized)
gggagttagagcagtccctacaggaccaggcactgctgaaagcgcagctgacacagttgaaggagtcatttcaacaactccaattagaaagagatgagtgtgctgaacatatagaaggag

SEQ ID NO: 751014 - DNA, 120 bp, Artificial Sequence
  ENSG00000206127_7 (sequence is synthesized)
agagggcccggtggcatcagaggatgagtaaaatgtcgcaggagatttgcacattaaagaaagagaagcagcaagatatgcgtcgggtagaggagctggagaggagcttgtccaaactca

SEQ ID NO: 751015 - DNA, 120 bp, Artificial Sequence
  ENSG00000206127_8 (sequence is synthesized)
acaatcagcacataagtctcctgaaccggcgacaagaagagaggattcgggaacaggaagagaggcttcggaagcaggaggagaggcttcaggagcagcacgagaagcttcggcagctgg

SEQ ID NO: 751016 - DNA, 74 bp, Artificial Sequence
  ENSG00000206127_9 (sequence is synthesized)
gagaggcttcaggagcagcacgagaagcttcggcagctggccaagccacagagcgtcttcgaggagctgaacaa

SEQ ID NO: 751017 - DNA, 120 bp, Artificial Sequence
  ENSG00000206127_10 (sequence is synthesized)
caggagaagcttggcgaggagcacctggaagcggccagccagcagaaccagcagctaacggcccagctgagcctcatggctctccctggggaaggacacggaggagaacatctggacagt

SEQ ID NO: 751018 - DNA, 120 bp, Artificial Sequence
  ENSG00000206127_11 (sequence is synthesized)
aggacccggagagcagggaggccatgagcagctttatggaccacctgaaggagaaggcagacctgagtgagctggtgaaaaaacaagaacttcgcttcattcaatactggcaagagagat

SEQ ID NO: 751019 - DNA, 120 bp, Artificial Sequence
  ENSG00000206127_12 (sequence is synthesized)
aagaacttcgcttcattcaatactggcaagagagatgccatcagaaaatccatcaccttttatcagaaccagggggccgtgccaaagatgcagcactgggaggaggacaccatcaggctg

SEQ ID NO: 751020 - DNA, 85 bp, Artificial Sequence
  ENSG00000206127_13 (sequence is synthesized)
ctgctgatgagcccggtccaggagccccagccccccaggagcttggggctgcagacaagcatggtgatcttcgtgaggtgaccct

SEQ ID NO: 751021 - DNA, 76 bp, Artificial Sequence
  ENSG00000206127_14 (sequence is synthesized)
gatgagcccggtccaggagccccagccccccaggagcttggggctgcagacaagcatggtgatcttcgtgaggtga

SEQ ID NO: 751022 - DNA, 73 bp, Artificial Sequence
  ENSG00000206127_15 (sequence is synthesized)
atttacttcctttgaatgttagactcactagttaaaagagagtgggtgtctgtggctctcactgatgttcact

SEQ ID NO: 751023 - DNA, 120 bp, Artificial Sequence
  ENSG00000206127_16 (sequence is synthesized)
ttgcctatgttctgctgttgtttgatgtaatcttaatcacagtgagctcttccttagctcaatatgtagtttgcccccaagtgtgcactgtttattactttgtaatacgccactatgagt

SEQ ID NO: 751024 - DNA, 79 bp, Artificial Sequence
  ENSG00000206127_17 (sequence is synthesized)
gatgggagtgataaccttttctctggcaggtatgtgcaagatagagtgtgtttcatctcttccggtgccaggaattagc

SEQ ID NO: 751025 - DNA, 120 bp, Artificial Sequence
  ENSG00000206127_18 (sequence is synthesized)
aagaggaaagtggcctcctctggcaggtatgtgcaagatagagtgtgtttcatctcttccggtgccaggaattagcggtgtattatggtggtgcccttaggatttgtatgtgctctgggc

SEQ ID NO: 751026 - DNA, 72 bp, Artificial Sequence
  ENSG00000206127_19 (sequence is synthesized)
atattgcatcatgagctgcagcagttgcactctttttttgactgtggatgtggaaaacctttcctagcttag

SEQ ID NO: 751027 - DNA, 120 bp, Artificial Sequence
  ENSG00000206127_20 (sequence is synthesized)
aaaacactttaaaaaaatagaaacattcttataaactaatatatgtgagatagttgaaacaaaaaggagttttagtagatggtattatactatctttgaaaatcaaggagaagtttatga

SEQ ID NO: 751028 - DNA, 120 bp, Artificial Sequence
  ENSG00000206127_21 (sequence is synthesized)
tactgttgttcgtgaatgtcaatgtattatcaggaaacgtgtctatacaaccacagagttatattttctcacaaacttctttacaaagtgaaatatgtttttgtacctctgggtttctgt

SEQ ID NO: 751029 - DNA, 120 bp, Artificial Sequence
  ENSG00000206127_22 (sequence is synthesized)
gtttctgttcgggacatattttgtgcaatatttatgtgattgtgcctatgcatgatgaatgaatgcatttcagttatgtattgcctaaatcgtaacttgatgatgcttgggaaagactca

SEQ ID NO: 751030 - DNA, 66 bp, Artificial Sequence
  ENSG00000206127_23 (sequence is synthesized)
ttagaccaaataatgcggctaattaacagtggtacgatttgtagcccgtgggtttaaaatgcactt

SEQ ID NO: 751031 - DNA, 120 bp, Artificial Sequence
  ENSG00000206127_24 (sequence is synthesized)
aaagaatggaaattgtatgacaataactcaagtctttctccaaagtgcatgcagtcttttgcgatacctcattcagccgagtatttgtgctcttcctcattcagtataaggcagctttca

SEQ ID NO: 751032 - DNA, 120 bp, Artificial Sequence
  ENSG00000206127_25 (sequence is synthesized)
ggcaacattggaatgttagagttcatcagaaacatagaattttaaactgtgagttccactgaatacattttgatttctgtaggaagaatcaaaatacctatttaaagatggcaatgtata

SEQ ID NO: 751033 - DNA, 120 bp, Artificial Sequence
  ENSG00000206127_26 (sequence is synthesized)
tggcaatgtataataatcattttaaaagtatttgattaaacctgataattttccagaaatgaaaaaaaaaatcagctctaaaaccaaagctgattttagaaaatttgaaaatgtaaatca

SEQ ID NO: 751034 - DNA, 79 bp, Artificial Sequence
  ENSG00000206127_27 (sequence is synthesized)
gttctgaaataatttaaaacattttaaaatatgaatactgtagtataaaagaaagaaatggtgggaacgaaaagcaagt

SEQ ID NO: 751035 - DNA, 120 bp, Artificial Sequence
  ENSG00000206127_28 (sequence is synthesized)
gttactgcaagactggcctttgaccttacgacccagtcccctaagcgttctcaccccgtttctggttcctctggtcacagcacaaatttccagctggaaggggaatggagactatgggac

SEQ ID NO: 751036 - DNA, 120 bp, Artificial Sequence
  ENSG00000206140_0 (sequence is synthesized)
gatcagtttgcaagtgccatctgcagtgtgggggaaccaatcttcaacttgcctgcatttggtattagtattttattaacctttcattgatccaattacggctctttgacacaattttca

SEQ ID NO: 751037 - DNA, 120 bp, Artificial Sequence
  ENSG00000206140_1 (sequence is synthesized)
tcagtgatggactaagtgtgatccggcctgacccgcctccggccggcgtgagaaggggcatgtgtcgggctacgctcgggcttcccctgccgcccattgtgatccagcccgctaggcgct

SEQ ID NO: 751038 - DNA, 120 bp, Artificial Sequence
  ENSG00000206140_2 (sequence is synthesized)
ccctgccgcccattgtgacgcctgccagccgcaggctgggtccccgaggcgggcggcatttaggctcggtctccacagccatggccgcgacgcaggagctgctgctgcagttgcagaagg

SEQ ID NO: 751039 - DNA, 120 bp, Artificial Sequence
  ENSG00000206140_3 (sequence is synthesized)
ataaccgagatggtcgccagcggaagcaggagctagagaagctgatgcgcgggctcgaggccgagagcgagagcctcaaccagcgcctgcaggacctgagcgagcgggagcggagcctgc

SEQ ID NO: 751040 - DNA, 120 bp, Artificial Sequence
  ENSG00000206140_4 (sequence is synthesized)
tgcggaggcgaagccaggcagcgcagcctctgcaaggggaggcgcgcgaggcggcgcgggagcgcgcggagcgggtgcgcagaagactggaggaggcggagcgccacaaggagtacttgg

SEQ ID NO: 751041 - DNA, 120 bp, Artificial Sequence
  ENSG00000206140_5 (sequence is synthesized)
ctgcaggagcagtgggaggagctgtcgagtcagctcttctactacggaggggaactgcagagccagaagagcacggagcagcaactcgcagcccaattggtgacgctgcagaatgaactg

SEQ ID NO: 751042 - DNA, 120 bp, Artificial Sequence
  ENSG00000206140_6 (sequence is synthesized)
gagctggcggagaccaaatgcgccttgcaggaggagaagctgcagcaggacgcgctgcagacagcggaggcctgggccatattccaggagcagaccgtagtcctgcaggtgcggccccac

SEQ ID NO: 751043 - DNA, 120 bp, Artificial Sequence
  ENSG00000206140_7 (sequence is synthesized)
tcagacgccaaggtgcctcccgcctctcctcccccagacctggggcggtgtgacgggcagcttcgcggagtgcagtacagcaccgaatcgctcatggaggagatggccagggcggaccga

SEQ ID NO: 751044 - DNA, 120 bp, Artificial Sequence
  ENSG00000206140_8 (sequence is synthesized)
gagacgcggctgttcggcggccctcgcgcgctggccatcaggcggtgcgtgctgggcgcgctgcaggtgctgctgacgctgccgctcctcttcctggggctgtcgctgctctggacggtg

SEQ ID NO: 751045 - DNA, 120 bp, Artificial Sequence
  ENSG00000206140_9 (sequence is synthesized)
ctgttggaccccggcgccgtctccgcgtggctctggagcctcacctcggagacgacgctgcgccgcctgcgctacacgctgtccccgctgctggagctgcgcgctaacgggcttctgcca

SEQ ID NO: 751046 - DNA, 120 bp, Artificial Sequence
  ENSG00000206140_10 (sequence is synthesized)
acctaagtgcagcgccccgcgcctggctccaggtggactccagggcacctggctttatttctggtgcactcctctcctgagagtgtagaccaaggttgcctaataaactcaagggatgaa

SEQ ID NO: 751047 - DNA, 120 bp, Artificial Sequence
  ENSG00000206140_11 (sequence is synthesized)
ctcatcttcatgttttctgcatctattgaagtgcgccattgagatcgtggagttcttccctgtttgtccatatggtgaacaacactgattttctgatgttgaacaatctctggaataaac

SEQ ID NO: 751048 - DNA, 120 bp, Artificial Sequence
  ENSG00000206140_12 (sequence is synthesized)
tctgtttggtttccatggatttctgtttccctttagattttgttagtaatgtattttggatttttgcatccaagttcataattgtaactggacaaataaaggcagattttaaaaggacaa

SEQ ID NO: 751049 - DNA, 120 bp, Artificial Sequence
  ENSG00000206140_13 (sequence is synthesized)
gttgggaggctaaggcggaaggatcacttgagcctgggagattgaagctgcagctagcttcgattgttccactgtactccagcctggtgacagcaggacctgcctctaaaataataatac

SEQ ID NO: 751050 - DNA, 120 bp, Artificial Sequence
  ENSG00000206140_14 (sequence is synthesized)
ttaaaaggacgagtttacctacagtctcaccaagcaatgaaagagcttatcttcctcctgtttcctttacggatcttgctcatgtattttatcttagttactttagcataaatgctaaat

SEQ ID NO: 751051 - DNA, 120 bp, Artificial Sequence
  ENSG00000206140_15 (sequence is synthesized)
caaattctttttcactagacatcatcatagctctaggcataccacataatacccaagcacattttaatcattaaaattgtttcctttttttgtggctactgtaaccacttcagcgaacca

SEQ ID NO: 751052 - DNA, 120 bp, Artificial Sequence
  ENSG00000206140_16 (sequence is synthesized)
cggggaacgcccctctacctggcgggcgcgcgagggtcggtcccgcaggcagcgccgcgaggtgcttcgcagagtaccaggctgatccgcccaggcccgcatctctgctctaggcccttg

SEQ ID NO: 751053 - DNA, 120 bp, Artificial Sequence
  ENSG00000206140_17 (sequence is synthesized)
gtgcctcccgcctctcctcccccagacctggggcggtaagtctcccaacccaccgccaggacgcctccccgaggcctcagtccgcactctcacccgctccaggaggtgcaggtgaaggtg

SEQ ID NO: 751054 - DNA, 120 bp, Artificial Sequence
  ENSG00000206140_18 (sequence is synthesized)
atggaggctgcggaggagctggacgcctggcagagtggccgggaactgtaagggagttgggcctgcgggcgcggcggggcactgtggggccgggatgggctcccacctgcatgcctgtcc

SEQ ID NO: 751055 - DNA, 120 bp, Artificial Sequence
  ENSG00000206140_19 (sequence is synthesized)
cctggaatggggctggacccagggtggggtggggcagggcgggcggaagggggcaggatccgggggtggggtgaggtaggaccggcggagaggtcggcaccgccccaggaccccgtccgc

SEQ ID NO: 751056 - DNA, 120 bp, Artificial Sequence
  ENSG00000206140_20 (sequence is synthesized)
cgtctgtctcccatgtcatgtaggagcttgactggcttttcagcctccaaagattccttccttccttacagctcatggatttagagccactccccagtattgtaaacagcatttttagtt

SEQ ID NO: 751057 - DNA, 120 bp, Artificial Sequence
  ENSG00000206140_21 (sequence is synthesized)
tttcaggatacataatttgccgtattgccagaaacttgtacatagcatttgacactttgccaatctgacaagctgccttttcaagtattgtgatttgaaattatttctactatatttgaa

SEQ ID NO: 751058 - DNA, 120 bp, Artificial Sequence
  ENSG00000206140_22 (sequence is synthesized)
tttatttctaccatttgtaacatgttgatcctgatttttcaatgctcccctttccttctgtttatttgggaagtcacactctgtattctggtattcttactacttgagctcagctcatcg

SEQ ID NO: 751059 - DNA, 120 bp, Artificial Sequence
  ENSG00000206140_23 (sequence is synthesized)
ctgtcatcttcccctaaaccgccttaaagcatcttaggtcttttccctctgatcacatgtgctacttttttttttcttttctttggagacggagtcttgctctgcgcccaggatggagtg

SEQ ID NO: 751060 - DNA, 120 bp, Artificial Sequence
  ENSG00000206140_24 (sequence is synthesized)
ctggccaacattttctccagatatcttactgagtcctaatttccactgtggccagagaatacactctgcatgattttaattctatctcatttactgagacttgttttgtggcccagcaca

SEQ ID NO: 751061 - DNA, 88 bp, Artificial Sequence
  ENSG00000206140_25 (sequence is synthesized)
tctatctcatttactgagacttgttttgtggcccagcacaaagcttgtaatgaacactgagaagtgtattgttgctgttgacagagtg

SEQ ID NO: 751062 - DNA, 63 bp, Artificial Sequence
  ENSG00000206140_26 (sequence is synthesized)
cgccaggctggagtacagtggtgtgcaatctcggctcactccaacctccacctactccaccat

SEQ ID NO: 751063 - DNA, 68 bp, Artificial Sequence
  ENSG00000206140_27 (sequence is synthesized)
atccgcctgaacagagtgtgttctaaatacccagcaggtccaggtgagtgacaggcttgttcagggct

SEQ ID NO: 751064 - DNA, 120 bp, Artificial Sequence
  ENSG00000206140_28 (sequence is synthesized)
acccagcaggtccaggtgagtgacaggcttgttcagggctcctgtgtttactttcttgttggtagcgccgtcaattgcttattgtgaaatgccccttcataaacacccatacacattttg

SEQ ID NO: 751065 - DNA, 120 bp, Artificial Sequence
  ENSG00000206140_29 (sequence is synthesized)
tcctcgcccttgttgcctccccgtccctgtctcccctgacacccgttcctccagaagcccggtaaaccccgcccttacaagccccgcccctagctcttctactacggaggggaactgcag

SEQ ID NO: 751066 - DNA, 120 bp, Artificial Sequence
  ENSG00000206140_30 (sequence is synthesized)
cggggtgggctggagcgggacaaccctccccgtcccccccgcggtaccgcctccccctcctcctggaaaccgggccggcgccgcgggcgcggaggtagctggatgcggccctctctcccc

SEQ ID NO: 751067 - DNA, 120 bp, Artificial Sequence
  ENSG00000206150_0 (sequence is synthesized)
gacattccctcctcccagactgatttttacctagaaacctttctagcctctcctcatctcttgactgtcttggccttggcaagaagaatacacgtccctacccagctatcttcagctcct

SEQ ID NO: 751068 - DNA, 120 bp, Artificial Sequence
  ENSG00000206150_1 (sequence is synthesized)
gtccttcctcccagctgccagagaattgtcagcaggaggaatggcaccagctgtgacccggctccttttcctccagcttgttctggggccaactctggtcatggacatcaagatgcagat

SEQ ID NO: 751069 - DNA, 120 bp, Artificial Sequence
  ENSG00000206150_2 (sequence is synthesized)
tggcagcaggaacttctataccttaagcattgactatcccagggttaactacccaaagggtttccggggctattgtaatggtctgatgtcctatatgcgaggcaagatgcaaaattcaga

SEQ ID NO: 751070 - DNA, 120 bp, Artificial Sequence
  ENSG00000206150_3 (sequence is synthesized)
ttgcccaaagatccattatgtgatacatgccccttggaaggccatccagaagttctgcaagtatagtgacagcttctgtgagaattacaatgaatactgcacactcacccaggattccct

SEQ ID NO: 751071 - DNA, 120 bp, Artificial Sequence
  ENSG00000206150_4 (sequence is synthesized)
ccccatcacggtctgctccctgagccaccaacagccacccactagctgctactacaatagcaccctaaccaaccagaagctctacctactctgctcccgcaagtatgaagctgatccaat

SEQ ID NO: 751072 - DNA, 120 bp, Artificial Sequence
  ENSG00000206150_5 (sequence is synthesized)
aggtatcgctggtctctattcgggaatttaattcctgagccactccccaacctctaccaccacaggccagctgtctccatttccaacactctgatccctgtaacaagacttccttcctga

SEQ ID NO: 751073 - DNA, 120 bp, Artificial Sequence
  ENSG00000206150_6 (sequence is synthesized)
tgcaaagtggtgctatcttctaggttctttccagcttgtttaccccctcttcgcccccacctcctcatcatccttcctctcccagagacagtaaaacccacccaagaagttgactgtgtc

SEQ ID NO: 751074 - DNA, 120 bp, Artificial Sequence
  ENSG00000206150_7 (sequence is synthesized)
cagttggcagtgactgtccacccactgggccagatcctaagtcctggatggaggcccagggcctcagctcacaccatggcaacaggcaccagctccgagtctcacctccccatccccacc

SEQ ID NO: 751075 - DNA, 120 bp, Artificial Sequence
  ENSG00000206150_8 (sequence is synthesized)
agccttctcatgtcagcctcccccagttcccttataattccctccactcacccacctactcaggggatatggctagctataggaacctccctgaggccctcagactcatgttagcctcac

SEQ ID NO: 751076 - DNA, 120 bp, Artificial Sequence
  ENSG00000206150_9 (sequence is synthesized)
ttccccacaacccccagtttccagcctgcttctctctgtgaaatcatggtttctcccttcatataactgtcctctcctgcttcctcttaccatggagcctaggactgtctcccccacact

SEQ ID NO: 751077 - DNA, 120 bp, Artificial Sequence
  ENSG00000206150_10 (sequence is synthesized)
cccaacaaccgtagtcaccctgccttcctttttccaacctctttttcttccagtcttcttaccttggctcactggcatttcaaggtatcttctctcacccattccccagaggttcctgct

SEQ ID NO: 751078 - DNA, 120 bp, Artificial Sequence
  ENSG00000206150_11 (sequence is synthesized)
tcccttctcttccagaagctcctcccaaatcccccagactccagagtctgcccctgaccaggcagcgaatgaggcaggcccggctctaatcgaacataaatttctaaaaccacatctgag

SEQ ID NO: 751079 - DNA, 120 bp, Artificial Sequence
  ENSG00000206150_12 (sequence is synthesized)
tatgtaagatgtaaccattgggggaaactgggtgaagggcacacgagccccctctgtaccattttttgtaacttcctgtcaacccataatcaattcaaaataaaaagttaataacacaca

SEQ ID NO: 751080 - DNA, 120 bp, Artificial Sequence; identical to SEQ ID NO: 692591
  ENSG00000206172_0 (sequence is synthesized)

SEQ ID NO: 751081 - DNA, 120 bp, Artificial Sequence; identical to SEQ ID NO: 692592
  ENSG00000206172_1 (sequence is synthesized)

SEQ ID NO: 751082 - DNA, 120 bp, Artificial Sequence
  ENSG00000206172_2 (sequence is synthesized)
ctcctaagccactgcctgctggtgaccctggccgcccacctccccgccgagttcacccctgcggtgcacgcctccctggacaagttcctggcttctgtgagcaccgtgctgacctccaaa

SEQ ID NO: 751083 - DNA, 120 bp, Artificial Sequence
  ENSG00000206172_3 (sequence is synthesized)
taccgttaagctggagcctcggtggccatgcttcttgccccttgggcctccccccagcccctcctccccttcctgcacccgtacccccgtggtctttgaataaagtctgagtgggcggca

SEQ ID NO: 751084 - DNA, 120 bp, Artificial Sequence
  ENSG00000206172_4 (sequence is synthesized)
atctgggtcgaggggcgagatggcgccttcctcgcagggcagaggatcacgcgggttgcgggaggtgtagcgcaggcggcggctgcgggcctgggccctcggccccactgaccctcttct

SEQ ID NO: 751085 - DNA, 120 bp, Artificial Sequence; identical to SEQ ID NO: 692596
  ENSG00000206172_5 (sequence is synthesized)

SEQ ID NO: 751086 - DNA, 120 bp, Artificial Sequence
  ENSG00000206177_0 (sequence is synthesized)
agagcacgtcaggcggcgccatgctcagcgcccaggagcgcgcccaaatcgcgcaggtctgggacctgattgcgggccacgaggcgcaattcggggcggagctgctgctcaggctcttca

SEQ ID NO: 751087 - DNA, 120 bp, Artificial Sequence
  ENSG00000206177_1 (sequence is synthesized)
cggtgtaccccagcaccaaggtctacttcccgcacctgagcgcctgccaggacgcgacgcagctgctgagccacgggcagcgcatgctggcggctgtgggcgcggcggtgcagcacgtgg

SEQ ID NO: 751088 - DNA, 120 bp, Artificial Sequence
  ENSG00000206177_2 (sequence is synthesized)
cccgctggcggacctgcacgcgctcgtgctgcgcgtggacccagccaactttccgctgctaatccagtgtttccacgtcgtgctggcctcccacctgcaggacgagttcaccgtgcaaat

SEQ ID NO: 751089 - DNA, 120 bp, Artificial Sequence
  ENSG00000206177_3 (sequence is synthesized)
gcaagcggcgtgggacaagttcctgactggtgtggccgtggtgctgaccgaaaaataccgctgagccctgtgctgcgcaggccttggtctgtgcctgtcaataaacagaggcccgaacca

SEQ ID NO: 751090 - DNA, 120 bp, Artificial Sequence
  ENSG00000206177_4 (sequence is synthesized)
gctcttcctcagccacccgcagaccaagacctacttcccgcacttcgacctgcacccggggtccgcgcagttgcgcgcgcacggctccaaggtggtggccgccgtgggcgacgcggtgaa

SEQ ID NO: 751091 - DNA, 120 bp, Artificial Sequence
  ENSG00000206181_0 (sequence is synthesized)
aagagggtcagggctagagccgtgagtgtcagcctgggatgggctacataaggcccagctctggcaccagagcttcattctttgttgcacagcaaactgcagaggtcactccaggctgtg

SEQ ID NO: 751092 - DNA, 120 bp, Artificial Sequence
  ENSG00000206181_1 (sequence is synthesized)
gctccacatcccgaggaacaaaagcgggcctgctcagctgtctgcaaggacggccgttccagaccaagtggcctgctgctccgaggacccagctcgctccaggctgtgactccacatccc

SEQ ID NO: 751093 - DNA, 120 bp, Artificial Sequence
  ENSG00000206181_2 (sequence is synthesized)
gaggtcgctgcctggcgaccgggcagcgaggaccggccaccccagacttcctgtcccgcagccccaaagacagagctgcgaccgccgggacagcgacgcctgcacagctctggtgagatg

SEQ ID NO: 751094 - DNA, 120 bp, Artificial Sequence
  ENSG00000206181_3 (sequence is synthesized)
gcggcagggtccactacgctgcacgcagtggagaagctgcaggtgcgtctggccactaagacggagccgaaaaagctagagaaatatttgcagaaactctccgccttgcccatgacggca

SEQ ID NO: 751095 - DNA, 120 bp, Artificial Sequence
  ENSG00000206181_4 (sequence is synthesized)
gacatcctggcggagactggaatcagaaagacggtgaagcgcctgcggaagcaccagcacgtgggcgactttgccagagacttagcggcccggtggaagaagctggtgctcgtggaccga

SEQ ID NO: 751096 - DNA, 120 bp, Artificial Sequence
  ENSG00000206181_5 (sequence is synthesized)
aacacccggcctggcccacaggaccctgaggagagcgcttcccgacagcgcttcggggaggctcttcaggaccaggaaaaggcctggggcttcccagaaaacgcgacggcccccaggagc

SEQ ID NO: 751097 - DNA, 120 bp, Artificial Sequence
  ENSG00000206181_6 (sequence is synthesized)
ccatctcacagccctgagcacagacggacagcacgcagaacacctccggggcaacagagacctcacccgaggtctcacagtcgcgagcccagagctgagagaaagtgccccagaatagcc

SEQ ID NO: 751098 - DNA, 120 bp, Artificial Sequence
  ENSG00000206181_7 (sequence is synthesized)
ccagctgattccggccgctatcgggcctctccaacgcgcacagctcccctccggatgcccgagggccctgagcccgctgcgcccgggaagcaacccggaagaggccacactcacgcggct

SEQ ID NO: 751099 - DNA, 120 bp, Artificial Sequence
  ENSG00000206181_8 (sequence is synthesized)
cagggcgggcctctgctgtgtccaggctgccagggccaaccccaggggaaagccgttgtgagccacagcaaggggcacaaatcgtctcgccaggaaaaacgccccttgtgtgcccaggga

SEQ ID NO: 751100 - DNA, 120 bp, Artificial Sequence
  ENSG00000206181_9 (sequence is synthesized)
gattggcactcccctactttgatcagggagaaatcatgcggggcctgcttaagagaggaaaccccaaggatgccctcctgggcaagtgccagggacaggcagccttcggacttcaagaca

SEQ ID NO: 751101 - DNA, 120 bp, Artificial Sequence
  ENSG00000206181_10 (sequence is synthesized)
gacaaggaaggggggcaagctggcagcggccagcgtgtccctgccttggaggaggctccagacagtcaccagaagaggcctcagcacagtcactcgaacaagaagaggcccagtctagac

SEQ ID NO: 751102 - DNA, 120 bp, Artificial Sequence
  ENSG00000206181_11 (sequence is synthesized)
ggccgggacccaggaaatgggacacacggcctgtcgcccgaggagaaagagcagctttccaacgaccgagagactcaagaggggaagccaccgactgctcatttggacagaacgtccgtg

SEQ ID NO: 751103 - DNA, 120 bp, Artificial Sequence
  ENSG00000206181_12 (sequence is synthesized)
gcccactctgtcatgtgaaaaatacctcacctacgatcagttgcggaagcaaaagaaaaagactggaaaatctgccaccactgcacttggagataaacaaaggaaagcaaacgaatccaa

SEQ ID NO: 751104 - DNA, 120 bp, Artificial Sequence
  ENSG00000206181_13 (sequence is synthesized)
gggcactcgtgagtcctgggattcggctaagaaattgcctcctgtccaggaaagccagtcagagaggctgcaggcggccggcgctgattccgccgggccgaaaacggtgcccagccatgt

SEQ ID NO: 751105 - DNA, 120 bp, Artificial Sequence
  ENSG00000206181_14 (sequence is synthesized)
cttctcagagctctgggacctctcagaggcctggatgcaggccaactacgatccgctttcggattctgactccatgacctcccaggcaaagccagaagcactctcttcaccaaagttccg

SEQ ID NO: 751106 - DNA, 120 bp, Artificial Sequence
  ENSG00000206181_15 (sequence is synthesized)
ggaggaagctgctttccctggacgcagagtgaatgctaagatgccggtgtactcgggctccaggcctgcctgccagctccaggtgccgacgctgcgccagcagtgtgcccaggtgcttag

SEQ ID NO: 751107 - DNA, 120 bp, Artificial Sequence
  ENSG00000206181_16 (sequence is synthesized)
aaacaatccggacgccctcagcgacgtgggagaggtcccctactgggttcttgaacctgttctggaagggtggaggcccgatcagctgtatcgcagaaagaaagacaatcacgcactcgt

SEQ ID NO: 751108 - DNA, 120 bp, Artificial Sequence
  ENSG00000206181_17 (sequence is synthesized)
tagagagacagacgaattacggaggaatcattgtttccaggacttcaaggaagaaaagccacaggaaaacaaaacttggagggagcagtacctgcggcttccggacgccccagagcagcg

SEQ ID NO: 751109 - DNA, 120 bp, Artificial Sequence
  ENSG00000206181_18 (sequence is synthesized)
gctgagagtaatgacaacgaatatccgatctgcacgtggaaacaaccccaacggcagagaggcaaagatgatctgtttcaaatctgtggccaagacgccttatgatacttcaaggaggca

SEQ ID NO: 751110 - DNA, 120 bp, Artificial Sequence
  ENSG00000206181_19 (sequence is synthesized)
agagaagtctgcaggagacgctgaccccgaaaatggggagatcaagccagcctccaagcccgcgggaagcagccacactccctccagccagagcagcagcggcggtggcagagacagcag

SEQ ID NO: 751111 - DNA, 120 bp, Artificial Sequence
  ENSG00000206181_20 (sequence is synthesized)
cagcagcatccttcgctggctccctgagaagcgggccaacccctgcctgagcagcagcaatgagcacgcggcgcccgcggccaaaacccggaaacaggctgccaagaaagtggccccgct

SEQ ID NO: 751112 - DNA, 120 bp, Artificial Sequence
  ENSG00000206181_21 (sequence is synthesized)
gatggccaaggcaattcgagactacaagagaagattctcccgacgataaactcaggacttgccttgcagataaaatctggggggatttttgcattggcaaagtcaatgcgggttggggaa

SEQ ID NO: 751113 - DNA, 120 bp, Artificial Sequence
  ENSG00000206181_22 (sequence is synthesized)
cgaaacttccaatggacaccagaacctttaacttggtgcaaagttgagcctttgaattctgcaggtgtcatgtgctggccctgtgattttgcctcccacacccagccactacctcccagc

SEQ ID NO: 751114 - DNA, 120 bp, Artificial Sequence
  ENSG00000206181_23 (sequence is synthesized)
ttggagaacacctcagaattcagaagatatgaacgcattgggaacaattctattttggatgttcactgataatttttaaaaacaccctagttgtaatcataaataaggaaaaagatgtga

SEQ ID NO: 751115 - DNA, 120 bp, Artificial Sequence
  ENSG00000206181_24 (sequence is synthesized)
gatttcctttttcctttcttttttttttcgaaatcaagtagataagaacttcttagacaaaaacacacaagccattagttgacactgataactccgaatacataaaatgtttgctgttgc

SEQ ID NO: 751116 - DNA, 120 bp, Artificial Sequence
  ENSG00000206190_0 (sequence is synthesized)
ggccgcgagtgatgataacctaagaggccggcgcgggcgggcgtgagcggcggaggagccgggcgcggcgacacgcggccatggagcgggagccggcggggaccgaggagcccgggcctc

SEQ ID NO: 751117 - DNA, 80 bp, Artificial Sequence
  ENSG00000206190_1 (sequence is synthesized)
ggagccggcggggaccgaggagcccgggcctccgggacggcggaggcgccgagagggcaggacgcgcacggtgcgctcca

SEQ ID NO: 751118 - DNA, 120 bp, Artificial Sequence
  ENSG00000206190_2 (sequence is synthesized)
cgcggccaagggcgagcggcgacggcggcgcgggtgtgcccagcacctggccgacaaccggctcaagactaccaagtacacgctgctgtccttcctgcccaagaacctgttcgagcagtt

SEQ ID NO: 751119 - DNA, 120 bp, Artificial Sequence
  ENSG00000206190_3 (sequence is synthesized)
ccaccgcccggccaacgtgtactttgtcttcatcgcgctgctcaacttcgtgccggcggtgaacgccttccagcccggcctggcactggcgccggtgctcttcatcctggccatcacggc

SEQ ID NO: 751120 - DNA, 120 bp, Artificial Sequence
  ENSG00000206190_4 (sequence is synthesized)
cttcagggacctgtgggaggactacagccgccaccgctccgaccacaagatcaaccacctgggctgcctggtcttcagcagggaagaaaagaaatacgtgaaccgattctggaaagaaat

SEQ ID NO: 751121 - DNA, 120 bp, Artificial Sequence
  ENSG00000206190_5 (sequence is synthesized)
ccacgtgggagactttgtgcgtcttcgctgcaacgaaatcttccctgcggacattctgctgctctcctccagtgaccccgacgggctatgccacatcgagaccgccaacctggatggaga

SEQ ID NO: 751122 - DNA, 120 bp, Artificial Sequence
  ENSG00000206190_6 (sequence is synthesized)
gaccaacctgaagcggcggcaggtggtccgcggcttctcggagcttgtctccgaattcaatcctttgacgttcaccagcgtgatcgaatgcgagaagccaaacaacgacctgagtaggtt

SEQ ID NO: 751123 - DNA, 120 bp, Artificial Sequence
  ENSG00000206190_7 (sequence is synthesized)
tcgcggctgcatcatacatgacaacgggaaaaaggccgggctgtataaagaaaacctgctgctgaggggctgcacccttaggaacacggacgcagtcgtcggcattgtcatctacgcagg

SEQ ID NO: 751124 - DNA, 120 bp, Artificial Sequence
  ENSG00000206190_8 (sequence is synthesized)
acatgaaaccaaggctctgctgaacaacagtgggccccgctacaagcgcagcaagctggagaggcagatgaactgcgacgtgctctggtgtgtcctgctccttgtttgcatgtctctgtt

SEQ ID NO: 751125 - DNA, 120 bp, Artificial Sequence
  ENSG00000206190_9 (sequence is synthesized)
ttcagcagtcggacatggactgtggatatggcggtatcaagagaagaagtcattattttatgtccccaagtctgatggaagctccttatccccagtcacagctgcagtttactcattttt

SEQ ID NO: 751126 - DNA, 120 bp, Artificial Sequence
  ENSG00000206190_10 (sequence is synthesized)
aacaatgataatagttctgcaggttttgatcccaatttccttatacgtttccattgaaattgttaaagcatgccaagtgtacttcattaaccaggacatgcagttgtatgacgaagaaac

SEQ ID NO: 751127 - DNA, 120 bp, Artificial Sequence
  ENSG00000206190_11 (sequence is synthesized)
agactcgcagctgcagtgccgagctctgaacatcacggaagacttaggacagatacagtacattttctcagataaaactggcactttgacagagaataagatggttttccgaagatgcac

SEQ ID NO: 751128 - DNA, 120 bp, Artificial Sequence
  ENSG00000206190_12 (sequence is synthesized)
tgtgtctggtgtagaatattctcatgatgcaaatgcgcagcgtctggccaggtaccaagaggcagactcggaggaggaggaggtggtgcccagagggggctcggtgtcccagcgcggcag

SEQ ID NO: 751129 - DNA, 120 bp, Artificial Sequence
  ENSG00000206190_13 (sequence is synthesized)
catcggcagccaccagagtgtccgggtggtgcacagaacccagagcaccaagtcccaccggcgcacgggcagccgggccgaggccaagagggccagcatgctgtccaagcacacggcctt

SEQ ID NO: 751130 - DNA, 120 bp, Artificial Sequence
  ENSG00000206190_14 (sequence is synthesized)
cagcagccccatggagaaggatatcacgcccgacccaaagctgctggagaaggtgagtgagtgtgacaagagcctagccgtggcgaggcatcaggagcacctgctggcccacctctcgcc

SEQ ID NO: 751131 - DNA, 120 bp, Artificial Sequence
  ENSG00000206190_15 (sequence is synthesized)
tgagctgtctgacgtctttgatttcttcatcgcactcaccatctgcaacacagtcgtcgtcacgtccccggatcagccacgaacaaaggtgagggtgaggtttgagctgaagtccccggt

SEQ ID NO: 751132 - DNA, 120 bp, Artificial Sequence
  ENSG00000206190_16 (sequence is synthesized)
gaagacgatagaagacttcctgcggaggttcacacccagctgcctgacctcaggctgcagcagcatcgggagcctggccgccaacaagtccagccacaagttgggctccagcttcccgtc

SEQ ID NO: 751133 - DNA, 120 bp, Artificial Sequence
  ENSG00000206190_17 (sequence is synthesized)
caccccgtccagcgacggcatgcttctcaggctggaggagaggctgggccagcccacctcggccatcgccagcaacggctacagcagccaggcggacaactgggcctcggagcttgctca

SEQ ID NO: 751134 - DNA, 120 bp, Artificial Sequence
  ENSG00000206190_18 (sequence is synthesized)
ggagcaggagtcagagcgcgagctgcggtacgaggcggagagcccggatgaggccgcactggtgtatgcggccagagcctacaactgcgtgcttgtggagcggctgcacgaccaagtgtc

SEQ ID NO: 751135 - DNA, 120 bp, Artificial Sequence
  ENSG00000206190_19 (sequence is synthesized)
agtggagctgccccacctgggcaggctcaccttcgagctcctgcacacactgggtttcgattccgtccgcaagaggatgtcagtggtgatccggcacccgcttaccgatgagatcaacgt

SEQ ID NO: 751136 - DNA, 120 bp, Artificial Sequence
  ENSG00000206190_20 (sequence is synthesized)
ctacaccaagggggccgactcagtggtcatggatctcctgcagccctgctcttcagttgacgccagagggaggcatcaaaaaaagattcggagcaaaactcagaattacctcaacgtgta

SEQ ID NO: 751137 - DNA, 120 bp, Artificial Sequence
  ENSG00000206190_21 (sequence is synthesized)
tgcggcggaaggcctgcgcaccttgtgcatcgccaagagagttctgagtaaagaagagtatgcctgctggttgcaaagccacctagaagccgaatcctccctggaaaacagcgaggagct

SEQ ID NO: 751138 - DNA, 120 bp, Artificial Sequence
  ENSG00000206190_22 (sequence is synthesized)
cctcttccagtctgccattcgcctggagaccaacctgcacttgttaggtgccactgggattgaagaccgcctgcaggacggagtccctgaaactatttctaaattgcgtcaagcgggcct

SEQ ID NO: 751139 - DNA, 120 bp, Artificial Sequence
  ENSG00000206190_23 (sequence is synthesized)
gcagatttgggttctcactggtgacaaacaagaaacagctgtcaacattgcatatgcctgcaaactgctggaccacgacgaggaggtcatcaccctgaatgccacctcccaggaggcgtg

SEQ ID NO: 751140 - DNA, 120 bp, Artificial Sequence
  ENSG00000206190_24 (sequence is synthesized)
tgcagccctgctagaccagtgcctatgctacgtgcagtccagaggcctccagagagcccctgagaagaccaagggcaaagtgagcatgaggttctcctctctctgcccaccctccacgtc

SEQ ID NO: 751141 - DNA, 120 bp, Artificial Sequence
  ENSG00000206190_25 (sequence is synthesized)
cactgcctctggccgcagacccagcctcgtgatcgatgggagaagcctggcctacgctctcgagaaaaacctggaggacaaattcctcttccttgccaagcagtgccgctccgtcctctg

SEQ ID NO: 751142 - DNA, 120 bp, Artificial Sequence
  ENSG00000206190_26 (sequence is synthesized)
ctgtcggtcgacgcctctgcagaagagcatggtggtgaagctggtgcggagcaagctcaaggccatgaccctggccataggtgatggagccaatgatgtcagcatgatccaggtggcaga

SEQ ID NO: 751143 - DNA, 120 bp, Artificial Sequence
  ENSG00000206190_27 (sequence is synthesized)
tggagaggctcttgattcttcacgggcattggtgctactcccgacttgccaacatggtgctgtacttcttctacaaaaacacaatgttcgtgggcctcctgttttggttccagtttttct

SEQ ID NO: 751144 - DNA, 120 bp, Artificial Sequence
  ENSG00000206190_28 (sequence is synthesized)
gtggcttctctgcatctaccatgattgaccagtggtatctaatcttctttaatctgctcttctcgtcacttcccccgctcgtgactggggtgctggacagggatgtgccagccaatgtgc

SEQ ID NO: 751145 - DNA, 120 bp, Artificial Sequence
  ENSG00000206190_29 (sequence is synthesized)
tgctgaccaacccgcagctctacaagagtggccagaacatggaggaataccggccacgaacgttctggtttaacatggccgacgccgccttccagagcctggtttgcttttccattcctt

SEQ ID NO: 751146 - DNA, 120 bp, Artificial Sequence
  ENSG00000206190_30 (sequence is synthesized)
acctggcctactatgactcgaacgtggacctgtttacctgggggacccctattgtgacaatcgcgctgctcactttcctgctccacctgggcattgaaaccaaaacctggacctggctca

SEQ ID NO: 751147 - DNA, 120 bp, Artificial Sequence
  ENSG00000206190_31 (sequence is synthesized)
actggataacgtgtggcttcagtgtccttttgtttttcaccgtggctttgatttacaatgcgtcttgtgccacgtgctatcctccgtccaacccttactggactatgcaagccttactgg

SEQ ID NO: 751148 - DNA, 120 bp, Artificial Sequence
  ENSG00000206190_32 (sequence is synthesized)
gtgacccagtgttttacttgacttgcctgatgacgcctgtcgctgcactgctgcccagattgtttttcagatccctccaggggagggttttccccacacaacttcagctggcacgtcagt

SEQ ID NO: 751149 - DNA, 120 bp, Artificial Sequence
  ENSG00000206190_33 (sequence is synthesized)
tgaccaggaagtcccccaggagatgcagtgctcccaaagagacctttgctcagggacgcctcccgaaggactcgggaaccgagcactcatcagggaggacagtcaagacctctgtgcccc

SEQ ID NO: 751150 - DNA, 120 bp, Artificial Sequence
  ENSG00000206190_34 (sequence is synthesized)
tgtcccagccttcttggcacacacagcagccggtctgctccctggaggccagcggggagcccagcacagtggacatgagcatgccagtgagggagcacaccctgctggaggggctgagcg

SEQ ID NO: 751151 - DNA, 120 bp, Artificial Sequence
  ENSG00000206190_35 (sequence is synthesized)
caccggcccccatgtcctctgcgccaggggaggctgtcctgaggagtccaggagggtgtcctgaggagtccaaggtgagagctgccagcaccggcagggtgacccccctgtcttccctct

SEQ ID NO: 751152 - DNA, 120 bp, Artificial Sequence
  ENSG00000206190_36 (sequence is synthesized)
tcagcctgcctaccttcagcttactcaactggatttcctcctggtcgctggtcagcaggctggggagtgtcttacagttctcccggacggagcagcttgcagatggacaagcgggacgtg

SEQ ID NO: 751153 - DNA, 120 bp, Artificial Sequence
  ENSG00000206190_37 (sequence is synthesized)
gacttcctgtccagccccactcaggccgatcaggacttcaagggccagaccacagactacttataggagcatcttcaaggcggtcacagtgaaaaccttgaaatggccttttttaatata

SEQ ID NO: 751154 - DNA, 120 bp, Artificial Sequence
  ENSG00000206190_38 (sequence is synthesized)
tataaataaatgttaatattatttatgtttattatttgcacagaagagttctagggagatgtatttctaaatgtttcccaggctaatacaggaaacaagaggtaccaaaaaagaaagttt

SEQ ID NO: 751155 - DNA, 120 bp, Artificial Sequence
  ENSG00000206190_39 (sequence is synthesized)
attttttaaaattctaagtagagtatattgaaaagaaaaagaagagccttaacatatataaaagtttaaagaagagtaacacttgaaaagtgtgtttagatttattttttcatctcattt

SEQ ID NO: 751156 - DNA, 120 bp, Artificial Sequence
  ENSG00000206190_40 (sequence is synthesized)
ttaagaacaagcagtacgatttgttttcttcaacatgtgtgactgcgcactgagtacaaatgtgtgactgctcatggttaatgcaggcaggtgtgaacatgggggaacaatgagcagaga

SEQ ID NO: 751157 - DNA, 120 bp, Artificial Sequence
  ENSG00000206190_41 (sequence is synthesized)
tggcagagggcagagcacatggcccccagaggcttccagtctcactgacacaggagggctgggctccacttcatccagatgaaggaaaggaagacctcaagaaaaattcacagttgagtg

SEQ ID NO: 751158 - DNA, 120 bp, Artificial Sequence
  ENSG00000206190_42 (sequence is synthesized)
catcccagcattctgttccgggcaggcatttcaggaagaccgccttgtaggtattacatccctggtgtcgtattttgcctgttaaatcgtaacaagcaataaacaactttcactttgcaa

SEQ ID NO: 751159 - DNA, 120 bp, Artificial Sequence
  ENSG00000206190_43 (sequence is synthesized)
agacagtgtgtccagttaccactggtgtatgaaatgattaatacctgacctcacagagtatgatctcagggcacttccgtaaggcaagtccttttagaggctatgaagaaaacagctgca

SEQ ID NO: 751160 - DNA, 120 bp, Artificial Sequence
  ENSG00000206190_44 (sequence is synthesized)
tggcacataccaaagctgctgcacagctggccaccatggcaccctgcaccaggccatcagcaccacgtgccaaggagctcagcggtcttcaggcatttttgtaatgagccattagttctg

SEQ ID NO: 751161 - DNA, 120 bp, Artificial Sequence
  ENSG00000206190_45 (sequence is synthesized)
tccctctaaaactagaaaaggaagggcaggaaatgataacaacccaaggcaatgatatggcatgtcatcttccgagcccttctttctactttgtcaaacagttcttagttgctggctctg

SEQ ID NO: 751162 - DNA, 120 bp, Artificial Sequence
  ENSG00000206190_46 (sequence is synthesized)
ctcggcaccgggactgtgaagggtgtactccctgctgtgtgggagggacctagggcctctttggatgctgtcttcgaggacagcaatgcagagagggcataggatctgaggacaaggaaa

SEQ ID NO: 751163 - DNA, 120 bp, Artificial Sequence
  ENSG00000206190_47 (sequence is synthesized)
ttcctcagcatggcgtatcaggaaagcatggctcattctgcaatgagccatgagtgtgggccatcgcaagtcacagaaaatgcacctcattccagtcaagcagaaaaacaggcacaggct

SEQ ID NO: 751164 - DNA, 120 bp, Artificial Sequence
  ENSG00000206190_48 (sequence is synthesized)
cagtgtaggtcccaagagagggtgcctggactcagcaactcagacctgggcttttctcccagctttcagggacagctttgtcctgagtctgcctctgttcacggggatgcttggctggag

SEQ ID NO: 751165 - DNA, 120 bp, Artificial Sequence
  ENSG00000206190_49 (sequence is synthesized)
tcacccccaggacttatccatgcatcactattcagaagacacagagggcccctctctccacattccaaacagagtcctggtttcctcagcctcaccctgcatagcttgcacaacatcctc

SEQ ID NO: 751166 - DNA, 120 bp, Artificial Sequence
  ENSG00000206190_50 (sequence is synthesized)
agaaccattcactggcaaatggaggggaacgtgctgactgggactcccagctggagctgggaggagaggtccacttcccttagaacacctgagctgctgcatgagtggacgtcagaagaa

SEQ ID NO: 751167 - DNA, 120 bp, Artificial Sequence
  ENSG00000206190_51 (sequence is synthesized)
tctctatgccctgttaaatggggagacaaaggggtggtgggggcttcagccagtgatttcggaccgaaggtgacagccgtcccaaccctgcccagcctgatgccacctcctctgttcttg

SEQ ID NO: 751168 - DNA, 120 bp, Artificial Sequence
  ENSG00000206190_52 (sequence is synthesized)
gaacaacgcataggaaaagaatctcctttggaaggtgacactgctccctgaattaaggtaatggttgcgagcaccaagtacaaggactagacgcatatttacctgcgtatctgagagttc

SEQ ID NO: 751169 - DNA, 120 bp, Artificial Sequence
  ENSG00000206190_53 (sequence is synthesized)
cagattcccagcttccagatgatccttgcacagacaacctaccttctttccagaggatgtctttctcctctggagagtagatgcttgctcttgggaaacggaatgaccttggcgctggct

SEQ ID NO: 751170 - DNA, 120 bp, Artificial Sequence
  ENSG00000206190_54 (sequence is synthesized)
tcaggaatatgcatcccacagccagtttagagaaatacatgttgtaaatggcattgacagctgctctttaggatggggagtattatggaaatccacaataacaatctatggcaagcaact

SEQ ID NO: 751171 - DNA, 120 bp, Artificial Sequence
  ENSG00000206190_55 (sequence is synthesized)
aggataaggagacctctcaccttggggctgggcctgaaccagggaggggctgaagaaaatcagcaagctggttcccctcagggcctcaagggacctctgcctgaggaatcagcatttggc

SEQ ID NO: 751172 - DNA, 120 bp, Artificial Sequence
  ENSG00000206190_56 (sequence is synthesized)
agcagccgctcccacctgaagtgaaaggcaggaaaagccagcctggccccctggcctgaagtccctgcctcagtcttcggccaggcacagtggtctctgaacagccggcacaggacagta

SEQ ID NO: 751173 - DNA, 120 bp, Artificial Sequence
  ENSG00000206190_57 (sequence is synthesized)
aagctcagtctgctaacagctcggctcaggacagcagcaaagtgaaactgccgccaagtgctgatatgtctggcacggcccaggagagccccttggtagatccatcttggagctgtgtcc

SEQ ID NO: 751174 - DNA, 120 bp, Artificial Sequence
  ENSG00000206190_58 (sequence is synthesized)
agcagcctggaccacctcaaggccctgtccctgagaaaggatgcaggatgaacattacaaaatgctgatgaaaaatatcaaggaacatctgaataaatggagagacttcccatgttcatg

SEQ ID NO: 751175 - DNA, 120 bp, Artificial Sequence
  ENSG00000206190_59 (sequence is synthesized)
gatcggaaaatgaacataataacatacacaagcttattctacgtggaaaaacacaggtccaaaaatgtccacaagatttctcaaaaagaataataaagtggaagcactcacttctcccaa

SEQ ID NO: 751176 - DNA, 120 bp, Artificial Sequence
  ENSG00000206190_60 (sequence is synthesized)
gctttgctattgtgcttttgtgtgtcctcccctcagtgggagtcagtcactgtccactgcacctcctcagagagtatgcaggtcactaaagaagagacaggagcagagatatagccacag

SEQ ID NO: 751177 - DNA, 120 bp, Artificial Sequence
  ENSG00000206190_61 (sequence is synthesized)
gtaggctttgtctggggtcacagacagaggagggccactagggaagatgccacagctcatactcaactggccctcttgaaatgtgagcagccctacacccctgtgaaaccttgattttgt

SEQ ID NO: 751178 - DNA, 120 bp, Artificial Sequence
  ENSG00000206190_62 (sequence is synthesized)
tttatgttaatgatccagagcttgtcaagcacaaaaatctcatccccgcaagtgctgctcctgggaattcccaattcccactgccagttcttctttcttaagggagtgaggagggcgaag

SEQ ID NO: 751179 - DNA, 120 bp, Artificial Sequence
  ENSG00000206190_63 (sequence is synthesized)
gccataggtgatggagccaatgatgtcagcatgatccaggtggcagatgtgggtgtgggaatctccggccaggagggtatgcaggagatgctgagggagacgacagcgatggagaccctg

SEQ ID NO: 751180 - DNA, 120 bp, Artificial Sequence
  ENSG00000206190_64 (sequence is synthesized)
caaagtgaaactgccgccaagtgctgatatgtctggcacggcccaggtaccagggcaggggaaataacagcagtgtccatcctccactgtgagccatgagccgcgagccaggcaccgccc

SEQ ID NO: 751181 - DNA, 120 bp, Artificial Sequence
  ENSG00000206190_65 (sequence is synthesized)
ggtagctgcctgcctaattttcttcatcttaacctgcttcctgggggaaagaggctgtggggtgtttgtgagccctgccacgggcagtaccaggggtgaccctgcgatggaccactcctg

SEQ ID NO: 751182 - DNA, 120 bp, Artificial Sequence
  ENSG00000206199_0 (sequence is synthesized)
gtgttgcctgatactgtggcactgtgggactaggctcttcacattctacaacttacctttgaggctagacagtgacagctgcctctggctatcatttttgtccttaattgtgaaccggaa

SEQ ID NO: 751183 - DNA, 120 bp, Artificial Sequence
  ENSG00000206199_1 (sequence is synthesized)
tttttctagccatccaggagaatctttgaaaaagttggatattttttgtttgaaaaggtaattgtacaatgaggattttcatcgcctttgaaggatcttttgaaccgtttgatgtttcag

SEQ ID NO: 751184 - DNA, 120 bp, Artificial Sequence
  ENSG00000206199_2 (sequence is synthesized)
cagatgaaactgtggaggttgtcaagctgatgataaaggattatttccacattcctctctctgaagacaaacaaggcaggcggtatctggagttaatgtatgctggagctgctctaaagg

SEQ ID NO: 751185 - DNA, 120 bp, Artificial Sequence
  ENSG00000206199_3 (sequence is synthesized)
acagttggagtcttgctgatgttggaatatctttctgttcaactctcaaatgctttgttaaggaagaagacaagcctactctatacgtgttcaatgctgtaactcaagacacaatgccag

SEQ ID NO: 751186 - DNA, 120 bp, Artificial Sequence
  ENSG00000206199_4 (sequence is synthesized)
taatggagagcatttcccttcttgataaaacagtgtctgatctgagaacactggtaactctgagatgtggcctccccgtgagtgtctactgtctccgaaccccaaggggcctggagatgt

SEQ ID NO: 751187 - DNA, 120 bp, Artificial Sequence
  ENSG00000206199_5 (sequence is synthesized)
atgattgcaacaccctcaaggactaccagactgatattggcacaacacttcgcttggatgtctgggatggatggaaggaatttctgatgggttgtctccttggacaaaaacttaaagtcc

SEQ ID NO: 751188 - DNA, 120 bp, Artificial Sequence
  ENSG00000206199_6 (sequence is synthesized)
aacgctacttatcaaaagaaggaccagtactcaagtatcagaaaagggtagccctgtacattgctgctttttgtgggtacattgaactcactgaatgggccctgaagcagggtgcgcggc

SEQ ID NO: 751189 - DNA, 120 bp, Artificial Sequence
  ENSG00000206199_7 (sequence is synthesized)
cccacgaggcagtcggtgttcacccctatcgagcatggtgccatgaagcccttcatgcagatgtctctaaatgccccattcatgcagccgcagaagcaggccaactgttgattctgaagg

SEQ ID NO: 751190 - DNA, 120 bp, Artificial Sequence
  ENSG00000206199_8 (sequence is synthesized)
cctttgtcaactacagtgtgctgtgcctggaatgcaaaaatgcagcaggacaaactcccctgaccattgtgttcaaacacaagcataaagactgtgtattatatttgctcagtaaaatgt

SEQ ID NO: 751191 - DNA, 120 bp, Artificial Sequence
  ENSG00000206199_9 (sequence is synthesized)
tggatcctcagagctcagagtcacagtcttcataaaagccagttttgtggagcaagggtctttggggcaaaagttggagacactgtgatggtggatggtttcaccaaaccaaaaatgacc

SEQ ID NO: 751192 - DNA, 120 bp, Artificial Sequence
  ENSG00000206199_10 (sequence is synthesized)
tccaagagctggcataaggctgggaacagcgactcacaaagcatcgtgctcaagctaccatctctcagcaaacaaactgcaagcagcaaacctgtcaatcctttggcaatttcacagccg

SEQ ID NO: 751193 - DNA, 120 bp, Artificial Sequence
  ENSG00000206199_11 (sequence is synthesized)
gacacaagaaaacaagccctcaaatttcatccactggtgaatgcaagttcattctctgaattacaaaaacatcaacaacaaaatcagaaaaaaattactgccacagctaggaaaaaagaa

SEQ ID NO: 751194 - DNA, 120 bp, Artificial Sequence
  ENSG00000206199_12 (sequence is synthesized)
aagctcataaaaaacacatatcttccccaagtccccctccctccagtttcaagagtgggatattcacatccatcgtttttctatgcaacacccagtgctgactttttactgaagtcctcc

SEQ ID NO: 751195 - DNA, 120 bp, Artificial Sequence
  ENSG00000206199_13 (sequence is synthesized)
ttctcatctttcttagagcacagtgggaagactccatgggagaacgcaatctactgcttagctgtggcaaggtaatgttctccccttaaacatacaaacagcaaagcttttataaggcag

SEQ ID NO: 751196 - DNA, 120 bp, Artificial Sequence
  ENSG00000206199_14 (sequence is synthesized)
gtccaggataaggaatggtccataatgccctactatgccactgaaagtaatacaagttgttccagtgcatcaatacccagcttcaaggacctcatcttagcctcatcactaggacaaaat

SEQ ID NO: 751197 - DNA, 120 bp, Artificial Sequence
  ENSG00000206199_15 (sequence is synthesized)
gaattaatattattggccaatccaatctgtgcagtactttactcctcaaactttcaggagggaaagaaacacagtagaaagaattgtatcaattctcaaggtcccttgctgctgctgctg

SEQ ID NO: 751198 - DNA, 90 bp, Artificial Sequence
  ENSG00000206199_16 (sequence is synthesized)
ctgctgctgctgctgctgctgctgcttttcttttttctttttgtttgagacagggtctcgttatcacagctcattgcattcttgaattcc

SEQ ID NO: 751199 - DNA, 77 bp, Artificial Sequence
  ENSG00000206199_17 (sequence is synthesized)
gttgctcaggctggagtgcagtggtgctatcacagctcattgcattcttgaattcctaggctcaagcaattctccca

SEQ ID NO: 751200 - DNA, 120 bp, Artificial Sequence
  ENSG00000206199_18 (sequence is synthesized)
gaaatagcaagagtcctggccaaaaagagcatttctaacttgactacccgaggaggtctgacagcgtgtgaaaactctctagaaactgtgctttgaaaagtcatgacaacttcagtttgg

SEQ ID NO: 751201 - DNA, 120 bp, Artificial Sequence
  ENSG00000206199_19 (sequence is synthesized)
acaaagacctgatcaaacagaatgtccagttctaatgttaacatttctaataacagttctaatgttatcatctctagtaacagttataatgccacataacttttaataggatatttaaca

SEQ ID NO: 751202 - DNA, 120 bp, Artificial Sequence
  ENSG00000206199_20 (sequence is synthesized)
ccatgttttctcagacttcatcacactaagtgaaactttagtgctatttttgcataaagaatatgaggaagaattcagaagaaacttagaatagtagttgtccacagggtaggggagctg

SEQ ID NO: 751203 - DNA, 120 bp, Artificial Sequence
  ENSG00000206199_21 (sequence is synthesized)
agacaatggaaaacaaggaagtgggaatttttacagttcctttgtttgtttttctttttttttcctaaaaaaatgtgttttggttttttaagccatatgaatgtagaacatatttaaaaa

SEQ ID NO: 751204 - DNA, 120 bp, Artificial Sequence
  ENSG00000206199_22 (sequence is synthesized)
ccctgtgctagtgcatcccaatcaaatatctatttttaagggttcttcaatcagctgtacttatgtaaataagaattcaggagtcagttgatggggaccacatcacaaaagtgtaattta

SEQ ID NO: 751205 - DNA, 120 bp, Artificial Sequence
  ENSG00000206199_23 (sequence is synthesized)
tgagtagcatttttgtatcacatgcttgaagcttgtccatacttgcctcaaccattgtcaagtttgctggtttccgtaatataggaataaggtggctattgactactgccttccgcagat

SEQ ID NO: 751206 - DNA, 120 bp, Artificial Sequence
  ENSG00000206199_24 (sequence is synthesized)
attacttccccttttgttcactctggaatagttcagcaagcttctgcttacttagtgctgtaactccaaaacagcaaaatataaaaaagcagaacttgagaaaaaatacagcagtacatt

SEQ ID NO: 751207 - DNA, 120 bp, Artificial Sequence
  ENSG00000206199_25 (sequence is synthesized)
caaaactttcattaacttgttttctttcagtcagttctgtttagcttttcctttcttattgttaaagtacatgtatgaatttacagtaagtttgcatttgttttttgaaggtaagcatgg

SEQ ID NO: 751208 - DNA, 120 bp, Artificial Sequence
  ENSG00000206199_26 (sequence is synthesized)
aattattctcatgagatagaacgtatttgtttttattgaaaagtaagatactttgtgtatatctcttgggttggtttgtttgcatctcagtttgtttataaaggaaaaagtctaattttg

SEQ ID NO: 751209 - DNA, 120 bp, Artificial Sequence
  ENSG00000206199_27 (sequence is synthesized)
tgaacaaatggaggcattatttctaaatggaaacctctgggaagtgaagttctacaatttctcctcagagtactttgctatagtgcacatacctgctctgcacgcttgctggaggctgaa

SEQ ID NO: 751210 - DNA, 120 bp, Artificial Sequence
  ENSG00000206199_28 (sequence is synthesized)
ccctgcctagaacatgatgggggctcacataaggaagggcacacagtggcatttgtccccaactaactgataatttagttatttaatgaagtaccaaaggatgaaacaaaactaggaaaa

SEQ ID NO: 751211 - DNA, 120 bp, Artificial Sequence
  ENSG00000206199_29 (sequence is synthesized)
aacatgtaggacataaatacaaaaaaaaagaacacatttgttttgcatatagatacaaaggatggtttgaagatagacaaaaaggaagaaagcaagagtgttatatatagataagaaaag

SEQ ID NO: 751212 - DNA, 120 bp, Artificial Sequence
  ENSG00000206199_30 (sequence is synthesized)
atggaaggatcaagtaaaccttaagtattcacaaagcatggattaagtcacgcatccagactgatagctacgtcatccctgaatcaaacacccattggttaacgctatcctagcctctta

SEQ ID NO: 751213 - DNA, 120 bp, Artificial Sequence
  ENSG00000206199_31 (sequence is synthesized)
tgtcatctgccagaggcatgcagataagcaactccacagtttaacagccaattacagctgtgaccagttgccttgcatctctccagtacagcaagcaaatgttggatctagacacctttc

SEQ ID NO: 751214 - DNA, 120 bp, Artificial Sequence
  ENSG00000206199_32 (sequence is synthesized)
caaactacaacaagtgacccaggattcaggcagtaggtttaagaatgcaaagagctggacagtcaagatggtgtagacttgtgtggctgacagcatgagcatccctatggagagcagcat

SEQ ID NO: 751215 - DNA, 120 bp, Artificial Sequence
  ENSG00000206199_33 (sequence is synthesized)
ctcgttgtaaaatcacctggaagacaaggatgtgagtaactgagagctggtgctttgtcccagggaatagatcatttgatatattaattcccaatgtccaaaaatatcccttttaattat

SEQ ID NO: 751216 - DNA, 120 bp, Artificial Sequence
  ENSG00000206199_34 (sequence is synthesized)
aaacatgtattaacattaaaagtaaagcttttatttcaaaagcataagaacttacacagatttggacatttaggtaaacacccatgtttagtcaatacctatgtaactcatgatgacaaa

SEQ ID NO: 751217 - DNA, 120 bp, Artificial Sequence
  ENSG00000206199_35 (sequence is synthesized)
attggtactgcccagtatatttgatatcagctaccatttggcactagggtcctttgataccagattttgcagcttttcaagagaaaatagaaatctagattttcatatacaatctgttaa

SEQ ID NO: 751218 - DNA, 120 bp, Artificial Sequence
  ENSG00000206199_36 (sequence is synthesized)
ctttatttacatattcactttaaaacagttaacacatttacatagtttaaatatcagaagtgaaaaggatgtgtagtggtaagttgccctccctctcctggccttacaagcacttagttc

SEQ ID NO: 751219 - DNA, 120 bp, Artificial Sequence
  ENSG00000206199_37 (sequence is synthesized)
cctcctcacaggcaaccattattgttttgaagatttacaatcaaaaccatttccaaattaaatctgaacaaatggaggcattatttctaaatggaaacctctgtaagttcagtatggata

SEQ ID NO: 751220 - DNA, 120 bp, Artificial Sequence
  ENSG00000206199_38 (sequence is synthesized)
tgaattatcaacatttcattcttgggtctgggtctacagactaagaaataaggagggtctcatagccctgtcaagtcttgttctcaaagcagattcattaatatcctcagggtggaagag

SEQ ID NO: 751221 - DNA, 120 bp, Artificial Sequence
  ENSG00000206199_39 (sequence is synthesized)
caaaactcaggccacttcatctcttctctttcaaaatgtacttcaagcatgtataaatgcaagttcaagtacatattctttttcccgtttttaatgcaaggtagcatatgatacatgcta

SEQ ID NO: 751222 - DNA, 120 bp, Artificial Sequence
  ENSG00000206199_40 (sequence is synthesized)
ttctgaaccctgctttgggcaatttcatcttaaaatgttgctgattatattaaaataatctttttaacaatgtgacgccaatgctatactggctgaaaatctgcattagtggaatagtgt

SEQ ID NO: 751223 - DNA, 89 bp, Artificial Sequence
  ENSG00000206199_41 (sequence is synthesized)
tgctcatctgtacaaaaaacaaaaaacaaaaacaatagcaggatgtggtggtgcccagctgcttgggaggctgaggtaggaggatcact

SEQ ID NO: 751224 - DNA, 90 bp, Artificial Sequence
  ENSG00000206199_42 (sequence is synthesized)
gtacaaaaaacaaaaaacaaaaacaatagcaggatgtggtggtgcccagctgggccaagaggttaaggctacagtgagctatgatcacac

SEQ ID NO: 751225 - DNA, 120 bp, Artificial Sequence
  ENSG00000206199_43 (sequence is synthesized)
aaaaaaaaaaaaaaaaatctgtacttccaggtcacgtctgcagtagccaaacatcaataagacaaacaaaaaaggctgtcagatttgttttaagcatactaaaaaatgatttgacgatac

SEQ ID NO: 751226 - DNA, 120 bp, Artificial Sequence
  ENSG00000206199_44 (sequence is synthesized)
agagatgattaacatggcccctacctgacgatgacacacaagttcatgaaacatttcacactttttaaaaatggttagaaccttatagaaattacttgaagtaaatgaatccttgctgac

SEQ ID NO: 751227 - DNA, 120 bp, Artificial Sequence
  ENSG00000206199_45 (sequence is synthesized)
aatcagcacaaccttaggtaacattgtgttgtaacattgcaatgaaatttgagttctcccaacatatacatagggctttgtaggtatccttagttaagtagttttgctttatataactgc

SEQ ID NO: 751228 - DNA, 120 bp, Artificial Sequence
  ENSG00000206199_46 (sequence is synthesized)
taaatttgcatttattgatacttctcctgactgtagtatttgcttagcattattctttcctattattttaaattaaggctctcaaaactttgacataatttttttccttgtttttgatca

SEQ ID NO: 751229 - DNA, 120 bp, Artificial Sequence
  ENSG00000206199_47 (sequence is synthesized)
attataatgtgacgttttaagctggaagataatttgaattgacccaaccccaacttttacagacttgaaaaaaagcaaatcatcttaatgattaaatgacttgctcagcatgtgtcaagg

SEQ ID NO: 751230 - DNA, 120 bp, Artificial Sequence
  ENSG00000206199_48 (sequence is synthesized)
gagtatcatatagacagagaggtagagatgccttctcttatgtggataaggtggattagcaagttgctattaattggcatctacctactccctcgtcatacaaccaaattagaaaatatc

SEQ ID NO: 751231 - DNA, 120 bp, Artificial Sequence
  ENSG00000206199_49 (sequence is synthesized)
gacaactaatgtgcctcactagaactcaaaatgggttttcccataaaaacaaggtttatacaaaggaagaagacaagcctactctatacgtgttcaatgctgtaactcaagacacaatgc

SEQ ID NO: 751232 - DNA, 120 bp, Artificial Sequence
  ENSG00000206199_50 (sequence is synthesized)
aatgtggctgtcggcagagctggtagaggacttactgctctactgtaggaatggcaagaaatcaccagtcaacaaaactgtgacaagtatgttttagagttgtgcaaagaaaggtcaata

SEQ ID NO: 751233 - DNA, 120 bp, Artificial Sequence
  ENSG00000206203_0 (sequence is synthesized)
agacgcctccggtagtgtaaatgaggacaatgcctgctggcccacatgacggggggatgtagacggcagcggcgccagtcgctcctggcaccatggacgatgccacagtcctaaggaaga

SEQ ID NO: 751234 - DNA, 120 bp, Artificial Sequence
  ENSG00000206203_1 (sequence is synthesized)
agggttacatcgtaggcatcaatcttggcaagggttcctacgcaaaagtcaaatctgcctactctgagcgcctcaagttcaatgtggctgtcaagatcatcgaccgcaagaaaacaccta

SEQ ID NO: 751235 - DNA, 120 bp, Artificial Sequence
  ENSG00000206203_2 (sequence is synthesized)
ctgactttgtggagagattccttcctcgggagatggacatcctggcaactgtcaaccacggctccatcatcaagacttacgagatctttgagacctctgacggacggatctacatcatca

SEQ ID NO: 751236 - DNA, 120 bp, Artificial Sequence
  ENSG00000206203_3 (sequence is synthesized)
tggagcttggcgtccagggcgacctcctcgagttcatcaagtgccagggagccctgcatgaggacgtggcacgcaagatgttccgacagctctcctccgccgtcaagtactgccacgacc

SEQ ID NO: 751237 - DNA, 120 bp, Artificial Sequence
  ENSG00000206203_4 (sequence is synthesized)
tggacatcgtccaccgggacctcaagtgcgagaaccttctcctcgacaaggacttcaacatcaagctgtctgactttggcttctccaagcgctgcctgcgggacagcaatgggcgcatca

SEQ ID NO: 751238 - DNA, 120 bp, Artificial Sequence
  ENSG00000206203_5 (sequence is synthesized)
catggtctgcggctccatgccctatgacgactccgacatcaggaagatgctgcgtatccagaaggagcaccgtgtggacttcccgcgctccaagaacctgacctgcgagtgcaaggacct

SEQ ID NO: 751239 - DNA, 120 bp, Artificial Sequence
  ENSG00000206203_6 (sequence is synthesized)
catctaccgcatgctgcagcccgacgtcagccagcggctccacatcgatgagatcctcagccactcgtggctgcagccccccaagcccaaagccacgtcttctgcctccttcaagaggga

SEQ ID NO: 751240 - DNA, 120 bp, Artificial Sequence
  ENSG00000206203_7 (sequence is synthesized)
gggggagggcaagtaccgcgctgagtgcaaactggacaccaagacaggcttgaggcccgaccaccggcccgaccacaagcttggagccaaaacccagcaccggctgctggtggtgcccga

SEQ ID NO: 751241 - DNA, 120 bp, Artificial Sequence
  ENSG00000206203_8 (sequence is synthesized)
gaacgagaacaggatggaggacaggctggccgagacctccagggccaaagaccatcacatctccggagctgaggtggggaaagcaagcacctagcatgacaatggccccgttgtgtgtgg

SEQ ID NO: 751242 - DNA, 120 bp, Artificial Sequence
  ENSG00000206203_9 (sequence is synthesized)
tgggggtcggggttggggggcatggtgcagtcggccttcacgtaaactaagtaggcaggtaggatctgaagaaggcacaggtgcaagtaaaattcgtcaattaaaccactattttgatta

SEQ ID NO: 751243 - DNA, 120 bp, Artificial Sequence
  ENSG00000206260_0 (sequence is synthesized)
ccccagcgccttccctgcgccctggtggggacagcagccaggaggacccggccctgccaagcgcctccgattggaggagcccgcgggccccgaaccccgcgtggcgcccagcctggaaga

SEQ ID NO: 751244 - DNA, 120 bp, Artificial Sequence
  ENSG00000206260_1 (sequence is synthesized)
gtggcgcccagcctggaagacccggcgggtaccccggccgtgggcgcgctcacctccatagtggtcctggccgcgggctgtgccctgcgtgtgcccctggacgacgtcgacctggtgctg

SEQ ID NO: 751245 - DNA, 120 bp, Artificial Sequence
  ENSG00000206260_2 (sequence is synthesized)
gagctcccgccaacgtcgatcctgcgagtgtctctcgatggacacaccctcatcctgatcccagaggtcctcctgagctctgtcgacgaacgctcaggagcgcaggacgactcgtctgct

SEQ ID NO: 751246 - DNA, 120 bp, Artificial Sequence
  ENSG00000206260_3 (sequence is synthesized)
gggctggaagtggacgttttcctgggcgctctcagggaggacgtcgtcgttgagcaggaagtcttctgcgcatctgtcccagagatcgccgcccaggaagaggcctacgaggaggacgcg

SEQ ID NO: 751247 - DNA, 120 bp, Artificial Sequence
  ENSG00000206260_4 (sequence is synthesized)
gaccccgagtttccggagctccagatggactccgcagccggctcagccgctgggctctactcctccgccagaagtatgttcagcccctaccgggagggccccatcccagaaccctgtgct

SEQ ID NO: 751248 - DNA, 120 bp, Artificial Sequence
  ENSG00000206260_5 (sequence is synthesized)
ctggcccccaaccccagttcagagggacactctccaggccccttcttcgacccggaattccgccttctggagcctgtccccagctcacctctccaacctctacctccctctccgcgcgtg

SEQ ID NO: 751249 - DNA, 120 bp, Artificial Sequence
  ENSG00000206260_6 (sequence is synthesized)
gggagtccaggtccccacgcgcacccgccgctcccgaaacgccctccgtgcaaggcccgcagacgactgttccaggaatgaactgcttcccacaatcccttgccaccggctgcgggttct

SEQ ID NO: 751250 - DNA, 120 bp, Artificial Sequence
  ENSG00000206260_7 (sequence is synthesized)
tgtggatcctccaagactcactgtgaggacttgccacagcccggaaatgcagcatcttcattcatcgacagcgggcagttggattactgttgtttgggtgggttggttggttggctggct

SEQ ID NO: 751251 - DNA, 120 bp, Artificial Sequence
  ENSG00000206260_8 (sequence is synthesized)
ggctggttggttttttggcagaattccttggtaagtggcaggcaaggacatgaaaaaagaaaagcagattctggtaagcacctttaccaagaagagtagaccacacataaccagtcatgg

SEQ ID NO: 751252 - DNA, 120 bp, Artificial Sequence
  ENSG00000206260_9 (sequence is synthesized)
ggagctgttacttctgcctttgtcaccttcagccaactgtatcctcagtttcacccctactcttgcttaaagctcccttcagttttctttaaaattcccccctttttttttatcacttcc

SEQ ID NO: 751253 - DNA, 120 bp, Artificial Sequence
  ENSG00000206260_10 (sequence is synthesized)
atacacctatccgttctctccaatccagatcattgtctttccttctttttgcagttaggaatttacctatacgatttctcccaacatcctctgaggtgcttctgaccactgattttattt

SEQ ID NO: 751254 - DNA, 120 bp, Artificial Sequence
  ENSG00000206260_11 (sequence is synthesized)
tccacttgctctccttaactccttttcctggacctggacaatcaagataaatgcatattagattagatagtaaacaaacaacattcaaatgtaatgaatgcactggaccttttggaagtg

SEQ ID NO: 751255 - DNA, 60 bp, Artificial Sequence
  ENSG00000206260_12 (sequence is synthesized)
acattcaaatgtaatgaatgcactggaccttttggaagtgtttctgcaaataagaattta

SEQ ID NO: 751256 - DNA, 65 bp, Artificial Sequence
  ENSG00000206260_13 (sequence is synthesized)
ttaaaaattagtgaaagcaatatttaatgagggaaagtaggaagttgtgacactttcattccagc

SEQ ID NO: 751257 - DNA, 120 bp, Artificial Sequence
  ENSG00000206260_14 (sequence is synthesized)
aatgagggaaagtaggaagttgtgacactttcattccagcagcatcttgtacaatgacatattctatgtactttaaccaatgggtattcctgaatttcagggcagtgtgggcttcatctt

SEQ ID NO: 751258 - DNA, 120 bp, Artificial Sequence
  ENSG00000206260_15 (sequence is synthesized)
gatttcctctcaggggtactcactcaccttcaccgcatggacatttggtctaatttatttttgagagtttttttcatgctcttgagtccatcaccctgaattggcagtcgttatttctta

SEQ ID NO: 751259 - DNA, 120 bp, Artificial Sequence
  ENSG00000206260_16 (sequence is synthesized)
gtattatttccttaatgtctttttaactataaaggaaaggaaatattacagataatgttgtcatatcctttgatccccactcttctcccccattcccaggggattcacatcatgacacaa

SEQ ID NO: 751260 - DNA, 120 bp, Artificial Sequence
  ENSG00000206260_17 (sequence is synthesized)
agttgatggatatcattctagtcaatatatgaaagctacatatacatatatatatgtatagatataaataagcaatgtttatgttgttttctggacaattaaatttacataactacctca

SEQ ID NO: 751261 - DNA, 120 bp, Artificial Sequence
  ENSG00000206262_0 (sequence is synthesized)
gagttcatctccaagtcactttttgtaaacgccccgcacagcctggaccggcctgcccccgcccagcgagcctcaggggcccagccgacagccaggctcacgcgcccttgaaatctgccg

SEQ ID NO: 751262 - DNA, 120 bp, Artificial Sequence
  ENSG00000206262_1 (sequence is synthesized)
gtactcgctctgcgggctgggctgggagatgacgaggaccccggtggggtctgcccgcacccggccaaagcccaggaagctcgggccccagcgaggaaaggcgctccaagcctcctcgcg

SEQ ID NO: 751263 - DNA, 120 bp, Artificial Sequence
  ENSG00000206262_2 (sequence is synthesized)
gctttcagaatccccagccctggtgaagaagaggatgcctgatgcgtgcaccctgggaagggctggaatcggtctccccaagatgtgccttcacatggctgtccggcattcgaaggctca

SEQ ID NO: 751264 - DNA, 120 bp, Artificial Sequence
  ENSG00000206262_3 (sequence is synthesized)
gaaaacagggccgggaatcctgcaacagcggcagaagccgcccgcgcctcgggcttccggcggcccagctctactagggaagcgtcgcggctgctctgaggcaggcagcgcttcgctaga

SEQ ID NO: 751265 - DNA, 120 bp, Artificial Sequence
  ENSG00000206262_4 (sequence is synthesized)
accactcagctcgtcccgcgccgccgccggctgcctgaaccaggttccgctgtcccctttcctagcgggaccccgaaacacccggcggcttcccgctcctgagcgggagagaatagagct

SEQ ID NO: 751266 - DNA, 120 bp, Artificial Sequence
  ENSG00000206262_5 (sequence is synthesized)
tgctgcaaccctctgcttggagggatggcctctgcggtgcttggctagcaaagggaagcttcactgtgtctattagtacatccccatacactccacgcctcaacaactgtcagcactcac

SEQ ID NO: 751267 - DNA, 120 bp, Artificial Sequence
  ENSG00000206262_6 (sequence is synthesized)
tccctcccggcccctcacagggccctttgcacccacacctcagggactcggtgtccctccactcaggtcacgttactccatccacttctctctccttctccctctgtcaactccaaatcc

SEQ ID NO: 751268 - DNA, 120 bp, Artificial Sequence
  ENSG00000206262_7 (sequence is synthesized)
cctctagttctccctcccctcctacttctctcacactcaccagctacacgtactaattcagattttgcacatgttggtggaaaacatgtcaagccaatgtgcagaccctaaggcttttca

SEQ ID NO: 751269 - DNA, 120 bp, Artificial Sequence
  ENSG00000206262_8 (sequence is synthesized)
cacgctgctcactttcgcatctcacggtgcagaaggaccaatgggctccaggtttacaagcctgactccgagaagcctgttgattctctgatgtccttggcctgtgattcgggtgactgg

SEQ ID NO: 751270 - DNA, 120 bp, Artificial Sequence
  ENSG00000206262_9 (sequence is synthesized)
gctgccacctgggtgttttcatgatgggactgccgcacagaccacagagaagctcaggtactgagcacgttccagatacactttaacatgcacaggccactcacacaggctttatctctg

SEQ ID NO: 751271 - DNA, 120 bp, Artificial Sequence
  ENSG00000206262_10 (sequence is synthesized)
tctcgaaactctgctgagtttgctgctcagaccaacaaggtgcagcagcagacacccacatagcaccaggtctgaagccagtgggtattagtctgcctggttgggattagcaaagtcagt

SEQ ID NO: 751272 - DNA, 120 bp, Artificial Sequence
  ENSG00000206262_11 (sequence is synthesized)
tactcacatatgtgcttgggagagaataggggagtggagagagagagagagatattgaggaagaggaaagagaagcgacctcctactctgggaagaactcacacatgagagctgtttcct

SEQ ID NO: 751273 - DNA, 120 bp, Artificial Sequence
  ENSG00000206262_12 (sequence is synthesized)
gttgttaagtgtctcactgagctcccctctttctcccccaggaagggcttgagaggcagtagaccagagctctgggctcctctttaccttgctgatgttggggtatgagtcctccaacac

SEQ ID NO: 751274 - DNA, 120 bp, Artificial Sequence
  ENSG00000206262_13 (sequence is synthesized)
cattttgtcccaaggagtatgtgccccatcgtcaatcaggcagaatgcagggcagttgtcggcctttttcatggtggaggccaactgggaaaaaggcagaagggtctgggtcctgggcca

SEQ ID NO: 751275 - DNA, 120 bp, Artificial Sequence
  ENSG00000206262_14 (sequence is synthesized)
agtgaggccctcttccctccaaagacccgtgggatgctctcagaggcggattctagggtggtgggagctgctgacaagtttcctctgatatccctcatgacatctatggcccaaagccat

SEQ ID NO: 751276 - DNA, 120 bp, Artificial Sequence
  ENSG00000206262_15 (sequence is synthesized)
tttgttcagctctgaacagtgagtgccttgccagtaggcctcaggcttgctggggaacatgatgtgttcttaaaagttgccttgttgcctttctccacacccagactgtaagcgctgatg

SEQ ID NO: 751277 - DNA, 120 bp, Artificial Sequence
  ENSG00000206262_16 (sequence is synthesized)
ggcagagactctgccctccacttctcactcagtgctccccaccaggatgggcttaatgccttttaatagaattagaaaatggttctgctggacagaattgggaaatgccactttccttat

SEQ ID NO: 751278 - DNA, 120 bp, Artificial Sequence
  ENSG00000206262_17 (sequence is synthesized)
gaagttagaatttccaagaaagggactgtagctgaggaaaagcggtttgatcattgacagccagctcaggatctgagagttctttgccatttggggttattatagctgcatggccatggt

SEQ ID NO: 751279 - DNA, 120 bp, Artificial Sequence
  ENSG00000206262_18 (sequence is synthesized)
gctgaaccttaggcaagggcaaggacacctccctagttcccagtcatggtgaggacctgtctgaaacattcaaactagactttactggaaacagagaagtctctgcattcagggcagctg

SEQ ID NO: 751280 - DNA, 120 bp, Artificial Sequence
  ENSG00000206262_19 (sequence is synthesized)
gcttgcaaggtaaggcctgcagtctccacccgcacgctaacccatgaggggatgccagagagagcccttcccccttggtcctcattcctggctcaattttctcccacaaagcgggcactt

SEQ ID NO: 751281 - DNA, 120 bp, Artificial Sequence
  ENSG00000206262_20 (sequence is synthesized)
tctaaagatgataggcaactgccatggaggaaggcagttttagatgcctagctggcacaaagtccagaggaagggagggagaagggctgagttttgtattactgttctacctttggagat

SEQ ID NO: 751282 - DNA, 79 bp, Artificial Sequence
  ENSG00000206262_21 (sequence is synthesized)
gaagggctgagttttgtattactgttctacctttggagattttcctcatgccaagataggcactataactttatgaaac

SEQ ID NO: 751283 - DNA, 120 bp, Artificial Sequence
  ENSG00000206262_22 (sequence is synthesized)
ttttttttttttttttggtatttttggtagagacagggttttaccatgtgggcccaactggtcttgagctcctgagctcagggtgatttgcctgcttcaacttcccaaagtgttgggatt

SEQ ID NO: 751284 - DNA, 120 bp, Artificial Sequence
  ENSG00000206262_23 (sequence is synthesized)
acaggtgtgagccaccatgcccagtcagttttttattttttatttaaacagttttgggggaacaggtggtttttgcttacatggataagttctttaatggtaatttctgagattttggtg

SEQ ID NO: 751285 - DNA, 120 bp, Artificial Sequence
  ENSG00000206262_24 (sequence is synthesized)
gagattttggtgcacttgtcacccgagcattgtacacggtacccagtgtgtaatcttttatccctcatccccctcctacgcttccccccccgagtccccattatataattctttttttct

SEQ ID NO: 751286 - DNA, 74 bp, Artificial Sequence
  ENSG00000206262_25 (sequence is synthesized)
gtccattataatgaaaacacaggatatttggttttccatacttgagttacttcacttagtataatggtctccag

SEQ ID NO: 751287 - DNA, 80 bp, Artificial Sequence
  ENSG00000206262_26 (sequence is synthesized)
tagctcccacttataaatgaaaacacaggatatttggttttccatacttgagttacttcacttagtataatggtctccag

SEQ ID NO: 751288 - DNA, 120 bp, Artificial Sequence
  ENSG00000206262_27 (sequence is synthesized)
atccactcattggttgatgggcatttagccttgttccatatttttgtatgcagtataacttacagatggtaaacaatatacagcttgatgtattctgacatgtaatgcagtatgtaacca

SEQ ID NO: 751289 - DNA, 120 bp, Artificial Sequence
  ENSG00000206262_28 (sequence is synthesized)
tgtaaccaccacctggatcaagatatggagcatttctggcacttcagaaggttccttcatatctttttccaatcaatattgcctcaaaagggaaaccatatttggatttctatcaccata

SEQ ID NO: 751290 - DNA, 120 bp, Artificial Sequence
  ENSG00000206262_29 (sequence is synthesized)
aataacctttgcctgccttgagcctcgtataaatggagcatatagcatgtatgcctttatgtctagttttttctgtgcaacatatttttaatattcactggtcttgttgcatgtgtcaga

SEQ ID NO: 751291 - DNA, 120 bp, Artificial Sequence
  ENSG00000206262_30 (sequence is synthesized)
catttatttctttttattgctgtgtaatattctagtatttgcttatccatccatatgttgagggacatttgtttccagtttttggatatcataaataaagctgctgtgcacattgttgta

SEQ ID NO: 751292 - DNA, 120 bp, Artificial Sequence
  ENSG00000206262_31 (sequence is synthesized)
agaaacgggtgtgactgtacgaagaagcctcggcctggcctgtccctcgcgctctcagagtgactgggctggaatggggcaggggagaggatctctggaaatagtcgtcaggggcgccgc

SEQ ID NO: 751293 - DNA, 120 bp, Artificial Sequence
  ENSG00000206262_32 (sequence is synthesized)
ctgaatcacctctgcctctccctgcgttaccagtggatctaggaaccaggaatccgtgtactaatcctacggggttggagtgaaggttggatgtgtgctttaacagcaccaagtagatgc

SEQ ID NO: 751294 - DNA, 120 bp, Artificial Sequence
  ENSG00000206262_33 (sequence is synthesized)
ccctcagctattgcactaacacaggcggggctgttgcccgggactttgcgggactgtgtatgtgtgtgcacaggggtcacatatggaagtcatggagaggagctgtccttgagatgggtg

SEQ ID NO: 751295 - DNA, 120 bp, Artificial Sequence
  ENSG00000206262_34 (sequence is synthesized)
ggcttcgggctggagatagaggaatctagggagagaacagaatcctctccttgccggcccagccagaggtgggtgaaccgggcgctccaggaaacggtgcggggcgccctgatttacttc

SEQ ID NO: 751296 - DNA, 120 bp, Artificial Sequence
  ENSG00000206262_35 (sequence is synthesized)
tcaaccttcggaggtaggctggttgctggcgaggtcgggatcctctctgaacagggcatactgtgcctaggttttgtggacgccagggccggttccttttctccccgcggcattggggcg

SEQ ID NO: 751297 - DNA, 120 bp, Artificial Sequence
  ENSG00000206262_36 (sequence is synthesized)
gcgctcacctccaaaggccagggtggtgggctgggcagaactcactgcctctttgccccagttttccagggtcccgcagctgcaattcagcagccaccggcgcctcctgaccgtggtccc

SEQ ID NO: 751298 - DNA, 120 bp, Artificial Sequence
  ENSG00000206262_37 (sequence is synthesized)
accgtagcgccgcctgcggatacggttccagtgaaccgccgattgagcgcagtctcagctcccgcgcctcctcgcagcctggccccgcgcctcggaggtcccgacagccggcgcgagcaa

SEQ ID NO: 751299 - DNA, 120 bp, Artificial Sequence
  ENSG00000206384_0 (sequence is synthesized)
atttgaagttgaagatttttcaggtcataatatgatgttgctaattttgttcctcgtgataatttgttcccatatttctgtgaaccaagattccggccctgagtatgcagatgttgtgtt

SEQ ID NO: 751300 - DNA, 120 bp, Artificial Sequence
  ENSG00000206384_1 (sequence is synthesized)
tttggtggacagctctgatcgcctgggatccaagtccttcccatttgtgaaaatgttcatcaccaaaatgatcagcagtctccccatagaggccgacaaataccgtgtggccctggccca

SEQ ID NO: 751301 - DNA, 120 bp, Artificial Sequence
  ENSG00000206384_2 (sequence is synthesized)
gtacagtgataaacttcacagtgaattccacctgagcaccttcaaaggcaggagccccatgctgaaccacctaaggaagaactttggattcattggcgggtccctgcagataggaaaggc

SEQ ID NO: 751302 - DNA, 120 bp, Artificial Sequence
  ENSG00000206384_3 (sequence is synthesized)
tcttcaggaggctcacaggacttatttctctgcacccgcaaatgggagagacaagaaacagtttcccccaattctagtggtcctggcttcatctgagtctgaggataatgtggaagaggc

SEQ ID NO: 751303 - DNA, 120 bp, Artificial Sequence
  ENSG00000206384_4 (sequence is synthesized)
atcaaaggccctgcggaaagacggagtgaaaatcatctctgtaggggtgcagaaagcttctgaggaaaacctgaaggccatggccacgtctcagtttcatttcaaccttcggacagtcag

SEQ ID NO: 751304 - DNA, 120 bp, Artificial Sequence
  ENSG00000206384_5 (sequence is synthesized)
agacctcagcatgttttcccaaaacatgacacacatcatcaaggatgtaataaagtacaaggagggagcagttgatgacatctttgtagaagcttgccaaggcccttctatggccgatgt

SEQ ID NO: 751305 - DNA, 120 bp, Artificial Sequence
  ENSG00000206384_6 (sequence is synthesized)
tgtgttcctattggatatgtcaatcaatggaagtgaggagaactttgactatcttaaaggattcttggaagaaagtgtatctgcccttgacataaaggaaaattgcatgagggttggcct

SEQ ID NO: 751306 - DNA, 120 bp, Artificial Sequence
  ENSG00000206384_7 (sequence is synthesized)
tgtggcctatagcaatgagacaaaagtgataaattcactgagcatgggcataaataagtcagaggttctccagcatatacagaacctttctccccgaactgggaaggcctatactggagc

SEQ ID NO: 751307 - DNA, 120 bp, Artificial Sequence
  ENSG00000206384_8 (sequence is synthesized)
tgccatcaaaaagctcaggaaggaagtttttagtgcacggaatggcagtcggaagaatcagggggtgccccagattgccgtgctggtgacccaccgagattcagaagacaacgtgacaaa

SEQ ID NO: 751308 - DNA, 120 bp, Artificial Sequence
  ENSG00000206384_9 (sequence is synthesized)
agcagctgttaacctccgacgggagggtgtgaccatcttcaccctgggcatagagggcgccagcgacacccagttggaaaagatagcatcccaccctgctgagcagtatgtctccaaact

SEQ ID NO: 751309 - DNA, 120 bp, Artificial Sequence
  ENSG00000206384_10 (sequence is synthesized)
gaagaccttcgctgacctggctgctcacaaccagacatttctgaagaagctgcggaaccaaataacacacacagtctctgtcttttcagagaggactgaaacgctcaaatctggttgtgt

SEQ ID NO: 751310 - DNA, 120 bp, Artificial Sequence
  ENSG00000206384_11 (sequence is synthesized)
ggacactgaggaagcagacatctatctgcttatcgatggctcagggagcacccaggccacagatttccatgaaatgaagacgttcctgtcagaggtggtagggatgttcaacattgctcc

SEQ ID NO: 751311 - DNA, 120 bp, Artificial Sequence
  ENSG00000206384_12 (sequence is synthesized)
ccataaggtgcgggttggggccgttcagtatgctgacagctgggacttggaatttgagatcaataaatactccaacaagcaggatttgggaaaggccattgagaatatcaggcagatggg

SEQ ID NO: 751312 - DNA, 120 bp, Artificial Sequence
  ENSG00000206384_13 (sequence is synthesized)
tgggaatacaaacacaggcgcagcactgaatttcacactgagtctgttgcaaaaagcaaagaagcagcgaggaaacaaagttccatgccaccttgttgtcctgacaaatggcatgtccaa

SEQ ID NO: 751313 - DNA, 120 bp, Artificial Sequence
  ENSG00000206384_14 (sequence is synthesized)
ggatagcatcttggagcctgcaaacagactgagagaagagcacatccgagtttatgctatcgggatcaaggaggccaaccaaacacagctgagagaaattgcaggagaggaaaagagagt

SEQ ID NO: 751314 - DNA, 120 bp, Artificial Sequence
  ENSG00000206384_15 (sequence is synthesized)
gtattacgtgcatgactttgatgcattgaaagacataagaaaccaagttgttcaagaaatctgtactgaagaagcttgcaaagagatgaaagctgacatcatgtttctggtggacagttc

SEQ ID NO: 751315 - DNA, 120 bp, Artificial Sequence
  ENSG00000206384_16 (sequence is synthesized)
tggaagtataggacctgaaaacttcagcaaaatgaaaacatttatgaaaaacctggtgagcaagtctcagattggaccagatcgggtgcaaattggtgtagtccagttcagcgacatcaa

SEQ ID NO: 751316 - DNA, 120 bp, Artificial Sequence
  ENSG00000206384_17 (sequence is synthesized)
taaggaagagtttcagctcaacagattcatgtcccaaagcgacatttcaaatgcaatagaccaaatggctcacattggacaaaccaccctgactggtagtgccctgagctttgtgtctca

SEQ ID NO: 751317 - DNA, 120 bp, Artificial Sequence
  ENSG00000206384_18 (sequence is synthesized)
gtacttcagccccaccaagggcgcccggcccaacatcagaaagtttctcatcctcatcacggatggtgaagctcaggacatagtaaaggaaccagcagtagtgcttcggcaagaaggtgt

SEQ ID NO: 751318 - DNA, 120 bp, Artificial Sequence
  ENSG00000206384_19 (sequence is synthesized)
aatcatctattctgtgggagtgtttggctccaatgtcacccagcttgaggagatcagtgggaggcccgagatggttttttatgttgagaattttgacattctgcagcgcattgaagatga

SEQ ID NO: 751319 - DNA, 120 bp, Artificial Sequence
  ENSG00000206384_20 (sequence is synthesized)
tcttgtttttggaatatgcagcccccgtgaagaatgcaagcggattgaagttttagacgttgtgtttgtcattgatagctctggcagtattgactatgatgagtataatatcatgaagga

SEQ ID NO: 751320 - DNA, 120 bp, Artificial Sequence
  ENSG00000206384_21 (sequence is synthesized)
ttttatgattggcttagtgaaaaaagctgatgtgggcaagaatcaggtccggtttggggctctgaagtatgctgatgacccagaggtgctgttttatctggatgactttggcacaaaact

SEQ ID NO: 751321 - DNA, 120 bp, Artificial Sequence
  ENSG00000206384_22 (sequence is synthesized)
ggaggtaatttcagtgctccagaatgaccaagccatgggtggcagtacttatactgctgaggcactgggcttctcagaccacatgttcactgaagcccggggcagccgcctgaacaaggg

SEQ ID NO: 751322 - DNA, 120 bp, Artificial Sequence
  ENSG00000206384_23 (sequence is synthesized)
ggtcccccaagtcctcattgtgatcaccgatggggaatcccatgatgctgataaactcaatgccacggcaaaggccttgcgggacaaaggcattcttgtcctggctgtggggattgatgg

SEQ ID NO: 751323 - DNA, 120 bp, Artificial Sequence
  ENSG00000206384_24 (sequence is synthesized)
tgccaatcccgtggagctgttagccatggcaggatcaagcgacaagtacttcttcgtggagacttttggaggtctgaagggaatattttcagatgtgacagccagtgtctgcaactcttc

SEQ ID NO: 751324 - DNA, 120 bp, Artificial Sequence
  ENSG00000206384_25 (sequence is synthesized)
aaaagtagattgtgaaattgacaaagtagatcttgttttccttatggatggttcaactagcattcagccaaatgacttcaagaaaatgaaggaatttctggcatctgttgttcaagactt

SEQ ID NO: 751325 - DNA, 120 bp, Artificial Sequence
  ENSG00000206384_26 (sequence is synthesized)
tgatgtcagcctcaacagagtgcgaataggagcggcccagtttagcgatacctatcacccggagtttccactgggaactttcataggtgaaaaagagatatcatttcagattgaaaacat

SEQ ID NO: 751326 - DNA, 120 bp, Artificial Sequence
  ENSG00000206384_27 (sequence is synthesized)
caagcagatctttggaaacacacacatcggtgctgcactcagggaggtggaacattacttcaggccagacatgggcagcaggataaatacaggtaccccacaggtgctgctggtccttac

SEQ ID NO: 751327 - DNA, 120 bp, Artificial Sequence
  ENSG00000206384_28 (sequence is synthesized)
agatggccagtcccaagacgaggtggcccaggccgcggaagccctgagacacagaggtatcgacatctactccgtgggcattggggatgtggatgaccagcagctcattcagatcaccgg

SEQ ID NO: 751328 - DNA, 120 bp, Artificial Sequence
  ENSG00000206384_29 (sequence is synthesized)
gactgcagagaaaaaactgacagtgcacaacttcgatgaactgaagaaggtcaataaaaggatcgttcgcaacatctgtaccacagcgggtgaaagcaactgtttcgtggatgttgtggt

SEQ ID NO: 751329 - DNA, 120 bp, Artificial Sequence
  ENSG00000206384_30 (sequence is synthesized)
gggatttgatgtctcaactcaggagaaagggcagactttgcttgaaggtcagccttggatggaaacctaccttcaagacatcttacgtgccatcagctccctcaatggagtaagctgtga

SEQ ID NO: 751330 - DNA, 120 bp, Artificial Sequence
  ENSG00000206384_31 (sequence is synthesized)
ggtgggcacagagactcaggtcagtgtggcttttcaagtgaccaatgccatggaaaaatattctcccaagtttgagatctacagtgaaaacatactgaatagcttgaaggatataacagt

SEQ ID NO: 751331 - DNA, 120 bp, Artificial Sequence
  ENSG00000206384_32 (sequence is synthesized)
taaaggaccatctcttctcaatgcaaacctcttggattctctatgggatacatttcagaataaatcagctgctcgaggaaaggtggtccttttattttcagatggattggatgatgatgt

SEQ ID NO: 751332 - DNA, 120 bp, Artificial Sequence
  ENSG00000206384_33 (sequence is synthesized)
tgagaaacttgaacaaaaatctgatgaacttagaaaagaaggcctgaatgccctcataactgttgctctggatggacctgctgattcaagtgacttggctgatcttccctatattgaatt

SEQ ID NO: 751333 - DNA, 120 bp, Artificial Sequence
  ENSG00000206384_34 (sequence is synthesized)
tgggaaaggatttgagtacaggacacagctctctattggcatgagagaacttggaagccggctgtcaaagcagctggtcaatgttgctgaaaggacatgctgctgtttgttctgcaagtg

SEQ ID NO: 751334 - DNA, 120 bp, Artificial Sequence
  ENSG00000206384_35 (sequence is synthesized)
cattggaggagatggcacaatgggagatcctggaccaccagggaaaaggggacctccaggttttaaaggcagtgaaggctacctgggagaggagggaatcgctggagaaagaggagcccc

SEQ ID NO: 751335 - DNA, 120 bp, Artificial Sequence
  ENSG00000206384_36 (sequence is synthesized)
tggaccagtgggagagcaaggtactaagggatgctatggcaccaaaggtcctaagggaaacagaggactaaatggacaggagggagaagttggggaaaatggaattgacggattaaacgg

SEQ ID NO: 751336 - DNA, 120 bp, Artificial Sequence
  ENSG00000206384_37 (sequence is synthesized)
agaacagggtgataatggtcttcctggaagaaaaggagaaaagggagatgagggatctcagggaagcccagggaagagagggactcctggtgaccgtggagcaaagggcctgcgagggga

SEQ ID NO: 751337 - DNA, 120 bp, Artificial Sequence
  ENSG00000206384_38 (sequence is synthesized)
tcccggagctcctggagttgacagtagcatagaaggacccacaggcttgaaaggagaacgtggaagacaaggcagaagaggctggccaggcccccccgggacaccaggctccagaagaaa

SEQ ID NO: 751338 - DNA, 120 bp, Artificial Sequence
  ENSG00000206384_39 (sequence is synthesized)
agggcccaagaggagaggctggtgtgaaaggagaaaaaggaggtgtgggaagtaaaggtccccaggggcctccaggacccggaggagaggcagggaatcaaggccgtttgggaagccaag

SEQ ID NO: 751339 - DNA, 120 bp, Artificial Sequence
  ENSG00000206384_40 (sequence is synthesized)
gaaataaaggagaacctggagatctgggagaaaaaggagctgttggctttcctggtcctcgtggcttgcagggcaatgatggcagtccaggttatggtagtgtcggacgcaagggagcaa

SEQ ID NO: 751340 - DNA, 120 bp, Artificial Sequence
  ENSG00000206384_41 (sequence is synthesized)
agggacaagaaggattccctggagaaagtggacctaagggtgagattggggaccctggtggtccaggagagactgggctgaagggagctagaggcaaaatgatatctgctgggcttccag

SEQ ID NO: 751341 - DNA, 120 bp, Artificial Sequence
  ENSG00000206384_42 (sequence is synthesized)
gagagatgggatcccctggggaaccaggacctcctggacgtaagggtgtgaaaggagccaaaggcttggcttcattttctacatgtgagctcattcagtatgtgcgagaccgcagtcctg

SEQ ID NO: 751342 - DNA, 120 bp, Artificial Sequence
  ENSG00000206384_43 (sequence is synthesized)
gcaggcatggaaaaccggaatgcccagtgcacccaaccgagttggtgtttgccctggaccactcccgggatgtcactgagcaggaatttgagcggatgaaggagatgatggctttcctgg

SEQ ID NO: 751343 - DNA, 120 bp, Artificial Sequence
  ENSG00000206384_44 (sequence is synthesized)
tgagagacattaaggtccgggagaacagctgccccgtgggagcgcacatcgccatcctctcctataactcccacgccaggcaccttgtgcgcttctcagacgcctacaagaagagtcaac

SEQ ID NO: 751344 - DNA, 120 bp, Artificial Sequence
  ENSG00000206384_45 (sequence is synthesized)
ttctcagagaaattgaaactattccttatgagagatcctctgccagcagggagattggcagagcaatgcggtttatttccaggaatgtcttcaagcggacgcttccgggggcacacacga

SEQ ID NO: 751345 - DNA, 120 bp, Artificial Sequence
  ENSG00000206384_46 (sequence is synthesized)
gaaaaatcgccacatttttcagcagcggtcagtccgcggatgcccactccatcaccacggctgccatggagttcggcgcgcttgaaatcattcccgtggtgatcactttcagcaacgtgc

SEQ ID NO: 751346 - DNA, 120 bp, Artificial Sequence
  ENSG00000206384_47 (sequence is synthesized)
cctcggtcaggcgcgcatttgcgattgacgacactggcacatttcaagtaatagtggttccctccggggccgactacataccagcattagagagactccagcggtgcactttctgctatg

SEQ ID NO: 751347 - DNA, 120 bp, Artificial Sequence
  ENSG00000206384_48 (sequence is synthesized)
atgtgtgcaagccagatgcttcttgtgaccaagccagaccaccccctgtgcagtcttacatggatgctgctttccttctggatgcctcccggaacatgggaagtgctgaatttgaagaca

SEQ ID NO: 751348 - DNA, 120 bp, Artificial Sequence
  ENSG00000206384_49 (sequence is synthesized)
taagagccttccttggagcactattagatcactttgaaatcaccccagagccggagacttctgtcactggagaccgggtggccctattgagccatgctccccccgacttcctacccaaca

SEQ ID NO: 751349 - DNA, 120 bp, Artificial Sequence
  ENSG00000206384_50 (sequence is synthesized)
ctcagaagagtccagttagagctgagttcaatcttaccacctacagaagtaagcgcctcatgaagaggcatgtgcacgagtcagttaaacaactaaatggagatgcttttattggtcatg

SEQ ID NO: 751350 - DNA, 120 bp, Artificial Sequence
  ENSG00000206384_51 (sequence is synthesized)
ccttacagtggactctggacaatgtatttttaagtacacccaatctgagaagaaacaaagtcatatttgtgatatctgctggggaaaccagccacttagatggggaaatcttaaagaagg

SEQ ID NO: 751351 - DNA, 120 bp, Artificial Sequence
  ENSG00000206384_52 (sequence is synthesized)
aatccttgcgagccaaatgtcagggatatgccttatttgtgttttcccttggccctatttgggatgacaaggaactggaggatctcgccagccaccctttggatcaccacctggtccagc

SEQ ID NO: 751352 - DNA, 120 bp, Artificial Sequence
  ENSG00000206384_53 (sequence is synthesized)
ttggccgaattcataaacctgaccacagttatggtgtgaagtttgtgaagtcctttataaactcaatcaggcgtgcaatcaacaaatatccaccaataaacttaaaaataaagtgcaaca

SEQ ID NO: 751353 - DNA, 120 bp, Artificial Sequence
  ENSG00000206384_54 (sequence is synthesized)
gacttaactctatagatccaaagcagcccccacgaccattccgaagctttgttcctggaccacttaaagctaccctcaaagaagatgtattacagaaggcaaaattctttcaagataaaa

SEQ ID NO: 751354 - DNA, 120 bp, Artificial Sequence
  ENSG00000206384_55 (sequence is synthesized)
aatatctttcaagagtagcaagaagtggcagagatgatgctattcaaaattttatgagaagcacctcccatacctttaagaatggaaggatgatagaaagtgctcccaaacaacatgatt

SEQ ID NO: 751355 - DNA, 120 bp, Artificial Sequence
  ENSG00000206384_56 (sequence is synthesized)
aaaaaaatgcttgaacaacttagccttaggaagcatggtaagactctggacttaaatagtaactaaatctgctgccagaactcaagcaacagtttgtaggttatcaggtgacttgacccc

SEQ ID NO: 751356 - DNA, 120 bp, Artificial Sequence
  ENSG00000206384_57 (sequence is synthesized)
ctgcattcattggtattaagatatatcttgttcatttatttgaccactcctgacaattccagcactctacgactgatatgtcgaagaactgtttcattagaagacagaagaatgaaagaa

SEQ ID NO: 751357 - DNA, 120 bp, Artificial Sequence
  ENSG00000206384_58 (sequence is synthesized)
gtgttttgaaaagtctaatggagatataatttgaaggtaaaatttatatgatgtatgcatatgtgtacatgggtcaatgttaattcttttatctctgtccagttcattttctgcaaaccc

SEQ ID NO: 751358 - DNA, 120 bp, Artificial Sequence
  ENSG00000206384_59 (sequence is synthesized)
atcctcctttcctaatttagtaatgtctaatgctcatctatttagtcaaagttattttttaatgttttaagctactccaaaatttatcctagaaatggatgctgtttatatgtcgtattt

SEQ ID NO: 751359 - DNA, 120 bp, Artificial Sequence
  ENSG00000206384_60 (sequence is synthesized)
ttttaaaacgtgaccttctattccacttaaacacaccactgtgggagttgtttgcttggactgatgagaagagggtaattttctccatctctaaatcctcctgaactcactgaaaaactc

SEQ ID NO: 751360 - DNA, 120 bp, Artificial Sequence
  ENSG00000206384_61 (sequence is synthesized)
attaattcccgcagaacataaattattgcttttgagctggaagttttctcttcattaggaagcttactgccattttgatggagcttgaagcccccattttgatggacttctagtctgtct

SEQ ID NO: 751361 - DNA, 120 bp, Artificial Sequence
  ENSG00000206384_62 (sequence is synthesized)
ttcctgttatggtcatttattaattttcactaatccatatattctttagacaaggagagtcaagaaactacttgtcatagatgaagctctgagttacttttacccatcaggtagctgttt

SEQ ID NO: 751362 - DNA, 120 bp, Artificial Sequence
  ENSG00000206384_63 (sequence is synthesized)
agtcaataataaacagcaccaaaacaggattagcagagctcttaaaaacagccttaaatacacactgagtttagaaaaatgtaagaaaatcattgttttaatctacaaattcatatgcag

SEQ ID NO: 751363 - DNA, 120 bp, Artificial Sequence
  ENSG00000206384_64 (sequence is synthesized)
ttgcagagatgcaaaagagatcagagtaagttaaagtaggaaaggttttataaaagtattgatggctgtgtcctcatctgcatttttgtttttatgatagggctgatattttcaacaacg

SEQ ID NO: 751364 - DNA, 120 bp, Artificial Sequence
  ENSG00000206384_65 (sequence is synthesized)
aaacacccaatgttcagaccttacctcagtctaagagctggctccacagttggtagcaatggccctgttaggcagactgtccccctctttgggaatggaaagaagccctgcctggatgca

SEQ ID NO: 751365 - DNA, 120 bp, Artificial Sequence
  ENSG00000206384_66 (sequence is synthesized)
tggagcagatggatactgacaccaaggacattcagattttctttcctatacctattttcataaaatttggaaagaaaaactatctgcagtatttttttaaaacgacttctgctattctta

SEQ ID NO: 751366 - DNA, 120 bp, Artificial Sequence
  ENSG00000206384_67 (sequence is synthesized)
cttagagaaatccagtgatagcacctcatgtcttcagaggagcaagaagttcaaggagttaaatgtcacattcatactcaggtaatagagaagaataaaacacatcaggtttgcttcatc

SEQ ID NO: 751367 - DNA, 120 bp, Artificial Sequence
  ENSG00000206384_68 (sequence is synthesized)
tatcctaagtggtgcttaggggttcagaaaaaatgtttcaagtacaggaaattaatgagcaatatttacaatgtattttaataaaagggatttttctagttaactctgagttaagcacga

SEQ ID NO: 751368 - DNA, 120 bp, Artificial Sequence
  ENSG00000206384_69 (sequence is synthesized)
actcctttcttttgttaattgttggaaataccattaagatgtatttgtctgtttttctgcattggcaagtaaagaacataaaacaaatattcccttggtgacagattatttttagtattt

SEQ ID NO: 751369 - DNA, 120 bp, Artificial Sequence
  ENSG00000206384_70 (sequence is synthesized)
tgggccatcttttgaatcactaataggtgagagctctaaagcatgctgcaaatagaagttcctttttaaaaatccctaatattagtattttccctgatttacctctttctcctaaaagtg

SEQ ID NO: 751370 - DNA, 120 bp, Artificial Sequence
  ENSG00000206384_71 (sequence is synthesized)
gaaacagcaaaaattaagttgaatataaatttaataaagctatatttaacccaagaatcacacaagccaggatgcttcttggtttaaaaatgtgaattaatcgactgtaaaggaactgcc

SEQ ID NO: 751371 - DNA, 120 bp, Artificial Sequence
  ENSG00000206384_72 (sequence is synthesized)
tcccattatctctgcactgagctatgaatcaaactttttttttttaagtagaggtcaaaaggagatgcaacttaacacggcatcagattgtaatacttagaattcaaccaaataactttt

SEQ ID NO: 751372 - DNA, 120 bp, Artificial Sequence
  ENSG00000206384_73 (sequence is synthesized)
ttttaaaactggggcttttctgtggggcaaggggacagagaagaatgggtggtagcaggagataaggggagaaaaggatcatatctctgtcagcccactccatttttttttcttagcact

SEQ ID NO: 751373 - DNA, 120 bp, Artificial Sequence
  ENSG00000206384_74 (sequence is synthesized)
tcccatatttatcagtcttacagcttatctatctaatggctccaggctgaagtccaatctcagcattacagtttatatagcaaaaaaaattttccccaacccccttggagactctaaatc

SEQ ID NO: 751374 - DNA, 120 bp, Artificial Sequence
  ENSG00000206384_75 (sequence is synthesized)
tgacttagtagctagaaaccctgtaaatatggtcttagcagacattaagggaaacaaagccaaggcaacatgacaatgccaaatttgcaatttctaccaatccactaagctatcaggcct

SEQ ID NO: 751375 - DNA, 120 bp, Artificial Sequence
  ENSG00000206384_76 (sequence is synthesized)
agttagtccatcattcctaactttgacatttctgaacgactggcattttctgacagttttgttgtttacctgtctaaaaactaagtacagttggctctgtatctgtgggtgttccacatc

SEQ ID NO: 751376 - DNA, 120 bp, Artificial Sequence
  ENSG00000206384_77 (sequence is synthesized)
catgaattcaaccgtggataaaaaatattcagaaaaagaaggatggttgtgtctgtactgaacatgtacagacatttttcttttcattctctaaacaatagagtataacaactatttagc

SEQ ID NO: 751377 - DNA, 120 bp, Artificial Sequence
  ENSG00000206384_78 (sequence is synthesized)
atttacagtgtattatgtatcgcaagtgacctagaaataatttgaagtatatgagaagatgtgtgtagattatatgcaaatacaacgtcattttatgtaagagactagagcatctgtggg

SEQ ID NO: 751378 - DNA, 120 bp, Artificial Sequence
  ENSG00000206418_0 (sequence is synthesized)
gctgccgctactgcggagtagctgcttcccttcctcctctcccggcggcggcggcggcagcggcggaggaggaggaggaggggacccgggcgcagagagccggccggcggcgcagttgca

SEQ ID NO: 751379 - DNA, 80 bp, Artificial Sequence
  ENSG00000206418_1 (sequence is synthesized)
gagccgcatgcgtgtatggatccgggcgccgcgctgcagaggcgggccgggggcggcggcggtctgggcgcgggctcccc

SEQ ID NO: 751380 - DNA, 120 bp, Artificial Sequence
  ENSG00000206418_2 (sequence is synthesized)
cggccagggccgccggaggaagcagccccccaggccggccgacttcaagttgcaggtcatcattatcggctcccgcggcgtgggcaagaccagcctgatggagcgcttcaccgacgacac

SEQ ID NO: 751381 - DNA, 120 bp, Artificial Sequence
  ENSG00000206418_3 (sequence is synthesized)
cttctgcgaggcctgcaagtccaccgtgggtgttgacttcaaaatcaaaactgtagagctaagaggaaagaaaattagattacagatctgggacacagcaggtcaggagagattcaacag

SEQ ID NO: 751382 - DNA, 120 bp, Artificial Sequence
  ENSG00000206418_4 (sequence is synthesized)
cattacctcagcttattacagaagtgccaaggggatcatattagtatatgatatcactaagaaggagacatttgatgatttgccgaaatggatgaagatgattgataagtatgcttcaga

SEQ ID NO: 751383 - DNA, 120 bp, Artificial Sequence
  ENSG00000206418_5 (sequence is synthesized)
agatgcagagcttctcttagttggaaataagttggactgtgaaacggacagagaaatcaccaggcagcagggggaaaagtttgcacagcagatcactgggatgcggttctgtgaagcaag

SEQ ID NO: 751384 - DNA, 120 bp, Artificial Sequence
  ENSG00000206418_6 (sequence is synthesized)
tgccaaggataacttcaatgtggacgagatatttttgaaacttgtcgatgacattctgaaaaagatgcctctggatattttaaggaatgagttgtccaatagtatcctgtcgttacaacc

SEQ ID NO: 751385 - DNA, 120 bp, Artificial Sequence
  ENSG00000206418_7 (sequence is synthesized)
ggggaaaaaacgttctattctgcactacaatcattttgacaatttcctttcgcactttgtaatccaagtcagagctatacactaacttgtaaatatgcatatatgcaatcctgggtaagt

SEQ ID NO: 751386 - DNA, 120 bp, Artificial Sequence
  ENSG00000206418_8 (sequence is synthesized)
tttggttataagttacctatttccctccaaattattatatttcattcattaccccagtgtctagtgtacatacactgggaaacctagtacttctaatatgaagaatgggagaaatgaaag

SEQ ID NO: 751387 - DNA, 120 bp, Artificial Sequence
  ENSG00000206418_9 (sequence is synthesized)
gtataatgtttcttgaaataaataatataattgtccttattaattatattatgaggacagaagatattctgataagagagaacgtggtgctttgcttaccgttttaaagaaaatttgtaa

SEQ ID NO: 751388 - DNA, 120 bp, Artificial Sequence
  ENSG00000206418_10 (sequence is synthesized)
aactaaagactttttgaaaaaaagctatcttaagtgctttttctttatttacaagacatttcccccagtggtagcatctgaagtattggagtgtttctgccacgaagcaaagctccattc

SEQ ID NO: 751389 - DNA, 120 bp, Artificial Sequence
  ENSG00000206418_11 (sequence is synthesized)
atggccgtcatggaaggttatttattaatgttacataatggtagaatattactagttagagggttggatttgacttggtcctaaggccacagaatctctctcatggcttcctaagggatg

SEQ ID NO: 751390 - DNA, 120 bp, Artificial Sequence
  ENSG00000206418_12 (sequence is synthesized)
tacctttatgcttttaagaactacaaagattcaataaagaaagaaatgtttttgaaactatagaaaaagattttaaaacacgctgctgtcctaaacaaatcctgtttaaaggaattttaa

SEQ ID NO: 751391 - DNA, 120 bp, Artificial Sequence
  ENSG00000206418_13 (sequence is synthesized)
agagatgcattttactatatcaaagaacatacgtgtatttgcctaaacactctgtacctttgtaatgataaaacttcccccttctttacggtgaagcttattctgattaagcctagactg

SEQ ID NO: 751392 - DNA, 120 bp, Artificial Sequence
  ENSG00000206418_14 (sequence is synthesized)
ttttttttttttttttttggtctgatgatgaatttgtgaactctatctttggtatatcttttattaaactgcactgttttgtttagtcaaggtaattaagtaattatgtatttgaataac

SEQ ID NO: 751393 - DNA, 120 bp, Artificial Sequence
  ENSG00000206418_15 (sequence is synthesized)
aaggtaattaagtaattatgtatttgaataacttggtgtgtcttgagtgttgtggtatgaaaagcattgtggtctttctacactaatgaagtgcaaataaaattttgtatttatgaatga

SEQ ID NO: 751394 - DNA, 120 bp, Artificial Sequence
  ENSG00000206418_16 (sequence is synthesized)
tattttgatgttatattagcattcctgttgctgattttctgtcttgagggaaaaagttattcaggagagtatgttgatcttggttcataatccatctccattaatctaatttagttgtta

SEQ ID NO: 751395 - DNA, 120 bp, Artificial Sequence
  ENSG00000206418_17 (sequence is synthesized)
aatataaaggtattttctatgtcatagttttagtcaacctaaatttttcctactttctttaagtgtggtcatcaggtcaaagggaaataggggttactctcgttcttttttcgcagaaaa

SEQ ID NO: 751396 - DNA, 120 bp, Artificial Sequence
  ENSG00000206422_0 (sequence is synthesized)
gaagggaaggtacaatgggggccaggcagtcaagggccagctccaaggataagggccccaagaggatgctgttcacggggaggagacagaagttttctccgtgggacgatgccctgctct

SEQ ID NO: 751397 - DNA, 120 bp, Artificial Sequence
  ENSG00000206422_1 (sequence is synthesized)
cgggaagggacccgcggtccctgctgaagcggggcatgcaccacgtcagcttcagcctggtcacgagaggaatgacagacatccccgactttctgtggggcttgtccgaggtccagaaac

SEQ ID NO: 751398 - DNA, 120 bp, Artificial Sequence
  ENSG00000206422_2 (sequence is synthesized)
tcaatctgtctcacaaccagctccgggttctccctcccgaggtggggaaactgacccggatcgtggtcctgaacttgtgcgggaaccgcctgaagagcctgcccagagaagtgagcctcc

SEQ ID NO: 751399 - DNA, 120 bp, Artificial Sequence
  ENSG00000206422_3 (sequence is synthesized)
gtcctgagcttgtcgcacaactgcctgtcccagctccctgcatgcttcgccgacctctctagactgaggaagctaaacctcagcaacaacttcttcgcgcacatccccatgtgtgtgttc

SEQ ID NO: 751400 - DNA, 120 bp, Artificial Sequence
  ENSG00000206422_4 (sequence is synthesized)
tccctgaaggaactgattttcttgcacgtgggctcgaatcgcctggaaaacatcgctgagagcatccagcacctggccagcctgcagatcttcatcgcagagggcaacaacatccactcc

SEQ ID NO: 751401 - DNA, 120 bp, Artificial Sequence
  ENSG00000206422_5 (sequence is synthesized)
ttcccgaggtcgctttgcctggtcaccagcctggagctgctgaacctcaacaacaatgacatccagaccctcccgagcgaactccacctgctgtgtagactggtgaggatcgcctggaat

SEQ ID NO: 751402 - DNA, 120 bp, Artificial Sequence
  ENSG00000206422_6 (sequence is synthesized)
cccatggacaaagggctccacatttcccacaaccctttatccaagcctctgccggagctggtggaggggggcctggagatgctcttcggctacctgaaggacaaaaaacacacctgacct

SEQ ID NO: 751403 - DNA, 120 bp, Artificial Sequence
  ENSG00000206432_0 (sequence is synthesized)
cctccatcccagaggctagtcctgcactccaggagctcgccatgatcgccaccggcggcctgctaaggatttccgccagaaagcaggatccactccgccccccaagccagatacccaagc

SEQ ID NO: 751404 - DNA, 120 bp, Artificial Sequence
  ENSG00000206432_1 (sequence is synthesized)
gcaagcggaaagccaagaagaggcgcaagaacgacgtggtggtggtgaaaggcaagctgaagctgtgctccatctcagggctcatcgccctctgtgggatcctggtgctgctggtgggca

SEQ ID NO: 751405 - DNA, 120 bp, Artificial Sequence
  ENSG00000206432_2 (sequence is synthesized)
tagccatggcggtggtgggctactggcccaaggccaccgggaccaatcgggaggggggtaagcagctgccgcctgcgggcagcagccaccgggtcccaaccacggccaacagcagtagca

SEQ ID NO: 751406 - DNA, 120 bp, Artificial Sequence
  ENSG00000206432_3 (sequence is synthesized)
gtggcagcaaaaaccggtccaggagccaccctagggctccagggggtgtcaactccagttccgcgggcgcgcccaggagcacgcctccagcacgagccgcctccccgtcctcctcctcca

SEQ ID NO: 751407 - DNA, 120 bp, Artificial Sequence
  ENSG00000206432_4 (sequence is synthesized)
cgtccgtgggcttcttcttccgcatcttctctggctacctgcactctgacaagctcaaggtcttcgggcccctcatcatgggcatcggcatcttcctcttcatctgcgcaaacgcggtcc

SEQ ID NO: 751408 - DNA, 120 bp, Artificial Sequence
  ENSG00000206432_5 (sequence is synthesized)
tccacgagaaccgggacaagaagaccaaaatcatcaacctgcgggacctctactccaccgtcatcgacgtgcacagcctccgcgccaaagacctggcggccgccgcggccgccgccgcgg

SEQ ID NO: 751409 - DNA, 120 bp, Artificial Sequence
  ENSG00000206432_6 (sequence is synthesized)
ccgccgccgcctcttcgtcgtcgtctgcccccgccgcggcgccccccggggccataccgctcaacggcttcctcagctacgtgcagtcgcggggcctggagctgaagcccgggggctgcg

SEQ ID NO: 751410 - DNA, 80 bp, Artificial Sequence
  ENSG00000206432_7 (sequence is synthesized)
gtggctccggggacgccttcggagcggcggcgatgctggccaagggctcgtggcctcctcaccccgcggcgccgagcggc

SEQ ID NO: 751411 - DNA, 120 bp, Artificial Sequence
  ENSG00000206432_8 (sequence is synthesized)
cggacctggcctcttccccgcgctgtccgcgggagcccccgagcctggccgaggccgtgtacagcgtctaccgcgagcgctcgggcgtggcaggcagtcgccgggccgccgctgccaccg

SEQ ID NO: 751412 - DNA, 120 bp, Artificial Sequence
  ENSG00000206432_9 (sequence is synthesized)
ctagcagctgcagcagtccggcgccctgcagcccacccgagagctgggggcgccagagcacggccagctccttcgtggactcctcgctgagcgccttcgcgctgctgcccttgcaagggg

SEQ ID NO: 751413 - DNA, 120 bp, Artificial Sequence
  ENSG00000206432_10 (sequence is synthesized)
gccgcgataggggcggggacgcggagggcgcgagctgcagctggcagaggcctccgggggaacgcggctcccaggagatcccgaggggcgagctcgacctgagcatgaccaacctccgcg

SEQ ID NO: 751414 - DNA, 80 bp, Artificial Sequence
  ENSG00000206432_11 (sequence is synthesized)
atgaccaacctccgcggcgcagagggcagcatgcgcggggcgcgccgggagccggaggagcccgagggcgcggtagcggc

SEQ ID NO: 751415 - DNA, 80 bp, Artificial Sequence
  ENSG00000206432_12 (sequence is synthesized)
ccgtcccccgagcccccgccctccccggggagtgcggacccggactccagccctctggccaaggccgcctccccctcgcc

SEQ ID NO: 751416 - DNA, 120 bp, Artificial Sequence
  ENSG00000206432_13 (sequence is synthesized)
cgccacccctgcggctggagggctcgccccccaccaggcgggactccgggagctcccagtcggatgacccatccagcagcaataagggctacacacccctgcgggaggccggcacctcca

SEQ ID NO: 751417 - DNA, 120 bp, Artificial Sequence
  ENSG00000206432_14 (sequence is synthesized)
ccgagtcggtcttggacgcagtagctggtcaaacgcgagactctgctgtggccgcccccgttctgggtgcggagcagagctcgccggagggtgccagccaggagccacccacggccgagc

SEQ ID NO: 751418 - DNA, 120 bp, Artificial Sequence
  ENSG00000206432_15 (sequence is synthesized)
aacctcagccggtgcagaggcagtttacaaacaaggagaaactcatcatgatttccaggtctcatgccataggggtagaagaagaactggaaagcacaggcatttagagaaaggggtggg

SEQ ID NO: 751419 - DNA, 120 bp, Artificial Sequence
  ENSG00000206432_16 (sequence is synthesized)
gcggactctggcccctagctccccgagagcgcccctcggatgctgctggggagaccctccgggcctctctttggggcctctggggcccgcggctcagacagcaacagccgccagtccggc

SEQ ID NO: 751420 - DNA, 80 bp, Artificial Sequence
  ENSG00000206432_17 (sequence is synthesized)
cgccccgagccgccgccgcgggctcaactccacccggcggagcccggcgcgccgcagccacacaaaagaggcgcgagggc

SEQ ID NO: 751421 - DNA, 120 bp, Artificial Sequence
  ENSG00000206432_18 (sequence is synthesized)
taggggacgccgggagctggaggatgagcggcggagaggagggctccgaggcgggatgcgggatgcgggatgcggaggacctgacacttcttggaaactcttggaaatggctcccgccac

SEQ ID NO: 751422 - DNA, 120 bp, Artificial Sequence
  ENSG00000206432_19 (sequence is synthesized)
cggggactgcgagcctggggcgggcgctcgcccccgcggggctgctgagtcgcgctcggatgcggggccccggggcgctgtccctgcgctccgccgtcggctcgggctgaaaaagtttct

SEQ ID NO: 751423 - DNA, 120 bp, Artificial Sequence
  ENSG00000206432_20 (sequence is synthesized)
aagtttctccatggttcctttgtgtcgcccgagcgcccgttcgccggccccgacctccctcggtctccctggcaggaggaggtggctgagcagctagtgggcagttggcgccctccctgt

SEQ ID NO: 751424 - DNA, 120 bp, Artificial Sequence
  ENSG00000206432_21 (sequence is synthesized)
agaatgttatccttgaattgcgtccacaagattcctgtagataactccaaggatttttttttttaagcaaactagtctttttatgtccgatggtgattgtatgttcaatgaaaaccaaat

SEQ ID NO: 751425 - DNA, 120 bp, Artificial Sequence
  ENSG00000206432_22 (sequence is synthesized)
gtattaaaaggtcagcaatctagtccattagataaaatcttttaattttcttaggatcaaaataatatatttttgacagtaactgtgcactttactccgacttttttttttaatccctca

SEQ ID NO: 751426 - DNA, 120 bp, Artificial Sequence
  ENSG00000206432_23 (sequence is synthesized)
tttcccgacccctgtactctgcgctggttttgcccacagctgcttgcgaatggcaggcttttttctccattcctttgcggaacatagaagagtttgtctcagttctcttagaattgatgt

SEQ ID NO: 751427 - DNA, 120 bp, Artificial Sequence
  ENSG00000206432_24 (sequence is synthesized)
tactaactgaagtcaaagccaaaagcatgaataattcaggaacgagcactttccttgccccaccccactgtgctcacccaatgcccaaaagcttcttcatttttaaacgggtgtgtacgt

SEQ ID NO: 751428 - DNA, 120 bp, Artificial Sequence
  ENSG00000206432_25 (sequence is synthesized)
tttgctactaggctatgtggtggagactggaggggaccaggaactagatggactgttacattccgaaatttatatcaagtacaccatgctttattgagtgttatcacacctgtattgaaa

SEQ ID NO: 751429 - DNA, 120 bp, Artificial Sequence
  ENSG00000206432_26 (sequence is synthesized)
atagcattaatatttaaaatcttttttaataaaagaagtttccgaacaaacagttaaacataatattgcctcatttgccttggagctagctcatctggtacctctgaaatattttgctgt

SEQ ID NO: 751430 - DNA, 120 bp, Artificial Sequence
  ENSG00000206432_27 (sequence is synthesized)
gacactgctaccaggactgttgtgatcttcccccaaagtactcagcaccattgtcgcatgtccagcgtatttttaagcttaaaatgtagggtagtatttaacatttgggaatttctcttt

SEQ ID NO: 751431 - DNA, 120 bp, Artificial Sequence
  ENSG00000206432_28 (sequence is synthesized)
caaatagaatgaaacgttaagtaaatagtaatatgcctatgatacttctcatttacctgcaagtattaatttgcagagcaccaggcttaatattctcttcccatcctcttggctatcact

SEQ ID NO: 751432 - DNA, 120 bp, Artificial Sequence
  ENSG00000206432_29 (sequence is synthesized)
gattataagttaatggtcttgatccatggcctacatagacaaaaagataatgttttaataatttggtagattgtttacacttgatgtcattaaaagtgaattagttaattttcaagacca

SEQ ID NO: 751433 - DNA, 120 bp, Artificial Sequence
  ENSG00000206432_30 (sequence is synthesized)
ggagacaagatgtcttcattttggtctccttgggcaaagcgctagtcctgtagacagagtgcagattccgagctgagattggacccagctgttggcatctcctagctgtgaggccttgta

SEQ ID NO: 751434 - DNA, 120 bp, Artificial Sequence
  ENSG00000206432_31 (sequence is synthesized)
caagtcacaaactctgagtctcagtcatctttctgtaaaatgaagagaaccagacatatctcatggagctatgagaggaatagaacagggtcagggtcagaggagggtttatatgtgtgg

SEQ ID NO: 751435 - DNA, 120 bp, Artificial Sequence
  ENSG00000206432_32 (sequence is synthesized)
agtttaccagaacccttggcccacaggatgtattcaatagatgggggttattgtaattattattaccattgtaatatattgctgaatgcatagtgtagaagaatggaccttccttgaact

SEQ ID NO: 751436 - DNA, 120 bp, Artificial Sequence
  ENSG00000206432_33 (sequence is synthesized)
tgagctcaagaaagtctagtctgaaatctgggatatccacctattatctgtataaccttagacaaatcacttaatccctctgggcctctggtagatgatataatctctatgatcttcagc

SEQ ID NO: 751437 - DNA, 120 bp, Artificial Sequence
  ENSG00000206432_34 (sequence is synthesized)
tctaaaagccttacttaaattcaggctcttgtcctggatgtaatcatatcacatttgtacctacaacttggcaaagagtgaatatacgtcgtcaattaccattagctcaacattctgtaa

SEQ ID NO: 751438 - DNA, 120 bp, Artificial Sequence
  ENSG00000206432_35 (sequence is synthesized)
tacactttaaaagggcctaatttattctcagattggatctgcattaaaccggtaactcactttaaggctgtagattaatatattgggctcttctataaagcaaaagtgagtttgcactaa

SEQ ID NO: 751439 - DNA, 120 bp, Artificial Sequence
  ENSG00000206432_36 (sequence is synthesized)
ggagtgacatgcaagtgtaataagacctcaaggtagtgttaaatttcaacagtctcaattgctttatcacacttccaaagtaaatgtcaaacttccttaggttttcttctccattacctt

SEQ ID NO: 751440 - DNA, 120 bp, Artificial Sequence
  ENSG00000206432_37 (sequence is synthesized)
gggtactgggtaatttatatactgagatagcgtgttacttcaaggggaaaacaggttctggtgttctacaatactgtttccagtcctcggagaatgcactgtaaatgttacatttatcaa

SEQ ID NO: 751441 - DNA, 120 bp, Artificial Sequence
  ENSG00000206432_38 (sequence is synthesized)
atgctaagtgacatttagcaaataataaagctaatacctcttagcttaactaaggaggggtggacagaatactgtttatatctcacaaacttagttccatatcagataatatctaactta

SEQ ID NO: 751442 - DNA, 120 bp, Artificial Sequence
  ENSG00000206432_39 (sequence is synthesized)
accattgaacaatttaactagattttttttctgaagatagacaaagatgagctcaattttccaaatcttgggaggagcctgtgatttctttagacttcagaggaagtgtataagtgtagt

SEQ ID NO: 751443 - DNA, 120 bp, Artificial Sequence
  ENSG00000206432_40 (sequence is synthesized)
aattcacaatcgtaactttcataggagcagaaatctgcaataatgctaattttcactcagtacttactgtgggttcagtactattgtaggagcttggtacacatgatctcagtgaatcct

SEQ ID NO: 751444 - DNA, 120 bp, Artificial Sequence
  ENSG00000206432_41 (sequence is synthesized)
cacagcaactctattgaagtaggatcattcttaccgctgttttgcagagaaagacactgaggtcagaaagatggaattgttgtccagggttacacagctggtaaatggtggatccaggat

SEQ ID NO: 751445 - DNA, 120 bp, Artificial Sequence
  ENSG00000206432_42 (sequence is synthesized)
ttacacagagtttggaagattaggtagacctgtcggcagatgctgagttgaaatgggcatttctggagaccatcaaaatactttatatattctttatttcctgccagatccctttccaga

SEQ ID NO: 751446 - DNA, 120 bp, Artificial Sequence
  ENSG00000206432_43 (sequence is synthesized)
catgaacaagtttttttgtaagtgacttttcaggggtttttgtacacaataaataagagtatttgaaagggccttatagatgatagaatccccccacctttaatttataaatgaggtttc

SEQ ID NO: 751447 - DNA, 120 bp, Artificial Sequence
  ENSG00000206432_44 (sequence is synthesized)
taagatttagaaagatggaacaatttattctgagacaaacagcagtggcaggactcgaatgttaaattaaaataattgcaacaattggtgtgatggtattttttccctgaatttctgtca

SEQ ID NO: 751448 - DNA, 120 bp, Artificial Sequence
  ENSG00000206432_45 (sequence is synthesized)
tgtaccagctgggtgaccatggacaagttacatagtctctctgtgtctcaatttccttttccacactataggaataataatgtccctatcttacaggactggagtaaagattaaatgaac

SEQ ID NO: 751449 - DNA, 120 bp, Artificial Sequence
  ENSG00000206432_46 (sequence is synthesized)
taatatttgtgtaaagtgcttataatgggcttggaacatagagagtattatacaaaggtttgttccttttatttaaaatagaatcaactgctaaacaattacttcatatgaccttccttt

SEQ ID NO: 751450 - DNA, 120 bp, Artificial Sequence
  ENSG00000206432_47 (sequence is synthesized)
ttattaatagaataattttaggcttaaaaatctaaagtataaggcaacatagcatagtggctcaaagtgtgacttagggggttatataacattataactgggtcttcacatctagtaaat

SEQ ID NO: 751451 - DNA, 120 bp, Artificial Sequence
  ENSG00000206432_48 (sequence is synthesized)
ggagataataaatggaatttggcacatagaattaattatttaaatgaggactaaataaactaatataattaaaggacttagaacaactcctggcacataaaaatattcagtaaatgttaa

SEQ ID NO: 751452 - DNA, 120 bp, Artificial Sequence
  ENSG00000206432_49 (sequence is synthesized)
ctactattattaaggcaaaatacagaaaagcaattagtaggctaaatttactactcagtagttagggacaaccataaacttaatgtactaaaaagtctttaaaatttaggtatatcagaa

SEQ ID NO: 751453 - DNA, 120 bp, Artificial Sequence
  ENSG00000206432_50 (sequence is synthesized)
agaaaagttagaccttaaaacatgagggcttatgctgctgcaatgcctcctggtagaacatagaactatcaagagctagacatatgctccttatggtcccaggatcataatattatataa

SEQ ID NO: 751454 - DNA, 120 bp, Artificial Sequence
  ENSG00000206432_51 (sequence is synthesized)
caatgaatgaacgcccaaactggcacacttggctatatttagccacaattattgcatttccatttattgaggctagccgtatcagaaaggccagtgaagtccttgaggtctcagccccct

SEQ ID NO: 751455 - DNA, 120 bp, Artificial Sequence
  ENSG00000206432_52 (sequence is synthesized)
attaggcttcaagtaaagatcaggtgctctattgagttatttaaattgtctagacaaaagttttttctatattaatttttttcttcagtaattttgagttctttaagatgcagttttgat

SEQ ID NO: 751456 - DNA, 120 bp, Artificial Sequence
  ENSG00000206432_53 (sequence is synthesized)
ttttttttgagctagagaacttaagaaaaaccctctgacacataaaattagtacagactaagtatatggacttgtatttggattaggatagtatttttgccacgatataaaaatacattt

SEQ ID NO: 751457 - DNA, 120 bp, Artificial Sequence
  ENSG00000206432_54 (sequence is synthesized)
tataaataagatcttcttgtattaagggttgcagtttaagatggatatttttcttacttataacaaagaataggttgatgtttacggagtttgttttccataaacccagactattttaaa

SEQ ID NO: 751458 - DNA, 120 bp, Artificial Sequence
  ENSG00000206432_55 (sequence is synthesized)
atttttattgctatttggaagggaggaataaaactcattgggtgaatatttagactaaatttttgaatgactaactctgaaaaacaatctaagacaccccaccctaccccagggaagtta

SEQ ID NO: 751459 - DNA, 120 bp, Artificial Sequence
  ENSG00000206432_56 (sequence is synthesized)
tctttggggttttttcttcaaaaaggaatgagattcttctttaaattgataagaaaattcaatgttttatctattaagccaccaccagttaaggagtccaactttagtcaaactacctgc

SEQ ID NO: 751460 - DNA, 120 bp, Artificial Sequence
  ENSG00000206432_57 (sequence is synthesized)
aactctgccaagacctgagaagctccttactttctgtatgccatccgttcatctatgacatcagaaaagcactgtgctagtgctgagcccacatgggtgtgaactacagtaggagttaca

SEQ ID NO: 751461 - DNA, 120 bp, Artificial Sequence
  ENSG00000206432_58 (sequence is synthesized)
aatgccagccatcctaaggacttagccttcatcccagagccagaagcatttcaggatttccaccacctggaaagatattgttattccacttgaaatgggctcttagctgttgccccttta

SEQ ID NO: 751462 - DNA, 120 bp, Artificial Sequence
  ENSG00000206432_59 (sequence is synthesized)
ataatgccagctatgacatggacatgggctgattcgttagtaagataacatactgtcattgctggtgaaaagaccgaaaaagattatgcagattctcctggagtgttacaaagtatgggc

SEQ ID NO: 751463 - DNA, 120 bp, Artificial Sequence
  ENSG00000206432_60 (sequence is synthesized)
ctgtctcaataacctgtgctttctgatcctacattgtgaccaagtcccacgaaggctgactgtcaataacaagggaggaaaataggcaggcccaggggtggaagaaaaagagcatcctgc

SEQ ID NO: 751464 - DNA, 120 bp, Artificial Sequence
  ENSG00000206432_61 (sequence is synthesized)
cgaaagaaaaaaaaagataggccagaatcactagggaagctttttgtttcataaaggagcatttggttactcttgtttacagatcattttgtatgtaaagtgtcttaaaaattgcaataa

SEQ ID NO: 751465 - DNA, 120 bp, Artificial Sequence
  ENSG00000206432_62 (sequence is synthesized)
cttttattccttagcaaatattctttttgcaaatgcatggctagacattaattcatatattttttaatatttaagaaattcaacacaacattgtattattgatgcaaacccacttgatac

SEQ ID NO: 751466 - DNA, 120 bp, Artificial Sequence
  ENSG00000206432_63 (sequence is synthesized)
aaatgctaaacacctaataatatttaataattgaaaataaatttatgggcaaatttatgaacaatttattttaagttgagaaactccagtatctttaaactatgtctatatgtctaaaga

SEQ ID NO: 751467 - DNA, 120 bp, Artificial Sequence
  ENSG00000206432_64 (sequence is synthesized)
aagaaaaaaaaatctaaaagttattaatgactgatataactaggtcagtcgaagcaaaccggatcagaaaatgactttgtctcagtggaggacttttgctattgttttatgtggctaatt

SEQ ID NO: 751468 - DNA, 120 bp, Artificial Sequence
  ENSG00000206432_65 (sequence is synthesized)
gccttttcactcccttttgtatagacacaacctaaaaaacacctgatttcacctgtatagtaagcagctgtgtttcaagcttctgcccttttggtaaactacacaaattgctttcagatg

SEQ ID NO: 751469 - DNA, 120 bp, Artificial Sequence
  ENSG00000206432_66 (sequence is synthesized)
agtttcagatatattatactctgcctatcatgagtcagataggcactgtggtaggtagaaaggacaaaaatatcctttttgtgtctgtgaaagacacaatttctgaccacagaatcttgt

SEQ ID NO: 751470 - DNA, 120 bp, Artificial Sequence
  ENSG00000206432_67 (sequence is synthesized)
aatagtattgtttctgagacaggcacataaaccataattttactataatgtgaatattacaagagagttatgatacaaatcttccagctgagtcttgagaaatgaagaaaatgtcagata

SEQ ID NO: 751471 - DNA, 120 bp, Artificial Sequence
  ENSG00000206432_68 (sequence is synthesized)
ggtacaaaaagctgggaaaggtgtgttggccagtggggccagcatgagcaaatgcagaacacaaaacacaatttaaaaagccagatgttcataaggtaattgatatttaattattaccta

SEQ ID NO: 751472 - DNA, 120 bp, Artificial Sequence
  ENSG00000206432_69 (sequence is synthesized)
gtatctccatagcatagaggtgtttattttggaaaaaaacaacaaaaacaaaacaaactatatatctctgatctatagatatagataaatagatgtctcctttataagtagcagaaggat

SEQ ID NO: 751473 - DNA, 120 bp, Artificial Sequence
  ENSG00000206432_70 (sequence is synthesized)
attcgaaattaaaattacgatggtttggcattaaaatgctcaaaatatatatacctacattctatatttaatgattcatttttaactgaccttcactagcagggcttcttaactgagaag

SEQ ID NO: 751474 - DNA, 120 bp, Artificial Sequence
  ENSG00000206432_71 (sequence is synthesized)
tatcagtacatagaactaacaaactaaattcttattggacctaagctatctttatgagcaagaatgatttttgctgaattatacattgctttaaaattaccattaaatttgaaatttcag

SEQ ID NO: 751475 - DNA, 120 bp, Artificial Sequence
  ENSG00000206432_72 (sequence is synthesized)
attctggaaatcatttccctagacgtgtgtataaggagataaaactgagaggagaatctgtcacttggcaacactgtttgcatcatggatcaagtgtgttgatccatgtaccgtaaagac

SEQ ID NO: 751476 - DNA, 120 bp, Artificial Sequence
  ENSG00000206432_73 (sequence is synthesized)
tggagacagcataaacttgggggttgttctatcaagccacaggtcatttttcagaatctacacatgataactgaatatatttctacagatttctacatcaattttgcagcagcatttata

SEQ ID NO: 751477 - DNA, 120 bp, Artificial Sequence
  ENSG00000206432_74 (sequence is synthesized)
tcaggaaacataaataatttatctttgttaataataaacatccgtttttttgttcctcacgtatgcgttcatagcaaaaggaaaggttaagacccagacatactgtcgcaaatgtgtatg

SEQ ID NO: 751478 - DNA, 120 bp, Artificial Sequence
  ENSG00000206432_75 (sequence is synthesized)
agtattgtttgtggactggcaccaaaaacactatgccttttgatttttaaacagccagtcattttgagatagtcactgaaaacagatttggccagaatagcaaagtatagatgcagctta

SEQ ID NO: 751479 - DNA, 120 bp, Artificial Sequence
  ENSG00000206432_76 (sequence is synthesized)
atactttgtttatgcacaaagctgcaaacaaaaagatacaggcaaaaaacctgcttttcaaaacaaatattctattaaagtaaaaaaaaaataattttattaacaaaagtataattttgt

SEQ ID NO: 751480 - DNA, 120 bp, Artificial Sequence
  ENSG00000206432_77 (sequence is synthesized)
tagtttgaattcctcacataattacttgatttcttcaaaatctttttagtgcataaacacagtcaaggcaaacatataaaatgtgttttctaatccatgaaagtgagaattctgcaaaac

SEQ ID NO: 751481 - DNA, 120 bp, Artificial Sequence
  ENSG00000206432_78 (sequence is synthesized)
cactttgcattatagataaaatttaatagatatcatcagttatggtttattgtcagagccactaataattcttccataaggttatatctattggtaagaagattaaaaattggaaatgct

SEQ ID NO: 751482 - DNA, 120 bp, Artificial Sequence
  ENSG00000206432_79 (sequence is synthesized)
ggtagataaagtgctgtggttaatatgtcatggtaaatgatatcaggaagcacatagaattcttgataaagagcaagaaaattcaaaagactaatttggtgacctaaatactaatccttc

SEQ ID NO: 751483 - DNA, 120 bp, Artificial Sequence
  ENSG00000206432_80 (sequence is synthesized)
tgcttatgtaaccattgcaggttaatgtgtttggagcactaaatacgacttgagtgcttgctcatttgattgtacaatttattctctttgtatttctagttttatttcagcttcatgcct

SEQ ID NO: 751484 - DNA, 120 bp, Artificial Sequence
  ENSG00000206432_81 (sequence is synthesized)
gagaacatctcttgatttattaatcttgcttgggattactactttaaaaaattgaatgcatttatagtgatagtaatagtaataataataatagtcttaaaaaagaccgaaaagtaattt

SEQ ID NO: 751485 - DNA, 120 bp, Artificial Sequence
  ENSG00000206432_82 (sequence is synthesized)
gagcactaataataagtaattgtttgcgtcccaattttttatatcttctcaaatagagagtaaattgactgatatcttctggaaacatgtgccactgaaaagccaaaacacaattgaagt

SEQ ID NO: 751486 - DNA, 120 bp, Artificial Sequence
  ENSG00000206432_83 (sequence is synthesized)
gcatgtttgcaatctcctcgttcctcaaatcccatggatgtccaaaactagaacctttctttgattcatgtaggatattctgactaagtcagagagatgctggtgaatgctttccaagat

SEQ ID NO: 751487 - DNA, 120 bp, Artificial Sequence
  ENSG00000206432_84 (sequence is synthesized)
ttcttttattataaagtgaatggaaaggacatttaataatgctatacctgcctgaaaaaaatgccagctttcattaagtcagtggcaattaaatgcaacacttggcaaataaattgaaca

SEQ ID NO: 751488 - DNA, 120 bp, Artificial Sequence
  ENSG00000206432_85 (sequence is synthesized)
aagcatctggctagcctgtaagtatgaatcatcttcaatggaagtaccaaattatagcaaaaaaaaataaagggatataaaaaggaaaataaaattcagacatgattagggccatgagta

SEQ ID NO: 751489 - DNA, 120 bp, Artificial Sequence
  ENSG00000206432_86 (sequence is synthesized)
aaaataatccaagttgatatgtggcaacttgtaatgcagcataattttagaaaattatttagtgaatgtataaatgtgacatgcctgaaaaatgttaattaaactggtttacgcaatggt

SEQ ID NO: 751490 - DNA, 120 bp, Artificial Sequence
  ENSG00000206474_0 (sequence is synthesized)
cagaaataagcaattaaggaagttcttgtcatcttttgcctgagcatgttttaaaactagagaaatgctcacccctctaaatagttgaactgtttaatgctataggagcttaaaaagaga

SEQ ID NO: 751491 - DNA, 120 bp, Artificial Sequence
  ENSG00000206474_1 (sequence is synthesized)
ggatctttctcattttttttctcctccttgaacactgtgaaatttatggtaaaatgacagaaaaagaagaaagactaagtgaatctggtaactaaagaaagagctggaaaaaagaaaact

SEQ ID NO: 751492 - DNA, 120 bp, Artificial Sequence
  ENSG00000206474_2 (sequence is synthesized)
agagggcaagaggtgataagagaggtcacctcttatcagacaggagacaagttgatggagaaaaagatctgctatgagggaaaattctgtctccagccctgcaggaagaattggaaaatc

SEQ ID NO: 751493 - DNA, 120 bp, Artificial Sequence
  ENSG00000206474_3 (sequence is synthesized)
agaaaagagtgaaaagggagctagactgacttaatcttcagcccaggtaaaactggaaagacagtttaacatgttctttagaatgataggcactatcaggaagagatgaagtcagggatt

SEQ ID NO: 751494 - DNA, 120 bp, Artificial Sequence
  ENSG00000206474_4 (sequence is synthesized)
caggctcagagagacaaatactcatccaggatcccaagagtgagcaagggtggaatatggactccaggcaaggctgcctaatttcaaagtccatgatattctaatagaaagggagatcta

SEQ ID NO: 751495 - DNA, 120 bp, Artificial Sequence
  ENSG00000206474_5 (sequence is synthesized)
gtgctgcgatcagatgcagagagaggtcatctttgcccatttcacgattccatagttgtgatttttccttgccatttcttttgtcttccagtcaaaggtatgcaggcaggatgagtgcaa

SEQ ID NO: 751496 - DNA, 120 bp, Artificial Sequence
  ENSG00000206474_6 (sequence is synthesized)
tttcctcattgtggtgctggtctccactgatgctgccctccagtcccctatgtacttcttcctgcgcaccctctcggccttggagattggctatacgtctgtcacggtccccctgctact

SEQ ID NO: 751497 - DNA, 120 bp, Artificial Sequence
  ENSG00000206474_7 (sequence is synthesized)
tcaccacctccttactggccggcgccacatctctcgctctggatgtgctctccagatgttcttcttcctcttctttggcgccacggagtgctgcctcctggcagccatggcctatgaccg

SEQ ID NO: 751498 - DNA, 120 bp, Artificial Sequence
  ENSG00000206474_8 (sequence is synthesized)
ctatgcagccatctgtgaacccctccgctacccactgctgctgagccaccgggtgtgtctacagctagctgggtcggcgtgggcctgtggggtgctggtggggctgggccacaccccttt

SEQ ID NO: 751499 - DNA, 120 bp, Artificial Sequence
  ENSG00000206474_9 (sequence is synthesized)
catcttctctttgcccttctgcggccccaataccatcccgcagttcttctgtgagatccagcctgtcctgcagctggtatgtggagacacctcgcttaatgaactgcagattatcctggc

SEQ ID NO: 751500 - DNA, 120 bp, Artificial Sequence
  ENSG00000206474_10 (sequence is synthesized)
aacagccctcctcatcctctgcccctttggcctcatcctgggctcctacgggcgtatcctcgttaccatcttccggatcccatctgttgcgggccgccgcaaggccttctccacctgctc

SEQ ID NO: 751501 - DNA, 120 bp, Artificial Sequence
  ENSG00000206474_11 (sequence is synthesized)
ctcccacctgatcatggtctccctcttctatggcaccgcactctttatctatattcgccctaaggccagctacgatccggccactgaccctctggtgtccctcttctatgctgtggtcac

SEQ ID NO: 751502 - DNA, 120 bp, Artificial Sequence
  ENSG00000206474_12 (sequence is synthesized)
ccccatcctcaaccccatcatctacagcctgcggaacacagaggtcaaagctgccctaaagagaaccatccagaaaacggtgcctatggagatttgaaaagggggcgatagtgacttctg

SEQ ID NO: 751503 - DNA, 120 bp, Artificial Sequence
  ENSG00000206503_0 (sequence is synthesized)
agattctccccagacgccgaggatggccgtcatggcgccccgaaccctcctcctgctactctcgggggccctggccctgacccagacctgggcgggctcccactccatgaggtatttctt

SEQ ID NO: 751504 - DNA, 120 bp, Artificial Sequence
  ENSG00000206503_1 (sequence is synthesized)
cacatccgtgtcccggcccggccgcggggagccccgcttcatcgccgtgggctacgtggacgacacgcagttcgtgcggttcgacagcgacgccgcgagccagaggatggagccgcgggc

SEQ ID NO: 751505 - DNA, 120 bp, Artificial Sequence
  ENSG00000206503_2 (sequence is synthesized)
gccgtggatagagcaggaggggccggagtattgggaccaggagacacggaatgtgaaggcccagtcacagactgaccgagtggacctggggaccctgcgcggctactacaaccagagcga

SEQ ID NO: 751506 - DNA, 120 bp, Artificial Sequence
  ENSG00000206503_3 (sequence is synthesized)
ggccggttctcacaccatccagataatgtatggctgcgacgtggggtcggacgggcgcttcctccgcgggtaccggcaggacgcctacgacggcaaggattacatcgccctgaacgagga

SEQ ID NO: 751507 - DNA, 120 bp, Artificial Sequence
  ENSG00000206503_4 (sequence is synthesized)
cctgcgctcttggaccgcggcggacatggcggctcagatcaccaagcgcaagtgggaggcggcccatgaggcggagcagttgagagcctacctggatggcacgtgcgtggagtggctccg

SEQ ID NO: 751508 - DNA, 120 bp, Artificial Sequence
  ENSG00000206503_5 (sequence is synthesized)
cagatacctggagaacgggaaggagacgctgcagcgcacggacccccccaagacacatatgacccaccaccccatctctgaccatgaggccaccctgaggtgctgggccctgggcttcta

SEQ ID NO: 751509 - DNA, 120 bp, Artificial Sequence
  ENSG00000206503_6 (sequence is synthesized)
tccagaagtgggcggctgtggtggtgccttctggagaggagcagagatacacctgccatgtgcagcatgagggtctgcccaagcccctcaccctgagatgggagctgtcttcccagccca

SEQ ID NO: 751510 - DNA, 120 bp, Artificial Sequence
  ENSG00000206503_7 (sequence is synthesized)
ccatccccatcgtgggcatcattgctggcctggttctccttggagctgtgatcactggagctgtggtcgctgccgtgatgtggaggaggaagagctcagatagaaaaggagggagttaca

SEQ ID NO: 751511 - DNA, 120 bp, Artificial Sequence
  ENSG00000206503_8 (sequence is synthesized)
ctcaggctgcaagcagtgacagtgcccagggctctgatgtgtccctcacagcttgtaaagtgtgagacagctgccttgtgtgggactgagaggcaagagttgttcctgcccttccctttg

SEQ ID NO: 751512 - DNA, 120 bp, Artificial Sequence
  ENSG00000206503_9 (sequence is synthesized)
tgacttgaagaaccctgactttgtttctgcaaaggcacctgcatgtgtctgtgttcgtgtaggcataatgtgaggaggtggggagaccaccccacccccatgtccaccatgaccctcttc

SEQ ID NO: 751513 - DNA, 120 bp, Artificial Sequence
  ENSG00000206503_10 (sequence is synthesized)
ccacgctgacctgtgctccctccccaatcatctttcctgttccagagaggtggggctgaggtgtctccatctctgtctcaacttcatggtgcactgagctgtaacttcttccttccctat

SEQ ID NO: 751514 - DNA, 120 bp, Artificial Sequence
  ENSG00000206503_11 (sequence is synthesized)
taaaattagaaccttagtataaatttactttctcaaattcttgccatgagaggttgatgagttaattaaaggagaagattcctaaaatttgagagacaaaataaatggaagacatgagaa

SEQ ID NO: 751515 - DNA, 120 bp, Artificial Sequence
  ENSG00000206503_12 (sequence is synthesized)
aaggggagaggagggcctgaaggatgagaaggatggagggaagggctggagaagcaggaggcacaacttttccggattaaaaacaaaaacaacaacaacaaaaatctacacctccattcc

SEQ ID NO: 751516 - DNA, 120 bp, Artificial Sequence
  ENSG00000206503_13 (sequence is synthesized)
cagatcaagcttactctctggcaccaaactccatggggtgatttttcttctagaagagtccaggtggacagggtccttcatcctggatactcacgacgcggacccagttctcactcccat

SEQ ID NO: 751517 - DNA, 120 bp, Artificial Sequence
  ENSG00000206503_14 (sequence is synthesized)
cgcttcgcacaggagcagaggggtcagggcgaagtcccagggccccaggcgtggctctcagagtctcaggccccgaaggcggtgtatggattggggagtcccagccttggggattcccca

SEQ ID NO: 751518 - DNA, 120 bp, Artificial Sequence
  ENSG00000206503_15 (sequence is synthesized)
ggggcgcaggtcaggacccctcatcccccacggacgggccaggtcgcccacagtctccgggtccgagatccaccccgaagccgcgggaccccgagacccttgccccgggagaggcccagg

SEQ ID NO: 751519 - DNA, 120 bp, Artificial Sequence
  ENSG00000206503_16 (sequence is synthesized)
acccagtctgggccctgtgtgccagcacttactcttttgtaaagcacctgttaaaatgaaggacagatttatcaccttgattacggcggtgatgggacctgatcccagcagtcacaagtc

SEQ ID NO: 751520 - DNA, 120 bp, Artificial Sequence
  ENSG00000206503_17 (sequence is synthesized)
acaggggaaggtccctgaggacagacctcaggagggctattggtccaggacccacacctgctttcttcatgtttcctgatcccgccctgggtctgcagtcacacatttctggaaacttct

SEQ ID NO: 751521 - DNA, 120 bp, Artificial Sequence
  ENSG00000206527_0 (sequence is synthesized)
aggagagcgggcttcgggcacttgacatggcggcagtggcggcgactgcagcagcgaaggggaatgggggcggcggtggcagggccggggccggggacgccagcggcacgcggaagaaga

SEQ ID NO: 751522 - DNA, 120 bp, Artificial Sequence
  ENSG00000206527_1 (sequence is synthesized)
agggcccggggcccctggccacggcgtacctggtcatctacaatgtggtgatgacagccgggtggctggttatagcggttggtctggtccgagcatacctggctaagggtagctaccata

SEQ ID NO: 751523 - DNA, 120 bp, Artificial Sequence
  ENSG00000206527_2 (sequence is synthesized)
gcctttattattcaattgaaaagcctttgaaattctttcaaactggagccttattggagattttacattgtgctataggaattgttccatcttctgttgtcctgacttctttccaggtga

SEQ ID NO: 751524 - DNA, 120 bp, Artificial Sequence
  ENSG00000206527_3 (sequence is synthesized)
tgtcaagagtttttctaatatgggcagtaacacatagcgtcaaagaggtacagagtgaagacagtgtcctcctgtttgttattgcatggacgatcacggaaatcatccgttactcctttt

SEQ ID NO: 751525 - DNA, 120 bp, Artificial Sequence
  ENSG00000206527_4 (sequence is synthesized)
atacattcagtctattaaaccatctgccttacctcatcaaatgggccaggtacacacttttcattgtgctgtacccaatgggagtgtcaggagaactgctcacaatatatgcagctctgc

SEQ ID NO: 751526 - DNA, 120 bp, Artificial Sequence
  ENSG00000206527_5 (sequence is synthesized)
cctttgtcagacaagctggcctatattccatcagtttacccaacaaatacaatttctcttttgactactatgcattcctgattctaataatgatctcctacattccaatttttccccagt

SEQ ID NO: 751527 - DNA, 120 bp, Artificial Sequence
  ENSG00000206527_6 (sequence is synthesized)
tatacttccacatgatacaccagagaagaaagatcctttctcatactgaagaacacaagaaatttgaatagttcctgctttctgcacctcccaccaaaacaaacttttcaatgatcaaaa

SEQ ID NO: 751528 - DNA, 120 bp, Artificial Sequence
  ENSG00000206527_7 (sequence is synthesized)
aatgctgcagattttttgagttcccaatacgtttcatagaaaataagtaagaactatttttaaaatattcaaacaaaactaaaacaaaaatccagtgtcacatgggcctgagattttatt

SEQ ID NO: 751529 - DNA, 120 bp, Artificial Sequence
  ENSG00000206527_8 (sequence is synthesized)
ttagaaaaaggttgttacataaaacaccctggccagttcatttcagcatgctctttcaaccagaagttcttaatatttatgatggcactagaaagggatttggcattttatgtccttctg

SEQ ID NO: 751530 - DNA, 120 bp, Artificial Sequence
  ENSG00000206527_9 (sequence is synthesized)
tgtccttcatgtatctgatcaatgaagacctgtaacactaagtacttgagagttacagtctgaataatgaagtcgtaccagctgaatagcccagcttgcagtatagttatgtttcagtct

SEQ ID NO: 751531 - DNA, 120 bp, Artificial Sequence
  ENSG00000206527_10 (sequence is synthesized)
gcagtgtgtttagcattcccttgtcaaagtgcttgactgcatgctggaaactttgtatttttgaagcggcaaactctgttctctggaatgctctgaagttatggctgggacctatcccct

SEQ ID NO: 751532 - DNA, 120 bp, Artificial Sequence
  ENSG00000206527_11 (sequence is synthesized)
cacatctaatgaatgaattataaaatgtatatgtctatgaagcttcggggtagtgcctgtaatcagaaaacaacttagaacccttttgtttgtttccaattgagtcattactgcctgcca

SEQ ID NO: 751533 - DNA, 120 bp, Artificial Sequence
  ENSG00000206527_12 (sequence is synthesized)
ctaagaaacgtgcttgaatctaataagtatgtgtgtaccgtaaagaatatatcttatctggagctcagcctcaatcatgtcttaacaaaatgacaggtctcagaaagggggagctcaata

SEQ ID NO: 751534 - DNA, 120 bp, Artificial Sequence
  ENSG00000206527_13 (sequence is synthesized)
gctcaaaagtgacaagtccttttcacagcaccattctcagaacacctctgagtaacgtgtttgccagtagctattctcactgatgcactgatggccctgaagaagcggatccagtcacat

SEQ ID NO: 751535 - DNA, 120 bp, Artificial Sequence
  ENSG00000206527_14 (sequence is synthesized)
aggaaaggaggctgtgttagtgaaagcacatggaaggtgttgctttagaaaggtagtcaggaaaaacattcaggaatagatttatacaccattattgttttatttttaaattttcattca

SEQ ID NO: 751536 - DNA, 120 bp, Artificial Sequence
  ENSG00000206527_15 (sequence is synthesized)
ctcttctgtttggatacttttgctaattaacttcctatgttaatttccaccaagctataagtccatagtcagtaaaacattccccttgggctgtcatgagctaaaagcagtgtcatctcc

SEQ ID NO: 751537 - DNA, 120 bp, Artificial Sequence
  ENSG00000206527_16 (sequence is synthesized)
gcatgttggagcagccaagaaatagtttggtactaccgacattgtctaatccatgtcacatcctcatacaatttaattgctcaaccatgcatttaaaactcctcaagaaaggattggtac

SEQ ID NO: 751538 - DNA, 120 bp, Artificial Sequence
  ENSG00000206527_17 (sequence is synthesized)
atgaaaatgtgaaagcccaagtttagatgtgcattaagtattaaatagcacagtatcttcttcatggagccttttttcctcccccatcccctgcagctgcctttttttgggggcagggtg

SEQ ID NO: 751539 - DNA, 120 bp, Artificial Sequence
  ENSG00000206527_18 (sequence is synthesized)
ggggttgatgttgaactttaagagtttaaaagtttagcttattgagtagttgtcatttaaaatataattgcgaatatcagaaaactcatactggaaaactaaattttttttttctcttga

SEQ ID NO: 751540 - DNA, 120 bp, Artificial Sequence
  ENSG00000206527_19 (sequence is synthesized)
attgcaggcatgagccactgcacccaacccctggaaaactaaatttttaagtgcttatttttatagaagtttgaaaatttaatgcaggcaggtgtgtaataaattatttttgaattgaac

SEQ ID NO: 751541 - DNA, 120 bp, Artificial Sequence
  ENSG00000206527_20 (sequence is synthesized)
tttgaattgaacattaaaattctgcttcttaaagtcagcactcaacttggacatgttgaaattagaatctattcttgtatttgatagacaaaatatgtgggaaagattttttgcatgact

SEQ ID NO: 751542 - DNA, 120 bp, Artificial Sequence
  ENSG00000206527_21 (sequence is synthesized)
tttctctcattttattcttccataatgtatttctactataaaatagaatcaacttgggttatatttgtcatttactttgttctgttagattttttcagttgtttttggaaaaattctaga

SEQ ID NO: 751543 - DNA, 120 bp, Artificial Sequence
  ENSG00000206527_22 (sequence is synthesized)
aatcaggatgaaaaatgcagcttttccagggttgctggactgggggttttatttgggcctccttattataatttgtcactacttataaaaaacattctgttgcaaacagtggtgttgcat

SEQ ID NO: 751544 - DNA, 120 bp, Artificial Sequence
  ENSG00000206527_23 (sequence is synthesized)
tgaattgaactttggcaatgagaacacagcacacagctcccttttcaaaaagggtctcaaccccagtgtgtatttttgtacatcaacatttagaatacttatggcagataagtaaggcat

SEQ ID NO: 751545 - DNA, 120 bp, Artificial Sequence
  ENSG00000206527_24 (sequence is synthesized)
gtcactgtgtccttcagtaacctctctcagtaactggtttctttatccctaacatgaattcatttctcctttgaagtcatttattattttataaattgagaacaaccacaccaccaaatg

SEQ ID NO: 751546 - DNA, 120 bp, Artificial Sequence
  ENSG00000206527_25 (sequence is synthesized)
tcacaccttcttataaagtgtgaacaaggaaggtcatgtttttgtgggtattttgtcagacttagaggtttcatttcagggcatagtcaaaggcatcatcctcccaactacccacttgat

SEQ ID NO: 751547 - DNA, 120 bp, Artificial Sequence
  ENSG00000206527_26 (sequence is synthesized)
tatgtatttcagatccctccgtgggggccttcttctgacagagaattctttgaggtccgcagtagtgcttttgtcagcacagactgctaatctacatcttgctgcgttctgtttgctgag

SEQ ID NO: 751548 - DNA, 120 bp, Artificial Sequence
  ENSG00000206527_27 (sequence is synthesized)
gttgggcttattcatttaacacataccaaccattatccagaggcaccatggagagttagtcatggaataaagcactgtccttgcagatgaaaaaagtctccagagcagacttctgacagg

SEQ ID NO: 751549 - DNA, 120 bp, Artificial Sequence
  ENSG00000206527_28 (sequence is synthesized)
aaaggtttagatgctggagagttgaagaggtgtaagaagagatcgtgccctcatttttcacttatttttttggttattcatttataataaaaggttggcattgatatggtacaacctgca

SEQ ID NO: 751550 - DNA, 120 bp, Artificial Sequence
  ENSG00000206527_29 (sequence is synthesized)
aattacttgcagttctgagtttcagataaaacattataaaacattaaattcaatacatactgctcctttgaaatttgggtaaaaaattgtacaaccgtatatatagtcatttttgtattt

SEQ ID NO: 751551 - DNA, 120 bp, Artificial Sequence
  ENSG00000206527_30 (sequence is synthesized)
tttctatgttgtgaaaaccaaaattgtaattttataagtctttgattcactaaaattatataatttaaatgtattttttgtatatttagaaataaggagtccagagactacgcttaactt

SEQ ID NO: 751552 - DNA, 120 bp, Artificial Sequence
  ENSG00000206527_31 (sequence is synthesized)
tctatgcatgcatttgaaagctgtttttacctgataatgtagtaataagttgtattcataaaatactgatctgtgttgcatttcaaaataaactggtgtgtgctctgcctggatttgaaa

SEQ ID NO: 751553 - DNA, 120 bp, Artificial Sequence
  ENSG00000206527_32 (sequence is synthesized)
ttgtgagaaaaaaactacatccagatttcatgtgagtgtttatcttgcagaaattcttggatacagttctgcttcatgattcattttccactctttattcatgttgagtcctctctagtg

SEQ ID NO: 751554 - DNA, 120 bp, Artificial Sequence
  ENSG00000206527_33 (sequence is synthesized)
ctggaatcatagcgaccagaggccatctctcttcaaatgtaaaaagtggttgattttcaaacagatgataaatgtgaaatcatctaaactactaagtaataaaaattaactggtagttta

SEQ ID NO: 751555 - DNA, 83 bp, Artificial Sequence
  ENSG00000206527_34 (sequence is synthesized)
agtgtaacttttctaacagaagttcagcgggagatcctgttgcccagcactgttcatcttacattaaagcaagatgtggtgaa

SEQ ID NO: 751556 - DNA, 120 bp, Artificial Sequence
  ENSG00000206527_35 (sequence is synthesized)
gcggccggactacctgcggcgcggagcccgtcctgggcggccagattcggatgttgaacggcgccagcatggggagtggaggagctgtggctgcagagtgaccattcatttgggcggctg

SEQ ID NO: 751557 - DNA, 120 bp, Artificial Sequence
  ENSG00000206527_36 (sequence is synthesized)
ctcctggtgactgaggccctttgcacttggccctcatctctgggatgtacacagctgtcatcctaggccccagctctacacgcaagctctttctgccatacaggggtcctgaagatagag

SEQ ID NO: 751558 - DNA, 120 bp, Artificial Sequence
  ENSG00000206527_37 (sequence is synthesized)
accagcggctgtgccgactcactccctggctctgccgggtgctgcacactgtcttcattaacgttgtctgtgtgttttttttcttttgttttcctcttccttcaggtacagagtgaagac

SEQ ID NO: 751559 - DNA, 120 bp, Artificial Sequence
  ENSG00000206530_0 (sequence is synthesized)
gggttcccggagagctggacgccggccgcgcatgcgccccacggcccgccctggttccgcctccctggaagaggggtggcgttgtctcggtaaccggagtaaacggaggcctccggcaga

SEQ ID NO: 751560 - DNA, 120 bp, Artificial Sequence
  ENSG00000206530_1 (sequence is synthesized)
cgctgtgaagagaggagccgcggcggtcagtaccttcgaggaaatgaaggaaccagatgatcaggatactgatggggagaaatcagttacatcaaagagtgatgggaagaagtctctgag

SEQ ID NO: 751561 - DNA, 120 bp, Artificial Sequence
  ENSG00000206530_2 (sequence is synthesized)
gtcttctaaatcagaatcaagatctcctgttcaagaagataacacatttttagaagatgacacagatgaaacatttaccaaaggggaaggatcatatttagaagaagactcagatgagga

SEQ ID NO: 751562 - DNA, 120 bp, Artificial Sequence
  ENSG00000206530_3 (sequence is synthesized)
acgtttggaaggaagtttgagttcatttcagtatggtgatttgcaaagcactacagtacctcagcaaacccctgctccagctgtggaagaagcagaggaggaagttaagaagaaaatatc

SEQ ID NO: 751563 - DNA, 120 bp, Artificial Sequence
  ENSG00000206530_4 (sequence is synthesized)
agagagcttcttctatgattatatggagcttgcttcgatgccttttgtgactctggattcaaacataccactggatcttctcacacttgtacattcttttggttatgactgtagaaagcg

SEQ ID NO: 751564 - DNA, 120 bp, Artificial Sequence
  ENSG00000206530_5 (sequence is synthesized)
agccaacctacaacttctggacgacagtatcgccatatacatagctgggaaccaactgatctttctgaatttgaaaaccaaggaacagatctacctgcgaagtagcagtggtgaaggaat

SEQ ID NO: 751565 - DNA, 120 bp, Artificial Sequence
  ENSG00000206530_6 (sequence is synthesized)
tggcgtcattggggttcatccacataaaacttatttcacagtagctgaaaaagggagttttccagatattatcatctatgaatatccttctctgagaccatacagagtccttcgagatgg

SEQ ID NO: 751566 - DNA, 120 bp, Artificial Sequence
  ENSG00000206530_7 (sequence is synthesized)
gactgagaagggatatgcttatgtggactttaactacagcggtaacttgctggcctctgttggtagtaaccctgactacacactgactatctggaactggaaagaagaacaacccatact

SEQ ID NO: 751567 - DNA, 120 bp, Artificial Sequence
  ENSG00000206530_8 (sequence is synthesized)
aaggacaaaagctttttctcaggaagtttttaaggttactttcaatcctgataaggaagagcagcttactacatcgggatcaggccacatcaagttctgggaaatggcttttacgttcac

SEQ ID NO: 751568 - DNA, 120 bp, Artificial Sequence
  ENSG00000206530_9 (sequence is synthesized)
cggtctcaagctgcagggatcactaggtcgatttggcaaaacaatcactactgatatagaaggctacatggagctcccagatgggaaggtgctctcagggtcagaatggggcaacatgct

SEQ ID NO: 751569 - DNA, 120 bp, Artificial Sequence
  ENSG00000206530_10 (sequence is synthesized)
gctttgggaaggtggtctgatcaaagtggagctctgtcgagggacaagcaagtcatgtcacaatggtcccattaaccagataatgctgtatgagggtgaagttatcactgttgggtcaga

SEQ ID NO: 751570 - DNA, 120 bp, Artificial Sequence
  ENSG00000206530_11 (sequence is synthesized)
tggatatgttaggatatgggattttgagacaatagacactgctgatgtaatagatgagactggattgttggagattgagcctattaatgaacttcaagtagacaagaatgtgaatctctt

SEQ ID NO: 751571 - DNA, 120 bp, Artificial Sequence
  ENSG00000206530_12 (sequence is synthesized)
ctctatgataaaaatgaatgaaactggaaataacttttggttggctcaggatgccaatggagccatatggaagcttgaccttagtttttcaaatattacccaggacccagaatgcctctt

SEQ ID NO: 751572 - DNA, 120 bp, Artificial Sequence
  ENSG00000206530_13 (sequence is synthesized)
ctccttccattctggagctattgaagccgtggctgtttctcctctcacttatctcatggccacaactgccttggactgctctgttcgaatctatgattttgctagcaaaactcctttggc

SEQ ID NO: 751573 - DNA, 120 bp, Artificial Sequence
  ENSG00000206530_14 (sequence is synthesized)
aaggaggtactgcccttgtttgggtaccccgaatggtaaacttcactggagcacaaattattgtaggatttgaagatggagttgttcgaattcttgaactttatgatccaaaagggctca

SEQ ID NO: 751574 - DNA, 120 bp, Artificial Sequence
  ENSG00000206530_15 (sequence is synthesized)
cgatttttgcgggacggaagaaaattttggatgctgatattcagttgaaacaggttttcaaaccccatactgcttgtgtcactgctttagcttatgaacgtgatggggaaattctagcca

SEQ ID NO: 751575 - DNA, 120 bp, Artificial Sequence
  ENSG00000206530_16 (sequence is synthesized)
cagggagtaaagatcaaactgttttcttctttgaagtggaaagggattataagccgattggttatattaatactcctggacctgtgtgtcagttaatgtggtctcccatgtctcatcctg

SEQ ID NO: 751576 - DNA, 120 bp, Artificial Sequence
  ENSG00000206530_17 (sequence is synthesized)
aaagtactttactaattatctgtgaaaatggctatattcttgaagctccacttccaaccataaagcaagaagaggatgatcatgatgtagtctcctatgaaatcaaagacatgtgcataa

SEQ ID NO: 751577 - DNA, 120 bp, Artificial Sequence
  ENSG00000206530_18 (sequence is synthesized)
aatgtttccatttttcaagtgtcaaatctaagattctgagattaatagaaattgaaaagagggagagacaaagggagttgaaggagaaaataagggaagaaaggaggaacaagctagcag

SEQ ID NO: 751578 - DNA, 120 bp, Artificial Sequence
  ENSG00000206530_19 (sequence is synthesized)
cagagatgggagaagatggagaaaaagaatttcaggaggaggaagaggagaaagaggaggaggaggaggaagaagagccattacctgaaatatttattccgtcaaccccctctcccatcc

SEQ ID NO: 751579 - DNA, 120 bp, Artificial Sequence
  ENSG00000206530_20 (sequence is synthesized)
tctgtggattttactcagagccagggaagttctgggtttctttgggtggctatgattctggttttctatatcactgtgagttccccccttgtgatgaaagcagtgatttcaaagaacaaa

SEQ ID NO: 751580 - DNA, 120 bp, Artificial Sequence
  ENSG00000206530_21 (sequence is synthesized)
aagatgaacctattgatgtccgttatcttgcggatacagaggacaatcccatccaaactatcactttcaacattaacaaagttatgatgttttgtggaatgaaaaatggagcaattcgag

SEQ ID NO: 751581 - DNA, 120 bp, Artificial Sequence
  ENSG00000206530_22 (sequence is synthesized)
tctatgtcctaaatcaaaatgatccttcattgaccagtttggtggactactggcacttcaatatgcatgacaataattatggatgtattaaaagtattgctaatagctttgatgatcgtt

SEQ ID NO: 751582 - DNA, 120 bp, Artificial Sequence
  ENSG00000206530_23 (sequence is synthesized)
tcttggtgactgctggagcagatggcaatatctttgttttcaacattttttctgaatttatgctaaggaaagacatgaaggccaaagttccatctcccaggtttggaattgaaacagagc

SEQ ID NO: 751583 - DNA, 120 bp, Artificial Sequence
  ENSG00000206530_24 (sequence is synthesized)
caattccagaagacattgaagatcccaaagcctacagtatcgagaatgctaggagaaaaagagaacatgacaagttaatgaaagaagtgggagaaataaaggcacggaagagagagcaaa

SEQ ID NO: 751584 - DNA, 120 bp, Artificial Sequence
  ENSG00000206530_25 (sequence is synthesized)
tcaaagctttgaggagtgaattttgtaatctattagaaatgaatgaaaaattaccaaagcatatgcagtttaaacgaacagtaagcctaatataaacttgatttttattttaacatatgc

SEQ ID NO: 751585 - DNA, 120 bp, Artificial Sequence
  ENSG00000206530_26 (sequence is synthesized)
tatttctggatagagatgactattttcccaacaagtagaaacacttaaaatcatctttcttttttgtttgtttctttcaaaatttcaatagccatttattttgggcatcttttaatttgt

SEQ ID NO: 751586 - DNA, 120 bp, Artificial Sequence
  ENSG00000206530_27 (sequence is synthesized)
atgtggggtttatcccttttaatcagttaagattcttgttgacacaaattgttttacatcaactgttgttatagaacacatgaaaggaatacatggggaagaaataaagtagaacccaag

SEQ ID NO: 751587 - DNA, 120 bp, Artificial Sequence
  ENSG00000206530_28 (sequence is synthesized)
aatccgtgctgagatgcacagaaaaacagctttcaaaattcaacaagtggaaaaggaattagcttgggaaaaagagaaacatgaactcggcctaatgaagctaaagaatcgatttcgaga

SEQ ID NO: 751588 - DNA, 120 bp, Artificial Sequence
  ENSG00000206530_29 (sequence is synthesized)
tccactggaaagtgatactattgtggttcatgccatactgagtgaccacaagatatcctcttacaggctggtgcagccctctaagtactccaaattcaaacgagctagtcaatcagagag

SEQ ID NO: 751589 - DNA, 120 bp, Artificial Sequence
  ENSG00000206530_30 (sequence is synthesized)
aaaaccaagcaaattggacaggtttgaaaaagagggacctggaagaaaggacagccagagagatgcaggtgggagtgttaccatacaagaagaatcaataatagaaaaagggaagaaatt

SEQ ID NO: 751590 - DNA, 120 bp, Artificial Sequence
  ENSG00000206530_31 (sequence is synthesized)
tcggcctaaaaccctaagtgaaatcatcgtggaaaatcaaattgagaaaacgagaaaacttatattaaaagctgaaagggcacaactaaagattcaacagcgaaaaaaagaatgggagga

SEQ ID NO: 751591 - DNA, 120 bp, Artificial Sequence
  ENSG00000206530_32 (sequence is synthesized)
actatacaagagtaaacctggtgatgactatgaagatcccaaagatcttcaagccatcaaagaagcccaggtgtatatgggagatttcaatctgaagacagccccagactacaagatacc

SEQ ID NO: 751592 - DNA, 120 bp, Artificial Sequence
  ENSG00000206530_33 (sequence is synthesized)
tgagcacatgagaataaatgctgccaagaaggaagaggaactaggacacctagattctttggtccatggaaataaaaggcacatgaacaagtgcattctctctcttagagaccttaaagt

SEQ ID NO: 751593 - DNA, 120 bp, Artificial Sequence
  ENSG00000206530_34 (sequence is synthesized)
ggctgttgttgaggaaatacagtgcctggtacaagaactgaagaacattcagtcgactcttcacatatccaagcacatacccattcccaaaattcctcagatacacccagaagaagttcc

SEQ ID NO: 751594 - DNA, 120 bp, Artificial Sequence
  ENSG00000206530_35 (sequence is synthesized)
agaaaagagatttcagtatgatgaagaaactctcctaaattttaagcaacagcaaatgaaaagtaaagatgaaaagtcccccggagtggaacagacagggtctggaggcccagttggagg

SEQ ID NO: 751595 - DNA, 120 bp, Artificial Sequence
  ENSG00000206530_36 (sequence is synthesized)
attcctcaaactctcttctagaaaggatggggatttgacaacccgtgattcaatatctagatcatcaaaggcatcaacattcagcctagatataccaaagtgtttggaatttgaaaaagc

SEQ ID NO: 751596 - DNA, 120 bp, Artificial Sequence
  ENSG00000206530_37 (sequence is synthesized)
agagccaacggatgtggagctggaaattatgaagagagacgagattaaacacgtgtacatgcaacagtatttggtcaacaggatcaaagaactggttgtcactttcgatgcagaactccg

SEQ ID NO: 751597 - DNA, 120 bp, Artificial Sequence
  ENSG00000206530_38 (sequence is synthesized)
tctccttagacatcagaaactaaaactagatactcagatgaaattatctgacctgcaccatgtcaccttatttcaagaaatacttctcctgaagaattttgaaaaacaggagaacatact

SEQ ID NO: 751598 - DNA, 120 bp, Artificial Sequence
  ENSG00000206530_39 (sequence is synthesized)
tcaagaacgtgttaattccttagacaaagaggaacagtacatgcaatggaaaataaatgaaactcttaaagagatggaagagaaaaagaatgaaatcaccaaactccaggagcaagaaaa

SEQ ID NO: 751599 - DNA, 120 bp, Artificial Sequence
  ENSG00000206530_40 (sequence is synthesized)
ggcactctatgctggttttcaagcagccattggagaaaacaataaatttgcaaacttcctcatgaaggtcctaaagaagaagattaaacgggtaaagaaaaaagaagttgaaggagatgc

SEQ ID NO: 751600 - DNA, 120 bp, Artificial Sequence
  ENSG00000206530_41 (sequence is synthesized)
tgatgaagatgaggagagtgaggaatcaagtgaagaagaatctagcttggagagtgatgaagatgagtctgaatcagaagatgaggtttttgatgattctatttgcccaacaaattgtga

SEQ ID NO: 751601 - DNA, 120 bp, Artificial Sequence
  ENSG00000206530_42 (sequence is synthesized)
tgtggctctttttgagctggcccttcaccttcgagagaaaaggctggacattgaggaggctttagttgaagaaaagaaaattgttgataacctcaaaaaggaatatgatacattgtcaaa

SEQ ID NO: 751602 - DNA, 120 bp, Artificial Sequence
  ENSG00000206530_43 (sequence is synthesized)
aaaagtgaaaattgtggcaactaatctgaatgcagcagaggaggccctggaggcttatcagcgagagaagcagcagcggctgaatgaactgctagttgtgattccgctcaagctccacca

SEQ ID NO: 751603 - DNA, 120 bp, Artificial Sequence
  ENSG00000206530_44 (sequence is synthesized)
gatagagtatgtggtatttggagaaatacctagcgatctttctggtactttggtcttctctaaccatgccttgagacggctgcaagaacgaatccatgagctccaggaggaaaattccaa

SEQ ID NO: 751604 - DNA, 120 bp, Artificial Sequence
  ENSG00000206530_45 (sequence is synthesized)
aacagctcatccgagaaaagagagaaatgacaaaaaccatacacaaaatggaggaaacagtccggcagctcatgatcagcaagtttggccgtgtggtaaatctagaagcccttcaaacgc

SEQ ID NO: 751605 - DNA, 120 bp, Artificial Sequence
  ENSG00000206530_46 (sequence is synthesized)
tttctgttaatacaacacttgaagaactgaagatcagaaaacttcgaaaggagctagcaaatgcgaaagagatgaagatgtgggaggaaaagattgctcaaatgcgatgggaactgatga

SEQ ID NO: 751606 - DNA, 120 bp, Artificial Sequence
  ENSG00000206530_47 (sequence is synthesized)
tgaagacaaaagaacacaccagaaagctttatcagatgaatgatttgtgtattgaaaagaagaaacttgattctcggttgaatacactacagaatcagcagggcaatgccttccagggcc

SEQ ID NO: 751607 - DNA, 120 bp, Artificial Sequence
  ENSG00000206530_48 (sequence is synthesized)
ctcgggaagcagatgttgtggcaagagaggaggtcactgaattgatccaactccaggcggaaaggatttcggccttaaaggaggagattgctcttttgcgtaggaaaggcagtcttatcc

SEQ ID NO: 751608 - DNA, 120 bp, Artificial Sequence
  ENSG00000206530_49 (sequence is synthesized)
tcccacccattcagtctccacgagagaaagagatacagcccgcagacctttgagtttgctattttctcaaacccatacaagatttctgacataactcactggaagttctgtctcctcatc

SEQ ID NO: 751609 - DNA, 120 bp, Artificial Sequence
  ENSG00000206530_50 (sequence is synthesized)
acctccaacaatcttattactttaaactgaactcgcctgaaagtgtaaaaccagatccagtcacgttaagtcactttaagaatctctctacaatttggttatcttagaactgactgcagc

SEQ ID NO: 751610 - DNA, 120 bp, Artificial Sequence
  ENSG00000206530_51 (sequence is synthesized)
acccaacctctgttatgaaactgaatcattttagatgtttcgaacctactagattgaatatgaagtctcggaaggctgtgtttcatgattgcagcaaatcacctgtaatatattttgttt

SEQ ID NO: 751611 - DNA, 120 bp, Artificial Sequence
  ENSG00000206530_52 (sequence is synthesized)
taggaaaatttgatttgggggtatcctgaatttttagcccttggcaagaaaaactatcattcagcaattcatgagaaaactttgttttcttgatccttagaaaataaacttagatgttat

SEQ ID NO: 751612 - DNA, 120 bp, Artificial Sequence
  ENSG00000206530_53 (sequence is synthesized)
taagtgttctctgagaggatgcaggagaaaaggacattttgtcagctatatcttagaatagaaatgcaaatttcagttttggcattgttgacttcataaagcagtgttttgagggctcag

SEQ ID NO: 751613 - DNA, 120 bp, Artificial Sequence
  ENSG00000206530_54 (sequence is synthesized)
gattcaggaaatacaaacagacatggcagagcagtttgctttgggttggcagaaagcaggaaaataaccagccttcttggattgcccacagtttttgtagactcctcagttctgagtgga

SEQ ID NO: 751614 - DNA, 120 bp, Artificial Sequence
  ENSG00000206530_55 (sequence is synthesized)
gcagaggggcatgcttaataaaacagtcaataaagaggcttttctttaaagatttctgcaactccgtcagaattctaagttttccccatagtttctcatgtcccctgccattttctttca

SEQ ID NO: 751615 - DNA, 120 bp, Artificial Sequence
  ENSG00000206530_56 (sequence is synthesized)
ggttttacttgggccatttgctggttttgatatagatgaggagataatgaaatagatttactagagatcatctttaacaatcacctttgattatgcataacattttaaactaattgaaga

SEQ ID NO: 751616 - DNA, 120 bp, Artificial Sequence
  ENSG00000206530_57 (sequence is synthesized)
gtatccttttggtttgggggtaagtgctcattgaagttcatggctataaccattgcaggataatctcactgacatttggaatcctgttagtaacagagcatagctctttagattaagagc

SEQ ID NO: 751617 - DNA, 120 bp, Artificial Sequence
  ENSG00000206530_58 (sequence is synthesized)
tctgtattaacgagctactcattgaggctgttccaggataagctggtcactgagaagggcgggtgaagaaaggaacattgcataaatgtagaagggaactcagcaatgccaagtcttcct

SEQ ID NO: 751618 - DNA, 120 bp, Artificial Sequence
  ENSG00000206530_59 (sequence is synthesized)
cacctgtgattagcctgctaatgtgccccccaaaattacagacaggtcttgctttctttgtacatcagcatattcttagaggtggccacttggcctattgtcttcctaagattccttcat

SEQ ID NO: 751619 - DNA, 120 bp, Artificial Sequence
  ENSG00000206530_60 (sequence is synthesized)
attcctatttaagaggtcagaataccttattgtttgcacttgtcaccattaatttctgatgtagtcacttctctactggagagcacccacttttttttttaaatcactttctgtgttgta

SEQ ID NO: 751620 - DNA, 120 bp, Artificial Sequence
  ENSG00000206530_61 (sequence is synthesized)
tatcctaagccatgtgtgcctttcaagtatttttaaaaatatgctagtcatagccctgagtgtcttatttattgcggtaaaaaattacccccaaacttagcttgaaacaacaaacttgtg

SEQ ID NO: 751621 - DNA, 120 bp, Artificial Sequence
  ENSG00000206530_62 (sequence is synthesized)
atctcacccaggagtgagagggtttctgaggtccaggaatctggggacagcttggccgggtgttctggctcagggtctttcgtggagttgcagtcacactaggagctggggctgcagcca

SEQ ID NO: 751622 - DNA, 120 bp, Artificial Sequence
  ENSG00000206530_63 (sequence is synthesized)
tctgaagcttggctggagctggaggggctattagcaaattcactcccttggccattaggcagggcttcagttcctcgccatgtgggcctctccatagggccgcttgggatatgacttctc

SEQ ID NO: 751623 - DNA, 120 bp, Artificial Sequence
  ENSG00000206530_64 (sequence is synthesized)
ccagagcaagtgatccaagagtgagggagacagcaagagagaatgatgtatacaagagccacagtcttttacagcccaagctcagaagtgacatagcgtcactattgtcatatgggtcac

SEQ ID NO: 751624 - DNA, 120 bp, Artificial Sequence
  ENSG00000206530_65 (sequence is synthesized)
aggctgaccctgtgtgatgtgggaggggactgaacagggtgtgaatgccaggtgggggtcaccggggccttcgtgggagctggcagccacaagaagcagctgcctggagagagtggctgg

SEQ ID NO: 751625 - DNA, 120 bp, Artificial Sequence
  ENSG00000206530_66 (sequence is synthesized)
tctctgagaaaggtcttgaggcgataccatccccttggtaattgtagagaatcaggagaagttacgttatcttcctgggcctcattttattatctgacaaatgaaggattggtagaatgg

SEQ ID NO: 751626 - DNA, 120 bp, Artificial Sequence
  ENSG00000206530_67 (sequence is synthesized)
gttccttcccattctgagattctgattctgattgcagcaagaatggacctacagtctacagaagagccacatcaggacttgctgtgcatttcaactgagaggaaagctaatcgggataat

SEQ ID NO: 751627 - DNA, 120 bp, Artificial Sequence
  ENSG00000206530_68 (sequence is synthesized)
tattcccaaactgagctggactaaatcactagttaattctacaatattcagggcttcattccgcatgtttgggaattgacgacagttaacactgaattactttattttgaattggacaaa

SEQ ID NO: 751628 - DNA, 120 bp, Artificial Sequence
  ENSG00000206530_69 (sequence is synthesized)
atatgttgatagctttaggttcatttcaacttgattccaggcttagtcttaaatctgtagttaagttagagcatctgagtctttgggaagttaagcttcaaacacaagtagaccagcagg

SEQ ID NO: 751629 - DNA, 120 bp, Artificial Sequence
  ENSG00000206530_70 (sequence is synthesized)
gtgtggcatgggcagggtggctgggaagctatcctgctcctggcacacttccctgccttctgctgtgctcccagaggagcagcctcacctctgagggtaaggccaaaaatcagcctacac

SEQ ID NO: 751630 - DNA, 120 bp, Artificial Sequence
  ENSG00000206530_71 (sequence is synthesized)
tgagttacttgtgggtcaattgttcatataacttggctcttctgaactgtcatccatagtatcaccgatgatcaatctcagcattggaagaaaaagaaaccacagagtccagcccctctg

SEQ ID NO: 751631 - DNA, 120 bp, Artificial Sequence
  ENSG00000206530_72 (sequence is synthesized)
tcacaacttcagagtaaaggagttgctcatgcctgccagccagcctgtcccaccacagcgggctccccagcttagggaggtctgtgagccatgtgctaaatttctctttagagctaaatc

SEQ ID NO: 751632 - DNA, 120 bp, Artificial Sequence
  ENSG00000206530_73 (sequence is synthesized)
cattgagtgctatgattccagtgctgtgcagaaagcagatgtttcacctatcacttcagaaaagttcaccagacttcattttgacagctaccttagatcatcaaggagaaaaaggaaaaa

SEQ ID NO: 751633 - DNA, 120 bp, Artificial Sequence
  ENSG00000206530_74 (sequence is synthesized)
atgtaaaaaccagtggggctagaaggtgagttacagctcagattggggggcctctggatagcaaagcaatgactgagagcgtcagccctacccaccccagaagtgagctctgggccgtga

SEQ ID NO: 751634 - DNA, 120 bp, Artificial Sequence
  ENSG00000206530_75 (sequence is synthesized)
tgccaggttgtctgaaatcacagtatcttattttttctcttctcttccctgctctgcttctcatttcctaacatttacctgttccttacagtccttccttttaaataatatttttaaaat

SEQ ID NO: 751635 - DNA, 120 bp, Artificial Sequence
  ENSG00000206530_76 (sequence is synthesized)
actgctttcctgaaaaccatgctgcacttccacatgaagttctctctgacgttgagcttgatggaaaaaggatgcagaagtcaggaatagcaggtgctatacttattttggccagcagag

SEQ ID NO: 751636 - DNA, 120 bp, Artificial Sequence
  ENSG00000206530_77 (sequence is synthesized)
gatgcacttgccctaaacagtcagagtgactcttccctaggaccctgtttatcaaattcttcatgtttaaaagccagggtctggccccccacttaacgagattgtctcaagtggcatttc

SEQ ID NO: 751637 - DNA, 120 bp, Artificial Sequence
  ENSG00000206530_78 (sequence is synthesized)
atctgtaactcaattttacagaaatctagaaaatacaggctccccccaccctctccagccccaaaacacaaagcgtagtaaggctttcattgcaagcatcagtctccatctaattccact

SEQ ID NO: 751638 - DNA, 120 bp, Artificial Sequence
  ENSG00000206530_79 (sequence is synthesized)
tccacatataaagattttaaaatttcaattaaaaaagaatctatggttgatcctttggttggacaacagtaagtaaatgttgattttaaactagtgagtcaactactctggcaatgttgg

SEQ ID NO: 751639 - DNA, 120 bp, Artificial Sequence
  ENSG00000206530_80 (sequence is synthesized)
tgtatctttggaaagaagggaagtgaatttattatgcaccatatgtccatgtgtggcacagcacttagctaaacagtattttggagaaaatatttggtcttcaacacacacctatataaa

SEQ ID NO: 751640 - DNA, 120 bp, Artificial Sequence
  ENSG00000206530_81 (sequence is synthesized)
aaagattagttctatttcttcaatatgacctaaacttcatctcaagtccagttggtaagagaactatgaacctgtttttcctggtctgttgtacaacggttcccttgtggactaaacggt

SEQ ID NO: 751641 - DNA, 120 bp, Artificial Sequence
  ENSG00000206530_82 (sequence is synthesized)
aatgtgttctgcatgaatccaagcacaactgacattcactgttttaaaaaacaaaaaagagaaacatttactacctttttcagatctcatttctgatggacctgaaaatattgtaagtgg

SEQ ID NO: 751642 - DNA, 120 bp, Artificial Sequence
  ENSG00000206530_83 (sequence is synthesized)
gtattttcttcaaatactcagagactgaattctaacatgtaaagaaaatgctgactcacacatgactcagtttgaaggttacagggaagactaaacatttatttagaagttacagtgttt

SEQ ID NO: 751643 - DNA, 120 bp, Artificial Sequence
  ENSG00000206530_84 (sequence is synthesized)
gtttttacagagatatgttgccacggattattgattctggaaggttttttaatgctcatagtgctgtacacatcttggtctgttctcatgggcatcttaggaaaatgtttcccgtagcac

SEQ ID NO: 751644 - DNA, 120 bp, Artificial Sequence
  ENSG00000206530_85 (sequence is synthesized)
cggatccagccatctgtgtgggtgtctccaggctgtgataccgtgccccttgctgttccctcatgctcgtgatgaaccatgtgcctgggatccttcctcttgccagcttatctgtgggcc

SEQ ID NO: 751645 - DNA, 120 bp, Artificial Sequence
  ENSG00000206530_86 (sequence is synthesized)
tcctgcagcctcgcctgccactgcagaggccccaggttaggagtctgtcccgcgccagcctgtgcggtgctttcctgggtgactcctgttaggtggcagcttctttattttccctctcca

SEQ ID NO: 751646 - DNA, 120 bp, Artificial Sequence
  ENSG00000206530_87 (sequence is synthesized)
acctcaacgggtaggactccttatgtctctccagaattataaaacatatacatttatttacaagtgcataaatatataaatatggctataatagaaaaataaataccaattttctctgtc

SEQ ID NO: 751647 - DNA, 120 bp, Artificial Sequence
  ENSG00000206530_88 (sequence is synthesized)
taatcaatagaattgccttggtcctggagaggtgtaaggttacttaggtatgaataacgacaccattatacgccctgggtttggtgtcaaacatgtatttccaatatctgcaaatttcat

SEQ ID NO: 751648 - DNA, 120 bp, Artificial Sequence
  ENSG00000206530_89 (sequence is synthesized)
ttgacttgaagtgggcatcttgagtggtgaaatctaccctgttttcttattaaaatgcttgtcactttgtgtgggtttcaacttgctattacataatatttagccagcctaacattgtac

SEQ ID NO: 751649 - DNA, 120 bp, Artificial Sequence
  ENSG00000206530_90 (sequence is synthesized)
ttaatacattgtatgtggtggatatacctaattaatatttacccaatccaagtcttgccctctacaaacctaacacatgtatagcatattccaaactctatgttatatacttaacaatat

SEQ ID NO: 751650 - DNA, 120 bp, Artificial Sequence
  ENSG00000206530_91 (sequence is synthesized)
acctgcaaaaaggccagttgtttctcttggtcttctttgctttatattttctttcagaaccctggaaatggtctaagctaagtgttccaacagtttggtcctctgaagaagagcatcagc

SEQ ID NO: 751651 - DNA, 120 bp, Artificial Sequence
  ENSG00000206530_92 (sequence is synthesized)
attgttctcttactctagtcagactataactttttcttgagttctgttatttcctgccacaggacttctgcacaagttaaattctctcttaggagtgcttgtgccaccttcctgtaccta

SEQ ID NO: 751652 - DNA, 120 bp, Artificial Sequence
  ENSG00000206530_93 (sequence is synthesized)
gtgtttgcctggctactgttactcagtaaggaagacgtagaagcccaaaggcaaggagctaaacaaggggcaaagaaggaagtgcacctcttatgctttctgttgccatacaaaatctgt

SEQ ID NO: 751653 - DNA, 120 bp, Artificial Sequence
  ENSG00000206530_94 (sequence is synthesized)
tataattttgggattttcatttcttaggtcagaggtcagcaaactatagcccagggagcccaaatgtgccttcccacctgttttggtaaatcaagttttattgcaacacagccacatcca

SEQ ID NO: 751654 - DNA, 120 bp, Artificial Sequence
  ENSG00000206530_95 (sequence is synthesized)
gggagacagtcatcatactacactctcctttgtcctttgatcgtgtagtgtaccatatctgctttaggcataccagtctatcttcagagaccaggaagatataacagtgtggcagtttaa

SEQ ID NO: 751655 - DNA, 120 bp, Artificial Sequence
  ENSG00000206530_96 (sequence is synthesized)
gtaaccctcatagcaggcttgtaaaaagttttttcttcattcccattacagttggggaattcatataaagtttagttagctagttatatgtcagtactgggattcaaaccctaatctaac

SEQ ID NO: 751656 - DNA, 120 bp, Artificial Sequence
  ENSG00000206530_97 (sequence is synthesized)
tataaatctgatccaaatagaactagtgttccattctgcttgccaggcatatcgtagaagaatgttgaggaaacatagggtgtttagtatagagaagtgaagacttagaaggaaggtgtt

SEQ ID NO: 751657 - DNA, 120 bp, Artificial Sequence
  ENSG00000206530_98 (sequence is synthesized)
aatatatgaaaagctgcattatagacagagggcagagaaaacctgttgtgtcgctcccctctttaaaaccctttaatggttttcagttgtcaaggaaataagaggaaatgaaggaaccag

SEQ ID NO: 751658 - DNA, 120 bp, Artificial Sequence
  ENSG00000206531_0 (sequence is synthesized)
caaaactcactgacatttcccatcagtggttaatcagtcaaaaacatatagaatgacagcaaaaattaaagataagcaagataatgaagaaatatgttttgcaatcctgttgaagacaga

SEQ ID NO: 751659 - DNA, 120 bp, Artificial Sequence
  ENSG00000206531_1 (sequence is synthesized)
ataagcaaaagtgaccaagagaaacagattcaccaagtctgttgattgatttaaagtggatttatgtttaagtagaaaaccactccaaaagcatactttagggaagatgtcagctccaag

SEQ ID NO: 751660 - DNA, 120 bp, Artificial Sequence
  ENSG00000206531_2 (sequence is synthesized)
attactgatttccatcattatcatggtgtctgcttcaagtagttcatgcatgggtggaaagcagatgacacagaactattcaacaatttttgcagaaggtaacatttcacagcctgtact

SEQ ID NO: 751661 - DNA, 120 bp, Artificial Sequence
  ENSG00000206531_3 (sequence is synthesized)
gatggatataaatgctgtgctttgttgccctcctatcgcattaagaaatttgatcataataacatgggaaataatcctgagaggccagccttcctgcacaaaagcctacaagaaagaaac

SEQ ID NO: 751662 - DNA, 120 bp, Artificial Sequence
  ENSG00000206531_4 (sequence is synthesized)
aaatgagaccaaggaaaccaactgtactgttgagagaataacctgggtctctagacctgatcagaattcggaccttcagattcgtccggtggacaccactcatgacgggtattacagagg

SEQ ID NO: 751663 - DNA, 120 bp, Artificial Sequence
  ENSG00000206531_5 (sequence is synthesized)
tgcagtatgcaaggcagttacagggaagccagctgcccagatctcctggatcccagagggatctattcttgccactaagcaagaatactggggcaatggcacagtgacggttaagagtac

SEQ ID NO: 751664 - DNA, 120 bp, Artificial Sequence
  ENSG00000206531_6 (sequence is synthesized)
atgcccctgggagggccacaagtctactgtgacctgccatgtctcccatttgactggcaacaagagtctgtccgtaaagttgaattcaggtctcagaacctcaggatctccagcgttgtc

SEQ ID NO: 751665 - DNA, 120 bp, Artificial Sequence
  ENSG00000206531_7 (sequence is synthesized)
cttactgatcattctttatgtgaaactctctctttttgtggtcattctggtcaccacaggatttgttttcttccagaggataaatcatgtcagaaaagttctttaaagaagaaggaaggg

SEQ ID NO: 751666 - DNA, 120 bp, Artificial Sequence
  ENSG00000206531_8 (sequence is synthesized)
tcttcttttgcttctcctccttgtctctggactgcaacattggtgagatgagtgatggtccagcagtgaacttgggccatggatgatgttaaggatagaagccactcagtaggatagaag

SEQ ID NO: 751667 - DNA, 120 bp, Artificial Sequence
  ENSG00000206531_9 (sequence is synthesized)
aaaagaaagatggaagaaggatcctgggcttgatgaccatgaagtttccctataaaccctcaaccacctattcattgacttcttttgtgttagagtgaataaaattttgttcatgccagt

SEQ ID NO: 751668 - DNA, 120 bp, Artificial Sequence
  ENSG00000206531_10 (sequence is synthesized)
aacatcactcagatctctgccttttatcttcacatggtgttcctgtgtatgcgcccagttttcctctttttataaggacaccataaaaagctaagaagtgcaaaagaagaaaaaaagaat

SEQ ID NO: 751669 - DNA, 120 bp, Artificial Sequence
  ENSG00000206531_11 (sequence is synthesized)
tttccatcattatcatggtgtctgcctcagataataattcctgtctgatgacacaactggaaatacaaagttagagaatacgtcttaatgaagcttcaagtagttcatgcatgggtggaa

SEQ ID NO: 751670 - DNA, 120 bp, Artificial Sequence
  ENSG00000206531_12 (sequence is synthesized)
atttccatcattatcatggtgtctggctgtacaggaagcatggctgaggaggcctcaaaaaacttacaatcatggtggaaatgtgaaggggaagcaagcatgtcttcaaatggccagcag

SEQ ID NO: 751671 - DNA, 120 bp, Artificial Sequence
  ENSG00000206535_0 (sequence is synthesized)
agttttccagttatagccacgttggcacctcttgaacctctgtggccgttagcacggttttctgcccgcgtgcccgagaaaccaacggattagaaggacttttaaagatgtgtgaggaaa

SEQ ID NO: 751672 - DNA, 120 bp, Artificial Sequence
  ENSG00000206535_1 (sequence is synthesized)
gagctcaccgctgaagaaggctgctgcatcactgaacttcttatcactaacatagcgagattttagtttggacgaatttgaggttataggggagatagcgatggcagaagactaggtgga

SEQ ID NO: 751673 - DNA, 120 bp, Artificial Sequence
  ENSG00000206535_2 (sequence is synthesized)
aatggcacatctaggttggctgcagtcgaaacggtttgagcgtggtcgctgtggctcatcgtcggcaccaattaacgaagcgatgacatctgcgttgttaggggtttcttaaactgagtt

SEQ ID NO: 751674 - DNA, 120 bp, Artificial Sequence
  ENSG00000206535_3 (sequence is synthesized)
ggtagaaatgcgaagcgtcagggttcccgccggcttcgagcctttcttggcgtatttgtatcttgagctgatttctgcgtcagcccacatctcgctctgatccgcacgccccccgggttg

SEQ ID NO: 751675 - DNA, 120 bp, Artificial Sequence
  ENSG00000206535_4 (sequence is synthesized)
ttttgcagtagcagtctcagccctcttctcgtctcattcccaaatcgtaatttcagttcacagctttttatctataatagctttatcaactctttttccgatgctctgcaccagatctct

SEQ ID NO: 751676 - DNA, 120 bp, Artificial Sequence
  ENSG00000206535_5 (sequence is synthesized)
taaaatataaaattaccttgcaaggtattgtttggaatacacggtattttcatgaagacaactattaatagaaaaatcagagtccagaactatggttctccatttctggtatactggttt

SEQ ID NO: 751677 - DNA, 120 bp, Artificial Sequence
  ENSG00000206535_6 (sequence is synthesized)
gcagaagccttacattaagatttcataaatgattgttttgctgttaagtgcaacaacatcacagtagagctacataaagattgaaaggagatattttatcaagtggcaccagaatggact

SEQ ID NO: 751678 - DNA, 120 bp, Artificial Sequence
  ENSG00000206535_7 (sequence is synthesized)
caggccttcagtatttggcatcacctttacatggagcacaaagatgatgatgatgatgatgtgtcttttgccaaatggatgagcagcttctggggccacagctggagagaggaggatcag

SEQ ID NO: 751679 - DNA, 120 bp, Artificial Sequence
  ENSG00000206535_8 (sequence is synthesized)
agaggactccgggaacgccaccgactgcaagccaccagtcacaggaaaacctccctgccctgcccacttcctgtgcttcccagaattccatcatctgactgccatcctagaaggcattct

SEQ ID NO: 751680 - DNA, 120 bp, Artificial Sequence
  ENSG00000206535_9 (sequence is synthesized)
catgaggaccaagaatttcgatgccgtagccacgtacgggattacagaaaatactcagaggatgggtcattcaaggagccactggaatcaaaaggaagatcccattccaaaattgagaaa

SEQ ID NO: 751681 - DNA, 120 bp, Artificial Sequence
  ENSG00000206535_10 (sequence is synthesized)
ttttcagagtcctttgaacggcaactgtgctttagaaccaagcgttctgcctctttgggacctgaaagcagaaaggagagaaatgaaagagaatgcctgaggatggagataaaatcccga

SEQ ID NO: 751682 - DNA, 120 bp, Artificial Sequence
  ENSG00000206535_11 (sequence is synthesized)
aagaaagtagaggaagaaaggagctctaggaaagaagagcatggagaagcacacatggctcccctgtttgaaaaagggcctgaataatactctgcttctgcctcatgacatcagatgcta

SEQ ID NO: 751683 - DNA, 120 bp, Artificial Sequence
  ENSG00000206535_12 (sequence is synthesized)
ctgttttggtttttttctttgagccccaattcaccatttcaggatgtggatgggggcggggttgggggtaaaaacagctataaaaagcaactgcagatgctgactgactgcagtgggcag

SEQ ID NO: 751684 - DNA, 120 bp, Artificial Sequence
  ENSG00000206535_13 (sequence is synthesized)
ggtatgtagctgctccaagatgacttgcatcataccccaattactgctggcatcttagttgagagtataatctgcttggttgcctttttatgggaataaagagaataaaaggtattttaa

SEQ ID NO: 751685 - DNA, 120 bp, Artificial Sequence
  ENSG00000206535_14 (sequence is synthesized)
tagaataaagaaaaatttgaaaatataatggaaggtatttaaagagccacccacatagcttcaccaacccttctcacacatcaactcataaatcatcttaaataaaagtcattggtatga

SEQ ID NO: 751686 - DNA, 120 bp, Artificial Sequence
  ENSG00000206535_15 (sequence is synthesized)
cgactgcaagccaccagtcacaggaaaacctccctgccctgcccatccttttatactgtaaattttttcattctgtattctcagcttcctgtgcttcccagaattccatcatctgactgc

SEQ ID NO: 751687 - DNA, 120 bp, Artificial Sequence
  ENSG00000206536_0 (sequence is synthesized)
atgaataaggagaatcactccttgatagctgagttcatcctcacaggatttacatatcatccaaagctgaagactgttctgtttgtggtgttctttgccatctatctgatcaccatggtg

SEQ ID NO: 751688 - DNA, 120 bp, Artificial Sequence
  ENSG00000206536_1 (sequence is synthesized)
gggaacattggtttggtggcattgatttatatagagcaacgtcttcacacaccaatgtacatatttttaggcaacctagttctgatggattcctgctgttcctctgctattactcccaag

SEQ ID NO: 751689 - DNA, 120 bp, Artificial Sequence
  ENSG00000206536_2 (sequence is synthesized)
atgttagagaacttcttttctgaggacaaaaggattaccctgtatgaatgtatggcacaattttattttctctgtcttgctgaaactacagactgctttcttctggcggcaatggcctat

SEQ ID NO: 751690 - DNA, 120 bp, Artificial Sequence
  ENSG00000206536_3 (sequence is synthesized)
gactgctatgtggccatatgcaacccactgcagtaccacaccatgatgtccaagacactctgcattcagatgactgcaggagcctacctagctggcaacctgcatcccatgattgaagta

SEQ ID NO: 751691 - DNA, 120 bp, Artificial Sequence
  ENSG00000206536_4 (sequence is synthesized)
ctgttgaggttaactttctgtgggtctcatcaaatcaatcattttttctgtgatgttcttccattatatagactttcttgtattaacccttatatcaatgaattggtgttatttatcttg

SEQ ID NO: 751692 - DNA, 120 bp, Artificial Sequence
  ENSG00000206536_5 (sequence is synthesized)
gcaggatcaattcaaatctttactatagtcttagtttcttatttctacatccttttcacaatatttacaatgaaatccaaggagggaagaggcaaagctttatctacttgtgcatctcac

SEQ ID NO: 751693 - DNA, 120 bp, Artificial Sequence
  ENSG00000206536_6 (sequence is synthesized)
tttctctctgtgtcaatattctgtgattcccttctcttcatgtatgctcgaccaggtgcagttaatgaaggggataaagatatacctgttgctatattttatactttagttattccttta

SEQ ID NO: 751694 - DNA, 120 bp, Artificial Sequence
  ENSG00000206536_7 (sequence is synthesized)
ttaaatccttttatttatagcctaagaaataaggaagtaataaatattatgaaaaaaattatgaagaagagaaaattttgtcacattctgaaacaaatgtcatcccctctggcaacttga

SEQ ID NO: 751695 - DNA, 120 bp, Artificial Sequence
  ENSG00000206538_0 (sequence is synthesized)
gtatatgcaaaccggagctgggctccccacggctgcccgacccgggcctgggctgtggctgtgactggcgctgccgtgggcgccgcagccctcgcgggagccggacgcggtaatgcccca

SEQ ID NO: 751696 - DNA, 120 bp, Artificial Sequence
  ENSG00000206538_1 (sequence is synthesized)
gcggcgcagcgggcggctgcgtccctgagccgctatataagcgcggcagggaacatccggaggggctgaagatgaaggtgcccgcgcatgggcccccgctgattgccagtccctcccgac

SEQ ID NO: 751697 - DNA, 120 bp, Artificial Sequence
  ENSG00000206538_2 (sequence is synthesized)
cgctgattgccagtccctcccgaccccgcgccccgcgcggagcccgaggccgccgaggacccgccttcgccgcagtagcagctggagcagcgacagaggcggcagctgcggcggcggcgg

SEQ ID NO: 751698 - DNA, 120 bp, Artificial Sequence
  ENSG00000206538_3 (sequence is synthesized)
gtagagcggcggcggcagctcgggggccgccactgccccggctgccatgagttgtgcggaggtgatgtatcacccccagccttatggagcgtcccagtatctgcccaaccccatggcagc

SEQ ID NO: 751699 - DNA, 120 bp, Artificial Sequence
  ENSG00000206538_4 (sequence is synthesized)
gacaacctgccccacagcctactatcagccggcgccccaacctggccagcagaagaagttagcggtattcagcaagatgcaggactctctggaagtcacccttcccagcaaacaagagga

SEQ ID NO: 751700 - DNA, 120 bp, Artificial Sequence
  ENSG00000206538_5 (sequence is synthesized)
ggaggatgaggaggaggaggaggaggagaaagaccagcctgccgagatggagtaccttaactctcgctgtgtccttttcacttatttccagggagacattgggtcagtagtggatgaaca

SEQ ID NO: 751701 - DNA, 120 bp, Artificial Sequence
  ENSG00000206538_6 (sequence is synthesized)
cttctcaagagctttgggccaagccatcaccctccatccagaatctgccatttcaaaaagcaagatggggctaacccccctatggcgagacagctcagctctctcaagccagcggaatag

SEQ ID NO: 751702 - DNA, 120 bp, Artificial Sequence
  ENSG00000206538_7 (sequence is synthesized)
tttcccaacttccttttggaccagctcttaccagcccccacctgcaccttgtttggggggagttcatcctgacttccaggtcactggaccccctggcaccttttctgcagctgatcccag

SEQ ID NO: 751703 - DNA, 120 bp, Artificial Sequence
  ENSG00000206538_8 (sequence is synthesized)
tccttggccgggacacaacctgcatcagactggcccagcccctccccctgctgtgtctgagtcctggccttatcctttgacatctcaggtgagcccatcctacagccatatgcatgacgt

SEQ ID NO: 751704 - DNA, 120 bp, Artificial Sequence
  ENSG00000206538_9 (sequence is synthesized)
gtacatgcggcaccaccaccctcatgcccacatgcaccaccgccaccgccaccatcatcaccatcaccaccctcctgctggctctgccctggatccatcctatgggcctctgctgatgcc

SEQ ID NO: 751705 - DNA, 120 bp, Artificial Sequence
  ENSG00000206538_10 (sequence is synthesized)
ttcagtgcatgcggccaggattcctgctccccagtgtgacatcacaaagacagaaccaactacagtcacctctgctacctcagcatgggctggagcctttcatggaacagtagacatagt

SEQ ID NO: 751706 - DNA, 120 bp, Artificial Sequence
  ENSG00000206538_11 (sequence is synthesized)
gcccagcgtgggattcgatacaggtctacagcatcaagacaagagtaaggaatcaccgtggtactgaaacacacaatcttagtgagttaagttgcagcataaatccaagggcccactggg

SEQ ID NO: 751707 - DNA, 120 bp, Artificial Sequence
  ENSG00000206538_12 (sequence is synthesized)
aaaagatactgtcgggtttttccattcagcaataggacacgaaaggcatagaaggagaagacaaagtgtcacgcagttgactggttttcggcctttcttgagaaagcaaagtgggtccca

SEQ ID NO: 751708 - DNA, 120 bp, Artificial Sequence
  ENSG00000206538_13 (sequence is synthesized)
gacattgaagaaaagcatttttatttgtttatttcctcatctgagcctttgccaactgtgcaactctctccttttgttatcttgcttttatcaatatatagctaagtttttgtttcattt

SEQ ID NO: 751709 - DNA, 120 bp, Artificial Sequence
  ENSG00000206538_14 (sequence is synthesized)
tgatttttttttttagccaaccaccttgtcaggaaaggatgaaccacacattaaaatgttcattctttcaggaatacaagtttgtagctctatgtgcatctatttttgtagaaatacaaa

SEQ ID NO: 751710 - DNA, 120 bp, Artificial Sequence
  ENSG00000206538_15 (sequence is synthesized)
aagtttggtttagcattgatgggctatttttgagggatgtattttttttaaaattgtaaaaattgttgagttctgtttaaagaacttgctctcagagaagcactggcaaaaatgtttaaa

SEQ ID NO: 751711 - DNA, 120 bp, Artificial Sequence
  ENSG00000206538_16 (sequence is synthesized)
atgcttatctctaagatgtctattatatgctctgtctgtgctttctaggttacctcaaatgttttgtttttttccttcttacaaaagtagctataccgtagtcaaaccaatgcagtattg

SEQ ID NO: 751712 - DNA, 120 bp, Artificial Sequence
  ENSG00000206538_17 (sequence is synthesized)
tttttacattgaatctcagtaaagatttaattccatgctagctcaattagttttgaattatatgtatagcttgaaaagtttttttttaatgactgtgctaaagaaatgatattttattgc

SEQ ID NO: 751713 - DNA, 120 bp, Artificial Sequence
  ENSG00000206538_18 (sequence is synthesized)
tttgatttctcccaaagaataacttggaggttgactaataagaaagttggcataaactttcaatcaaatgaagagtttgcctagaggagactaattctctttctagcccatccaaatttg

SEQ ID NO: 751714 - DNA, 120 bp, Artificial Sequence
  ENSG00000206538_19 (sequence is synthesized)
ataaatggaaccagaggttatatacaactacaaggaaaaaaatgcatttaaccatgccacctatgagtgccagtgacttattttacttgtttttaattattcattcatggcaatttaaaa

SEQ ID NO: 751715 - DNA, 120 bp, Artificial Sequence
  ENSG00000206538_20 (sequence is synthesized)
agtcatattttaagtgggatttgtttttcctgaagggcatttgaaggaacaatatctgggaaggtactagagaaattacaaagcccgagctctttcttataatgccacctatccctgtaa

SEQ ID NO: 751716 - DNA, 120 bp, Artificial Sequence
  ENSG00000206538_21 (sequence is synthesized)
aacaaacaaacaaacaaacaaacaaacagttctatatataatagtttcaacacagaacttaacaagtctctttttttgtttgtttaaatctggctttacttgatttaattcctttttaga

SEQ ID NO: 751717 - DNA, 120 bp, Artificial Sequence
  ENSG00000206538_22 (sequence is synthesized)
tagaaagaaatttagggcaaaataaagtgtatattaggatttaaatttatgccacaatttaaaaataaaaccagaggttatatacaatttaaattgggctaaaaattaaaaatttgagga

SEQ ID NO: 751718 - DNA, 120 bp, Artificial Sequence
  ENSG00000206538_23 (sequence is synthesized)
tttaacttgatatagctctcaggatctaaataaagtttaaattatcattaagacactgctaggagaagattaagattatgaaagtaacagttattgatactgctggacttcaaaggcaaa

SEQ ID NO: 751719 - DNA, 120 bp, Artificial Sequence
  ENSG00000206538_24 (sequence is synthesized)
gttcatttcttccattaactgcttccagagatgtcatgtaaaaaagttagtgtattagagaagttttttagctttataaagaggttttttcaaatttctcccatttttctctccacccac

SEQ ID NO: 751720 - DNA, 120 bp, Artificial Sequence
  ENSG00000206538_25 (sequence is synthesized)
ataaaatagtatgttcagtgaaatgccactttctatctttaattgttcgtatcatatatgcgaactttttagacatgaacatgacatgttcagctaggcagagttctcatagataatttt

SEQ ID NO: 751721 - DNA, 120 bp, Artificial Sequence
  ENSG00000206538_26 (sequence is synthesized)
caaatattttccttggctgtaatttatgtattcatttatatcctatccgtcttttgagcttcagatctatatactcttttgtactctcatcactccgcactttgctgtttcttacctaga

SEQ ID NO: 751722 - DNA, 120 bp, Artificial Sequence
  ENSG00000206538_27 (sequence is synthesized)
ctctcttttacacaatatgcacatttttaccattgtggggtccaaatttaagataccttccactcactaataatatgaacttatatttcctgggagtagccaggttaaattttctatact

SEQ ID NO: 751723 - DNA, 120 bp, Artificial Sequence
  ENSG00000206538_28 (sequence is synthesized)
ttggtccataatttgatttgatatgattgtttcatttataatttgcccaaatacatggagcacaaaatttagtgaatttataaatctggatttgccttgtgtccttctgagttttcaaag

SEQ ID NO: 751724 - DNA, 120 bp, Artificial Sequence
  ENSG00000206538_29 (sequence is synthesized)
gcaagtattcaacagtccctgtgtgatgactgacagggttatttgcctcatccacatccaccttcggaatacattaacttcctttgtaatttatttgaaagtagtgttaaactcattcag

SEQ ID NO: 751725 - DNA, 120 bp, Artificial Sequence
  ENSG00000206538_30 (sequence is synthesized)
atcattcagttggattttcccaatgaagaggaaaaggaaagtagttattcctagctccatttcttattttccaccaaatttaattgaagggcattaattagatgtcttcaccctgaattt

SEQ ID NO: 751726 - DNA, 120 bp, Artificial Sequence
  ENSG00000206538_31 (sequence is synthesized)
agactttgctctgtgttctcccggtaactgtcagacaaaaagtttattggctctgaggaactgagaaatgttgggaacctggtttctgctgtacacaggaaagatttgtaagtgagctct

SEQ ID NO: 751727 - DNA, 120 bp, Artificial Sequence
  ENSG00000206538_32 (sequence is synthesized)
aagatttgtaagtgagctctctctttgaaaacaggacccaggctgggcacagcagctcatgcctgtaatcctagtattataggaggcagaggctcgggaggattgcttgagcccaggagt

SEQ ID NO: 751728 - DNA, 120 bp, Artificial Sequence
  ENSG00000206538_33 (sequence is synthesized)
atagggagaccctatccctacaaaaaatttctgaaaaattacctgggcattgtggggcacacctgttgtcccagctactctggaggctgagtccggaggaacgtttgagcctgggagttt

SEQ ID NO: 751729 - DNA, 120 bp, Artificial Sequence
  ENSG00000206538_34 (sequence is synthesized)
gctgtgattgcaccactgtactccagcttgggcaacagagcaagatcctgtctcaaaaggaaaaagaaaacaggacctaggtgtttggggtacactgccacccagggagtggatcaaaaa

SEQ ID NO: 751730 - DNA, 120 bp, Artificial Sequence
  ENSG00000206538_35 (sequence is synthesized)
cccagggagtggatcaaaaatatacatagaaagagaatgagcatgtctctataattgtcttctaggaccatattgctgttagaagtcctaaaagaggatgggttgtaatttagcataata

SEQ ID NO: 751731 - DNA, 120 bp, Artificial Sequence
  ENSG00000206538_36 (sequence is synthesized)
ttctgaattcattccaagtttaaaatcctgtcattctctggctcttcttttttcacatcaaaatgatgctgttggacttagaggcttccgaactgttttattgagggctactatctgcct

SEQ ID NO: 751732 - DNA, 120 bp, Artificial Sequence
  ENSG00000206538_37 (sequence is synthesized)
ccacaattttattaaaaccactccacctttagacaaaggtgacttttgtctgattttacaaatcagattttattcaagctttctaaatatctgtgaagtagaccctagaaaattgtctcg

SEQ ID NO: 751733 - DNA, 120 bp, Artificial Sequence
  ENSG00000206538_38 (sequence is synthesized)
tttattttaaatagaatctatgcttccaccaataaaccatcgggagctaagaaacaacataatgttgacaaatcaggaacctaacagattattttgtctctcattattaatttgaaagag

SEQ ID NO: 751734 - DNA, 120 bp, Artificial Sequence
  ENSG00000206538_39 (sequence is synthesized)
cctctaaacttttgagaaatcaatgtgtcttcttaagaaagttaagcaccctctcttaactttcccctctatttgctctcctttttctttcttcttaagagtatttatattattttgtta

SEQ ID NO: 751735 - DNA, 120 bp, Artificial Sequence
  ENSG00000206538_40 (sequence is synthesized)
agcaaaaatggctaagattgctctaaaatttgcaaaatgaggagtggattgcaaataattgagggatttatttctttaactttataagactttaaaaaaaaaacccaaattctaagcact

SEQ ID NO: 751736 - DNA, 120 bp, Artificial Sequence
  ENSG00000206538_41 (sequence is synthesized)
gacatgaaagttgcctttgagaagcttgttattcattatacaaaaagtatttgcccattcctattctaagatttgcagaatatgtcaccctatctagcttttgagtttgctatctggttt

SEQ ID NO: 751737 - DNA, 120 bp, Artificial Sequence
  ENSG00000206538_42 (sequence is synthesized)
aatgttgtatttataatttaaagtggaaatcagaaactgtttcaagaacctgtattctattccttactgagtgtcccttctttaaatagtgtttgctgaattaagccgatgggggcagtg

SEQ ID NO: 751738 - DNA, 120 bp, Artificial Sequence
  ENSG00000206538_43 (sequence is synthesized)
tttagccaaaagtttatgtgtggtttggggcttcatttatttatctcatgagtaaaatggaataatacctaacaggcaggctctggaagttggaaatcacatacacacacacacacacac

SEQ ID NO: 751739 - DNA, 120 bp, Artificial Sequence
  ENSG00000206538_44 (sequence is synthesized)
agacacacacacacacgatcaatcatgtagctcatattagatgttcaataaataacagctactacagatgcctatcagttgagtaagtagttcattaaattgagctcccaaaggtctctt

SEQ ID NO: 751740 - DNA, 120 bp, Artificial Sequence
  ENSG00000206538_45 (sequence is synthesized)
ctcttcacatccatatccgtttctgcagcaatcaaatagatacatgattgtttttctgtaagaaattactgcaaagagaatctttttctcctactaactgttccttctacctggtatagg

SEQ ID NO: 751741 - DNA, 120 bp, Artificial Sequence
  ENSG00000206538_46 (sequence is synthesized)
agataaatgtacgtttcttaattagctgactttttagtatgtcatttctgaaggaaaaataaattaaccttaaagtggcatgtaggtccaattcagttttcctacatgttccaaaatttt

SEQ ID NO: 751742 - DNA, 120 bp, Artificial Sequence
  ENSG00000206538_47 (sequence is synthesized)
atttaaattactgtgtccaaaattatgaggacagtgtcattcattcaccatagtttatatttttagttatatatcaaacttccttggcacctaggataagaacatttcttttgaagttat

SEQ ID NO: 751743 - DNA, 120 bp, Artificial Sequence
  ENSG00000206538_48 (sequence is synthesized)
ccaatttttttttatttttacttgacttgaaggaaagttggaaaatatggtggaaaaaatcttccgcattaaaagggggaaaaacacaaccatttacgatctcagtcagcagatttactc

SEQ ID NO: 751744 - DNA, 120 bp, Artificial Sequence
  ENSG00000206538_49 (sequence is synthesized)
tactcaaggaaaaaaagaaacaatcttattggaagcagatgttgacactgtgtcagttattgaagacggaaggagttcacttgagccattgcagttacaaaggggtattgatggcagttt

SEQ ID NO: 751745 - DNA, 120 bp, Artificial Sequence
  ENSG00000206538_50 (sequence is synthesized)
ggattcctgattgatcacctttgcagccaagggaaagacagcagaaactgtatgggatcagaaatgaaatcagcctgccagtttaatggagaggctcctagaaactcattttttttcttt

SEQ ID NO: 751746 - DNA, 120 bp, Artificial Sequence
  ENSG00000206538_51 (sequence is synthesized)
cctgtaagataaaagacatctttcagaataagaaaggcttgtttgagagagaaattacagtttattctctgaaaatatttaaaggccaaagtgccctttaaatctattattaaagcattg

SEQ ID NO: 751747 - DNA, 120 bp, Artificial Sequence
  ENSG00000206538_52 (sequence is synthesized)
aaactgttattaaaatcattatagaaaaattaggtaaaaattttagcctaactttcaacatccattcaaaaacgaatgttgaaaacaaacatataacctataaaaaagtgaatggctctg

SEQ ID NO: 751748 - DNA, 120 bp, Artificial Sequence
  ENSG00000206538_53 (sequence is synthesized)
gcaagtgggggcatgggtggagtccataaggaaacctcagtctcaataacttcaaaatgttacttttcatggtaacttggtcatggagattggtcacagcacagacatttagaatttttt

SEQ ID NO: 751749 - DNA, 120 bp, Artificial Sequence
  ENSG00000206538_54 (sequence is synthesized)
agcaggttttttttttcttttgaatcttgtagtgctctctgggaattgcaccatgtacacttttacaacctacagaaatcgtcattattgttaaagtatctcaacttttctatttctttt

SEQ ID NO: 751750 - DNA, 120 bp, Artificial Sequence
  ENSG00000206538_55 (sequence is synthesized)
attgtctattgtgcttttttgtttaaaaatacttttatagttttaaagtattggtcaaagtagtattctcttgaagttctagtcaatttaatttgatccaataagtttttctgaatctcc

SEQ ID NO: 751751 - DNA, 120 bp, Artificial Sequence
  ENSG00000206538_56 (sequence is synthesized)
tttttaagttccaagaaattctattataaataagtgtacttttaccaattccattgtataagcaaacagacaccttttagaaaaggataagtaatcatcaatttgtttttttaaaaaaaa

SEQ ID NO: 751752 - DNA, 120 bp, Artificial Sequence
  ENSG00000206538_57 (sequence is synthesized)
aaacaatttctagactactaaatttggcataagaataattcttttaaaatgcaacatactttaattagtttttttggtatatgcataagatgtgaactttcctattgatatcactttata

SEQ ID NO: 751753 - DNA, 120 bp, Artificial Sequence
  ENSG00000206538_58 (sequence is synthesized)
ttaatagagatgtacatttctttctatgccgtggctagagcaaaagttaataatgattatttacacaattgatttaatttcttaggatatgtataatattggatattatatctgatttaa

SEQ ID NO: 751754 - DNA, 120 bp, Artificial Sequence
  ENSG00000206538_59 (sequence is synthesized)
aaatactattccatacattttttttttcaggagataaaacatagggaaaggttttcatgtgaattctttgtatcactttgaagtacatatatttaaagggaagatggatacaatttgttt

SEQ ID NO: 751755 - DNA, 120 bp, Artificial Sequence
  ENSG00000206538_60 (sequence is synthesized)
ttattatataaatctaggtaaggtgaaatgcttttgtcaacaaaaatacagtgtagtgaattttatatttgtcacttgattaggtaaactgaaaactaacaatagaaatattattttact

SEQ ID NO: 751756 - DNA, 120 bp, Artificial Sequence
  ENSG00000206538_61 (sequence is synthesized)
gcattgaaataccatgaactttcagacttgttagttctacaagaagttgtgctaccttaattttgtgtttccagaaataaaaattaaccttagttatgctgtcatttttaactaataaaa

SEQ ID NO: 751757 - DNA, 120 bp, Artificial Sequence
  ENSG00000206538_62 (sequence is synthesized)
aaagtataattcataaaacttttggctttataagataattataaaattatatatttttttctgtttttgtggggttgggaaaacattttcttatttctattcactcttcaaatgcaggtc

SEQ ID NO: 751758 - DNA, 120 bp, Artificial Sequence
  ENSG00000206538_63 (sequence is synthesized)
ggtctcataatatgtgtcaatgatataagatgatggaagactttgtaataaaaacatatgtcattatcttcaatttgttcaataaataatttaatgtgaattgaatgtttgtattttaac

SEQ ID NO: 751759 - DNA, 120 bp, Artificial Sequence
  ENSG00000206538_64 (sequence is synthesized)
catttggatttggtctgcatttcttgagaatttaaagctctttttgtttcctccttattcaattaagcatcttataaatattttggaaattacaacatcttaggtgttattaattaagaa

SEQ ID NO: 751760 - DNA, 120 bp, Artificial Sequence
  ENSG00000206538_65 (sequence is synthesized)
gttaatttctagggccaagaagtctatatgttacagcaaggaatagattataaaatacatgtttataatggaaaagaaaatgaaatggggtatattaattacataacagcaagagtcttg

SEQ ID NO: 751761 - DNA, 120 bp, Artificial Sequence
  ENSG00000206538_66 (sequence is synthesized)
agaattttataatacaatgcttctaaggatattggttgaccaaggtgtattttattgtttttacatttgttgacagggactctgccataagtagtatgaaaaaacaaacaaaaacttttc

SEQ ID NO: 751762 - DNA, 120 bp, Artificial Sequence
  ENSG00000206538_67 (sequence is synthesized)
tacgattcattaacattgaaaagagaattccaagaccttgtattctgaagaaagctagagtttctctaagtgggccttcaattttcttattacacgtatctttaatgtgaaagtactaaa

SEQ ID NO: 751763 - DNA, 120 bp, Artificial Sequence
  ENSG00000206538_68 (sequence is synthesized)
gtctgaaaatcagcatttaaataatagactttccagcattacagatgaaataatttggcgcaggctttttaactgtctaccatatttagaatgtggtgtcaaaatgagatttttagaact

SEQ ID NO: 751764 - DNA, 120 bp, Artificial Sequence
  ENSG00000206538_69 (sequence is synthesized)
gctgtaaaatattactacattactacaacgataacggcctaaaacaacacaaatttattatcttacagctctgtcagtcagacattcagcaaagatcttagtcttggtgggctacagaat

SEQ ID NO: 751765 - DNA, 120 bp, Artificial Sequence
  ENSG00000206538_70 (sequence is synthesized)
gtaggaggcatttcctggatgcttccaagagagaatcttgctgttccctgcttctagagtcctttgcttagtttccttccatcttcaaatccagcaacctggtcaagaccttctcacatg

SEQ ID NO: 751766 - DNA, 120 bp, Artificial Sequence
  ENSG00000206538_71 (sequence is synthesized)
acatcactgacttcctcttcttcctctcccttacatatttaaggactcatgtgattacaatagctgcatctgtgtaatccagaataatctcttcatctcaaggtttttgttctgttttgt

SEQ ID NO: 751767 - DNA, 80 bp, Artificial Sequence
  ENSG00000206538_72 (sequence is synthesized)
tgttttgttttgatggagtcttgctctgtcgcctccacctcccgggttcaaaggattcccctgcctcagcctctcgagta

SEQ ID NO: 751768 - DNA, 79 bp, Artificial Sequence
  ENSG00000206538_73 (sequence is synthesized)
actccaacctccacctcccgggttcaaaatgcgtgctaccacacaaggctaatattttgtattttagtagagacgggat

SEQ ID NO: 751769 - DNA, 120 bp, Artificial Sequence
  ENSG00000206538_74 (sequence is synthesized)
aaagtgttgggattacaggcataagccattgcgccatgctcaaggttcttaattacatctttaaaggccctttttccatgtacagtaacatattcaatggttctggggattaggacttgg

SEQ ID NO: 751770 - DNA, 120 bp, Artificial Sequence
  ENSG00000206538_75 (sequence is synthesized)
ttcaatggttctggggattaggacttggagccattattctacctacaacaattagtattggacttccatcattttctatcactcttgtaatcgagaaggactatttcactgggagtagca

SEQ ID NO: 751771 - DNA, 120 bp, Artificial Sequence
  ENSG00000206538_76 (sequence is synthesized)
agtcataatgtttgcgttggcatttgtgtgggggtttatcttcattcattaaataattgcatgtaaagaaaattcctgtcactatttcaaatgtttcatgtagttattatagtgcttcag

SEQ ID NO: 751772 - DNA, 120 bp, Artificial Sequence
  ENSG00000206538_77 (sequence is synthesized)
aatccaaagggttatgtgttacttatgtaagatgagcagtctagggggtggagaacaggtcatctagtgcagattcttcctagctgaagtgtgttttctctggggacaaccaagtaggat

SEQ ID NO: 751773 - DNA, 120 bp, Artificial Sequence
  ENSG00000206538_78 (sequence is synthesized)
ttaattgttttgcttccttttttgggaacttagacccatcttgcgatgtcctaagtctccaagcatcttatttgacctgcttatacacatttgactaaatagctaaatatgaccacattg

SEQ ID NO: 751774 - DNA, 120 bp, Artificial Sequence
  ENSG00000206538_79 (sequence is synthesized)
acgtggtaaagctttaacacttttgtccagattgaatcactccatctgctatcagttaagcagtggaaaactgttatggaaaagcaaacatgttttgatagatttaatgtgtaaagaagg

SEQ ID NO: 751775 - DNA, 120 bp, Artificial Sequence
  ENSG00000206538_80 (sequence is synthesized)
tatccatactctggaatgctgctgatcaataaatgagctgcaagactttgttcgaaacaacactcaagcacaactgttttactttccataccaagtttggctgtgactgaatgaagaaca

SEQ ID NO: 751776 - DNA, 120 bp, Artificial Sequence
  ENSG00000206538_81 (sequence is synthesized)
tcagcattgatctttgctttgcacttgtacaagagactatttgcagagagccaaatatagcaacagaggatttaatatcttgccaaaaaatacaaaatctgttcccctttaagcatgaca

SEQ ID NO: 751777 - DNA, 120 bp, Artificial Sequence
  ENSG00000206538_82 (sequence is synthesized)
ctctatcctttcttgtggatcttgctaaaaggaaaatatagctttaaactcccctattccttctgttgaaagcttaagaatctttttcaaatgagctatgtatggttttgtggtatttta

SEQ ID NO: 751778 - DNA, 120 bp, Artificial Sequence
  ENSG00000206538_83 (sequence is synthesized)
tgtttccaaaagaaaatggctacatgaaaaatctgtccagtgttatcatttttcttacaaaaaatacttctagttatggttgtattaattaatttgattgtgataatgattacacaatgt

SEQ ID NO: 751779 - DNA, 120 bp, Artificial Sequence
  ENSG00000206538_84 (sequence is synthesized)
ttacctatatcaaatcatcatatcgtataccttaaatatatataacttttatgtgtcaattataactcagtaagtctgggaaaatatcgttaagtcaaagattagagtcaacagaaataa

SEQ ID NO: 751780 - DNA, 120 bp, Artificial Sequence
  ENSG00000206538_85 (sequence is synthesized)
agaaaaatcatactttgataacttcaggactaatcaaggatcaatgggtgacatgatatcatgctatgtgccattttgtgttaaacaaattacaccaacaataaaaaaaattggcttcaa

SEQ ID NO: 751781 - DNA, 120 bp, Artificial Sequence
  ENSG00000206538_86 (sequence is synthesized)
ctaattttttgtatttttagtagatagtcactattttgaatagtgaaggctggcttccctattttgaatagtgaaggctggcttccctattttgaatagtgaaggctggcttccctattt

SEQ ID NO: 751782 - DNA, 71 bp, Artificial Sequence
  ENSG00000206538_87 (sequence is synthesized)
gaaggctggcttccctattttgaatagtgaaggctggcttccctattttgaatagtgaaggctggcttccc

SEQ ID NO: 751783 - DNA, 120 bp, Artificial Sequence
  ENSG00000206538_88 (sequence is synthesized)
gtgtccagccctcatgtacaaatttttaagtaaatgtgtgtttaattctcttggaaatatatctaggagtagaactgtggggttaagagaacctcactttttattttatgtatttctata

SEQ ID NO: 751784 - DNA, 120 bp, Artificial Sequence
  ENSG00000206538_89 (sequence is synthesized)
taaaatatttaaatttaaatttttgttttttaaatttttttttagtatttaaattgttaagattcattacaacatattatagtagagtttgaggtttggtaggcaaaactgccataggaa

SEQ ID NO: 751785 - DNA, 120 bp, Artificial Sequence
  ENSG00000206538_90 (sequence is synthesized)
agtagagtttgaggtttggtaggcaaaactgccataggaatgaagtaaggtggtccattttttccgaagggctgagtggtggtgaggacagtgaggtgcctctggcacaaaatttaaaag

SEQ ID NO: 751786 - DNA, 120 bp, Artificial Sequence
  ENSG00000206538_91 (sequence is synthesized)
gatccatactgtgagggctgtgcaagtgtatgccaccccatattttgcacccagggctccttattcctctaacctctgtcttggtgttgctttgctgtcatgcgagctcactcttacttt

SEQ ID NO: 751787 - DNA, 120 bp, Artificial Sequence
  ENSG00000206538_92 (sequence is synthesized)
ttgctccctctgttgaacaggtattacatacaggtaccttgaaatgatcagtatggtatgatcataagtcatttgtatttgccctccacgtgaaaaatgctcatctttaccaagaggctg

SEQ ID NO: 751788 - DNA, 120 bp, Artificial Sequence
  ENSG00000206538_93 (sequence is synthesized)
ttatcacaaatctcacattaggctttttccctttcctttatcagtctttaaactgagtttcatgggttccataggaaaaatactcagaatgtgataataagggcttaattgaaaaaagaa

SEQ ID NO: 751789 - DNA, 120 bp, Artificial Sequence
  ENSG00000206538_94 (sequence is synthesized)
aagatctattatcaaatgaatttatttacattgcctaccatatacctcttagagatcacagttccctatagcatataaaatgttttatatattcttcagtaaaaaagcattttaaattgt

SEQ ID NO: 751790 - DNA, 120 bp, Artificial Sequence
  ENSG00000206538_95 (sequence is synthesized)
atggaacagtagacatagtgcccagcgtgggattcgatacaggtctacagcatcaagacaagagtaaggaatcaccgtggtactgaaacacacaatcttaatctccaggtgtgcctaaag

SEQ ID NO: 751791 - DNA, 120 bp, Artificial Sequence
  ENSG00000206538_96 (sequence is synthesized)
aatcttggggatgtgtcttctgaagctaaagagacccctaagcatcctgcaaaataccagtgcacaacaatttgggacatagcttaagctttctgctcgatgctggcgacaaagaggaga

SEQ ID NO: 751792 - DNA, 120 bp, Artificial Sequence
  ENSG00000206538_97 (sequence is synthesized)
aagacaacttctactctcagacaacttagtctgctttaggagttacaaacacagacaatttcaacactggatgaaaatgatgggacaaaggtaaaaggagagaggaatgcatctcagctg

SEQ ID NO: 751793 - DNA, 120 bp, Artificial Sequence
  ENSG00000206538_98 (sequence is synthesized)
agtttcagaaaaaaaaaaagttttgaagagatctcaatgttaggaagccaacaaggcctgcaaaagtcacctagatcatgaaattgactatgtcaggggaggcaattcgtcacaatcgtg

SEQ ID NO: 751794 - DNA, 120 bp, Artificial Sequence
  ENSG00000206538_99 (sequence is synthesized)
tttgaaaatgaggataagcatggagagccaatgattacatttcacaatgtccttcatgggtcttctcctttaagaaacaacatgaggattcccaggcaagatggccaaataggaacagct

SEQ ID NO: 751795 - DNA, 89 bp, Artificial Sequence
  ENSG00000206538_100 (sequence is synthesized)
agaatagctcagtgtaaacaaagccacctggaagtttggattgggcggagcctaccagagctgggcaaagcctctgtagccagactgcc

SEQ ID NO: 751796 - DNA, 88 bp, Artificial Sequence
  ENSG00000206538_101 (sequence is synthesized)
tctgaaagaaaggcggcagcttctcaaagacagagcacctggggaaaggggcggctgtgggctcagcttcagcagacttaaatgttcc

SEQ ID NO: 751797 - DNA, 120 bp, Artificial Sequence
  ENSG00000206538_102 (sequence is synthesized)
ctgaagagagcagtggatctcccagcacaatgctcggctcaagctctgctaagggacattctgccttctcaggtgggtccctgaccccatgtctcctgacagggagacacctcccagcag

SEQ ID NO: 751798 - DNA, 78 bp, Artificial Sequence
  ENSG00000206538_103 (sequence is synthesized)
cattctgccttctcaggtgggtccctgaccccatgtctcctgacagggagacacctcccagcagaggtaggtgcccct

SEQ ID NO: 751799 - DNA, 120 bp, Artificial Sequence
  ENSG00000206538_104 (sequence is synthesized)
gagcaggcagcaatctttgctgttctacagcctctgctggtgatacccaggcaaagaggatctggagtggatgccttagcaaactctagcaaacctgcagaagaggggcctgactgttag

SEQ ID NO: 751800 - DNA, 120 bp, Artificial Sequence
  ENSG00000206557_0 (sequence is synthesized)
actcccccacccacctcgtccgctctctcctcctcctcctcctcttcctctctggtctcctccctcctccgggctgggttgcaaatggcttcgttccccgagaccgatttccagatctgc

SEQ ID NO: 751801 - DNA, 120 bp, Artificial Sequence
  ENSG00000206557_1 (sequence is synthesized)
ttgctgtgcaaggagatgtgcggctcgccggcgccgctctcctccaactcgtccgcgtcgtcgtcctcctcgcagacgtccacgtcgtcggggggcggcggcgggggccctggggcggcg

SEQ ID NO: 751802 - DNA, 120 bp, Artificial Sequence
  ENSG00000206557_2 (sequence is synthesized)
gccctgcctgcacgccttctgccgcccctgcctcgaggcgcaccggctgccggcggcgggcggcggcgcggcgggagagccgctcaagctgcgctgccccgtgtgcgaccagaaagtagt

SEQ ID NO: 751803 - DNA, 120 bp, Artificial Sequence
  ENSG00000206557_3 (sequence is synthesized)
gtgtgcgaccagaaagtagtgctagccgaggcggcgggtatggacgcgctgccttcgtccgccttcctgcttagcaacctgctcgacgcggtggtggccactgccgacgagccgccgccc

SEQ ID NO: 751804 - DNA, 80 bp, Artificial Sequence
  ENSG00000206557_4 (sequence is synthesized)
aagaacgggcgcgccggcgctccggcgggagcgggcggccacagcaaccaccggcaccacgctcaccacgcgcacccgcg

SEQ ID NO: 751805 - DNA, 120 bp, Artificial Sequence
  ENSG00000206557_5 (sequence is synthesized)
ccgcccgcgccttcccgctcggcacccggcggccctgccgcttccccgtcggcgctgctgctccgccgtcctcacggctgcagctcgtgcgatgagggcaacgcagcttcttcgcgctgc

SEQ ID NO: 751806 - DNA, 120 bp, Artificial Sequence
  ENSG00000206557_6 (sequence is synthesized)
ctcgactgccaggagcacctgtgcgacaactgcgtccgagcgcaccagcgcgtgcgcctcaccaaggaccactacatcgagcgcggcccgccgggtcccggtgccgcagcagcggcgcag

SEQ ID NO: 751807 - DNA, 120 bp, Artificial Sequence
  ENSG00000206557_7 (sequence is synthesized)
cagctcgggctcgggccgccctttcccggcccgcccttctccatcctctcagtgtttcccgagcgcctcggcttctgccagcaccacgacgacgaggtgctgcacctgtactgtgacact

SEQ ID NO: 751808 - DNA, 120 bp, Artificial Sequence
  ENSG00000206557_8 (sequence is synthesized)
tgctctgtacccatctgtcgtgagtgcacaatgggccggcatgggggccacagcttcatctacctccaggaggcactgcaggactcacgggcactcaccatccagctgctggcagatgcc

SEQ ID NO: 751809 - DNA, 120 bp, Artificial Sequence
  ENSG00000206557_9 (sequence is synthesized)
cagcagggacgacaggcaatccagctgagcatcgagcaggcccagacggtggcggaacaggtggagatgaaggcgaaggttgtgcagtcggaggtcaaagccgtgacggcgaggcataag

SEQ ID NO: 751810 - DNA, 120 bp, Artificial Sequence
  ENSG00000206557_10 (sequence is synthesized)
aaagccctggaggaacgcgagtgtgagctgctgtggaaggtagaaaagatccgccaggtgaaagccaagtctctgtacctgcaggtggagaagctgcggcaaaacctcaacaagcttgag

SEQ ID NO: 751811 - DNA, 120 bp, Artificial Sequence
  ENSG00000206557_11 (sequence is synthesized)
agcaccatcagtgccgtgcagcaggtcctggaggagggtagagcgctagacatcctactggcccgagaccggatgctggcccaggtgcaggagctgaagaccgtgcggagcctcctgcag

SEQ ID NO: 751812 - DNA, 120 bp, Artificial Sequence
  ENSG00000206557_12 (sequence is synthesized)
ccccaggaagacgaccgagtcatgttcacaccccccgatcaggcactgtaccttgccatcaagtcttttggctttgttagcagcggggcctttgccccactcaccaaggccacaggcgat

SEQ ID NO: 751813 - DNA, 120 bp, Artificial Sequence
  ENSG00000206557_13 (sequence is synthesized)
ggcctcaagcgtgccctccagggtaaggtggcctccttcacagtcattggttatgaccacgatggtgagccccgcctctcaggaggcgacctgatgtcggctgtggtcctgggccctgat

SEQ ID NO: 751814 - DNA, 120 bp, Artificial Sequence
  ENSG00000206557_14 (sequence is synthesized)
ggcaacctgtttggtgcagaggtgagtgatcagcagaatgggacatacgtggtgagttaccgaccccagctggagggtgagcacctggtatctgtgacactgtgcaaccagcacattgag

SEQ ID NO: 751815 - DNA, 120 bp, Artificial Sequence
  ENSG00000206557_15 (sequence is synthesized)
aacagccctttcaaggtggtggtcaagtcaggccgcagctacgtgggcattgggctcccgggcctgagcttcggcagtgagggtgacagcgatggcaagctctgccgcccttggggtgtg

SEQ ID NO: 751816 - DNA, 120 bp, Artificial Sequence
  ENSG00000206557_16 (sequence is synthesized)
agtgtagacaaggagggctacatcattgtcgccgaccgcagcaacaaccgcatccaggtgttcaagccctgcggcgccttccaccacaaattcggcaccctgggctcccggcctgggcag

SEQ ID NO: 751817 - DNA, 120 bp, Artificial Sequence
  ENSG00000206557_17 (sequence is synthesized)
ttcgaccgaccagccggcgtggcctgtgacgcctcacgcaggatcgtggtggctgacaaggacaatcatcgcatccagatcttcacgttcgagggccagttcctcctcaagtttggtgag

SEQ ID NO: 751818 - DNA, 120 bp, Artificial Sequence
  ENSG00000206557_18 (sequence is synthesized)
aaaggaaccaagaatgggcagttcaactacccttgggatgtggcggtgaattctgagggcaagatcctggtctcagacacgaggaaccaccggatccagctgtttgggcctgatggtgtc

SEQ ID NO: 751819 - DNA, 120 bp, Artificial Sequence
  ENSG00000206557_19 (sequence is synthesized)
ttcctaaacaagtatggcttcgagggggctctctggaagcactttgactccccacggggtgtggccttcaaccatgagggccacttggtggtcactgacttcaacaaccaccggctcctg

SEQ ID NO: 751820 - DNA, 120 bp, Artificial Sequence
  ENSG00000206557_20 (sequence is synthesized)
gttattcaccccgactgccagtcggcacgctttctgggctcggagggcacaggcaatgggcagttcctgcgcccacaaggggtagctgtggaccaggaagggcgcatcattgtggcggat

SEQ ID NO: 751821 - DNA, 120 bp, Artificial Sequence
  ENSG00000206557_21 (sequence is synthesized)
tccaggaaccatcgggtacagatgtttgaatccaacggcagcttcctgtgcaagtttggtgctcaaggcagcggctttgggcagatggaccgcccttccggcatcgccatcacccccgac

SEQ ID NO: 751822 - DNA, 120 bp, Artificial Sequence
  ENSG00000206557_22 (sequence is synthesized)
ggaatgatcgttgtggtggactttggcaacaatcgaatcctcgtcttctaattgcatttcctaggtttctgtgtttggggtgtgtgtgcgtgtctctctctctctctctctctttctctt

SEQ ID NO: 751823 - DNA, 120 bp, Artificial Sequence
  ENSG00000206557_23 (sequence is synthesized)
tctctctctttttgaatttcaaagaagaaacagtctcagggaaatttcttttttcttttttttttttaaagagaacaagaaaagtacaacattgcttaagtcctacctcatctttatttt

SEQ ID NO: 751824 - DNA, 120 bp, Artificial Sequence
  ENSG00000206557_24 (sequence is synthesized)
tttacagatgaatgtacttatcttttctgcagggattgagcctgtgaagtgataatttctatctacctcataaatctttacatttccttctgcaacaggccctcttcccctcctcagtgg

SEQ ID NO: 751825 - DNA, 120 bp, Artificial Sequence
  ENSG00000206557_25 (sequence is synthesized)
agtttgcatttccctcttcccctgcgtggggcatgatatgcacaagcctggcatctgtatggctgggagggcactggatgtgtgtggtggggtgtattctgtagattgagccaaggaaac

SEQ ID NO: 751826 - DNA, 120 bp, Artificial Sequence
  ENSG00000206557_26 (sequence is synthesized)
acaaaaaaaaactactaagtaaaaaaacaaaaaactataaaacatggaaaaaataggatttgaaatgcataattatagaatacctgtgttcttgagaatactgtttatatggggtttaga

SEQ ID NO: 751827 - DNA, 120 bp, Artificial Sequence
  ENSG00000206557_27 (sequence is synthesized)
ttatgttgtgttgttttgatctttttggaaaatcttctctttttaaatgctgcaacagagaaatttcctctgttctctgtttatacctcagtgtgtttaacatcctcttctgcatcgttt

SEQ ID NO: 751828 - DNA, 120 bp, Artificial Sequence
  ENSG00000206557_28 (sequence is synthesized)
cttgatcttagacgttgtggctgtggcttgctagccaagaaaagcagacccttcatattttagggtatataatctttgtttcttttaagggagggtgtgtgcatgtttgtttcaaagcca

SEQ ID NO: 751829 - DNA, 120 bp, Artificial Sequence
  ENSG00000206557_29 (sequence is synthesized)
tcttgcacccaagtagtaaagctgaaaatgacacactgcctcccaaagaacctctccttttcacactttggtttcttaaaaaagtatatagatggtagctcaggatttttgattaaacat

SEQ ID NO: 751830 - DNA, 120 bp, Artificial Sequence
  ENSG00000206557_30 (sequence is synthesized)
attctcaaaagttatgctttcttattttgctgttaggttataaagggttaaatggaaggaaaaaggaaattaacctcgttctcagagagagggttttcaggcatgggctgacgtggacat

SEQ ID NO: 751831 - DNA, 120 bp, Artificial Sequence
  ENSG00000206557_31 (sequence is synthesized)
gaatgtgggtggacatgcgtgtgctgagggagtcagggagcacattaaagaacaaggcacccccaaactataggaactccacagaaagggcagggtctgccctgacccgcgagtgcatgt

SEQ ID NO: 751832 - DNA, 120 bp, Artificial Sequence
  ENSG00000206557_32 (sequence is synthesized)
tgttctgtagtgctaggggtttcttttcctaagaagagtaggcaaaggaaagaacttttattttacaagcacaattttttcctgctttgaaagttcagggaaatagaaggtttgaaagtc

SEQ ID NO: 751833 - DNA, 120 bp, Artificial Sequence
  ENSG00000206557_33 (sequence is synthesized)
aaattaataccaacagcccagtcccacaccctctgcttgggtcactttttataggattgtttgcacccaggccatgctttaggacctcatggttaacatgaatccccccgccccctctcc

SEQ ID NO: 751834 - DNA, 120 bp, Artificial Sequence
  ENSG00000206557_34 (sequence is synthesized)
ccccaaggcctttgaccataaaggatctagaaaccaaattgtcccaacctgaaatgtaggatgtaatgtcttttcttaaacctgtaactcggtaccaaagaatgaaaatttaaggctccc

SEQ ID NO: 751835 - DNA, 120 bp, Artificial Sequence
  ENSG00000206557_35 (sequence is synthesized)
actgcagaactgtggggtagaatctgtgtcactttacaggattggttggttgtaagctggacttgggtacaaaacttgtgcttctgggcattgtctgtctttcaagtgcaaagcagatgt

SEQ ID NO: 751836 - DNA, 120 bp, Artificial Sequence
  ENSG00000206557_36 (sequence is synthesized)
ccaaattctggaggagccctcctcagggaaaagagggactctcaaacaaacgtcagtgacttacaagggagacctcttgtttaaagacttatggatcaacttctgttcctctgtttaaga

SEQ ID NO: 751837 - DNA, 120 bp, Artificial Sequence
  ENSG00000206557_37 (sequence is synthesized)
gaaatttctattgcaaaatgggtatcgttttaaatgagcagaacagattaacaaatggagcaatttgtttctgttatcccaatagaaaaggagatgatggggacagtgtgacaagtcaat

SEQ ID NO: 751838 - DNA, 120 bp, Artificial Sequence
  ENSG00000206557_38 (sequence is synthesized)
caagttgcttttcccgtacacctcttttggacgtttaatttactactactacaagctactctgtctcttcccattgctttaattctagggtttctgagtgaccaaaatgggaaggaaaaa

SEQ ID NO: 751839 - DNA, 120 bp, Artificial Sequence
  ENSG00000206557_39 (sequence is synthesized)
aaaaacctcatctcacagaggagaactgcatgcaataaaagattcaaaagttggaaagtagcttcaaactgctgctggctcccagctgctgttacagggtgggaaggtgttaggaaatgt

SEQ ID NO: 751840 - DNA, 120 bp, Artificial Sequence
  ENSG00000206557_40 (sequence is synthesized)
tgtttgttagaagctccttttactgtagaatttaatagtgaatccttccccaatgcctattcagttgccttttggccgttaagctctaagttctttggtaaagagttaatataattaaac

SEQ ID NO: 751841 - DNA, 120 bp, Artificial Sequence
  ENSG00000206557_41 (sequence is synthesized)
atttttactgttttctattttggagtaacttggtgctgatcttccttccctttccccagctgcccaacaagccaccctttaaacaccaaagacaactggttttaaatgcttgaaaaaaat

SEQ ID NO: 751842 - DNA, 120 bp, Artificial Sequence
  ENSG00000206557_42 (sequence is synthesized)
tttattgaggagatggatcttgattaaaatcttttcatcatcattttcattctgctcttttctttctaatttccccagatgtaggaaaattttgggacctgaatgagaaatgttcttggt

SEQ ID NO: 751843 - DNA, 120 bp, Artificial Sequence
  ENSG00000206557_43 (sequence is synthesized)
gcataacagtaactagagctccttatttgacattttactatggatgtgatcgaaaagccaagattttcgctccatggctgaaattatcaggtcttaatttacagacttgtaaatttgcag

SEQ ID NO: 751844 - DNA, 120 bp, Artificial Sequence
  ENSG00000206557_44 (sequence is synthesized)
gcttagagcaactagaactatcccctgaaataggtgtgtaggtcagagatactacctctttgtcctcagtggtggtatatctatctccttacctttctgtacccaaaatggtgcatgact

SEQ ID NO: 751845 - DNA, 120 bp, Artificial Sequence
  ENSG00000206557_45 (sequence is synthesized)
ggtatttgagaaacatggtcacatttggaaagcttttgtttttaaaacattggcggtttttcctgcccgtggttgactcctgacccatagggattggtgcgaagcactttggagagtgtt

SEQ ID NO: 751846 - DNA, 120 bp, Artificial Sequence
  ENSG00000206557_46 (sequence is synthesized)
tattgtatgatgtgaaatgttctaaatcaaagaaagatgataaaagccaacatttggcagtccctagtgtgaaactgtgaaaagtacctgtgtttaaatgcataatctcctgcccgggta

SEQ ID NO: 751847 - DNA, 120 bp, Artificial Sequence
  ENSG00000206557_47 (sequence is synthesized)
atgccaggtagccaggagttgggtcaaagaagggagtcgtcatcctgatggaaaaaataaggtcctgggtattatgaggtaggagaataaaaaggtttctggggagtaagtatgacaatt

SEQ ID NO: 751848 - DNA, 120 bp, Artificial Sequence
  ENSG00000206557_48 (sequence is synthesized)
actagtccccatggaggtctgatctggtcaggtggcaagggttgggtggggtatgatgtaagctcagtttatgtgtggagatgcccattgggtttggatatataggtttgagtattgaga

SEQ ID NO: 751849 - DNA, 120 bp, Artificial Sequence
  ENSG00000206557_49 (sequence is synthesized)
tgtttaaaggacatctaacccataggtaaaaactacttttgcttgacactgacttaacatttcaaaagtgttatttttggtcccaagatctaatgctgtctcagaacatgtgccctgttg

SEQ ID NO: 751850 - DNA, 120 bp, Artificial Sequence
  ENSG00000206557_50 (sequence is synthesized)
tggctgcaagtggcactcaagttgactagagcacagtgacctgggttgtaccccaagtgcactaactcctcaatgcccttttaagtctaacttatttgggaaacacataacaaagggtac

SEQ ID NO: 751851 - DNA, 120 bp, Artificial Sequence
  ENSG00000206557_51 (sequence is synthesized)
cataaaccgaatccaaattacgtgttgggccaaaaatgttgccagaactgaggcactttgtgatggagttgcaagagatagcttgagatcggctcagtctgatttattctagttaagcca

SEQ ID NO: 751852 - DNA, 120 bp, Artificial Sequence
  ENSG00000206557_52 (sequence is synthesized)
aagcttaattatttgaggaggaaagtcttttaggcttgaagcagcaaaatactgtttatatatgtgttaccttcctcgttggaagattctacgattgctctgttctggtaggtggtgaaa

SEQ ID NO: 751853 - DNA, 120 bp, Artificial Sequence
  ENSG00000206557_53 (sequence is synthesized)
gatatgccaaagttttaggcttgtttttctgatcttatttttttaatccagtggtgccaaaaagtatttagggtatgtttaaggtatatttaaaacatcactctgaatgagtttccaaca

SEQ ID NO: 751854 - DNA, 120 bp, Artificial Sequence
  ENSG00000206557_54 (sequence is synthesized)
gtctggggctgtataaaagtcacactcttgtacttgcaggtgatggtgtcacagggccagggcctccagagctctacggctttctctggttttctatagggccaagggcacaggacgcag

SEQ ID NO: 751855 - DNA, 120 bp, Artificial Sequence
  ENSG00000206557_55 (sequence is synthesized)
cattccagaccacactgactgcttttgctgagtttctacctcacttgtggcaagtcatctacctcatgttagcatctgacaggtctcaaaaagaatagtattaatccagtgggcagtggg

SEQ ID NO: 751856 - DNA, 120 bp, Artificial Sequence
  ENSG00000206557_56 (sequence is synthesized)
tgggagtgggaagctacctctaaaagaaatgttaccataaatctacaactgatttctcccaggagaaatgttctacttaccttgaaagagaaatgtcaggcaaatgtagtcataaatcca

SEQ ID NO: 751857 - DNA, 120 bp, Artificial Sequence
  ENSG00000206557_57 (sequence is synthesized)
agtagttcttagcaatctggcttttccccctcaaaaagaattatgcataccattactgttgttcagtattatgaaactactggttaatctgacctattggaggacttaactacaaataaa

SEQ ID NO: 751858 - DNA, 120 bp, Artificial Sequence
  ENSG00000206557_58 (sequence is synthesized)
gacctttaggtctctttctcttcaagagaaaaatattttatctgtatttcgaatgtctgcaaataataccctttaggagcaattctaaaggtctagatcttggaaacatcaaatatttga

SEQ ID NO: 751859 - DNA, 120 bp, Artificial Sequence
  ENSG00000206557_59 (sequence is synthesized)
agggaatgagaatcctcttgacttcatgattgtatttgtagctctctggacccggcaggacgttcatcaccatgatgttgcaacaatcactgttttgactgagcagtgactgttgaagtg

SEQ ID NO: 751860 - DNA, 120 bp, Artificial Sequence
  ENSG00000206557_60 (sequence is synthesized)
tgtattgctcttttgttttgtttttatttttttctaccaaaggtaacatgttgacgggttttttttttccttgtttattaaatacttgataaagttgagaagcacattaccaggatatac

SEQ ID NO: 751861 - DNA, 120 bp, Artificial Sequence
  ENSG00000206557_61 (sequence is synthesized)
tgtattgaccctcccacctctcttctgccctaatttttggttgtttggaagagaggagggtcctaagaccactgtcattatcatgaggggcttataaatgtcatggtgaagaaatacctc

SEQ ID NO: 751862 - DNA, 120 bp, Artificial Sequence
  ENSG00000206557_62 (sequence is synthesized)
aatgatgtctatttttaaaactgatcttacgggttaacaagccagcctggtgggatattttccatcatcatttaaccaataatggttctaaaagttttgtgtatccacatggtcttagac

SEQ ID NO: 751863 - DNA, 120 bp, Artificial Sequence
  ENSG00000206557_63 (sequence is synthesized)
ctccttttaatgattgtattaacttacaagctcaggtagtatttttcttaagactctatctcagagcacactgactgaatgttgatgtgtgtagcaaagtgtttactttctttaaataac

SEQ ID NO: 751864 - DNA, 120 bp, Artificial Sequence
  ENSG00000206557_64 (sequence is synthesized)
cagctctgtaactctgtaagttctttgtgtttctagcagtctgtgtagttgtctttcttcagaggaagatttttcacatttctggggttttcttgcttttagggtggtaagattcctttc

SEQ ID NO: 751865 - DNA, 120 bp, Artificial Sequence
  ENSG00000206557_65 (sequence is synthesized)
tttttttcccttttctcctaaaatcgatgcaggtaagggtgggtgggtaaggggtgttgttttttaactagcatgttagttatacttgggtgggtgggagggttgttaaactgaatcttg

SEQ ID NO: 751866 - DNA, 120 bp, Artificial Sequence
  ENSG00000206557_66 (sequence is synthesized)
cttaatactgtccattagctctcatgccgggtcagcaaaatgctttaatttttaactgcagaacatgtgactcggttgagtctttttgtcttttttttttttaaataaacaattggggga

SEQ ID NO: 751867 - DNA, 120 bp, Artificial Sequence
  ENSG00000206557_67 (sequence is synthesized)
attaatgtgggcaagttgccttatgttagaatgactaagttaaacctcttaatttgtatttgtccaaggcagacatgatataaggaatatgcactaccgtagtaactcccctggccgcag

SEQ ID NO: 751868 - DNA, 120 bp, Artificial Sequence
  ENSG00000206557_68 (sequence is synthesized)
aaaccacactgcaagcctgtccggggtggggtgctgactgccatttgccacttttaaatgggcactgccgtggtaatgtgaatcccatcaatgcagtagatgggtggggaaatgaagatt

SEQ ID NO: 751869 - DNA, 120 bp, Artificial Sequence
  ENSG00000206557_69 (sequence is synthesized)
tccccccaaacctttaggcaaaagtgagtttttgtttggttgattttgggtttttttcccccctcctcttttggctttcacattttaaatcttaaatgttactattgcaggccgcaggca

SEQ ID NO: 751870 - DNA, 120 bp, Artificial Sequence
  ENSG00000206557_70 (sequence is synthesized)
tgacaggcaatgagcaggtgaagaaccaatggaaaagtgttcaaaaactcctgtgttagctaacaggcttctgaatgtatcactgtggtccacagagaaggctggaggaggtagcaagga

SEQ ID NO: 751871 - DNA, 120 bp, Artificial Sequence
  ENSG00000206557_71 (sequence is synthesized)
gatgctgtatcagctactacagccttaaaacaaagttggtgtctctttggactttaaaattgttcctatgcagcttattttatttttgtttaatcaaataaacgagggtttttccatggc

SEQ ID NO: 751872 - DNA, 120 bp, Artificial Sequence
  ENSG00000206559_0 (sequence is synthesized)
gaagacaccgccgcttccacagcgaagggagctgctccgggcacgtcgcggagggagtcccatttcttctgactcggcaggagcccgggacgttctggaaggagggacgagccgaggcag

SEQ ID NO: 751873 - DNA, 120 bp, Artificial Sequence
  ENSG00000206559_1 (sequence is synthesized)
gaggggccgggccgacgcgagagaaggcccgttacccagcaatacgcgcgcgagacccaggcccgccgtcgggaccagcacgggccggagggaggggaagcactccggaaagtgattgga

SEQ ID NO: 751874 - DNA, 120 bp, Artificial Sequence
  ENSG00000206559_2 (sequence is synthesized)
agtgtggatgagctctcagccggaaaaggggctgccgctgtccgcgggctcggcgccagggacgcgcgaggaaaccggaagtcaggcccgagggagctgggagggcgttagcgaagccag

SEQ ID NO: 751875 - DNA, 120 bp, Artificial Sequence
  ENSG00000206559_3 (sequence is synthesized)
gttcggtcgtgggggtggggaagtgcaggagtggcgcgcggcgtactacatgtcccgtgagcctccgcggcgggacggggcggggccgcgggacgccaggaggcggaggcggagtggagt

SEQ ID NO: 751876 - DNA, 120 bp, Artificial Sequence
  ENSG00000206559_4 (sequence is synthesized)
tagattcatcccagtagaacgcctgcctctttagtgactacagacctcacttcccttctctggagttttggagtctattttcttcatggaattttgctaggaacaaaagaaaagtctaac

SEQ ID NO: 751877 - DNA, 120 bp, Artificial Sequence
  ENSG00000206559_5 (sequence is synthesized)
tccattaaatgccttaatggataaagaaaaattggatgttaagattgaatattgtaactatgcaatggattcctcagtggaaaacatgtatgtaaacaaagtgtgggttcaatgtgagaa

SEQ ID NO: 751878 - DNA, 120 bp, Artificial Sequence
  ENSG00000206559_6 (sequence is synthesized)
tgaaaattgtttgaaatggagattgttatcaagtgaggattcagccaaggttgatcatgatgaaccatggtactgcttcatgaacactgattcaagatataataactgctcaatttctga

SEQ ID NO: 751879 - DNA, 120 bp, Artificial Sequence
  ENSG00000206559_7 (sequence is synthesized)
agaagacttccctgaagagtctcagcttcatcagtgtggatttaagattgtctattcacagctccctcttggaagcctggttttggtaaaattacagaattggccaagttggccaggaat

SEQ ID NO: 751880 - DNA, 120 bp, Artificial Sequence
  ENSG00000206559_8 (sequence is synthesized)
actttgccctgaccgttttaaagggaaatatgtaacttatgacccggatggaaatgttgaagagtatcacatagaattcctgggcgatccccattcaagatcatggataaaggcaacatt

SEQ ID NO: 751881 - DNA, 120 bp, Artificial Sequence
  ENSG00000206559_9 (sequence is synthesized)
cgttggacattatagtatcacattaaagccagaaaagtgtaagaataaaaagaagtggtataaaagtgcactacaagaagcatgtctactctatggatattctcatgagcaaagactgga

SEQ ID NO: 751882 - DNA, 120 bp, Artificial Sequence
  ENSG00000206559_10 (sequence is synthesized)
aatgtgctgcctatcaaaactacaagataaatccgaaacacatgacaaagttgctgcactggtcaagaaaaggaagcagacttctaaaaataatattgaaaagaagaagcccaaatttag

SEQ ID NO: 751883 - DNA, 120 bp, Artificial Sequence
  ENSG00000206559_11 (sequence is synthesized)
aaaaaggaaaaggaaagcaattttaaaatgctcttttgaaaatgtttattctgatgatgccttatcaaaggagaacagggttgtctgtgagacggaagttttactaaaagagctggagca

SEQ ID NO: 751884 - DNA, 120 bp, Artificial Sequence
  ENSG00000206559_12 (sequence is synthesized)
aatgctgcagcaagcactgcaacccacagccacacctgatgaatcagaagaaggacatggagaggaaataaatatgggagaaaagttatctaaatgcagcccagaagctcctgcaggcag

SEQ ID NO: 751885 - DNA, 120 bp, Artificial Sequence
  ENSG00000206559_13 (sequence is synthesized)
tagatgctttgatgtctgagttttagaacattatacatttttcaaattaattataaaaatattggcatctttatatttatccaaagttaaaactttaaaaatgtttagtgaaataggtat

SEQ ID NO: 751886 - DNA, 120 bp, Artificial Sequence
  ENSG00000206559_14 (sequence is synthesized)
tatatttgcggtaactttctacttcatattttgagaatggccatgatttttagagccagtcaaatggtatttaagttagtgttaaaaatttagaattaaaaaaccctgatatttgtattt

SEQ ID NO: 751887 - DNA, 120 bp, Artificial Sequence
  ENSG00000206559_15 (sequence is synthesized)
atatatttcttgtttgccttaatttttaaatggtttgtgaaatttgcctaacaaacatatgttttacaatgattgtttaggccctttgttcaaaaatggataacttaaaatggctggcca

SEQ ID NO: 751888 - DNA, 120 bp, Artificial Sequence
  ENSG00000206559_16 (sequence is synthesized)
gccaagctattataattctcagaggtaattcaaatctaataaacttagagaatgtatatttgcagtggaatcaaactattacaaaataaaaggaaataattttttaaataattgtttaat

SEQ ID NO: 751889 - DNA, 120 bp, Artificial Sequence
  ENSG00000206559_17 (sequence is synthesized)
ttgaaacttttcctaaaaagcaaaatttcacttgctacttctactggaatcagttatttcaaccatggtacccaaaactgactgcttaatagagtctctgggagattttggaagatcaaa

SEQ ID NO: 751890 - DNA, 120 bp, Artificial Sequence
  ENSG00000206559_18 (sequence is synthesized)
atcctggacccttccctgctgaatcagtgtctttggaggtatcatcaggaagatggaaaaatgtaatttaaagtgtatagagagaagttaaacatattgattataagaaatctaacaata

SEQ ID NO: 751891 - DNA, 120 bp, Artificial Sequence
  ENSG00000206559_19 (sequence is synthesized)
tagaaagtaaaaactcatcatttttcagggattctcatgaacagttttagtagatatccttctagatatgtgtgggcattcacacctatctttagttcctgctctatctctttctggtgg

SEQ ID NO: 751892 - DNA, 120 bp, Artificial Sequence
  ENSG00000206559_20 (sequence is synthesized)
tacggggtggggaaaagggcattccaagcacataaaaaccaaagcttgaggagagaagaagtgcacgagagcatcaccacagcggtgaattttattgtgagttgcctcatattgctttaa

SEQ ID NO: 751893 - DNA, 120 bp, Artificial Sequence
  ENSG00000206559_21 (sequence is synthesized)
caaggaggcagcacatgtctagatattaaaaacaaataagacaccaaacaaccaacgtgtcactcattgagtgggttgcttcttttaagtatttttagattctatgataattacgtagag

SEQ ID NO: 751894 - DNA, 120 bp, Artificial Sequence
  ENSG00000206559_22 (sequence is synthesized)
tggagagtggagatagactcacaacggtgaaatatcttatttgtcaaagtaaagtatgtatgtatttctgtcttccttgttttcctcatgtattccttagcattctgatattgtgtcata

SEQ ID NO: 751895 - DNA, 120 bp, Artificial Sequence
  ENSG00000206559_23 (sequence is synthesized)
ggatgttgagttgtaaagcctatctgggttcatattttacatactagcttgtcttaagtcatataaccagtaaatagaaggcctggaagttgagtacatctctgtcaggttccagatccc

SEQ ID NO: 751896 - DNA, 120 bp, Artificial Sequence
  ENSG00000206559_24 (sequence is synthesized)
atgccattgattatcatctataatgtcttgatgaagcttttaactagctgggtggtggaatgataatctagtttcctcatatgtaaaatggggatggaactatgcaaaccaagcactgtt

SEQ ID NO: 751897 - DNA, 120 bp, Artificial Sequence
  ENSG00000206559_25 (sequence is synthesized)
gtgaggaataaatgagatattttttgtgaaagtggtttgtaaatcaatttgatcttctgtttactctttgcaaagagaaccaagtatgtgtttaaatatattgcaattaataattactga

SEQ ID NO: 751898 - DNA, 120 bp, Artificial Sequence
  ENSG00000206559_26 (sequence is synthesized)
gataaaatgtaactatacatttgaaatgatcagttttctttctgttatatcatttaatctactactcatcaatatcagagttctttctttctcatttataaaattaatctttggaaacca

SEQ ID NO: 751899 - DNA, 120 bp, Artificial Sequence
  ENSG00000206559_27 (sequence is synthesized)
ccaatgaatttttgaagctctataaagaagattaggctaatcacataattcaggattaaaaaatgtagcagcctttcattttcatctccagtttcctgactgggttgtttttcatgccac

SEQ ID NO: 751900 - DNA, 120 bp, Artificial Sequence
  ENSG00000206559_28 (sequence is synthesized)
cttgaacgaaatatatctatttatactactcaataaatatttactcaactcctattatttgaaattcttctaggttccaaagtgaacaaaatagaccaaattgaatgccctcataaaatt

SEQ ID NO: 751901 - DNA, 120 bp, Artificial Sequence
  ENSG00000206559_29 (sequence is synthesized)
tagccttttcagctatcaagatgagagtcaacgctaagaatctaccccagatgtcaagaaagaccctgggcataatcaatgctgaagtgaaaaggatcaacactggagagagaagagggg

SEQ ID NO: 751902 - DNA, 120 bp, Artificial Sequence
  ENSG00000206559_30 (sequence is synthesized)
atatgggagaaaagacaatttttttttttggagatagagtctcactttgtcaccaaggctggagtgaagtaatgcaatctttgctcactgcaatctctgcctcccaagttcaagtgattc

SEQ ID NO: 751903 - DNA, 120 bp, Artificial Sequence
  ENSG00000206559_31 (sequence is synthesized)
ataataaccaaaggaggtttatggtggaggatgaagaaaagctctgtctgagttagtgagtttgttaaagcaatttttcaagcaaaagaaaatttgtgattgaggccaaagagaatttga

SEQ ID NO: 751904 - DNA, 120 bp, Artificial Sequence
  ENSG00000206559_32 (sequence is synthesized)
gagcctcaattactcagattttaaaaaacaacacttaatgtttacacttagtgtttgacgcttcattttccttcatatggataatagctaacatttattaaacacttcttatatgcccga

SEQ ID NO: 751905 - DNA, 120 bp, Artificial Sequence
  ENSG00000206559_33 (sequence is synthesized)
tggctgctataacaaattaccgtagactgggtggcttcaacaacaaacatgtatttctcacagttctggaggctaaaaagtccaagatcaaggtgacagcaggtcctatatctgatgggg

SEQ ID NO: 751906 - DNA, 88 bp, Artificial Sequence
  ENSG00000206559_34 (sequence is synthesized)
atggataaaggcaacattcgttggacattatagtatcacattaaagactggagtgcagtggcacaatctcgcatcactgcagcatctg

SEQ ID NO: 751907 - DNA, 120 bp, Artificial Sequence
  ENSG00000206560_0 (sequence is synthesized)
gcggccgcgggggctgccagggtatttcgggaagggggcgtgaggaggcggcggcggcagcggcgggtagggcaggcagcagagggaaggagaaagaaaggaaggaagagggcggggagt

SEQ ID NO: 751908 - DNA, 89 bp, Artificial Sequence
  ENSG00000206560_1 (sequence is synthesized)
agagggaaggagaaagaaaggaaggaagagggcggggagtcctcagaggaggaggcgggaccggccgggcacctcacctctcggccggg

SEQ ID NO: 751909 - DNA, 120 bp, Artificial Sequence
  ENSG00000206560_2 (sequence is synthesized)
cttctcagcgcagtcggccgcggacccgctggtcccgggcagcggccaaggctactggggcgggagcagtgggccggtcggcggcggcagcggcagcggcggaggaggaggaggctggag

SEQ ID NO: 751910 - DNA, 120 bp, Artificial Sequence
  ENSG00000206560_3 (sequence is synthesized)
cgaccgccatggcgttcctcaaactccgtgaccagccatcactggtgcaagctatatttaacggagatcctgatgaagttcgagcactaatatttaagaaagaagatgttaactttcagg

SEQ ID NO: 751911 - DNA, 120 bp, Artificial Sequence
  ENSG00000206560_4 (sequence is synthesized)
acaatgaaaagcgaaccccattgcacgccgcagcttaccttggagatgcagaaatcattgaacttcttattttatctggagctagagttaatgccaaagacagcaaatggttgacacctt

SEQ ID NO: 751912 - DNA, 120 bp, Artificial Sequence
  ENSG00000206560_5 (sequence is synthesized)
tacacagagcagttgcatcttgtagtgaggaagcagttcaggtacttttgaagcattctgcagatgttaatgctcgagacaaaaattggcaaacccctttacatatagctgctgctaata

SEQ ID NO: 751913 - DNA, 120 bp, Artificial Sequence
  ENSG00000206560_6 (sequence is synthesized)
aagctgtaaagtgtgctgaagctttggtacctcttctgagtaatgtaaacgtatctgatcgagcagggaggactgcattacatcatgcagctttcagtggacatggtgagatggtcaaac

SEQ ID NO: 751914 - DNA, 120 bp, Artificial Sequence
  ENSG00000206560_7 (sequence is synthesized)
tactcttgtctagaggtgccaatattaatgcttttgacaagaaagataggcgtgctatccattgggcagcatatatgggtcacattgaagtagtgaaattgcttgtgtcgcatggagctg

SEQ ID NO: 751915 - DNA, 120 bp, Artificial Sequence
  ENSG00000206560_8 (sequence is synthesized)
aagtgacatgcaaggataaaaagtcttatacacctcttcatgcagcagcctctagtggaatgatcagcgtagtcaagtaccttctagatcttggagttgatatgaatgaaccaaatgcct

SEQ ID NO: 751916 - DNA, 120 bp, Artificial Sequence
  ENSG00000206560_9 (sequence is synthesized)
atggaaatacacctcttcatgtagcctgctataatggacaagatgttgtagtgaatgaacttatagactgtggtgctattgtgaatcaaaagaatgaaaaaggatttactcctttgcact

SEQ ID NO: 751917 - DNA, 120 bp, Artificial Sequence
  ENSG00000206560_10 (sequence is synthesized)
ttgctgctgcatcaacacatggagcattgtgtttagagcttctagttggcaatggggccgatgtcaatatgaagagtaaagatgggaaaaccccactacacatgactgctctccacggta

SEQ ID NO: 751918 - DNA, 120 bp, Artificial Sequence
  ENSG00000206560_11 (sequence is synthesized)
gattctcccgatcacaaaccattatccagagtggagctgtaatcgactgtgaggataagaatggaaatacccctttgcacatagcagcacggtatggccatgagctgctgatcaacactc

SEQ ID NO: 751919 - DNA, 120 bp, Artificial Sequence
  ENSG00000206560_12 (sequence is synthesized)
ttattacaagtggtgctgacactgcaaagcgtggcatacatggaatgttccccctccatttggcagccttaagcggcttttcagattgctgcagaaaacttctttcttcaggatttgata

SEQ ID NO: 751920 - DNA, 120 bp, Artificial Sequence
  ENSG00000206560_13 (sequence is synthesized)
tagataccccagatgattttggcaggacttgtctacatgcagctgcagctggagggaatttggagtgcctaaaccttctgctgaatactggtgcagactttaataaaaaggacaaatttg

SEQ ID NO: 751921 - DNA, 120 bp, Artificial Sequence
  ENSG00000206560_14 (sequence is synthesized)
ggagatctccactgcactacgctgctgccaactgcaattaccagtgcctgtttgctcttgtgggatcaggagcaagtgtgaatgaccttgatgaaagaggctgcacacccctgcactatg

SEQ ID NO: 751922 - DNA, 120 bp, Artificial Sequence
  ENSG00000206560_15 (sequence is synthesized)
cagctacatcagacacagatggcaagtgcctggaatacttattaagaaacgatgcaaatccagggatccgtgataagcaaggatacaacgcagttcattattcagctgcttatggtcacc

SEQ ID NO: 751923 - DNA, 120 bp, Artificial Sequence
  ENSG00000206560_16 (sequence is synthesized)
gtctatgtcttcagctgattgcaagtgaaactcctctagatgttttaatggaaacctcaggaacagacatgctgagtgattcagataatagagcaacaataagccctttacacttggctg

SEQ ID NO: 751924 - DNA, 120 bp, Artificial Sequence
  ENSG00000206560_17 (sequence is synthesized)
cctatcatggtcaccatcaagcactggaagtgttggtacagtctttgttagatcttgatgtcagaaatagtagtggaagaacacccctagatcttgcagcttttaagggccatgttgaat

SEQ ID NO: 751925 - DNA, 120 bp, Artificial Sequence
  ENSG00000206560_18 (sequence is synthesized)
gtgtggatgtactcattaatcagggagcctcaatcttagtaaaagattacattttgaagaggacacctattcatgcagcagcaacaaatggtcattcagaatgcttacggctattaatag

SEQ ID NO: 751926 - DNA, 120 bp, Artificial Sequence
  ENSG00000206560_19 (sequence is synthesized)
gaaatgcagaaccacagaatgcagtggatattcaagatggaaatggacagacgcctctgatgctatctgttctcaacgggcacacagactgtgtttactcattgctgaacaaaggagcaa

SEQ ID NO: 751927 - DNA, 120 bp, Artificial Sequence
  ENSG00000206560_20 (sequence is synthesized)
atgtagatgccaaagataagtggggaaggacagcgttgcatagaggggcagttacaggccatgaagaatgtgtagatgcattacttcaacatggtgctaagtgcttacttcgggatagca

SEQ ID NO: 751928 - DNA, 120 bp, Artificial Sequence
  ENSG00000206560_21 (sequence is synthesized)
ggggccggacgcctatacacctgtctgctgcctgtggacacattggtgttcttggagcccttttgcagtcagcagcatctatggatgcaaatccagccacagcagacaatcatggatata

SEQ ID NO: 751929 - DNA, 120 bp, Artificial Sequence
  ENSG00000206560_22 (sequence is synthesized)
cggcacttcactgggcttgctacaatggtcacgagacatgtgtagaactgcttttagaacaggaagttttccagaaaacggaaggaaatgcttttagtccattgcattgtgccgtgataa

SEQ ID NO: 751930 - DNA, 120 bp, Artificial Sequence
  ENSG00000206560_23 (sequence is synthesized)
atgacaacgaaggtgctgctgagatgttaattgatacattaggtgccagcattgtgaacgccacagattcaaaaggaagaactcctctccatgcagccgccttcacagaccatgtagagt

SEQ ID NO: 751931 - DNA, 120 bp, Artificial Sequence
  ENSG00000206560_24 (sequence is synthesized)
gtttacagctgctgctcagccataatgctcaagtcaattctgtggactctacagggaaaacacctcttatgatggctgcagaaaatggacaaacaaatacagttgagatgctggttagca

SEQ ID NO: 751932 - DNA, 120 bp, Artificial Sequence
  ENSG00000206560_25 (sequence is synthesized)
gtgctagtgcagaactgactttacaagataacagtaaaaatactgccctccatttggcttgtagcaagggtcatgaaactagtgccttgttaatactggaaaagataacagatagaaacc

SEQ ID NO: 751933 - DNA, 120 bp, Artificial Sequence
  ENSG00000206560_26 (sequence is synthesized)
tcatcaatgcaaccaacgcagccttgcaaacacctctgcatgttgctgcccgaaatgggctaacaatggtggttcaggaacttttgggaaaaggagcaagtgtgcttgcagtagatgaaa

SEQ ID NO: 751934 - DNA, 120 bp, Artificial Sequence
  ENSG00000206560_27 (sequence is synthesized)
tctcatcaagtagtcctttatcatccttaacattcaatgccattaaccgttataccaacacctcaaaaacagtcagctttgaagctttgcccatcatgaggaatgaacctagctcctatt

SEQ ID NO: 751935 - DNA, 120 bp, Artificial Sequence
  ENSG00000206560_28 (sequence is synthesized)
gcagtttcaataacattggaggggaacaggagtacttatacactgacgtggatgagctcaacgactccgattctgagacctactgagaggctgaggaggagggagttctcacagtaaagc

SEQ ID NO: 751936 - DNA, 120 bp, Artificial Sequence
  ENSG00000206560_29 (sequence is synthesized)
ttcaaactgtgctttttcaggaaaaaggcactttgatattcacgtagaaattcaacctaagaggaaagatcccacagtgagccaatgttaagagatctgatggcattaggaggaagagtt

SEQ ID NO: 751937 - DNA, 120 bp, Artificial Sequence
  ENSG00000206560_30 (sequence is synthesized)
ttaaaggcaagttttacaaaaggaacttctagaatcttgaaatagacctgactgaggaaaacacattgatgtcagaattctttgtggaattgtttaatttggttttgcagtgccaggaac

SEQ ID NO: 751938 - DNA, 120 bp, Artificial Sequence
  ENSG00000206560_31 (sequence is synthesized)
aattggggacactgtgcactctaacctgcttacacaagcaacactattgtaacagaagaaataaagacactagatttaaattttatcaataaaattacaactaaatttaaaggcaataaa

SEQ ID NO: 751939 - DNA, 120 bp, Artificial Sequence
  ENSG00000206560_32 (sequence is synthesized)
agtttggtacagtaggcattatgtgcacagcaaattgcaaaaggaccaaataactgaaaggtttttttaataaaatgccattttgtggaaactggagtagattaaatgaaacattaccta

SEQ ID NO: 751940 - DNA, 120 bp, Artificial Sequence
  ENSG00000206560_33 (sequence is synthesized)
aaccaaactgcaatatttctggaaatgaagctgagatttggttttaaatgttgagtttttttgggttttgttttttttttaagaaaacatctgaaagccttccaatgctgtattaaacca

SEQ ID NO: 751941 - DNA, 120 bp, Artificial Sequence
  ENSG00000206560_34 (sequence is synthesized)
tgagagaaagcagatgtatttttacatttttttcttttacagaactatttcaaatttccaatttttatactattagaattaaaaaccagctgactgggtgcaatacgggtgaaaatactt

SEQ ID NO: 751942 - DNA, 120 bp, Artificial Sequence
  ENSG00000206560_35 (sequence is synthesized)
gtgacatagacattgagatggattggggtcaggctgttgccctgttttgaatggtttgggtttaaaatagtactatttttgtttgaaaatgtaaagaatttcctagaaaaaaattcatga

SEQ ID NO: 751943 - DNA, 120 bp, Artificial Sequence
  ENSG00000206560_36 (sequence is synthesized)
aatcaaaaagtagactatttcaccctattgcagctaagtggtcctggggcatggagtcttcaacctctctatgaatggcacaccttagtcacttatgttacttttgtgtccccaccatgg

SEQ ID NO: 751944 - DNA, 120 bp, Artificial Sequence
  ENSG00000206560_37 (sequence is synthesized)
gttgggggattttttgtttattctgatctatgagttttgaaaaagtgaataatcaaaaggaaaataattccttgttgttcataaattaagcatcactaaagtctcttgaaaggcatttct

SEQ ID NO: 751945 - DNA, 120 bp, Artificial Sequence
  ENSG00000206560_38 (sequence is synthesized)
gtattgggcaagatttaaaatactaaagccttaggtcctattcatatttaaagtagcatgtttgtaacctgttactatttggagagagaagcagttgcctgccaaattgaagactacctt

SEQ ID NO: 751946 - DNA, 120 bp, Artificial Sequence
  ENSG00000206560_39 (sequence is synthesized)
tcaaatagcaaaagagagagagaaggctgatatttcggcttttaaataaagatttgtgtggttctgcttttactgtaactgtcactttcccagtgaaaatgatttcatatacattgaggg

SEQ ID NO: 751947 - DNA, 120 bp, Artificial Sequence
  ENSG00000206560_40 (sequence is synthesized)
tcttacaggtatgggtaaagttctataaattgcaacaaaatgatacccaatttcattttatcctttttgtattgtgaaactggaaactttatgacattgtaaattatcagctggtttttc

SEQ ID NO: 751948 - DNA, 120 bp, Artificial Sequence
  ENSG00000206560_41 (sequence is synthesized)
tgaatataaagtgtgaaaacacagaacagtattttgatctatttgataattttgtgggttttttgaagaattaatgagcatgtacatagaaatagtgactgcttgaatactgtatttact

SEQ ID NO: 751949 - DNA, 120 bp, Artificial Sequence
  ENSG00000206560_42 (sequence is synthesized)
tgcactctttcagtacatcaagattcctgtatattttagagtataataaaacacagatgtgagttgtatttaatgaataatgtatttgtatctgtgcatattatctacaaatctataaag

SEQ ID NO: 751950 - DNA, 120 bp, Artificial Sequence
  ENSG00000206560_43 (sequence is synthesized)
tttctagggcattgactactagattttaagcattttttctaaaatatttacagaaattataaatctaatcccccatcttttctttataatataaagaagtcataatgaacccttcctaat

SEQ ID NO: 751951 - DNA, 120 bp, Artificial Sequence
  ENSG00000206560_44 (sequence is synthesized)
tattagtagtaggaaggtgaatatgcattttaatgacagtggactacattttctattgtaccttttgaaaaaaaaaaaaatcaagcagattctaaaagtatacatatgtgtgctttctct

SEQ ID NO: 751952 - DNA, 120 bp, Artificial Sequence
  ENSG00000206560_45 (sequence is synthesized)
ttccttttaggaattctcttctgaattccctgagggaattttctagaatctcagaattgaaagagacctgaggttcatccagtctctaacctcttaacaaatgcaggagtcccttctaca

SEQ ID NO: 751953 - DNA, 120 bp, Artificial Sequence
  ENSG00000206560_46 (sequence is synthesized)
agggtgatctttccaccttgaacacttccaagtgactctacctcaccaagcagtccattcagttgttgagcagctctaactgttagaaaggtcttccttagatggagttgaagcctccct

SEQ ID NO: 751954 - DNA, 120 bp, Artificial Sequence
  ENSG00000206560_47 (sequence is synthesized)
cccggtaacttctgtctttgggcctgggtctgtcctccaagagaaccctgagaatgttggaaggatgaatctcgcacattctgccatgtcttctcttttacaggctgtttgacttctctg

SEQ ID NO: 751955 - DNA, 120 bp, Artificial Sequence
  ENSG00000206560_48 (sequence is synthesized)
ctgaagtgatttccagaaggactcatttgacacactattagatttaccacatctaatgaaatccaaggtgtagctataaagtgacaagctgtttttaatttatcacatacaccagaactt

SEQ ID NO: 751956 - DNA, 120 bp, Artificial Sequence
  ENSG00000206560_49 (sequence is synthesized)
ctatcctgcatcacttatatgtaaatgatgctgttaccaaaaacattaaggtagttcttgcgaatgccaccccactaagaaaactatttcattacttttgtaatccatctgtgagagtct

SEQ ID NO: 751957 - DNA, 120 bp, Artificial Sequence
  ENSG00000206560_50 (sequence is synthesized)
gccccccagcttaaccacttcctttggtctgcacccaatgaagggaaaccccaaagtactgtctcaaatggtatttgaactacgccagtattgttggaataagtacattaattacttgaa

SEQ ID NO: 751958 - DNA, 120 bp, Artificial Sequence
  ENSG00000206560_51 (sequence is synthesized)
tgaatgaacacagcaccgtagaaatttcctttatggttacaccttgtatgtctaaagcattcaggccctgttctgtagtgtttcttatcctcacacagagtagaaaagcctgtttgcttt

SEQ ID NO: 751959 - DNA, 120 bp, Artificial Sequence
  ENSG00000206560_52 (sequence is synthesized)
atttaacttatacataaaagatgacatctgaaatatctgatgtgtattataataccagcttctgctctagaactactttgggtgaaatggtggtaatagcaaatgacctcctttaacaag

SEQ ID NO: 751960 - DNA, 120 bp, Artificial Sequence
  ENSG00000206560_53 (sequence is synthesized)
acactcatctcaaacaatgccatttagttcaggagatctctaagtgtagctgtaaattttggggttaatttggcttatattggaccttttaaaagaaataaagttttttaatgcaataaa

SEQ ID NO: 751961 - DNA, 120 bp, Artificial Sequence
  ENSG00000206560_54 (sequence is synthesized)
actcatttctaaaatgatcacaactaaaagccatattatttaaaatgcttttgaactgaaattttattataacattgacaataatgtatttttttccttaatccacctacctaattttct

SEQ ID NO: 751962 - DNA, 120 bp, Artificial Sequence
  ENSG00000206560_55 (sequence is synthesized)
gaaggaaagtagtactattttgtgtattctgtggaaatcaactgtaataatatgttacttgaaactaacaataaatgaggtaagaagctttatgtgtgtctgtaagccaataaggtttct

SEQ ID NO: 751963 - DNA, 120 bp, Artificial Sequence
  ENSG00000206560_56 (sequence is synthesized)
ctgttagtcagcagaggcagtacaccagatttccttgtggcttttagtggaaaatgttaaaagcgcactcatttttcagttatagaattttttagtttgatttggattagtcacagaact

SEQ ID NO: 751964 - DNA, 120 bp, Artificial Sequence
  ENSG00000206560_57 (sequence is synthesized)
ggcatgaaccttctaattgtgaaggctgtccaaatgcactatttttttctcctgctagaggaagttacatcccgagaagtagctcagatctctgccatcactggtgcaagctatatttaa

SEQ ID NO: 751965 - DNA, 120 bp, Artificial Sequence
  ENSG00000206560_58 (sequence is synthesized)
tctgatatataatatttccagttaattgtctttaaaattttgacctttttttttttcaaatcatatatggattatttgacctcaccaaataactttattcacacaaatgaatttacaaag

SEQ ID NO: 751966 - DNA, 120 bp, Artificial Sequence
  ENSG00000206560_59 (sequence is synthesized)
cggtcggcggcggcagcggcagcggcggaggaggaggaggctggagtgggcgcggaggcgaccgccatggcgttcctcaaactccgtgaccaggcctgtgattggaattgaaacagtaca

SEQ ID NO: 751967 - DNA, 120 bp, Artificial Sequence
  ENSG00000206560_60 (sequence is synthesized)
cgatgggacctatggctgagcttgatgccgagctacacgttgacaaggtgtgacagtgcactgcacagaggttctgctctccctgcccccatctttgttattaggactaggtttctcgag

SEQ ID NO: 751968 - DNA, 120 bp, Artificial Sequence
  ENSG00000206560_61 (sequence is synthesized)
tttgtacctcttggtcttcacaagttgacaaaaatgctctttgacagccaggtgtgtatgtgtatgtgcatgcacatgcacatatgtgtacatgtatcatgttttttcccctagacctct

SEQ ID NO: 751969 - DNA, 120 bp, Artificial Sequence
  ENSG00000206560_62 (sequence is synthesized)
ttttaaatgagcttggactcagttttagttattgacatgttggtgtgaaatttcttcttaagtattgcagtaatccaacagaaataatagaatttcgttatatttaggaagttacaaatt

SEQ ID NO: 751970 - DNA, 120 bp, Artificial Sequence
  ENSG00000206560_63 (sequence is synthesized)
atgtagtcataattttaaacttgtttttccagtagtacttattaactttaaaaaaaaaaaaaacccagctgtgctgttcagagaatgtttgtaagtgttgtacagaagaggaggaaaaac

SEQ ID NO: 751971 - DNA, 120 bp, Artificial Sequence
  ENSG00000206560_64 (sequence is synthesized)
tacttgtgctcttccaactgtgacttttatcacatagcttggaatttagtgttttaaaagatcgaatgagtcgagtgtgtattgttgttttggaggaggtagaagatgaatctcctgcat

SEQ ID NO: 751972 - DNA, 120 bp, Artificial Sequence
  ENSG00000206560_65 (sequence is synthesized)
gtttcgataaataattgttgcatcacagaagggcgtatttcgaaaaccagagtacagtcttaagtgacagcactgaacctattcctgttgttgctcaggacgcctctgatgctatctgtt

SEQ ID NO: 751973 - DNA, 120 bp, Artificial Sequence
  ENSG00000206560_66 (sequence is synthesized)
agataaaagaatgacatatttataaggcaaattttaagtttaaaattagcaaaaaccttgggaataatctactgtataggctcacgtactaataatacttagtacgtaggctcactcctg

SEQ ID NO: 751974 - DNA, 120 bp, Artificial Sequence
  ENSG00000206560_67 (sequence is synthesized)
tcctttgtcatgctaaagccaagacactagttgtcaaaggtgttctgagataagccatgaagtatttttgaggtttttcttttcttttcttttcttttttagttttggtaggatcttgct

SEQ ID NO: 751975 - DNA, 66 bp, Artificial Sequence
  ENSG00000206560_68 (sequence is synthesized)
agcctgaagtttttcttagatccttatttccacaaatattttgcatttttaggaggtttttagaat

SEQ ID NO: 751976 - DNA, 120 bp, Artificial Sequence
  ENSG00000206560_69 (sequence is synthesized)
tttccacaaatattttgcatttttaggaggtttttagaatgtttccattgcttttatatagtgtgcttgtattttgattgtgttcttttactatttttttttttttaagagtcccactat

SEQ ID NO: 751977 - DNA, 90 bp, Artificial Sequence
  ENSG00000206560_70 (sequence is synthesized)
ctcccacatcagactcccccacccagccatgttcttttactttctaaatacaatcatattaggggaaaaataaccaaaagtaggagaaac

SEQ ID NO: 751978 - DNA, 120 bp, Artificial Sequence
  ENSG00000206560_71 (sequence is synthesized)
caatcatattaggggaaaaataaccaaaagtaggagaaacagtgagatgtatcacattctaaactgaaatctatgtatgttttctgagcacattgcaagataacattcttatattaccag

SEQ ID NO: 751979 - DNA, 120 bp, Artificial Sequence
  ENSG00000206560_72 (sequence is synthesized)
taatatccatgttcaatgttttaaaggaataaatccctagcaggtcttagaattagaaactttgatgggttaactctgctacatggttaaaagagattttctttggcctcctacaggctc

SEQ ID NO: 751980 - DNA, 120 bp, Artificial Sequence
  ENSG00000206560_73 (sequence is synthesized)
acagtcacagtcatcgcttttataggtagactcataaaaggtcacgtagggaagcataaagctactttgaagttatagatgttaaaaatgcagtttggcttatgaaatgccactaattaa

SEQ ID NO: 751981 - DNA, 120 bp, Artificial Sequence
  ENSG00000206560_74 (sequence is synthesized)
aataatttatgcaatgaagcatgttgagatatttttagatttgatcatcttagaaaactcaagtacattatatacagtgcaagcatcagtgttgtcaaagttcaagcttcaggctttagt

SEQ ID NO: 751982 - DNA, 120 bp, Artificial Sequence
  ENSG00000206560_75 (sequence is synthesized)
agagaaattagaggtttttaaaatttgttttcaatttcagtgtagcttcaagattaatgttaattatgacagcagatctacaaagctgtagttcacaattctaataaccttccctcaaaa

SEQ ID NO: 751983 - DNA, 120 bp, Artificial Sequence
  ENSG00000206560_76 (sequence is synthesized)
tgcagagaaaatataagttgtctctttatataaatacccatttgctaaaaataaataagtataatatctgttgtaaaatcagactgccttaccaggaagttgagatttcctatctttcta

SEQ ID NO: 751984 - DNA, 120 bp, Artificial Sequence
  ENSG00000206560_77 (sequence is synthesized)
taatatgctgtttcatagttctttcactgggagctgttctgacaaagttatcaagttaaagcaaaagaggaaaaagctgaatcttgtaaaattataacttcattaaatgtttccacaagt

SEQ ID NO: 751985 - DNA, 120 bp, Artificial Sequence
  ENSG00000206560_78 (sequence is synthesized)
ctttttacctatagttttcattcttgcatattaaattcagtgcaactatcccaaaagtaaattctagaagatgtgcttttagatggacattttctattttatcattatatgtaattactg

SEQ ID NO: 751986 - DNA, 120 bp, Artificial Sequence
  ENSG00000206560_79 (sequence is synthesized)
agatctctggtaagtgtaacatgtgagcattactaggcatttcatcctgtgggtctgcagtctttgctcttcagactgttgctccgttggaatgcttctgtgggactgatactgaggttc

SEQ ID NO: 751987 - DNA, 120 bp, Artificial Sequence
  ENSG00000206560_80 (sequence is synthesized)
tatagatattttttaaggacctactcatttggggatgtcagtggtgttttgcaagatcatctgaggaacaggaaagcatttgaaatctgaaaaggataactgtggcggttttcacagtgg

SEQ ID NO: 751988 - DNA, 120 bp, Artificial Sequence
  ENSG00000206560_81 (sequence is synthesized)
aaggaaactatattggcaaagaggcagatgactgaataaagtagttggctcaaagaagatgcacagtctgctatttttttctctgaatgaagactgtttaatggaagctgtattcatgtg

SEQ ID NO: 751989 - DNA, 120 bp, Artificial Sequence
  ENSG00000206560_82 (sequence is synthesized)
gagatcaaaggaaacactggaatgatacactactatgtttttcccccccctttttttttttaaagaaaacaaaaagcctgaagcagtaatttgagctcaaatgccttctaattccttcac

SEQ ID NO: 751990 - DNA, 120 bp, Artificial Sequence
  ENSG00000206560_83 (sequence is synthesized)
agcctgcttgttctactaggattctccactaacaccatttctgcctggtgcctgtgcccttttgctggagcagccacagacaactgcctgatggagaaagaatgaacgctctgccttgct

SEQ ID NO: 751991 - DNA, 120 bp, Artificial Sequence
  ENSG00000206560_84 (sequence is synthesized)
tatgctatcgatgggaataaagctaactgtgtttcttctattatatgggaaacctggattaatcaagctgtattctagtaccaagagtcgtattgtctcttgtggtctgactcatcacat

SEQ ID NO: 751992 - DNA, 120 bp, Artificial Sequence
  ENSG00000206560_85 (sequence is synthesized)
gtttttttttttttgtttttgttttttgcccctttcccaaacactgaaagaattgttaacctctgagcttcattttcaggatttgtgctgagctctagatcttttttctgtgaatagtat

SEQ ID NO: 751993 - DNA, 120 bp, Artificial Sequence
  ENSG00000206560_86 (sequence is synthesized)
tggaaacagaatagtgagattttattttttattttcaattataagcaaaacagctactggtaactatatgaccttgcaggcaagagtgggtatcgctgtgatcatctctgtcacagcagt

SEQ ID NO: 751994 - DNA, 120 bp, Artificial Sequence
  ENSG00000206560_87 (sequence is synthesized)
tctaaattgccacaggaaaataaatccctacattctccaccttctggaaatgtattgccatcactggtgcaagctatatttaacggagatcctgatgaagttcgagcactaatatttaag

SEQ ID NO: 751995 - DNA, 120 bp, Artificial Sequence
  ENSG00000206560_88 (sequence is synthesized)
aaagaagatgttaactttcagcagtacttctggaatagaaattctaaacattagcctgccgaacaactggattgcatttgatgattacaattgtccagtcacagatggcatcacctctac

SEQ ID NO: 751996 - DNA, 120 bp, Artificial Sequence
  ENSG00000206560_89 (sequence is synthesized)
acctctactttttattattaatattagttttaattgccaaatcataattgtatatatttgtagagtacaatgtaatattttggtatatgtatacaatgtgggatgattaaatcaagctaa

SEQ ID NO: 751997 - DNA, 120 bp, Artificial Sequence
  ENSG00000206561_0 (sequence is synthesized)
gtgaggaagagaaaagcagagataagcaaggctccgcagcagcctcctttctaacttgaccctcgccagaccctggccagcatggttgtcctgaatccaatgactttgggaatttatctt

SEQ ID NO: 751998 - DNA, 120 bp, Artificial Sequence
  ENSG00000206561_1 (sequence is synthesized)
cagcttttcttcctctctatcgtgtctcagccgactttcatcaacagcgttcttccaatctcagcagcccttcccagcctggatcagaagaagcgtggtggccacaaagcatgctgcctg

SEQ ID NO: 751999 - DNA, 120 bp, Artificial Sequence
  ENSG00000206561_2 (sequence is synthesized)
ctgacgcctcctccaccaccactgttcccaccaccattcttcagaggtggccgaagtccgcttctctccccagacatgaagaatctcatgctggaactggagacctcgcagtccccgtgc

SEQ ID NO: 752000 - DNA, 120 bp, Artificial Sequence
  ENSG00000206561_3 (sequence is synthesized)
atgcaaggctcgctaggctcccctgggcctcccggcccccagggtccaccggggcttcctggcaagacaggaccaaagggagaaaagggggagcttggccgaccaggaaggaagggtaga

SEQ ID NO: 752001 - DNA, 120 bp, Artificial Sequence
  ENSG00000206561_4 (sequence is synthesized)
cctggccccccaggtgttcctggcatgcctgggcccatcggttggccaggccctgaaggacccaggggtgaaaaaggtgacctgggtatgatgggcttgccagggtcaagaggaccaatg

SEQ ID NO: 752002 - DNA, 120 bp, Artificial Sequence
  ENSG00000206561_5 (sequence is synthesized)
ggctccaagggctaccctggatccagaggggaaaagggatccagaggtgaaaagggtgacctgggtcccaaaggagaaaagggtttcccaggatttcctggaatgttggggcagaaaggt

SEQ ID NO: 752003 - DNA, 120 bp, Artificial Sequence
  ENSG00000206561_6 (sequence is synthesized)
gaaatgggtccaaaaggtgaacctgggatagcaggacaccgaggacccacaggaagaccaggaaaacgaggcaagcagggacagaaaggggatagtggagttatgggcccaccaggcaag

SEQ ID NO: 752004 - DNA, 120 bp, Artificial Sequence
  ENSG00000206561_7 (sequence is synthesized)
cctgggccttctggtcaacctggccgtccggggcccccaggccccccacctgcaggacaacttataatgggacccaaaggggaaagaggatttcccgggcctccaggaagatgtctttgt

SEQ ID NO: 752005 - DNA, 120 bp, Artificial Sequence
  ENSG00000206561_8 (sequence is synthesized)
ggacccactatgaatgtgaataacccttcctacggggaatctgtgtatgggcccagttccccgcgagttcctgtgatttttgtggtcaacaaccaggaggagcttgagaggctgaacacc

SEQ ID NO: 752006 - DNA, 120 bp, Artificial Sequence
  ENSG00000206561_9 (sequence is synthesized)
caaaacgccattgccttccgcagagaccagagatctctgtacttcaaggacagccttggctggctccccatccagctgacccctttctaccctgtggattacactgcagaccagcacggc

SEQ ID NO: 752007 - DNA, 120 bp, Artificial Sequence
  ENSG00000206561_10 (sequence is synthesized)
acctgtggggatgggctcctgcagcctggggaggagtgtgacgacggtaacagcgatgtgggtgacgactgcatccgctgtcaccgtgcctactgtggagatggtcaccggcatgagggt

SEQ ID NO: 752008 - DNA, 120 bp, Artificial Sequence
  ENSG00000206561_11 (sequence is synthesized)
gtggaggactgtgacggctctgactttggctacctgacatgcgagacctatctccctgggtcatatggagacctgcaatgcacccagtactgctacatcgactccacgccctgccgctac

SEQ ID NO: 752009 - DNA, 120 bp, Artificial Sequence
  ENSG00000206561_12 (sequence is synthesized)
atgtcctggccccgtctccaccaacctttgtgtgacaaaaacaaggacaaattcctgctactaagacatgctgttaactcagtctgactggaagaatttaggaccactgcatcctgtctt

SEQ ID NO: 752010 - DNA, 120 bp, Artificial Sequence
  ENSG00000206561_13 (sequence is synthesized)
aatccaaggtactggaaaaccttccacatgcccaacctgagacctgttccccatcgctaccatttggccaaacaaccggctacaatgctcttcctcttctggaatgttgctgacccaggc

SEQ ID NO: 752011 - DNA, 120 bp, Artificial Sequence
  ENSG00000206561_14 (sequence is synthesized)
cgtggacttggctgagcactgttagacacacacagacctgcaggctgttttagaatgttttgatctctttggggaatctggagtacaggcctctccgcccctgaccaccgaaacgtgcag

SEQ ID NO: 752012 - DNA, 120 bp, Artificial Sequence
  ENSG00000206561_15 (sequence is synthesized)
gcattctcactcacactgggcagcccgctgtcgggtctctctaggcctatgaaccacaaagcagggaagtgggcacgttctctcggggtggctcacagctttgaacctgccaaaggaccc

SEQ ID NO: 752013 - DNA, 120 bp, Artificial Sequence
  ENSG00000206561_16 (sequence is synthesized)
ctcgactggccacagcccagcccagcctgacgtggatgtggctgcccaggaaaagacttaactgtgaaaaagtactgagaacccacctgacccaggcttgccccaagcagaggctagaga

SEQ ID NO: 752014 - DNA, 120 bp, Artificial Sequence
  ENSG00000206561_17 (sequence is synthesized)
agaggctcctcttctcagtgtttcccaaaggggcggctcttgtggtttcaaaatctctggcaccatcttgacctcttggctctctctgcactttgccccctgtctcaaaaatgtccctca

SEQ ID NO: 752015 - DNA, 120 bp, Artificial Sequence
  ENSG00000206561_18 (sequence is synthesized)
tgtccatttcctgtccaggagactcatgaggactgtgtgacctgcacaagcccacacctgggcaggctgttggtgtctccttggtccttaggcagatactcccctgagtccccgatctag

SEQ ID NO: 752016 - DNA, 120 bp, Artificial Sequence
  ENSG00000206561_19 (sequence is synthesized)
ggccagctgcagagggctctctctaggcagagcgttcctggccagagctctacctctttgcctcctgctgacccctgacagcgtcccgtggcatttctttcatgtctgcatattgcatag

SEQ ID NO: 752017 - DNA, 120 bp, Artificial Sequence
  ENSG00000206561_20 (sequence is synthesized)
ccttgtcctcctgtgtgcctgagctcctcccttttcaataagattattagtcgtgcatgtctgtgagctgcctttcatcaccatttttcctgagtagggcttagttttattctggaaaga

SEQ ID NO: 752018 - DNA, 120 bp, Artificial Sequence
  ENSG00000206561_21 (sequence is synthesized)
catctccaaggtgaggtccacccccacagcagacctcaagtagaaattgcccaatttttaccagctggagggacacccttgggtttttgtacgaagctatttaatgagcctgtgtcttgg

SEQ ID NO: 752019 - DNA, 120 bp, Artificial Sequence
  ENSG00000206561_22 (sequence is synthesized)
ggactcagcaggctggagcttggggcctggtggaccatcacctggtgtctgtaggtggacccggtctcccacaggtgacatcaacctgagggtggcgtctttagagacaggcacatgggc

SEQ ID NO: 752020 - DNA, 120 bp, Artificial Sequence
  ENSG00000206561_23 (sequence is synthesized)
agccctgttcccttcgcctctactgcgaggcctggggagatgttgttttcatgctgcttccaccatcacactggggtttctggatgggaaataaaaaaataaaggcagttcatttcccca

SEQ ID NO: 752021 - DNA, 120 bp, Artificial Sequence
  ENSG00000206561_24 (sequence is synthesized)
atatcctcccctgggctgaaggcactcttgtcctccaagcctcccctacagcagtgttcatgggcagctggagcagggctgcctacccattgctactcccaggagctcaggactggctcc

SEQ ID NO: 752022 - DNA, 120 bp, Artificial Sequence
  ENSG00000206561_25 (sequence is synthesized)
agacccctggcatctggagcagaagcaacatcaaagcagggattggccaactcccacccctaatgccaaacaggccaggcactgggagcactcagaggcgtgacgaatctcagcctgtct

SEQ ID NO: 752023 - DNA, 120 bp, Artificial Sequence
  ENSG00000206561_26 (sequence is synthesized)
ccggctagtgttccctggccagtccgctttgggccctgcctcacaatgacgggctcatcattcagcctcgctcatctgctcatcatttcaggactgctctgttactcggcaggctgcttg

SEQ ID NO: 752024 - DNA, 120 bp, Artificial Sequence
  ENSG00000206561_27 (sequence is synthesized)
aagaccttgaaagagtgctgacagcatctgctactgctccccaaatgtaatcctatctcattccatagcacatccttggaaagaacccattggaacgcaggggacttttgggtgggggtg

SEQ ID NO: 752025 - DNA, 120 bp, Artificial Sequence
  ENSG00000206561_28 (sequence is synthesized)
ggtagaagtgacaaaaattaaaaaaccaagaagtttagagtccctttctcaccaccctccatttcttgagaagaataaggtcttatttgatgatacagtgtgacaccaagggcttgtcag

SEQ ID NO: 752026 - DNA, 120 bp, Artificial Sequence
  ENSG00000206561_29 (sequence is synthesized)
gccatcagtcttcggagagtggggatgagggtcatagtagccatgcctagagaacccactgtctcctctgggccccagagacaaaacatatttattagaagtaaagaaacaaacccagtt

SEQ ID NO: 752027 - DNA, 120 bp, Artificial Sequence
  ENSG00000206561_30 (sequence is synthesized)
tgggtggggctgcagtcccggactagggaatgtcgcggatattggagagcctgcctttaccagccctttggagaacatcatgccctgggatgcaggggcatagggatgccattcctgctg

SEQ ID NO: 752028 - DNA, 120 bp, Artificial Sequence
  ENSG00000206561_31 (sequence is synthesized)
ggggcttcctggcaagacaggaccaaagggagaaaagggggagcttggccgaccaggaaggaaggtatggtctgcgctgttctgagcaggagcctgctactgccaggcattcagacttct

SEQ ID NO: 752029 - DNA, 120 bp, Artificial Sequence
  ENSG00000206561_32 (sequence is synthesized)
cccgccccaaccccagaccatctcactctgctacccatcagagaaacccttcatagctccaaccagtgacattgaatgactgtcactctctgtttgattaaatttgaataaagtgccaga

SEQ ID NO: 752030 - DNA, 120 bp, Artificial Sequence
  ENSG00000206562_0 (sequence is synthesized)
tgccatggcaaaagaactcccggataatccgaattcgtggtcctcagaattggtttagggttgtttcgcggttcttcccgtattctgcctccgaggcccagtggggctggctgtgggccc

SEQ ID NO: 752031 - DNA, 120 bp, Artificial Sequence
  ENSG00000206562_1 (sequence is synthesized)
cctgtgctgtttgaggcgtgaaactcacctcaggaaatgtatctgatccattagcgtggattcatattatttggtgatggagaatcttcagctgtgttaagtgttaccgtcagtttcaga

SEQ ID NO: 752032 - DNA, 120 bp, Artificial Sequence
  ENSG00000206562_2 (sequence is synthesized)
gatggcttctttgcaaaggaaagggctgcaggcaaggattctcacctctgaagaagaggagaaactgaaaagagaccaaactttggtgtctgattttaaacagcagaaattggaacaaga

SEQ ID NO: 752033 - DNA, 120 bp, Artificial Sequence
  ENSG00000206562_3 (sequence is synthesized)
ggctcagaaaaattgggatcttttttacaaaagaaatagcactaatttcttcaaagacagacactggaccaccagagagtttgaggagctaagatcatgtagagagtttgaagatcaaaa

SEQ ID NO: 752034 - DNA, 120 bp, Artificial Sequence
  ENSG00000206562_4 (sequence is synthesized)
gttaacaatgcttgaagctggctgtggggttggaaactgtttattcccacttttagaagaagatccgaatatctttgcctatgcctgtgatttttctccaagagccattgaatatgttaa

SEQ ID NO: 752035 - DNA, 120 bp, Artificial Sequence
  ENSG00000206562_5 (sequence is synthesized)
tgatacagaaagatgcaaggtattccagtgtgatctgactaaagatgatcttctggatcatgtaccgccagagtctgtggatgttgttatgttgatatttgtgctgtcagctgttcatcc

SEQ ID NO: 752036 - DNA, 120 bp, Artificial Sequence
  ENSG00000206562_6 (sequence is synthesized)
tgataagatgcaccttgtcttacaaaacatttacaaggtattaaaaccaggcaaaagtgtcttgtttcgtgactacggactgtatgatcatgccatgcttaggtttaaagccagcagcaa

SEQ ID NO: 752037 - DNA, 120 bp, Artificial Sequence
  ENSG00000206562_7 (sequence is synthesized)
acttggagaaaacttttatgttagacaagatgggaccagatcatatttttttactgatgacttcctggctcagctctttatggacacaggttatgaagaagtggtaaacgagtatgtgtt

SEQ ID NO: 752038 - DNA, 120 bp, Artificial Sequence
  ENSG00000206562_8 (sequence is synthesized)
tcgagagacggtgaataaaaaagaaggcctgtgtgtgccaagagttttccttcagagcaaatttctaaagcctcctaagaacccatctcctgtggtcctgggcctggatcctaagtcctg

SEQ ID NO: 752039 - DNA, 120 bp, Artificial Sequence
  ENSG00000206562_9 (sequence is synthesized)
cctgtggtcctgggcctggatcctaagtcctgacctttcatgaggttggcatttataccttcccttgaagaggaaaatttaaaatcactctttcgtctgggtgcggtggctcatgcctgt

SEQ ID NO: 752040 - DNA, 120 bp, Artificial Sequence
  ENSG00000206562_10 (sequence is synthesized)
gatattgttttcagtatagtacctcaaccctaattttgcctggtaaccctttatccagagaccttttgttttcaacttacagtcttattctggggtgggggatgtacagtctggctgtgt

SEQ ID NO: 752041 - DNA, 120 bp, Artificial Sequence
  ENSG00000206562_11 (sequence is synthesized)
ggacttgcaggagagatttagggttctaacttcttcttactgacttccaaccaattctcctgtattcagtcttatacacacccccacttatactagacgtagctggtactaccaaagcct

SEQ ID NO: 752042 - DNA, 120 bp, Artificial Sequence
  ENSG00000206562_12 (sequence is synthesized)
ggtcacaaaactctatgggagtctcaatgcaagttgagttgcttcttgactttcatccctgctggcttaagactcagcttcacaagcctgctaagtcagttgctatttatcctgttttct

SEQ ID NO: 752043 - DNA, 120 bp, Artificial Sequence
  ENSG00000206562_13 (sequence is synthesized)
agcccttcaaaattttaaatgaaaatttacatttttaattgacaaataatatatatatgggataaatatgatgttttgatagtaatagatgtatacattgtggaatgattatatgaagct

SEQ ID NO: 752044 - DNA, 120 bp, Artificial Sequence
  ENSG00000206562_14 (sequence is synthesized)
tggaatgattatatgaagctaattagcatatcacactcctcacatacttctttttctttgtattgagaacatgtaaaatctattcttggccaagcatggtggctcacacctgtaattcca

SEQ ID NO: 752045 - DNA, 120 bp, Artificial Sequence
  ENSG00000206562_15 (sequence is synthesized)
aggaagattgcttgagcccaggaattcaggggttccagacaccagcctgggcaacatagcaataccctgtctctaataaaaaaaaaaaaaagtaaaaataaatgtgtaatttaaaaaatt

SEQ ID NO: 752046 - DNA, 120 bp, Artificial Sequence
  ENSG00000206562_16 (sequence is synthesized)
tgccctctgaagaataactaaaaaatcactcaccaaatgcagattaataggagaaatggaataaaaacttagtaattgttttccttggtggatcccttaggtctttatgtagatagggaa

SEQ ID NO: 752047 - DNA, 120 bp, Artificial Sequence
  ENSG00000206562_17 (sequence is synthesized)
aaggtttcttctagcatctgttgattgctaaggacatttaattcaaaatactcattataccagggagccatatctgggggtaaaattccagatgctccttcaaagtatacattattattg

SEQ ID NO: 752048 - DNA, 120 bp, Artificial Sequence
  ENSG00000206562_18 (sequence is synthesized)
actatggtcaccatgtacagtagatctcaaaaacgtattccccctggctaactgaaatgtgtgccctttggtcaacatctcccctactcctctcctcccccagcctctggtaaccaccat

SEQ ID NO: 752049 - DNA, 120 bp, Artificial Sequence
  ENSG00000206562_19 (sequence is synthesized)
tctactttctgctgctgtgagttcaactttttaaaattccacgtataagtgaaatcatgtggtatttgtctttctgaatctggcttatttcacttagcataatatcttccaggttcaccc

SEQ ID NO: 752050 - DNA, 120 bp, Artificial Sequence
  ENSG00000206562_20 (sequence is synthesized)
atgttgttgcaaatgatagaatgtccttgtttctaatgttctcccaaatttaatcagttgtatggggtttatgtgataaaaatatccttttgctgtcattttcgtggggtttccagaagg

SEQ ID NO: 752051 - DNA, 85 bp, Artificial Sequence
  ENSG00000206562_21 (sequence is synthesized)
tttttttttttgaagcactgatcatgactcattgcaacctctgcctcccaggcccaagcaatcctcctacctcagcctccaagta

SEQ ID NO: 752052 - DNA, 120 bp, Artificial Sequence
  ENSG00000206562_22 (sequence is synthesized)
tcccaggcccaagcaatcctcctacctcagcctccaagtagctgggactgaaggtgtgtgccagcatgtgtggctaattttatttttgtaaagacagagtctccttatattgcccaggct

SEQ ID NO: 752053 - DNA, 78 bp, Artificial Sequence
  ENSG00000206562_23 (sequence is synthesized)
tctagtctgtcatctttaaacaattgggttgggaaggaaaaggtagcacatagatagatgatttaagcagaaatagat

SEQ ID NO: 752054 - DNA, 120 bp, Artificial Sequence
  ENSG00000206562_24 (sequence is synthesized)
aaaggtagcacatagatagatgatttaagcagaaatagataagcataattgtccactgtaaaggggctgaatgatctggagaatggaggcatctcaggaaaactgaacttggtggtgtgt

SEQ ID NO: 752055 - DNA, 88 bp, Artificial Sequence
  ENSG00000206562_25 (sequence is synthesized)
gaatggaggcatctcaggaaaactgaacttggtggtgtgtgcttaggactaatgaaaagtggccgggcacagatgtgagagggagtat

SEQ ID NO: 752056 - DNA, 120 bp, Artificial Sequence
  ENSG00000206562_26 (sequence is synthesized)
tgtgccactgttctccagcctgggcagcagagtgagaccccgactcttaaaaaaaaaaaaaaaagaaccaaagaaatgttagttccagggattcccagggacatgggcagggtccaagaa

SEQ ID NO: 752057 - DNA, 120 bp, Artificial Sequence
  ENSG00000206562_27 (sequence is synthesized)
tgatgctgagttaaggttaggtggctattcagaaagctacttcgacttgtatcccatattatggatcaaggaccttaaaaatagccatactttttttttgttctagtaactcaatttgta

SEQ ID NO: 752058 - DNA, 120 bp, Artificial Sequence
  ENSG00000206562_28 (sequence is synthesized)
ggattgtttcctaagagataatctgacatattcaaggacttcttcacaaagatattcattagctgcattatttatagtaccaaacattataaatagtctaaaccagagatccacaagcta

SEQ ID NO: 752059 - DNA, 120 bp, Artificial Sequence
  ENSG00000206562_29 (sequence is synthesized)
tggctataacagtgacaaggaggcctagcgtgactaactccattttgctcctaacccccctgcagcgataacctgtatcttttaggttaactgcttttgcttatctctgcacataggcca

SEQ ID NO: 752060 - DNA, 120 bp, Artificial Sequence
  ENSG00000206562_30 (sequence is synthesized)
agctaactatagaaggaatttagtttatagtttagagcaaggatggtaatagtgcctcccccaaaactaacccctgaggagataaggaggatgtatgcaagtaataatgttatgttaaag

SEQ ID NO: 752061 - DNA, 120 bp, Artificial Sequence
  ENSG00000206562_31 (sequence is synthesized)
atttataagagcactgtgacctgaccaaggacaaagtttcaccacctccttggacccttgccaccacccagatgtgatcactggccacttcttgacctcaactccctccctcttccccct

SEQ ID NO: 752062 - DNA, 120 bp, Artificial Sequence
  ENSG00000206562_32 (sequence is synthesized)
tcctctcacgtaaaaggagcctgaaatttgtattgacttaaaaatggttcttcaggacactactcttccattttcttggtttgctggctctctgaataaaagtcactttccttgcctcaa

SEQ ID NO: 752063 - DNA, 120 bp, Artificial Sequence
  ENSG00000206562_33 (sequence is synthesized)
acccaggctggagtgcagtggcacaattgttaccggaaagggatcccaatccagaccccaagaggattcttggaccttgagtaagaaagaattcagagagatggtctcgctatgttgccc

SEQ ID NO: 752064 - DNA, 120 bp, Artificial Sequence
  ENSG00000206562_34 (sequence is synthesized)
gcccaggctggtcctgaactcctggcctaaagcgatcctcctgcctcggccccccaaagtgctgaaattacaggtctcaaacaaaagtctggaacctgggattctttgtaggatatctgg

SEQ ID NO: 752065 - DNA, 120 bp, Artificial Sequence
  ENSG00000206562_35 (sequence is synthesized)
cagccctgggacaaggatgattttgcagttacctgggatccatggagtcctgctataagggtcttgctgtgtcactcaggctggagtgcagtggcatggacgtggctcactgcagcctca

SEQ ID NO: 752066 - DNA, 120 bp, Artificial Sequence
  ENSG00000206562_36 (sequence is synthesized)
acttcctgggctcaagcagttctcccacctcagcctctgaagtagttgggactacaggacgcactaccagatccagctaatttttaatttttgtgtagagatggggtctcactatattgc

SEQ ID NO: 752067 - DNA, 120 bp, Artificial Sequence
  ENSG00000206562_37 (sequence is synthesized)
ccaggttggtctctaacattttaatcctgtgacactggacattccagggtgctcttggaggtactcaagaattgtcttcagggacgagcgaggtggctcacgcctgtaatcccaactttg

SEQ ID NO: 752068 - DNA, 120 bp, Artificial Sequence
  ENSG00000206562_38 (sequence is synthesized)
ctgaaacaagccctctactgcacaatatttacccagcacctggaaggcacagacctggcccctgcccttgaagagctcacaagccttctctggtgtcagtgactcccctaatgagcttgg

SEQ ID NO: 752069 - DNA, 120 bp, Artificial Sequence
  ENSG00000206562_39 (sequence is synthesized)
gttaatggacagcctctgacatgccatgtggattccctactaggaattgtgctggaataagagggagggcaagtcagaaacttcttgtccagttaaaaataaagcaaatttgacagtata

SEQ ID NO: 752070 - DNA, 120 bp, Artificial Sequence
  ENSG00000206562_40 (sequence is synthesized)
ctagctggggagggagaggccatatgagtggagggacctgtggaggaaaaattattattactaccttgatgtccgctgaaccaaagtggatggaaatttctcaggacatattcatccaaa

SEQ ID NO: 752071 - DNA, 120 bp, Artificial Sequence
  ENSG00000206562_41 (sequence is synthesized)
ctacaaaaacagctcttctacaggtctacttaaactttgaaagatgagattgttcaaaaatgacacgagaaaatcacccatcaccactaagttaaagacttgaatatgtgagagttccag

SEQ ID NO: 752072 - DNA, 120 bp, Artificial Sequence
  ENSG00000206579_0 (sequence is synthesized)
atcctctccctcggagtcagctggtggaggagaggaagcgggaggagggagcgcgcgcgaggggaggagaggaatgtgcaggtccgaggagcgccgcggcggccgctgctgctcctgctg

SEQ ID NO: 752073 - DNA, 80 bp, Artificial Sequence
  ENSG00000206579_1 (sequence is synthesized)
gcggcgggcggcggcggacggcaggcgagccgacgcaggagcaggaggagggggagccgcaccgcctgggagggaagccg

SEQ ID NO: 752074 - DNA, 120 bp, Artificial Sequence
  ENSG00000206579_2 (sequence is synthesized)
cctgggagggaagccggggcgaggcgaggaggtggcgggaggaggagacagcggggaaaggtgtcagataaaggagggctctcctccggtgtggaggcatcatggccgctaaatcagacg

SEQ ID NO: 752075 - DNA, 120 bp, Artificial Sequence
  ENSG00000206579_3 (sequence is synthesized)
ggaggctgaaaatgaagaaaagcagcgacgtggcgttcaccccgctgcagaactcggaccactcgggctcggtgcagggattggctccaggcttgccgtcggggtcgggagccgaggacg

SEQ ID NO: 752076 - DNA, 80 bp, Artificial Sequence
  ENSG00000206579_4 (sequence is synthesized)
gacgaggaggcggccgggggcggctgctgcccggacggcggcggctgctcgcgctgctgctgctgctgcgccgggagtgg

SEQ ID NO: 752077 - DNA, 120 bp, Artificial Sequence
  ENSG00000206579_5 (sequence is synthesized)
gcggcggcggggcgggctcggctgcgctgtgcctgcgcctgggcagggagcagcggcgctactcactgtgggactgcctctggatcctggccgccgtggccgtgtacttcgcggacgtgg

SEQ ID NO: 752078 - DNA, 120 bp, Artificial Sequence
  ENSG00000206579_6 (sequence is synthesized)
gcacagacgtctggctcgccgtggactactacctgcgcggccagcgctggtggttcgggctcacgctcttcttcgtggtgctcggctctctgtcggtgcaagtgttcagcttccgctggt

SEQ ID NO: 752079 - DNA, 120 bp, Artificial Sequence
  ENSG00000206579_7 (sequence is synthesized)
ttgtgcacgatttcagcaccgaggacagcgccacggccgctgctgcctccagctgcccgcagcctggagccgattgcaagacggtggtcggcggtgggtctgcagccggggaaggcgagg

SEQ ID NO: 752080 - DNA, 120 bp, Artificial Sequence
  ENSG00000206579_8 (sequence is synthesized)
ctcgtccttccacgccgcaaaggcaagcatctaacgccagcaagagcaacatcgccgcggccaacagcggcagcaacagcagcggggctacccgggccagtggcaagcacaggtctgcgt

SEQ ID NO: 752081 - DNA, 120 bp, Artificial Sequence
  ENSG00000206579_9 (sequence is synthesized)
cctgctccttctgcatctggctcctgcagtcactcatccacatcttgcagctcgggcaaatctggagatatttccacacaatatacttaggtattcgaagccgacagagtggggagaatg

SEQ ID NO: 752082 - DNA, 120 bp, Artificial Sequence
  ENSG00000206579_10 (sequence is synthesized)
acagatggaggttttactggaaaatggtatatgagtatgcggatgtgagtatgctgcatttgctagccacctttctggaaagtgctccacagctggtcctgcagctctgcattatcgtac

SEQ ID NO: 752083 - DNA, 120 bp, Artificial Sequence
  ENSG00000206579_11 (sequence is synthesized)
agactcatagcttacaggccctccaaggtttcacagcggcagcttccctcgtgtccctggcctgggccttggcctcctaccagaaggccctccgggactctcgagatgacaagaagccca

SEQ ID NO: 752084 - DNA, 120 bp, Artificial Sequence
  ENSG00000206579_12 (sequence is synthesized)
tcagctacatggccgtcatcatccagttctgctggcacttcttcaccatcgccgccagggtcatcacgtttgccctctttgcctcggttttccagctgtactttgggatcttcatcgtcc

SEQ ID NO: 752085 - DNA, 120 bp, Artificial Sequence
  ENSG00000206579_13 (sequence is synthesized)
ttcactggtgcatcatgaccttctggatcgtccactgtgagacagaattctgtatcaccaaatgggaagagattgtgttcgacatggtggtggggattatctatatcttcagttggttca

SEQ ID NO: 752086 - DNA, 120 bp, Artificial Sequence
  ENSG00000206579_14 (sequence is synthesized)
atgtcaaggaaggcaggacacgctgcaggctattcatttactattttgtgatccttttggaaaatacagccttgagtgccctctggtacctctacaaggctccccagattgcagacgcat

SEQ ID NO: 752087 - DNA, 120 bp, Artificial Sequence
  ENSG00000206579_15 (sequence is synthesized)
ttgccattccagcgctgtgtgtggtgttcagcagctttttaactggcgttgtttttatgctgatgtattatgccttctttcatcccaatggacccagattcgggcagtcaccaagttgtg

SEQ ID NO: 752088 - DNA, 120 bp, Artificial Sequence
  ENSG00000206579_16 (sequence is synthesized)
cttgtgaggacccagccgctgccttcactttgcccccagacgtggccacaagcaccctacggtccatctccaacaaccgcagtgttgtcagcgaccgcgatcagaaattcgcagagcggg

SEQ ID NO: 752089 - DNA, 120 bp, Artificial Sequence
  ENSG00000206579_17 (sequence is synthesized)
atgggtgtgtacctgtctttcaagtgaggcccactgccccatccaccccatcatctcgcccaccacggattgaagaatcagtcattaaaattgacttgttcaggaataggtacccagcat

SEQ ID NO: 752090 - DNA, 120 bp, Artificial Sequence
  ENSG00000206579_18 (sequence is synthesized)
gggagagacatgttttggaccgaagcctccgaaaggctattttagcttttgaatgttccccatctcctccaaggctgcagtacaaagatgatgcccttattcaggagcggttggagtacg

SEQ ID NO: 752091 - DNA, 120 bp, Artificial Sequence
  ENSG00000206579_19 (sequence is synthesized)
aaaccactttataaagcaaaaggagttgcaggacccacaacatccagatgaaggggtgacagcagggctgtggccataatgacacttcatcctagagcagggcagtgagccgtgaagttc

SEQ ID NO: 752092 - DNA, 120 bp, Artificial Sequence
  ENSG00000206579_20 (sequence is synthesized)
ctagtgggaccgtcatcaccattatcatttgatcctgtcggctgggggcggctggtctccttccaaagcagctgcacccgagagtctctgactccacctgaaagaatgacgctggcttaa

SEQ ID NO: 752093 - DNA, 120 bp, Artificial Sequence
  ENSG00000206579_21 (sequence is synthesized)
taggactctccattgctaccaaactcctcctgcacggtcttgggtgcacccaccagagggtactactattatggaaaaattttgcctccaatcattagggtgtcttgatggcgttaactg

SEQ ID NO: 752094 - DNA, 120 bp, Artificial Sequence
  ENSG00000206579_22 (sequence is synthesized)
atctttccataaaaatagattcagtcatacacacatacacacactaacacacataagttacaccagtcctctgtcaaaaaagcttaggtgacttttcttgatgcaaagctctgattccca

SEQ ID NO: 752095 - DNA, 120 bp, Artificial Sequence
  ENSG00000206579_23 (sequence is synthesized)
caggaatataaaaacaaagaaagagggaaacatccctcgagaaaaaaaatagtattgcttagaaaagaaaccattttctcatttggaaatccataccatgtgtgaaaatcctatccaacg

SEQ ID NO: 752096 - DNA, 120 bp, Artificial Sequence
  ENSG00000206579_24 (sequence is synthesized)
gacagcaaacccaaatgttgtctacacatgtgttagcattgatggagtggttcattttctacacatttcaggatttgttttatattttaaattttcagttgcgaacatcctttttgacag

SEQ ID NO: 752097 - DNA, 120 bp, Artificial Sequence
  ENSG00000206579_25 (sequence is synthesized)
aaatcctatgcagcccatgtacggctttcaacaagaccaaggagctcaataacttcatgatgtaaattaaatagtaatcatgattcagtattcaattgcaaaaatgtaacaggtacacaa

SEQ ID NO: 752098 - DNA, 120 bp, Artificial Sequence
  ENSG00000206579_26 (sequence is synthesized)
agaggaagtggggaaaaaggcaaaatgagagtctgattcccaggcatgtgcagcgcccattgggacataacggcagtgcggcgcgagccagaggaatgggctggaaccggatctgtttcc

SEQ ID NO: 752099 - DNA, 120 bp, Artificial Sequence
  ENSG00000206579_27 (sequence is synthesized)
agacgcagaatgagtggctctgtgtgaccataggcagatgctgactctggaagactccgtgccactcctttctagtgccaaacaccatccaaccacaggactgacgtggaagccccaaac

SEQ ID NO: 752100 - DNA, 120 bp, Artificial Sequence
  ENSG00000206579_28 (sequence is synthesized)
aactgagaatgagtggcatgagccccctaaaagcaggcgagagaacgagcaatcaagttctccactgtgtacagacttttcctccccccaatccaaggtcaaagtgatgtgtcttttaga

SEQ ID NO: 752101 - DNA, 120 bp, Artificial Sequence
  ENSG00000206579_29 (sequence is synthesized)
ggctttgggacactttttagtaagtatgagcagacaaatgcaatgaatatgctatgaaaaaacccttctgaactgagagagggcttatcactatatccagctaagatttgtatttgaatc

SEQ ID NO: 752102 - DNA, 120 bp, Artificial Sequence
  ENSG00000206579_30 (sequence is synthesized)
atctgtaaagtcgcactcttacaacaagcttctgggttttaaatacctccgtacagcaagtaaacgttccccgctttctgttctcagtgtcctcggtcatggtgcttttcgttgcattaa

SEQ ID NO: 752103 - DNA, 120 bp, Artificial Sequence
  ENSG00000206579_31 (sequence is synthesized)
aagtgccggtcaaactttgatagtatttttttatagttggtgcagagtggaataactcatggattatttcaatatttttgtaataaaaaatatagggtatacacataggcatcatcacat

SEQ ID NO: 752104 - DNA, 120 bp, Artificial Sequence
  ENSG00000206579_32 (sequence is synthesized)
tttttatagacctggaatcgtttaaaatactttaagcatcataattacttgggatgtcagaaactggtccacaaattccatcagcctgcctcagcagattgaaaacatttgtctcttgca

SEQ ID NO: 752105 - DNA, 120 bp, Artificial Sequence
  ENSG00000206579_33 (sequence is synthesized)
agatcaccctactttgcaagttggtgcccccaggaacctggccaggggtgctatcagaatatcaggtgaagagagaatcagcttaaatagaaagggcttgtcaagactggccaatgtttc

SEQ ID NO: 752106 - DNA, 120 bp, Artificial Sequence
  ENSG00000206579_34 (sequence is synthesized)
ccaggaaatcaaagatgtaaatgattactttcatccatccattataacaaacctgaccacagtggaagctgtcttaaacttccttccctggttttatattaacccaactgatagattaag

SEQ ID NO: 752107 - DNA, 120 bp, Artificial Sequence
  ENSG00000206579_35 (sequence is synthesized)
tattagtcaaaccactaaaaaagaaaaagaaaaaagtttaacttaattattcggttatttggatctaattcacacaaagtagtccagttctctagccaccacctgtaatgggtgtgtcat

SEQ ID NO: 752108 - DNA, 120 bp, Artificial Sequence
  ENSG00000206579_36 (sequence is synthesized)
ccagagactgtgtccccacgatgacatccacaggaagtaacagagggctcaacctaggacttcttttggtacaaagccccaaatcaatttttttaaaaaatagacaatttttataagtag

SEQ ID NO: 752109 - DNA, 120 bp, Artificial Sequence
  ENSG00000206579_37 (sequence is synthesized)
acatacttcctagtactccatgatttgatcctccaagcaagatttccactaaaaaatactaatcttttgttgggatgtggaaagattacctagtcaccagtaaaggcccaggaaaaggct

SEQ ID NO: 752110 - DNA, 120 bp, Artificial Sequence
  ENSG00000206579_38 (sequence is synthesized)
cttcttgtcagcacatggtgaaaacattccatccccactggagaaggaaaaaacgattttggcaaattcttcacttttgtgcagaaccttgagttattagcttcattgtttccaagacaa

SEQ ID NO: 752111 - DNA, 120 bp, Artificial Sequence
  ENSG00000206579_39 (sequence is synthesized)
cttttaactgatgatctttggaaattgagtttctcagttgaactgtacctttgattctatgagtaaatcacagattacagtctaatagagtcaatcaatcaacacaaacccaacaggccc

SEQ ID NO: 752112 - DNA, 120 bp, Artificial Sequence
  ENSG00000206579_40 (sequence is synthesized)
catcatgcttcaatcatgtaagttctaagttatttctcaacttgatccctcattcaacatgttaagagtcagaatgaatactatgtcaatgaaaaatgatgtactgtgctttgacttgga

SEQ ID NO: 752113 - DNA, 120 bp, Artificial Sequence
  ENSG00000206579_41 (sequence is synthesized)
ggtgagattggcagtcaggagaatgtaaggaggttgaatttttcagtgatttcccaaatactgtaaatactctgttatccgacatatttggagattatgatgttttaattaggcatgaat

SEQ ID NO: 752114 - DNA, 120 bp, Artificial Sequence
  ENSG00000206579_42 (sequence is synthesized)
tcttgttaaggaaagaacatatccatgatgtgatgaattacaacctttcaaaagattacaagagcaaaacaagagataaatcatgatttagccttgcttccatgattcaggaagcactac

SEQ ID NO: 752115 - DNA, 120 bp, Artificial Sequence
  ENSG00000206579_43 (sequence is synthesized)
actgccatcagactgttgtggtaataacaacttttacttgttttctagatgcacagataacagagagtttaaagtattcagatttaaagagacatcatcagtgtacaaagaaacaaagtt

SEQ ID NO: 752116 - DNA, 120 bp, Artificial Sequence
  ENSG00000206579_44 (sequence is synthesized)
tcatttttgtatttatattttaattctaacatttccttttcaatctgccattaaaccctccgcagacagtaactggagaatcccaaaggaaaaaattggaaatgctgggttccttatctg

SEQ ID NO: 752117 - DNA, 120 bp, Artificial Sequence
  ENSG00000206579_45 (sequence is synthesized)
caggctcctttctgtgtctgagtccactttgattccatttaagagggagatctgctcttactcactttttgcataggatcaggaaattttctaaaggaacaacattgtaatttgttttac

SEQ ID NO: 752118 - DNA, 120 bp, Artificial Sequence
  ENSG00000206579_46 (sequence is synthesized)
ttttaaacttgcatttctaaatatgaaaccatgtttaatgaatatatataatgtgtgtgtgtgtatcttaaccatagtgacactttaagtgtttgtgtgaaagaaaaggaaataattttt

SEQ ID NO: 752119 - DNA, 120 bp, Artificial Sequence
  ENSG00000206579_47 (sequence is synthesized)
ccatgtaagtcaaagtttagtctcccaaaatgactatgtcctttaaatcctctttgcttatttacttaactacatactgtctagttcaatagcactgactttgcagacacttagttacta

SEQ ID NO: 752120 - DNA, 120 bp, Artificial Sequence
  ENSG00000206579_48 (sequence is synthesized)
ctcatttgtgataaacgctgttaacccaacaaatataataaattctcttactgacatggcaagaatatataattcaagtattagcaaaagataatctgaggataaaagtaaaatgaagta

SEQ ID NO: 752121 - DNA, 120 bp, Artificial Sequence
  ENSG00000206579_49 (sequence is synthesized)
ttttatggttaatttctaaatgcccaatttattttgctctatgagtaaaggaagtgattgcacagaacaattaaaagtgaatgagaatagttgaaaactcaatggctgttttttaaaaat

SEQ ID NO: 752122 - DNA, 120 bp, Artificial Sequence
  ENSG00000206579_50 (sequence is synthesized)
gatatgtgccttttaagtgtgtttgtgtacatacatatatgtatatatacgtacctatatatgtatgtacacacacacacacacacactttccaactaaagtaacagagatgaaaaggat

SEQ ID NO: 752123 - DNA, 120 bp, Artificial Sequence
  ENSG00000206579_51 (sequence is synthesized)
aaagtatatactgcttttgaatgtatataaagtggtatgttatgcatataaattgtacataaactttttagaaaagaagcattttcctgctcctttttcaaaaccaacccaagcttacag

SEQ ID NO: 752124 - DNA, 120 bp, Artificial Sequence
  ENSG00000206579_52 (sequence is synthesized)
tccatctataagaccaacacacttacgaacttcagttggaaatacctaaatataattcagcacttcttagctcgaatgagttttatcacttcttaaggatctcatcttttaaacagctga

SEQ ID NO: 752125 - DNA, 120 bp, Artificial Sequence
  ENSG00000206579_53 (sequence is synthesized)
ataaaatagttctgtgtcacttcaaagtttctttctctgaacagattgaattgagcaaagagaacctcttctgtccttaccaggattgtgtaaggttacacatttgcttttaaatatacc

SEQ ID NO: 752126 - DNA, 120 bp, Artificial Sequence
  ENSG00000206579_54 (sequence is synthesized)
aaatgccgttgattggaaacaagttctgacacaatgtttagacaagaatccagagattttttctaatgaaccattttctagactaaatatatgctcccttgcattttccacatatctttg

SEQ ID NO: 752127 - DNA, 120 bp, Artificial Sequence
  ENSG00000206579_55 (sequence is synthesized)
ccattagccattgctgtttctatataaagcttggatgagatgcctgcatttttatgtgctaaggagaattccttaaagcctttttaaaaatagctcatactgtcattcagattatagctc

SEQ ID NO: 752128 - DNA, 120 bp, Artificial Sequence
  ENSG00000206579_56 (sequence is synthesized)
agaggatggttgaagcgcatggtgaaaacacaggaggactggggtggtcattcctataatttcagtgacagatgcagatcaacgttcctttgtctcggcaatccaatgtcatttttgaaa

SEQ ID NO: 752129 - DNA, 120 bp, Artificial Sequence
  ENSG00000206579_57 (sequence is synthesized)
acaatcaaaaagatcgcttgtgtcagcttctgactcataacactcctcccacctgatgctccagtgtttcaaaatggccaaggatgggcgattccgctctatcccccatttctgagactc

SEQ ID NO: 752130 - DNA, 120 bp, Artificial Sequence
  ENSG00000206579_58 (sequence is synthesized)
ttgtctggacctgtaacaggccgtgaaatgccctgagcattcgagtggcatcccttctcctcacataggcacctgggtggcagcatcagaccactgaagttgttgtgttgacatatgtct

SEQ ID NO: 752131 - DNA, 120 bp, Artificial Sequence
  ENSG00000206579_59 (sequence is synthesized)
tatctagttgctgtcctaaaaatgggcatgtggcaagactctcaatctacagcctcgacagtatcattactcattctaaagtaaaactgcagaatatgggtggaattgtataaaaacata

SEQ ID NO: 752132 - DNA, 120 bp, Artificial Sequence
  ENSG00000206579_60 (sequence is synthesized)
atgagccatttaattttgctaattgaagcaattagtctaacatgcaagcagcctgctctcacagcagagagccacatggaagaagtgccaaatagccatttgcatttatatatatatatt

SEQ ID NO: 752133 - DNA, 120 bp, Artificial Sequence
  ENSG00000206579_61 (sequence is synthesized)
gcaggcagtgacctggcccccaaatgtaaagcttttgtcaaccttgaggcctatattctgctaaacaagagatgacttaatgtccttgaaatattttcgtaatatactgacagcctaatg

SEQ ID NO: 752134 - DNA, 120 bp, Artificial Sequence
  ENSG00000206579_62 (sequence is synthesized)
tcagaaacgagctgcctaaatcaagttttgcttttggttatttcacttccccatagactttcttatggttccatctcccacattgagagtagctcaccacgatggatggtttactgcgca

SEQ ID NO: 752135 - DNA, 120 bp, Artificial Sequence
  ENSG00000206579_63 (sequence is synthesized)
cctagtgctggactaagagctgtatctatgtggtttcatttagtcctcactgccatctgtgagttaagcatcatttacagatgacaaaatctgtaaatggcttagagatgtcaagcaatt

SEQ ID NO: 752136 - DNA, 120 bp, Artificial Sequence
  ENSG00000206579_64 (sequence is synthesized)
tgcccaaaggtcccacagctaggaaacagtggggctgagggttgagcacagctttcaacaactgcgacttctgggagcccagtgactcttcccacaaaatctagtcctgatttggcaagt

SEQ ID NO: 752137 - DNA, 120 bp, Artificial Sequence
  ENSG00000206579_65 (sequence is synthesized)
cttcagaagaaacagaatcatggtctgatgatcaaatttttccaagaaaattttatttaaaagtcaaagatgtccttcaaaatgaacagttaaaaatgtaaaagtcgatgtaaaatggaa

SEQ ID NO: 752138 - DNA, 120 bp, Artificial Sequence
  ENSG00000206579_66 (sequence is synthesized)
gtctctatcacctgtaactaaattttaccttaactctaactcatagtaggcagataaatgctattcttccattccaggcaactgtccccctcctatggctccactatgtattcaattaag

SEQ ID NO: 752139 - DNA, 120 bp, Artificial Sequence
  ENSG00000206579_67 (sequence is synthesized)
tgataaatataaattaacctgatgccatgtctcttgtattttatatgtgtatgctgttttcatccaattaagcagactgaaaaaaaactaaaccccattacttactttggcattttgaca

SEQ ID NO: 752140 - DNA, 81 bp, Artificial Sequence
  ENSG00000206579_68 (sequence is synthesized)
aaaaaaactaaaccccattacttactttggcattttgacaagatagagagagaggaaaagaaagagggagggagagaggga

SEQ ID NO: 752141 - DNA, 120 bp, Artificial Sequence
  ENSG00000206579_69 (sequence is synthesized)
taacaagtctttgaagtgatattttcaaattataaggtaattctgtttcactgccataatttttccctaaattttatttaatatcttgcaggtcacaaactttaatatttaagaggatta

SEQ ID NO: 752142 - DNA, 120 bp, Artificial Sequence
  ENSG00000206579_70 (sequence is synthesized)
ttaaaccactagcttgaacaatcatataagtctaggaaccttattttagtgttagatgccaataatactgcaagtgtcaaccaaatatttgttgaattgaattataaaataattgatgtg

SEQ ID NO: 752143 - DNA, 120 bp, Artificial Sequence
  ENSG00000206579_71 (sequence is synthesized)
ttctttcccttctcactttagatatagcatgtctgaaggtctgcaagatgacagagttgtaacccattcaatgatattgttgcctagtaagctgtgtgtgtgttgtttgaactgatacta

SEQ ID NO: 752144 - DNA, 120 bp, Artificial Sequence
  ENSG00000206579_72 (sequence is synthesized)
aaaaggtagctgataataaaccaaaaattttctcaaccctggtgtttatttttaaaaaatcttcaatgatcaatatgaatgtagtgtattaaaatacaagtaactatcttcctactttga

SEQ ID NO: 752145 - DNA, 120 bp, Artificial Sequence
  ENSG00000206579_73 (sequence is synthesized)
agagatctttatgaatttatataaaattagaagtcactgatttttataggaaatagcatgtaaaataaatctaagtattgctttatcactttattttatagatgagacaactgagatcca

SEQ ID NO: 752146 - DNA, 120 bp, Artificial Sequence
  ENSG00000206579_74 (sequence is synthesized)
tccaaaaagaacaggtaatttttgtgatcaggattacacaatacacttttttttttccctgagtcatttattcaacaagtttgacctctacaactcatttggctaggcaatgcacagtca

SEQ ID NO: 752147 - DNA, 120 bp, Artificial Sequence
  ENSG00000206579_75 (sequence is synthesized)
agcacaaaaggaaagttgcactggaatagctcatagtctggctattagcagcacaatcatagttttctgacgccagctcttactcttttctactctaccacactgtttcttctcttctca

SEQ ID NO: 752148 - DNA, 120 bp, Artificial Sequence
  ENSG00000206579_76 (sequence is synthesized)
atatctatatttaattccatattgaagcaagaaagaaacacagcttttctaagactatgcagtcatgtgtcacttaaggatggggatatgttctgagatatgcatcgtcaggcaattttg

SEQ ID NO: 752149 - DNA, 120 bp, Artificial Sequence
  ENSG00000206579_77 (sequence is synthesized)
tcattgtgtgatggagtgtgcttacacaagcttagatggtagagcctaccatgctcctaggctatatggtagagcctattgtccctaggctacaaacctgtacagcatgctactgtaccg

SEQ ID NO: 752150 - DNA, 120 bp, Artificial Sequence
  ENSG00000206579_78 (sequence is synthesized)
aatactgtaggcaactgtaacaccatggtaagtacttgtgtatttaaatatagaaaagttaacagtaaaaaatatagtattattgtcttatgggatcgctgtcatatgtgcagtctatta

SEQ ID NO: 752151 - DNA, 120 bp, Artificial Sequence
  ENSG00000206579_79 (sequence is synthesized)
ttgaccaaaatgccattgtgtggcatgtgagccttacaatatacaattaacatatgaaataatgatgatgaacataaagtaacaatacaaatacaaaaaaaaaactagatgactgcttat

SEQ ID NO: 752152 - DNA, 120 bp, Artificial Sequence
  ENSG00000206579_80 (sequence is synthesized)
aaagagaaaagtaattttataatttgtttatatgactctccaacactagatatttttaaattgatatcacaacacacaaaaaaattgaaatactctcttggtgcatagtatttgattgaa

SEQ ID NO: 752153 - DNA, 120 bp, Artificial Sequence
  ENSG00000206579_81 (sequence is synthesized)
aacaatcatttttggataaactttgaagcgattcttgagaacttatttcaagaaaaggcatgaaattagggagactccaaagtgaagagttttccaataggtgacttctctgatttttca

SEQ ID NO: 752154 - DNA, 120 bp, Artificial Sequence
  ENSG00000206579_82 (sequence is synthesized)
agaaagcattcttcactaactgtatttctccagcatactggttatttaggaataacaaatttctggacataaacatgagctgtttctctaaagcctttcctccaatgcccagaagagcag

SEQ ID NO: 752155 - DNA, 120 bp, Artificial Sequence
  ENSG00000206579_83 (sequence is synthesized)
ggctttggacccgattgcattctctcctgagtgattggcttcccacatatataagcagcagattgttaaagatcactattaacttgtataactaattttccttatgtgaaataattctgg

SEQ ID NO: 752156 - DNA, 120 bp, Artificial Sequence
  ENSG00000206579_84 (sequence is synthesized)
tcagggaatatataaacccattggccctctaaggagtagaagaaaagagagaagaaagtatattaacttttatgagtacagaataattcaagttccttagcgagtcacattatgcattaa

SEQ ID NO: 752157 - DNA, 120 bp, Artificial Sequence
  ENSG00000206579_85 (sequence is synthesized)
taaaagagttgacctaataaatgttacaaggtaccatgatctctaggttcatgccaccattaccacattccttactacaattattgctattttagtcattggaccagacaaaatgaagca

SEQ ID NO: 752158 - DNA, 120 bp, Artificial Sequence
  ENSG00000206579_86 (sequence is synthesized)
tataattactgatataatatttgctaagcaaaaatcttgtttaacgaaaaaaatcaataccaaaactaattaatcaaaatattaagcaaatattaccagcacagtactgacacaaaattt

SEQ ID NO: 752159 - DNA, 120 bp, Artificial Sequence
  ENSG00000206579_87 (sequence is synthesized)
attaagcaaatattaccagcacagtactgacacaaaattttctcttgtgctagtaattgaagtatgtcatctaccctgttattagaatttcagaaaataggccgggcgcagtggctcacg

SEQ ID NO: 752160 - DNA, 120 bp, Artificial Sequence
  ENSG00000206579_88 (sequence is synthesized)
aaaaaagaatttcagaaaatataaagttttatgtttttattatatttccatctaccaaattgttgaccttctcctcctctccattgcttaatttatattaaaacagatttaatcaaatta

SEQ ID NO: 752161 - DNA, 120 bp, Artificial Sequence
  ENSG00000206579_89 (sequence is synthesized)
ttacttaagtactacaaatgttatcagatggagatgtggttaagctaatttaatttacctattctagtggcattctggtatggagctgtatcaaatcaacacttttaattatttcacatt

SEQ ID NO: 752162 - DNA, 120 bp, Artificial Sequence
  ENSG00000206579_90 (sequence is synthesized)
aattcatcaagaagttccaaaacactactaaatgtgttgaaaatatagtttgagtttctatgattgtaatcaaaattcctattttgatcgcacaccagtagaacgcatcttaacaccagc

SEQ ID NO: 752163 - DNA, 120 bp, Artificial Sequence
  ENSG00000206579_91 (sequence is synthesized)
attgccattgtgagtctagaaaatgagcactttgtgtgttgagcgctgttgcattcacttagcaattaacctttgacctgtggttttctgctgagccccttgtgattttttttattctat

SEQ ID NO: 752164 - DNA, 120 bp, Artificial Sequence
  ENSG00000206579_92 (sequence is synthesized)
tcaaattgggagcaataacacaccttaacataaccaaaaaaaggagacctgtcagctagtgaaagaattgtcattttatatcattctttcaaaaaattaaaatattcaacttcccttatt

SEQ ID NO: 752165 - DNA, 120 bp, Artificial Sequence
  ENSG00000206579_93 (sequence is synthesized)
aacctttctaatgcattgtacataaaagaggaaatggatttctgaaatatattttgaaagcctggggtgaaacattttccacggtctgaatcggaagcttggggctctgtggaaagatgt

SEQ ID NO: 752166 - DNA, 120 bp, Artificial Sequence
  ENSG00000206579_94 (sequence is synthesized)
aaatccctcctgctgtaagaggagggaaggcagcagtgagctgtcactcagaaatacagtcaccactgtcacaaagctgcctattgctgatgctatcgattcccttctttttctacagaa

SEQ ID NO: 752167 - DNA, 120 bp, Artificial Sequence
  ENSG00000206579_95 (sequence is synthesized)
acatcttggagcttgtcaagctttactggaggtgatttgcagttaattaattcaacagacactttaatcttgcaaattcttgacttgtaatattgtaaccaagctcctgcaagggaacat

SEQ ID NO: 752168 - DNA, 120 bp, Artificial Sequence
  ENSG00000206579_96 (sequence is synthesized)
taatcagttagtgaaaaaggagcacttccgttcagccgtagtaccatgacgtgcacaggcctgaagagaaatacctctgtgaagtggagcgctagtgaattcctgctacctgcttcttat

SEQ ID NO: 752169 - DNA, 120 bp, Artificial Sequence
  ENSG00000206579_97 (sequence is synthesized)
ggctcacgctatgaatattcacctgcttcatttgttttttccagtaaacgctgttttgaaaaaaaagaaaaatattcccgggggcttgcatagctcagagaacggagtactgggtcgtgg

SEQ ID NO: 752170 - DNA, 120 bp, Artificial Sequence
  ENSG00000206579_98 (sequence is synthesized)
agacttgctttaaatggattcaaatccacatgtttggaaatgaaaataatgcactgtcatctgttgaataattgatctgtctgagtacagttgctgcttttatttcatttcttgagacta

SEQ ID NO: 752171 - DNA, 120 bp, Artificial Sequence
  ENSG00000206579_99 (sequence is synthesized)
ccattgtcagcattgtaataaccaatttataaaaattgagtttttattcagtttcagaggtaaaatctgcatgggtgcagctactgaataatttgattcctgccttcttaggtggtgaca

SEQ ID NO: 752172 - DNA, 120 bp, Artificial Sequence
  ENSG00000206579_100 (sequence is synthesized)
ttagcagttccaaaccgagatccatttctatgtggaattggctatcctgttgcttctcaggccctgcaaaaccttggttacgagctcaaagatcacgaatctgatattcttttttttttt

SEQ ID NO: 752173 - DNA, 120 bp, Artificial Sequence
  ENSG00000206579_101 (sequence is synthesized)
aggcgtgagccaccacacccggccccgatattcttaatgactaaattttcacatagaggtaaacagatcatctcttaatttaatacatggttctttctcccttgcttctgggttttgttt

SEQ ID NO: 752174 - DNA, 120 bp, Artificial Sequence
  ENSG00000206579_102 (sequence is synthesized)
acatggttctttctcccttgcttctgggttttgttttttttttttcaaagaaagatttgagctacgagataagaatgaagttaccagaagttatcaggtcatagtttcagagtatgcaag

SEQ ID NO: 752175 - DNA, 120 bp, Artificial Sequence
  ENSG00000206579_103 (sequence is synthesized)
agagtcgggccttcatatgttcttgtaaagttttctgtctaatcttttggtataacaattttaggagttcaccctagatgaaagagtggaagtcatcagatttgtcaataagcagtctag

SEQ ID NO: 752176 - DNA, 120 bp, Artificial Sequence
  ENSG00000206579_104 (sequence is synthesized)
aggaaaaatgagaagaggaagaagcagggattctttttcttgtgttttgaagatgtttctcctcccaaagctatcaccttggtagttatcaccaagatgtataatagcaagcactactga

SEQ ID NO: 752177 - DNA, 120 bp, Artificial Sequence
  ENSG00000206579_105 (sequence is synthesized)
atgatcttcccagttatcagcactagcatcacggcgagtcagttttcagaactagctcttggcgcaagccctgaaataaaatggggacaaaaagtggtctaccaccatgtgacttatttt

SEQ ID NO: 752178 - DNA, 90 bp, Artificial Sequence
  ENSG00000206579_106 (sequence is synthesized)
cctccccccaccccacaacaccacgtgacttattttcaattgcccagcaatgaaaactaacaagttaaagaaaatgttcattttctgaac

SEQ ID NO: 752179 - DNA, 120 bp, Artificial Sequence
  ENSG00000206579_107 (sequence is synthesized)
tgaaaactaacaagttaaagaaaatgttcattttctgaaccccagagcccacataggtacaaagatactctgtaatgtacaatgaggtggccaatcgtgggaatataggagcaataaata

SEQ ID NO: 752180 - DNA, 120 bp, Artificial Sequence
  ENSG00000206579_108 (sequence is synthesized)
gtcctcttaagcaaggttcatgggtaagagttactctagcaggattgggtgttgggtcagagggtatctattaatgtagaggcccaagtatggtgatgaagagaaaacctgtcagtggct

SEQ ID NO: 752181 - DNA, 120 bp, Artificial Sequence
  ENSG00000206579_109 (sequence is synthesized)
catccatagtatttgccttttcacagagcagagaagttcaaaatagtcacagccagtccataactataacaacagacatgtccactttggaaaggctagggcctgacgaaagtgggaaaa

SEQ ID NO: 752182 - DNA, 120 bp, Artificial Sequence
  ENSG00000206579_110 (sequence is synthesized)
cagagatgtcagtggtgtcatgtctaagagtgactctgtcattaggggaacccaccccctgtgatagttctccttgaccactggtccctatgggctctgcaggagagcttctcgtgggtt

SEQ ID NO: 752183 - DNA, 120 bp, Artificial Sequence
  ENSG00000206579_111 (sequence is synthesized)
ctaagataaggtattccaaggtattgtaagttacccttgtttgtagaacatgaaccacttaaccatccctccttttaacagcaatgagattcagggttaccatggccttactcatcttcc

SEQ ID NO: 752184 - DNA, 120 bp, Artificial Sequence
  ENSG00000206579_112 (sequence is synthesized)
cattgtaaatatatcacaatgtcacaagagcctctgtgtccaaacacactaaactgggtttacaagcattagaatctttcactcatattgtgaatctcaattctgccagtcacctagtct

SEQ ID NO: 752185 - DNA, 120 bp, Artificial Sequence
  ENSG00000206579_113 (sequence is synthesized)
gtgtatctgttcccaaactggaaaaaataattcttgagagaataattttcagaataatggaggtggaaagaaatgaacagttaagcaatttttcaacatagacaaaaccactggaccatt

SEQ ID NO: 752186 - DNA, 120 bp, Artificial Sequence
  ENSG00000206579_114 (sequence is synthesized)
gatagccctcaagctctgattcttcctcctgactaagtttcttttctttggggggctttcaacatctgaattttccagatgattgcggaaccatcgtcactaaaccaaagtagacaagga

SEQ ID NO: 752187 - DNA, 120 bp, Artificial Sequence
  ENSG00000206579_115 (sequence is synthesized)
gttattaaaaaataaagactgtccacatgactgcaaatatcctgatgaaaagtggccaagtagatcactcaagtggtaaatttggtcttcatgatatcaaacatacggatatttggaaaa

SEQ ID NO: 752188 - DNA, 120 bp, Artificial Sequence
  ENSG00000206579_116 (sequence is synthesized)
gtcgagatgtttgaatcatacagttttccgtctgggtgtctggtgtttctggatagacagactgctccggtgttgtaagtaatggaattgaactttcttgcgccgtaagcaattgctggt

SEQ ID NO: 752189 - DNA, 120 bp, Artificial Sequence
  ENSG00000206579_117 (sequence is synthesized)
catattctgctgctaaaagtctctttgttgtgccaagagaaataatgcagaacaaatgttatttaatttttatttactttcagcaaacacatgaatgaaagaggtcaggtaggctgtcct

SEQ ID NO: 752190 - DNA, 120 bp, Artificial Sequence
  ENSG00000206579_118 (sequence is synthesized)
gggcattctgggcctggctgcggcacaccctccttcacttggcccctgccaggcaagaaactttctattcagtctttgctatctttcataaattgtatcattgctcttctgctgttcata

SEQ ID NO: 752191 - DNA, 120 bp, Artificial Sequence
  ENSG00000206579_119 (sequence is synthesized)
tcatcttagttattcacaaagtctacttgataaaatggctcaagggaaatacaagtttcttaagtttttattcttcaaatagaagttttaattttaagcattccttatgatattttttaa

SEQ ID NO: 752192 - DNA, 120 bp, Artificial Sequence
  ENSG00000206579_120 (sequence is synthesized)
gcctaaaaaccattcaaattgcttgacaaaattatttcatggtgaattttataaggttgatagaagtaaaagctatttttcccaaaacaaacaaaataccatacatagttttttgggttt

SEQ ID NO: 752193 - DNA, 120 bp, Artificial Sequence
  ENSG00000206579_121 (sequence is synthesized)
ggtttgttgatgtcatgccaatttccaagcaccaactggttaccacaaacatgggaatatttagtgatatctttgtagtcatcgttaaaattcctgggaaaaaaagaaaaagtttacgtc

SEQ ID NO: 752194 - DNA, 120 bp, Artificial Sequence
  ENSG00000206579_122 (sequence is synthesized)
aaaggaaaattcacctcccacaaggaaagtctgagatgttcatcctgacatttgcgttcctgattatttgtggacatttcttcattgtgactgtaggaagctgagcttgtttctcctaat

SEQ ID NO: 752195 - DNA, 120 bp, Artificial Sequence
  ENSG00000206579_123 (sequence is synthesized)
ttgacactgggttggtgagcattgtctcaaattttgtgcttgcctcatttatggtcctgaagcttagcagaaaaacagacaagctattcagaccagttttctttaagagcacttatgttg

SEQ ID NO: 752196 - DNA, 120 bp, Artificial Sequence
  ENSG00000206579_124 (sequence is synthesized)
cagaacatgatacaaatgattcaccgtgagcaggcacacagagtacggaaaggtattcaactatgcaaagatattgaggggatttccagagaaaacttaaatgttttgaagatttgtagg

SEQ ID NO: 752197 - DNA, 120 bp, Artificial Sequence
  ENSG00000206579_125 (sequence is synthesized)
tagggttttgattgtgtcacattctacactcagtgccaagttagaatgtctttatggggaaggcaataaagttacttgttgggtccttccttcccttacaaacagaatgtttttatgaaa

SEQ ID NO: 752198 - DNA, 120 bp, Artificial Sequence
  ENSG00000206579_126 (sequence is synthesized)
tcaaatggatcctccactttgtgtagtaaggaccccccaggccccacaacatcatcactgtgagtcctatcgcagatgtgtgtaccagcccaattcagttttgcttttctttttccctaa

SEQ ID NO: 752199 - DNA, 120 bp, Artificial Sequence
  ENSG00000206579_127 (sequence is synthesized)
gatttttacttcaccaaatcccatttcaaatctttttaccttcatgttaccaacaggatgtttagttgaatcagcaacaaagacgtgacaacctattgtcctccacaaaagcatgagtca

SEQ ID NO: 752200 - DNA, 120 bp, Artificial Sequence
  ENSG00000206579_128 (sequence is synthesized)
ttttattcagtgatctttggtagtacgataatcaatggaatttatggtgtcgtagaaaaccaaaaatccatgttgaatatagtgactgtcttaaatatacttaaatatgttattctacaa

SEQ ID NO: 752201 - DNA, 120 bp, Artificial Sequence
  ENSG00000206579_129 (sequence is synthesized)
aacaatatccttttacactatgggatggattcctttctggatgcagggatgggagggtctatgggtcagtgactgggacaaaggaactgggaatctctgcacaactgagccctaatccct

SEQ ID NO: 752202 - DNA, 120 bp, Artificial Sequence
  ENSG00000206579_130 (sequence is synthesized)
ggtccatctctccagcctcagaaactcaccctcagcctcattttccccatatgcaaaagagagatatttatttacctacctcataggggtgttgtggagattagctagatttgctaaagt

SEQ ID NO: 752203 - DNA, 120 bp, Artificial Sequence
  ENSG00000206579_131 (sequence is synthesized)
gcttgtaggttagaaagtgctgtcattcctgagaactggcattaacagaagagagctgtgtgcagcacggaggaagtggagtctgaggaatacaacagcaacaactcaccaagcagagaa

SEQ ID NO: 752204 - DNA, 120 bp, Artificial Sequence
  ENSG00000206579_132 (sequence is synthesized)
tacaatggttcttcatcactatataaaactaacacttttccttcaaaggtctatgtataattttcttcaatgattagctttttaatgagacaactcctttcatccagacattcagatgct

SEQ ID NO: 752205 - DNA, 120 bp, Artificial Sequence
  ENSG00000206579_133 (sequence is synthesized)
ttatataagttggcaattttcctgttaaccaaactgaattttattaaatgtttattaaaatgcacccagaaaacttgtctcctcctgatgcctgaggggtttgcatgcctgatcccaagc

SEQ ID NO: 752206 - DNA, 120 bp, Artificial Sequence
  ENSG00000206579_134 (sequence is synthesized)
tgcattttttcagaatgcgtgcatgatgccccagttctgtactcatgatcaccaggtggcgttctgaaatccactactggggaaagatttttaacagatattagtgagattagagttggt

SEQ ID NO: 752207 - DNA, 120 bp, Artificial Sequence
  ENSG00000206579_135 (sequence is synthesized)
gtcatttccattgagtatcctcttcacccctaagatgacacatctttacaacacaataaaagaacgtaaagccttatttccacctgtaactcctgaattgattcattttcacgttataac

SEQ ID NO: 752208 - DNA, 120 bp, Artificial Sequence
  ENSG00000206579_136 (sequence is synthesized)
tacatttcaaatatttcggagaagtttttacacagggcttcagctatatactgatatacatatgcttacatgtgcttaggtgggaattctactaaaggataaaggacacagtgtgaaaac

SEQ ID NO: 752209 - DNA, 120 bp, Artificial Sequence
  ENSG00000206579_137 (sequence is synthesized)
aacatcagagaatatcctgtacaacttccccaaaagtgacaagttttcttgtacttaaaaatttaatcctgataagaactaatgtgaaataacatcattttggtttataaatatttgtaa

SEQ ID NO: 752210 - DNA, 120 bp, Artificial Sequence
  ENSG00000206579_138 (sequence is synthesized)
tttttgagacatagaggcaatatcatgatataggaatacattcataaaactagactagcaaagcagataatgttttcatgatatggcttcatgaggcaaagttgttgtacatcaatatta

SEQ ID NO: 752211 - DNA, 120 bp, Artificial Sequence
  ENSG00000206579_139 (sequence is synthesized)
tcattgtgcccttatttaaggattatattccattgtgaaaaaaatgtgcacactcttaaaaacacaaaatgggtttcagaaagtttaccttgagaagtgggtttgaaatcatcttgtgct

SEQ ID NO: 752212 - DNA, 120 bp, Artificial Sequence
  ENSG00000206579_140 (sequence is synthesized)
tggagctgacataagatacgcactcaatataatctcttctggattctaaaatctaattggcagtgatatttcaaagccttaacatttcaaggtggttaattaatatctaatgcatggtat

SEQ ID NO: 752213 - DNA, 120 bp, Artificial Sequence
  ENSG00000206579_141 (sequence is synthesized)
taaactttctgaagcatgaatttaacctaggcaattatctgattcattttttttaaagtttgtgctgccaaaccagactgaagtattgtttttctggactaatactatgagaatagtaag

SEQ ID NO: 752214 - DNA, 120 bp, Artificial Sequence
  ENSG00000206579_142 (sequence is synthesized)
tgagtcaaaaaataattgggactgtcctttttcccctgcccacttcctagtatcaatactcccccaaccagaaatgcagcagaatatcctttttgctataaaggaaaatactgtgttttt

SEQ ID NO: 752215 - DNA, 120 bp, Artificial Sequence
  ENSG00000206579_143 (sequence is synthesized)
atttgtttttgcagaagaaaactggtgttgcctatttggactagatgtaggggcctggaagaaggaagtggcagattcacaggtggggtgaccaggatgggaggaaaatagtggggcgag

SEQ ID NO: 752216 - DNA, 120 bp, Artificial Sequence
  ENSG00000206579_144 (sequence is synthesized)
tatgtcatggggagattttgccacaaagatacaaaacagaattgaagtgtgttagagctggacaaccctttgaaatgacagagtctagattcttcaccaaacagatgaaaagacaagtag

SEQ ID NO: 752217 - DNA, 120 bp, Artificial Sequence
  ENSG00000206579_145 (sequence is synthesized)
agacaacatgtacttgagatataagctatacatctcatcactggaagaaaggagacttcagcctcttttcaaggctttccagaccacatggaactctccagagccctccttgaaagtttt

SEQ ID NO: 752218 - DNA, 120 bp, Artificial Sequence
  ENSG00000206579_146 (sequence is synthesized)
tagaaaaactaccattttcagcaaagattcatgtgattatgctgctgaggaccagtcattctgtaaacatcacatatgtgatgctttgtaaatgtattaattgtggtcaattttcatgga

SEQ ID NO: 752219 - DNA, 120 bp, Artificial Sequence
  ENSG00000206579_147 (sequence is synthesized)
tatttcccattaacattgtattccatgaacaagtgatagaaaacatatggaaattctcttttgatcaaaaggagtgtctcccaattagtttacgtgtgttagtattgctgacatattatt

SEQ ID NO: 752220 - DNA, 120 bp, Artificial Sequence
  ENSG00000206579_148 (sequence is synthesized)
atcatcacaaaattccttttatatctagatggtatcaaataagaaaaaaatgcatcatttggtcaattgcttattgaagatcccagctgaagcctttctttggtaaagagcgcagaaaga

SEQ ID NO: 752221 - DNA, 120 bp, Artificial Sequence
  ENSG00000206579_149 (sequence is synthesized)
gaccatagctattcttggatgagaaccttgcctctactaaatagtttctgcttttcctctctgtagccagacagctcaatagcctagggagagtcgatgaaggatatgcaaattacattt

SEQ ID NO: 752222 - DNA, 120 bp, Artificial Sequence
  ENSG00000206579_150 (sequence is synthesized)
ttcccattctcagaacaaagacagcaaccaatgagccagaggtttcttctctctttgaaaccaaatagcacgctgaatttagggctatgacaaaaatgttgttaaagcaagagcaaaatc

SEQ ID NO: 752223 - DNA, 120 bp, Artificial Sequence
  ENSG00000206579_151 (sequence is synthesized)
atccttcctatggattcttttctcagtgtttacttaattctttttgcagtttggattggagtttctagtaatgataattaatgccattttacatgatagcttcaatgcagaaatggtgtg

SEQ ID NO: 752224 - DNA, 120 bp, Artificial Sequence
  ENSG00000206579_152 (sequence is synthesized)
agcctgagttacaaatgacatgactagggatacaaacttcgtctgtactaacatcctaccaagcagattggaaacaaatactactaccactaatattctgatgtaattaataacatctaa

SEQ ID NO: 752225 - DNA, 120 bp, Artificial Sequence
  ENSG00000206579_153 (sequence is synthesized)
tagaaaaatagaaacatcgtgcttagcatgaaaccattgcacaatataaacctgctcccaaatggcaaggatttttgctaccaatatttgttcttaattctccagttattttaagtaaat

SEQ ID NO: 752226 - DNA, 120 bp, Artificial Sequence
  ENSG00000206579_154 (sequence is synthesized)
aagtttcacatctaactacctcagctactgttgttttatttagaaacatgaaaccatgcactttgtaatcaataagtcttttgtttaacatttcaaaaggatatttggtgcaaagcaatt

SEQ ID NO: 752227 - DNA, 120 bp, Artificial Sequence
  ENSG00000206579_155 (sequence is synthesized)
ttcaaaaatttgtacatgatatacaccacccaacctcaggaggttgtacttaattttgtttgtttgtttctaaggttggttttgggtaaaatcctcatttccactcaacatcaagataag

SEQ ID NO: 752228 - DNA, 120 bp, Artificial Sequence
  ENSG00000206579_156 (sequence is synthesized)
ctgctctatatttgcttaatttgccttaaacattttgtgctcctttccctgttcaatttttttgttttgttttaaatctatctctgaaaaaaaaatggaacaggtggcaggtgaacagca

SEQ ID NO: 752229 - DNA, 120 bp, Artificial Sequence
  ENSG00000206579_157 (sequence is synthesized)
aatggaagagaatggaccagtaatttctcagtcccctgttgtcaactatctgcatgacattctgattgtgcaaaaatgccattcctgtgcttccccctccattacagaataaggtccgag

SEQ ID NO: 752230 - DNA, 120 bp, Artificial Sequence
  ENSG00000206579_158 (sequence is synthesized)
agaccccacgagtgtgcgtagggaacggtgtagacatttcccccagtatgagcacagtgcctggacctgaatgatcatcttggcagttcttgtgcttttactttgtaaacattgtacaaa

SEQ ID NO: 752231 - DNA, 120 bp, Artificial Sequence
  ENSG00000206579_159 (sequence is synthesized)
tgtatttggaattttatttgaaatggagacttaaactagttattaaatttgtttccttcctgtaaatatatatattcaaattccatgtatccaaacatccctttagcgttcagattgtaa

SEQ ID NO: 752232 - DNA, 120 bp, Artificial Sequence
  ENSG00000206579_160 (sequence is synthesized)
gtgtgtctttattcgcgggaggccactgtcagcaggcagtgacccccagtgccctagtttgaagcacagtgtgtggagtatttgatgtactacagtaccatagttattttggtctgttaa

SEQ ID NO: 752233 - DNA, 120 bp, Artificial Sequence
  ENSG00000206579_161 (sequence is synthesized)
gtaagttgcaatttgtgatgaaatgaagtggaaagtagtacttcataatgaacaaatttccttggttacatggtttttcttgtaaaacttaaagaaaaaaaaagaaaacttgaaatttta

SEQ ID NO: 752234 - DNA, 120 bp, Artificial Sequence
  ENSG00000211445_0 (sequence is synthesized)
agacggacggtggccagggatcaggcagcggctcaggcgaccctgagtgtgcccccaccccgccatggcccggctgctgcaggcgtcctgcctgctttccctgctcctggccggcttcgt

SEQ ID NO: 752235 - DNA, 120 bp, Artificial Sequence
  ENSG00000211445_1 (sequence is synthesized)
ctcgcagagccggggacaagagaagtcgaagatggactgccatggtggcataagtggcaccatttacgagtacggagccctcaccattgatggggaggagtacatccccttcaagcagta

SEQ ID NO: 752236 - DNA, 120 bp, Artificial Sequence
  ENSG00000211445_2 (sequence is synthesized)
tgctggcaaatacgtcctctttgtcaacgtggccagctactgaggcctgacgggccagtacattgaactgaatgcactacaggaagagcttgcaccattcggtctggtcattctgggctt

SEQ ID NO: 752237 - DNA, 120 bp, Artificial Sequence
  ENSG00000211445_3 (sequence is synthesized)
tccctgcaaccaatttggaaaacaggaaccaggagagaactcagagatccttcctaccctcaagtatgtccgaccaggtggaggctttgtccctaatttccagctctttgagaaagggga

SEQ ID NO: 752238 - DNA, 120 bp, Artificial Sequence
  ENSG00000211445_4 (sequence is synthesized)
tgtcaatggagagaaagagcagaaattctacactttcctaaagaactcctgtcctcccacctcggagctcctgggtacatctgaccgcctcttctgggaacccatgaaggttcacgacat

SEQ ID NO: 752239 - DNA, 120 bp, Artificial Sequence
  ENSG00000211445_5 (sequence is synthesized)
ccgctggaactttgagaagttcctggtggggccagatggtatacccatcatgcgctggcaccaccggaccacggtcagcaacgtcaagatggacatcctgtcctacatgaggcggcaggc

SEQ ID NO: 752240 - DNA, 120 bp, Artificial Sequence
  ENSG00000211445_6 (sequence is synthesized)
catgtccaccatgtaggggagggactttgttcaggaagaaatccgtgtctccaaccacactatctacccatcacagacccctttcctatcactcaaggccccagcctggcacaaatggat

SEQ ID NO: 752241 - DNA, 120 bp, Artificial Sequence
  ENSG00000211445_7 (sequence is synthesized)
gcatacagttctgtgtactgccaggcatgtgggtgtgggtgcatgtgggtgtttacacacatgcctacaggtatgcgtgattgtgtgtgtgtgcatgggtgtacagccacgtgtctacct

SEQ ID NO: 752242 - DNA, 120 bp, Artificial Sequence
  ENSG00000211445_8 (sequence is synthesized)
atgtgtctttctgggaatgtgtaccatctgtgtgcctgcagctgtgtagtgctggacagtgacaaccctttctctccagttctccactccaatgataatagttcacttacacctaaaccc

SEQ ID NO: 752243 - DNA, 120 bp, Artificial Sequence
  ENSG00000211445_9 (sequence is synthesized)
aaaggaaaaaccagctctaggtccaattgttctgctctaactgatacctcaaccttggggccagcatctcccactgcctccaaatattagtaactatgactgacgtccccagaagtttct

SEQ ID NO: 752244 - DNA, 120 bp, Artificial Sequence
  ENSG00000211445_10 (sequence is synthesized)
gggtctaccacactccccaaccccccactcctacttcctgaagggccctcccaaggctacatccccaccccacagttctccctgagagagatcaacctccctgagatcaaccaaggcaga

SEQ ID NO: 752245 - DNA, 120 bp, Artificial Sequence
  ENSG00000211445_11 (sequence is synthesized)
tgtgacagcaagggccacggaccccatggcaggggtggcgtcttcatgagggaggggcccaaagcccttgtgggcggacctcccctgagcctgtctgaggggccagcccttagtgcattc

SEQ ID NO: 752246 - DNA, 120 bp, Artificial Sequence
  ENSG00000211445_12 (sequence is synthesized)
aggctaaggcccctgggcagggatgccacccctgctccttcggaggacgtgccctcacccctcactggtccactggcttgagactcaccccgtctgcccagtaaaagcctttctgcagca

SEQ ID NO: 752247 - DNA, 120 bp, Artificial Sequence
  ENSG00000211445_13 (sequence is synthesized)
gtcgccccgggacggggaggtggggagctgagggcaagtcgcgcccgcccctgaaatcccagccgcctagcgattggctgcaagggtctcggcttggccgcggattggtcacacccgagg

SEQ ID NO: 752248 - DNA, 120 bp, Artificial Sequence
  ENSG00000211445_14 (sequence is synthesized)
ggggcctcaagcaaggttgacactcctcttatccctgctctagaactcctgtcctcccacctcggagctcctgggtacatctgaccgcctcttctgggaacccatgaaggttcacgacat

SEQ ID NO: 752249 - DNA, 120 bp, Artificial Sequence
  ENSG00000211445_15 (sequence is synthesized)
ctgagggcctcagaggggatgcttggagaagctgaaaaatccacaagctgttctctgaaatttcctcccctggggcagcctcactacccaggacccactgtcctcattagcctgaggaaa

SEQ ID NO: 752250 - DNA, 120 bp, Artificial Sequence
  ENSG00000211445_16 (sequence is synthesized)
ccagcaggtgtgtggcccacacctggagtggggatactgaggccaggagtgggatgacccagcatgcttatctcctttgacagtatgtactggggtgggctctgtagacctctcctctac

SEQ ID NO: 752251 - DNA, 120 bp, Artificial Sequence
  ENSG00000211445_17 (sequence is synthesized)
ccagggagtgggagtgggtggggaaggaggcagaagccaggtgtagggatagactcaaagcgagcgatttctgtctccaacttcccaacatgcataactcacatttttgcaagctctgag

SEQ ID NO: 752252 - DNA, 120 bp, Artificial Sequence
  ENSG00000211445_18 (sequence is synthesized)
acaagagaagtcgaaggctccccgccagatgggcaatccccaggtgcgagagacctcctgaaccccttttgccgccccctccgccgccgggaccccgcccccgaccgtcgtcgtctcgta

SEQ ID NO: 752253 - DNA, 120 bp, Artificial Sequence
  ENSG00000211445_19 (sequence is synthesized)
gttccatctgttggagagccgagacctggtgcttcaggcgggcagaatgactaagggaggaaggtctctctccccgagctcgcactttctccccactgccacctcgagggtcgccttgct

SEQ ID NO: 752254 - DNA, 120 bp, Artificial Sequence
  ENSG00000211445_20 (sequence is synthesized)
gtgaactcactggtgatcctgcgcaagtccctccctttctcgggcctcagtagttccagcggcacagcgggtgagccgggggagtggtgtggatgagacagggctcctcgccaggatact

SEQ ID NO: 752255 - DNA, 120 bp, Artificial Sequence
  ENSG00000211445_21 (sequence is synthesized)
cactgaggaaactggggagctgggccagggcctcatctgtgttcctgatttgccaaagattatgggagggttgtaacctcaccccaaagaagttctctgccttgtatccagggatggata

SEQ ID NO: 752256 - DNA, 120 bp, Artificial Sequence
  ENSG00000211445_22 (sequence is synthesized)
gttcttgctccagaaaactcaatcctgagggttctgaatgagtgctctagctggcccaggtggagggccttggcaatgggcaggtgactgacagctgacttgaggaagggtattattctt

SEQ ID NO: 752257 - DNA, 120 bp, Artificial Sequence
  ENSG00000211448_0 (sequence is synthesized)
gggcttccttttaatttagttttttttccccttctcccccaacccccaaccttcccccttacctcccccaccccctttatcaccaccccccttttaaataagagggtgaaggggaaccag

SEQ ID NO: 752258 - DNA, 120 bp, Artificial Sequence
  ENSG00000211448_1 (sequence is synthesized)
agcgcacaagggaactgactcaggaggcagagaagatgggcatcctcagcgtagacttgctgatcacactgcaaattctgccagtttttttctccaactgcctcttcctggctctctatg

SEQ ID NO: 752259 - DNA, 120 bp, Artificial Sequence
  ENSG00000211448_2 (sequence is synthesized)
actcggtcattctgctcaagcacgtggtgctgctgttgagccgctccaagtccactcgcggagagtggcggcgcatgctgacctcagagggactgcgctgcgtctggaagagcttcctcc

SEQ ID NO: 752260 - DNA, 120 bp, Artificial Sequence
  ENSG00000211448_3 (sequence is synthesized)
tcgatgcctacaaacaggtgaaattgggtgaggatgcccccaattccagtgtggtgcatgtctccagtacagaaggaggtgacaacagtggcaatggtacccaggagaagatagctgagg

SEQ ID NO: 752261 - DNA, 120 bp, Artificial Sequence
  ENSG00000211448_4 (sequence is synthesized)
gagccacatgccaccttcttgactttgccagccctgagcgcccactagtggtcaactttggctcagccacttgacctcctttcacgagccagctgccagccttccgcaaactggtggaag

SEQ ID NO: 752262 - DNA, 120 bp, Artificial Sequence
  ENSG00000211448_5 (sequence is synthesized)
agttctcctcagtggctgacttcctgctggtctacattgatgaggctcatccatcagatggctgggcgataccgggggactcctctttgtcttttgaggtgaagaagcaccagaaccagg

SEQ ID NO: 752263 - DNA, 120 bp, Artificial Sequence
  ENSG00000211448_6 (sequence is synthesized)
aagatcgatgtgcagcagcccagcagcttctggagcgtttctccttgccgccccagtgccgagttgtggctgaccgcatggacaataacgccaacatagcttacggggtagcctttgaac

SEQ ID NO: 752264 - DNA, 120 bp, Artificial Sequence
  ENSG00000211448_7 (sequence is synthesized)
gtgtgtgcattgtgcagagacagaaaattgcttatctgggaggaaagggccccttctcctacaaccttcaagaagtccggcattggctggagaagaatttcagcaagagatgaaagaaaa

SEQ ID NO: 752265 - DNA, 120 bp, Artificial Sequence
  ENSG00000211448_8 (sequence is synthesized)
ctagattagctggttaaaggtatgattataagagagcttattgttttaaaaagttatataaaggcaaggaaattaagaactgaatccatatttcaacagagccctattggcttactgaaa

SEQ ID NO: 752266 - DNA, 120 bp, Artificial Sequence
  ENSG00000211448_9 (sequence is synthesized)
gacaggagtttatctatcggaagaacatgaatctctaacagctccatacttctttcactactcaaatggcattgggctgagtaagtaaccatatcacctctcttcttagtaaaaagccct

SEQ ID NO: 752267 - DNA, 120 bp, Artificial Sequence
  ENSG00000211448_10 (sequence is synthesized)
atgtgaaaagatcccaagatggagaggaagaaacgctaattcagcatgtgttcattctgcattgagaaggaactgatacatctgatgcatgctttgagaccagaagaaaagacttacctg

SEQ ID NO: 752268 - DNA, 120 bp, Artificial Sequence
  ENSG00000211448_11 (sequence is synthesized)
aataattactacattagggaagctactgtctacgttaagataaagggtattgccttggctctatttggcatggatggagcccagttggaaaattcccaaatattacaacaagtccttgaa

SEQ ID NO: 752269 - DNA, 120 bp, Artificial Sequence
  ENSG00000211448_12 (sequence is synthesized)
cccaggccatgtggttagacgttggtgttaaggttagaccttatgttagagtcatttctgatgttccagcttctagccatgtagtgctctcagtcttcataccccagaaattattggtat

SEQ ID NO: 752270 - DNA, 120 bp, Artificial Sequence
  ENSG00000211448_13 (sequence is synthesized)
atttgtagataccgagaatgatccctcagtctgagaggttagaatgatcatctgtaatctgagggttaatttctaggcaggtggagagagtggtaaaaaagaaatgaaattgacaagcta

SEQ ID NO: 752271 - DNA, 120 bp, Artificial Sequence
  ENSG00000211448_14 (sequence is synthesized)
ggaaagaggaggcagaaagatttggaaaattcacagagtttcacccttaagctgtagagagtgggtcacatttgttagccacggaaacatagaaacatacacaaggccagaaaaagaaga

SEQ ID NO: 752272 - DNA, 120 bp, Artificial Sequence
  ENSG00000211448_15 (sequence is synthesized)
aggagctcaactaaaagtggcatagagaatacacatataaaaacaatatatttgtcatatgctcctagagaggagaaaggggtgattgaaagaaaaaaaaatacttaaatatttgtaatt

SEQ ID NO: 752273 - DNA, 120 bp, Artificial Sequence
  ENSG00000211448_16 (sequence is synthesized)
gtgaggggtttcttttggaaataattacttttgaaccatgtatgtggtatgtatattttcagtgggttaattataccccatgatacctattaaaggaaaaccagtgggtctggtggtgct

SEQ ID NO: 752274 - DNA, 120 bp, Artificial Sequence
  ENSG00000211448_17 (sequence is synthesized)
ggtcttttcctccccattcctacaatttctatgtggcccaagtcattcctaatcttggtctctatagcagtgttctctctgaatgctgagctgaagaaattatacgtacatacacacata

SEQ ID NO: 752275 - DNA, 120 bp, Artificial Sequence
  ENSG00000211448_18 (sequence is synthesized)
catacatacatacaaatatatgtatatatattctcagctgctgcgggaggtaggtaccatggccattcagcacagccttgatttcctcccaaagtaggtgagctatagtgaagaataggt

SEQ ID NO: 752276 - DNA, 120 bp, Artificial Sequence
  ENSG00000211448_19 (sequence is synthesized)
gcaaacaaacaagcttacttccattgcaaaatagaagaagaggaagttagagataattctgatcaatcattttggaggctttgttataaggcaacccccggtatatcatggaatttccat

SEQ ID NO: 752277 - DNA, 120 bp, Artificial Sequence
  ENSG00000211448_20 (sequence is synthesized)
tgacatttgaatttggacttggatcttcccttggtcccattagctgaggtttagtaatctaaagtccctatagtatatgattataatgctattttaaaaaatatatatataaaatatttt

SEQ ID NO: 752278 - DNA, 120 bp, Artificial Sequence
  ENSG00000211448_21 (sequence is synthesized)
tttctttttaaaatagacactatagttttacccataagtaatatttaaagattatagctcccaaaagaatggaccaaccactttcgtatcataatttctttttggtaaatatgagactat

SEQ ID NO: 752279 - DNA, 120 bp, Artificial Sequence
  ENSG00000211448_22 (sequence is synthesized)
aaatcatagtatatgattgtatttaaaggtacaatcaaaggatcttttgtccattccattaataactgaataaaaaataaataaaatggatagaaaaaaactaaagttgaaaatacattc

SEQ ID NO: 752280 - DNA, 120 bp, Artificial Sequence
  ENSG00000211448_23 (sequence is synthesized)
attcttaaactagttgtctgaattgagaaaagagtgagaactaggtgtgcaagaaccaaacgtattttattttattttttaaatgggagcaacatatcagtcgtgtcaccagctggtata

SEQ ID NO: 752281 - DNA, 120 bp, Artificial Sequence
  ENSG00000211448_24 (sequence is synthesized)
ttgtgtaaatattaaagctccattgggactgatttttcatggcaacatcagctttctaatgttctaaattctataaaaaccacccacaaagaaacaaagcaaatttcattatctaatgag

SEQ ID NO: 752282 - DNA, 120 bp, Artificial Sequence
  ENSG00000211448_25 (sequence is synthesized)
ttgagaataattatttcagattcctcagttgttaacttctacattcaaggcttatctctgcccccattgatttttaacctcaaaatggtgttgagatttacgtggaaccctaaagcagta

SEQ ID NO: 752283 - DNA, 120 bp, Artificial Sequence
  ENSG00000211448_26 (sequence is synthesized)
aaataaaaaacctggttgcagcacattcacactgttgtccttaaaattccccttttttctctatgtacgataaagtaacagtatgtcagataagccggtggggggatgagattaggctga

SEQ ID NO: 752284 - DNA, 120 bp, Artificial Sequence
  ENSG00000211448_27 (sequence is synthesized)
ggcagtgctagtcaactggggaaaaggatgatggaaaaatcacccagttgtgctatatttttaaagaaggaggtcgtttatgtgtgcagacaattctccctgaggttagcccaatggaga

SEQ ID NO: 752285 - DNA, 120 bp, Artificial Sequence
  ENSG00000211448_28 (sequence is synthesized)
aatgaagcagaggaaggaaacatagaaagacatgggctatcagggaggaagatgttcaatagaacatgcaagaatttctggaagaaaggctgtggaagggccaatggagaaaatgaatgg

SEQ ID NO: 752286 - DNA, 120 bp, Artificial Sequence
  ENSG00000211448_29 (sequence is synthesized)
acaaagctcaggaatcctacgctatgtagaatgtcttggtgttatcagggttaagcctgtaattatgtaacctatttatcgcaacatgaatttttatgatttcttgtgatgtattctttt

SEQ ID NO: 752287 - DNA, 120 bp, Artificial Sequence
  ENSG00000211448_30 (sequence is synthesized)
atgaaattaacaagaactcattattttgaggtagaggaaaatcaatgctttatctgatatgctgagaaattattagattgccaatactcatgtgcgtttcatgtgttttataaggtttgt

SEQ ID NO: 752288 - DNA, 120 bp, Artificial Sequence
  ENSG00000211448_31 (sequence is synthesized)
tcctttgaagaattgtagttcttagtcccacagggaaatgtgtatctatttatatatcatagtataaatctatgatatatttatatcatatataaaagtctgagttctctttcttagtcc

SEQ ID NO: 752289 - DNA, 120 bp, Artificial Sequence
  ENSG00000211448_32 (sequence is synthesized)
ctaatcatgtttctcccataggctgtgtttacatggagctatcggtttagccttttaagcttcattagcttgtctattattgaaatagtttccaagaaattttagatattatcataacat

SEQ ID NO: 752290 - DNA, 120 bp, Artificial Sequence
  ENSG00000211448_33 (sequence is synthesized)
ctgggtctactcaaacacttattgtttgaaagacttatgtcttggacctatcaaaaactgactttatttattgcttagtgaaaatactagtgggatcaacaatgattttcttgaatgggc

SEQ ID NO: 752291 - DNA, 120 bp, Artificial Sequence
  ENSG00000211448_34 (sequence is synthesized)
atgaatggagatgcccgcacagtaatgtagaaatgtttcatacagctattaaaatgtaactgacctccttagaggcagattagtaactgttcctactttgtatagctaagtgacagtcac

SEQ ID NO: 752292 - DNA, 120 bp, Artificial Sequence
  ENSG00000211448_35 (sequence is synthesized)
ttaacttacatgactttcttttttcacattgggtctctggtcctgtgtcttcacctcatttatagcacgtctccttgatttttggtagtatcaacttcccagtgatctgttcagttaagt

SEQ ID NO: 752293 - DNA, 120 bp, Artificial Sequence
  ENSG00000211448_36 (sequence is synthesized)
tcttctcccgttaaccaggaagtgcttattctctcatcacagtgggaagaatagcctattgtctttcattttgcctgagtgtattttactatttgggctctgaaataaaaattatgaaat

SEQ ID NO: 752294 - DNA, 120 bp, Artificial Sequence
  ENSG00000211448_37 (sequence is synthesized)
atggtgaggtcacatgttggtgctgccttgctgcataaaattctagagggcaggttagagacagtatgtatgccttcgggaaaattcaaaggtggattacaaggtgtcctcagcatgccc

SEQ ID NO: 752295 - DNA, 120 bp, Artificial Sequence
  ENSG00000211448_38 (sequence is synthesized)
tatggcctatgtgcgaagcaagaagaattgactgatttacaggacttctctttatgtcaatcttaagaggatggatgaatctggacatttgttccacccgacctctgactgatggtttgg

SEQ ID NO: 752296 - DNA, 120 bp, Artificial Sequence
  ENSG00000211448_39 (sequence is synthesized)
aaaataactttaattaggatcatatgaccattgaaaaaggaaaaatgtagactctgacttccgtcccactgaaggattaatgaaaacctttactagcatttagagcttttcagaacatcc

SEQ ID NO: 752297 - DNA, 120 bp, Artificial Sequence
  ENSG00000211448_40 (sequence is synthesized)
ccactgtcatgtgtctcagcagtggagactgcaagtaaggcttttaattttaggaggtttttttttttttttttttttccctaaatggtatggccaaaagtcagagttaaaatatatata

SEQ ID NO: 752298 - DNA, 120 bp, Artificial Sequence
  ENSG00000211448_41 (sequence is synthesized)
gttagattccaacttcctccttcactctaaaaatagaatccaaacccactcttcatatatgcttccagaatggggcttaagtaccaatctctgctttgcaatgggcacaatcttggtcat

SEQ ID NO: 752299 - DNA, 120 bp, Artificial Sequence
  ENSG00000211448_42 (sequence is synthesized)
gtcctgaggctctctaagaaaagagaggatctaggatgggagagctagaaagttgctaactgggaagaacaaggccctgagggcttggtctaccaatctgggaagatttgaaaacaaact

SEQ ID NO: 752300 - DNA, 120 bp, Artificial Sequence
  ENSG00000211448_43 (sequence is synthesized)
tctcgcaactgaaggaaggctgaaggctgctgcaagtcattgagtgactttaggatgagcaaaacattgggccacttcctaatgccctatgtgtatagtaccagaagcaaggtctcagac

SEQ ID NO: 752301 - DNA, 120 bp, Artificial Sequence
  ENSG00000211448_44 (sequence is synthesized)
ttaacagacccagctctgttccaaggtgagtctgaaccaatagaaagcaaacatgtgcagatatccaaacaagactgctcatgcaagtcggggctggctacccgtcttaggcagcaacag

SEQ ID NO: 752302 - DNA, 120 bp, Artificial Sequence
  ENSG00000211448_45 (sequence is synthesized)
cagagctccagggagcttattcaatatttactgagacttcgaagacccagcagatgtttaatgaagtcactattttggctcaaaccctccacttctccccctcccctcaaaaagccaaca

SEQ ID NO: 752303 - DNA, 120 bp, Artificial Sequence
  ENSG00000211448_46 (sequence is synthesized)
ggtaaacacataaatgaaagaaacccacagaaggggatgggaaataaagaaaattctctcaagacttctccaggcccatgtcactggtcagcgtggtttttatgtgtattaggattgggg

SEQ ID NO: 752304 - DNA, 120 bp, Artificial Sequence
  ENSG00000211448_47 (sequence is synthesized)
gatgtgaagaaataagtatccagtactttataaccaaagcaattaaatgatattgggtagggaatgttggccagttttgtttagttttgcatcacattgtcaccagactcactagcccaa

SEQ ID NO: 752305 - DNA, 120 bp, Artificial Sequence
  ENSG00000211448_48 (sequence is synthesized)
gtaatcgggcgcccgaagagggagacagagatgtgcagagttgaccagtgtgcggatgataactactgacgaaagagtcatcgactcagttagtggttggatgtagtcacattagtttgc

SEQ ID NO: 752306 - DNA, 120 bp, Artificial Sequence
  ENSG00000211448_49 (sequence is synthesized)
ctctccccatctttgtctccctggcaaggagaatatgcgggacatgatgctaagagtcctgggtaaatgtggtgagaatgcacgcgtgcatatgctacacatatgtgcttctcagttgca

SEQ ID NO: 752307 - DNA, 120 bp, Artificial Sequence
  ENSG00000211448_50 (sequence is synthesized)
gaaaatgaactgctttgggagattatcagtagaaagagtgttatcatattggtgctgagtgctatgtgtgcttatacaatttgttcttgtattttaataaactttgaataaaagaataaa

SEQ ID NO: 752308 - DNA, 62 bp, Artificial Sequence
  ENSG00000211448_51 (sequence is synthesized)
cctcccagcctacatctttcttccagactgactgtccttgctcctcaagcttgcagacagcc

SEQ ID NO: 752309 - DNA, 120 bp, Artificial Sequence
  ENSG00000211448_52 (sequence is synthesized)
ttgcagacagcctattgtgggacgttgtgatcattaggtagcctggaaaaaaaagagaagcaacagttcctgagggaagaatgcattaacaactcggatgggtgctgtctgccagcactg

SEQ ID NO: 752310 - DNA, 120 bp, Artificial Sequence
  ENSG00000211448_53 (sequence is synthesized)
ctacaaacagctaaattgtcctccatcaggttttagcaaagatggacacattttatgactagtatatgaagcttataaaagcagactactggtctactcacatttggatttatggatggt

SEQ ID NO: 752311 - DNA, 120 bp, Artificial Sequence
  ENSG00000211448_54 (sequence is synthesized)
ctgagatgagatgagctctctcccttatgtggagaagtccttttaggaatctgccatgtttaaatgtgtggcatgggggaaaggaatatggctaataatcactatgcaaaataagaaatg

SEQ ID NO: 752312 - DNA, 120 bp, Artificial Sequence
  ENSG00000211448_55 (sequence is synthesized)
aaaggtgtgaccctttctgcagatgtgaggactttggacttgggccggaactacacatcagctctcctgggcctctagcttgccaactacggacactgtgacttttcagccatcacaatt

SEQ ID NO: 752313 - DNA, 120 bp, Artificial Sequence
  ENSG00000211448_56 (sequence is synthesized)
catgctgacctcagagggactgcgctgcgtctggaagagcttcctcctcgatgcctacaaacagactgacagtgttgtacttactctaaatttcccaaggcaaattagtctgtgttttgg

SEQ ID NO: 752314 - DNA, 120 bp, Artificial Sequence
  ENSG00000211448_57 (sequence is synthesized)
gcagagagaggcactttgcaccacagacagatagcaagaagggaaagacagagagtgagaaaaaagaggagtcagtcgctcctggggaagggagagagtgagactgggagaaagagaagc

SEQ ID NO: 752315 - DNA, 120 bp, Artificial Sequence
  ENSG00000211448_58 (sequence is synthesized)
cacatttaaaaaaaaaaaaaactctggcaattcaagaaagaaacaggctacgtttaaagagcatagagacaatgaaaggctaaagaaaattttaaaatctctgccacagtctcataggtg

SEQ ID NO: 752316 - DNA, 120 bp, Artificial Sequence
  ENSG00000211448_59 (sequence is synthesized)
cttggaaatgaaagtagaactgcctgtctttaacggactctgacagagagggtgaaggggaaccagagcgcacaagggaactgactcaggaggcagagaagatgggcatcctcagcgtag

SEQ ID NO: 752317 - DNA, 120 bp, Artificial Sequence
  ENSG00000211448_60 (sequence is synthesized)
aaagtgcttgcaattgcatagagcaaagagcatgctgaacagtgatgttccagtttaaaaggacagagctgcaaacaaaggactttggacttgggccggaactacacatcagctctcctg

SEQ ID NO: 752318 - DNA, 120 bp, Artificial Sequence
  ENSG00000211448_61 (sequence is synthesized)
gaggagcagctggttgatccaggagagacagggaggcgctgagatgagatgagctctctcccttatgtggagaagtccttttaggaatctgccatgtttaaatgactttggacttgggcc

SEQ ID NO: 752319 - DNA, 120 bp, Artificial Sequence
  ENSG00000211448_62 (sequence is synthesized)
ggaactacacatcagctctcctgggcctctagcttgccaactacggacactgtgacttttcagccatcacaattgttatttagggagaaagaagagattgagtcacagtttcagaaaaga

SEQ ID NO: 752320 - DNA, 120 bp, Artificial Sequence
  ENSG00000211450_0 (sequence is synthesized)
attctcggccgggctctaggcgccatggctccccgcgggaggaagcgtaaggctgaggccgcggtggtcgccgtagccgagaagcgagagaagctggcgaacggcggggagggaatggag

SEQ ID NO: 752321 - DNA, 120 bp, Artificial Sequence
  ENSG00000211450_1 (sequence is synthesized)
gaggcgaccgttgttatcgagcattgcactagctgacgcgtctatgggcgcaacgccgcggccctgagccaggcgctgcgcctggaggccccagagcttccagtaaaggtgaacccgacg

SEQ ID NO: 752322 - DNA, 120 bp, Artificial Sequence
  ENSG00000211450_2 (sequence is synthesized)
aagccccggaggggcagcttcgaggtgacgctgctgcgcccggacggcagcagtgcggagctctggactgggattaagaaggggcccccacgcaaactcaaattccctgagcctcaagag

SEQ ID NO: 752323 - DNA, 120 bp, Artificial Sequence
  ENSG00000211450_3 (sequence is synthesized)
ttgatcttggtgtggctacaagtacccacctggcgtgggtagctcacgcctgcaatcccagcactctgggaggtcgaggcaggagtggatggccaacacagggagaccctatttgaaaac

SEQ ID NO: 752324 - DNA, 120 bp, Artificial Sequence
  ENSG00000211450_4 (sequence is synthesized)
aaaaaacaaaaaaaagacacaatattgttttctgtctagtgtgccctaagtggaatttatgtcctttgggagactgtagttgacttgccctgggggtatggacaagttttccatttggaa

SEQ ID NO: 752325 - DNA, 120 bp, Artificial Sequence
  ENSG00000211450_5 (sequence is synthesized)
gtttatttcatgttacttcatttatgcttatccctaccctcttctgtttggttcttgggtgttctgttactgtcctgtgttaacactgcattacaataccattaaatttggttacaagga

SEQ ID NO: 752326 - DNA, 120 bp, Artificial Sequence
  ENSG00000211450_6 (sequence is synthesized)
agaaatgaaggttcagttatgaggcaaccctctagtaaggcattgtaaaagttactggatttggtttaataaaagttgaaataaagtatttgagtaatagagtaaaacttaatcttaagg

SEQ ID NO: 752327 - DNA, 120 bp, Artificial Sequence
  ENSG00000211450_7 (sequence is synthesized)
gatggacaaagccagccttgtggagttggtagtccttgtgtttttcatagcccaagatagccatgtgacctggaacttttaaaaaaaaatttttttttaagagccagagtctcactttgt

SEQ ID NO: 752328 - DNA, 120 bp, Artificial Sequence
  ENSG00000211450_8 (sequence is synthesized)
ttaagagccagagtctcactttgtcacccatgctggagtatagtggtgctatctcggctcactgcaaccattgtctcccaggttcaagcgatactcctgcctcagtctcctgagtagctg

SEQ ID NO: 752329 - DNA, 120 bp, Artificial Sequence
  ENSG00000211450_9 (sequence is synthesized)
ttacaggcatgatgagccaccgcacctggcctgacctgcaacttttatgatctctggtaaaacatgagaaatacttgtaaaaattatgggagcaaagtaaataatttattttttaaaaaa

SEQ ID NO: 752330 - DNA, 120 bp, Artificial Sequence
  ENSG00000211450_10 (sequence is synthesized)
aaaagattgcgcgaagcgaggctagcagtcggacctagtctccgccccttcctgctgtgttcaccatcccagcgtcccctgtcccctccacccgaagcgatgggtggttccgtcaggcgc

SEQ ID NO: 752331 - DNA, 120 bp, Artificial Sequence
  ENSG00000211450_11 (sequence is synthesized)
ttcccgcaccttcccgctccctgcttgcaaagtggttgtgccccaaggtccgcctccaggccacgtgggtgctgcgggccaagctttcccttcctttgagagaggtttccgctgtaggag

SEQ ID NO: 752332 - DNA, 120 bp, Artificial Sequence
  ENSG00000211450_12 (sequence is synthesized)
ttgaagaagtacctgtcgtagggagatttgggtagaagccctcatgctgagctttgtgtccctggtgatgttggaacattaatgatggaacatggccaaacttcagtcatgatcctgaag

SEQ ID NO: 752333 - DNA, 120 bp, Artificial Sequence
  ENSG00000211450_13 (sequence is synthesized)
gacctggatgtgggggagagggacgtgggtgaaagggacgtgggttccgaagacaggaagcgctattcttagaaaccacggcagtctcatgacttcagagacgtgctcgtgggttccgaa

SEQ ID NO: 752334 - DNA, 120 bp, Artificial Sequence
  ENSG00000211450_14 (sequence is synthesized)
ttggcatgttgttctgcacttattatgttgagtgagatttggaggaaggatgcaatccttgagcttcagggtttgtgagttcaagggttggggaacatgtcttcctcagtccttaagatt

SEQ ID NO: 752335 - DNA, 120 bp, Artificial Sequence
  ENSG00000211450_15 (sequence is synthesized)
ccgttgttatcgagcattggtgaggggcctggagagtaacgggagagagggaacagtggcgccggggggggccaggggccccggtttctaacctctccgtctctccctagcactagctga

SEQ ID NO: 752336 - DNA, 120 bp, Artificial Sequence
  ENSG00000211452_0 (sequence is synthesized)
agagcttactctggctttgccgagatggggctgccccagccagggctgtggctgaagaggctctgggtgctcttggaggtggctgtgcatgtggtcgtgggtaaagtgcttctgatattg

SEQ ID NO: 752337 - DNA, 120 bp, Artificial Sequence
  ENSG00000211452_1 (sequence is synthesized)
tttccagacagagtcaagcggaacatcctggccatgggcgagaagacgggtatgaccaggaacccccatttcagccacgacaactggataccaacctttttcagcacccagtatttctgg

SEQ ID NO: 752338 - DNA, 120 bp, Artificial Sequence
  ENSG00000211452_2 (sequence is synthesized)
ttcgtcttgaaggtccgttggcagcgactagaggacacgactgagctagggggtctggccccaaactgcccggtggtccgcctctcaggacagaggtgcaacatttgggagtttatgcaa

SEQ ID NO: 752339 - DNA, 120 bp, Artificial Sequence
  ENSG00000211452_3 (sequence is synthesized)
ggtaataggccactggtgctgaattttggaagttgtacctgaccttcatttatgttcaaatttgaccagttcaagaggcttattgaagactttagttccatagcagattttcttgtcatt

SEQ ID NO: 752340 - DNA, 120 bp, Artificial Sequence
  ENSG00000211452_4 (sequence is synthesized)
tacattgaagaagcacatgcatcagatggctgggcttttaagaacaacatggacatcagaaatcaccagaaccttcaggatcgcctgcaggcagcccatctactgctggccaggagcccc

SEQ ID NO: 752341 - DNA, 120 bp, Artificial Sequence
  ENSG00000211452_5 (sequence is synthesized)
cagtgccctgtggtggtggacaccatgcagaaccagagcagccagctctacgcagcactgcctgagaggctctacataatccaggagggcaggatcctctacaagggtaaatctggccct

SEQ ID NO: 752342 - DNA, 120 bp, Artificial Sequence
  ENSG00000211452_6 (sequence is synthesized)
tggaactacaacccagaggaagttcgtgctgttctggaaaagctccacagttaatctggacagatacctcaattctaggtgaccaacgggagggcttctcaaggcttagctctccctgag

SEQ ID NO: 752343 - DNA, 120 bp, Artificial Sequence
  ENSG00000211452_7 (sequence is synthesized)
gatctaagcaaacaactcccagctgaggaatgcaggccacagcacccaatcaagacaaattgttattatcagaaaatgaagcaacacttgagctgttcaggccagttccctgttgaagaa

SEQ ID NO: 752344 - DNA, 120 bp, Artificial Sequence
  ENSG00000211452_8 (sequence is synthesized)
acagttccctgttgaagaaagtagagcctgacactgctcccactttggagaccacattccctgcacacggtctttgagagagcagttgcactctacaggcacacttctgaggtacggtat

SEQ ID NO: 752345 - DNA, 120 bp, Artificial Sequence
  ENSG00000211452_9 (sequence is synthesized)
ctctctccagccactctgataccaagtaattcaagctggcattccttctattagggaaattcattttacccaatttgcatttatggaattgatcatttaagacactaaattagtttttag

SEQ ID NO: 752346 - DNA, 120 bp, Artificial Sequence
  ENSG00000211452_10 (sequence is synthesized)
aaccaattatgggaagaattccagttgttaggaagagatgaggagttggaagaggagggattagaaacaggaggaggcagtcatcctctccttgccaaaagatttaaacctgtccacatt

SEQ ID NO: 752347 - DNA, 120 bp, Artificial Sequence
  ENSG00000211452_11 (sequence is synthesized)
ggtggtgatgatgggtgagtttccatggtaacacatccctaattttaccagggaagaggagagtactcactttaccatctttgaatatatttcatagaaatctagctctctgtaccctga

SEQ ID NO: 752348 - DNA, 120 bp, Artificial Sequence
  ENSG00000211452_12 (sequence is synthesized)
aatcttccactagcctcacttttcaacagagtcatctagaagggagggttggcttcccaaaagcataaccttgaccaaaccaaacaataggcaccagcaatgctgtcattcagttatgca

SEQ ID NO: 752349 - DNA, 120 bp, Artificial Sequence
  ENSG00000211452_13 (sequence is synthesized)
gaagctcatttgtgaaattctgtttctctgatttcttcgcaagtctcttaatggtcatttgtgttagattacatcaaactgatggatagccattggtattcatctattttaactctgtgt

SEQ ID NO: 752350 - DNA, 120 bp, Artificial Sequence
  ENSG00000211452_14 (sequence is synthesized)
ctttacatatttgtttatgatggccacagcctaaagtacacacggctgtgacttgattcaaaagaaaatgttataagatgcagtaaactaataacagaattattaaaatatatcaggcta

SEQ ID NO: 752351 - DNA, 120 bp, Artificial Sequence
  ENSG00000211452_15 (sequence is synthesized)
gatacagacatgaggaaggtgggggtcaggtgtcacgtcccccagtgttgcatggcagctgtccccatcccgggctcgcagtgccatagtgcaattcgccaagtgactgagggtggggga

SEQ ID NO: 752352 - DNA, 120 bp, Artificial Sequence
  ENSG00000211452_16 (sequence is synthesized)
tccagacagagtcaagcggaacatcctggccatgggcgagaagacgggtccgttggcagcgactagaggacacgacgctagggggtctggccccaaactgcccggtggtccgcctctcag

SEQ ID NO: 752353 - DNA, 120 bp, Artificial Sequence
  ENSG00000211455_0 (sequence is synthesized)
gcggtccgtgcggaggctgagccggccgcgggcgcgaccggaggcagtttccgttactatggcaatgacggcagggactacaacaacctttcctatgagcaaccatacccgggaaagagt

SEQ ID NO: 752354 - DNA, 120 bp, Artificial Sequence
  ENSG00000211455_1 (sequence is synthesized)
gactgtagccaagctcacattggagaatttttatagcaacctaattttacagcatgaagagagagaaaccaggcagaagaaattagaagtggccatggaagaagaaggattagcagatga

SEQ ID NO: 752355 - DNA, 120 bp, Artificial Sequence
  ENSG00000211455_2 (sequence is synthesized)
agagaaaaagttacgtcgatcacaacacgctcgcaaagaaacagagttcttacggctcaaaaggaccagacttggcttggatgactttgagtctctgaaagttataggaagaggagcttt

SEQ ID NO: 752356 - DNA, 120 bp, Artificial Sequence
  ENSG00000211455_3 (sequence is synthesized)
tggagaggtgcggttggtccagaagaaagatacaggccatatctatgcaatgaagatattgagaaagtctgatatgcttgaaaaagagcaggtggcccatatccgagcagaaagagatat

SEQ ID NO: 752357 - DNA, 120 bp, Artificial Sequence
  ENSG00000211455_4 (sequence is synthesized)
tttggtagaagcagatggtgcctgggtggtgaagatgttttacagttttcaggataagaggaatctttatctaatcatggaatttctccctggaggtgacatgatgacattgctaatgaa

SEQ ID NO: 752358 - DNA, 120 bp, Artificial Sequence
  ENSG00000211455_5 (sequence is synthesized)
gaaagacaccttgacagaagaggaaacacagttctacatttcagagactgttctggcaatagatgcgatccaccagttgggtttcatccatcgggatattaagccagacaaccttttatt

SEQ ID NO: 752359 - DNA, 120 bp, Artificial Sequence
  ENSG00000211455_6 (sequence is synthesized)
ggatgccaagggtcatgtaaaattatctgattttggtttatgtacgggattaaagaaagctcacaggactgaattttatagaaatctcacacacaacccaccaagtgacttctcatttca

SEQ ID NO: 752360 - DNA, 120 bp, Artificial Sequence
  ENSG00000211455_7 (sequence is synthesized)
gaacatgaactcaaagaggaaagcagaaacttggaagaagaacaggagacaactggcatattccacagttgggacaccagattacattgctccagaagtattcatgcagactggttacaa

SEQ ID NO: 752361 - DNA, 120 bp, Artificial Sequence
  ENSG00000211455_8 (sequence is synthesized)
caaattgtgtgactggtggtctttgggagtgattatgtatgaaatgctaataggatatccacctttctgctctgaaacacctcaagaaacgtacagaaaagtgatgaactggaaagaaac

SEQ ID NO: 752362 - DNA, 120 bp, Artificial Sequence
  ENSG00000211455_9 (sequence is synthesized)
tctggtatttcctccagaggtacctatatctgagaaagccaaggacttaattctcagattttgtattgattctgaaaacagaattggaaatagtggagtagaagaaataaaaggtcatcc

SEQ ID NO: 752363 - DNA, 120 bp, Artificial Sequence
  ENSG00000211455_10 (sequence is synthesized)
cttttttgaaggtgtcgactgggagcacataagggaaaggccagcagcaatccctatagaaatcaaaagcattgatgatacttcaaattttgatgacttccctgaatctgatattttaca

SEQ ID NO: 752364 - DNA, 120 bp, Artificial Sequence
  ENSG00000211455_11 (sequence is synthesized)
accagtgccaaataccacagaaccggactacaaatccaaagactgggtttttctcaattatacctataaaaggtttgaagggttgactcaacgtggctctatccccacctacatgaaagc

SEQ ID NO: 752365 - DNA, 120 bp, Artificial Sequence
  ENSG00000211455_12 (sequence is synthesized)
tgggaagttatgaatgaagataacattcacccataaccaagagaactcaggtagctgcatcaccaggcttgcttggcgtagataacaatacactgaaatactcctgaagatggtggtgct

SEQ ID NO: 752366 - DNA, 120 bp, Artificial Sequence
  ENSG00000211455_13 (sequence is synthesized)
tattgactacaagaggaaattctacaggattaggatttctaagactactataggaattggttggcagtgccagctggctcttttttttaatattttattatttttgttaactttattata

SEQ ID NO: 752367 - DNA, 120 bp, Artificial Sequence
  ENSG00000211455_14 (sequence is synthesized)
tgaaggtactggaataaaaggaacagacatccctttctaactgcactgcctacatgcgtattaaggtccattctgcctgtgtgtgctgtggctttgaactgtaacacctctaatcaattc

SEQ ID NO: 752368 - DNA, 120 bp, Artificial Sequence
  ENSG00000211455_15 (sequence is synthesized)
aggagaaacacatatcatttaaagcaacataggctaacctgtaggtaacactgcagtattgatgttttactgcaaatcttatgggtctagataatcagtaaaagccatcttccatagttg

SEQ ID NO: 752369 - DNA, 120 bp, Artificial Sequence
  ENSG00000211455_16 (sequence is synthesized)
gtgttagaacattgccctattggtttggacatctgtagaatatatatgaagacaatttctgtaatggttttaagagatttaaaaagaaattcactggttctttacaaaatagaatttatc

SEQ ID NO: 752370 - DNA, 120 bp, Artificial Sequence
  ENSG00000211455_17 (sequence is synthesized)
atcaagttattacacaaacttcacagtaaggagtgacaagtttataataaggaagacaaagtttaacaccttcactcaagcactccactaatatatttacgttgcattcagaaatactga

SEQ ID NO: 752371 - DNA, 120 bp, Artificial Sequence
  ENSG00000211455_18 (sequence is synthesized)
tgaccttcatatacgtagtctgtatactcatagggagatgtactgtattatataacatgtaaagttgattttcttgtgacaagagaacttctttttttaacaagaggacatggcattatt

SEQ ID NO: 752372 - DNA, 120 bp, Artificial Sequence
  ENSG00000211455_19 (sequence is synthesized)
ttaatttgattatggtgagttgaatttaagacatgaccatgaaggctgcttgtagaattagtgtatttttattaaactatttttttaaatgtcaaacttctatcatgtaaatggacttat

SEQ ID NO: 752373 - DNA, 120 bp, Artificial Sequence
  ENSG00000211455_20 (sequence is synthesized)
gttgttacatatcatggctggttaacttttatttcttttgatgaaaatttttcctttgatagtacttgtattattgtgccattattttcttatgctccaaatgtaccaaagatcttgaac

SEQ ID NO: 752374 - DNA, 120 bp, Artificial Sequence
  ENSG00000211455_21 (sequence is synthesized)
agagtggatgttcacaactgagtagaattttcctttcctgtgggcatgctgtattcagacctgacagatctttgatagaggtcagcttattaaagggcaatattgttcttgtttagctac

SEQ ID NO: 752375 - DNA, 120 bp, Artificial Sequence
  ENSG00000211455_22 (sequence is synthesized)
atcactgtggtgaatatagatggaattaaggaagtaaatgcaggccagggggttgtgatgagaggataggggagataatatcagcatcaaattctttgggtatctctctaagaattaaat

SEQ ID NO: 752376 - DNA, 120 bp, Artificial Sequence
  ENSG00000211455_23 (sequence is synthesized)
aatcttttctagcttaatattttaattctaattcaaacaactctgaggttttggtttcattagtaatagttgaggaataatatactagcaaagaatggcctaatgtttgtcataactgtt

SEQ ID NO: 752377 - DNA, 120 bp, Artificial Sequence
  ENSG00000211455_24 (sequence is synthesized)
aatggatgaaattttttaaagatacaaccatgataaccattataaatgatctatgatcaaaatctaaagtgatgaattatttgtaggaatgtcttcctaatggggaagaattgcatagga

SEQ ID NO: 752378 - DNA, 120 bp, Artificial Sequence
  ENSG00000211455_25 (sequence is synthesized)
gcattatgcaaatctacacaagcttttataaatgttgctgctgggtagctccacagtgtttcataaggccatcctgtttcccccaactcccccatttttggtttgtttctttttaaatat

SEQ ID NO: 752379 - DNA, 120 bp, Artificial Sequence
  ENSG00000211455_26 (sequence is synthesized)
ttgttgagtacttacgtgtttatctaacagttcacttccatttttctagtctggattttttgagtatttaggaaagagagctattaaaaactggggatttctcaatgtgactaactctaa

SEQ ID NO: 752380 - DNA, 120 bp, Artificial Sequence
  ENSG00000211455_27 (sequence is synthesized)
tttttctaattataactgcctttaattaacataatattaacttttgctgaggtttatgagattttctcaccccacatcgctcccctttttttaaaaaggactgttttgctagtgtgataa

SEQ ID NO: 752381 - DNA, 120 bp, Artificial Sequence
  ENSG00000211455_28 (sequence is synthesized)
tgaataggtaagatatgagataattgcaacattgtctagttctagtatggtaactattcttgaaatggtattgaaaaataccgttaattcaaattgacagagattgataaaaagaaactg

SEQ ID NO: 752382 - DNA, 120 bp, Artificial Sequence
  ENSG00000211455_29 (sequence is synthesized)
atttacctaagtttactttttaattgcataatagagcattttttgttttgagttccctcattcttattaccagaaagagcttgcaaatagttttactttcttggcactggaagggtagtt

SEQ ID NO: 752383 - DNA, 120 bp, Artificial Sequence
  ENSG00000211455_30 (sequence is synthesized)
ctggaaagctactttgttgagagtctcattcttccctggagttaatagagtgattcacaatctttggggttttctcctcatcaaaagcatttcttaagtgcctatctaaaagcaattaaa

SEQ ID NO: 752384 - DNA, 120 bp, Artificial Sequence
  ENSG00000211455_31 (sequence is synthesized)
gactgtgtctgccctttagaagctaagaatttgattcatgatgcaaattaactagataatttgcaaagtacccttgagattgaattttctctattatatatttcccatatttcaggtgaa

SEQ ID NO: 752385 - DNA, 120 bp, Artificial Sequence
  ENSG00000211455_32 (sequence is synthesized)
taatttaatttaaatgacaaaaccctatctagtcaactgggcataatgacattttctttaaattagactctattttgaattaaaagagttttattataaaccgtgtgtttttggtttttc

SEQ ID NO: 752386 - DNA, 120 bp, Artificial Sequence
  ENSG00000211455_33 (sequence is synthesized)
taagtatatagaaagcttgtataattcagatttatcaatttcctgatttaatgtagactttgacttttttattaaaaacctttgtattaaagcaagttatgttatttttcttttatgcat

SEQ ID NO: 752387 - DNA, 120 bp, Artificial Sequence
  ENSG00000211455_34 (sequence is synthesized)
ttattactaacatagctttaaatctttaaatgtattgaagcattgtgctgtctgaaaataaggaattgcttataaaccagccacttctgaatacaatatgtagctgatttaataagctag

SEQ ID NO: 752388 - DNA, 120 bp, Artificial Sequence
  ENSG00000211455_35 (sequence is synthesized)
ttagtgaatggaaaataagtgtggagtattaaaaatgttctttggttggtaaggcctaagatagggtttcatttatttctatactttttctgttttttaaacacctgcatatttttatgt

SEQ ID NO: 752389 - DNA, 120 bp, Artificial Sequence
  ENSG00000211455_36 (sequence is synthesized)
aaatctctaaatttaaaatattttaagtacatttatttttggtgttttattgtataaaaccttagacaatcaatcagtcagtctttactgacaggagcagcagctatctgtcttttgctg

SEQ ID NO: 752390 - DNA, 120 bp, Artificial Sequence
  ENSG00000211455_37 (sequence is synthesized)
atctacaaataaatgaattgagaatttagtccatagaggtccctggctaccaaacacattctcctttgaattgttaaaattcagaacattcaaaataactgttttgctacaacccatgat

SEQ ID NO: 752391 - DNA, 120 bp, Artificial Sequence
  ENSG00000211455_38 (sequence is synthesized)
tattttcctgttgtgtttatttaaatttactttctctttagaagtgcacttatttctgaaaaatcttaatgaaacaaacgcttagaacaaatataaatatgagacacttgggactactag

SEQ ID NO: 752392 - DNA, 120 bp, Artificial Sequence
  ENSG00000211455_39 (sequence is synthesized)
agatattttagatttttatgaaaaaaatgtgaggggatattgctgctttaaaaaggaataaagtaataaaaatatatctcagctatttttttaaagcaatataattcagcaattgtctag

SEQ ID NO: 752393 - DNA, 120 bp, Artificial Sequence
  ENSG00000211455_40 (sequence is synthesized)
aaaagtaatcatgaggctactgagtttggtgttcagttactgagtttcaaaaatgttttggtggcatgaggacaaaatttcattgaaggtaagataagaataaaaactatgtttacaaaa

SEQ ID NO: 752394 - DNA, 120 bp, Artificial Sequence
  ENSG00000211455_41 (sequence is synthesized)
cttaaataatgtggattttatcatttgaatatgggcttctttgttgctgtcatggatatcttttattgatatctttagaaggaggcagttttgtttttttcttaaattccaagaacacgt

SEQ ID NO: 752395 - DNA, 120 bp, Artificial Sequence
  ENSG00000211455_42 (sequence is synthesized)
atttaagagaacattgccaagtgtattttaggtgtgtggaatgagaaaggcaagctccgggaggaattaatcaatcgttagcttttctaaaattttttctaaatattcttttaaagctat

SEQ ID NO: 752396 - DNA, 120 bp, Artificial Sequence
  ENSG00000211455_43 (sequence is synthesized)
acggcagtgaggtgaggctggtgagaggggaagtggcgacagttcagtcaactccctcaaaaccagtctggccttcaccaggcggagatgggtggggccgggaagacgggcgttgacgac

SEQ ID NO: 752397 - DNA, 120 bp, Artificial Sequence
  ENSG00000211455_44 (sequence is synthesized)
tgttaaatacatactgatcaataccagtgagctccccacggatcctgtttcaggaaggtgggtatttaacccaaactcccacgtataaaagtggttatctacatagcttttcaggtaaaa

SEQ ID NO: 752398 - DNA, 120 bp, Artificial Sequence
  ENSG00000211455_45 (sequence is synthesized)
ggggaggcagtgctttcaatcctttattttattgactttattagcaacgtgattgtaaattgatgaatggtggcatttttgactgttaaatagagcactcagggttgtttggtttcttgt

SEQ ID NO: 752399 - DNA, 120 bp, Artificial Sequence
  ENSG00000211455_46 (sequence is synthesized)
agggcagcctgctcgacaaggccccttggcagacagtcagctccctccaaggccaaaccccaagttcaacatacatctttctctcccatttctgcaagcataactgtgaacagcataatt

SEQ ID NO: 752400 - DNA, 120 bp, Artificial Sequence
  ENSG00000211455_47 (sequence is synthesized)
gctgtgagtggaatagaaacttgtttaccatgaatgatatgaatattatggatccctgcatgctgtttttgagtttcctgtactgacagtgcacatagacatgtgttttattttcacaga

SEQ ID NO: 752401 - DNA, 120 bp, Artificial Sequence
  ENSG00000211455_48 (sequence is synthesized)
atacccgtatgacatgccaattaacgttttaaacaaaccttttccaaacatgaaattatgatatgtctttacattttcttttaaagggatgcctggcttggtgtggtgtggctcatgcct

SEQ ID NO: 752402 - DNA, 120 bp, Artificial Sequence
  ENSG00000211455_49 (sequence is synthesized)
gtgcggaggctgagccggccgcgggcgcgaccggaggcaggcatctgaatttcatttgaaaatgaaatgggctgcacagtctggagaagtgtactataccttgttatagcacgttttgga

SEQ ID NO: 752403 - DNA, 120 bp, Artificial Sequence
  ENSG00000211455_50 (sequence is synthesized)
attgtatgtgaattagccacccttgtgactatttgaggagagagaagttagtctaaaatattatgttaaattatgatattacataattttattgcataagttcatcaaactacttccatc

SEQ ID NO: 752404 - DNA, 120 bp, Artificial Sequence
  ENSG00000211456_0 (sequence is synthesized)
agagttgtagccgaggtggcggcgcggggcggggcgggcggagagagaaggaaggaggtggttgtgcaggatggcgacggcggcctacgagcagctgaagctgcatatcacacctgaaaa

SEQ ID NO: 752405 - DNA, 120 bp, Artificial Sequence
  ENSG00000211456_1 (sequence is synthesized)
attttatgtggaagcttgtgatgatggagcagatgacgtacttaccattgaccgtgtgtccacagaggttacccttgcagtcaagaaagatgttcctccttcagctgtcacaagaccaat

SEQ ID NO: 752406 - DNA, 120 bp, Artificial Sequence
  ENSG00000211456_2 (sequence is synthesized)
atttggtatactgggcacaatccatctggtggcaggtaattatcttatagtcattaccaaaaagataaaagtaggtgaatttttcagtcatgtagtctggaaagcaacagattttgatgt

SEQ ID NO: 752407 - DNA, 120 bp, Artificial Sequence
  ENSG00000211456_3 (sequence is synthesized)
cctttcttataagaagacaatgttgcacttaactgatattcagttacaagataataaaaccttcctagcgatgctaaaccatgtcttgaatgtggatggattttacttttcaacaacata

SEQ ID NO: 752408 - DNA, 120 bp, Artificial Sequence
  ENSG00000211456_4 (sequence is synthesized)
tgatttgacccatactttgcagcggctatccaacactagtcctgaattccaagaaatgagtctcttggaaagggcagatcagcggtttgtatggaatggtcatcttctaagagaactttc

SEQ ID NO: 752409 - DNA, 120 bp, Artificial Sequence
  ENSG00000211456_5 (sequence is synthesized)
tgcacagccagaggttcatcggtttgcccttccagtgttacatggctttattaccatgcattcatgttctattaatggaaaatactttgattggattctcatctcgaggaggagctgttt

SEQ ID NO: 752410 - DNA, 120 bp, Artificial Sequence
  ENSG00000211456_6 (sequence is synthesized)
cagagctggtgtgcgctattatgtaagaggaattgattcggaaggccatgcagctaactttgtagaaacagaacaaattgtgcactacaatgggagcaaagcttcgtttgtacagactcg

SEQ ID NO: 752411 - DNA, 120 bp, Artificial Sequence
  ENSG00000211456_7 (sequence is synthesized)
aggatcaatacctgttttctggtcccaaagaccaaacctcaagtacaaaccactgccacagatcagcaaagtagcaaatcacatggacggtttccaaaggcattttgattcccaagtaat

SEQ ID NO: 752412 - DNA, 120 bp, Artificial Sequence
  ENSG00000211456_8 (sequence is synthesized)
tatttatggaaaacaagttataatcaatctgattaaccagaagggctcggagaagccacttgagcagacatttgcaacaatggtgtcttccttgggaagtggaatgatgagatacattgc

SEQ ID NO: 752413 - DNA, 120 bp, Artificial Sequence
  ENSG00000211456_9 (sequence is synthesized)
ctttgacttccataaggaatgtaaaaatatgagatgggatcgactaagtattttattggatcaggtagcagaaatgcaagatgaattaagttattttctagtggactctgctggccaggt

SEQ ID NO: 752414 - DNA, 120 bp, Artificial Sequence
  ENSG00000211456_10 (sequence is synthesized)
ggtggcaaaccaggaaggcgtgttccgaagcaattgcatggattgtctagatagaaccaatgtgatccagagtttgttagctcgtcgttcacttcaggcccaacttcagagactaggagt

SEQ ID NO: 752415 - DNA, 120 bp, Artificial Sequence
  ENSG00000211456_11 (sequence is synthesized)
tttgcatgtgggacaaaagcttgaagaacaagatgaatttgagaagatttacaaaaatgcctgggctgacaacgcaaatgcttgtgccaagcaatatgcgggaactggtgccttgaagac

SEQ ID NO: 752416 - DNA, 120 bp, Artificial Sequence
  ENSG00000211456_12 (sequence is synthesized)
tgactttaccagaactggaaagagaactcatttgggacttataatggatggctggaactcaatgatacgatattataagaacaacttttccgatggatttagacaagattccatagactt

SEQ ID NO: 752417 - DNA, 120 bp, Artificial Sequence
  ENSG00000211456_13 (sequence is synthesized)
atttcttggaaactattcagtggatgaattagaatctcatagtcctttaagtgttccaagggactggaaattcctggctttgcctattatcatggttgttgccttttcaatgtgcattat

SEQ ID NO: 752418 - DNA, 120 bp, Artificial Sequence
  ENSG00000211456_14 (sequence is synthesized)
tacaatggcaaagattttgtcgatgctcccagactggtccagaaagaaaagatagactgaatttgtatttgtggaaagcggcttggcttggaagattccattgtgcagaactggagtctt

SEQ ID NO: 752419 - DNA, 120 bp, Artificial Sequence
  ENSG00000211456_15 (sequence is synthesized)
tactgacccgctttccacatcagcccaaggtctttttaatgcctttatccaaaagcacatcttgtgctccatgcaggatgatgacagaattgatctgatgttactgccttgatggtctct

SEQ ID NO: 752420 - DNA, 120 bp, Artificial Sequence
  ENSG00000211456_16 (sequence is synthesized)
ttactattgggacagttagatttataatttgaagctattctgtaattaaaatataacctgaattcagcttgcagaatggaagctgaatctgttcattgtattctattgattgtcaattta

SEQ ID NO: 752421 - DNA, 120 bp, Artificial Sequence
  ENSG00000211456_17 (sequence is synthesized)
attagctgttgcagaataagtaatatattttaaaaacctagctcctttcattatttaaaacagcaaaattatttttgtagctcagtttcattattgtcattgtagaagcggtcactatta

SEQ ID NO: 752422 - DNA, 120 bp, Artificial Sequence
  ENSG00000211456_18 (sequence is synthesized)
gcaggcatacttttccacacatctttggacttttcttaaaagttcagtaataagctaactgtgtttataaaatgtaagtctcttacagacatcaagtagtttgatgagacagtctgtgac

SEQ ID NO: 752423 - DNA, 120 bp, Artificial Sequence
  ENSG00000211456_19 (sequence is synthesized)
ttcatgataggaaagaggaggatgaggtctggggttctttaaagtctctggtgggctgcctcatgactttaatcagcttgaactgccagtgcaccagcagtttaggtgtgatgagagaat

SEQ ID NO: 752424 - DNA, 120 bp, Artificial Sequence
  ENSG00000211456_20 (sequence is synthesized)
tcagatatactttatctttttaaaaaagtgtaaataaaatcaaagaatgtaaagtctatctcttacgctagaggtccaaagctgcctctgttttaaagattatcccaatgtggaagatgc

SEQ ID NO: 752425 - DNA, 120 bp, Artificial Sequence
  ENSG00000211456_21 (sequence is synthesized)
ccatgactggtcagctacttcctcctatacattttggtttctttgagggtcactcattgagacacgcaggcctctgagagggtcttgttctagatttcatattgcacttggagggtaaca

SEQ ID NO: 752426 - DNA, 120 bp, Artificial Sequence
  ENSG00000211456_22 (sequence is synthesized)
gctgctttttcacgcatggtactcttgatgtttttcactctgtcaaggattttgttggctatcaatgaatgtgtctaaaacttagtgcttccaggtagttatagtactccaaatcaagga

SEQ ID NO: 752427 - DNA, 120 bp, Artificial Sequence
  ENSG00000211456_23 (sequence is synthesized)
ccaacttaaacgttaatttttgtgcaaaaacaaacctgaaaaatatgcttcggaaactgtgcatagttctaattgtaagtcagattgtatattcaaattgtaattaagagatttaaatat

SEQ ID NO: 752428 - DNA, 120 bp, Artificial Sequence
  ENSG00000211456_24 (sequence is synthesized)
tagaacggtatgtaaggtagtataattaccactattttaaataattcagttaaacactgctgcaatatttcagtgttgtgcttgaaaatatgtacagtttttttccaatattaatacctt

SEQ ID NO: 752429 - DNA, 120 bp, Artificial Sequence
  ENSG00000211456_25 (sequence is synthesized)
atgttgtccttaaatatttctaaaagcgcctttatttcagcattacctttttttcatcactatcttttataaaacattaatataagtcgttacttttagaaactaaaggaaataatagct

SEQ ID NO: 752430 - DNA, 120 bp, Artificial Sequence
  ENSG00000211456_26 (sequence is synthesized)
ggaaaaccctctgtagtttaaaatcagtcattaaactcacaatagggtaagtaaatatagccacctgttaacatgtaaataagcataatttgttccaaagatggaatattgaaacttagt

SEQ ID NO: 752431 - DNA, 120 bp, Artificial Sequence
  ENSG00000211456_27 (sequence is synthesized)
tcatgtctgctgtaaaatattatttaaatgctgctgggcatttcacttaaagaacttaatgtcaacagctacaacaaagaccaaatctgaactgctaatgtggctgctttgtagggaatg

SEQ ID NO: 752432 - DNA, 120 bp, Artificial Sequence
  ENSG00000211456_28 (sequence is synthesized)
gactaatatcagtgtgttagatcttaaggtatcagtatttcagaatcctgcgacgattttatttctaaattcatgtactgtatgtccataagtgaaaataaaatgtcatattcttttcta

SEQ ID NO: 752433 - DNA, 120 bp, Artificial Sequence
  ENSG00000211456_29 (sequence is synthesized)
actccaacccgccgcgtcggcggcatctctcgcgtgctcttgcttgcgcactaatttgtcctccaccgcctcccgttcaggccggctctcctgcggggcggggaaaggggtgggaagagg

SEQ ID NO: 752434 - DNA, 120 bp, Artificial Sequence
  ENSG00000211456_30 (sequence is synthesized)
ctggggagaggagggtgagggtgttgtggaatacaaagaatgctataattattttaacaacctatagagtaagatcactctacctacttttctacctaggcataaaaaatattttttaaa

SEQ ID NO: 752435 - DNA, 120 bp, Artificial Sequence
  ENSG00000211456_31 (sequence is synthesized)
tcatttgttgctcttgtttttttttttttaaagattcagttcttaaattatgcaatttcatatggagagaagggaaaacagaaatgcacgggtactcaacaccagatttaacttcatatc

SEQ ID NO: 752436 - DNA, 120 bp, Artificial Sequence
  ENSG00000211456_32 (sequence is synthesized)
ctctttgtaaagaaataaaatataaatacctttgaagttctactcctcttaactcattcccttctttcccagagaggttttctctatttttaccacatgtgaatgtaagtgtgtgtgtgt

SEQ ID NO: 752437 - DNA, 120 bp, Artificial Sequence
  ENSG00000211456_33 (sequence is synthesized)
acaggcacgcaccaccacgcccagctaaaagtatttttaatgcaaaatattcaatccttgcctcagagattctgattcagttgatctcaaggccaggaatcttttttcacaagcaaccca

SEQ ID NO: 752438 - DNA, 120 bp, Artificial Sequence
  ENSG00000211456_34 (sequence is synthesized)
cccagaggattctaaagatagtatatgaatcataaagccctgacatctagggatatagttggaataattatgttagaggaaaccctcatctggctttgggaaacatgattgatttgcaca

SEQ ID NO: 752439 - DNA, 120 bp, Artificial Sequence
  ENSG00000211456_35 (sequence is synthesized)
gcaacctttttaatactcttaactttactttttcacatctttggggtgagatgatctctaatcttcagccattttttggatggagggctgtcttgcctcagccatttagacttctttttg

SEQ ID NO: 752440 - DNA, 120 bp, Artificial Sequence
  ENSG00000211456_36 (sequence is synthesized)
gtctaggataatcacatatgcctgaccacacattcctgtctgaccttttaatttacagtttttaataatgtcactgaaatgagacccatgttataagagttaagtccttagtaaatctga

SEQ ID NO: 752441 - DNA, 120 bp, Artificial Sequence
  ENSG00000211456_37 (sequence is synthesized)
agaaacaattctaatttaactgtttataacttacaaacttggatcaggtctaccctgtcacatcattctaggttgaagaagcctaactattttactctgatcttctatagaagccttaaa

SEQ ID NO: 752442 - DNA, 120 bp, Artificial Sequence
  ENSG00000211456_38 (sequence is synthesized)
ttcttagttagaatgttgacctttcttttacaacatcttaagtttttgagttcaccgaacacttgatgtttccctattaaatttaatgggtaaagtggatgtgacattagattgtcatta

SEQ ID NO: 752443 - DNA, 120 bp, Artificial Sequence
  ENSG00000211456_39 (sequence is synthesized)
gatgtgacaggaagaaaaataacatacctagtagtttgatggttgtcgttttttttaacctcagattttaaaaacatgtttttcttattactgtaaaccaatgagtgtctgagacaggtc

SEQ ID NO: 752444 - DNA, 120 bp, Artificial Sequence
  ENSG00000211456_40 (sequence is synthesized)
ttccaagaaatgagtctcttggaaaggatcagcggtttgtatggaatggtcatcttctaagagaactttctgcacagccagaggttcatcggtttgcccttccagtgttacatggctgta

SEQ ID NO: 752445 - DNA, 120 bp, Artificial Sequence
  ENSG00000211456_41 (sequence is synthesized)
tagaagactgggggtaagagggagggaggaagtagcggctggaatcctatagcagctttcactctctcttctgaccctctccctgagtatagtcctgctgctatccctcaagggagtgcg

SEQ ID NO: 752446 - DNA, 120 bp, Artificial Sequence
  ENSG00000211456_42 (sequence is synthesized)
ggggctgcaaggcaaaggtgccctcaggagaggctttgcagtctgccctgggcaggagagggctgctgtgagctggggccccctatagacaacagacatttctggcctgcatccagcaac

SEQ ID NO: 752447 - DNA, 120 bp, Artificial Sequence
  ENSG00000211456_43 (sequence is synthesized)
taagagagatacaggggatcttggtacatggataatggagaaatgaggggccagggccaagtttcctggccaaggggagagctcttttttgtcttcctttggggatgagactcccttcag

SEQ ID NO: 752448 - DNA, 120 bp, Artificial Sequence
  ENSG00000211456_44 (sequence is synthesized)
ggtaaatagatgtgtctaattgctttatttcttgtcatttgctatgctttttttggaaaagtagtttgagctgcaaacaattagcatgggatatcttttccctggaggagtgaagttgtt

SEQ ID NO: 752449 - DNA, 120 bp, Artificial Sequence
  ENSG00000211456_45 (sequence is synthesized)
gtaggcaaagactgaaaaggaggtaaacattctgtaacttcatgtagctttattagtgttccaaaatctgtgaatattcaagctcaaatgattgtaatgcatacttaatgttacattaga

SEQ ID NO: 752450 - DNA, 120 bp, Artificial Sequence
  ENSG00000211456_46 (sequence is synthesized)
atgcatacttaatgttacattagagaaatcttttaaaaattatattacccataagtttactaccttgttatgtttgtatattacctccctatgtgtaaatatttttatataatgcttatt

SEQ ID NO: 752451 - DNA, 120 bp, Artificial Sequence
  ENSG00000211456_47 (sequence is synthesized)
aatatatatcttcatttcaggttcatcggtttgcccttccagtgttacatggctttattaccatgcattcatgttctattaatggaaaatactttgattggattctcatctcgaggagga

SEQ ID NO: 752452 - DNA, 120 bp, Artificial Sequence
  ENSG00000211456_48 (sequence is synthesized)
gtgcgggccctggcctcggggagggcttctgagtcccggattgcagatagggtgtgggagctcctcgcatttaccggttttcctcagccggcgcggcctctcctaggcctcgcccgagta

SEQ ID NO: 752453 - DNA, 120 bp, Artificial Sequence
  ENSG00000211456_49 (sequence is synthesized)
gccataggccgggaaccagcggctcgccggcctttctccaccgtgctcggccccagcgcccacggctgaagagagaagctgccgactggcccccaccgagccggggtcggcgttatgatg

SEQ ID NO: 752454 - DNA, 120 bp, Artificial Sequence
  ENSG00000211456_50 (sequence is synthesized)
cggcccttcagggcacgcttgtccccactttctatgcagagctaccgactaaatttatctgtatgacttaacagagaaaaagagttttctcttacttaacggacctacagcagcaattta

SEQ ID NO: 752455 - DNA, 120 bp, Artificial Sequence
  ENSG00000211456_51 (sequence is synthesized)
gagtctacgcacaaatcaacaaatctttgttttgcttacagcctatctgggtaccgaagcctgcctgccccctcttcagtgtgcagaaaaaatttaaagtacagtcagtagtcttaaggt

SEQ ID NO: 752456 - DNA, 120 bp, Artificial Sequence
  ENSG00000211456_52 (sequence is synthesized)
cctgaaggagtttactttggtttaaattttaaacagctccagcctaaagcaggttcttaagtcagtgtcgacagccagaggctaatctcggtaattttggtactgcaaattgacttttcg

SEQ ID NO: 752457 - DNA, 120 bp, Artificial Sequence
  ENSG00000211456_53 (sequence is synthesized)
gtaaatccaagttcttgagtctttgatacagaggctgtggttgttaagagttataaaataggtgtttttaagggttttggtttgtcttggattaaaaacaacatgtgtttatttccctta

SEQ ID NO: 752458 - DNA, 120 bp, Artificial Sequence
  ENSG00000211456_54 (sequence is synthesized)
gtgttacccattagcatccacacttttcttgtctgtgaataattttgttgtactcacttcgtgtttaatgctttacccctaggctgtttgaaaatctggtggccacagcctgggaatatc

SEQ ID NO: 752459 - DNA, 120 bp, Artificial Sequence
  ENSG00000211456_55 (sequence is synthesized)
attgcgccactggccccgacttgctaaagccttctccgtgatagctgatcacccttatacagtttgaacgggcttccgggctgtttgaaaatctggtggccacagcctgggaatatctgg

SEQ ID NO: 752460 - DNA, 120 bp, Artificial Sequence
  ENSG00000211460_0 (sequence is synthesized)
ggtcgtggcgtaagaccggggggacgcggcggtagcggcggccgttgcgattgattgcgctggttgcctgcggcgtccacttccttggccgcccttgctacactggctgattgttgtgca

SEQ ID NO: 752461 - DNA, 120 bp, Artificial Sequence
  ENSG00000211460_1 (sequence is synthesized)
gccggcgccatgtctgtgagcgagatcttcgtggagctgcagggctttttggctgccgagcaggacatccgagaggaaatcagaaaagttgtacagagtttagaacaaacagctcgagag

SEQ ID NO: 752462 - DNA, 120 bp, Artificial Sequence
  ENSG00000211460_2 (sequence is synthesized)
attttaactctactgcaaggggtccatcagggtgctgggtttcaggacattccaaagaggtgtttgaaagctcgagaacattttggtacagtaaaaacacatctaacatctttgaagacc

SEQ ID NO: 752463 - DNA, 120 bp, Artificial Sequence
  ENSG00000211460_3 (sequence is synthesized)
aaatttcctgctgaacagtattacagatttcatgagcactggaggtttgtgttgcagcgcttggtcttcttggcagcatttgttgtgtatttggaaacagaaacactagtgactcgagaa

SEQ ID NO: 752464 - DNA, 120 bp, Artificial Sequence
  ENSG00000211460_4 (sequence is synthesized)
gcagttacagaaattcttggcattgagccagatcgggagaaaggatttcatctggatgtagaagattatctctcaggagttctaattcttgccagtgaactgtcgaggctgtctgtcaac

SEQ ID NO: 752465 - DNA, 120 bp, Artificial Sequence
  ENSG00000211460_5 (sequence is synthesized)
agcgtgactgctggagactactcccgacccctccacatctccaccttcatcaatgagctggattccggttttcgccttctcaacctgaaaaatgactccctgaggaagcgctacgacgga

SEQ ID NO: 752466 - DNA, 120 bp, Artificial Sequence
  ENSG00000211460_6 (sequence is synthesized)
ttgaaatatgacgtgaagaaagtagaggaagtggtctatgatctctccatccggggctttaataaggagacggcagcagcttgtgttgaaaaataggaggctctccttgctcctggcctt

SEQ ID NO: 752467 - DNA, 120 bp, Artificial Sequence
  ENSG00000211460_7 (sequence is synthesized)
gctgacctcagcggttgccaggaaggggtgagcacagagtgcctcttacggtagttaggatgctcagttgctaaacactgcgctttattttcttaaccagttgtggtgtgagtatcagaa

SEQ ID NO: 752468 - DNA, 120 bp, Artificial Sequence
  ENSG00000211460_8 (sequence is synthesized)
ttgaaacacttttttgggggtaaaaaatatagcctttacatggacagaattttttttgttgtttcagtgaatatgcctgtaattcagtgtatttcagttccgtcagaaagtgtaaatgtt

SEQ ID NO: 752469 - DNA, 120 bp, Artificial Sequence
  ENSG00000211460_9 (sequence is synthesized)
agtttcttggtaaagtccttttcttgcttaccttgactgttgatgtactgattgagaagttcattgtctcgtttgtgattcttccagatgtgatgcttgatattttctatatgcgagtta

SEQ ID NO: 752470 - DNA, 120 bp, Artificial Sequence
  ENSG00000211460_10 (sequence is synthesized)
gccatccacacccaggcatagcctggatacagtataaaaatagataattaaaaagatggttgccaagcaaggaaaacttattttatattttcccttccttattttaagcattgtgagtaa

SEQ ID NO: 752471 - DNA, 120 bp, Artificial Sequence
  ENSG00000211460_11 (sequence is synthesized)
atcagatgttgaattcttttgccaagggaattatagctgcaggttctctctcactgccatcaaactgtaaaagattaaactgcgaagtcaagctcaacagattattttggaaagtttttg

SEQ ID NO: 752472 - DNA, 120 bp, Artificial Sequence
  ENSG00000211460_12 (sequence is synthesized)
tattaagggatttagtaacatcattttgttttccaccaggcagggagtagggcttagtgttttaaaacacctctgctttctgatgttgccttaatattctgctattgcagcaattaaaaa

SEQ ID NO: 752473 - DNA, 120 bp, Artificial Sequence
  ENSG00000211460_13 (sequence is synthesized)
tttcctagtagtcagctagatcatttgttctgggagtataaagccacccacgtaagttaataagcaaaatcctgactattatgttgttagagaaaaatgctttgctttgtctggaagaaa

SEQ ID NO: 752474 - DNA, 63 bp, Artificial Sequence
  ENSG00000211460_14 (sequence is synthesized)
agagaaaaatgctttgctttgtctggaagaaagataaaatagtgaattataaataaaggggga

SEQ ID NO: 752475 - DNA, 120 bp, Artificial Sequence
  ENSG00000211460_15 (sequence is synthesized)
ggcaacaaagtgagactccatctctatataaaaacaaaaaccacgaaagcacacacaaaataaatcagtgggatttggtaatgtgttttagagtaagaaatttcaggttgttggtgacta

SEQ ID NO: 752476 - DNA, 120 bp, Artificial Sequence
  ENSG00000211460_16 (sequence is synthesized)
tcccaacagtcatgttttaaatgtacagtttggggcaagtcatgtaaatactgttggtggtcttccccacacgccccaattttcaggtagtactaagagtatgtgccaggaaactcttgc

SEQ ID NO: 752477 - DNA, 120 bp, Artificial Sequence
  ENSG00000211460_17 (sequence is synthesized)
tattgaattgagatgattaaaatggtgacttaatccgtagttattttgcacccactgaaaggaaagtgctttccagaataatatgaagtatctaaaagtgtcaccttttcttgcctgatc

SEQ ID NO: 752478 - DNA, 120 bp, Artificial Sequence
  ENSG00000211460_18 (sequence is synthesized)
aacaatttgggcttcctgtttgtacaaggggccatttggcatacctttcacagcttttatcaggccaagttaaaggctgactacattttttcatcatgaggaaagcagttgaaatgaggc

SEQ ID NO: 752479 - DNA, 120 bp, Artificial Sequence
  ENSG00000211460_19 (sequence is synthesized)
atgagttactgtgcattgggattttagaacaattttcttgtgacagctctttttgtgaagttaggttcttaaaagtgcccatgatggtcacttaaaatgtgcagtaatagcactgccagg

SEQ ID NO: 752480 - DNA, 120 bp, Artificial Sequence
  ENSG00000211460_20 (sequence is synthesized)
atcaagcatgaaaggcttttaaattagatcatcccacagacaatacgtttgataatagttttttcttttaacctctttaagtattgattctgcttgagaatattgaagtacttgccagaa

SEQ ID NO: 752481 - DNA, 120 bp, Artificial Sequence
  ENSG00000211460_21 (sequence is synthesized)
gttgtggatttcagttttaacaaatgctattaaagtggagaagcacactctggtcttggaattccatttgaggatttagaagtgtcatgtttataactattcagttgtgtttgttgctgg

SEQ ID NO: 752482 - DNA, 120 bp, Artificial Sequence
  ENSG00000211460_22 (sequence is synthesized)
cttgttgtaaagcaataaaatttttttggtctttttgtaagtgagtgtgctgctgtaagaaatctcccatgtgcataacaaattctgaatattttttgaggctaaagaagaccggggtga

SEQ ID NO: 752483 - DNA, 120 bp, Artificial Sequence
  ENSG00000211460_23 (sequence is synthesized)
caagcagatactgctgtgtaatggttacactaaccaaaagacaccagccactcagagttctatactgtaaagcgcagataacatttgtgtgttataccttgattggggaattaaaagtca

SEQ ID NO: 752484 - DNA, 120 bp, Artificial Sequence
  ENSG00000211460_24 (sequence is synthesized)
tttaactgaagatgttgagaaacctgggctctggttttagtataccggaattacttttttccaattttagaaaatcaagcaggttagagaaaatagagatgaattaggggacactgtctt

SEQ ID NO: 752485 - DNA, 120 bp, Artificial Sequence
  ENSG00000211460_25 (sequence is synthesized)
atggattcatttataagaagagaaccagccatatacacttggggagatttgccacatcttaaacttgaataatagtatgagtaatgcttaagggagtttaatagagaaggaaagctttgg

SEQ ID NO: 752486 - DNA, 120 bp, Artificial Sequence
  ENSG00000211460_26 (sequence is synthesized)
cagtgttttgagaacttaagtggctaaagagatgagacaaacatgcaggtcgctactggcatagtttcataattgtgtactcggaaattaaagtttgcttgtttcttggtctggattaaa

SEQ ID NO: 752487 - DNA, 120 bp, Artificial Sequence
  ENSG00000211460_27 (sequence is synthesized)
ctgcaaggggtccatcagggtgctgggtttcaggacagtaagttctttgttttgtatccaattatcagtctcttatttagagggagagtttctatccagaagacattttataatgaaaaa

SEQ ID NO: 752488 - DNA, 120 bp, Artificial Sequence
  ENSG00000211460_28 (sequence is synthesized)
tgcctagttgggccacttcgcccggccctcctctgtcgctcagtctcgggcggtggggacgcctccgagggaaatcagaaaagttgtacagagtttagaacaaacagctcgagagatttt

SEQ ID NO: 752489 - DNA, 120 bp, Artificial Sequence
  ENSG00000211460_29 (sequence is synthesized)
cacttccacacagtatggtttaaacagagatgttttctattgcgagggcattctactgatgataattacaattgcttaacccatttcctgtttagaaaaaaaaagtgcagctctctgcca

SEQ ID NO: 752490 - DNA, 120 bp, Artificial Sequence
  ENSG00000211460_30 (sequence is synthesized)
ttaaaagcacatgtgatctgcttaaaactctcctgtgatttcctatgccacacaggataaaaaatcagactctactgtggctcacatggtttctcttcaatctcgtttatgctctctgtc

SEQ ID NO: 752491 - DNA, 120 bp, Artificial Sequence
  ENSG00000211460_31 (sequence is synthesized)
tttgtgtatgatgttcactttacctcttctagtgccccaaatagcttcctgcctgtttgcttttcctggaatttgcttctttcccgttcttttcctgattgtctcgtatttatctcattg

SEQ ID NO: 752492 - DNA, 120 bp, Artificial Sequence
  ENSG00000211460_32 (sequence is synthesized)
gcgtcacagtctaagcgatctatttcctgttatgttttctagtagcacattaactttttttaatgtgtgtaatattgattattttaaaaaaatcttctccctcattgtatgttaaaccgc

SEQ ID NO: 752493 - DNA, 120 bp, Artificial Sequence
  ENSG00000211460_33 (sequence is synthesized)
cagagggaagggattgtgtgcttggttccccggtatttacacagtgcctcgcacataagtatgctcagtgaatattttaaaaatgaattagaggcggggagcggcgcctcatgcctgtaa

SEQ ID NO: 752494 - DNA, 120 bp, Artificial Sequence
  ENSG00000211460_34 (sequence is synthesized)
acgaggtcgtgccgagagactgggagaggcgtgagtcgcgcggaggcgcgacatggggcgtgacgaggagcggagggcggggcgaaatcagaaaagttgtacagagtttagaacaaacag

SEQ ID NO: 752495 - DNA, 120 bp, Artificial Sequence
  ENSG00000211584_0 (sequence is synthesized)
cctgtgactctcggccgcgctcgccctcggcccgcccggcgccgcagccccatggccccgtccaggctgcagctcggcctccgcgccgcctactccggcatcagctccgtggccggcttc

SEQ ID NO: 752496 - DNA, 120 bp, Artificial Sequence
  ENSG00000211584_1 (sequence is synthesized)
ctccgtggccggcttctccatcttcctcgtctggacggtggtctaccgacagccggggaccgcggccatgggagggctcgcaggggtgctggcactgtgggtcctggtgacgcacgtgat

SEQ ID NO: 752497 - DNA, 120 bp, Artificial Sequence
  ENSG00000211584_2 (sequence is synthesized)
gtacatgcaagattattggaggacctggctcaaggggctgcgcggcttcttcttcgtgggcgtcctcttctcggccgtctccatcgctgccttctgcaccttcctcgtgctggccatcac

SEQ ID NO: 752498 - DNA, 120 bp, Artificial Sequence
  ENSG00000211584_3 (sequence is synthesized)
ccggcatcagagcctcacagaccccaccagctactacctctccagcgtctggagcttcatttccttcaagtgggccttcctgctcagcctctatgcccaccgctaccgggctgactttgc

SEQ ID NO: 752499 - DNA, 120 bp, Artificial Sequence
  ENSG00000211584_4 (sequence is synthesized)
tgacatcagcatcctcagcgatttctgacccagggggtgaggtctctgcaccctgggggggccttaggacctggactcagcctctgagatgttgggagaggctactcccaccccctggtg

SEQ ID NO: 752500 - DNA, 120 bp, Artificial Sequence
  ENSG00000211584_5 (sequence is synthesized)
accccagaactgtggcagaaaatacacagcaggacgagtgtggtctcccaggaagctgtcctgcccgtcccctttcgaggaaacctgagtgtggtagagaggggatcctgccatgttgct

SEQ ID NO: 752501 - DNA, 88 bp, Artificial Sequence
  ENSG00000211584_6 (sequence is synthesized)
aaacctgagtgtggtagagaggggatcctgccatgttgctcctcatcagcctggccagagggcagctttagaccttttcaaatgaatc

SEQ ID NO: 752502 - DNA, 120 bp, Artificial Sequence
  ENSG00000211584_7 (sequence is synthesized)
accgtgcccggcctggatctgttttcttagcacgcagtgaggaatctttgtacttaaggccagggcaacaaagtcaagaggtcaaggtgtagggccatgaggcctggacctatgctgcag

SEQ ID NO: 752503 - DNA, 120 bp, Artificial Sequence
  ENSG00000211584_8 (sequence is synthesized)
gcaagggtttccatccccgctgccctaggcactctcttcccaaggccaggttgggcacctggggaggtcagttcagaaatatctagcagagacctcttaaacccccatcccagcacccca

SEQ ID NO: 752504 - DNA, 120 bp, Artificial Sequence
  ENSG00000211584_9 (sequence is synthesized)
tcctgttgttcccagagctggtctcccatgagtgtgctagagccagatagccgtggccccccacccatctcactcacacacacaggcatccatacaccccagaagacttcccaaatgagg

SEQ ID NO: 752505 - DNA, 120 bp, Artificial Sequence
  ENSG00000211584_10 (sequence is synthesized)
ccatgcccctccagccctgcgtttccattctgccttctcagagtgcccttgctgcacccagaccaccggccaggagagaccttctctcccactccagcccctctcactgcccttcaacta

SEQ ID NO: 752506 - DNA, 120 bp, Artificial Sequence
  ENSG00000211584_11 (sequence is synthesized)
gagctttcacctttttacatttcccttctgaaggacacaaatctgcttttctgcccatacactggcccaagggctcacctaacttgggagggaaggggctgttggtacaaggatgatttt

SEQ ID NO: 752507 - DNA, 120 bp, Artificial Sequence
  ENSG00000211584_12 (sequence is synthesized)
ctgttagactgccattttgcacggtctcccccttcccatctgatgtgtcctgcccctcagctctttgccttatctgtgtcactgtcactttagcaaaaatacagcggccatttgtatcag

SEQ ID NO: 752508 - DNA, 120 bp, Artificial Sequence
  ENSG00000211584_13 (sequence is synthesized)
cctctggtggttgcttgtgaggtgggactcttgcgggaacaggtggactttgggaggagtgggcagggagggagtggtagtggcagttctcgagctatctgattaagccattccgctagt

SEQ ID NO: 752509 - DNA, 120 bp, Artificial Sequence
  ENSG00000211584_14 (sequence is synthesized)
tcagttgtgccctggagggcaggggacagagtcagtatctctggggctgcaggccctcttgccttggccctcctggcatggggtaaccaccagctcagctctcctcctccagctttcctc

SEQ ID NO: 752510 - DNA, 120 bp, Artificial Sequence
  ENSG00000211584_15 (sequence is synthesized)
tctctagcacaccccagccagggcaaggatgcccacgggcatagctacagcaacccctgcgggatttggtgtccacacccgagaggccaggccagatgggaaagggattagcgcctcttc

SEQ ID NO: 752511 - DNA, 120 bp, Artificial Sequence
  ENSG00000211584_16 (sequence is synthesized)
cctcacactctgccaggctgccaggagcttgggccaggtctaaggtaatgaggtgctcctcttcctgctggaaaaaccggacagactcagaaccacaaaggcaggtgctgccagcctggc

SEQ ID NO: 752512 - DNA, 120 bp, Artificial Sequence
  ENSG00000211584_17 (sequence is synthesized)
gccttcctctctgcttaggctgggtgagcttgtccaggcctgtgcctcaccccttctctcttctaggctcagtgtatgcttaatcaggcatggtgcatcagagcgggaaggagccatcaa

SEQ ID NO: 752513 - DNA, 120 bp, Artificial Sequence
  ENSG00000211584_18 (sequence is synthesized)
cagtgtatacttctggagccttctactgataaacagaggccccagaagacgatttgacttacctgagctcccagctgggacttaaacccaggtgtgtctgagtcacaactcttcggggat

SEQ ID NO: 752514 - DNA, 120 bp, Artificial Sequence
  ENSG00000211584_19 (sequence is synthesized)
gccgtggtgagctggggctgagctcctgtattcccactcccccaccccacccccactcctgccatatcagggctggtctctgtggactcagcccagggctgcctcctctttgtcacccca

SEQ ID NO: 752515 - DNA, 120 bp, Artificial Sequence
  ENSG00000211584_20 (sequence is synthesized)
aagtggggcagccagggacagccagggtgtgttcagaatgggttcttcctgcagggcaggaagggcagattgttaaaggggctgcggcccagaccaccctggtccctcctccggcagtga

SEQ ID NO: 752516 - DNA, 120 bp, Artificial Sequence
  ENSG00000211584_21 (sequence is synthesized)
ctcagacccacactgtgccgtgcagctgtgtgccctgcacacccgcttgacggcgcactgctcacttctggggggccctttcagaggcacttttaaagcaaataaaacatttattgttca

SEQ ID NO: 752517 - DNA, 120 bp, Artificial Sequence
  ENSG00000211584_22 (sequence is synthesized)
actcaggggttgggtggccctggagtcttcatggctggacctcctcatcctgcaaaaccaactcaggcagtttgggaagagccctgcaggccttgtgactttgagactgtggcctctgag

SEQ ID NO: 752518 - DNA, 120 bp, Artificial Sequence
  ENSG00000211584_23 (sequence is synthesized)
ggaggagcatggggcaggagcatggcttccctgctctgtggccctcagggtagacagtggcaagtccccagaaagcaggctgggctgctgaggcacagactttctggttttcaggatcct

SEQ ID NO: 752519 - DNA, 120 bp, Artificial Sequence
  ENSG00000211584_24 (sequence is synthesized)
aggtcagagaatggccctagtccatgagcactgaggaagggactttaaggaatccctctcattttgacaaggaaagcaaaagcccagagagatcacacaactatttagaaaggtaggaac

SEQ ID NO: 752520 - DNA, 120 bp, Artificial Sequence
  ENSG00000211584_25 (sequence is synthesized)
agaaagagctgtcttcagacttcttctctgggaggttgatgggttttccccttggctttcgaagagggaggtctggcctcaataactggcagtgctgtcttcctgggactcgggctccac

SEQ ID NO: 752521 - DNA, 120 bp, Artificial Sequence
  ENSG00000211584_26 (sequence is synthesized)
catgctcacagctggcactcattccctcacggaagccttccctgggctaaaggcatcatcaagaggtatatgatgggcctccccatgtggatccttagtgctgtggcagagcccttgtta

SEQ ID NO: 752522 - DNA, 120 bp, Artificial Sequence
  ENSG00000211584_27 (sequence is synthesized)
ttgtgctgggattttccctccagctcccggccggaagctgggctcacgtgggagctcagtgccctcctgctacagatctgtctcttccttacaatggggtgctggcactgtgggtcctgg

SEQ ID NO: 752523 - DNA, 120 bp, Artificial Sequence
  ENSG00000211584_28 (sequence is synthesized)
agaagagggagtggccgcctgcctctaaacactaaaaatctaagttccctctagtcaccaacgcccacctggcacggaaaggccttgttttggtgcctttgaccccatttacactccagc

SEQ ID NO: 752524 - DNA, 120 bp, Artificial Sequence
  ENSG00000211584_29 (sequence is synthesized)
aacctttacccccacctttctggccttcccctgcacaccagcccttcatttctgggggctgtggagagtcaggagacagcttggtggcctcctccactccctcccagacttcaggtccca

SEQ ID NO: 752525 - DNA, 120 bp, Artificial Sequence
  ENSG00000211584_30 (sequence is synthesized)
ggagatcctccagtgacctattgtcctggcacctgaccttctccctaccccctaccttgcttccacaagctgggaaggggacaggaaatgcacaaataattatagcccaagagggaagga

SEQ ID NO: 752526 - DNA, 120 bp, Artificial Sequence
  ENSG00000211584_31 (sequence is synthesized)
gggagggagggttccagcccactggctccaggcaatagctacagccagtgacccggagagcggagagccggagagccagaggggtagcggaggaggacccaggctcatgataaggaagac

SEQ ID NO: 752527 - DNA, 120 bp, Artificial Sequence
  ENSG00000211584_32 (sequence is synthesized)
cgtaggggaagggggccggcactggcaggctttggagtccgcacccgggggtaccagagtggacatccgcctgagcccagagtatccccagggggcaggagcggccccgaagtgtgtgga

SEQ ID NO: 752528 - DNA, 120 bp, Artificial Sequence
  ENSG00000211584_33 (sequence is synthesized)
ggaggccgcaacggccggggtgtcagggatccggcggtcatctgctgtgtccacacattaagaaacgctggtggagttttaaatgcctctccggggaaggaggaaagcctgagaatgaat

SEQ ID NO: 752529 - DNA, 120 bp, Artificial Sequence
  ENSG00000211592_0 (sequence is synthesized)
gaactgtggctgcaccatctgtcttcatcttcccgccatctgatgagcagttgaaatctggaactgcctctgttgtgtgcctgctgaataacttctatcccagagaggccaaagtacagt

SEQ ID NO: 752530 - DNA, 120 bp, Artificial Sequence
  ENSG00000211592_1 (sequence is synthesized)
ggaaggtggataacgccctccaatcgggtaactcccaggagagtgtcacagagcaggacagcaaggacagcacctacagcctcagcagcaccctgacgctgagcaaagcagactacgaga

SEQ ID NO: 752531 - DNA, 120 bp, Artificial Sequence
  ENSG00000211592_2 (sequence is synthesized)
ctcgcccgtcacaaagagcttcaacaggggagagtgttagagggagaagtgcccccacctgctcctcagttccagcctgaccccctcccatcctttggcctctgaccctttttccacagg

SEQ ID NO: 752532 - DNA, 120 bp, Artificial Sequence
  ENSG00000211592_3 (sequence is synthesized)
ggacctacccctattgcggtcctccagctcatctttcacctcacccccctcctcctccttggctttaattatgctaatgttggaggagaatgaataaataaagtgaatctttgcacctgt

SEQ ID NO: 752533 - DNA, 120 bp, Artificial Sequence
  ENSG00000211598_0 (sequence is synthesized)
tttggctcttgatttacattgggtactttcacaacccactgctcatgaaatttgcttttgtactcactggttgtttttgcataggcccctccaggccacgaccagctgtttggattttat

SEQ ID NO: 752534 - DNA, 120 bp, Artificial Sequence
  ENSG00000211598_1 (sequence is synthesized)
aaacgggccgtttgcattgtgaactgagctacaacaggcaggcaggggcagcaagatggtgttgcagacccaggtcttcatttctctgttgctctggatctctggtgcctacggggacat

SEQ ID NO: 752535 - DNA, 120 bp, Artificial Sequence
  ENSG00000211598_2 (sequence is synthesized)
aactgcaagtccagccagagtgttttatacagctccaacaataagaactacttagcttggtaccagcagaaaccaggacagcctcctaagctgctcatttactgggcatctacccgggaa

SEQ ID NO: 752536 - DNA, 79 bp, Artificial Sequence
  ENSG00000211598_3 (sequence is synthesized)
gcctcctaagctgctcatttactgggcatctacccgggaatccggggtccctgaccgattcagtggcagcggctgaaga

SEQ ID NO: 752537 - DNA, 120 bp, Artificial Sequence
  ENSG00000211599_0 (sequence is synthesized)
ataaaatctgtgctgtcaaactgattaggaactgactaccacctgcaggtcagggccaaggttatggggtcccaggttcacctcctcagcttcctcctcctttggatctctgataccagg

SEQ ID NO: 752538 - DNA, 120 bp, Artificial Sequence
  ENSG00000211599_1 (sequence is synthesized)
ggagacaaagtcaacatctcctgcaaagccagccaagacattgatgatgatatgaactggtaccaacagaaaccaggagaagctgctattttcattattcaagaagctactactctcgtt

SEQ ID NO: 752539 - DNA, 120 bp, Artificial Sequence
  ENSG00000211599_2 (sequence is synthesized)
cctggaatcccacctcgattcagtggcagcgggtatggaacagattttaccctcacaattaataacatagaatctgaggatgctgcatattacttctgtctacaacatgataatttccct

SEQ ID NO: 752540 - DNA, 120 bp, Artificial Sequence
  ENSG00000211611_0 (sequence is synthesized)
atcttaaaagaggttctttctctgggatgtggcatgagcaaaactgacaagtcaaggcaggaagatgttgccatcacaactcattgggtttctgctgctctgggttccagcctccagggg

SEQ ID NO: 752541 - DNA, 120 bp, Artificial Sequence
  ENSG00000211611_1 (sequence is synthesized)
aaggagaaagtcaccatcacctgccgggccagtcagagcattggtagtagcttacactggtaccagcagaaaccagatcagtctccaaagctcctcatcaagtatgcttcccagtccttc

SEQ ID NO: 752542 - DNA, 120 bp, Artificial Sequence
  ENSG00000211611_2 (sequence is synthesized)
tcaggggtcccctcgaggttcagtggcagtggatctgggacagatttcaccctcaccatcaatagcctggaagctgaagatgctgcaacgtattactgtcatcagagtagtagtttacct

SEQ ID NO: 752543 - DNA, 120 bp, Artificial Sequence
  ENSG00000211623_0 (sequence is synthesized)
gatcaggactcctcagttcaccttctcactatgaggctccctgctcagctcttggggctgctaatgctctgggtccctggatccagtgcagagattgtgatgacccagactccactctcc

SEQ ID NO: 752544 - DNA, 120 bp, Artificial Sequence
  ENSG00000211623_1 (sequence is synthesized)
atgtcctgcaggtctagtcagagcctcctgcatagtgatggatacacctatttgtattggtttctgcagaaagccaggccagtctccacgctcctgatctatgaagtttccaaccggttc

SEQ ID NO: 752545 - DNA, 120 bp, Artificial Sequence
  ENSG00000211623_2 (sequence is synthesized)
tctggagtgccagataggttcagtggcagcgggtcagggacagatttcacactgaaaatcagccgggtggaggctgaggattttggagtttattactgcatgcaagatgcacaagatcct

SEQ ID NO: 752546 - DNA, 120 bp, Artificial Sequence
  ENSG00000211625_0 (sequence is synthesized)
gcatgtccctcccagccgccctgcagtccagagcccatatcaatgcctgggtcagagctctggggaggaactgctcagttaggacccagagggaaccatggaaaccccagcgcagcttct

SEQ ID NO: 752547 - DNA, 120 bp, Artificial Sequence
  ENSG00000211625_1 (sequence is synthesized)
gaaagagccaccctctcctgcggggccagtcagagtgttagcagcagctacttagcctggtaccagcagaaacctggcctggcgcccaggctcctcatctatgatgcatccagcagggcc

SEQ ID NO: 752548 - DNA, 120 bp, Artificial Sequence
  ENSG00000211625_2 (sequence is synthesized)
actggcatcccagacaggttcagtggcagtgggtctgggacagacttcactctcaccatcagcagactggagcctgaagattttgcagtgtattactgtcagcagtatggtagctcacct

SEQ ID NO: 752549 - DNA, 120 bp, Artificial Sequence
  ENSG00000211626_0 (sequence is synthesized)
agcaaaactgaagtcaaaacactgagatggtgtccccgttgcaattcctgcggcttctgctcctctgggttccagcctccaggggtgatgttgtgatgacacagtctccagctttcctct

SEQ ID NO: 752550 - DNA, 120 bp, Artificial Sequence
  ENSG00000211626_1 (sequence is synthesized)
ggggagaaagtcaccatcacctgccaggccagtgaaggcattggcaactacttatactggtaccagcagaaaccagatcaagccccaaagctcctcatcaagtatgcttcccagtccatc

SEQ ID NO: 752551 - DNA, 120 bp, Artificial Sequence
  ENSG00000211626_2 (sequence is synthesized)
tcaggggtcccctcgaggttcagtggcagtggatctgggacagatttcacctttaccatcagtagcctggaagctgaagatgctgcaacatattactgtcagcagggcaataagcaccct

SEQ ID NO: 752552 - DNA, 120 bp, Artificial Sequence
  ENSG00000211632_0 (sequence is synthesized)
gcatgtccctcccagctgccctaccttccagagcccatatcaatgcctgggtcagagctctggggaggaactgctcagttaggacccagacggaaccatggaagccccagcgcagcttct

SEQ ID NO: 752553 - DNA, 120 bp, Artificial Sequence
  ENSG00000211632_1 (sequence is synthesized)
ggaaagagccaccctctcctgcagggccagtcagagtgttagcagctacttagcctggtaccagcagaaacctggccaggctcccaggctcctcatctatgatgcatccaacagggccac

SEQ ID NO: 752554 - DNA, 120 bp, Artificial Sequence
  ENSG00000211632_2 (sequence is synthesized)
tggcatcccagccaggttcagtggcagtgggcctgggacagacttcactctcaccatcagcagcctagagcctgaagattttgcagtttattactgtcagcagcgtagcaactggcatcc

SEQ ID NO: 752555 - DNA, 90 bp, Artificial Sequence
  ENSG00000211633_0 (sequence is synthesized)
ccgctcagctcctggggctcctgctgctctggctcccaggtgtcagatttgacatccagatgacccagtctccatcttgtatcatttgct

SEQ ID NO: 752556 - DNA, 120 bp, Artificial Sequence
  ENSG00000211633_1 (sequence is synthesized)
agacagagtcagtatcatttgctgggcaagtgagggcattagcagtaatttagcctggtatctgcagaaaccagggaaatcccctaagctcttcctctatgatgcaaaagatttgcaccc

SEQ ID NO: 752557 - DNA, 120 bp, Artificial Sequence
  ENSG00000211633_2 (sequence is synthesized)
tggggtctcatcgaggttcagtggcaggggatctgggacggatttcactctcaccatcatcagcctgaagcctgaagattttgcagcttattactgtaaacaggacttcagttaccctcc

SEQ ID NO: 752558 - DNA, 120 bp, Artificial Sequence
  ENSG00000211637_0 (sequence is synthesized)
agggtgggtaagaaatacctgcaactgtcagcctcagcagagctctggggagtctgcaccatggcttggaccccactcctcttcctcaccctcctcctccactgcacagggtctctctcc

SEQ ID NO: 752559 - DNA, 120 bp, Artificial Sequence
  ENSG00000211637_1 (sequence is synthesized)
cacctgcactctgagcagtgggcacagcagctacgccatcgcatggcatcagcagcagccagagaagggccctcggtacttgatgaagcttaacagtgatggcagccacagcaaggggga

SEQ ID NO: 752560 - DNA, 120 bp, Artificial Sequence
  ENSG00000211637_2 (sequence is synthesized)
cgggatccctgatcgcttctcaggctccagctctggggctgagcgctacctcaccatctccagcctccagtctgaggatgaggctgactattactgtcagacctggggcactggcattca

SEQ ID NO: 752561 - DNA, 120 bp, Artificial Sequence
  ENSG00000211638_0 (sequence is synthesized)
gaggaaaacaaaccccagctgggaagcctgagaacacttagccttcatgagtgtccccaccatggcctggatgatgcttctcctcggactccttgcttatggatcaggagtggattctca

SEQ ID NO: 752562 - DNA, 120 bp, Artificial Sequence
  ENSG00000211638_1 (sequence is synthesized)
actcacttgtggcttgagctctggctcagtctctactagttactaccccagctggtaccagcagaccccaggccaggctccacgcacgctcatctacagcacaaacactcgctcttctgg

SEQ ID NO: 752563 - DNA, 120 bp, Artificial Sequence
  ENSG00000211638_2 (sequence is synthesized)
ggtccctgatcgcttctctggctccatccttgggaacaaagctgccctcaccatcacgggggcccaggcagatgatgaatctgattattactgtgtgctgtatatgggtagtggcatttc

SEQ ID NO: 752564 - DNA, 120 bp, Artificial Sequence
  ENSG00000211639_0 (sequence is synthesized)
atggcctggaccccactcctcctcctcttccctctcctcctccactgcacagggtctctctcccagcctgtgctgactcaatcatcctctgcctctgcttccctgggatcctcggtcaag

SEQ ID NO: 752565 - DNA, 120 bp, Artificial Sequence
  ENSG00000211639_1 (sequence is synthesized)
cacctgcactctgagcagtgggcacagtagctacatcatcgcatggcatcagcagcagccagggaaggcccctcggtacttgatgaagcttgaaggtagtggaagctacaacaaggggag

SEQ ID NO: 752566 - DNA, 120 bp, Artificial Sequence
  ENSG00000211639_2 (sequence is synthesized)
cggagttcctgatcgcttctcaggctccagctctggggctgaccgctacctcaccatctccaacctccagtttgaggatgaggctgattattactgtgagacctgggacagtaacactca

SEQ ID NO: 752567 - DNA, 120 bp, Artificial Sequence
  ENSG00000211640_0 (sequence is synthesized)
atggcctgggctccactacttctcaccctcctcgctcactgcacaggttcttgggccaattttatgctgactcagccccactctgtgtcggagtctccggggaagacggtaaccatctcc

SEQ ID NO: 752568 - DNA, 120 bp, Artificial Sequence
  ENSG00000211640_1 (sequence is synthesized)
ccctgatcggttctctggctccatcgacagctcctccaactctgcctccctcaccatctctggactgaagactgaggacgaggctgactactactgtcagtcttatgatagcagcaatca

SEQ ID NO: 752569 - DNA, 120 bp, Artificial Sequence
  ENSG00000211641_0 (sequence is synthesized)
gctgtgtccactatggccctgactcctctcctcctcctgctcctctctcactgcacaggttccctctcccggcccgtgctgactcagccgccctccctgtctgcatccccgggagcaaca

SEQ ID NO: 752570 - DNA, 120 bp, Artificial Sequence
  ENSG00000211641_1 (sequence is synthesized)
agcagtgacctcagtgttggtggtaaaaacatgttctggtaccagcagaagctagggagctctcccaggttattcctgtatcactactcagactcagacaagcagctgggacctggggtc

SEQ ID NO: 752571 - DNA, 120 bp, Artificial Sequence
  ENSG00000211641_2 (sequence is synthesized)
cccagtcgagtctctggctccaaggagacctcaagtaacacagcgtttttgctcatctctgggctccagcctgaggacgaggccgattattactgccaggtgtacgaaagtagtgctaat

SEQ ID NO: 752572 - DNA, 120 bp, Artificial Sequence
  ENSG00000211642_0 (sequence is synthesized)
gggaatctgcaccatgccctgggctctgctcctcctgaccctcctcactcactctgcagtgtcagtggtccaggcagggctgactcagccaccctcggtgtccaagggcttgagacagac

SEQ ID NO: 752573 - DNA, 120 bp, Artificial Sequence
  ENSG00000211642_1 (sequence is synthesized)
cactcacctgcactgggaacagcaacattgttggcaaccaaggagcagcttggctgcagcagcaccagggccaccctcccaaactcctatcctacaggaataacaaccggccctcaggga

SEQ ID NO: 752574 - DNA, 120 bp, Artificial Sequence
  ENSG00000211642_2 (sequence is synthesized)
tctcagagagattctctgcatccaggtcaggaaacacagcctccctgaccattactggactccagcctgaggacgaggctgactattactgctcagcattggacagcagcctcagtgctc

SEQ ID NO: 752575 - DNA, 120 bp, Artificial Sequence
  ENSG00000211642_3 (sequence is synthesized)
atggactggtcccctctcctcctcatactcctcactcactgtacaggatcctgggctcagtctgtgctgactcagccaccctcagtgtcttgggccacaaggcagaggctcactgtctcc

SEQ ID NO: 752576 - DNA, 120 bp, Artificial Sequence
  ENSG00000211643_0 (sequence is synthesized)
ccaccatggcctggactcttctccttctcgtgctcctctctcactgcacaggttccctctcccagcctgtgctgactcagccatcttcccattctgcatcttctggagcatcagtcagac

SEQ ID NO: 752577 - DNA, 120 bp, Artificial Sequence
  ENSG00000211643_1 (sequence is synthesized)
tggcttcagtgttggggacttctggataaggtggtaccaacaaaagccagggaaccctccccggtatctcctgtactaccactcagactccaataagggccaaggctctggagttcccag

SEQ ID NO: 752578 - DNA, 120 bp, Artificial Sequence
  ENSG00000211643_2 (sequence is synthesized)
ccgcttctctggatccaacgatgcatcagccaatgcagggattctgcgtatctctgggctccagcctgaggatgaggctgactattactgtggtacatggcacagcaactctaagactca

SEQ ID NO: 752579 - DNA, 120 bp, Artificial Sequence
  ENSG00000211644_0 (sequence is synthesized)
tgagcgcagaaggcaggactcgggacaatcttcatcatgacctgctcccctctcctcctcacccttctcattcactgcacagggtcctgggcccagtctgtgttgacgcagccgccctca

SEQ ID NO: 752580 - DNA, 120 bp, Artificial Sequence
  ENSG00000211644_1 (sequence is synthesized)
catctcctgctctggaagcagctccaacattgggaataattatgtatcctggtaccagcagctcccaggaacagcccccaaactcctcatttatgacaataataagcgaccctcagggat

SEQ ID NO: 752581 - DNA, 120 bp, Artificial Sequence
  ENSG00000211644_2 (sequence is synthesized)
tcctgaccgattctctggctccaagtctggcacgtcagccaccctgggcatcaccggactccagactggggacgaggccgattattactgcggaacatgggatagcagcctgagtgctgg

SEQ ID NO: 752582 - DNA, 120 bp, Artificial Sequence
  ENSG00000211645_0 (sequence is synthesized)
gctctgcttcagctgtgggcacaggaggcagcactcaggacaatctccagcatggcctggtcttctctcctcctcactctcctcgctcactgcacagggtcctgggcccagtctgtgctg

SEQ ID NO: 752583 - DNA, 120 bp, Artificial Sequence
  ENSG00000211645_1 (sequence is synthesized)
atctcctgcactgggagcagctccaacattggggcgggttatgttgtacattggtaccagcagcttccaggaacagcccccaaactcctcatctatggtaacagcaatcggccctcaggg

SEQ ID NO: 752584 - DNA, 120 bp, Artificial Sequence
  ENSG00000211645_2 (sequence is synthesized)
gtccctgaccaattctctggctccaagtctggcacctcagcctccctggccatcactggactccagtctgaggatgaggctgattattactgcaaagcatgggataacagcctgaatgct

SEQ ID NO: 752585 - DNA, 120 bp, Artificial Sequence
  ENSG00000211647_0 (sequence is synthesized)
atggcctggactcctctccttctcctgttcctctctcactgcacaggttccctctcgcaggctgtgctgactcagccaacttccctctcagcatctcctggagcatcagccagactcacc

SEQ ID NO: 752586 - DNA, 120 bp, Artificial Sequence
  ENSG00000211647_1 (sequence is synthesized)
cgcagtggcatcagtgttggtagctacaggatatactggtaccagcagaagccagggagtcctcccaggtatctcctgaactactactcagactcagataagcaccagggctctggagtc

SEQ ID NO: 752587 - DNA, 120 bp, Artificial Sequence
  ENSG00000211647_2 (sequence is synthesized)
cccagccgcttctctggatccaaagatgcttcgaccaatgcagggattttattcatctctgggctctagtctgaggatgaggctgactattactgtatgatttggcacagcagtgcttct

SEQ ID NO: 752588 - DNA, 120 bp, Artificial Sequence
  ENSG00000211648_0 (sequence is synthesized)
ggggaagctcagcttcagctgtggtagagaagacaggattcaggacaatctccagcatggccggcttccctctcctcctcaccctcctcactcactgtgcagggtcctgggcccagtctg

SEQ ID NO: 752589 - DNA, 120 bp, Artificial Sequence
  ENSG00000211648_1 (sequence is synthesized)
accatctcttgttctggaagcagctccaacatcggaagtaattatgtatactggtaccagcagctcccaggaacggcccccaaactcctcatctatagtaataatcagcggccctcaggg

SEQ ID NO: 752590 - DNA, 120 bp, Artificial Sequence
  ENSG00000211648_2 (sequence is synthesized)
gtccctgaccgattctctggctccaagtctggcacctcagcctccctggccatcagtgggctccggtccgaggatgaggctgattattactgtgcagcatgggatgacagcctgagtggt

SEQ ID NO: 752591 - DNA, 120 bp, Artificial Sequence
  ENSG00000211649_0 (sequence is synthesized)
tctggcaccaggggtcccttccaatatcagcaccatggcctggactcctctctttctgttcctcctcacttgctgcccagggtccaattcccaggctgtggtgactcaggagccctcact

SEQ ID NO: 752592 - DNA, 120 bp, Artificial Sequence
  ENSG00000211649_1 (sequence is synthesized)
actctcacctgtggctccagcactggagctgtcaccagtggtcattatccctactggttccagcagaagcctggccaagcccccaggacactgatttatgatacaagcaacaaacactcc

SEQ ID NO: 752593 - DNA, 120 bp, Artificial Sequence
  ENSG00000211649_2 (sequence is synthesized)
tggacacctgcccggttctcaggctccctccttgggggcaaagctgccctgacccttttgggtgcgcagcctgaggatgaggctgagtattactgcttgctctcctatagtggtgctcgg

SEQ ID NO: 752594 - DNA, 120 bp, Artificial Sequence
  ENSG00000211650_0 (sequence is synthesized)
actgcgggggtaagaggttgtgtccaccatggcctggactcctctcctcctcctgttcctctctcactgcacaggttccctctcgcaggctgtgctgactcagccgtcttccctctctgc

SEQ ID NO: 752595 - DNA, 120 bp, Artificial Sequence
  ENSG00000211650_1 (sequence is synthesized)
tgcagtggcatcaatgttggtacctacaggatatactggtaccagcagaagccagggagtcctccccagtatctcctgaggtacaaatcagactcagataagcagcagggctctggagtc

SEQ ID NO: 752596 - DNA, 120 bp, Artificial Sequence
  ENSG00000211650_2 (sequence is synthesized)
cccagccgcttctctggatccaaagatgcttcggccaatgcagggattttactcatctctgggctccagtctgaggatgaggctgactattactgtatgatttggcacagcagcgcttct

SEQ ID NO: 752597 - DNA, 120 bp, Artificial Sequence
  ENSG00000211651_0 (sequence is synthesized)
ctgatttgcatggatggactctccccctctcagagtatgaagagagggagagatctgggggaagctcagcttcagctgtgggtagagaagacaggactcaggacaatctccagcatggcc

SEQ ID NO: 752598 - DNA, 120 bp, Artificial Sequence
  ENSG00000211651_1 (sequence is synthesized)
catctcttgttctggaagcagctccaacatcggaagtaatactgtaaactggtaccagcagctcccaggaacggcccccaaactcctcatctatagtaataatcagcggccctcaggggt

SEQ ID NO: 752599 - DNA, 120 bp, Artificial Sequence
  ENSG00000211651_2 (sequence is synthesized)
ccctgaccgattctctggctccaagtctggcacctcagcctccctggccatcagtgggctccagtctgaggatgaggctgattattactgtgcagcatgggatgacagcctgaatggtcc

SEQ ID NO: 752600 - DNA, 120 bp, Artificial Sequence
  ENSG00000211652_0 (sequence is synthesized)
tctggcgccaggggtcccttccaatatcagcaccatggcctggactcctctctttctgttcctcctcacttgctgcccagggtccaattctcagactgtggtgactcaggagccctcact

SEQ ID NO: 752601 - DNA, 120 bp, Artificial Sequence
  ENSG00000211652_1 (sequence is synthesized)
actctcacctgtgcttccagcactggagcagtcaccagtggttactatccaaactggttccagcagaaacctggacaagcacccagggcactgatttatagtacaagcaacaaacactcc

SEQ ID NO: 752602 - DNA, 120 bp, Artificial Sequence
  ENSG00000211652_2 (sequence is synthesized)
tggacccctgcccggttctcaggctccctccttgggggcaaagctgccctgacactgtcaggtgtgcagcctgaggacgaggctgagtattactgcctgctctactatggtggtgctcag

SEQ ID NO: 752603 - DNA, 120 bp, Artificial Sequence
  ENSG00000211653_0 (sequence is synthesized)
gctctgcttcagctgtgggcacaagaggcagcactcaggacaatctccagcatggcctggtctcctctcctcctcactctcctcgctcactgcacagggtcctgggcccagtctgtgctg

SEQ ID NO: 752604 - DNA, 120 bp, Artificial Sequence
  ENSG00000211653_1 (sequence is synthesized)
ctcctgcactgggagcagctccaacatcggggcaggttatgatgtacactggtaccagcagcttccaggaacagcccccaaactcctcatctatggtaacagcaatcggccctcaggggt

SEQ ID NO: 752605 - DNA, 120 bp, Artificial Sequence
  ENSG00000211653_2 (sequence is synthesized)
ccctgaccgattctctggctccaagtctggcacctcagcctccctggccatcactgggctccaggctgaggatgaggctgattattactgccagtcctatgacagcagcctgagtggttc

SEQ ID NO: 752606 - DNA, 120 bp, Artificial Sequence
  ENSG00000211654_0 (sequence is synthesized)
ccaccatggcctggactcctcttcttctcttgctcctctctcactgcacaggttccctctcccagcctgtgctgactcagccaccttcctcctccgcatctcctggagaatccgccagac

SEQ ID NO: 752607 - DNA, 120 bp, Artificial Sequence
  ENSG00000211654_1 (sequence is synthesized)
cccagtgacatcaatgttggtagctacaacatatactggtaccagcagaagccagggagccctcccaggtatctcctgtactactactcagactcagataagggccagggctctggagtc

SEQ ID NO: 752608 - DNA, 120 bp, Artificial Sequence
  ENSG00000211654_2 (sequence is synthesized)
cccagccgcttctctggatccaaagatgcttcagccaatacagggattttactcatctccgggctccagtctgaggatgaggctgactattactgtatgatttggccaagcaatgcttct

SEQ ID NO: 752609 - DNA, 120 bp, Artificial Sequence
  ENSG00000211655_0 (sequence is synthesized)
gctgcgggtagagaagacaggactcaggacaatctccagcatggcctggtcccctctcttcctcaccctcatcactcactgtgcagggtcctgggcccagtctgtgctgactcagccacc

SEQ ID NO: 752610 - DNA, 120 bp, Artificial Sequence
  ENSG00000211655_1 (sequence is synthesized)
catctcctgttctggaagcagctccaacatcggaaataatgctgtaaactggtaccagcagctcccaggaaaggctcccaaactcctcatctattatgatgatctgctgccctcaggggt

SEQ ID NO: 752611 - DNA, 120 bp, Artificial Sequence
  ENSG00000211655_2 (sequence is synthesized)
ctctgaccgattctctggctccaagtctggcacctcagcctccctggccatcagtgggctccagtctgaggatgaggctgattattactgtgcagcatgggatgacagcctgaatggtcc

SEQ ID NO: 752612 - DNA, 120 bp, Artificial Sequence
  ENSG00000211656_0 (sequence is synthesized)
ggctagaggcaggcccggtgctggggtctcaaggcagcgctctcgggacatctccaccatggcctgggctctgctcctcctcaccctcctcactcagggcacagggtcctgggcccaatc

SEQ ID NO: 752613 - DNA, 120 bp, Artificial Sequence
  ENSG00000211656_1 (sequence is synthesized)
atctcctgcactggaaccagcagtgacgttggggattatgatcatgtcttctggtaccaaaagcgtctcagcactacctccagactcctgatttacaatgtcaatactcggccttcaggg

SEQ ID NO: 752614 - DNA, 120 bp, Artificial Sequence
  ENSG00000211656_2 (sequence is synthesized)
atctctgacctcttctcaggctccaagtctggcaacatggcttccctgaccatctctgggctcaagtccgaggttgaggctaattatcactgcagcttatattcaagtagttacactttc

SEQ ID NO: 752615 - DNA, 120 bp, Artificial Sequence
  ENSG00000211657_0 (sequence is synthesized)
gctgtggactcagaggcagagctctggggcatttccattatggcctggacccctcccctgctcgtcctcactctctgcacaggctccgttatttcctctgggccaactcaggtgcctgca

SEQ ID NO: 752616 - DNA, 120 bp, Artificial Sequence
  ENSG00000211657_1 (sequence is synthesized)
ggccaggatcacctgccagggagacagcatggaaggctcttatgaacactggtaccagcagaagccaggccaggcccccgtgctggtcatctatgatagcagtgaccggccctcaaggat

SEQ ID NO: 752617 - DNA, 120 bp, Artificial Sequence
  ENSG00000211657_2 (sequence is synthesized)
ccctgagcgattctctggctccaaatcaggcaacacaaccaccctgaccatcactggggcccaggctgaggatgaggctgattattactatcagttgatagacaaccatgctactcaact

SEQ ID NO: 752618 - DNA, 120 bp, Artificial Sequence
  ENSG00000211658_0 (sequence is synthesized)
gctgtaggctcaggaggcagagctctgaatgtctcaccatggcctggatccctctcctgctccccctcctcattctctgcacagtctctgtggcctcctatgagctgacacagccatcct

SEQ ID NO: 752619 - DNA, 120 bp, Artificial Sequence
  ENSG00000211658_1 (sequence is synthesized)
ggacagacagccaggatcacctgctcaggagatgtactggcaaaaaaatatgctcggtggttccagcagaagccaggccaggcccctgtgctggtgatttataaagacagtgagcggccc

SEQ ID NO: 752620 - DNA, 120 bp, Artificial Sequence
  ENSG00000211658_2 (sequence is synthesized)
tcagggatccctgagcgattctccggctccagctcagggaccacagtcaccttgaccatcagcggggcccaggttgaggatgaggctgactattactgttactctgcggctgacaacaat

SEQ ID NO: 752621 - DNA, 120 bp, Artificial Sequence
  ENSG00000211659_0 (sequence is synthesized)
gctgtgctgtgggtccaggaggcagaactctgggtgtctcaccatggcctggatccctctacttctccccctcctcactctctgcacaggctctgaggcctcctatgagctgacacagcc

SEQ ID NO: 752622 - DNA, 120 bp, Artificial Sequence
  ENSG00000211659_1 (sequence is synthesized)
caggacagacggccaggatcacctgctctggagatgcattgccaaagcaatatgcttattggtaccagcagaagccaggccaggcccctgtgctggtgatatataaagacagtgagaggc

SEQ ID NO: 752623 - DNA, 120 bp, Artificial Sequence
  ENSG00000211659_2 (sequence is synthesized)
cctcagggatccctgagcgattctctggctccagctcagggacaacagtcacgttgaccatcagtggagtccaggcagaagacgaggctgactattactgtcaatcagcagacagcagtg

SEQ ID NO: 752624 - DNA, 120 bp, Artificial Sequence
  ENSG00000211660_0 (sequence is synthesized)
tctctgagcccaggcccacgtgagggtggggtgaggagaggagcccaggatgctgattttcatggaggccccgccctcctctgaggcaaaggggataagacagggctggggcagggccag

SEQ ID NO: 752625 - DNA, 120 bp, Artificial Sequence
  ENSG00000211660_1 (sequence is synthesized)
tgctggggtcacaagaggcagcgctctcgggacgtctccaccatggcctgggctctgctgctcctcactctcctcactcaggacacagggtcctgggcccagtctgccctgactcagcct

SEQ ID NO: 752626 - DNA, 120 bp, Artificial Sequence
  ENSG00000211660_2 (sequence is synthesized)
gacagtcgatcaccatctcctgcactggaaccagcagtgatgttgggagttataaccttgtctcctggtaccaacagcacccaggcaaagcccccaaactcatgatttatgagggcagta

SEQ ID NO: 752627 - DNA, 120 bp, Artificial Sequence
  ENSG00000211660_3 (sequence is synthesized)
agcggccctcaggggtttctaatcgcttctctggctccaagtctggcaacacggcctccctgacaatctctgggctccaggctgaggacgaggctgattattactgctgctcatatgcag

SEQ ID NO: 752628 - DNA, 120 bp, Artificial Sequence
  ENSG00000211661_0 (sequence is synthesized)
aagagaggcctgggaagcccagctgtgctgtgggctcaggaggcagagctgtgggtgtctcaccatggcatgggccacactcctgctcccactcctcaacctctacacaggctctgttgc

SEQ ID NO: 752629 - DNA, 120 bp, Artificial Sequence
  ENSG00000211661_1 (sequence is synthesized)
acagccaggatcacctgctctggagatgtactgggggaaaattatgctgactggtaccagcagaagccaggccaggcccctgagttggtgatatacgaagatagtgagcggtaccctgga

SEQ ID NO: 752630 - DNA, 120 bp, Artificial Sequence
  ENSG00000211661_2 (sequence is synthesized)
atccctgaacgattctctgggtccacctcagggaacacgaccaccctgaccatcagcagggtcctgaccgaagacgaggctgactattactgtttgtctggggatgaggacaatccctca

SEQ ID NO: 752631 - DNA, 120 bp, Artificial Sequence
  ENSG00000211662_0 (sequence is synthesized)
gcacagaggagctgtgccctggaatggggcctgtacctgtccaaggcttgtgccgtcccctgtgggagatgagaagcgtccctgcattgggctcttggggacccgtcttggacatgaatc

SEQ ID NO: 752632 - DNA, 120 bp, Artificial Sequence
  ENSG00000211662_1 (sequence is synthesized)
tcctccagcagcagcctctgactctgctgatttgcatcatgggccgctctctccagcaaggggataagagaggcctgggaggaacctgctcagtctgggcctaaggaagcagcactggtg

SEQ ID NO: 752633 - DNA, 120 bp, Artificial Sequence
  ENSG00000211662_2 (sequence is synthesized)
gcctcagccatggcctggaccgttctcctcctcggcctcctctctcactgcacaggctctgtgacctcctatgtgctgactcagccaccctcggtgtcagtggccccaggacagacggcc

SEQ ID NO: 752634 - DNA, 120 bp, Artificial Sequence
  ENSG00000211662_3 (sequence is synthesized)
aggattacctgtgggggaaacaacattggaagtaaaagtgtgcactggtaccagcagaagccaggccaggcccctgtgctggtcgtctatgatgatagcgaccggccctcagggatccct

SEQ ID NO: 752635 - DNA, 120 bp, Artificial Sequence
  ENSG00000211662_4 (sequence is synthesized)
gagcgattctctggctccaactctgggaacacggccaccctgaccatcagcagggtcgaagccggggatgaggccgactattactgtcaggtgtgggatagtagtagtgatcatcccacg

SEQ ID NO: 752636 - DNA, 120 bp, Artificial Sequence
  ENSG00000211663_0 (sequence is synthesized)
agctgtgggctcagaagcagagttctggggtgtctccaccatggcctggacccctctctggctcactctcctcactctttgcataggttctgtggtttcttctgagctgactcaggaccc

SEQ ID NO: 752637 - DNA, 120 bp, Artificial Sequence
  ENSG00000211663_1 (sequence is synthesized)
tgggacagacagtcaggatcacatgccaaggagacagcctcagaagctattatgcaagctggtaccagcagaagccaggacaggcccctgtacttgtcatctatggtaaaaacaaccggc

SEQ ID NO: 752638 - DNA, 120 bp, Artificial Sequence
  ENSG00000211663_2 (sequence is synthesized)
cctcagggatcccagaccgattctctggctccagctcaggaaacacagcttccttgaccatcactggggctcaggcggaagatgaggctgactattactgtaactcccgggacagcagtg

SEQ ID NO: 752639 - DNA, 120 bp, Artificial Sequence
  ENSG00000211664_0 (sequence is synthesized)
gaatatctccaccatggcctgggctctgctcctcctcaccctcctcactcagggcacaggatcctgggctcagtctgccctgactcagcctccctccgtgtccgggtctcctggacagtc

SEQ ID NO: 752640 - DNA, 120 bp, Artificial Sequence
  ENSG00000211664_1 (sequence is synthesized)
atctcctgcactggaaccagcagtgacgttggtagttataaccgtgtctcctggtaccagcagcccccaggcacagcccccaaactcatgatttatgaggtcagtaatcggccctcaggg

SEQ ID NO: 752641 - DNA, 120 bp, Artificial Sequence
  ENSG00000211664_2 (sequence is synthesized)
gtccctgatcgcttctctgggtccaagtctggcaacacggcctccctgaccatctctgggctccaggctgaggacgaggctgattattactgcagcttatatacaagcagcagcactttc

SEQ ID NO: 752642 - DNA, 120 bp, Artificial Sequence
  ENSG00000211665_0 (sequence is synthesized)
tctgtgggtccaggaggcacagctctgggaatctcaccatggcctggatccctctcctgctccccctcctcactctctgcacaggctctgaggcctcctatgagctgacacagccaccct

SEQ ID NO: 752643 - DNA, 120 bp, Artificial Sequence
  ENSG00000211665_1 (sequence is synthesized)
ggccaggatcacctgctctggagaagcattgccaaaaaaatatgcttattggtaccagcagaagccaggccagttccctgtgctggtgatatataaagacagcgagaggccctcagggat

SEQ ID NO: 752644 - DNA, 120 bp, Artificial Sequence
  ENSG00000211665_2 (sequence is synthesized)
ccctgagcgattctctggctccagctcagggacaatagtcacattgaccatcagtggagtccaggcagaagacgaggctgactattactgtctatcagcagacagcagtggtacttatcc

SEQ ID NO: 752645 - DNA, 120 bp, Artificial Sequence
  ENSG00000211666_0 (sequence is synthesized)
gctggggtctcaggaggcagcgctctcaggacatctccaccatggcctgggctctgctgctcctcaccctcctcactcagggcacagggtcctgggcccagtctgccctgactcagcctg

SEQ ID NO: 752646 - DNA, 120 bp, Artificial Sequence
  ENSG00000211666_1 (sequence is synthesized)
gcactggaaccagcagtgacgttggtggttataactatgtctcctggtaccaacagcacccaggcaaagcccccaaactcatgatttatgaggtcagtaatcggccctcaggggtttcta

SEQ ID NO: 752647 - DNA, 120 bp, Artificial Sequence
  ENSG00000211666_2 (sequence is synthesized)
atcgcttctctggctccaagtctggcaacacggcctccctgaccatctctgggctccaggctgaggacgaggctgattattactgcagctcatatacaagcagcagcactctccacagtg

SEQ ID NO: 752648 - DNA, 120 bp, Artificial Sequence
  ENSG00000211667_0 (sequence is synthesized)
gcctcagccatggcctggacccctctcctcctcagcctcctcgctcactgcacaggctctgcgacctcctatgagctgactcagccacactcagtgtcagtggccacagcacagatggcc

SEQ ID NO: 752649 - DNA, 120 bp, Artificial Sequence
  ENSG00000211667_1 (sequence is synthesized)
ccctgagcgattctctggctccaacccagggaacaccgccaccctaaccatcagcaggatcgaggctggggatgaggctgactattactgtcaggtgtgggacagtagtagtgatcatcc

SEQ ID NO: 752650 - DNA, 120 bp, Artificial Sequence
  ENSG00000211668_0 (sequence is synthesized)
tgctggggtctcaggaggcagcactctcgggacgtctccaccatggcctgggctctgctcctcctcagcctcctcactcagggcacaggatcctgggctcagtctgccctgactcagcct

SEQ ID NO: 752651 - DNA, 120 bp, Artificial Sequence
  ENSG00000211668_1 (sequence is synthesized)
cctgcactggaaccagcagtgatgttggtggttataactatgtctcctggtaccaacagcacccaggcaaagcccccaaactcatgatttatgatgtcagtaagcggccctcaggggtcc

SEQ ID NO: 752652 - DNA, 120 bp, Artificial Sequence
  ENSG00000211668_2 (sequence is synthesized)
ctgatcgcttctctggctccaagtctggcaacacggcctccctgaccatctctgggctccaggctgaggatgaggctgattattactgctgctcatatgcaggcagctacactttccaca

SEQ ID NO: 752653 - DNA, 120 bp, Artificial Sequence
  ENSG00000211669_0 (sequence is synthesized)
gtgggctcaggaggcagagctctgggaatctcaccatggcctggacccctctcctgctccccctcctcactttctgcacagtctctgaggcctcctatgagctgacacagccaccctcgg

SEQ ID NO: 752654 - DNA, 120 bp, Artificial Sequence
  ENSG00000211669_1 (sequence is synthesized)
ggccaggatcacctgctctggagatgcattgccaaaaaaatatgcttattggtaccagcagaagtcaggccaggcccctgtgctggtcatctatgaggacagcaaacgaccctccgggat

SEQ ID NO: 752655 - DNA, 120 bp, Artificial Sequence
  ENSG00000211669_2 (sequence is synthesized)
ccctgagagattctctggctccagctcagggacaatggccaccttgactatcagtggggcccaggtggaggatgaagctgactactactgttactcaacagacagcagtggtaatcatag

SEQ ID NO: 752656 - DNA, 120 bp, Artificial Sequence
  ENSG00000211670_0 (sequence is synthesized)
cttgactctgctgatttgcatcacaggctgctctcttcagcaaggggataagagagggctggaaggaacctgcccagcctgggcctcaggaagcagcatcgggggtgccgcagccatggc

SEQ ID NO: 752657 - DNA, 120 bp, Artificial Sequence
  ENSG00000211670_1 (sequence is synthesized)
cggccaggattacctgtgggggaaacaacattggaagtaaaaatgtgcactggtaccagcagaagccaggccaggcccctgtgctggtcatctatagggatagcaaccggccctctggga

SEQ ID NO: 752658 - DNA, 120 bp, Artificial Sequence
  ENSG00000211670_2 (sequence is synthesized)
tccctgagcgattctctggctccaactcggggaacacggccaccctgaccatcagcagagcccaagccggggatgaggctgactattactgtcaggtgtgggacagcagcactgcacaca

SEQ ID NO: 752659 - DNA, 120 bp, Artificial Sequence
  ENSG00000211672_0 (sequence is synthesized)
ctcgaatagagctcttggaagtccctccaaccatggcctgggtctccttctacctactgcccttcattttctccacaggtctctgtgctctgcctgtgctgactcagcccccgtctgcat

SEQ ID NO: 752660 - DNA, 120 bp, Artificial Sequence
  ENSG00000211672_1 (sequence is synthesized)
cagtgagcacagcacctacaccatcgaatggtatcaacagagaccagggaggtccccccagtatataatgaaggttaagagtgatggcagccacagcaagggggacgggatccccgatcg

SEQ ID NO: 752661 - DNA, 120 bp, Artificial Sequence
  ENSG00000211672_2 (sequence is synthesized)
cttcatgggctccagttctggggctgaccgctacctcaccttctccaacctccagtctgacgatgaggctgagtatcactgtggagagagccacacgattgatggccaagtcggttgagc

SEQ ID NO: 752662 - DNA, 120 bp, Artificial Sequence
  ENSG00000211673_0 (sequence is synthesized)
aagaacctgcccagcctgggcctcaggaagcagcatcggaggtgcctcagccatggcatggatccctctcttcctcggcgtccttgcttactgcacaggatccgtggcctcctatgagct

SEQ ID NO: 752663 - DNA, 120 bp, Artificial Sequence
  ENSG00000211673_1 (sequence is synthesized)
cagccagcatcacctgctctggagataaattgggggataaatatgcttgctggtatcagcagaagccaggccagtcccctgtgctggtcatctatcaagatagcaagcggccctcaggga

SEQ ID NO: 752664 - DNA, 120 bp, Artificial Sequence
  ENSG00000211673_2 (sequence is synthesized)
tccctgagcgattctctggctccaactctgggaacacagccactctgaccatcagcgggacccaggctatggatgaggctgactattactgtcaggcgtgggacagcagcactgcacaca

SEQ ID NO: 752665 - DNA, 120 bp, Artificial Sequence
  ENSG00000211674_0 (sequence is synthesized)
ggctcctgctccagcccagcccccagagagcagaccccaggtgctggccccgggggttttggtctgagcctcagtcactgtgttatgtcttcggaactgggaccaaggtcaccgtcctag

SEQ ID NO: 752666 - DNA, 120 bp, Artificial Sequence
  ENSG00000211675_0 (sequence is synthesized)
gtcagcccaaggccaaccccactgtcactctgttcccgccctcctctgaggagctccaagccaacaaggccacactagtgtgtctgatcagtgacttctacccgggagctgtgacagtgg

SEQ ID NO: 752667 - DNA, 120 bp, Artificial Sequence
  ENSG00000211675_1 (sequence is synthesized)
gacgcccgagcagtggaagtcccacagaagctacagctgccaggtcacgcatgaagggagcaccgtggagaagacagtggcccctacagaatgttcataggttcccaactctaaccccac

SEQ ID NO: 752668 - DNA, 120 bp, Artificial Sequence
  ENSG00000211675_2 (sequence is synthesized)
ccacgggagcctggagctgcaggatcccaggggaggggtctctctccccatcccaagtcatccagcccttctccctgcactcatgaaaccccaataaatatcctcattgacaaccagaaa

SEQ ID NO: 752669 - DNA, 120 bp, Artificial Sequence
  ENSG00000211676_0 (sequence is synthesized)
cagcttcctccttcacagctgcagtgggggctggggctggggcatcccagggagggtttttgtatgagcctgtgtcacagtgtgtggtattcggcggagggaccaagctgaccgtcctag

SEQ ID NO: 752670 - DNA, 120 bp, Artificial Sequence
  ENSG00000211677_0 (sequence is synthesized)
gtcagcccaaggctgccccctcggtcactctgttcccgccctcctctgaggagcttcaagccaacaaggccacactggtgtgtctcataagtgacttctacccgggagccgtgacagtgg

SEQ ID NO: 752671 - DNA, 120 bp, Artificial Sequence
  ENSG00000211677_1 (sequence is synthesized)
cgcctgagcagtggaagtcccacagaagctacagctgccaggtcacgcatgaagggagcaccgtggagaagacagtggcccctacagaatgttcataggttctcaaccctcaccccccac

SEQ ID NO: 752672 - DNA, 120 bp, Artificial Sequence
  ENSG00000211677_2 (sequence is synthesized)
cacgggagactagagctgcaggatcccaggggaggggtctctcctcccaccccaaggcatcaagcccttctccctgcactcaataaaccctcaataaatattctcattgtcaatcagaaa

SEQ ID NO: 752673 - DNA, 120 bp, Artificial Sequence
  ENSG00000211678_0 (sequence is synthesized)
agcttcctccttcacagctgcagtgggggctggggctaggggcatcccagggagggtttttgtatgagcctgtgtcacagtgttgggtgttcggcggagggaccaagctgaccgtcctag

SEQ ID NO: 752674 - DNA, 120 bp, Artificial Sequence
  ENSG00000211679_0 (sequence is synthesized)
gtcagcccaaggctgccccctcggtcactctgttcccaccctcctctgaggagcttcaagccaacaaggccacactggtgtgtctcataagtgacttctacccgggagccgtgacagtgg

SEQ ID NO: 752675 - DNA, 120 bp, Artificial Sequence
  ENSG00000211679_1 (sequence is synthesized)
cgcctgagcagtggaagtcccacaaaagctacagctgccaggtcacgcatgaagggagcaccgtggagaagacagtggcccctacagaatgttcataggttctcatccctcaccccccac

SEQ ID NO: 752676 - DNA, 120 bp, Artificial Sequence; identical to SEQ ID NO: 752672
  ENSG00000211679_2 (sequence is synthesized)

SEQ ID NO: 752677 - DNA, 120 bp, Artificial Sequence
  ENSG00000211685_0 (sequence is synthesized)
gtcagcccaaggctgccccctcggtcactctgttcccaccctcctctgaggagcttcaagccaacaaggccacactggtgtgtctcgtaagtgacttcaacccgggagccgtgacagtgg

SEQ ID NO: 752678 - DNA, 120 bp, Artificial Sequence
  ENSG00000211685_1 (sequence is synthesized)
ccagcagctacctgagcctgacgcccgagcagtggaagtcccacagaagctacagctgccgggtcacgcatgaagggagcaccgtggagaagacagtggcccctgcagaatgctcttagg

SEQ ID NO: 752679 - DNA, 120 bp, Artificial Sequence
  ENSG00000211685_2 (sequence is synthesized)
cccccgaccctcaccccacccacaggggcctggagctgcaggttcccaggggaggggtctctgcccccatcccaagtcatccagcccttctcaataaatatcctcatcgtcaacgagaaa

SEQ ID NO: 752680 - DNA, 120 bp, Artificial Sequence
  ENSG00000211689_0 (sequence is synthesized)
ataaacaacttgatgcagatgtttcccccaagcccactatttttcttccttcaattgctgaaacaaagctccagaaggctggaacatacctttgtcttcttgagaaatttttccctgatg

SEQ ID NO: 752681 - DNA, 120 bp, Artificial Sequence
  ENSG00000211689_1 (sequence is synthesized)
ttattaagatacattggcaagaaaagaagagcaacacgattctgggatcccaggaggggaacaccatgaagactaacgacacatacatgaaatttagctggttaacggtgccagaaaagt

SEQ ID NO: 752682 - DNA, 120 bp, Artificial Sequence
  ENSG00000211689_2 (sequence is synthesized)
cactggacaaagaacacagatgtatcgtcagacatgagaataataaaaacggagttgatcaagaaattatctttcctccaataaagacagatgtcatcacaatggatcccaaagacaatt

SEQ ID NO: 752683 - DNA, 120 bp, Artificial Sequence
  ENSG00000211689_3 (sequence is synthesized)
gttcaaaagatgcaaatgatacactactgctgcagctcacaaacacctctgcatattacatgtacctcctcctgctcctcaagagtgtggtctattttgccatcatcacctgctgtctgc

SEQ ID NO: 752684 - DNA, 120 bp, Artificial Sequence
  ENSG00000211689_4 (sequence is synthesized)
ttagaagaacggctttctgctgcaatggagagaaatcataacagacggtggcacaaggaggccatcttttcctcatcggttattgtccctagaagcgtcttctgaggatctagttgggct

SEQ ID NO: 752685 - DNA, 120 bp, Artificial Sequence
  ENSG00000211689_5 (sequence is synthesized)
ttctttctgggtttgggccatttcagttctcatgtgtgtactattctatcattattgtataacggttttcaaaccagtgggcacacagagaacctcactctgtaataacaatgaggaata

SEQ ID NO: 752686 - DNA, 120 bp, Artificial Sequence
  ENSG00000211689_6 (sequence is synthesized)
gccacggcgatctccagcaccaatctctccatgttttccacagctcctccagccaacccaaatagcgcctgctatagtgtagacatcctgcggcttctagccttgtccctctcttagtgt

SEQ ID NO: 752687 - DNA, 120 bp, Artificial Sequence
  ENSG00000211689_7 (sequence is synthesized)
tctttaatcagataactgcctggaagcctttcattttacacgccctgaagcagtcttctttgctagttgaattatgtggtgtgtttttccgtaataagcaaaataaatttaaaaaaatga

SEQ ID NO: 752688 - DNA, 120 bp, Artificial Sequence
  ENSG00000211689_8 (sequence is synthesized)
aaagttgacttttgtccatggtattttaattggatgacatcaaattgaacatccaaggtaagaaacagcatggcaattgggctgtggaattctgtattggttgtaagaatggtccaacac

SEQ ID NO: 752689 - DNA, 120 bp, Artificial Sequence
  ENSG00000211689_9 (sequence is synthesized)
cccatttctaattctttccctgagatcgtggttatcacaccttctaagaagaactacaaccaaatgaaggagctcatgtgacttctgtttgaaaggtcaccagagtcagattcattcggt

SEQ ID NO: 752690 - DNA, 120 bp, Artificial Sequence
  ENSG00000211689_10 (sequence is synthesized)
ttaggacattccagtggctataggacactatctactgtgacgcgtaccgtgtgagctcagctctagagtgtttcacagacactgtgtttcctgatcctcacgatacccccatgagagctg

SEQ ID NO: 752691 - DNA, 120 bp, Artificial Sequence
  ENSG00000211689_11 (sequence is synthesized)
acctcaggtgagttccaggaactctatgtgccataatctcctcatgtaaaatgaagttataatgccccgtttcctggagttatgtggattagatgagttaatgacacctggcacatgcaa

SEQ ID NO: 752692 - DNA, 120 bp, Artificial Sequence
  ENSG00000211689_12 (sequence is synthesized)
gtcctccacagtgtcggcacgcactgttggtagctctactctagagacagtaataaaccaaaaagtatctgacacaggcctcaatcaacttagaagtttattttgcctatgttaagggca

SEQ ID NO: 752693 - DNA, 120 bp, Artificial Sequence
  ENSG00000211689_13 (sequence is synthesized)
tgcccaacttcctgagataataatttatttcataagaatattttaaaaactcgagtaaacttgttaatgtttattgctgcagccactctgtccatctccaccatcactgcaacaacgcag

SEQ ID NO: 752694 - DNA, 120 bp, Artificial Sequence
  ENSG00000211689_14 (sequence is synthesized)
gtccttgttgcctcttattggcttatggtgaccacctataaaaccatctgcttcacccaaattgctgtcctggggagtgccccttcctttctgcttgcacatttatcttcctcaagtgca

SEQ ID NO: 752695 - DNA, 120 bp, Artificial Sequence
  ENSG00000211689_15 (sequence is synthesized)
aatgtgatcatgtgactttcctccctaaatcttttagcaagtcctcattgtctattcttctttcaaaaacatttatttgaaaatactattaaaatagaaaattttccacattcttacttc

SEQ ID NO: 752696 - DNA, 120 bp, Artificial Sequence
  ENSG00000211689_16 (sequence is synthesized)
ttaaaaattaatgtgttttaagtttctcctactccatttccatcccatgcctctttactcaatggatgcaattattcttctacatgttccttctggccatgtgtagctttgtcattttaa

SEQ ID NO: 752697 - DNA, 120 bp, Artificial Sequence
  ENSG00000211689_17 (sequence is synthesized)
ttttaatctatttggaccctgtgttatctgggatgaggtagagtgatatttttattttctcaggtaattatttgcctaatgcctgtttccaaataatccaccatttccttacaatttaaa

SEQ ID NO: 752698 - DNA, 120 bp, Artificial Sequence
  ENSG00000211689_18 (sequence is synthesized)
aatgctccagcatgtttttaatagctacacatatttgacacattttctggagaatttctgttttatttgtctatttcattattcttgtatcattatcatattatctcagtagctttgtgg

SEQ ID NO: 752699 - DNA, 120 bp, Artificial Sequence
  ENSG00000211689_19 (sequence is synthesized)
caagtattaagatctactatgccaaatgtctattcactgtaccatttttcagaaaattctttttcaatcatctcatatttattcactcctgtagaatttaaaatcaacttatctagccta

SEQ ID NO: 752700 - DNA, 120 bp, Artificial Sequence
  ENSG00000211689_20 (sequence is synthesized)
acattaaacctcacaccctagaacaacaacatgtcgtagtaattctgactaaaattgctggaaatttatagatgaatttagggtgtattggcctctttatgatagaagctttttattcat

SEQ ID NO: 752701 - DNA, 120 bp, Artificial Sequence
  ENSG00000211689_21 (sequence is synthesized)
caatgtatgtttctccatttatttaggttttattttatgcccttaggaaaactaaatactgtgttcttcatatcattcttgtatttttttggtaaatttaataaaagattttataattca

SEQ ID NO: 752702 - DNA, 120 bp, Artificial Sequence
  ENSG00000211693_0 (sequence is synthesized)
atgccactggtagtagctgttatcttcttctccctctgggtttgtgagttgccccctaatcatttcagtctacagaagagattgaagtcattctgtattattacctcttcacgtatcgtt

SEQ ID NO: 752703 - DNA, 120 bp, Artificial Sequence
  ENSG00000211693_1 (sequence is synthesized)
aaggcatccatccaaggctttagcagtaaaatcatacactggtactggcagaaaccaaacaaaggcttagaatatttattacatgtcttcttgacaatctctgctcaagattgctcaggt

SEQ ID NO: 752704 - DNA, 120 bp, Artificial Sequence
  ENSG00000211693_2 (sequence is synthesized)
gggaagactaagaaacttgaggtaagtaaaaatgctcacacttccacttccactttgaaaataaagttcttagagaaagaagatgaggtggtgtaccactgtgcctgctggattaggcac

SEQ ID NO: 752705 - DNA, 120 bp, Artificial Sequence
  ENSG00000211694_0 (sequence is synthesized)
actttcctgccttctccttgggtacaccgccccgaagacaggatgtcactgctggaagcatttgccttctcctcctgggctcctgagttgctgtccgaacatttcagtctagctgcgtga

SEQ ID NO: 752706 - DNA, 120 bp, Artificial Sequence
  ENSG00000211694_1 (sequence is synthesized)
ccaaaatcattcttcaatgtttccctcttctactgtcagatgttcattggaaattctcctcttttacttacagttggacttggattatcaaaagtggagcagttccagctatccatttcc

SEQ ID NO: 752707 - DNA, 120 bp, Artificial Sequence
  ENSG00000211694_2 (sequence is synthesized)
caagatatcgagcacaaggtttgaaacagatgtcattcactggtaccggcagaaaccaaatcaggctttggagcacctgatctatattgtctcaacaaaatccgcagctcgacgcagcat

SEQ ID NO: 752708 - DNA, 120 bp, Artificial Sequence
  ENSG00000211694_3 (sequence is synthesized)
gggtaagacaagcaacaaagtggaggcaagaaagaattctcaaactctcacttcaatccttaccatcaagtccgtagagaaagaagacatggccgtttactactgtgctgcgtgggatta

SEQ ID NO: 752709 - DNA, 120 bp, Artificial Sequence
  ENSG00000211695_0 (sequence is synthesized)
aaaaaaattcaagtcaatccatagaagtgggtcgtggaattccaggcagaaagtgactaaatgaagatggaaggacagggagggggtggccacatcacagagaacctcttatcctaagaa

SEQ ID NO: 752710 - DNA, 120 bp, Artificial Sequence
  ENSG00000211695_1 (sequence is synthesized)
ctctggacttcatcttcagaggcaaggtagagagagcaaggactttagagcaggaaaaggaccaggtcagtctagtggccatggggaaggtgggtgggaggggccgagatgggatgtatg

SEQ ID NO: 752711 - DNA, 120 bp, Artificial Sequence
  ENSG00000211695_2 (sequence is synthesized)
gaggtgcgtgaggtggaggcagtggtgagccaggaaatgtttaggacgtagaatcctcaggaattagagtgcggtgaattagaggggagaattgaggctgatgctcaagctcctggcttg

SEQ ID NO: 752712 - DNA, 120 bp, Artificial Sequence
  ENSG00000211695_3 (sequence is synthesized)
ggcaatgtgggtagttatgtcatacagggaactcggaagaagatatggtttgggggaagggaatgagttcactctggctatgagcagactttgtttgagatcccatgtcagacgtacttg

SEQ ID NO: 752713 - DNA, 120 bp, Artificial Sequence
  ENSG00000211695_4 (sequence is synthesized)
aaaatgtccaagagttagctggatatgggtacagacagctttcgatttaactgaggtccgacttaagatttttttttactttatgatggtgcaaaagtgacacgcatttggtagaaaaca

SEQ ID NO: 752714 - DNA, 120 bp, Artificial Sequence
  ENSG00000211695_5 (sequence is synthesized)
taatttgacctttgctgtttccccaggacagtgatataaggttatgatactctcttgcgatgctgggcagtggcagtgagctgcagctcccagtgggtaaattaagcatggaaatctgga

SEQ ID NO: 752715 - DNA, 120 bp, Artificial Sequence
  ENSG00000211695_6 (sequence is synthesized)
acacagcagcttttaagggatgcactggggagagcagtttgtaaaaataccttgggacggattaaatgtcttggcttagagaaagaacaacagacaataggaaactgtcattgaggagaa

SEQ ID NO: 752716 - DNA, 120 bp, Artificial Sequence
  ENSG00000211695_7 (sequence is synthesized)
tgaatcttcaacagaagcaaacaaactgggatggagggcccagcctcatgaaggtgaccagaaggacccggtgctgcaggctgtgtgggtagctgagcagagctaagcggcttgacggac

SEQ ID NO: 752717 - DNA, 120 bp, Artificial Sequence
  ENSG00000211695_8 (sequence is synthesized)
caacatctctccagctggttgaagacaagctctcagaagacaatgctgcatgtcacagccccagcaaccaacaacaccagcctgacaacttgctggggtggccgccttgtggtctgaggt

SEQ ID NO: 752718 - DNA, 120 bp, Artificial Sequence
  ENSG00000211695_9 (sequence is synthesized)
ggccgtctaaactatgtggtctgatctcaggctgcagaccttgcaggactgtcttcacacagactggaagtgctaacaggtggtgaggacaccgctttacaacgatgcagggggccccat

SEQ ID NO: 752719 - DNA, 120 bp, Artificial Sequence
  ENSG00000211695_10 (sequence is synthesized)
gtcaccctcacccatgggaagtttgacttggtggactcagccaagccacagaggtctaacgcttctctgcggtgatttcaggctgccctggcagaaagcacagtgcctgcagacatgctg

SEQ ID NO: 752720 - DNA, 120 bp, Artificial Sequence
  ENSG00000211695_11 (sequence is synthesized)
tcactgctccacacatcaacgctggcagtccttggggctctgtgtgtatatggtgcaggtcacctagagcaacctcaaatttccagtactaaaacgctgtcaaaaacagcccgcctggaa

SEQ ID NO: 752721 - DNA, 120 bp, Artificial Sequence
  ENSG00000211695_12 (sequence is synthesized)
tgtgtggtgtctggaataacaatttctgcaacatctgtatattggtatcgagagagacctggtgaagtcatacagttcctggtgtccatttcatatgacggcactgtcagaaaggaatcc

SEQ ID NO: 752722 - DNA, 120 bp, Artificial Sequence
  ENSG00000211695_13 (sequence is synthesized)
ggcattccgtcaggcaaatttgaggtggataggatacctgaaacgtctacatccactctcaccattcacaatgtagagaaacaggacatagctacctactactgtgccttgtgggaggtg

SEQ ID NO: 752723 - DNA, 120 bp, Artificial Sequence
  ENSG00000211696_0 (sequence is synthesized)
ctactgtcttctgtgttagggatcacttccttgttgagtgggacctgagttttgagagggtcttctgctcctcttcgtctggtcccttacttccaagaccccagagaggaaggcatgctg

SEQ ID NO: 752724 - DNA, 120 bp, Artificial Sequence
  ENSG00000211696_1 (sequence is synthesized)
atcacttgtgatcttcctgtagaaaatgccgtctacacccactggtacctacaccaggaggggaaggccccacagcgtcttctgtactatgactcctacaactccagggttgtgttggaa

SEQ ID NO: 752725 - DNA, 120 bp, Artificial Sequence
  ENSG00000211696_2 (sequence is synthesized)
tcaggaatcagtcgagaaaagtatcatacttatgcaagcacagggaagagccttaaatttatactggaaaatctaattgaacgtgactctggggtctattactgtgccacctgggatagg

SEQ ID NO: 752726 - DNA, 120 bp, Artificial Sequence
  ENSG00000211697_0 (sequence is synthesized)
ttctgggaggaaggcttgggagtcccctaagacacatcttcagtcacttctctctgcctgtgactcaggaagaccagctcctcctactgtcttctgtgctagggatcacttccttgttga

SEQ ID NO: 752727 - DNA, 120 bp, Artificial Sequence
  ENSG00000211697_1 (sequence is synthesized)
gtggggccggagttttaagaggatcttctgctcctcctcatctggtccctttccttccaaggcccccgagaggaaggcatgcggtgggccctactggtgcttctagctttcctgtctcct

SEQ ID NO: 752728 - DNA, 120 bp, Artificial Sequence
  ENSG00000211697_2 (sequence is synthesized)
atcacttgtgaccttactgtaataaatgccttctacatccactggtacctacaccaggaggggaaggccccacagcgtcttctgtactatgacgtctccaactcaaaggatgtgttggaa

SEQ ID NO: 752729 - DNA, 120 bp, Artificial Sequence
  ENSG00000211697_3 (sequence is synthesized)
tcaggactcagtccaggaaagtattatactcatacacccaggaggtggagctggatattgatactacgaaatctaattgaaaatgattctggggtctattactgtgccacctgggacagg

SEQ ID NO: 752730 - DNA, 120 bp, Artificial Sequence
  ENSG00000211698_0 (sequence is synthesized)
ggcctgagctctcctggcccctggctctcttctgcagagggcctgctctcagctgccacaagagggcgccggagaacggacctgagcaagagaggcaggagctcctctgcaggtcctccc

SEQ ID NO: 752731 - DNA, 120 bp, Artificial Sequence
  ENSG00000211698_1 (sequence is synthesized)
aggcaccaatccttctgggagggaggaaggcttgggagtcctcttagacagatcctcagtcacttctctctgcttgtgtctcaggaagaccagctcctcctactgtcttctgtgctaggg

SEQ ID NO: 752732 - DNA, 120 bp, Artificial Sequence
  ENSG00000211698_2 (sequence is synthesized)
gaaggcatgcagtgggccctagcggtgcttctagctttcctgtctcctgccagtcagaaatcttccaacttggaagggagaacgaagtcagtcatcaggcagactgggtcatctgctgaa

SEQ ID NO: 752733 - DNA, 120 bp, Artificial Sequence
  ENSG00000211698_3 (sequence is synthesized)
atcacttgtgatcttgctgaaggaagtaccggctacatccactggtacctacaccaggaggggaaggccccacagcgtcttctgtactatgactcctacacctccagcgttgtgttggaa

SEQ ID NO: 752734 - DNA, 120 bp, Artificial Sequence
  ENSG00000211698_4 (sequence is synthesized)
tcaggaatcagcccagggaagtatgatacttacggaagcacaaggaagaacttgagaatgatactgcgaaatcttattgaaaatgactctggagtctattactgtgccacctgggatggg

SEQ ID NO: 752735 - DNA, 120 bp, Artificial Sequence
  ENSG00000211699_0 (sequence is synthesized)
cttgggagtcccctaagacacatcttcagtcacttctctctgcctgtgtctcaggaaaccagctcctcctactgtcttctgtgctagggatcacttccttgttgagtggggcctgagttt

SEQ ID NO: 752736 - DNA, 120 bp, Artificial Sequence
  ENSG00000211699_1 (sequence is synthesized)
taagaggatcttctgctcctcttcatctggtccgtttccttccaaggcccccgagaggaaggcatgcggtgggccctactggtgcttctagctttcctgtctcctgccagtcagaaatct

SEQ ID NO: 752737 - DNA, 120 bp, Artificial Sequence
  ENSG00000211699_2 (sequence is synthesized)
atcacttgcgatcttactgtaacaaataccttctacatccactggtacctacaccaggaggggaaggccccacagcgtcttctgtactatgacgtctccaccgcaagggatgtgttggaa

SEQ ID NO: 752738 - DNA, 120 bp, Artificial Sequence
  ENSG00000211699_3 (sequence is synthesized)
tcaggactcagtccaggaaagtattatactcatacacccaggaggtggagctggatattgagactgcaaaatctaattgaaaatgattctggggtctattactgtgccacctgggacagg

SEQ ID NO: 752739 - DNA, 120 bp, Artificial Sequence
  ENSG00000211701_0 (sequence is synthesized)
tactgtcttctgtgctagggatcacttccttgttgagtggggcctgagttttaagaggatcttctgctcctcttcatctggtccctttccttccaaggccccagagaggaaggcatgcgg

SEQ ID NO: 752740 - DNA, 120 bp, Artificial Sequence
  ENSG00000211701_1 (sequence is synthesized)
gaaatcacctgtgatcttcctggagcaagtaccttatacatccactggtacctgcaccaggaggggaaggccccacagtgtcttctgtactatgaaccctactactccagggttgtgctg

SEQ ID NO: 752741 - DNA, 120 bp, Artificial Sequence
  ENSG00000211701_2 (sequence is synthesized)
gaatcaggaatcactccaggaaagtatgacactggaagcacaaggagcaattggaatttgagactgcaaaatctaattaaaaatgattctgggttctattactgtgccacctgggacagg

SEQ ID NO: 752742 - DNA, 120 bp, Artificial Sequence
  ENSG00000211706_0 (sequence is synthesized)
gttcccctatcaccgatgcacagacccagaagacccctccatcctgtagcacctgccatgagcatcgggctcctgtgctgtgtggccttttctctcctgtgggcaagtccagtgaatgct

SEQ ID NO: 752743 - DNA, 120 bp, Artificial Sequence
  ENSG00000211706_1 (sequence is synthesized)
acagagcatgacactgcagtgtgcccaggatatgaaccataactccatgtactggtatcgacaagacccaggcatgggactgaggctgatttattactcagcttctgagggtaccactga

SEQ ID NO: 752744 - DNA, 120 bp, Artificial Sequence
  ENSG00000211706_2 (sequence is synthesized)
caaaggagaagtccccaatggctacaatgtctccagattaaacaaacgggagttctcgctcaggctggagtcggctgctccctcccagacatctgtgtacttctgtgccagcagtgaagc

SEQ ID NO: 752745 - DNA, 120 bp, Artificial Sequence
  ENSG00000211707_0 (sequence is synthesized)
ctggtaaagctcccatcctgccctgaccctgccatgggcacaaggctcctctgctgggcagccatatgtctcctgggggcagatcacacaggtgctggagtctcccagtccctgagacac

SEQ ID NO: 752746 - DNA, 120 bp, Artificial Sequence
  ENSG00000211707_1 (sequence is synthesized)
ggatgtagctctcagatatgatccaatttcaggtcataatgccctttattggtaccgacagagcctggggcagggcctggagtttccaatttacttccaaggcaaggatgcagcagacaa

SEQ ID NO: 752747 - DNA, 120 bp, Artificial Sequence
  ENSG00000211707_2 (sequence is synthesized)
atcggggcttccccgtgatcggttctctgcacagaggtctgagggatccatctccactctgaagttccagcgcacacagcagggggacttggctgtgtatctctgtgccagcagctcagc

SEQ ID NO: 752748 - DNA, 120 bp, Artificial Sequence
  ENSG00000211710_0 (sequence is synthesized)
agaggccccatctcagacccgaggctagcatgggctgcaggctgctctgctgtgcggttctctgtctcctgggagcagttcccatagacactgaagttacccagacaccaaaacacctgg

SEQ ID NO: 752749 - DNA, 120 bp, Artificial Sequence
  ENSG00000211710_1 (sequence is synthesized)
aaataagaagtctttgaaatgtgaacaacatatggggcacagggctatgtattggtacaagcagaaagctaagaagccaccggagctcatgtttgtctacagctatgagaaactctctat

SEQ ID NO: 752750 - DNA, 120 bp, Artificial Sequence
  ENSG00000211710_2 (sequence is synthesized)
aaatgaaagtgtgccaagtcgcttctcacctgaatgccccaacagctctctcttaaaccttcacctacacgccctgcagccagaagactcagccctgtatctctgcgccagcagccaaga

SEQ ID NO: 752751 - DNA, 120 bp, Artificial Sequence
  ENSG00000211713_0 (sequence is synthesized)
ctctgtcttgtagcatctgccatgagcatcaggctcctgtgctgtgtggccttttctctcctgtgggcaggtccagtgactgctgggatcacccaggcaccaacatctcagatcctggca

SEQ ID NO: 752752 - DNA, 120 bp, Artificial Sequence
  ENSG00000211713_1 (sequence is synthesized)
acggagcatgacactgagatgtacccaggatatgagacataatgccatgtactggtatagacaagatctaggactggggctaaggctcatccattattcaaatactgcaggtaccactgg

SEQ ID NO: 752753 - DNA, 120 bp, Artificial Sequence
  ENSG00000211713_2 (sequence is synthesized)
caaaggagaagtccctgatggttatagtgtctccagagcaaacacagatgatttccccctcacgttggcgtctgctgtaccctctcagacatctgtgtacttctgtgccagcagtgactc

SEQ ID NO: 752754 - DNA, 120 bp, Artificial Sequence
  ENSG00000211714_0 (sequence is synthesized)
ctcacagtgaccctgatctggtaaagctcccatcctgccctgactctgtcatgggcaccaggctcctctgctgggcagccctgtgcctcctgggggcagatcacacaggtgctggagtct

SEQ ID NO: 752755 - DNA, 120 bp, Artificial Sequence
  ENSG00000211714_1 (sequence is synthesized)
agatgtagagctcaggtgtgatccaatttcaggtcatactgccctttactggtaccgacaaagcctggggcagggcccagagtttctaatttacttccaaggcacgggtgcggcagatga

SEQ ID NO: 752756 - DNA, 120 bp, Artificial Sequence
  ENSG00000211714_2 (sequence is synthesized)
ctcagggctgcccaaagatcggttctttgcagtcaggcctgagggatccgtctctactctgaagatccagcgcacagagcagggggactcagccgcgtatctccgtgccagcagcttaac

SEQ ID NO: 752757 - DNA, 120 bp, Artificial Sequence
  ENSG00000211715_0 (sequence is synthesized)
atgggccctgggctcctctgctgggaactgctttatctcctgggagcaggcccagtggaggctggagtcacccaaagtcccacacacctgatcaaaacgagaggacagcaagtgactctg

SEQ ID NO: 752758 - DNA, 120 bp, Artificial Sequence
  ENSG00000211715_1 (sequence is synthesized)
cagaaggaaacttccctaatcgattctcagggcgccagttccatgactattgctctgagatgaatgtgagtgccttggagctgggggactcggccctgtatctctgtgccagaagcttgg

SEQ ID NO: 752759 - DNA, 120 bp, Artificial Sequence
  ENSG00000211716_0 (sequence is synthesized)
agaatgcttactacagagacaccagccccaagctaggagatcctgccatgggcttcaggctcctctgctgtgtggccttttgtctcctgggagcaggcccagtggattctggagtcacac

SEQ ID NO: 752760 - DNA, 120 bp, Artificial Sequence
  ENSG00000211716_1 (sequence is synthesized)
gacagcgagtgacgctgagatgctcccctaggtctggagacctctctgtgtactggtaccaacagagcctggaccagggcctccagttcctcattcactattataatggagaagagagag

SEQ ID NO: 752761 - DNA, 120 bp, Artificial Sequence
  ENSG00000211716_2 (sequence is synthesized)
caaaaggaaacattcttgaacgattctccgcacaacagttccctgacttgcactctgaactaaacctgagctctctggagctgggggactcagctttgtatttctgtgccagcagcgtag

SEQ ID NO: 752762 - DNA, 120 bp, Artificial Sequence
  ENSG00000211717_0 (sequence is synthesized)
actgagagcccaacttcagtctgcccacagcagggctgggagacacaagatcctgccctggagctgaaatgggcacgaggctcttcttctatgtggccctttgtctgctgtgggcaggac

SEQ ID NO: 752763 - DNA, 120 bp, Artificial Sequence
  ENSG00000211717_1 (sequence is synthesized)
aaggcaggtgaccttggcgtgtcaccagacttggaaccacaacaatatgttctggtatcgacaagacctgggacatgggctgaggctgatccattactcatatggtgttcacgacactaa

SEQ ID NO: 752764 - DNA, 120 bp, Artificial Sequence
  ENSG00000211717_2 (sequence is synthesized)
caaaggagaagtctcagatggctacagtgtctctagatcaaacacagaggacctccccctcactctggagtctgctgcctcctcccagacatctgtatatttctgcgccagcagtgagtc

SEQ ID NO: 752765 - DNA, 120 bp, Artificial Sequence
  ENSG00000211720_0 (sequence is synthesized)
cctgccctgaccctgccatgagcaccaggcttctctgctggatggccctctgtctcctgggggcagaactctcagaagctgaagttgcccagtcccccagatataagattacagagaaaa

SEQ ID NO: 752766 - DNA, 120 bp, Artificial Sequence
  ENSG00000211720_1 (sequence is synthesized)
ggctgtggctttttggtgtgatcctatttctggccatgctaccctttactggtaccggcagatcctgggacagggcccggagcttctggttcaatttcaggatgagagtgtagtagatga

SEQ ID NO: 752767 - DNA, 120 bp, Artificial Sequence
  ENSG00000211720_2 (sequence is synthesized)
ttcacagttgcctaaggatcgattttctgcagagaggctcaaaggagtagactccactctcaagatccagcctgcagagcttggggactcggccatgtatctctgtgccagcagcttagc

SEQ ID NO: 752768 - DNA, 120 bp, Artificial Sequence
  ENSG00000211721_0 (sequence is synthesized)
gagagtcctgctcccctttcatcaatgcacagatacagaagacccctccgtcatgcagcatctgccatgagcatcggcctcctgtgctgtgcagccttgtctctcctgtgggcaggtcca

SEQ ID NO: 752769 - DNA, 120 bp, Artificial Sequence
  ENSG00000211721_1 (sequence is synthesized)
acagagcatgacactgcagtgtgcccaggatatgaaccatgaatacatgtcctggtatcgacaagacccaggcatggggctgaggctgattcattactcagttggtgctggtatcactga

SEQ ID NO: 752770 - DNA, 120 bp, Artificial Sequence
  ENSG00000211721_2 (sequence is synthesized)
ccaaggagaagtccccaatggctacaatgtctccagatcaaccacagaggatttcccgctcaggctgctgtcggctgctccctcccagacatctgtgtacttctgtgccagcagttactc

SEQ ID NO: 752771 - DNA, 120 bp, Artificial Sequence
  ENSG00000211724_0 (sequence is synthesized)
caatgcacagatacagaagacccctccgtcctggagcacctgccatgagcatcagcctcctgtgctgtgcagcctttcctctcctgtgggcaggtccagtgaatgctggtgtcactcaga

SEQ ID NO: 752772 - DNA, 120 bp, Artificial Sequence
  ENSG00000211724_1 (sequence is synthesized)
acagagcatgacactgcagtgtgcccaggatatgaaccataactacatgtactggtatcgacaagacccaggcatggggctgaagctgatttattattcagttggtgctggtatcactga

SEQ ID NO: 752773 - DNA, 120 bp, Artificial Sequence
  ENSG00000211724_2 (sequence is synthesized)
caaaggagaagtcccgaatggctacaacgtctccagatcaaccacagaggatttcccgctcaggctggagttggctgctccctcccagacatctgtgtacttctgtgccagcagttactc

SEQ ID NO: 752774 - DNA, 120 bp, Artificial Sequence
  ENSG00000211725_0 (sequence is synthesized)
ctgtgccatgggccctgggctcctctgctgggtgctgctttgtctcctgggagcaggcccagtggacgctggagtcacccaaagtcccacacacctgatcaaaacgagaggacagcaagt

SEQ ID NO: 752775 - DNA, 120 bp, Artificial Sequence
  ENSG00000211725_1 (sequence is synthesized)
gaagaggaaacttccctgatcgattctcagctcgccagttccctaactatagctctgagctgaatgtgaacgccttgttgctgggggactcggccctgtatctctgtgccagcagcttgg

SEQ ID NO: 752776 - DNA, 120 bp, Artificial Sequence
  ENSG00000211727_0 (sequence is synthesized)
agtgacactgatctggtaaagccctcatcctgtcctgaccctgccatgggcaccagtctcctatgctgggtggtcctgggtttcctagggacagatcacacaggtgctggagtctcccag

SEQ ID NO: 752777 - DNA, 120 bp, Artificial Sequence
  ENSG00000211727_1 (sequence is synthesized)
ggatgtagctctcaggtgtgatccaatttcgggtcatgtatccctttattggtaccgacaggccctggggcagggcccagagtttctgacttacttcaattatgaagcccaacaagacaa

SEQ ID NO: 752778 - DNA, 120 bp, Artificial Sequence
  ENSG00000211727_2 (sequence is synthesized)
atcagggctgcccaatgatcggttctctgcagagaggcctgagggatccatctccactctgacgatccagcgcacagagcagcgggactcggccatgtatcgctgtgccagcagcttagc

SEQ ID NO: 752779 - DNA, 120 bp, Artificial Sequence
  ENSG00000211728_0 (sequence is synthesized)
aagccctgaatcagatgcagtgcttcctgtccctctgtgccatgggccccgggctcctctgctgggcactgctttgtctcctgggagcaggcttagtggacgctggagtcacccaaagtc

SEQ ID NO: 752780 - DNA, 120 bp, Artificial Sequence
  ENSG00000211728_1 (sequence is synthesized)
gacagcaagtgactctgagatgctctcctaagtctgggcatgacactgtgtcctggtaccaacaggccctgggtcaggggccccagtttatctttcagtattatgaggaggaagagagac

SEQ ID NO: 752781 - DNA, 120 bp, Artificial Sequence
  ENSG00000211728_2 (sequence is synthesized)
agagaggcaacttccctgatcgattctcaggtcaccagttccctaactatagctctgagctgaatgtgaacgccttgttgctgggggactcggccctctatctctgtgccagcagcttgg

SEQ ID NO: 752782 - DNA, 120 bp, Artificial Sequence
  ENSG00000211731_0 (sequence is synthesized)
atgggccccgggctcctctgctgggtgctgctttgtcccctaggagaaggcccagtggacgctggagtcacccaaagtcccacacacctgatcaaaacgagaggacagcacgtgactctg

SEQ ID NO: 752783 - DNA, 120 bp, Artificial Sequence
  ENSG00000211731_1 (sequence is synthesized)
gaagaggaaacttccctgatcaattctcaggtcaccagttccctaactatagctctgagctgaatgtgaacgccttgttgctaggggactcggccctctatctctgtgccagcagcttgg

SEQ ID NO: 752784 - DNA, 120 bp, Artificial Sequence
  ENSG00000211734_0 (sequence is synthesized)
ctcagaggaccagtatccctcacagggtgacacctgaccagctctgtcccacctggccatgggctccaggtacctctgatgggaagacctttgtctcttgggaacaagtgaatccttggc

SEQ ID NO: 752785 - DNA, 120 bp, Artificial Sequence
  ENSG00000211734_1 (sequence is synthesized)
acaggcccagtggattctgctgtgcagaacagagagcagtggacctcaggaggcctgcaaggggaggacataggacagtgacatcacagtatgcccctcccaccaggaaaagcaaggctg

SEQ ID NO: 752786 - DNA, 120 bp, Artificial Sequence
  ENSG00000211734_2 (sequence is synthesized)
gcctgcccctttgtgccatgggctccaggctgctctgttgggtgctgctttgtctcctgggagcaggcccagtaaaggctggagtcactcaaactccaagatatctgatcaaaacgagag

SEQ ID NO: 752787 - DNA, 120 bp, Artificial Sequence
  ENSG00000211734_3 (sequence is synthesized)
gacagcaagtgacactgagctgctcccctatctctgggcataggagtgtatcctggtaccaacagaccccaggacagggccttcagttcctctttgaatacttcagtgagacacagagaa

SEQ ID NO: 752788 - DNA, 120 bp, Artificial Sequence
  ENSG00000211734_4 (sequence is synthesized)
acaaaggaaacttccctggtcgattctcagggcgccagttctctaactctcgctctgagatgaatgtgagcaccttggagctgggggactcggccctttatctttgcgccagcagcttgg

SEQ ID NO: 752789 - DNA, 120 bp, Artificial Sequence
  ENSG00000211745_0 (sequence is synthesized)
aggagcagtgacatcacaggaaaaaccaccaaccaaggccaaggagaccagagcccagcacctcacccagaggaccccagtcagaggccccatctcagacccgaggctagcatgggctgc

SEQ ID NO: 752790 - DNA, 120 bp, Artificial Sequence
  ENSG00000211745_1 (sequence is synthesized)
aaataagaagtctttgaaatgtgaacaacatctggggcataacgctatgtattggtacaagcaaagtgctaagaagccactggagctcatgtttgtctacaactttaaagaacagactga

SEQ ID NO: 752791 - DNA, 120 bp, Artificial Sequence
  ENSG00000211745_2 (sequence is synthesized)
aaacaacagtgtgccaagtcgcttctcacctgaatgccccaacagctctcacttattccttcacctacacaccctgcagccagaagactcggccctgtatctctgtgccagcagccaaga

SEQ ID NO: 752792 - DNA, 120 bp, Artificial Sequence
  ENSG00000211746_0 (sequence is synthesized)
ggaggtgcgaatgactctgctctctgtcctgtctcctcatctgcaaaattaggaagcctgtcttgattatctccaggaacctcccacctcttcattccagcctctgacaaactctgcaca

SEQ ID NO: 752793 - DNA, 120 bp, Artificial Sequence
  ENSG00000211746_1 (sequence is synthesized)
ttaggccaggagaagcccccgagccaagtctcttttctcattctcttccaacaagtgcttggagctccaagaaggccccctttgcactatgagcaaccaggtgctctgctgtgtggtcct

SEQ ID NO: 752794 - DNA, 120 bp, Artificial Sequence
  ENSG00000211746_2 (sequence is synthesized)
acagaatgtgaccctgagttgtgaacagaatttgaaccacgatgccatgtactggtaccgacaggacccagggcaagggctgagattgatctactactcacagatagtaaatgactttca

SEQ ID NO: 752795 - DNA, 120 bp, Artificial Sequence
  ENSG00000211746_3 (sequence is synthesized)
gaaaggagatatagctgaagggtacagcgtctctcgggagaagaaggaatcctttcctctcactgtgacatcggcccaaaagaacccgacagctttctatctctgtgccagtagtataga

SEQ ID NO: 752796 - DNA, 120 bp, Artificial Sequence
  ENSG00000211747_0 (sequence is synthesized)
gtcatccctcctcgctggtgaatggaggcagtggtcacaactctccccagagaaggtggtgtgaggccatcacggaagatgctgctgcttctgctgcttctggggccaggctccgggctt

SEQ ID NO: 752797 - DNA, 120 bp, Artificial Sequence
  ENSG00000211747_1 (sequence is synthesized)
tgtgaagatcgagtgccgttccctggactttcaggccacaactatgttttggtatcgtcagttcccgaaacagagtctcatgctgatggcaacttccaatgagggctccaaggccacata

SEQ ID NO: 752798 - DNA, 120 bp, Artificial Sequence
  ENSG00000211747_2 (sequence is synthesized)
cgagcaaggcgtcgagaaggacaagtttctcatcaaccatgcaagcctgaccttgtccactctgacagtgaccagtgcccatcctgaagacagcagcttctacatctgcagtgctagaga

SEQ ID NO: 752799 - DNA, 120 bp, Artificial Sequence
  ENSG00000211749_0 (sequence is synthesized)
atgggcaccaggctcctcggctgtgcagccctgtgtctcctggcagcagactcttttcatgccaaagtcacacagactccaggacatttggtcaaaggaaaaggacagaaaacaaagatg

SEQ ID NO: 752800 - DNA, 120 bp, Artificial Sequence
  ENSG00000211749_1 (sequence is synthesized)
aacggagatgcacaagaagcgattctcatctcaatgccccaagaacgcaccctgcagcctggcaatcctgtcctcagaaccgggagacacggcactgtatctctgcgccagcagtcaatc

SEQ ID NO: 752801 - DNA, 120 bp, Artificial Sequence
  ENSG00000211750_0 (sequence is synthesized)
agagctggaaacacctccatcctgcctcttcatgccatggcctccctgctcttcttctgtggggccttttatctcctgggaacagggtccatggatgctgatgttacccagaccccaagg

SEQ ID NO: 752802 - DNA, 120 bp, Artificial Sequence
  ENSG00000211750_1 (sequence is synthesized)
aagaggattatgctggaatgttctcagactaagggtcatgatagaatgtactggtatcgacaagacccaggactgggcctacagttgatctattactcctttgatgtcaaagatataaac

SEQ ID NO: 752803 - DNA, 120 bp, Artificial Sequence
  ENSG00000211750_2 (sequence is synthesized)
aaaggagagatctctgatggatacagtgtctctcgacaggcacaggctaaattctccctgtccctagagtctgccatccccaaccagacagctctttacttctgtgccaccagtgatttg

SEQ ID NO: 752804 - DNA, 120 bp, Artificial Sequence
  ENSG00000211751_0 (sequence is synthesized)
aggacctgaacaaggtgttcccacccgaggtcgctgtgtttgagccatcagaagcagagatctcccacacccaaaaggccacactggtgtgcctggccacaggcttcttccctgaccacg

SEQ ID NO: 752805 - DNA, 120 bp, Artificial Sequence
  ENSG00000211751_1 (sequence is synthesized)
tggagctgagctggtgggtgaatgggaaggaggtgcacagtggggtcagcacggacccgcagcccctcaaggagcagcccgccctcaatgactccagatactgcctgagcagccgcctga

SEQ ID NO: 752806 - DNA, 120 bp, Artificial Sequence
  ENSG00000211751_2 (sequence is synthesized)
gggtctcggccaccttctggcagaacccccgcaaccacttccgctgtcaagtccagttctacgggctctcggagaatgacgagtggacccaggatagggccaaacccgtcacccagatcg

SEQ ID NO: 752807 - DNA, 120 bp, Artificial Sequence
  ENSG00000211751_3 (sequence is synthesized)
ctcggtgtcctaccagcaaggggtcctgtctgccaccatcctctatgagatcctgctagggaaggccaccctgtatgctgtgctggtcagcgcccttgtgttgatggccatggtcaagag

SEQ ID NO: 752808 - DNA, 120 bp, Artificial Sequence
  ENSG00000211751_4 (sequence is synthesized)
aaaggatttctgaaggcagccctggaagtggagttaggagcttctaacccgtcatggtttcaatacacattcttcttttgccagcgcttctgaagagctgctctcacctctctgcatccc

SEQ ID NO: 752809 - DNA, 120 bp, Artificial Sequence
  ENSG00000211751_5 (sequence is synthesized)
aatagatatccccctatgtgcatgcacacctgcacactcacggctgaaatctccctaacccagggggaccttagcatgcctaagtgactaaaccaataaaaatgttctggtctggcctga

SEQ ID NO: 752810 - DNA, 120 bp, Artificial Sequence
  ENSG00000211752_0 (sequence is synthesized)
acctggagcccccagaactggcagacacctgcctgatgctgccatgggcccccagctccttggctatgtggtcctttgccttctaggagcaggccccctggaagcccaagtgacccagaa

SEQ ID NO: 752811 - DNA, 120 bp, Artificial Sequence
  ENSG00000211752_1 (sequence is synthesized)
aaagaagttaacagtgacttgttctcagaatatgaaccatgagtatatgtcctggtatcgacaagacccagggctgggcttaaggcagatctactattcaatgaatgttgaggtgactga

SEQ ID NO: 752812 - DNA, 120 bp, Artificial Sequence
  ENSG00000211752_2 (sequence is synthesized)
taagggagatgttcctgaagggtacaaagtctctcgaaaagagaagaggaatttccccctgatcctggagtcgcccagccccaaccagacctctctgtacttctgtgccagcagtttatc

SEQ ID NO: 752813 - DNA, 120 bp, Artificial Sequence
  ENSG00000211753_0 (sequence is synthesized)
attctttcttcaaagcagccatgggaatcaggctcctctgtcgtgtggccttttgtttcctggctgtaggcctcgtagatgtgaaagtaacccagagctcgagatatctagtcaaaagga

SEQ ID NO: 752814 - DNA, 120 bp, Artificial Sequence
  ENSG00000211753_1 (sequence is synthesized)
agagaaagtttttctggaatgtgtccaggatatggaccatgaaaatatgttctggtatcgacaagacccaggtctggggctacggctgatctatttctcatatgatgttaaaatgaaaga

SEQ ID NO: 752815 - DNA, 120 bp, Artificial Sequence
  ENSG00000211753_2 (sequence is synthesized)
aaaaggagatattcctgaggggtacagtgtctctagagagaagaaggagcgcttctccctgattctggagtccgccagcaccaaccagacatctatgtacctctgtgccagcagtttatg

SEQ ID NO: 752816 - DNA, 120 bp, Artificial Sequence
  ENSG00000211772_0 (sequence is synthesized)
aggacctgaaaaacgtgttcccacccaaggtcgctgtgtttgagccatcagaagcagagatctcccacacccaaaaggccacactggtgtgcctggccacaggcttctaccccgaccacg

SEQ ID NO: 752817 - DNA, 120 bp, Artificial Sequence
  ENSG00000211772_1 (sequence is synthesized)
tggagctgagctggtgggtgaatgggaaggaggtgcacagtggggtcagcacagacccgcagcccctcaaggagcagcccgccctcaatgactccagatactgcctgagcagccgcctga

SEQ ID NO: 752818 - DNA, 120 bp, Artificial Sequence
  ENSG00000211772_2 (sequence is synthesized)
gggtctcggccaccttctggcagaacccccgcaaccacttccgctgtcaagtccagttctacgggctctcggagaatgacgagtggacccaggatagggccaaacctgtcacccagatcg

SEQ ID NO: 752819 - DNA, 120 bp, Artificial Sequence
  ENSG00000211772_3 (sequence is synthesized)
acctccgagtcttaccagcaaggggtcctgtctgccaccatcctctatgagatcttgctagggaaggccaccttgtatgccgtgctggtcagtgccctcgtgctgatggccatggtcaag

SEQ ID NO: 752820 - DNA, 120 bp, Artificial Sequence
  ENSG00000211772_4 (sequence is synthesized)
agaaaggattccagaggctagctccaaaaccatcccaggtcattcttcatcctcacccaggattctcctgtacctgctcccaatctgtgttcctaaaagtgattctcactctgcttctca

SEQ ID NO: 752821 - DNA, 120 bp, Artificial Sequence
  ENSG00000211772_5 (sequence is synthesized)
tctcctacttacatgaatacttctctcttttttctgtttccctgaagattgagctcccaacccccaagtacgaaataggctaaaccaataaaaaattgtgtgttgggcctggttgcattt

SEQ ID NO: 752822 - DNA, 120 bp, Artificial Sequence
  ENSG00000211776_0 (sequence is synthesized)
cattttggccatggctttgcagagcactctgggggcggtgtggctagggcttctcctcaactctctctggaaggttgcagaaagcaaggaccaagtgtttcagccttccacagtggcatc

SEQ ID NO: 752823 - DNA, 120 bp, Artificial Sequence
  ENSG00000211776_1 (sequence is synthesized)
aggctcaaagccttctcagcagggacgatacaacatgacctatgaacggttctcttcatcgctgctcatcctccaggtgcgggaggcagatgctgctgtttactactgtgctgtggagga

SEQ ID NO: 752824 - DNA, 120 bp, Artificial Sequence
  ENSG00000211777_0 (sequence is synthesized)
ccggtgtcgggaagcaccagtgccctgaggaagggccatttccaaaagccctgtgctgacacagggttgctggttcctcttcaagagcccactctctggggtggggccatatctccagca

SEQ ID NO: 752825 - DNA, 120 bp, Artificial Sequence
  ENSG00000211777_1 (sequence is synthesized)
gaggtgggctggaaaggacccccccaatcccgcccgccgtgagcttagctggagccatggcctctgcacccatctcgatgcttgcgatgctcttcacattgagtgggctgagagctcagt

SEQ ID NO: 752826 - DNA, 120 bp, Artificial Sequence
  ENSG00000211777_2 (sequence is synthesized)
ggaatcctctgactgtgaaatgcacctattcagtctctggaaacccttatcttttttggtatgttcaataccccaaccgaggcctccagttccttctgaaatacatcacaggggataacc

SEQ ID NO: 752827 - DNA, 120 bp, Artificial Sequence
  ENSG00000211777_3 (sequence is synthesized)
tggttaaaggcagctatggctttgaagctgaatttaacaagagccaaacctccttccacctgaagaaaccatctgcccttgtgagcgactccgctttgtacttctgtgctgtgagagaca

SEQ ID NO: 752828 - DNA, 120 bp, Artificial Sequence
  ENSG00000211778_0 (sequence is synthesized)
ctgggctcattgcagctcagacacagcaaaagagcctagaacctgggtcctagtttgcacctagaatatgaggcaagtggcgagagtgatcgtgttcctgaccctgagtactttgagcct

SEQ ID NO: 752829 - DNA, 120 bp, Artificial Sequence
  ENSG00000211778_1 (sequence is synthesized)
atgaaggacaagaagtgaacataacctgtagccacaacaacattgctacaaatgattatatcacgtggtaccaacagtttcccagccaaggaccacgatttattattcaaggatacaaga

SEQ ID NO: 752830 - DNA, 120 bp, Artificial Sequence
  ENSG00000211778_2 (sequence is synthesized)
caaaagttacaaacgaagtggcctccctgtttatccctgccgacagaaagtccagcactctgagcctgccccgggtttccctgagcgacactgctgtgtactactgcctcgtgggtgaca

SEQ ID NO: 752831 - DNA, 120 bp, Artificial Sequence
  ENSG00000211779_0 (sequence is synthesized)
gtggggagaacaatgaagacatttgctggattttcgttcctgtttttgtggctgcagctggactgtatgagtagaggagaggatgtggagcagagtcttttcctgagtgtccgagaggga

SEQ ID NO: 752832 - DNA, 120 bp, Artificial Sequence
  ENSG00000211779_1 (sequence is synthesized)
tggacatgaaacaagaccaaagactcactgttctattgaataaaaaggataaacatctgtctctgcgcattgcagacacccagactggggactcagctatctacttctgtgcagagagta

SEQ ID NO: 752833 - DNA, 120 bp, Artificial Sequence
  ENSG00000211780_0 (sequence is synthesized)
aaacagaatggctttttggctgagaagcctgggtctacatttcaggccacatttggggagacgaatggagtcattcctgggaggtgttttgctgattttgtggcttcaagtggactgggt

SEQ ID NO: 752834 - DNA, 120 bp, Artificial Sequence
  ENSG00000211780_1 (sequence is synthesized)
aggagggtaaaacggccaccctgacctgcaactatacaaactattctccagcatacttacagtggtaccgacaagatccaggaagaggccctgttttcttgctactcatacgtgaaaatg

SEQ ID NO: 752835 - DNA, 120 bp, Artificial Sequence
  ENSG00000211780_2 (sequence is synthesized)
agaaagaaaaaaggaaagaaagactgaaggtcacctttgataccacccttaaacagagtttgtttcatatcacagcctcccagcctgcagactcagctacctacctctgtgctctagaca

SEQ ID NO: 752836 - DNA, 120 bp, Artificial Sequence
  ENSG00000211781_0 (sequence is synthesized)
atggagaagatgcggagacctgtcctaattatattttgtctatgtcttggctgggcaaatggagaaaaccaggtggagcacagccctcattttctgggaccccagcagggagacgttgcc

SEQ ID NO: 752837 - DNA, 120 bp, Artificial Sequence
  ENSG00000211781_1 (sequence is synthesized)
cagctggatatgagaagcagaaaggaagactaaatgctacattactgaagaatggaagcagcttgtacattacagccgtgcagcctgaagattcagccacctatttctgtgctgtagatg

SEQ ID NO: 752838 - DNA, 120 bp, Artificial Sequence
  ENSG00000211782_0 (sequence is synthesized)
ccaaaacaagagacttgcctagcccaaccttcctcacgctcgctattctcaagacctgggttccagccactttcctactggccccgaggagaatttccaaagagacgcctgcagtgtttc

SEQ ID NO: 752839 - DNA, 120 bp, Artificial Sequence
  ENSG00000211782_1 (sequence is synthesized)
agcagcctcactggagttgggatgcaactattcctatggtggaactgttaatctcttctggtatgtccagtaccctggtcaacaccttcagcttctcctcaagtacttttcaggggatcc

SEQ ID NO: 752840 - DNA, 120 bp, Artificial Sequence
  ENSG00000211782_2 (sequence is synthesized)
actggttaaaggcatcaagggctttgaggctgaatttataaagagtaaattctcctttaatctgaggaaaccctctgtgcagtggagtgacacagctgagtacttctgtgccgtgaatgc

SEQ ID NO: 752841 - DNA, 120 bp, Artificial Sequence
  ENSG00000211783_0 (sequence is synthesized)
atgaattcttctccaggaccagcgattgcactattcttaatgtttgggggaatcaatggagattcagtggtccagacagaaggccaagtgctcccctctgaaggggattccctgattgtg

SEQ ID NO: 752842 - DNA, 120 bp, Artificial Sequence
  ENSG00000211783_1 (sequence is synthesized)
tgacaagggaaggaacaaaggttttgaagccatgtaccgtaaagaaaccacttctttccacttggagaaagactcagttcaagagtcagactccgctgtgtacttctgtgctctgagtga

SEQ ID NO: 752843 - DNA, 120 bp, Artificial Sequence
  ENSG00000211784_0 (sequence is synthesized)
agtcaacttctgggagcagatctctgcagaataaaaatgaaaaagcatctgacgaccttcttggtgattttgtggctttatttttatagggggaatggcaaaaaccaagtggagcagagt

SEQ ID NO: 752844 - DNA, 120 bp, Artificial Sequence
  ENSG00000211784_1 (sequence is synthesized)
tggagggaaagaactgcactcttcaatgcaattatacagtgagccccttcagcaacttaaggtggtataagcaagatacggggagaggtcctgtttccctgacaatcatgactttcagtg

SEQ ID NO: 752845 - DNA, 120 bp, Artificial Sequence
  ENSG00000211784_2 (sequence is synthesized)
agaacacaaagtcgaacggaagatatacagcaactctggatgcagacacaaagcaaagctctctgcacatcacagcctcccagctcagcgattcagcctcctacatctgtgtggtgagcg

SEQ ID NO: 752846 - DNA, 120 bp, Artificial Sequence
  ENSG00000211785_0 (sequence is synthesized)
atgatgatatccttgagagttttactggtgatcctgtggcttcagttaagctgggtttggagccaacggaaggaggtggagcaggatcctggacccttcaatgttccagagggagccact

SEQ ID NO: 752847 - DNA, 120 bp, Artificial Sequence
  ENSG00000211785_1 (sequence is synthesized)
ccagtggtaatgaagatggaaggtttacagcacagctcaatagagccagccagtatatttccctgctcatcagagactccaagctcagtgattcagccacctacctctgtgtggtgaaca

SEQ ID NO: 752848 - DNA, 120 bp, Artificial Sequence
  ENSG00000211786_0 (sequence is synthesized)
ggctgatgtagctcactgatgtctgtgtagatagggagctgtgacgagagcaagaggtcagaacacatccagactccttaagagaaagcctttctgttttggaaacttttcaaagccagg

SEQ ID NO: 752849 - DNA, 120 bp, Artificial Sequence
  ENSG00000211786_1 (sequence is synthesized)
gacttgtccagcccaacctccccattgctcctagctcccgaggctcaggacccctggcttctgtcctccctgctcagggtcctgcagcgttgcctctgctcagccatgctcctgctgctc

SEQ ID NO: 752850 - DNA, 120 bp, Artificial Sequence
  ENSG00000211786_2 (sequence is synthesized)
aggaaccccggtgctgctgaggtgcaactactcatcttcttattcaccgtctctcttctggtatgtgcaacaccccaacaaaggactccagcttctcctgaagtacacatcagcggccac

SEQ ID NO: 752851 - DNA, 120 bp, Artificial Sequence
  ENSG00000211786_3 (sequence is synthesized)
cctggttaaaggcatcaacggttttgaggctgaatttaagaagagtgaaacctccttccacctgacgaaaccctcagcccatatgagcgacgcggctgagtacttctgtgttgtgagtga

SEQ ID NO: 752852 - DNA, 120 bp, Artificial Sequence
  ENSG00000211787_0 (sequence is synthesized)
atgctcctggagcttatcccactgctggggatacattttgtcctgagaactgccagagcccagtcagtgacccagcctgacatccacatcactgtctctgaaggagcctcactggagttg

SEQ ID NO: 752853 - DNA, 120 bp, Artificial Sequence
  ENSG00000211787_1 (sequence is synthesized)
tctggttcaaggcattaaaggctttgaggctgaatttaagaggagtcaatcttccttcaatctgaggaaaccctctgtgcattggagtgatgctgctgagtacttctgtgctgtgggtgc

SEQ ID NO: 752854 - DNA, 120 bp, Artificial Sequence
  ENSG00000211788_0 (sequence is synthesized)
gatcttaattgggaagaacaaggatgacatccattcgagctgtatttatattcctgtggctgcagctggacttggtgaatggagagaatgtggagcagcatccttcaaccctgagtgtcc

SEQ ID NO: 752855 - DNA, 120 bp, Artificial Sequence
  ENSG00000211788_1 (sequence is synthesized)
aggagggagacagcgctgttatcaagtgtacttattcagacagtgcctcaaactacttcccttggtataagcaagaacttggaaaaggacctcagcttattatagacattcgttcaaatg

SEQ ID NO: 752856 - DNA, 120 bp, Artificial Sequence
  ENSG00000211788_2 (sequence is synthesized)
tgggcgaaaagaaagaccaacgaattgctgttacattgaacaagacagccaaacatttctccctgcacatcacagagacccaacctgaagactcggctgtctacttctgtgcagcaagta

SEQ ID NO: 752857 - DNA, 120 bp, Artificial Sequence
  ENSG00000211789_0 (sequence is synthesized)
aaagcagattctttttatgatttttaaagtagaaatatccattctaggtgcattttttaagggtttaaaatttgaatcctcagtgaaccagggcagagaagaatgatgaaatccttgaga

SEQ ID NO: 752858 - DNA, 120 bp, Artificial Sequence
  ENSG00000211789_1 (sequence is synthesized)
ttccagagggagccattgcctctctcaactgcacttacagtgaccgaggttcccagtccttcttctggtacagacaatattctgggaaaagccctgagttgataatgttcatatactcca

SEQ ID NO: 752859 - DNA, 120 bp, Artificial Sequence
  ENSG00000211789_2 (sequence is synthesized)
atggtgacaaagaagatggaaggtttacagcacagctcaataaagccagccagtatgtttctctgctcatcagagactcccagcccagtgattcagccacctacctctgtgccgtgaaca

SEQ ID NO: 752860 - DNA, 120 bp, Artificial Sequence
  ENSG00000211790_0 (sequence is synthesized)
ttttgaaacccttcaaaggcagagacttgtccagcctaacctgcctgctgctcctagctcctgaggctcagggcccttggcttctgtccgctctgctcagggccctccagcgtggccact

SEQ ID NO: 752861 - DNA, 120 bp, Artificial Sequence
  ENSG00000211790_1 (sequence is synthesized)
aggagccctggttctgctgaggtgcaactactcatcgtctgttccaccatatctcttctggtatgtgcaataccccaaccaaggactccagcttctcctgaagtacacatcagcggccac

SEQ ID NO: 752862 - DNA, 120 bp, Artificial Sequence
  ENSG00000211790_2 (sequence is synthesized)
cctggttaaaggcatcaacggttttgaggctgaatttaagaagagtgaaacctccttccacctgacgaaaccctcagcccatatgagcgacgcggctgagtacttctgtgctgtgagtga

SEQ ID NO: 752863 - DNA, 120 bp, Artificial Sequence
  ENSG00000211791_0 (sequence is synthesized)
cgatgatggaagtagctcttatggctggagattgcaggtttatgactgatcctatttgggaagaacaatgatggcaggcattcgagctttatttatgtacttgtggctgcagctggactg

SEQ ID NO: 752864 - DNA, 120 bp, Artificial Sequence
  ENSG00000211791_1 (sequence is synthesized)
aggagggtgacaactctattatcaactgtgcttattcaaacagcgcctcagactacttcatttggtacaagcaagaatctggaaaaggtcctcaattcattatagacattcgttcaaata

SEQ ID NO: 752865 - DNA, 120 bp, Artificial Sequence
  ENSG00000211791_2 (sequence is synthesized)
tggacaaaaggcaaggccaaagagtcaccgttttattgaataagacagtgaaacatctctctctgcaaattgcagctactcaacctggagactcagctgtctacttttgtgcagagaata

SEQ ID NO: 752866 - DNA, 120 bp, Artificial Sequence
  ENSG00000211792_0 (sequence is synthesized)
gccaggttcacttcacagtacagagtcctgaaaataaagaagaaaatttttttttatctagaaaaagaaccaaacatgtcactttctagcctgctgaaggtggtcacagcttcactgtgg

SEQ ID NO: 752867 - DNA, 120 bp, Artificial Sequence
  ENSG00000211792_1 (sequence is synthesized)
ggctgtgactctggactgcacatatgacaccagtgatccaagttatggtctattctggtacaagcagcccagcagtggggaaatgatttttcttatttatcaggggtcttatgaccagca

SEQ ID NO: 752868 - DNA, 120 bp, Artificial Sequence
  ENSG00000211792_2 (sequence is synthesized)
aaatgcaacagaaggtcgctactcattgaatttccagaaggcaagaaaatccgccaaccttgtcatctccgcttcacaactgggggactcagcaatgtacttctgtgcaatgagagaggg

SEQ ID NO: 752869 - DNA, 120 bp, Artificial Sequence
  ENSG00000211793_0 (sequence is synthesized)
cactgtgatttcttcatgttaaggatcaagaccattatttgggtaacacactaaagatgaactattctccaggcttagtatctctgatactcttactgcttggaagaacccgtggagatt

SEQ ID NO: 752870 - DNA, 120 bp, Artificial Sequence
  ENSG00000211793_1 (sequence is synthesized)
agaagaggccttcctgactataaactgcacgtacacagccacaggatacccttcccttttctggtatgtccaatatcctggagaaggtctacagctcctcctgaaagccacgaaggctga

SEQ ID NO: 752871 - DNA, 120 bp, Artificial Sequence
  ENSG00000211793_2 (sequence is synthesized)
tgacaagggaagcaacaaaggttttgaagccacataccgtaaagaaaccacttctttccacttggagaaaggctcagttcaagtgtcagactcagcggtgtacttctgtgctctgagtga

SEQ ID NO: 752872 - DNA, 120 bp, Artificial Sequence
  ENSG00000211794_0 (sequence is synthesized)
attatttttttttcgtgtttaaggtttgaatcctcagtgaaccagggcagaaaagaatgatgaaatccttgagagttttactggtgatcctgtggcttcagttaagctgggtttggagcc

SEQ ID NO: 752873 - DNA, 120 bp, Artificial Sequence
  ENSG00000211794_1 (sequence is synthesized)
ttccagagggagccattgtttctctcaactgcacttacagcaacagtgcttttcaatacttcatgtggtacagacagtattccagaaaaggccctgagttgctgatgtacacatactcca

SEQ ID NO: 752874 - DNA, 120 bp, Artificial Sequence
  ENSG00000211794_2 (sequence is synthesized)
gtggtaacaaagaagatggaaggtttacagcacaggtcgataaatccagcaagtatatctccttgttcatcagagactcacagcccagtgattcagccacctacctctgtgcaatgagcg

SEQ ID NO: 752875 - DNA, 120 bp, Artificial Sequence
  ENSG00000211795_0 (sequence is synthesized)
gtagctcgttgatgtctgtgtggatagggagctgtgacgagagcaagaggtcagaacacatccaggctccttaagggaaagcctctttctgtttctgaaacttttcaaagccagggactt

SEQ ID NO: 752876 - DNA, 120 bp, Artificial Sequence
  ENSG00000211795_1 (sequence is synthesized)
gtccaatccaacctcctcacagttcctagctcctgaggctcagcgcccttggcttctgtccgcccagcttaaggtcctgcagcattgccactgctcagccatgctcctgctgctcgtccc

SEQ ID NO: 752877 - DNA, 120 bp, Artificial Sequence
  ENSG00000211795_2 (sequence is synthesized)
agaagcccctgtggagctgaggtgcaactactcatcgtctgtttcagtgtatctcttctggtatgtgcaataccccaaccaaggactccagcttctcctgaagtatttatcaggatccac

SEQ ID NO: 752878 - DNA, 120 bp, Artificial Sequence
  ENSG00000211795_3 (sequence is synthesized)
cctggttgaaagcatcaacggttttgaggctgaatttaacaagagtcaaacttccttccacttgaggaaaccctcagtccatataagcgacacggctgagtacttctgtgctgtgagtga

SEQ ID NO: 752879 - DNA, 120 bp, Artificial Sequence
  ENSG00000211796_0 (sequence is synthesized)
atgaagcccaccctcatctcagtgcttgtgataatatttatactcagaggaacaagagcccagagagtgactcagcccgagaagctcctctctgtctttaaaggggccccagtggagctg

SEQ ID NO: 752880 - DNA, 120 bp, Artificial Sequence
  ENSG00000211796_1 (sequence is synthesized)
ctctagagagagcatcaaaggcttcactgctgaccttaacaaaggcgagacatctttccacctgaagaaaccatttgctcaagaggaagactcagccatgtattactgtgctctaagtgg

SEQ ID NO: 752881 - DNA, 120 bp, Artificial Sequence
  ENSG00000211797_0 (sequence is synthesized)
aggactgagcttgcctgtgactggctagggaggaacctgagactaggggacagaaagactagggattcacccagtaaagagagctcatctgtgactgaggagccttgctccatttcaggt

SEQ ID NO: 752882 - DNA, 120 bp, Artificial Sequence
  ENSG00000211797_1 (sequence is synthesized)
cttctgtgatttcaataaggaagaagaatggaaactctcctgggagtgtctttggtgattctatggcttcaactggctagggtgaacagtcaacagggagaagaggatcctcaggccttg

SEQ ID NO: 752883 - DNA, 120 bp, Artificial Sequence
  ENSG00000211797_2 (sequence is synthesized)
tccaggagggtgaaaatgccaccatgaactgcagttacaaaactagtataaacaatttacagtggtatagacaaaattcaggtagaggccttgtccacctaattttaatacgttcaaatg

SEQ ID NO: 752884 - DNA, 120 bp, Artificial Sequence
  ENSG00000211797_3 (sequence is synthesized)
aaagagagaaacacagtggaagattaagagtcacgcttgacacttccaagaaaagcagttccttgttgatcacggcttcccgggcagcagacactgcttcttacttctgtgctacggacg

SEQ ID NO: 752885 - DNA, 120 bp, Artificial Sequence
  ENSG00000211798_0 (sequence is synthesized)
gattttgtagaagattccgccaaagactcaacaacataaagaaatatatatacctttcggtttggatatctctcaacaaaaccttctactgcttctcagccagccatgctgtctgcttcc

SEQ ID NO: 752886 - DNA, 120 bp, Artificial Sequence
  ENSG00000211798_1 (sequence is synthesized)
ccctgagagggcagctctgacattaaactgcacttatcagtccagctattcaacttttctattctggtatgtccagtatctaaacaaagagcctgagctcctcctgaaaagttcagaaaa

SEQ ID NO: 752887 - DNA, 120 bp, Artificial Sequence
  ENSG00000211798_2 (sequence is synthesized)
ccaggagacggacagcagaggttttcaggccagtcctatcaagagtgacagttccttccacctggagaagccctcggtgcagctgtcggactctgccgtgtactactgcgctctgagaga

SEQ ID NO: 752888 - DNA, 120 bp, Artificial Sequence
  ENSG00000211799_0 (sequence is synthesized)
cagaagcctcacacagcccagtaactttgctagtacctcttgagtgcaaggtggagaattaagatctggatttgagacggagcacggaacatttcactcaggggaagagctatgaacatg

SEQ ID NO: 752889 - DNA, 120 bp, Artificial Sequence
  ENSG00000211799_1 (sequence is synthesized)
ggatgtgaccttggactgtgtgtatgaaacccgtgatactacttattacttattctggtacaagcaaccaccaagtggagaattggttttccttattcgtcggaactcttttgatgagca

SEQ ID NO: 752890 - DNA, 120 bp, Artificial Sequence
  ENSG00000211799_2 (sequence is synthesized)
aaatgaaataagtggtcggtattcttggaacttccagaaatccaccagttccttcaacttcaccatcacagcctcacaagtcgtggactcagcagtatacttctgtgctctgagtgaggc

SEQ ID NO: 752891 - DNA, 120 bp, Artificial Sequence
  ENSG00000211800_0 (sequence is synthesized)
acagaagtggcgcctctgagaaaagaaggttggaattatcgtaatttgtttctaggctgagataccagcatggagaaaatgttggagtgtgcattcatagtcttgtggcttcagcttggc

SEQ ID NO: 752892 - DNA, 120 bp, Artificial Sequence
  ENSG00000211800_1 (sequence is synthesized)
gactccaggagggagagagtagcagtctcaactgcagttacacagtcagcggtttaagagggctgttctggtataggcaagatcctgggaaaggccctgaattcctcttcaccctgtatt

SEQ ID NO: 752893 - DNA, 120 bp, Artificial Sequence
  ENSG00000211800_2 (sequence is synthesized)
cagctggggaagaaaaggagaaagaaaggctaaaagccacattaacaaagaaggaaagctttctgcacatcacagcccctaaacctgaagactcagccacttatctctgtgctgtgcagg

SEQ ID NO: 752894 - DNA, 120 bp, Artificial Sequence
  ENSG00000211801_0 (sequence is synthesized)
agaaggaatggagaccctcttgggcctgcttatcctttggctgcagctgcaatgggtgagcagcaaacaggaggtgacgcagattcctgcagctctgagtgtcccagaaggagaaaactt

SEQ ID NO: 752895 - DNA, 120 bp, Artificial Sequence
  ENSG00000211801_1 (sequence is synthesized)
cagagagagcaaacaagtggaagacttaatgcctcgctggataaatcatcaggacgtagtactttatacattgcagcttctcagcctggtgactcagccacctacctctgtgctgtgagg

SEQ ID NO: 752896 - DNA, 120 bp, Artificial Sequence
  ENSG00000211802_0 (sequence is synthesized)
ggctttgtcgggtggagctgattggttgcaggagcagcaacagttccagagccaagtcatgacaccgacctccccaaggtttagttaaatatatcttatggtgaaaatgcccggagcaag

SEQ ID NO: 752897 - DNA, 120 bp, Artificial Sequence
  ENSG00000211802_1 (sequence is synthesized)
tgattctccaggagggagccaattccacgctgcggtgcaatttttctgactctgtgaacaatttgcagtggtttcatcaaaacccttggggacagctcatcaacctgttttacattccct

SEQ ID NO: 752898 - DNA, 120 bp, Artificial Sequence
  ENSG00000211802_2 (sequence is synthesized)
cagggacaaaacagaatggaagattaagcgccacgactgtcgctacggaacgctacagcttattgtacatttcctcttcccagaccacagactcaggcgtttatttctgtgctgtggagc

SEQ ID NO: 752899 - DNA, 120 bp, Artificial Sequence
  ENSG00000211803_0 (sequence is synthesized)
ctggaagaccacctgggctgtcattgagctctggtgccaggaggaatggacaagatcttaggagcatcatttttagttctgtggcttcaactatgctgggtgagtggccaacagaaggag

SEQ ID NO: 752900 - DNA, 120 bp, Artificial Sequence
  ENSG00000211803_1 (sequence is synthesized)
agaaaggagggatttcaattataaactgtgcttatgagaacactgcgtttgactactttccatggtaccaacaattccctgggaaaggccctgcattattgatagccatacgtccagatg

SEQ ID NO: 752901 - DNA, 120 bp, Artificial Sequence
  ENSG00000211803_2 (sequence is synthesized)
tgagtgaaaagaaagaaggaagattcacaatctccttcaataaaagtgccaagcagttctcatcgcatatcatggattcccagcctggagactcagccacctacttctgtgcagcaagca

SEQ ID NO: 752902 - DNA, 120 bp, Artificial Sequence
  ENSG00000211804_0 (sequence is synthesized)
caaagagctacatgccacatgctgttctccagcctgctgtgtgtatttgtggccttcagctactctggatcaagtgtggcccagaaggttactcaagcccagtcatcagtatccatgcca

SEQ ID NO: 752903 - DNA, 120 bp, Artificial Sequence
  ENSG00000211804_1 (sequence is synthesized)
gaaagcagtcaccctgaactgcctgtatgaaacaagttggtggtcatattatattttttggtacaagcaacttcccagcaaagagatgattttccttattcgccagggttctgatgaaca

SEQ ID NO: 752904 - DNA, 120 bp, Artificial Sequence
  ENSG00000211804_2 (sequence is synthesized)
gaatgcaaaaagtggtcgctattctgtcaacttcaagaaagcagcgaaatccgtcgccttaaccatttcagccttacagctagaagattcagcaaagtacttttgtgctcttggggaact

SEQ ID NO: 752905 - DNA, 120 bp, Artificial Sequence
  ENSG00000211805_0 (sequence is synthesized)
atggagaagaatcctttggcagccccattactaatcctctggtttcatcttgactgcgtgagcagcatactgaacgtggaacaaagtcctcagtcactgcatgttcaggagggagacagc

SEQ ID NO: 752906 - DNA, 120 bp, Artificial Sequence
  ENSG00000211805_1 (sequence is synthesized)
atggggatgaaaagaagaaaggacgaataagtgccactcttaataccaaggagggttacagctatttgtacatcaaaggatcccagcctgaagactcagccacatacctctgtgccttta

SEQ ID NO: 752907 - DNA, 120 bp, Artificial Sequence
  ENSG00000211806_0 (sequence is synthesized)
actatttctattgatctggaagaagcttgtaccaggcaacccatttaggagaagttggatgaagagggagagggagatgctactcatcacatcaatgttggtcttatggatgcaattgtc

SEQ ID NO: 752908 - DNA, 120 bp, Artificial Sequence
  ENSG00000211806_1 (sequence is synthesized)
catgtacaagaaggagaggacttcaccacgtactgcaattcctcaactactttaagcaatatacagtggtataagcaaaggcctggtggacatcccgtttttttgatacagttagtgaag

SEQ ID NO: 752909 - DNA, 120 bp, Artificial Sequence
  ENSG00000211806_2 (sequence is synthesized)
agtggagaagtgaagaagcagaaaagactgacatttcagtttggagaagcaaaaaagaacagctccctgcacatcacagccacccagactacagatgtaggaacctacttctgtgcaggg

SEQ ID NO: 752910 - DNA, 120 bp, Artificial Sequence
  ENSG00000211807_0 (sequence is synthesized)
aggaacatgactaaacctggggaggaagacatagaaaagcaactgctctatcattggctgacaagatcctgacaacaacacaatgagagctgcactccttgcaagtctttactagtagct

SEQ ID NO: 752911 - DNA, 120 bp, Artificial Sequence
  ENSG00000211807_1 (sequence is synthesized)
gttgcttctgttctctggaaattctttaaacctagaatcagacacaaaaactgaactctgggtccacaatcctcatttgtccttgaagtatgaggctggtggcaagagtaactgtgtttc

SEQ ID NO: 752912 - DNA, 120 bp, Artificial Sequence
  ENSG00000211807_2 (sequence is synthesized)
ctgaaggaagagctgcaaacctgccttgtaatcactctaccatcagtggaaatgagtatgtgtattggtatcgacagattcactcccaggggccacagtatatcattcatggtctaaaaa

SEQ ID NO: 752913 - DNA, 120 bp, Artificial Sequence
  ENSG00000211807_3 (sequence is synthesized)
acaatgaaaccaatgaaatggcctctctgatcatcacagaagacagaaagtccagcaccttgatcctgccccacgctacgctgagagacactgctgtgtactattgcatcgtcagagtcg

SEQ ID NO: 752914 - DNA, 120 bp, Artificial Sequence
  ENSG00000211808_0 (sequence is synthesized)
atgctcttagtggtcattctgctgcttggaatgttcttcacactgagtaaaacccagtcggtgacccagcttgatggccacatcactgtctctgaagaagcccctctggaactgaagtgc

SEQ ID NO: 752915 - DNA, 120 bp, Artificial Sequence
  ENSG00000211808_1 (sequence is synthesized)
taaaggcatcagaggttttgaggctgaatttaagaagagcgaaacctccttctacctgaggaaaccatcaacccatgtgagtgatgctgctgagtacttctgtgctgtgggtgacaggag

SEQ ID NO: 752916 - DNA, 120 bp, Artificial Sequence
  ENSG00000211809_0 (sequence is synthesized)
aagcactcttctagcccagagaagtctgttccaggacgggctctttcaggagcagctaaagtcaggggccatgtccaccatgtgatagaaagacaagatggtcctgaaattctccgtgtc

SEQ ID NO: 752917 - DNA, 120 bp, Artificial Sequence
  ENSG00000211809_1 (sequence is synthesized)
gcatccaagagggagaaaatctcactgtgtactgcaactcctcaagtgttttttccagcttacaatggtacagacaggagcctggggaaggtcctgtcctcctggtgacagtagttacgg

SEQ ID NO: 752918 - DNA, 120 bp, Artificial Sequence
  ENSG00000211809_2 (sequence is synthesized)
gtggagaagtgaagaagctgaagagactaacctttcagtttggtgatgcaagaaaggacagttctctccacatcactgcagcccagactggtgatacaggcctctacctctgtgcaggag

SEQ ID NO: 752919 - DNA, 120 bp, Artificial Sequence
  ENSG00000211810_0 (sequence is synthesized)
atatgtaaaatgaagggtctgtggaaggacatgaataaagcacaggaggttgaagtcagatttgcagctttctaggcaggagataagacaatctgcatcttcacaggagggatggccatg

SEQ ID NO: 752920 - DNA, 120 bp, Artificial Sequence
  ENSG00000211810_1 (sequence is synthesized)
aggaaggaagaatttctattctgaactgtgactatactaacagcatgtttgattatttcctatggtacaaaaaataccctgctgaaggtcctacattcctgatatctataagttccatta

SEQ ID NO: 752921 - DNA, 120 bp, Artificial Sequence
  ENSG00000211810_2 (sequence is synthesized)
aggataaaaatgaagatggaagattcactgttttcttaaacaaaagtgccaagcacctctctctgcacattgtgccctcccagcctggagactctgcagtgtacttctgtgcagcaagcg

SEQ ID NO: 752922 - DNA, 120 bp, Artificial Sequence
  ENSG00000211812_0 (sequence is synthesized)
atgaagttggtgacaagcattactgtactcctatctttgggtattatgggtgatgctaagaccacacagccaaattcaatggagagtaacgaagaagagcctgttcacttgccttgtaac

SEQ ID NO: 752923 - DNA, 120 bp, Artificial Sequence
  ENSG00000211812_1 (sequence is synthesized)
agcaatgtgaacaacagaatggcctctctggcaatcgctgaagacagaaagtccagtaccttgatcctgcaccgtgctaccttgagagatgctgctgtgtactactgcatcctgagagac

SEQ ID NO: 752924 - DNA, 120 bp, Artificial Sequence
  ENSG00000211813_0 (sequence is synthesized)
aatagctaagggatggagactgttctgcaagtactcctagggatattggggttccaagcagcctgggtcagtagccaagaactggagcagagtcctcagtccttgatcgtccaagaggga

SEQ ID NO: 752925 - DNA, 120 bp, Artificial Sequence
  ENSG00000211813_1 (sequence is synthesized)
gggaagagaaaagtcatgaaaagataactgccaagttggatgagaaaaagcagcaaagttccctgcatatcacagcctcccagcccagccatgcaggcatctacctctgtggagcagaca

SEQ ID NO: 752926 - DNA, 120 bp, Artificial Sequence
  ENSG00000211815_0 (sequence is synthesized)
acttgataactgaaggatgatgaagtgtccacaggctttactagctatcttttggcttctactgagctgggtgagcagtgaagacaaggtggtacaaagccctctatctctggttgtcca

SEQ ID NO: 752927 - DNA, 120 bp, Artificial Sequence
  ENSG00000211815_1 (sequence is synthesized)
gaattgaaaagaagtcaggaagactaagtagcatattagataagaaagaacttttcagcatcctgaacatcacagccacccagaccggagactcggccatctacctctgtgctgtggagg

SEQ ID NO: 752928 - DNA, 120 bp, Artificial Sequence
  ENSG00000211816_0 (sequence is synthesized)
agcatgacacgagttagcttgctgtgggcagtcgtggtctccacctgtcttgaatccggcatggcccagacagtcactcagtctcaaccagagatgtctgtgcaggaggcagagactgtg

SEQ ID NO: 752929 - DNA, 120 bp, Artificial Sequence
  ENSG00000211816_1 (sequence is synthesized)
gaatgcaacggagaatcgtttctctgtgaacttccagaaagcagccaaatccttcagtctcaagatctcagactcacagctgggggacactgcgatgtatttctgtgctttcatgaagca

SEQ ID NO: 752930 - DNA, 120 bp, Artificial Sequence
  ENSG00000211817_0 (sequence is synthesized)
agatcagaagaggaggcttctcaccctgcagcagggacctgtgagcatggcatgccctggcttcctgtgggcacttgtgatctccacctgtcttgaatttagcatggctcagacagtcac

SEQ ID NO: 752931 - DNA, 120 bp, Artificial Sequence
  ENSG00000211817_1 (sequence is synthesized)
agaccgtgaccctgagctgcacatatgacaccagtgagagtgattattatttattctggtacaagcagcctcccagcaggcagatgattctcgttattcgccaagaagcttataagcaac

SEQ ID NO: 752932 - DNA, 120 bp, Artificial Sequence
  ENSG00000211817_2 (sequence is synthesized)
agaatgcaacagagaatcgtttctctgtgaacttccagaaagcagccaaatccttcagtctcaagatctcagactcacagctgggggatgccgcgatgtatttctgtgcttataggagcg

SEQ ID NO: 752933 - DNA, 120 bp, Artificial Sequence
  ENSG00000211818_0 (sequence is synthesized)
atgaagaagctactagcaatgattctgtggcttcaactagaccggttaagtggagagctgaaagtggaacaaaaccctctgttcctgagcatgcaggagggaaaaaactataccatctac

SEQ ID NO: 752934 - DNA, 120 bp, Artificial Sequence
  ENSG00000211818_1 (sequence is synthesized)
gagcagtgaagcaggagggacgattaatggcctcacttgataccaaagcccgtctcagcaccctccacatcacagctgccgtgcatgacctctctgccacctacttctgtgccgtggaca

SEQ ID NO: 752935 - DNA, 120 bp, Artificial Sequence
  ENSG00000211819_0 (sequence is synthesized)
atgaactcctctctggactttctaattctgatcttaatgtttggaggaaccagcagcaattcagtcaagcagacgggccaaataaccgtctcggagggagcatctgtgactatgaactgc

SEQ ID NO: 752936 - DNA, 120 bp, Artificial Sequence
  ENSG00000211819_1 (sequence is synthesized)
agagacaatggaaaacagcaaaaacttcggaggcggaaatattaaagacaaaaactcccccattgtgaaatattcagtccaggtatcagactcagccgtgtactactgtcttctgggaga

SEQ ID NO: 752937 - DNA, 120 bp, Artificial Sequence
  ENSG00000211820_0 (sequence is synthesized)
atggtgaagatccggcaatttttgttggctattttgtggcttcagctaagctgtgtaagtgccgccaaaaatgaagtggagcagagtcctcagaacctgactgcccaggaaggagaattt

SEQ ID NO: 752938 - DNA, 120 bp, Artificial Sequence
  ENSG00000211820_1 (sequence is synthesized)
tcagggaagaagaagcatggaagattaattgccacaataaacatacaggaaaagcacagctccctgcacatcacagcctcccatcccagagactctgccgtctacatctgtgctgtcaga

SEQ ID NO: 752939 - DNA, 120 bp, Artificial Sequence
  ENSG00000211821_0 (sequence is synthesized)
attagcaggcagcaggccctgcgagcctcctgtgatcagctagatttctctggggaatgaaacagctgctgatagggactgacttcctcagtcacaagtgtttcacaagtgtgttggttc

SEQ ID NO: 752940 - DNA, 120 bp, Artificial Sequence
  ENSG00000211821_1 (sequence is synthesized)
agaggagggaccaggcagaaggtggttgagaggcagagctgcccctgagtgagccatgcagaggatctcctccctcatccatctctctctcttctgggcaggagtcatgtcagccattga

SEQ ID NO: 752941 - DNA, 120 bp, Artificial Sequence
  ENSG00000211821_2 (sequence is synthesized)
gtccctgccaccctcaggtgctccatgaaaggagaagcgatcggtaactactatatcaactggtacaggaagacccaaggtaacacaatgactttcatataccgagaaaaggacatctat

SEQ ID NO: 752942 - DNA, 120 bp, Artificial Sequence
  ENSG00000211821_3 (sequence is synthesized)
ggccctggtttcaaagacaatttccaaggtgacattgatattgcaaagaacctggctgtacttaagatacttgcaccatcagagagagatgaagggtcttactactgtgcctgtgacacc

SEQ ID NO: 752943 - DNA, 120 bp, Artificial Sequence
  ENSG00000211829_0 (sequence is synthesized)
gaagtcagcctcataccaaaccatccgtttttgtcatgaaaaatggaacaaatgtcgcttgtctggtgaaggaattctaccccaaggatataagaataaatctcgtgtcatccaagaaga

SEQ ID NO: 752944 - DNA, 120 bp, Artificial Sequence
  ENSG00000211829_1 (sequence is synthesized)
taacagagtttgatcctgctattgtcatctctcccagtgggaagtacaatgctgtcaagcttggtaaatatgaagattcaaattcagtgacatgttcagttcaacacgacaataaaactg

SEQ ID NO: 752945 - DNA, 120 bp, Artificial Sequence
  ENSG00000211829_2 (sequence is synthesized)
tgcactccactgactttgaagtgaagacagattctacagatcacgtaaaaccaaaggaaactgaaaacacaaagcaaccttcaaagagctgccataaacccaaagccatagttcataccg

SEQ ID NO: 752946 - DNA, 120 bp, Artificial Sequence
  ENSG00000211829_3 (sequence is synthesized)
agaaggtgaacatgatgtccctcacagtgcttgggctacgaatgctgtttgcaaagactgttgccgtcaattttctcttgactgccaagttatttttcttgtaaggctgactggcatgag

SEQ ID NO: 752947 - DNA, 120 bp, Artificial Sequence
  ENSG00000211829_4 (sequence is synthesized)
gaagctacactcctgaagaaaccaaaggcttacaaaaatgcatctccttggcttctgacttctttgtgattcaagttgacctgtcatagccttgttaaaatggctgctagccaaaccact

SEQ ID NO: 752948 - DNA, 120 bp, Artificial Sequence
  ENSG00000211829_5 (sequence is synthesized)
ttttcttcaaagacaacaaacccagctcatcctccagcttgatgggaagacaaaagtcctggggaaggggggtttatgtcctaactgctttgtatgctgttttataaagggatagaagga

SEQ ID NO: 752949 - DNA, 120 bp, Artificial Sequence
  ENSG00000211890_0 (sequence is synthesized)
gcatccccgaccagccccaaggtcttcccgctgagcctcgacagcaccccccaagatgggaacgtggtcgtcgcatgcctggtccagggcttcttcccccaggagccactcagtgtgacc

SEQ ID NO: 752950 - DNA, 120 bp, Artificial Sequence
  ENSG00000211890_1 (sequence is synthesized)
tggagcgaaagcggacagaacgtgaccgccagaaacttcccacctagccaggatgcctccggggacctgtacaccacgagcagccagctgaccctgccggccacacagtgcccagacggc

SEQ ID NO: 752951 - DNA, 120 bp, Artificial Sequence
  ENSG00000211890_2 (sequence is synthesized)
aagtccgtgacatgccacgtgaagcactacacgaattccagccaggatgtgactgtgccctgccgagttcccccacctcccccatgctgccacccccgactgtcgctgcaccgaccggcc

SEQ ID NO: 752952 - DNA, 120 bp, Artificial Sequence
  ENSG00000211890_3 (sequence is synthesized)
ctcgaggacctgctcttaggttcagaagcgaacctcacgtgcacactgaccggcctgagagatgcctctggtgccaccttcacctggacgccctcaagtgggaagagcgctgttcaagga

SEQ ID NO: 752953 - DNA, 120 bp, Artificial Sequence
  ENSG00000211890_4 (sequence is synthesized)
ccacctgagcgtgacctctgtggctgctacagcgtgtccagtgtcctgcctggctgtgcccagccatggaaccatggggagaccttcacctgcactgctgcccaccccgagttgaagacc

SEQ ID NO: 752954 - DNA, 120 bp, Artificial Sequence
  ENSG00000211890_5 (sequence is synthesized)
ccactaaccgccaacatcacaaaatccggaaacacattccggcccgaggtccacctgctgccgccgccgtcggaggagctggccctgaacgagctggtgacgctgacgtgcctggcacgt

SEQ ID NO: 752955 - DNA, 120 bp, Artificial Sequence
  ENSG00000211890_6 (sequence is synthesized)
ggcttcagccccaaggatgtgctggttcgctggctgcaggggtcacaggagctgccccgcgagaagtacctgacttgggcatcccggcaggagcccagccagggcaccaccacctacgct

SEQ ID NO: 752956 - DNA, 120 bp, Artificial Sequence
  ENSG00000211890_7 (sequence is synthesized)
gtaaccagcatactgcgcgtggcagctgaggactggaagaagggggagaccttctcctgcatggtgggccacgaggccctgccgctggccttcacacagaagaccatcgaccgcatggcg

SEQ ID NO: 752957 - DNA, 120 bp, Artificial Sequence
  ENSG00000211890_8 (sequence is synthesized)
ggctcttgctgtgttgcagattggcagatgccgcctccctatgtggtgctggacttgccgcaggagaccctggaggaggagacccccggcgccaacctgtggcccaccaccatcaccttc

SEQ ID NO: 752958 - DNA, 120 bp, Artificial Sequence
  ENSG00000211890_9 (sequence is synthesized)
ctcaccctcttcctgctgagcctgttctatagcacagcactgaccgtgaccagcgtccggggcccatctggcaagagggagggcccccagtactgagcgggagccggcaaggcacaggga

SEQ ID NO: 752959 - DNA, 120 bp, Artificial Sequence
  ENSG00000211890_10 (sequence is synthesized)
ggaagtgtggaggaacctcttggagaagccagctatgcttgccagaactcagccctttcagacatcaccgacccgcccttactcacgtggcttccaggtgcaataaagtggccccaagga

SEQ ID NO: 752960 - DNA, 120 bp, Artificial Sequence
  ENSG00000211891_0 (sequence is synthesized)
gcctccacacagagcccatccgtcttccccttgacccgctgctgcaaaaacattccctccaatgccacctccgtgactctgggctgcctggccacgggctacttcccggagccggtgatg

SEQ ID NO: 752961 - DNA, 120 bp, Artificial Sequence
  ENSG00000211891_1 (sequence is synthesized)
gtgacctgggacacaggctccctcaacgggacaactatgaccttaccagccaccaccctcacgctctctggtcactatgccaccatcagcttgctgaccgtctcgggtgcgtgggccaag

SEQ ID NO: 752962 - DNA, 120 bp, Artificial Sequence
  ENSG00000211891_2 (sequence is synthesized)
cagatgttcacctgccgtgtggcacacactccatcgtccacagactgggtcgacaacaaaaccttcagcgtctgctccagggacttcaccccgcccaccgtgaagatcttacagtcgtcc

SEQ ID NO: 752963 - DNA, 120 bp, Artificial Sequence
  ENSG00000211891_3 (sequence is synthesized)
tgcgacggcggcgggcacttccccccgaccatccagctcctgtgcctcgtctctgggtacaccccagggactatcaacatcacctggctggaggacgggcaggtcatggacgtggacttg

SEQ ID NO: 752964 - DNA, 120 bp, Artificial Sequence
  ENSG00000211891_4 (sequence is synthesized)
tccaccgcctctaccacgcaggagggtgagctggcctccacacaaagcgagctcaccctcagccagaagcactggctgtcagaccgcacctacacctgccaggtcacctatcaaggtcac

SEQ ID NO: 752965 - DNA, 120 bp, Artificial Sequence
  ENSG00000211891_5 (sequence is synthesized)
acctttgaggacagcaccaagaagtgtgcagattccaacccgagaggggtgagcgcctacctaagccggcccagcccgttcgacctgttcatccgcaagtcgcccacgatcacctgtctg

SEQ ID NO: 752966 - DNA, 120 bp, Artificial Sequence
  ENSG00000211891_6 (sequence is synthesized)
tcccgggccagtgggaagcctgtgaaccactccaccagaaaggaggagaagcagcgcaatggcacgttaaccgtcacgtccaccctgccggtgggcacccgagactggatcgagggggag

SEQ ID NO: 752967 - DNA, 120 bp, Artificial Sequence
  ENSG00000211891_7 (sequence is synthesized)
acctaccagtgcagggtgacccacccccacctgcccagggccctcatgcggtccacgaccaagaccagcggcccgcgtgctgccccggaagtctatgcgtttgcgacgccggagtggccg

SEQ ID NO: 752968 - DNA, 120 bp, Artificial Sequence
  ENSG00000211891_8 (sequence is synthesized)
gggagccgggacaagcgcaccctcgcctgcctgatccagaacttcatgcctgaggacatctcggtgcagtggctgcacaacgaggtgcagctcccggacgcccggcacagcacgacgcag

SEQ ID NO: 752969 - DNA, 120 bp, Artificial Sequence
  ENSG00000211891_9 (sequence is synthesized)
ccccgcaagaccaagggctccggcttcttcgtcttcagccgcctggaggtgaccagggccgaatgggagcagaaagatgagttcatctgccgtgcagtccatgaggcagcaagcccctca

SEQ ID NO: 752970 - DNA, 120 bp, Artificial Sequence
  ENSG00000211891_10 (sequence is synthesized)
cagaccgtccagcgagcggtgtctgtaaatcccgagctggacgtgtgcgtggaggaggccgagggcgaggcgccgtggacgtggaccggcctctgcatcttcgccgcactcttcctgctc

SEQ ID NO: 752971 - DNA, 120 bp, Artificial Sequence
  ENSG00000211891_11 (sequence is synthesized)
agcgtgagctacagcgccgccatcacgctcctcatggtgcagcggttcctctcagccacgcggcaggggaggccccagacctccctcgactacaccaacgtcctccagccccacgcctag

SEQ ID NO: 752972 - DNA, 120 bp, Artificial Sequence
  ENSG00000211891_12 (sequence is synthesized)
tcctgcctccctccctcccagggctccatccagctgtgcagtggggaggactggccagaccttctgtccactgttgcaatgaccccaggaagctacccccaataaactgtgcctgctcag

SEQ ID NO: 752973 - DNA, 120 bp, Artificial Sequence
  ENSG00000211892_0 (sequence is synthesized)
gcttccaccaagggcccatcggtcttccccctggcgccctgctccaggagcacctccgagagcacagccgccctgggctgcctggtcaaggactacttccccgaaccggtgacggtgtcg

SEQ ID NO: 752974 - DNA, 120 bp, Artificial Sequence
  ENSG00000211892_1 (sequence is synthesized)
tggaactcaggcgccctgaccagcggcgtgcacaccttcccggctgtcctacagtcctcaggactctactccctcagcagcgtggtgaccgtgccctccagcagcttgggcacgaagacc

SEQ ID NO: 752975 - DNA, 120 bp, Artificial Sequence
  ENSG00000211892_2 (sequence is synthesized)
tacacctgcaacgtagatcacaagcccagcaacaccaaggtggacaagagagttgagtccaaatatggtcccccatgcccatcatgcccagcacctgagttcctggggggaccatcagtc

SEQ ID NO: 752976 - DNA, 120 bp, Artificial Sequence
  ENSG00000211892_3 (sequence is synthesized)
ttcctgttccccccaaaacccaaggacactctcatgatctcccggacccctgaggtcacgtgcgtggtggtggacgtgagccaggaagaccccgaggtccagttcaactggtacgtggat

SEQ ID NO: 752977 - DNA, 120 bp, Artificial Sequence
  ENSG00000211892_4 (sequence is synthesized)
ggcgtggaggtgcataatgccaagacaaagccgcgggaggagcagttcaacagcacgtaccgtgtggtcagcgtcctcaccgtcctgcaccaggactggctgaacggcaaggagtacaag

SEQ ID NO: 752978 - DNA, 120 bp, Artificial Sequence
  ENSG00000211892_5 (sequence is synthesized)
tgcaaggtctccaacaaaggcctcccgtcctccatcgagaaaaccatctccaaagccaaagggcagccccgagagccacaggtgtacaccctgcccccatcccaggaggagatgaccaag

SEQ ID NO: 752979 - DNA, 120 bp, Artificial Sequence
  ENSG00000211892_6 (sequence is synthesized)
aaccaggtcagcctgacctgcctggtcaaaggcttctaccccagcgacatcgccgtggagtgggagagcaatgggcagccggagaacaactacaagaccacgcctcccgtgctggactcc

SEQ ID NO: 752980 - DNA, 120 bp, Artificial Sequence
  ENSG00000211892_7 (sequence is synthesized)
gacggctccttcttcctctacagcaggctcaccgtggacaagagcaggtggcaggaggggaatgtcttctcatgctccgtgatgcatgaggctctgcacaaccactacacacagaagagc

SEQ ID NO: 752981 - DNA, 120 bp, Artificial Sequence
  ENSG00000211892_8 (sequence is synthesized)
ctctccctgtctctggagctgcaactggaggagagctgtgcggaggcgcaggacggggagctggacgggctgtggacgaccatcaccatcttcatcacactcttcctgctaagcgtgtgc

SEQ ID NO: 752982 - DNA, 120 bp, Artificial Sequence
  ENSG00000211892_9 (sequence is synthesized)
tacagtgccaccgtcaccttcttcaaggtgaagtggatcttctcctcagtggtggacctgaagcagaccatcgtccccgactacaggaacatgataaggcagggggcctagggccaccct

SEQ ID NO: 752983 - DNA, 120 bp, Artificial Sequence
  ENSG00000211892_10 (sequence is synthesized)
ccccctgacctcaccgccctcaaccccatggctctctggcttcgcagtcgccctctgagccctgaaacgccccccttccagaccctgtgcatagcaggtctaccccagacctccgctgct

SEQ ID NO: 752984 - DNA, 120 bp, Artificial Sequence
  ENSG00000211892_11 (sequence is synthesized)
tggtgcatgcagggcgctgagggccaggtgtcccctcagcaggacgtccctgccctctggaccaccaggtgctcacacaaaaggaggtaaccggcatcccaggcccccactcaggcagga

SEQ ID NO: 752985 - DNA, 120 bp, Artificial Sequence
  ENSG00000211892_12 (sequence is synthesized)
cctcgccctggagccaaccccgtccacgccagcctcctgaacacaggcatggtttccagatggtgagtgggagcatcagtcgccaaggtagggaagccacagcaccatcaggccctgttg

SEQ ID NO: 752986 - DNA, 120 bp, Artificial Sequence
  ENSG00000211892_13 (sequence is synthesized)
gggaggcttccgagagctgcgaaggctcactcagacggccttcctcccagcccgcagccagccagcctccattccgggcactcccgtgaactcctgacatgaggaatgaggttgttctga

SEQ ID NO: 752987 - DNA, 120 bp, Artificial Sequence
  ENSG00000211892_14 (sequence is synthesized)
tttcaagcaaagaacgctgctctctggctcctgggaacagtctcggtgccagcaccaccccttggctgcctgcccacactgctggattctcgggtggaactggacccgcagggacagcca

SEQ ID NO: 752988 - DNA, 120 bp, Artificial Sequence
  ENSG00000211892_15 (sequence is synthesized)
gccccagagtccgcactggggagagaaagggccaggcccaggacactgccacctaccacccactccagtccaccgagatcactcggagaagagcctgggccatgtggccgctgcaggagc

SEQ ID NO: 752989 - DNA, 120 bp, Artificial Sequence
  ENSG00000211892_16 (sequence is synthesized)
cccacagtgcaagggtgaggatagcccaaggaagggctgggcatctgcccagacaggcctcccacagaaggctggtgaccaggtcccaggcgggcaagactcagccttggtggggcctga

SEQ ID NO: 752990 - DNA, 120 bp, Artificial Sequence
  ENSG00000211892_17 (sequence is synthesized)
ggacagaggaggcccaggagcatcggggagagaggtggagggacaccgggagagccaggagcgtggacacagccagaactcatcacagaggctggcgtccagtcccgggtcacgtgcagc

SEQ ID NO: 752991 - DNA, 120 bp, Artificial Sequence
  ENSG00000211892_18 (sequence is synthesized)
aggaacaagcagccactctgggggcaccaggtggagaggcaagacgacaaagagggtgcccgtgttcttgcgaaagcggggctgctggccacgagtgctggacagaggcccccacgctct

SEQ ID NO: 752992 - DNA, 120 bp, Artificial Sequence
  ENSG00000211892_19 (sequence is synthesized)
gctgcccccatcacaccgttccgtgactgtcacgcagaatccacagacaggaagggaggctcgagcgggactgcggccagcgcctgcctcggccgtcagggaggactcccgggctcactc

SEQ ID NO: 752993 - DNA, 120 bp, Artificial Sequence
  ENSG00000211892_20 (sequence is synthesized)
gaaggaggtgtcaccatttcagctttggcttttcttcttcttttaaattttctaaagctcattaattgtctttgatgtttcttttgtgatgacaataaaatatcctttttaagtcttgta

SEQ ID NO: 752994 - DNA, 120 bp, Artificial Sequence
  ENSG00000211892_21 (sequence is synthesized)
agcccccgctccccgggctctcggggtcgcgcgaggatgcttggcacgtaccccgtgtacatacttcccgggcgcccagcatggaaataaagcacccagcgctgccctgggcccctgcga

SEQ ID NO: 752995 - DNA, 120 bp, Artificial Sequence
  ENSG00000211893_0 (sequence is synthesized)
gcctccaccaagggcccatcggtcttccccctggcgccctgctccaggagcacctccgagagcacagcggccctgggctgcctggtcaaggactacttccccgaaccggtgacggtgtcg

SEQ ID NO: 752996 - DNA, 120 bp, Artificial Sequence
  ENSG00000211893_1 (sequence is synthesized)
tggaactcaggcgctctgaccagcggcgtgcacaccttcccggctgtcctacagtcctcaggactctactccctcagcagcgtggtgaccgtgccctccagcaacttcggcacccagacc

SEQ ID NO: 752997 - DNA, 120 bp, Artificial Sequence
  ENSG00000211893_2 (sequence is synthesized)
tacacctgcaacgtagatcacaagcccagcaacaccaaggtggacaagacagttgagcgcaaatgttgtgtcgagtgcccaccgtgcccagcaccacctgtggcaggaccgtcagtcttc

SEQ ID NO: 752998 - DNA, 120 bp, Artificial Sequence
  ENSG00000211893_3 (sequence is synthesized)
ctcttccccccaaaacccaaggacaccctcatgatctcccggacccctgaggtcacgtgcgtggtggtggacgtgagccacgaagaccccgaggtccagttcaactggtacgtggacggc

SEQ ID NO: 752999 - DNA, 120 bp, Artificial Sequence
  ENSG00000211893_4 (sequence is synthesized)
gtggaggtgcataatgccaagacaaagccacgggaggagcagttcaacagcacgttccgtgtggtcagcgtcctcaccgtcgtgcaccaggactggctgaacggcaaggagtacaagtgc

SEQ ID NO: 753000 - DNA, 120 bp, Artificial Sequence
  ENSG00000211893_5 (sequence is synthesized)
aaggtctccaacaaaggcctcccagcccccatcgagaaaaccatctccaaaaccaaagggcagccccgagaaccacaggtgtacaccctgcccccatcccgggaggagatgaccaagaac

SEQ ID NO: 753001 - DNA, 120 bp, Artificial Sequence
  ENSG00000211893_6 (sequence is synthesized)
caggtcagcctgacctgcctggtcaaaggcttctaccccagcgacatctccgtggagtgggagagcaatgggcagccggagaacaactacaagaccacacctcccatgctggactccgac

SEQ ID NO: 753002 - DNA, 120 bp, Artificial Sequence
  ENSG00000211893_7 (sequence is synthesized)
ggctccttcttcctctacagcaagctcaccgtggacaagagcaggtggcagcaggggaacgtcttctcatgctccgtgatgcatgaggctctgcacaaccactacacacagaagagcctc

SEQ ID NO: 753003 - DNA, 120 bp, Artificial Sequence
  ENSG00000211893_8 (sequence is synthesized)
tccctgtctccggagctgcaactggaggagagctgtgcggaggcgcaggacggggagctggacgggctgtggaccaccatcaccatcttcatcacactcttcctgctaagcgtgtgctac

SEQ ID NO: 753004 - DNA, 120 bp, Artificial Sequence
  ENSG00000211893_9 (sequence is synthesized)
agtgccaccatcaccttcttcaaggtgaagtggatcttctcctcagtggtggacctgaagcagaccatcgtccccgactacaggaacatgatcaggcagggggcctagggccaccctctg

SEQ ID NO: 753005 - DNA, 120 bp, Artificial Sequence
  ENSG00000211893_10 (sequence is synthesized)
cccccgacctcaccgccctcaaccccatggctctctggcctcgcagtcgccctctgaccctgacacgccccccttccagaccctgtgcatagcaggtctaccccagacctccgctgcttg

SEQ ID NO: 753006 - DNA, 120 bp, Artificial Sequence
  ENSG00000211893_11 (sequence is synthesized)
gtgcatgcagggcgctgggggccaagtgtcccctcagcaggacgtccctgccctccggcccgccaggtgctcacacaaaaggaggtagtgaccagcatcccaggcccccactcaggcagg

SEQ ID NO: 753007 - DNA, 120 bp, Artificial Sequence
  ENSG00000211893_12 (sequence is synthesized)
acctcgccctggagccaaccctgtccacgccagcctcctgaacacaggcgtggtttccagatggtgagtgggagcatcagtcgccaaggtagggaagtcacagcaccatcaggccctgtt

SEQ ID NO: 753008 - DNA, 120 bp, Artificial Sequence
  ENSG00000211893_13 (sequence is synthesized)
ggggaggcttccgagagctgcgaaggctcactcagacggccttcctcccagcccgcagccagccagcctccattccaggcactcccgtgaactcctgacatgaggaatgaggttgttctg

SEQ ID NO: 753009 - DNA, 120 bp, Artificial Sequence
  ENSG00000211893_14 (sequence is synthesized)
atttcaagcaaagaacgctgctctctggctcctgggaacagtctcagtgccagcaccaccccttggctgcctgcccacactgctggattctcgggtggaactcgacccgcagggacagcc

SEQ ID NO: 753010 - DNA, 120 bp, Artificial Sequence
  ENSG00000211893_15 (sequence is synthesized)
agccccagagtccgcactggggagagaaggggccaggcccaggacactgccacctaccacccactccagtccaccgagatcactcggagaagagcctgggccatgtggccgctgcaggag

SEQ ID NO: 753011 - DNA, 120 bp, Artificial Sequence
  ENSG00000211893_16 (sequence is synthesized)
ccccacggtgcaagggtgaggatagcccaaggaagggctgggcatctgcccagacaggcctcccagagaaggctggtgaccaggtcccaggcgggcaagactcagccttggtggggcctg

SEQ ID NO: 753012 - DNA, 120 bp, Artificial Sequence
  ENSG00000211893_17 (sequence is synthesized)
aggacagaggaggcccaggagcatcggggagagaggtggagggacaccgggagagccaggagcgtggacacagccagaactcatcacagaggctggcgtccagccccgggtcacgtgcag

SEQ ID NO: 753013 - DNA, 120 bp, Artificial Sequence
  ENSG00000211893_18 (sequence is synthesized)
caggaacaagcagccactctgggggcaccaggtggagaggcaagacgacaaagagggtgcccgtgttcttgtgaaagcggggctgctggccacgagtgctggacagaggcccccacgctc

SEQ ID NO: 753014 - DNA, 120 bp, Artificial Sequence
  ENSG00000211893_19 (sequence is synthesized)
tgctgcccccatcacgccgttccgtgactgtcacgcagaatccgcagacagggagactcgagcgggagtgcggccagcgcctgcctcagctgtcagggaggactcccgggctcactcgaa

SEQ ID NO: 753015 - DNA, 120 bp, Artificial Sequence
  ENSG00000211893_20 (sequence is synthesized)
ggaggtgccaccatttcagctttggtagcttttcttcttcttttaaattttctaaagctcattaattgtctttgatgtttcttttgtgatgacaataaaatatcctttttaagtcttgta

SEQ ID NO: 753016 - DNA, 120 bp, Artificial Sequence
  ENSG00000211893_21 (sequence is synthesized)
agcccccgctccccaggctctcggggtcgcgcgaggatgcttggcacgtaccccgtctacatacttcccgggcacccagcatggaaataaagcacccagcgctgccctgggcccctgcga

SEQ ID NO: 753017 - DNA, 120 bp, Artificial Sequence
  ENSG00000211895_0 (sequence is synthesized)
gcatccccgaccagccccaaggtcttcccgctgagcctctgcagcacccagccagatgggaacgtggtcatcgcctgcctggtccagggcttcttcccccaggagccactcagtgtgacc

SEQ ID NO: 753018 - DNA, 120 bp, Artificial Sequence
  ENSG00000211895_1 (sequence is synthesized)
tggagcgaaagcggacagggcgtgaccgccagaaacttcccacccagccaggatgcctccggggacctgtacaccacgagcagccagctgaccctgccggccacacagtgcctagccggc

SEQ ID NO: 753019 - DNA, 120 bp, Artificial Sequence
  ENSG00000211895_2 (sequence is synthesized)
aagtccgtgacatgccacgtgaagcactacacgaatcccagccaggatgtgactgtgccctgcccagttccctcaactccacctaccccatctccctcaactccacctaccccatctccc

SEQ ID NO: 753020 - DNA, 120 bp, Artificial Sequence
  ENSG00000211895_3 (sequence is synthesized)
tcatgctgccacccccgactgtcactgcaccgaccggccctcgaggacctgctcttaggttcagaagcgaacctcacgtgcacactgaccggcctgagagatgcctcaggtgtcaccttc

SEQ ID NO: 753021 - DNA, 120 bp, Artificial Sequence
  ENSG00000211895_4 (sequence is synthesized)
acctggacgccctcaagtgggaagagcgctgttcaaggaccacctgagcgtgacctctgtggctgctacagcgtgtccagtgtcctgccgggctgtgccgagccatggaaccatgggaag

SEQ ID NO: 753022 - DNA, 120 bp, Artificial Sequence
  ENSG00000211895_5 (sequence is synthesized)
ggaggagctggccctgaacgagctggtgacgctgacgtgcctggcacgcggcttcagccccaaggatgtgctggttcgctggctgcaggggtcacaggagctgccccgcgagaagtacct

SEQ ID NO: 753023 - DNA, 120 bp, Artificial Sequence
  ENSG00000211895_6 (sequence is synthesized)
gacttgggcatcccggcaggagcccagccagggcaccaccaccttcgctgtgaccagcatactgcgcgtggcagccgaggactggaagaagggggacaccttctcctgcatggtgggcca

SEQ ID NO: 753024 - DNA, 120 bp, Artificial Sequence
  ENSG00000211895_7 (sequence is synthesized)
cgaggccctgccgctggccttcacacagaagaccatcgaccgcttggcggattggcagatgccgcctccctatgtggtgctggacttgccgcaggagaccctggaggaggagacccccgg

SEQ ID NO: 753025 - DNA, 120 bp, Artificial Sequence
  ENSG00000211895_8 (sequence is synthesized)
cgccaacctgtggcccaccaccatcaccttcctcaccctcttcctgctgagcctgttctatagcacagcactgaccgtgaccagcgtccggggcccatctggcaacagggagggccccca

SEQ ID NO: 753026 - DNA, 120 bp, Artificial Sequence
  ENSG00000211895_9 (sequence is synthesized)
gtactgagcaggagccggcaaggcacagggaggaagtgtggaggaacctcttggagaagccagctatgcttgccagaactcagccctttcagacatcaccgacccgcccttactcacatg

SEQ ID NO: 753027 - DNA, 120 bp, Artificial Sequence
  ENSG00000211895_10 (sequence is synthesized)
cttggcgggtaaacccacccatgtcaatgtgtctgttgtcatggcggaggtggacggcacctgctactgagccgcccgcctgtccccacccctgaataaactccatgctcccccaagcag

SEQ ID NO: 753028 - DNA, 120 bp, Artificial Sequence
  ENSG00000211896_0 (sequence is synthesized)
gcctccaccaagggcccatcggtcttccccctggcaccctcctccaagagcacctctgggggcacagcagccctgggctgcctggtcaaggactacttccccgaaccggtgacggtgtcg

SEQ ID NO: 753029 - DNA, 120 bp, Artificial Sequence
  ENSG00000211896_1 (sequence is synthesized)
tggaactcaggcgccctgaccagcggcgtgcacaccttcccggctgtcctacagtcctcaggactctactccctcagcagcgtggtgaccgtgccctccagcagcttgggcacccagacc

SEQ ID NO: 753030 - DNA, 120 bp, Artificial Sequence
  ENSG00000211896_2 (sequence is synthesized)
tacatctgcaacgtgaatcacaagcccagcaacaccaaggtggacaagaaagttgagcccaaatcttgtgacaaaactcacacatgcccaccgtgcccagcacctgaactcctgggggga

SEQ ID NO: 753031 - DNA, 120 bp, Artificial Sequence
  ENSG00000211896_3 (sequence is synthesized)
ccgtcagtcttcctcttccccccaaaacccaaggacaccctcatgatctcccggacccctgaggtcacatgcgtggtggtggacgtgagccacgaagaccctgaggtcaagttcaactgg

SEQ ID NO: 753032 - DNA, 120 bp, Artificial Sequence
  ENSG00000211896_4 (sequence is synthesized)
tacgtggacggcgtggaggtgcataatgccaagacaaagccgcgggaggagcagtacaacagcacgtaccgtgtggtcagcgtcctcaccgtcctgcaccaggactggctgaatggcaag

SEQ ID NO: 753033 - DNA, 120 bp, Artificial Sequence
  ENSG00000211896_5 (sequence is synthesized)
gagtacaagtgcaaggtctccaacaaagccctcccagcccccatcgagaaaaccatctccaaagccaaagggcagccccgagaaccacaggtgtacaccctgcccccatcccgggatgag

SEQ ID NO: 753034 - DNA, 120 bp, Artificial Sequence
  ENSG00000211896_6 (sequence is synthesized)
ctgaccaagaaccaggtcagcctgacctgcctggtcaaaggcttctatcccagcgacatcgccgtggagtgggagagcaatgggcagccggagaacaactacaagaccacgcctcccgtg

SEQ ID NO: 753035 - DNA, 120 bp, Artificial Sequence
  ENSG00000211896_7 (sequence is synthesized)
ctggactccgacggctccttcttcctctacagcaagctcaccgtggacaagagcaggtggcagcaggggaacgtcttctcatgctccgtgatgcatgaggctctgcacaaccactacaca

SEQ ID NO: 753036 - DNA, 120 bp, Artificial Sequence
  ENSG00000211896_8 (sequence is synthesized)
cagaagagcctctccctgtctccggagctgcaactggaggagagctgtgcggaggcgcaggacggggagctggacgggctgtggacgaccatcaccatcttcatcacactcttcctgtta

SEQ ID NO: 753037 - DNA, 120 bp, Artificial Sequence
  ENSG00000211896_9 (sequence is synthesized)
agcgtgtgctacagtgccaccgtcaccttcttcaaggtgaagtggatcttctcctcggtggtggacctgaagcagaccatcatccccgactacaggaacatgatcggacagggggcctag

SEQ ID NO: 753038 - DNA, 120 bp, Artificial Sequence
  ENSG00000211896_10 (sequence is synthesized)
cgccctcaaccccatgactctctggcctcgcagttgccctctgaccctgacacacctgacacgccccccttccagaccctgtgcatagcaggtctaccccagacctccgctgcttggtgc

SEQ ID NO: 753039 - DNA, 120 bp, Artificial Sequence
  ENSG00000211896_11 (sequence is synthesized)
atgcagggcactgggggccaggtgtcccctcagcaggacgtccttgccctccggaccacaaggtgctcacacaaaaggaggcagtgaccggtatcccaggcccccacccaggcaggacct

SEQ ID NO: 753040 - DNA, 120 bp, Artificial Sequence
  ENSG00000211896_12 (sequence is synthesized)
cgccctggagccaaccccgtccacgccagcctcctgaacacaggcgtggtttccagatggtgagtgggagcgtcagccgccaaggtagggaagccacagcaccatcaggccctgttgggg

SEQ ID NO: 753041 - DNA, 120 bp, Artificial Sequence
  ENSG00000211896_13 (sequence is synthesized)
aggcttccgagagctgcgaaggctcactcagacggccttcctcccagcccgcagccagccagcctccattccgggcactcccgtgaactcctgacatgaggaatgaggttgttctgattt

SEQ ID NO: 753042 - DNA, 120 bp, Artificial Sequence
  ENSG00000211896_14 (sequence is synthesized)
caagcaaagaacgctgctctctggctcctgggaacagtctcagtgccagcaccaccccttggctgcctgcccacactgctggattctcgggtggaactggacccgcagggacagccagcc

SEQ ID NO: 753043 - DNA, 120 bp, Artificial Sequence
  ENSG00000211896_15 (sequence is synthesized)
ccagagtccgcactggggagagaaggggccaggcccaggacactgccacctcccacccactccagtccaccgagatcactcagagaagagcctgggccatgtggccgctgcaggagcccc

SEQ ID NO: 753044 - DNA, 120 bp, Artificial Sequence
  ENSG00000211896_16 (sequence is synthesized)
acagtgcaagggtgaggatagcccaaggaagggctgggcatctgcccagacaggcctcccagagaaggctggtgaccaggtcccaggcgggcaagactcagccttggtggggcctgagga

SEQ ID NO: 753045 - DNA, 120 bp, Artificial Sequence
  ENSG00000211896_17 (sequence is synthesized)
cagaggaggcccaggagcatcggggagagaggtggagggacaccgggagagccaggagcgtggacacagccagaactcatcacagaggctggcgtccagccccgggtcacgtgcagcagg

SEQ ID NO: 753046 - DNA, 120 bp, Artificial Sequence
  ENSG00000211896_18 (sequence is synthesized)
aacaagcagccactctgggggcaccaggtggagaggcaagacgacaaagagggtgcccgtgttcttgcgaaagcagggctgctggccacgagtgctggacagaggcccccacgctctgct

SEQ ID NO: 753047 - DNA, 120 bp, Artificial Sequence
  ENSG00000211896_19 (sequence is synthesized)
gcccccatcacgccgttccgtgactgtcacgcagaatctgcagacaggaagggagactcgagcgggagtgcggccagcgcctgcctcggccgtcagggaggactcctgggctcactcgaa

SEQ ID NO: 753048 - DNA, 120 bp, Artificial Sequence; identical to SEQ ID NO: 753015
  ENSG00000211896_20 (sequence is synthesized)

SEQ ID NO: 753049 - DNA, 120 bp, Artificial Sequence
  ENSG00000211896_21 (sequence is synthesized)
aagcccccgctccccaggctctcggggtcgcgcgaggatgcttggcacgtaccccgtgtacatacttcccaggcacccagcatggaaataaagcacccagcgcttccctgggcccctgcg

SEQ ID NO: 753050 - DNA, 120 bp, Artificial Sequence
  ENSG00000211897_0 (sequence is synthesized)
cttccaccaagggcccatcggtcttccccctggcgccctgctccaggagcacctctgggggcacagcggccctgggctgcctggtcaaggactacttcccagaaccggtgacggtgtcgt

SEQ ID NO: 753051 - DNA, 120 bp, Artificial Sequence
  ENSG00000211897_1 (sequence is synthesized)
ggaactcaggcgccctgaccagcggcgtgcacaccttcccggctgtcctacagtcctcaggactctactccctcagcagcgtggtgaccgtgccctccagcagcttgggcacccagacct

SEQ ID NO: 753052 - DNA, 120 bp, Artificial Sequence
  ENSG00000211897_2 (sequence is synthesized)
acacctgcaacgtgaatcacaagcccagcaacaccaaggtggacaagagagttgagctcaaaaccccacttggtgacacaactcacacatgcccacggtgcccagagcccaaatcttgtg

SEQ ID NO: 753053 - DNA, 120 bp, Artificial Sequence
  ENSG00000211897_3 (sequence is synthesized)
acacacctcccccgtgcccacggtgcccagagcccaaatcttgtgacacacctcccccatgcccacggtgcccagagcccaaatcttgtgacacacctcccccgtgcccaaggtgcccag

SEQ ID NO: 753054 - DNA, 120 bp, Artificial Sequence
  ENSG00000211897_4 (sequence is synthesized)
cacctgaactcctgggaggaccgtcagtcttcctcttccccccaaaacccaaggatacccttatgatttcccggacccctgaggtcacgtgcgtggtggtggacgtgagccacgaagacc

SEQ ID NO: 753055 - DNA, 120 bp, Artificial Sequence
  ENSG00000211897_5 (sequence is synthesized)
ccgaggtccagttcaagtggtacgtggacggcgtggaggtgcataatgccaagacaaagccgcgggaggagcagtacaacagcacgttccgtgtggtcagcgtcctcaccgtcctgcacc

SEQ ID NO: 753056 - DNA, 120 bp, Artificial Sequence
  ENSG00000211897_6 (sequence is synthesized)
aggactggctgaacggcaaggagtacaagtgcaaggtctccaacaaagccctcccagcccccatcgagaaaaccatctccaaaaccaaaggacagccccgagaaccacaggtgtacaccc

SEQ ID NO: 753057 - DNA, 120 bp, Artificial Sequence
  ENSG00000211897_7 (sequence is synthesized)
tgcccccatcccgggaggagatgaccaagaaccaggtcagcctgacctgcctggtcaaaggcttctaccccagcgacatcgccgtggagtgggagagcagcgggcagccggagaacaact

SEQ ID NO: 753058 - DNA, 120 bp, Artificial Sequence
  ENSG00000211897_8 (sequence is synthesized)
acaacaccacgcctcccatgctggactccgacggctccttcttcctctacagcaagctcaccgtggacaagagcaggtggcagcaggggaacatcttctcatgctccgtgatgcatgagg

SEQ ID NO: 753059 - DNA, 120 bp, Artificial Sequence
  ENSG00000211897_9 (sequence is synthesized)
ctctgcacaaccgcttcacgcagaagagcctctccctgtctccggagctgcaactggaggagagctgtgcggaggcgcaggacggggagctggacgggctgtggacgaccatcaccatct

SEQ ID NO: 753060 - DNA, 120 bp, Artificial Sequence
  ENSG00000211897_10 (sequence is synthesized)
tcatcacactcttcctgttaagcgtgtgctacagtgccaccgtcaccttcttcaaggtgaagtggatcttctcctcggtggtggacctgaagcagaccatcatccccgactataggaaca

SEQ ID NO: 753061 - DNA, 120 bp, Artificial Sequence
  ENSG00000211897_11 (sequence is synthesized)
gacctcaccgccctcaaccccatggctctctgtctttgcagtcgccctctgagccctgacacgccccccttccagaccctgtgcatagcaggtctaccccagacctccgctgcttggtgc

SEQ ID NO: 753062 - DNA, 120 bp, Artificial Sequence
  ENSG00000211897_12 (sequence is synthesized)
atgcagggagctggggaccaggtgtcccctcagcaggatgtccctgccctccagaccgccagatgctcacacaaaaggaggcagtgaccagcatccgaggcccccacccaggcaggagct

SEQ ID NO: 753063 - DNA, 120 bp, Artificial Sequence
  ENSG00000211897_13 (sequence is synthesized)
ggccctggagccaaccccgtccacgccagcctcctgaacacaggcgtggtttccagatggtgagtgggagcatcagccgccaaggtagggaagccacagcaccatcaggccctgttgggg

SEQ ID NO: 753064 - DNA, 120 bp, Artificial Sequence; identical to SEQ ID NO: 753041
  ENSG00000211897_14 (sequence is synthesized)

SEQ ID NO: 753065 - DNA, 120 bp, Artificial Sequence
  ENSG00000211897_15 (sequence is synthesized)
caagcaaagaacgctgctctctggctcctgggaacagtctcggtgccagcaccaccccttggctgcctgcctacactgctggattctcgggtggaactggacccgcagggacagccagcc

SEQ ID NO: 753066 - DNA, 120 bp, Artificial Sequence
  ENSG00000211897_16 (sequence is synthesized)
ccagagtccgcactggggagagaaggggccaggcccaggacactgccacctcccacccactccagtccaccgagatcactcagagaagagcctgggccatgtggccactgcaggagcccc

SEQ ID NO: 753067 - DNA, 120 bp, Artificial Sequence
  ENSG00000211897_17 (sequence is synthesized)
acagtgcaagagtgaggatagcccaaggaagggctgggcatctgcccagacaggcctcccagagaaggctggtgaccaggtcccaggcgggcaagactcagccttggtggggcctgagga

SEQ ID NO: 753068 - DNA, 120 bp, Artificial Sequence; identical to SEQ ID NO: 753045
  ENSG00000211897_18 (sequence is synthesized)

SEQ ID NO: 753069 - DNA, 120 bp, Artificial Sequence
  ENSG00000211897_19 (sequence is synthesized)
aacaagcagccactctgggggcaccaggtggagaggcaagatgccaaagagggtgcccgtgttcttgcgaaagcggggctgctggccacgagtgctggacagaggcccccacgctctgct

SEQ ID NO: 753070 - DNA, 120 bp, Artificial Sequence
  ENSG00000211897_20 (sequence is synthesized)
gcccccatcacgccgttccgtgactgtcacgcagaatccgcagacaggaagggaggctcgagcgggactgcggccagcgcctgcctcggccgtcagggaggactcccgggctcactcgaa

SEQ ID NO: 753071 - DNA, 120 bp, Artificial Sequence; identical to SEQ ID NO: 753015
  ENSG00000211897_21 (sequence is synthesized)

SEQ ID NO: 753072 - DNA, 120 bp, Artificial Sequence
  ENSG00000211897_22 (sequence is synthesized)
agcccccgctccccgggctctcggggtcgcgcgaggatgcttggcacgtaccccgtgtacatacttcccgggcacccagcatggaaataaagcacccagcgctgccctgggcccctgcga

SEQ ID NO: 753073 - DNA, 120 bp, Artificial Sequence
  ENSG00000211898_0 (sequence is synthesized)
cacccaccaaggctccggatgtgttccccatcatatcagggtgcagacacccaaaggataacagccctgtggtcctggcatgcttgataactgggtaccacccaacgtccgtgactgtca

SEQ ID NO: 753074 - DNA, 120 bp, Artificial Sequence
  ENSG00000211898_1 (sequence is synthesized)
cctggtacatggggacacagagccagccccagagaaccttccctgagatacaaagacgggacagctactacatgacaagcagccagctctccacccccctccagcagtggcgccaaggcg

SEQ ID NO: 753075 - DNA, 120 bp, Artificial Sequence
  ENSG00000211898_2 (sequence is synthesized)
agtacaaatgcgtggtccagcacaccgccagcaagagtaagaaggagatcttccgctggccagagtctccaaaggcacaggcctcctcagtgcccactgcacaaccccaagcagagggca

SEQ ID NO: 753076 - DNA, 120 bp, Artificial Sequence
  ENSG00000211898_3 (sequence is synthesized)
gcctcgccaaggcaaccacagccccagccaccacccgtaacacaggaagaggaggagaagagaagaagaaggagaaggagaaagaggaacaagaagagagagagacaaagacaccagagt

SEQ ID NO: 753077 - DNA, 120 bp, Artificial Sequence
  ENSG00000211898_4 (sequence is synthesized)
gtccgagccacacccagcctcttggcgtctacctgctaacccctgcagtgcaggacctgtggctccgggacaaagccaccttcacctgcttcgtggtgggcagtgacctgaaggatgctc

SEQ ID NO: 753078 - DNA, 120 bp, Artificial Sequence
  ENSG00000211898_5 (sequence is synthesized)
acctgacctgggaggtggctgggaaggtccccacagggggcgtggaggaagggctgctggagcggcacagcaacggctcccagagccagcacagccgtctgaccctgcccaggtccttgt

SEQ ID NO: 753079 - DNA, 120 bp, Artificial Sequence
  ENSG00000211898_6 (sequence is synthesized)
ggcctcgtctgaccctcccgaggcggcctcgtggctcctgtgtgaggtgtctggcttctcgccccccaacatcctcctgatgtggctggaggaccagcgtgaggtgaacacttctgggtt

SEQ ID NO: 753080 - DNA, 120 bp, Artificial Sequence
  ENSG00000211898_7 (sequence is synthesized)
tgcccccgcacgcccccctccacagcccaggagcaccacgttctgggcctggagtgtgctgcgtgtcccagccccgcccagccctcagccagccacctacacgtgtgtggtcagccacga

SEQ ID NO: 753081 - DNA, 120 bp, Artificial Sequence
  ENSG00000211898_8 (sequence is synthesized)
ggactcccggactctgctcaacgccagccggagcctagaagtcagctacctggccatgacccccctgatccctcagagcaaggatgagaacagcgatgactacacgacctttgatgatgt

SEQ ID NO: 753082 - DNA, 120 bp, Artificial Sequence
  ENSG00000211898_9 (sequence is synthesized)
gggcagcctgtggaccaccctgtccacgtttgtggccctcttcatcctcaccctcctctacagcggcattgtcactttcatcaaggtgaagtagccccagaagagcaggacgccctgtac

SEQ ID NO: 753083 - DNA, 120 bp, Artificial Sequence
  ENSG00000211898_10 (sequence is synthesized)
ctgcagagaagggaagcagcctctgtacctcatctgtggctaccagagagcagaaaggacccaccctggactcttctgtgtgcaggaagatgcgccagcccctgcccccggctcccctct

SEQ ID NO: 753084 - DNA, 120 bp, Artificial Sequence
  ENSG00000211898_11 (sequence is synthesized)
gtccgccacagaacccagtcttctagaccagggggacgggcacccatcactccgcaggcgaatcagagcccccctgccccggccctaacccctgtgcctccttcccatgcttccccgaga

SEQ ID NO: 753085 - DNA, 120 bp, Artificial Sequence
  ENSG00000211898_12 (sequence is synthesized)
gccagctacacccctgccccggccctaacccccatgcctccttcctgtgcttcccccagagccagctagtcccacctgcagcccgctggcctccccataaacacactttggttcatttca

SEQ ID NO: 753086 - DNA, 120 bp, Artificial Sequence
  ENSG00000211899_0 (sequence is synthesized)
gggagtgcatccgccccaacccttttccccctcgtctcctgtgagaattccccgtcggatacgagcagcgtggccgttggctgcctcgcacaggacttccttcccgactccatcactttc

SEQ ID NO: 753087 - DNA, 120 bp, Artificial Sequence
  ENSG00000211899_1 (sequence is synthesized)
tcctggaaatacaagaacaactctgacatcagcagcacccggggcttcccatcagtcctgagagggggcaagtacgcagccacctcacaggtgctgctgccttccaaggacgtcatgcag

SEQ ID NO: 753088 - DNA, 120 bp, Artificial Sequence
  ENSG00000211899_2 (sequence is synthesized)
ggcacagacgaacacgtggtgtgcaaagtccagcaccccaacggcaacaaagaaaagaacgtgcctcttccagtgattgctgagctgcctcccaaagtgagcgtcttcgtcccaccccgc

SEQ ID NO: 753089 - DNA, 120 bp, Artificial Sequence
  ENSG00000211899_3 (sequence is synthesized)
gacggcttcttcggcaacccccgcaagtccaagctcatctgccaggccacgggtttcagtccccggcagattcaggtgtcctggctgcgcgaggggaagcaggtggggtctggcgtcacc

SEQ ID NO: 753090 - DNA, 120 bp, Artificial Sequence
  ENSG00000211899_4 (sequence is synthesized)
acggaccaggtgcaggctgaggccaaagagtctgggcccacgacctacaaggtgaccagcacactgaccatcaaagagagcgactggctcggccagagcatgttcacctgccgcgtggat

SEQ ID NO: 753091 - DNA, 120 bp, Artificial Sequence
  ENSG00000211899_5 (sequence is synthesized)
cacaggggcctgaccttccagcagaatgcgtcctccatgtgtgtccccgatcaagacacagccatccgggtcttcgccatccccccatcctttgccagcatcttcctcaccaagtccacc

SEQ ID NO: 753092 - DNA, 120 bp, Artificial Sequence
  ENSG00000211899_6 (sequence is synthesized)
aagttgacctgcctggtcacagacctgaccacctatgacagcgtgaccatctcctggacccgccagaatggcgaagctgtgaaaacccacaccaacatctccgagagccaccccaatgcc

SEQ ID NO: 753093 - DNA, 120 bp, Artificial Sequence
  ENSG00000211899_7 (sequence is synthesized)
agcgccgtgggtgaggccagcatctgcgaggatgactggaattccggggagaggttcacgtgcaccgtgacccacacagacctgccctcgccactgaagcagaccatctcccggcccaag

SEQ ID NO: 753094 - DNA, 120 bp, Artificial Sequence
  ENSG00000211899_8 (sequence is synthesized)
ggggtggccctgcacaggcccgatgtctacttgctgccaccagcccgggagcagctgaacctgcgggagtcggccaccatcacgtgcctggtgacgggcttctctcccgcggacgtcttc

SEQ ID NO: 753095 - DNA, 120 bp, Artificial Sequence
  ENSG00000211899_9 (sequence is synthesized)
gtgcagtggatgcagagggggcagcccttgtccccggagaagtatgtgaccagcgccccaatgcctgagccccaggccccaggccggtacttcgcccacagcatcctgaccgtgtccgaa

SEQ ID NO: 753096 - DNA, 120 bp, Artificial Sequence
  ENSG00000211899_10 (sequence is synthesized)
gaggaatggaacacgggggagacctacacctgcgtggtggcccatgaggccctgcccaacagggtcaccgagaggaccgtggacaagtccaccgagggggaggtgagcgccgacgaggag

SEQ ID NO: 753097 - DNA, 120 bp, Artificial Sequence
  ENSG00000211899_11 (sequence is synthesized)
ggctttgagaacctgtgggccaccgcctccaccttcatcgtcctcttcctcctgagcctcttctacagtaccaccgtcaccttgttcaaggtgaaatgatcccaacagaagaacatcgga

SEQ ID NO: 753098 - DNA, 120 bp, Artificial Sequence
  ENSG00000211899_12 (sequence is synthesized)
gaccagagagaggaactcaaaggggcgctgcctccgggtctggggtcctggcctgcgtggcctgttggcacgtgtttctcttccccgcccggcctccagttgtgtgctctcacacaggct

SEQ ID NO: 753099 - DNA, 120 bp, Artificial Sequence
  ENSG00000211899_13 (sequence is synthesized)
tccttctcgaccggcaggggctggctggcttgcaggccacgaggtgggctctaccccacactgctttgctgtgtatacgcttgttgccctgaaataaatatgcacattttatccatgaaa

SEQ ID NO: 753100 - DNA, 120 bp, Artificial Sequence
  ENSG00000211899_14 (sequence is synthesized)
tgctggcctgcccacaggctcggggcggctggccgctctgtgtgtgcatgcaaactaaccgtgtcaacggggtgagatgttgcatcttataaaattagaaataaaaagatccattcaaaa

SEQ ID NO: 753101 - DNA, 120 bp, Artificial Sequence
  ENSG00000211933_0 (sequence is synthesized)
gcagagcctgctgaattctggctgaccagggcagtcaccagagctccagacaatgtctgtctccttcctcatcttcctgcccgtgctgggcctcccatggggtgtcctgtcacaggtaca

SEQ ID NO: 753102 - DNA, 120 bp, Artificial Sequence
  ENSG00000211933_1 (sequence is synthesized)
tgtgccatctccggggacagtgtctctagcaacagtgctgcttggaactggatcaggcagtccccatcgagaggccttgagtggctgggaaggacatactacaggtccaagtggtataat

SEQ ID NO: 753103 - DNA, 120 bp, Artificial Sequence
  ENSG00000211933_2 (sequence is synthesized)
gattatgcagtatctgtgaaaagtcgaataaccatcaacccagacacatccaagaaccagttctccctgcagctgaactctgtgactcccgaggacacggctgtgtattactgtgcaaga

SEQ ID NO: 753104 - DNA, 120 bp, Artificial Sequence
  ENSG00000211934_0 (sequence is synthesized)
gagagcatcacccagcaaccacatctgtcctctagagaatcccctgagagctccgttcctcaccatggactggacctggaggatcctcttcttggtggcagcagccacaggagcccactc

SEQ ID NO: 753105 - DNA, 120 bp, Artificial Sequence
  ENSG00000211934_1 (sequence is synthesized)
ggtctcctgcaaggcttctggatacaccttcaccggctactatatgcactgggtgcgacaggcccctggacaagggcttgagtggatgggatggatcaaccctaacagtggtggcacaaa

SEQ ID NO: 753106 - DNA, 120 bp, Artificial Sequence
  ENSG00000211934_2 (sequence is synthesized)
ctatgcacagaagtttcagggctgggtcaccatgaccagggacacgtccatcagcacagcctacatggagctgagcaggctgagatctgacgacacggccgtgtattactgtgcgagaga

SEQ ID NO: 753107 - DNA, 120 bp, Artificial Sequence
  ENSG00000211935_0 (sequence is synthesized)
ccacatccctcctcagaagcccccagagcacaacgcctcaccatggactggacctggaggatcctctttttggtggcagcagccacaggtgcccactcccaggtccagcttgtgcagtct

SEQ ID NO: 753108 - DNA, 120 bp, Artificial Sequence
  ENSG00000211935_1 (sequence is synthesized)
ggtttcctgcaaggcttctggatacaccttcactagctatgctatgcattgggtgcgccaggcccccggacaaaggcttgagtggatgggatggatcaacgctggcaatggtaacacaaa

SEQ ID NO: 753109 - DNA, 120 bp, Artificial Sequence
  ENSG00000211935_2 (sequence is synthesized)
atattcacagaagttccagggcagagtcaccattaccagggacacatccgcgagcacagcctacatggagctgagcagcctgagatctgaagacacggctgtgtattactgtgcgagaga

SEQ ID NO: 753110 - DNA, 120 bp, Artificial Sequence
  ENSG00000211937_0 (sequence is synthesized)
agtgactcctgtgccccaccatggacacactttgctccacgctcctgctgctgaccatcccttcatgggtcttgtcccagatcaccttgaaggagtctggtcctacgctggtgaaaccca

SEQ ID NO: 753111 - DNA, 120 bp, Artificial Sequence
  ENSG00000211937_1 (sequence is synthesized)
cctgcaccttctctgggttctcactcagcactagtggagtgggtgtgggctggatccgtcagcccccaggaaaggccctggagtggcttgcactcatttattgggatgatgataagcgct

SEQ ID NO: 753112 - DNA, 120 bp, Artificial Sequence
  ENSG00000211937_2 (sequence is synthesized)
acagcccatctctgaagagcaggctcaccatcaccaaggacacctccaaaaaccaggtggtccttacaatgaccaacatggaccctgtggacacagccacatattactgtgcacacagac

SEQ ID NO: 753113 - DNA, 88 bp, Artificial Sequence
  ENSG00000211938_0 (sequence is synthesized)
aggtctcagagaggagccttagccctggactccaaggcctttccacttggtgatcagcactgagcacagaggactcaccatggagttg

SEQ ID NO: 753114 - DNA, 75 bp, Artificial Sequence
  ENSG00000211938_1 (sequence is synthesized)
attgggccaacataaagcaagatggaagtgagaaatactatgtggactctgtgaagggccgattcaccatctcca

SEQ ID NO: 753115 - DNA, 120 bp, Artificial Sequence
  ENSG00000211938_2 (sequence is synthesized)
tactatgtggactctgtgaagggccgattcaccatctccagagacaacgccaagaactcactgtatctgcaaatgaacagcctgagagccgaggacacggccgtgtattactgtgcgaga

SEQ ID NO: 753116 - DNA, 88 bp, Artificial Sequence
  ENSG00000211941_0 (sequence is synthesized)
ctccctctgctgataaaaaccagccgagcccagaccctgcagctctgggagaagagccccagccccagaattcccaggagtttccatt

SEQ ID NO: 753117 - DNA, 85 bp, Artificial Sequence
  ENSG00000211941_1 (sequence is synthesized)
tacatgagctggatcatacattagtagtagtagtagttacacaaactacgcagactctgtgaagggccgattcaccatctccaga

SEQ ID NO: 753118 - DNA, 120 bp, Artificial Sequence
  ENSG00000211941_2 (sequence is synthesized)
ctacgcagactctgtgaagggccgattcaccatctccagagacaacgccaagaactcactgtatctgcaaatgaacagcctgagagccgaggacacggctgtgtattactgtgcgagaga

SEQ ID NO: 753119 - DNA, 120 bp, Artificial Sequence
  ENSG00000211942_0 (sequence is synthesized)
agctctgggagtggagccccagccttgggattcccaagtgtttgtattcagtgatcaggactgaacacacaggactcaccatggagttggggctgagctgggttttccttgttgctatat

SEQ ID NO: 753120 - DNA, 120 bp, Artificial Sequence
  ENSG00000211942_1 (sequence is synthesized)
tgcagcctctggattcaccttcagtagctacgacatgcactgggtccgccaagctacaggaaaaggtctggagtgggtctcagctattggtactgctggtgacccatactatccaggctc

SEQ ID NO: 753121 - DNA, 120 bp, Artificial Sequence
  ENSG00000211942_2 (sequence is synthesized)
ctatccaggctccgtgaagggccgattcaccatctccagagaaaatgccaagaactccttgtatcttcaaatgaacagcctgagagccggggacacggctgtgtattactgtgcaagaga

SEQ ID NO: 753122 - DNA, 89 bp, Artificial Sequence
  ENSG00000211943_0 (sequence is synthesized)
agctctgggagaggagccccagccttgggattcccaagtgttttcattcagtgatcaggggctgagctggattttccttgctgctattt

SEQ ID NO: 753123 - DNA, 76 bp, Artificial Sequence
  ENSG00000211943_1 (sequence is synthesized)
ggccgtattaaaagcaaaactgatggtgggacaacagactacgctgcacccgtgaaaggcagattcaccatctcaa

SEQ ID NO: 753124 - DNA, 120 bp, Artificial Sequence
  ENSG00000211943_2 (sequence is synthesized)
gactacgctgcacccgtgaaaggcagattcaccatctcaagagatgattcaaaaaacacgctgtatctgcaaatgaacagcctgaaaaccgaggacacagccgtgtattactgtaccaca

SEQ ID NO: 753125 - DNA, 120 bp, Artificial Sequence
  ENSG00000211944_0 (sequence is synthesized)
agccctgggagagaagccccagccctgggattctcaggtgtttctattgggtcaacagcaataaacaaattaccatggaatttgggctgagctgggtttttcttgctggtattttaaaag

SEQ ID NO: 753126 - DNA, 120 bp, Artificial Sequence
  ENSG00000211944_1 (sequence is synthesized)
gcagcctctggattcaccttcagtaacagtgacatgaactgggcccgcaaggctccaggaaaggggctggagtgggtatcgggtgttagttggaatggcagtaggacgcactatgtggac

SEQ ID NO: 753127 - DNA, 120 bp, Artificial Sequence
  ENSG00000211944_2 (sequence is synthesized)
cactatgtggactccgtgaagcgccgattcatcatctccagagacaattccaggaactccctgtatctgcaaaagaacagacggagagccgaggacatggctgtgtattactgtgtgaga

SEQ ID NO: 753128 - DNA, 120 bp, Artificial Sequence
  ENSG00000211945_0 (sequence is synthesized)
gcatcacccaaaaaccacacccctccttgggagaatcccctagatcacagctcctcaccatggactggacctggagcatccttttcttggtggcagcagcaacaggtgcccactcccagg

SEQ ID NO: 753129 - DNA, 120 bp, Artificial Sequence
  ENSG00000211945_1 (sequence is synthesized)
aaggtctcctgcaaggcttctggttacacctttaccagctacggtatcagctgggtgcgacaggcccctggacaagggcttgagtggatgggatggatcagcgcttacaatggtaacaca

SEQ ID NO: 753130 - DNA, 120 bp, Artificial Sequence
  ENSG00000211945_2 (sequence is synthesized)
aactatgcacagaagctccagggcagagtcaccatgaccacagacacatccacgagcacagcctacatggagctgaggagcctgagatctgacgacacggccgtgtattactgtgcgaga

SEQ ID NO: 753131 - DNA, 71 bp, Artificial Sequence
  ENSG00000211946_0 (sequence is synthesized)
ccagccctgagattcccacgtgtttccattcagtgatcagcactgaacacagaggactcgccatggagttt

SEQ ID NO: 753132 - DNA, 120 bp, Artificial Sequence
  ENSG00000211946_1 (sequence is synthesized)
actctcctttgcagcctctggattcacctttgatgattatggcatgagctgggtccgccaagctccagggaaggggctggagtgggtctctggtattaattggaatggtggtagcacagg

SEQ ID NO: 753133 - DNA, 120 bp, Artificial Sequence
  ENSG00000211946_2 (sequence is synthesized)
ttatgcagactctgtgaagggccgattcaccatctccagagacaacgccaagaactccctgtatctgcaaatgaacagtctgagagccgaggacacggccttgtatcactgtgcgagaga

SEQ ID NO: 753134 - DNA, 120 bp, Artificial Sequence
  ENSG00000211947_0 (sequence is synthesized)
agctctgagagaggagccttagccctggattccaaggcctatccacttggtgatcagcactgagcaccgaggattcaccatggaactggggctccgctgggttttccttgttgctatttt

SEQ ID NO: 753135 - DNA, 79 bp, Artificial Sequence
  ENSG00000211947_1 (sequence is synthesized)
atagcatgatcatccattagtagtagtagtagttacatatactacgcagactcagtgaagggccgattcaccatctcca

SEQ ID NO: 753136 - DNA, 120 bp, Artificial Sequence
  ENSG00000211947_2 (sequence is synthesized)
tactacgcagactcagtgaagggccgattcaccatctccagagacaacgccaagaactcactgtatctgcaaatgaacagcctgagagccgaggacacggctgtgtattactgtgcgaga

SEQ ID NO: 753137 - DNA, 120 bp, Artificial Sequence
  ENSG00000211949_0 (sequence is synthesized)
agctctgagagaggagcccagccctgggattttcaggtgttttcatttggtgatcaggactgaacagagagaactcaccatggagtttgggctgagctggctttttcttgtggctatttt

SEQ ID NO: 753138 - DNA, 74 bp, Artificial Sequence
  ENSG00000211949_1 (sequence is synthesized)
gctcagctattagtggtagtggtggtagcacatactacgcagactccgtgaagggccggttcaccatctccaga

SEQ ID NO: 753139 - DNA, 120 bp, Artificial Sequence
  ENSG00000211949_2 (sequence is synthesized)
ctacgcagactccgtgaagggccggttcaccatctccagagacaattccaagaacacgctgtatctgcaaatgaacagcctgagagccgaggacacggccgtatattactgtgcgaaaga

SEQ ID NO: 753140 - DNA, 120 bp, Artificial Sequence
  ENSG00000211950_0 (sequence is synthesized)
accatcacacaacagccacatccctcccctacagaagcccccagagcgcagcacctcaccatggactgcacctggaggatcctcttcttggtggcagcagctacaggcacccacgcccag

SEQ ID NO: 753141 - DNA, 120 bp, Artificial Sequence
  ENSG00000211950_1 (sequence is synthesized)
aaggtctcctgcaaggtttccggatacaccctcactgaattatccatgcactgggtgcgacaggctcctggaaaagggcttgagtggatgggaggttttgatcctgaagatggtgaaaca

SEQ ID NO: 753142 - DNA, 120 bp, Artificial Sequence
  ENSG00000211950_2 (sequence is synthesized)
atctacgcacagaagttccagggcagagtcaccatgaccgaggacacatctacagacacagcctacatggagctgagcagcctgagatctgaggacacggccgtgtattactgtgcaaca

SEQ ID NO: 753143 - DNA, 120 bp, Artificial Sequence
  ENSG00000211951_0 (sequence is synthesized)
gctcagtgactcctgtgccccaccatggacacactttgctacacactcctgctgctgaccaccccttcctgggtcttgtcccaggtcaccttgaaggagtctggtcctgtgctggtgaaa

SEQ ID NO: 753144 - DNA, 120 bp, Artificial Sequence
  ENSG00000211951_1 (sequence is synthesized)
acctgcaccgtctctgggttctcactcagcaatgctagaatgggtgtgagctggatccgtcagcccccagggaaggccctggagtggcttgcacacattttttcgaatgacgaaaaatcc

SEQ ID NO: 753145 - DNA, 120 bp, Artificial Sequence
  ENSG00000211951_2 (sequence is synthesized)
tacagcacatctctgaagagcaggctcaccatctccaaggacacctccaaaagccaggtggtccttaccatgaccaacatggaccctgtggacacagccacatattactgtgcacggata

SEQ ID NO: 753146 - DNA, 120 bp, Artificial Sequence
  ENSG00000211952_0 (sequence is synthesized)
atttccttaaattcagggtcctgctcacatgggaaatactttctgagagtcctggacctcctgtgcaagaacatgaaacacctgtggttcttcctcctgctggtggcagctcccagatgg

SEQ ID NO: 753147 - DNA, 120 bp, Artificial Sequence
  ENSG00000211952_1 (sequence is synthesized)
cctcacctgcgctgtctctggttactccatcagcagtagtaactggtggggctggatccggcagcccccagggaagggactggagtggattgggtacatctattatagtgggagcaccta

SEQ ID NO: 753148 - DNA, 120 bp, Artificial Sequence
  ENSG00000211952_2 (sequence is synthesized)
ctacaacccgtccctcaagagtcgagtcaccatgtcagtagacacgtccaagaaccagttctccctgaagctgagctctgtgaccgccgtggacacggccgtgtattactgtgcgagaaa

SEQ ID NO: 753149 - DNA, 78 bp, Artificial Sequence
  ENSG00000211955_0 (sequence is synthesized)
tttccattggctgagctgggttttcctcgttgctcttttaagaggtgtccagtgtcaggtgcagctggtggagtctgg

SEQ ID NO: 753150 - DNA, 120 bp, Artificial Sequence
  ENSG00000211955_1 (sequence is synthesized)
agactctcctgtgcagcgtctggattcaccttcagtagctatggcatgcactgggtccgccaggctccaggcaaggggctggagtgggtggcagttatatggtatgatggaagtaataaa

SEQ ID NO: 753151 - DNA, 120 bp, Artificial Sequence
  ENSG00000211955_2 (sequence is synthesized)
tactatgcagactccgtgaagggccgattcaccatctccagagacaattccaagaacacgctgtatctgcaaatgaacagcctgagagccgaggacacggctgtgtattactgtgcgaga

SEQ ID NO: 753152 - DNA, 120 bp, Artificial Sequence
  ENSG00000211956_0 (sequence is synthesized)
cagctcacatgggaagtgctttctgagagtcatggacctcctgcacaagaacatgaaacacctgtggttcttcctcctcctggtggcagctcccagatgggtcctgtcccaggtgcagct

SEQ ID NO: 753153 - DNA, 120 bp, Artificial Sequence
  ENSG00000211956_1 (sequence is synthesized)
ctgtccctcacctgcgctgtctatggtgggtccttcagtggttactactggagctggatccgccagcccccagggaaggggctggagtggattggggaaatcaatcatagtggaagcacc

SEQ ID NO: 753154 - DNA, 120 bp, Artificial Sequence
  ENSG00000211956_2 (sequence is synthesized)
aactacaacccgtccctcaagagtcgagtcaccatatcagtagacacgtccaagaaccagttctccctgaagctgagctctgtgaccgccgcggacacggctgtgtattactgtgcgaga

SEQ ID NO: 753155 - DNA, 120 bp, Artificial Sequence
  ENSG00000211957_0 (sequence is synthesized)
gcagcctctggattcaccttcagtaacagtgacatgaactgggtccatcaggctccaggaaaggggctggagtgggtatcgggtgttagttggaatggcagtaggacgcactatgcagac

SEQ ID NO: 753156 - DNA, 120 bp, Artificial Sequence
  ENSG00000211957_1 (sequence is synthesized)
cactatgcagactctgtgaagggccgattcatcatctccagagacaattccaggaacaccctgtatctgcaaacgaatagcctgagggccgaggacacggctgtgtattactgtgtgaga

SEQ ID NO: 753157 - DNA, 120 bp, Artificial Sequence
  ENSG00000211958_0 (sequence is synthesized)
ctctgggagtggagccccagccttgggattcccaggtgtttcccttcagtgatcaggactgaacacacacaactcatcatgcagtttgtgctgagctgggttttccttgttggtatttta

SEQ ID NO: 753158 - DNA, 85 bp, Artificial Sequence
  ENSG00000211958_1 (sequence is synthesized)
gcaatgagatgagctggatcatccattagtggtggtagcacatactacgcagactccaggaagggcagattcaccatctccagag

SEQ ID NO: 753159 - DNA, 120 bp, Artificial Sequence
  ENSG00000211958_2 (sequence is synthesized)
tacgcagactccaggaagggcagattcaccatctccagagacaattccaagaacacgctgtatcttcaaatgaacaacctgagagctgagggcacggccgtgtattactgtgccagatat

SEQ ID NO: 753160 - DNA, 120 bp, Artificial Sequence
  ENSG00000211959_0 (sequence is synthesized)
atttccttaaattcaggtccaactcataagggaaatgctttctgagagtcatggatctcatgtgcaagaaaatgaagcacctgtggttcttcctcctgctggtggcggctcccagatggg

SEQ ID NO: 753161 - DNA, 120 bp, Artificial Sequence
  ENSG00000211959_1 (sequence is synthesized)
ctcacctgcactgtctctggtggctccatcagcagtagtagttactactggggctggatccgccagcccccagggaaggggctggagtggattgggagtatctattatagtgggagcacc

SEQ ID NO: 753162 - DNA, 120 bp, Artificial Sequence
  ENSG00000211959_2 (sequence is synthesized)
tactacaacccgtccctcaagagtcgagtcaccatatccgtagacacgtccaagaaccagttctccctgaagctgagctctgtgaccgccgcagacacggctgtgtattactgtgcgaga

SEQ ID NO: 753163 - DNA, 120 bp, Artificial Sequence
  ENSG00000211961_0 (sequence is synthesized)
atcacccaacaaccacatccctcctctagagaatcccctgaaagcacagctcctcaccatggactggacctggagaatcctcttcttggtggcagcagtcacagatgcctactcccagat

SEQ ID NO: 753164 - DNA, 120 bp, Artificial Sequence
  ENSG00000211961_1 (sequence is synthesized)
ggtttcctgcaaggcttccggatacaccttcacctaccgctacctgcactgggtgcgacaggcccccggacaagcgcttgagtggatgggatggatcacacctttcaatggtaacaccaa

SEQ ID NO: 753165 - DNA, 120 bp, Artificial Sequence
  ENSG00000211961_2 (sequence is synthesized)
ctacgcacagaaattccaggacagagtcaccattaccagggacaggtctatgagcacagcctacatggagctgagcagcctgagatctgaggacacagccatgtattactgtgcaagata

SEQ ID NO: 753166 - DNA, 120 bp, Artificial Sequence
  ENSG00000211962_0 (sequence is synthesized)
atctgtggggacttgttcttcagtgaaaggatcctgtccgcaaacagaaatggagcaggacatgcatttcttcaagcaggattagggcttggaccatcagcatcccactcctgtgtggca

SEQ ID NO: 753167 - DNA, 120 bp, Artificial Sequence
  ENSG00000211962_1 (sequence is synthesized)
gatgggacatctatcttctttctcaacctcgatcaggctttgaggtatgaaataatctgtctcatgaatatgcaaataaccttagatctactgaggtaaatatggatacatctgggccct

SEQ ID NO: 753168 - DNA, 120 bp, Artificial Sequence
  ENSG00000211962_2 (sequence is synthesized)
agaagcctctgagaggaaagttcttcaccatggactggacctggagggtcttctgcttgctggctgtagctccaggtgctcactcccaggtgcagctggtgcagtctggggctgaggtga

SEQ ID NO: 753169 - DNA, 120 bp, Artificial Sequence
  ENSG00000211962_3 (sequence is synthesized)
aaggtttcctgcaaggcatctggatacaccttcaccagctactatatgcactgggtgcgacaggcccctggacaagggcttgagtggatgggaataatcaaccctagtggtggtagcaca

SEQ ID NO: 753170 - DNA, 120 bp, Artificial Sequence
  ENSG00000211962_4 (sequence is synthesized)
agctacgcacagaagttccagggcagagtcaccatgaccagggacacgtccacgagcacagtctacatggagctgagcagcctgagatctgaggacacggccgtgtattactgtgcgaga

SEQ ID NO: 753171 - DNA, 79 bp, Artificial Sequence
  ENSG00000211964_0 (sequence is synthesized)
agctctcagagaggtgccttagccctggattccaaggcatttccactgggctgtgctgggttttccttgttgctatttt

SEQ ID NO: 753172 - DNA, 79 bp, Artificial Sequence
  ENSG00000211964_1 (sequence is synthesized)
gaaatgatcatacattagtagtagtggtagtaccatatactacgcagactctgtgaagggccgattcaccatctccaga

SEQ ID NO: 753173 - DNA, 120 bp, Artificial Sequence
  ENSG00000211964_2 (sequence is synthesized)
ctacgcagactctgtgaagggccgattcaccatctccagagacaacgccaagaactcactgtatctgcaaatgaacagcctgagagccgaggacacggctgtttattactgtgcgagaga

SEQ ID NO: 753174 - DNA, 120 bp, Artificial Sequence
  ENSG00000211965_0 (sequence is synthesized)
agctctgggagaggagccccagccgtgagattcccaggagtttccacttggtgatcagcactgaacacagaccaccaaccatggagtttgggcttagctgggttttccttgttgctattt

SEQ ID NO: 753175 - DNA, 78 bp, Artificial Sequence
  ENSG00000211965_1 (sequence is synthesized)
ggtttcattagaagcaaagcttatggtgggacaacagaatacgccgcgtctgtgaaaggcagattcaccatctcaaga

SEQ ID NO: 753176 - DNA, 120 bp, Artificial Sequence
  ENSG00000211965_2 (sequence is synthesized)
atacgccgcgtctgtgaaaggcagattcaccatctcaagagatgattccaaaagcatcgcctatctgcaaatgaacagcctgaaaaccgaggacacagccgtgtattactgtactagaga

SEQ ID NO: 753177 - DNA, 120 bp, Artificial Sequence
  ENSG00000211966_0 (sequence is synthesized)
tgagtctccctcactgcccagctgggatctcagggcttcattttctgtcctccaccatcatggggtcaaccgccatcctcgccctcctcctggctgttctccaaggagtctgtgccgagg

SEQ ID NO: 753178 - DNA, 120 bp, Artificial Sequence
  ENSG00000211966_1 (sequence is synthesized)
aagatctcctgtaagggttctggatacagctttaccagctactggatcggctgggtgcgccagatgcccgggaaaggcctggagtggatggggatcatctatcctggtgactctgatacc

SEQ ID NO: 753179 - DNA, 120 bp, Artificial Sequence
  ENSG00000211966_2 (sequence is synthesized)
agatacagcccgtccttccaaggccaggtcaccatctcagccgacaagtccatcagcaccgcctacctgcagtggagcagcctgaaggcctcggacaccgccatgtattactgtgcgaga

SEQ ID NO: 753180 - DNA, 120 bp, Artificial Sequence
  ENSG00000211967_0 (sequence is synthesized)
aataccaatctcccccaggacacttcatctgcacggagcccggcctctcctcagatgtcccaccccagagcttgctatatagtcggggacatgcaaatagggccctccctctgctgatga

SEQ ID NO: 753181 - DNA, 120 bp, Artificial Sequence
  ENSG00000211967_1 (sequence is synthesized)
atagggccctccctctgctgatgaaaaccagcccagctgaccctgcagctctgggagaggagcccagcactgggattccgaggtgtttccattcggtgatcagcactgaacacagaggac

SEQ ID NO: 753182 - DNA, 74 bp, Artificial Sequence
  ENSG00000211967_2 (sequence is synthesized)
aactatcagttatttatagcggtggtagcacatactacgcagactccgtgaagggccgattcaccatctccaga

SEQ ID NO: 753183 - DNA, 120 bp, Artificial Sequence
  ENSG00000211967_3 (sequence is synthesized)
ctacgcagactccgtgaagggccgattcaccatctccagagacaattccaagaacacgctgtatcttcaaatgaacagcctgagagccgaggacacggccgtgtattactgtgcgagaga

SEQ ID NO: 753184 - DNA, 120 bp, Artificial Sequence
  ENSG00000211968_0 (sequence is synthesized)
agcatcatccagaaaccacatccctccgctagagaagcccctgacggcacagttcctcactatggactggatttggaggatcctcttcttggtgggagcagcgacaggtgcccactccca

SEQ ID NO: 753185 - DNA, 120 bp, Artificial Sequence
  ENSG00000211968_1 (sequence is synthesized)
ggtctcctgcaaggcttctggattcacctttactagctctgctgtgcagtgggtgcgacaggctcgtggacaacgccttgagtggataggatggatcgtcgttggcagtggtaacacaaa

SEQ ID NO: 753186 - DNA, 120 bp, Artificial Sequence
  ENSG00000211968_2 (sequence is synthesized)
ctacgcacagaagttccaggaaagagtcaccattaccagggacatgtccacaagcacagcctacatggagctgagcagcctgagatccgaggacacggccgtgtattactgtgcggcaga

SEQ ID NO: 753187 - DNA, 120 bp, Artificial Sequence
  ENSG00000211970_0 (sequence is synthesized)
acttaagcacccacaggaaaccaccacacatttccttaaattcaggttccagctcacatgggaaatactttctgagagtcctggacctcctgtgcaagaacatgaaacacctgtggttct

SEQ ID NO: 753188 - DNA, 120 bp, Artificial Sequence
  ENSG00000211970_1 (sequence is synthesized)
cacctgcactgtctctggtggctccgtcagcagtggtagttactactggagctggatccggcagcccccagggaagggactggagtggattgggtatatctattacagtgggagcaccaa

SEQ ID NO: 753189 - DNA, 120 bp, Artificial Sequence
  ENSG00000211970_2 (sequence is synthesized)
ctacaacccctccctcaagagtcgagtcaccatatcagtagacacgtccaagaaccagttctccctgaagctgagctctgtgaccgctgcggacacggccgtgtattactgtgcgagaga

SEQ ID NO: 753190 - DNA, 88 bp, Artificial Sequence
  ENSG00000211972_0 (sequence is synthesized)
agctctgggagaggagcccagcactgggattccgaggtgtttccattcagtgatctgcactgaacacagaggactcgccatggagttt

SEQ ID NO: 753191 - DNA, 74 bp, Artificial Sequence
  ENSG00000211972_1 (sequence is synthesized)
gcaactatcagttatttatagctgtggtagcacatactacgcagactccgtgaagggccgattcaccatctcca

SEQ ID NO: 753192 - DNA, 120 bp, Artificial Sequence
  ENSG00000211972_2 (sequence is synthesized)
tactacgcagactccgtgaagggccgattcaccatctccagagacaattccaagaacacgctgtatcttcaaatgaacagcctgagagctgaggacacggctgtgtattactgtgcgaga

SEQ ID NO: 753193 - DNA, 120 bp, Artificial Sequence
  ENSG00000211973_0 (sequence is synthesized)
agcatcacataacaaccacattcctcctctgaagaagcccctgggagcacagctcatcaccatggactggacctggaggttcctctttgtggtggcagcagctacaggtgtccagtccca

SEQ ID NO: 753194 - DNA, 120 bp, Artificial Sequence
  ENSG00000211973_1 (sequence is synthesized)
aaggtctcctgcaaggcttctggaggcaccttcagcagctatgctatcagctgggtgcgacaggcccctggacaagggcttgagtggatgggagggatcatccctatctttggtacagca

SEQ ID NO: 753195 - DNA, 120 bp, Artificial Sequence
  ENSG00000211973_2 (sequence is synthesized)
aactacgcacagaagttccagggcagagtcacgattaccgcggacaaatccacgagcacagcctacatggagctgagcagcctgagatctgaggacacggccgtgtattactgtgcgaga

SEQ ID NO: 753196 - DNA, 120 bp, Artificial Sequence
  ENSG00000211974_0 (sequence is synthesized)
atctccaccagctccaccctcccctgggttcaaaagacgaggacagggcctcgctcagtgaatcctgctctccaccatggacatactttgttccacgctcctgctactgactgtcccgtc

SEQ ID NO: 753197 - DNA, 120 bp, Artificial Sequence
  ENSG00000211974_1 (sequence is synthesized)
cctgcaccttctctgggttctcactcagcactagtggaatgcgtgtgagctggatccgtcagcccccagggaaggccctggagtggcttgcacgcattgattgggatgatgataaattct

SEQ ID NO: 753198 - DNA, 120 bp, Artificial Sequence
  ENSG00000211974_2 (sequence is synthesized)
acagcacatctctgaagaccaggctcaccatctccaaggacacctccaaaaaccaggtggtccttacaatgaccaacatggaccctgtggacacagccacgtattactgtgcacggatac

SEQ ID NO: 753199 - DNA, 89 bp, Artificial Sequence
  ENSG00000211976_0 (sequence is synthesized)
agctctgggagaggagctccagccttgggattcccagctgtctccactcggtgatcggcactgaatacaggagactcaccatggagttt

SEQ ID NO: 753200 - DNA, 120 bp, Artificial Sequence
  ENSG00000211976_1 (sequence is synthesized)
tcctgtgcagcctctgggttcaccttcagtggctctgctatgcactgggtccgccaggcttccgggaaagggctggagtgggttggccgtattagaagcaaagctaacagttacgcgaca

SEQ ID NO: 753201 - DNA, 120 bp, Artificial Sequence
  ENSG00000211976_2 (sequence is synthesized)
gcatatgctgcgtcggtgaaaggcaggttcaccatctccagagatgattcaaagaacacggcgtatctgcaaatgaacagcctgaaaaccgaggacacggccgtgtattactgtactaga

SEQ ID NO: 753202 - DNA, 120 bp, Artificial Sequence
  ENSG00000211979_0 (sequence is synthesized)
acccaacaacaacatccctccttgggagaatcccctagagcacagctcctcaccatggactggacctggagcatcctcttcttggtggcagcagcaacaggtacctactcccaggtgcag

SEQ ID NO: 753203 - DNA, 120 bp, Artificial Sequence
  ENSG00000211979_1 (sequence is synthesized)
aaggtctcctgcaaggcttctggttacagtttcaccacctatggtatgaattgggtgccacaggcccctggacaagggcttgagtggatgggatggttcaacacctacactgggaaccca

SEQ ID NO: 753204 - DNA, 120 bp, Artificial Sequence
  ENSG00000211979_2 (sequence is synthesized)
acatatgcccagggcttcacaggacggtttgtcttctccatggacacctctgccagcacagcatacctgcagatcagcagcctaaaggctgaggacatggccatgtattactgtgcgaga

SEQ ID NO: 753205 - DNA, 120 bp, Artificial Sequence
  ENSG00000212122_0 (sequence is synthesized)
actccagagtcttggcctctaggaggcaggaacagcaggcctggccagcccaaaggactctctatccaggatgtaaatgagcacactgctggcccatgcgcctcggggctgtagagggca

SEQ ID NO: 753206 - DNA, 120 bp, Artificial Sequence
  ENSG00000212122_1 (sequence is synthesized)
gcctcagaggcactgggcattcctggcaccatggatgacgctgctgtcctcaagcgacgaggctacctcctggggataaatttaggagagggctcctatgcaaaagtaaaatctgcttac

SEQ ID NO: 753207 - DNA, 120 bp, Artificial Sequence
  ENSG00000212122_2 (sequence is synthesized)
tctgagcgcctgaagttcaatgtggcgatcaagatcatcgaccgcaagaaggcccccgcagacttcttggagaaattccttccccgggaaattgagattctggccatgttaaaccactgc

SEQ ID NO: 753208 - DNA, 120 bp, Artificial Sequence
  ENSG00000212122_3 (sequence is synthesized)
tccatcattaagacctacgagatctttgagacatcacatggcaaggtctacatcgtcatggagctcgcggtccagggcgacctcctcgagttaatcaaaacccggggagccctgcatgag

SEQ ID NO: 753209 - DNA, 120 bp, Artificial Sequence
  ENSG00000212122_4 (sequence is synthesized)
gacgaagctcgcaagaagttccaccagctttccttggccatcaagtactgccacgacctggacgtcgtccaccgggacctcaagtgtgacaaccttctccttgacaaggacttcaacatc

SEQ ID NO: 753210 - DNA, 120 bp, Artificial Sequence
  ENSG00000212122_5 (sequence is synthesized)
aagctgtccgacttcagcttctccaagcgctgcctgcgggatgacagtggtcgaatggcattaagcaagaccttctgtgggtcaccagcgtatgcggccccagaggtgctgcagggcatt

SEQ ID NO: 753211 - DNA, 120 bp, Artificial Sequence
  ENSG00000212122_6 (sequence is synthesized)
ccctaccagcccaaggtgtacgacatctggagcctaggcgtgatcctctacatcatggtctgcggctccatgccctacgacgactccaacatcaagaagatgctgcgtatccagaaggag

SEQ ID NO: 753212 - DNA, 120 bp, Artificial Sequence
  ENSG00000212122_7 (sequence is synthesized)
caccgcgtcaacttcccacgctccaagcacctgacaggcgagtgcaaggacctcatctaccacatgctgcagcccgacgtcaaccggcggctccacatcgacgagatcctcagccactgc

SEQ ID NO: 753213 - DNA, 120 bp, Artificial Sequence
  ENSG00000212122_8 (sequence is synthesized)
tggatgcagcccaaggcacggggatctccctctgtggccatcaacaaggagggggagagttcccggggaactgaacccttgtggacccccgaacctggctctgacaagaagtctgccacc

SEQ ID NO: 753214 - DNA, 120 bp, Artificial Sequence
  ENSG00000212122_9 (sequence is synthesized)
aagctggagcctgagggagaggcacagccccaggcacagcctgagacaaaacccgaggggacagcaatgcaaatgtccaggcagtcggagatcctgggtttccccagcaagccgtcgact

SEQ ID NO: 753215 - DNA, 120 bp, Artificial Sequence
  ENSG00000212122_10 (sequence is synthesized)
agacgcgggcccagtgagcttcttgcggcccagggaatgagatggagctcacggcttaaagcccaagctctgaagaagtcaagggtggagccagagaaggaaggcagtcccagatgagcc

SEQ ID NO: 753216 - DNA, 120 bp, Artificial Sequence
  ENSG00000212122_11 (sequence is synthesized)
tctattttcatcagcttcttctctctccccttgaacttggtaacccacatggttctcccgtggcccctaggtggatgaggccaaagtcaaatccaaggctgagacagtcgtgcgactcct

SEQ ID NO: 753217 - DNA, 120 bp, Artificial Sequence
  ENSG00000212122_12 (sequence is synthesized)
actcccccagagcgtgacccggagcaggtgctggacacagagcctgtctcagcagagggtccccactggccgcaacggctcagtgacagcaagagcaggaagagcagcaggaaggcaccg

SEQ ID NO: 753218 - DNA, 120 bp, Artificial Sequence
  ENSG00000212122_13 (sequence is synthesized)
ctgtccaccttgggcaccatttatcctcctttcatcgtccccggggcagttgcgtgaccctgctgggaggccagaccgggccagactgagggtcaggggaccaggctgggttgggggttg

SEQ ID NO: 753219 - DNA, 120 bp, Artificial Sequence
  ENSG00000212122_14 (sequence is synthesized)
ggtggggctggacggggacgaggcgcggagaggcggcgggaaagagcttcggctgggccacgggctcgcgggcactctcggcggcagcctcgggggctccgactccagctctgggcaaga

SEQ ID NO: 753220 - DNA, 120 bp, Artificial Sequence
  ENSG00000212122_15 (sequence is synthesized)
tccataaacttttaaagaagcctcaaaacatacttttaaagcattaagctttaaagtgctagaaatcttgtgccccatatgtgcttctttcagtattatcctagatcctcaggagtagca

SEQ ID NO: 753221 - DNA, 120 bp, Artificial Sequence
  ENSG00000212122_16 (sequence is synthesized)
tggcaactggagaaaatgggaggaaagacaagaagaaatagaagctgatttaacatcaagtttattcagttttgatttttcttatctctactggctttctcctgttcaaaccttgcagcg

SEQ ID NO: 753222 - DNA, 120 bp, Artificial Sequence
  ENSG00000212122_17 (sequence is synthesized)
ataatatttggaaaagagcacttggaaattatattcctgtttttaactctttatatttaatcattctccttgtaattgattttgtagctaatttactccccagcacccccagaagaaaat

SEQ ID NO: 753223 - DNA, 120 bp, Artificial Sequence
  ENSG00000212122_18 (sequence is synthesized)
tttacaaaggaaaatgttttatttttattttttccttatcaactttttatttaaatgctaatatccaattaatggacaaacgaatcagctaatactggaaacaatgtaacaatagtgaaa

SEQ ID NO: 753224 - DNA, 120 bp, Artificial Sequence
  ENSG00000212122_19 (sequence is synthesized)
agcatgaacttttgatttctatagaccgaatttgactctgctactaaatgatcttgggcaagttggttaatctatatgtctcagtttctttatctataaaatgagaataatacaacttca

SEQ ID NO: 753225 - DNA, 120 bp, Artificial Sequence
  ENSG00000212123_0 (sequence is synthesized)
aggttctcagcctgttctccggttgggccacttgcactcccactgccgccctcctggcctgtctggaccgggccccccgctgccccatgcagcaccccaaaccgttctgtgcccctgcag

SEQ ID NO: 753226 - DNA, 120 bp, Artificial Sequence
  ENSG00000212123_1 (sequence is synthesized)
ctccccaggaaggtttcagcccgcagagtctggagggggctgaggtgctgggcaaccagcctgctcccacctgtgccgagcctcctcccgctatgggctccttgaacctgtatcatcccc

SEQ ID NO: 753227 - DNA, 120 bp, Artificial Sequence
  ENSG00000212123_2 (sequence is synthesized)
cagacccagagaaagaggtgtttccagccccaccagcaggtttccagatggccccatgcgggtgcttcttcgacccccgcatctatcggatcgagtggaccacccccgacctgggccagt

SEQ ID NO: 753228 - DNA, 120 bp, Artificial Sequence
  ENSG00000212123_3 (sequence is synthesized)
cagccctgtataagctggcagcaagcagcggggggccagcgggggtcccctccgccccaggcagctacctcctggagcctcagccctacctcaaggccccggggctgcctccataccccc

SEQ ID NO: 753229 - DNA, 120 bp, Artificial Sequence
  ENSG00000212123_4 (sequence is synthesized)
actaccagcaggcacccggggggccccagtttctcttgccctacttcccgcctgagggccccgggccagaggctctgggttttgtgggggacgcagggcccgccgccttcgtggagctgc

SEQ ID NO: 753230 - DNA, 120 bp, Artificial Sequence
  ENSG00000212123_5 (sequence is synthesized)
gagaacaagccgccccctgtactcatcacgctgcctgcagagcccacactgcccccagacgcctacagccacctccagggtcacctcggccacttccctgggcccgaacccctggccttc

SEQ ID NO: 753231 - DNA, 120 bp, Artificial Sequence
  ENSG00000212123_6 (sequence is synthesized)
cccgtcaaggagctgcagggcagtggggcccgacctggggtgcccctgtacccaccgggcctcagcgagctcaaggtggccgaggtcaaggagggggccctgctgggagcaggcaaggcc

SEQ ID NO: 753232 - DNA, 120 bp, Artificial Sequence
  ENSG00000212123_7 (sequence is synthesized)
aaggcccccaagacggccagagctttggcactgcctgacaaggttctgctggaggacgccatgaagctcttcgactgcctgccaggcgcctctgagcctgagggtaccctgtgcgaggtc

SEQ ID NO: 753233 - DNA, 120 bp, Artificial Sequence
  ENSG00000212123_8 (sequence is synthesized)
cctgggccggccctgcctgacagcagtggtgggaactcagccgatgacatccgctcgctgtgcctgcccgaggagctgctgtcctttgactacagcgtgcctgagatcctggacaccgtg

SEQ ID NO: 753234 - DNA, 120 bp, Artificial Sequence
  ENSG00000212123_9 (sequence is synthesized)
tccaacgttgactacttcttcaacttcaaggcgctcgacgaggagcagccgccccacccggggccccctgccaccaacaccccggcccccattctgtctggcaagagaaaggcctcgacg

SEQ ID NO: 753235 - DNA, 120 bp, Artificial Sequence
  ENSG00000212123_10 (sequence is synthesized)
gccaagaagggaaagccgggaaggaaggccaggcagccggcaggcccagccagcgccactcccccggggcccagggaggacctgggagccaccccgcattaaagcacatttgacctttca

SEQ ID NO: 753236 - DNA, 120 bp, Artificial Sequence
  ENSG00000212123_11 (sequence is synthesized)
gtctggagggggctgaggtgctgggcaaccagcctgctcccacctgtgccgagcctcctcccgctatgggtacgatcgggtgggtgggagcacctgctggagagggttcaggggcccacc

SEQ ID NO: 753237 - DNA, 120 bp, Artificial Sequence
  ENSG00000212123_12 (sequence is synthesized)
cgcctaagggccctacccacctgggcacctttgtccacaggctccttgaacctgtatcatcccccagacccagagaaagaggtgtttccagccccaccagcaggtaccggcctcccctga

SEQ ID NO: 753238 - DNA, 120 bp, Artificial Sequence
  ENSG00000212123_13 (sequence is synthesized)
gcccttgacgaggctgggagtgggtttgagtgtgcaggcccatcttgcccctgccccgtccctaagtgggagcctgaaggcatggcctctgctccccatgcttcacacaggtcccccaga

SEQ ID NO: 753239 - DNA, 120 bp, Artificial Sequence
  ENSG00000212123_14 (sequence is synthesized)
tgagccccaaagacaagctctgtgtcatccatcacccagccagggccccaaagcaatatctatgtcgtcccccaaaggggccccccaatggcaaggttcttgtggcatctcccaaacagg

SEQ ID NO: 753240 - DNA, 120 bp, Artificial Sequence
  ENSG00000212124_0 (sequence is synthesized)
ggactcagaacaagtgttactaagcctgcatttttttatctgttcaaacatgatgtgttttctgctcatcatttcatcaattctggtagtgtttgcatttgttcttggaaatgttgccaa

SEQ ID NO: 753241 - DNA, 120 bp, Artificial Sequence
  ENSG00000212124_1 (sequence is synthesized)
tggcttcatagccctagtaaatgtcattgactgggttaacacacgaaagatctcctcagctgagcaaattctcactgctctggtggtctccagaattggtttactctgggtcatgttatt

SEQ ID NO: 753242 - DNA, 120 bp, Artificial Sequence
  ENSG00000212124_2 (sequence is synthesized)
cctttggtatgcaactgtgtttaattctgctttatatggtttagaagtaagaattgttgcttctaatgcctgggctgtaacgaaccatttcagcatgtggcttgctgctagcctcagcat

SEQ ID NO: 753243 - DNA, 120 bp, Artificial Sequence
  ENSG00000212124_3 (sequence is synthesized)
attttgtttgctcaagattgccaatttctccaaccttatttctctccacctaaagaagagaattaagagtgttgttctggtgatactgttggggcccttggtatttctgatttgtaatct

SEQ ID NO: 753244 - DNA, 120 bp, Artificial Sequence
  ENSG00000212124_4 (sequence is synthesized)
tgaaggaaatgtgacttggaagatcaaattgaggaatgcaatacacctttcaagcttgactgtaactactctagcaaacctcataccctttactctgagcctaatatgttttctgctgtt

SEQ ID NO: 753245 - DNA, 120 bp, Artificial Sequence
  ENSG00000212124_5 (sequence is synthesized)
aatctgttctctttgtaaacatctcaagaagatgcggctccatagcaaaggatctcaagatcccagcaccaaggtccatataaaagctttgcaaactgtgacctccttcctcatgttatt

SEQ ID NO: 753246 - DNA, 120 bp, Artificial Sequence
  ENSG00000212124_6 (sequence is synthesized)
tgccatttactttctgtgtataatcacatcaacttggaatcttaggacacagcagagcaaacttgtactcctgctttgccaaactgttgcaatcatgtatccttcattccactcattcat

SEQ ID NO: 753247 - DNA, 120 bp, Artificial Sequence
  ENSG00000212124_7 (sequence is synthesized)
cctgattatgggaagtaggaagctaaaacagacctttctttcagttttgtggcagatgacacgctgagtgaaagaagagaaaccctcaactccatagattcacaaggggagcatcgtggg

SEQ ID NO: 753248 - DNA, 120 bp, Artificial Sequence
  ENSG00000212126_0 (sequence is synthesized)
tcacaaccagtgatattaggcttgcattttctttctttttttctgctcagatatgataacttttctatacatttttttttcaattctaataatggttttatttgttctcggaaactttgc

SEQ ID NO: 753249 - DNA, 120 bp, Artificial Sequence
  ENSG00000212126_1 (sequence is synthesized)
caatggcttcatagcactggtaaatttcattgactgggtgaagagaaaaaagatctcctcagctgaccaaattctcactgctctggcggtctccagaattggtttgctctgggcattatt

SEQ ID NO: 753250 - DNA, 120 bp, Artificial Sequence
  ENSG00000212126_2 (sequence is synthesized)
attaaattggtatttaactgtgttgaatccagctttttatagtgtagaattaagaattacttcttataatgcctgggttgtaaccaaccatttcagcatgtggcttgctgctaacctcag

SEQ ID NO: 753251 - DNA, 120 bp, Artificial Sequence
  ENSG00000212126_3 (sequence is synthesized)
catattttatttgctcaagattgccaatttctccaaccttctttttcttcatttaaagaggagagttaggagtgtcattctggtgatactgttggggactttgatatttttggtttgtca

SEQ ID NO: 753252 - DNA, 120 bp, Artificial Sequence
  ENSG00000212126_4 (sequence is synthesized)
gaatatgaaggaaacatgactgggaagatgaaattgaggaatacagtacatctttcatatttgactgtaactaccctatggagcttcataccctttactctgtccctgatatcttttctg

SEQ ID NO: 753253 - DNA, 120 bp, Artificial Sequence
  ENSG00000212126_5 (sequence is synthesized)
atgctaatctgttctctgtgtaaacatctcaagaagatgcagctccatggagaaggatcgcaagatctcagcaccaaggtccacataaaagctttgcaaactctgatctccttcctcttg

SEQ ID NO: 753254 - DNA, 120 bp, Artificial Sequence
  ENSG00000212126_6 (sequence is synthesized)
ttatgtgccattttctttctattcctaatcgtttcggtttggagtcctaggaggctgcggaatgacccggttgtcatggttagcaaggctgttggaaacatatatcttgcattcgactca

SEQ ID NO: 753255 - DNA, 120 bp, Artificial Sequence
  ENSG00000212126_7 (sequence is synthesized)
ttcatcctaatttggagaaccaagaagctaaaacacacctttcttttgattttgtgtcagattaggtgctgagtaaaagacctgaaactctcaactctctagattcacaagtgggacatt

SEQ ID NO: 753256 - DNA, 120 bp, Artificial Sequence
  ENSG00000212127_0 (sequence is synthesized)
tgcattaagaagtcttcagcagtgatattagacattggggcatgctcttacaggcaatgggtggtgtcataaagagcatatttacattcgttttaattgtggaatttataattggaaatt

SEQ ID NO: 753257 - DNA, 120 bp, Artificial Sequence
  ENSG00000212127_1 (sequence is synthesized)
taggaaatagtttcatagcactggtgaactgtattgactgggtcaagggaagaaagatctcttcggttgatcggatcctcactgctttggcaatctctcgaattagcctggtttggttaa

SEQ ID NO: 753258 - DNA, 120 bp, Artificial Sequence
  ENSG00000212127_2 (sequence is synthesized)
tattcggaagctggtgtgtgtctgtgtttttcccagctttatttgccactgaaaaaatgttcagaatgcttactaatatctggacagtgatcaatcattttagtgtctggttagctacag

SEQ ID NO: 753259 - DNA, 120 bp, Artificial Sequence
  ENSG00000212127_3 (sequence is synthesized)
gcctcggtactttttattttctcaagatagccaatttttctaactctatttttctctacctaaagtggagggttaaaaaggtggttttggtgctgcttcttgtgacttcggtcttcttgt

SEQ ID NO: 753260 - DNA, 120 bp, Artificial Sequence
  ENSG00000212127_4 (sequence is synthesized)
ttttaaatattgcactgataaacatccatataaatgccagtatcaatggatacagaagaaacaagacttgcagttctgattcaagtaactttacacgattttccagtcttattgtattaa

SEQ ID NO: 753261 - DNA, 120 bp, Artificial Sequence
  ENSG00000212127_5 (sequence is synthesized)
ccagcactgtgttcattttcataccctttactttgtccctggcaatgtttcttctcctcatcttctccatgtggaaacatcgcaagaagatgcagcacactgtcaaaatatccggagacg

SEQ ID NO: 753262 - DNA, 120 bp, Artificial Sequence
  ENSG00000212127_6 (sequence is synthesized)
ccagcaccaaagcccacagaggagttaaaagtgtgatcactttcttcctactctatgccattttctctctgtcttttttcatatcagtttggacctctgaaaggttggaggaaaatctaa

SEQ ID NO: 753263 - DNA, 120 bp, Artificial Sequence
  ENSG00000212127_7 (sequence is synthesized)
tcttggaaacaagaagctgagacaggcctctctgtcagtgctactgtggctgaggtacatgttcaaagatggggagccctcaggtcacaaagaatttagagaatcatcttgaatatatta

SEQ ID NO: 753264 - DNA, 120 bp, Artificial Sequence
  ENSG00000212127_8 (sequence is synthesized)
gaaaaaaaatagctcctaagaaattcttgtatgttatataaatttatacttccttaagattctttcattgtgtataactttgtgaattttacaaagatatgcttggaatcaacaccatcc

SEQ ID NO: 753265 - DNA, 120 bp, Artificial Sequence
  ENSG00000212127_9 (sequence is synthesized)
aaacatatcacaaattaggatatatgaaagtatgtatattaccatacagagaagaatgcgaatactataaagagttcttatacaaacagataatatagattttgtatcaatcattcacct

SEQ ID NO: 753266 - DNA, 120 bp, Artificial Sequence
  ENSG00000212127_10 (sequence is synthesized)
tttttgagatttttaaatgagaaaacctataatgtataaaatacatgtgtgtatgtatgtatgtgacacagttactaaaaataggcttcttaaacttacatctcaatctggtagataaag

SEQ ID NO: 753267 - DNA, 120 bp, Artificial Sequence
  ENSG00000212127_11 (sequence is synthesized)
tacataaaagaatatggaattttagtacctatattaagtgtttttaatttttgtataatatttagtacctgattagcgtgtatgcaaaaaagtaatttgcttcgtttgttgaattagaag

SEQ ID NO: 753268 - DNA, 120 bp, Artificial Sequence
  ENSG00000212127_12 (sequence is synthesized)
ccagctgccttactaaactaccacatttgctttgctcattctcttggctttgcagatagaaaattatatcatctgcatatagtgacttataatgattattttacttctccattttactac

SEQ ID NO: 753269 - DNA, 120 bp, Artificial Sequence
  ENSG00000212127_13 (sequence is synthesized)
ttgtaattcttttttggtatcagttgtataatgaaatggtttgaacattcaaagtgttaagtaatcctgatcgtaactgctgtctttgcaaatggagtgttttctagtgttttaacaata

SEQ ID NO: 753270 - DNA, 120 bp, Artificial Sequence
  ENSG00000212127_14 (sequence is synthesized)
aacgtaatactgactctagctttgagataaattcttttaaaaatattcttcagggagaatatttgtttcctatcttcctgtgtatagtattgtaataaaatctctgttaaaaactatcaa

SEQ ID NO: 753271 - DNA, 120 bp, Artificial Sequence
  ENSG00000212127_15 (sequence is synthesized)
agtcatggctctaaatatgtacctgcaatcggatgttgaggatcaccgagcccgcgacgtagaagtacgggaagttcatgcgcagctgccaggccagctcgaagaaggcgagcagggtgc

SEQ ID NO: 753272 - DNA, 120 bp, Artificial Sequence
  ENSG00000212127_16 (sequence is synthesized)
gggagagccccttgcagaagacgccgtacgaggttctccagcatttggctcaaggccccaagggcacatgtgacaagaaggcgccagctttttaaacattggaagttcttctgtgtcagt

SEQ ID NO: 753273 - DNA, 120 bp, Artificial Sequence
  ENSG00000212127_17 (sequence is synthesized)
tctgtgacagaacatttacttaacacatcatgaaggctagtttggatgtggaggggaatagactccatctatccatatgagagttggagtctcactctgttatccaggctggagttcagt

SEQ ID NO: 753274 - DNA, 120 bp, Artificial Sequence
  ENSG00000212127_18 (sequence is synthesized)
ggctcaaaccatcctcccacctcagccttctgctgcagaagaatattttgcctgctggaacctgctgtatctactcaagagtggaagttttcacagaagatgcagcacactgtcaaaata

SEQ ID NO: 753275 - DNA, 120 bp, Artificial Sequence
  ENSG00000212128_0 (sequence is synthesized)
tctgcccatggtgaagacataaatatcttagctagggctcagcagagaaattgaagaaaaataaagatatcaccagaacagttatgtgaagatcgatcagcaaactttagagatttctgc

SEQ ID NO: 753276 - DNA, 120 bp, Artificial Sequence
  ENSG00000212128_1 (sequence is synthesized)
tttgacgttgagccaacaatgaaagaaggagcagaaaaaggagaaggaagaagaactccactggacactcaaggatgtgaatagcattttagatcagtgaataaccagcagtgacattag

SEQ ID NO: 753277 - DNA, 120 bp, Artificial Sequence
  ENSG00000212128_2 (sequence is synthesized)
acattgaactttctctgttctgacatggaaagtgccctgccgagtatcttcactcttgtaataattgcagaattcataattgggaatttgagcaatggatttatagtactgatcaactgc

SEQ ID NO: 753278 - DNA, 120 bp, Artificial Sequence
  ENSG00000212128_3 (sequence is synthesized)
attgactgggtcagtaaaagagagctgtcctcagtcgataaactcctcattatcttggcaatctccagaattgggctgatctgggaaatattagtaagttggtttttagctctgcattat

SEQ ID NO: 753279 - DNA, 120 bp, Artificial Sequence
  ENSG00000212128_4 (sequence is synthesized)
ctagccatatttgtgtctggaacaggattaagaattatgatttttagctggatagtttctaatcacttcaatctctggcttgctacaatcttcagcatcttttatttgctcaaaatagcg

SEQ ID NO: 753280 - DNA, 120 bp, Artificial Sequence
  ENSG00000212128_5 (sequence is synthesized)
agtttctctagccctgcttttctctatttgaagtggagagtaaacaaagtgattctgatgatactgctaggaaccttggtcttcttatttttaaatctgatacaaataaacatgcatata

SEQ ID NO: 753281 - DNA, 120 bp, Artificial Sequence
  ENSG00000212128_6 (sequence is synthesized)
ggtcaaattcactatgactatgttcagtctaacaccatttactgtggccttcatctcttttctcctgttaattttctccctgcagaaacatctccagaaaatgcaactcaattacaaagg

SEQ ID NO: 753282 - DNA, 120 bp, Artificial Sequence
  ENSG00000212128_7 (sequence is synthesized)
acacagagaccccaggaccaaggtccatacaaatgccttgaaaattgtgatctcattccttttattctatgctagtttctttctatgtgttctcatatcatggatttctgagctgtatca

SEQ ID NO: 753283 - DNA, 120 bp, Artificial Sequence
  ENSG00000212128_8 (sequence is synthesized)
gaacacagtgatctacatgctttgtgagacgattggagtcttctctccttcaagccactcctttcttctgattctaggaaacgctaagttaagacaggcctttcttttggtggcagctaa

SEQ ID NO: 753284 - DNA, 120 bp, Artificial Sequence
  ENSG00000212128_9 (sequence is synthesized)
ggtatgggctaaacgatgagaaactcacaatttcataagccattcagaccacagattattgaatattgcagacagaaacaggagtctacaaggagtttaaaagatattttatgcttcccc

SEQ ID NO: 753285 - DNA, 120 bp, Artificial Sequence
  ENSG00000212128_10 (sequence is synthesized)
tggtttcttttattgtgaaggtcactgtaaatgttttaaattcttctctataatagcatcttacctaagaatattatgtatttatgacatgtatttctacattattaggaatttgaaact

SEQ ID NO: 753286 - DNA, 120 bp, Artificial Sequence
  ENSG00000212128_11 (sequence is synthesized)
tatttgaggaaattattggcagattctattgtaaattaaaaacatatactacagcatacttagatgttaattgtaaatctacaatcttttgtttggcaatggctcttcaattctaaatca

SEQ ID NO: 753287 - DNA, 120 bp, Artificial Sequence
  ENSG00000212128_12 (sequence is synthesized)
ttcattgagatgggtgatttaggtaattattttattatctcaagtactcctatttaaatggtgagctacagataattagaacagttatttggaatagaattagggaagtttggacttgcc

SEQ ID NO: 753288 - DNA, 120 bp, Artificial Sequence
  ENSG00000212657_0 (sequence is synthesized)
atgtctggcagttgctcttctaggaaatgcttctccgtgccagccacctctctctgctccactgaggtgagctgtggaggccccatctgcctgcccagttcctgccagagccagacatgg

SEQ ID NO: 753289 - DNA, 120 bp, Artificial Sequence
  ENSG00000212657_1 (sequence is synthesized)
cagctggtgacttgtcaagacagctgtggatcatccagctgtgggccacagtgccgtcagccctcctgtcctgtgagtagctgtgcccaacccctgtgctgtgatcctgtcatttgtgag

SEQ ID NO: 753290 - DNA, 120 bp, Artificial Sequence
  ENSG00000212657_2 (sequence is synthesized)
ccttcttgctccgtgagcagcggctgccaacccgtgtgctgtgaggccaccacctgtgagccttcttgctctgtgagcaactgctaccaacctgtgtgcttcgaggccaccatctgtgag

SEQ ID NO: 753291 - DNA, 120 bp, Artificial Sequence
  ENSG00000212657_3 (sequence is synthesized)
ccttcttgctcagtgagcaactgctgccaacctgtgtgctttgaggccaccgtttgtgagccttcttgttccgtgagcagctgtgctcaacctgtgtgctgtgagcctgctatttgtgag

SEQ ID NO: 753292 - DNA, 120 bp, Artificial Sequence
  ENSG00000212657_4 (sequence is synthesized)
ccttcttgctccgtgagcagctgctgccagcctgtaggctctgaagccacttcctgccaaccagtcctctgtgtgcccacttcctgccagcctgtcctctgcaaatccagctgctgccag

SEQ ID NO: 753293 - DNA, 120 bp, Artificial Sequence
  ENSG00000212657_5 (sequence is synthesized)
ccagttgtctgtgagcccagctgctgttcagctgtctgcaccctgcctagttcctgccaacctgtggtctgtgagccttcctgctgtcagccggtgtgcccgacacctacctgctctgtg

SEQ ID NO: 753294 - DNA, 120 bp, Artificial Sequence
  ENSG00000212657_6 (sequence is synthesized)
ctccgccctgtctgctgtgttcagagctcgtgcgagccaccttctgtccccagcacttgccaagagccttcttgttgtgtctccagtatctgccaacccatctgctctgagcccagcccc

SEQ ID NO: 753295 - DNA, 120 bp, Artificial Sequence
  ENSG00000212657_7 (sequence is synthesized)
tgctcaccagctgtctgtgtgtccagtccatgccaacctacttgctatgtagtcaagcgctgtccttctgtctgccctgagccagtttcctgcccatctacctcctgccgacctctttcc

SEQ ID NO: 753296 - DNA, 120 bp, Artificial Sequence
  ENSG00000212657_8 (sequence is synthesized)
tgcagtccagggtcttctgcatctgccatctgccgaccaacttgtcctaggactttctacatacccagttccagcaaacggccttgcagtgctacgatttcctaccgcccggtctcccgt

SEQ ID NO: 753297 - DNA, 120 bp, Artificial Sequence
  ENSG00000212657_9 (sequence is synthesized)
ccgatctgccgcccaatctgctctggactcctcacctataggcagccatacatgacatccatctcctaccgtcctgcctgctatcgcccatgctactccatcctgcgccgcccagcctgt

SEQ ID NO: 753298 - DNA, 120 bp, Artificial Sequence
  ENSG00000212657_10 (sequence is synthesized)
gtcacttcctactcttgccgcccagtctacttccgcccatcttgcactgagtctgactcttgcaaacgggattgcaaaaaatccacttccagccaactggattgtgttgacacaaccccc

SEQ ID NO: 753299 - DNA, 120 bp, Artificial Sequence
  ENSG00000212657_11 (sequence is synthesized)
tgcaaggtggatgtctcagaagaggctccctgccagcccactgaagccaaacccatcagcccaaccacccgtgaggccgcagcagctcagcctgctgccagcaagcctgccaactgctaa

SEQ ID NO: 753300 - DNA, 120 bp, Artificial Sequence
  ENSG00000212658_0 (sequence is synthesized)
atggcagacggctgttgtcctggaaacaccacagccattccagctgtgcccaccatcaccacatacccagttaaaggtggatttcgacatgctctctgtttgcctagttcctgccacagc

SEQ ID NO: 753301 - DNA, 120 bp, Artificial Sequence
  ENSG00000212658_1 (sequence is synthesized)
agaatgtggcaactggtcacatgccaagaaagctgtcagccatccattggtgccccaagtggctgtgatcctgcttcgtgtcaacctacccgccttccagcaacgtcttgtgtgggtttt

SEQ ID NO: 753302 - DNA, 120 bp, Artificial Sequence
  ENSG00000212658_2 (sequence is synthesized)
gtttgccaacctatgtgctcccacgcagcctgctatcagtctggcactggtcagtctccttgtctggttagctcatgtcagccatcctgctcggaatctacttgttgtcaggaaaagtgc

SEQ ID NO: 753303 - DNA, 120 bp, Artificial Sequence
  ENSG00000212658_3 (sequence is synthesized)
tgcgatgccagtccctgccagcaaagctcctgccaggaatctgtctgcatgtctggatcatgtcaggcagcttgtggccaatcagtctgctgtgatgctggatcctgccagccatcctgc

SEQ ID NO: 753304 - DNA, 120 bp, Artificial Sequence
  ENSG00000212658_4 (sequence is synthesized)
ccaacttggtgccaaggaagttcatgtcaacccgtcagtggtgaaggccagccctgtaaatcaacttattatcaacccatctgctatattttcaagccttgccaatcagccctctacatg

SEQ ID NO: 753305 - DNA, 120 bp, Artificial Sequence
  ENSG00000212658_5 (sequence is synthesized)
cctgttccctgccagccatcgacttgtgtgttcagttcttgcaatactacttgctgtgtgccttcccattgccagccacctcactgccaactggttccttccacatgcttcatctaccag

SEQ ID NO: 753306 - DNA, 120 bp, Artificial Sequence
  ENSG00000212658_6 (sequence is synthesized)
ccagtggctaactgccaggccccttgttccacaaagaactgttgcaaaccagcttcttgtgacactgtgatttctggccaaccaacttgtgatggacccccttcctataaccagagtggc

SEQ ID NO: 753307 - DNA, 120 bp, Artificial Sequence
  ENSG00000212658_7 (sequence is synthesized)
tgcaaatcagcttgctgtgtgactggtttaggcacatcacccagtagtggctccaattgcttgccgacttcatgccaacccagctgtgagtccagcttctgcaaggcaacactttgttaa

SEQ ID NO: 753308 - DNA, 120 bp, Artificial Sequence
  ENSG00000212659_0 (sequence is synthesized)
tcacctctgaacagaagcccaccctccacccctgacaacatgacccactgttgctcccctggctgtcagcctacctgctgcaggaccacttgctgcaggactacctgctggcagcccacc

SEQ ID NO: 753309 - DNA, 120 bp, Artificial Sequence
  ENSG00000212659_1 (sequence is synthesized)
attgtgaccacctgcagcagcacaccctgctgccagccctcctgctgtgtgtccagctgctgccagccttactgccacccaacttgctgtcaaaacacctgctgcaggaccacctgctgc

SEQ ID NO: 753310 - DNA, 120 bp, Artificial Sequence
  ENSG00000212659_2 (sequence is synthesized)
cagcccacctgtgtgaccagctgctgccagccttcctgctgcagcacaccctgctaccagcccatctgctgtgggtccagctgctgtggccaaaccagctgtgggtccagctgtggccag

SEQ ID NO: 753311 - DNA, 120 bp, Artificial Sequence
  ENSG00000212659_3 (sequence is synthesized)
agcagctcctgtgcacctgtgtactgcagaagaacctgctaccaccccacgactgtctgcctgcctggttgcctcaaccagagctgtggatccagctgctgccagccctgctactgccca

SEQ ID NO: 753312 - DNA, 120 bp, Artificial Sequence
  ENSG00000212659_4 (sequence is synthesized)
gcctgctgtgtgtccagctgctgccagcattcttgttgctgagcagcaccacagaggaccatcatcctcacacaacaaccttctgctcaactgaccttttttttcttttgagacggagcc

SEQ ID NO: 753313 - DNA, 81 bp, Artificial Sequence
  ENSG00000212659_5 (sequence is synthesized)
gctgggattacatgcctttttagtagttttcaccatgttgatcagacttgtctggaactcctgccctcaggtgatccacct

SEQ ID NO: 753314 - DNA, 120 bp, Artificial Sequence
  ENSG00000212659_6 (sequence is synthesized)
attacaggtgtgagctaccacacccagacccaactcacttatctttcagaagacagatttactttcaaactttactgatacacagtatgctttcaccaattttttttatttctttgcctg

SEQ ID NO: 753315 - DNA, 120 bp, Artificial Sequence
  ENSG00000212659_7 (sequence is synthesized)
tttttttatttctttgcctgtttaaaatcttgggaatcagcttgagggagggcagaatacttcatcctgattcttttttccttacactttgtggatcatgtgccagcttcatgtgttctc

SEQ ID NO: 753316 - DNA, 120 bp, Artificial Sequence
  ENSG00000212659_8 (sequence is synthesized)
aatgtggagacatggtctccattcgactctaaagtcaagagcttcattctctccttctaagaaacttaggtttctgcaactgatcaataatctttgcaatcatatttttgttttcaattt

SEQ ID NO: 753317 - DNA, 120 bp, Artificial Sequence
  ENSG00000212659_9 (sequence is synthesized)
tgtcctcatgtttcttttacccttctttcttcttttcattgtaactttgggctatgtccctagtagcagggattcttacctatatatttctgaataaattctgaaccatccttcatctca

SEQ ID NO: 753318 - DNA, 120 bp, Artificial Sequence
  ENSG00000212710_0 (sequence is synthesized)
agagcagccttggcgctacggaggagcctagggctaaccctcagccatacctggggctggtcctggagttgctacgcagggttgtggcagcactgactgaaggtatgagacccgattctc

SEQ ID NO: 753319 - DNA, 120 bp, Artificial Sequence
  ENSG00000212710_1 (sequence is synthesized)
atccttatggttttccatgggaattggtgatacgtgcagctgttgctggattttttgctgttctcttcttgtggagaagttttagatcagttacgagtcggctttatgtgagaagagaga

SEQ ID NO: 753320 - DNA, 120 bp, Artificial Sequence
  ENSG00000212710_2 (sequence is synthesized)
aaaagtttgctgtggcactttctggactaattgaagaaaaatgtaaactacttgaaaaatttagccttgttcaaaaagagtatgaaggctatgaagtagagtcatctttaaagaatgcca

SEQ ID NO: 753321 - DNA, 120 bp, Artificial Sequence
  ENSG00000212710_3 (sequence is synthesized)
gctttgagaaggaggcaacagaagcacaaagtttggaggcaacctgcgaaaagctgaacaggttcaattctgaacttgtgcatgaaatactctgtctagaaaaagagttaaaagaagaga

SEQ ID NO: 753322 - DNA, 120 bp, Artificial Sequence
  ENSG00000212710_4 (sequence is synthesized)
aatctaaacattctgaacaaaatgaattgatggcggatatttccaaaaggatacagtcgctagaagatgagtcaaaatccctcaaatcacaagtagctgaagccaaaatgaccttcaaga

SEQ ID NO: 753323 - DNA, 120 bp, Artificial Sequence
  ENSG00000212710_5 (sequence is synthesized)
gatttcaagcgaatgaagaacggttggagatagaaatacaagatgcttggaaagaaaattctgaacttcaggaaagccagaaacagcttttgcaagaagctgaagtatggaaagaacaag

SEQ ID NO: 753324 - DNA, 120 bp, Artificial Sequence
  ENSG00000212710_6 (sequence is synthesized)
tgagtgaacttattaaacagaaaagaacatttgaagactccaaagtacatgcagaacaagttctaaatgataaagaaaatcacatcaagactctgactgaacgcttgctaaagatgaaag

SEQ ID NO: 753325 - DNA, 120 bp, Artificial Sequence
  ENSG00000212710_7 (sequence is synthesized)
atggggttgctatgcttgaagaagatgtaacggatgatgataacttggaattagaaatgaacagtgaatcggaagatggtgcttacttagataatcctccaaaaggagctttgaagaaac

SEQ ID NO: 753326 - DNA, 120 bp, Artificial Sequence
  ENSG00000212710_8 (sequence is synthesized)
tgattcatgctgctaagttaaatgcttccttaaaaaccttagaaggagaaagaaaccaaatttatattcaattatctgaagttgataaaacaaaggaagagcttacagagcatattaaaa

SEQ ID NO: 753327 - DNA, 120 bp, Artificial Sequence
  ENSG00000212710_9 (sequence is synthesized)
atcttcagactgaacaagcatctttgcagtcagaaaacacacattttgaaagtgagaatcagaagcttcagcagaaacttaaagtaatgactgaattatatcaagaaaatgaaatgaaac

SEQ ID NO: 753328 - DNA, 120 bp, Artificial Sequence
  ENSG00000212710_10 (sequence is synthesized)
tctacaggaaattaatagtagaggaaaaatgccggttagagaaagaagagaaactttctaaagtagacgaaatgatcagccatgccactgaagagctggagacctaccgaaagcgagcca

SEQ ID NO: 753329 - DNA, 120 bp, Artificial Sequence
  ENSG00000212710_11 (sequence is synthesized)
aagatcttaaagaatttgagaaaactattcatttttatcaaaagaagattattctccatgagaaaaaagcacatgataattggtcggcagcttggactgctgaaagaaacctcaatgatt

SEQ ID NO: 753330 - DNA, 120 bp, Artificial Sequence
  ENSG00000212710_12 (sequence is synthesized)
taaggaaagaaaatgctcacaacagacaaaaattaactgaaatagagtttaaaataaaacttttagaaaaagatccttatggacttgatgttccaaatacagcatttggcagacagcatt

SEQ ID NO: 753331 - DNA, 120 bp, Artificial Sequence
  ENSG00000212710_13 (sequence is synthesized)
ccccatatggtccctcaccattgggttggccttcatctgaaacgagagcttctctctatcctccaactttgttggaaggtcctctcagactctcacctttgcttccacggggaggaggaa

SEQ ID NO: 753332 - DNA, 120 bp, Artificial Sequence
  ENSG00000212710_14 (sequence is synthesized)
gaggctccagaggcccagggaatcctccggaccatcagattaccaaagaaagaggagaatcaagctgtgataggttaactgatcctcacagggctccttctgacgctgggcccctggcac

SEQ ID NO: 753333 - DNA, 120 bp, Artificial Sequence
  ENSG00000212710_15 (sequence is synthesized)
ctccgtgggaacaggactataggatgatgtttcctccaccaggacaatcatatcctgattcagctctccctccacaaaggcaagacagattttattctaattgtgctagactctctggac

SEQ ID NO: 753334 - DNA, 120 bp, Artificial Sequence
  ENSG00000212710_16 (sequence is synthesized)
cagcagaactcagaagttttaatatgccttctttggataaaatggatgggtcaatgccttcagaaatggaatccagtagaaatgataccaaagataatcttggtaatttaaaggtgcctg

SEQ ID NO: 753335 - DNA, 120 bp, Artificial Sequence
  ENSG00000212710_17 (sequence is synthesized)
gacctcctttccccccacctcctccaggaaccgtgtttggagcttctccagattatttttctccaagggatgtcccaggtccaccacgtgctccatttgcaatgagaaatgtctatttac

SEQ ID NO: 753336 - DNA, 120 bp, Artificial Sequence
  ENSG00000212710_18 (sequence is synthesized)
cgagaggttttcttccttaccgtcccccaagacctgcatttttccccccagcccccacattctgaaggtagaatgagtttccatcagggttgagtccgacttcaaatgagcctgctgctg

SEQ ID NO: 753337 - DNA, 120 bp, Artificial Sequence
  ENSG00000212710_19 (sequence is synthesized)
aacatccagaacgacagcaagaaacctaacaacatgtttgccctcttcaaaagtaattttgactgatctcattttcagtttaagtaactgctgttacttaagtgattacacttttgttca

SEQ ID NO: 753338 - DNA, 120 bp, Artificial Sequence
  ENSG00000212710_20 (sequence is synthesized)
tttgttcagattgaaacttaatggaactataattcccaggatagtattttgtaaatgaggatgatttaaatatgaatcttatgagtaaattatttcattttattttattctagatagtat

SEQ ID NO: 753339 - DNA, 120 bp, Artificial Sequence
  ENSG00000212710_21 (sequence is synthesized)
atttgattaatccactattatataaagaatggtgggagctttatatatgtaatcttgcaggtggggaggctttaaattgtctttatgtcaagaactgtatttactgtggttgtagacaaa

SEQ ID NO: 753340 - DNA, 120 bp, Artificial Sequence
  ENSG00000212710_22 (sequence is synthesized)
tgtgaaagtaactttatgcttaaataagttttagttgattaaaaaaatttaaaaaatttaaaaaaagaaatatataaatatgcacaggtgggaaggtagaatactatgtaactgttagaa

SEQ ID NO: 753341 - DNA, 120 bp, Artificial Sequence
  ENSG00000212710_23 (sequence is synthesized)
tatttcactttaaaccaagatgatcttggatctcctgtcttatagattttatatcctctttcagtactttgagagtgtaaaacatttatagcagaaagtattcgtgtttcctctgttttc

SEQ ID NO: 753342 - DNA, 120 bp, Artificial Sequence
  ENSG00000212710_24 (sequence is synthesized)
ctcaagaatggtttcttcgccctccctttccttcccttcgtcttccctaagctaatttcttcctatgtttgtcatcatatcattacataattgtgttgttatttcttttgttttattttt

SEQ ID NO: 753343 - DNA, 120 bp, Artificial Sequence
  ENSG00000212710_25 (sequence is synthesized)
atttggtgggaacaactttatccagaacttttacttgccccagaattatatagatcagtttctcctgacttctttcccaacctttacctctgttggtgttctaatagttttagttttatg

SEQ ID NO: 753344 - DNA, 120 bp, Artificial Sequence
  ENSG00000212710_26 (sequence is synthesized)
ttctgcttttctcttgctgtggcaaggggaaggagtaaatctaagatagtgcttaattgcagttggtgaatttgatctctgattgagctctcttctctggaattctgttaaaagatgaaa

SEQ ID NO: 753345 - DNA, 120 bp, Artificial Sequence
  ENSG00000212710_27 (sequence is synthesized)
tgtatcgtgttccctgagagacgccctcaaattttggattagtccttcatgcaagctgggccaccaagccattgcttcttttggggacaacctgccctcacttttaaaaagcatcctagc

SEQ ID NO: 753346 - DNA, 120 bp, Artificial Sequence
  ENSG00000212710_28 (sequence is synthesized)
tcacatgcctcccctagcagttaatgccactccagtctctgcttgaatgtaataaaataaaagaaaagtaactatttgagacatgaggtgcccttattgtacactggggcttcctataca

SEQ ID NO: 753347 - DNA, 120 bp, Artificial Sequence
  ENSG00000212710_29 (sequence is synthesized)
ttttccgtcttcccttgaaccaccactatcctcagctactttatgcttctgttctgttaaagccctatttgctagtggaaaaatttaactcctggtgatttttttaatactaggcctctt

SEQ ID NO: 753348 - DNA, 120 bp, Artificial Sequence
  ENSG00000212710_30 (sequence is synthesized)
gccttccttccagtgagagaaaaatagaatggtaagcctagtggtttcttccttcactgttgaatactatttatccaaggtatcaaggaagaacttctaatcagaaaagacatgtattat

SEQ ID NO: 753349 - DNA, 120 bp, Artificial Sequence
  ENSG00000212710_31 (sequence is synthesized)
tttcacaactgggtagcatatctcactcccagaatggaagttaggtgggaattgcaagattaaggagatttttctggatttctgtctatgtatcatatccacagaactctttctagagga

SEQ ID NO: 753350 - DNA, 120 bp, Artificial Sequence
  ENSG00000212710_32 (sequence is synthesized)
attttatattgagccaggcatccatttccacagtcttgcatttctagatacttccaaagttatagcactgttcctaaatcatttttggctttatttattaatttattgttcacttcattt

SEQ ID NO: 753351 - DNA, 120 bp, Artificial Sequence
  ENSG00000212710_33 (sequence is synthesized)
cattaggttcagtatgaaacaggtattgtcatctctttgtgtctactttgccacctttccccagaataggcctgaatgagattgaaaacgttacttcagttccttgtgtctgacattgct

SEQ ID NO: 753352 - DNA, 120 bp, Artificial Sequence
  ENSG00000212710_34 (sequence is synthesized)
tgtttgtaactaagaaaaataatatttgcttttgttgaatgactactaatttttttccatgaacctaataaactaaaaagaaagttgaaataataaagagtgaataagtataaaaatcca

SEQ ID NO: 753353 - DNA, 120 bp, Artificial Sequence
  ENSG00000212719_0 (sequence is synthesized)
gcgcccggccggcgtggctggctgtttgaggactgcgcgcggagctccgtggcgggtgtctgaagtcgtgagtttactgcttgtaaggaacatagcgatcactgggaacctggaagtaga

SEQ ID NO: 753354 - DNA, 120 bp, Artificial Sequence
  ENSG00000212719_1 (sequence is synthesized)
gactcctttctgccatccatccgtccctcgggctgctgcgaatccccccgccggcctccaggaccccgggctgactgaacgcccgcaccggtcccgccgccccagggcccgctacgcgcc

SEQ ID NO: 753355 - DNA, 120 bp, Artificial Sequence
  ENSG00000212719_2 (sequence is synthesized)
cggcataatgggagaaaaatcacgacggaaaggcccagcccctcgccatgcagacgggaagcttggccgcacgtgtgatcacccttacgccccttggagtttcaccccctcttcgcgggc

SEQ ID NO: 753356 - DNA, 120 bp, Artificial Sequence
  ENSG00000212719_3 (sequence is synthesized)
tccaacagcctgggtcaggcctccttgtcctgtgtgggcctctcggctgcaagaacacagtcccgagccccggcgagcccgcgcgcctcccacccgccgtgcacaggctgcactttacgc

SEQ ID NO: 753357 - DNA, 120 bp, Artificial Sequence
  ENSG00000212719_4 (sequence is synthesized)
cccagcactgcgcctgcgggaccatctggatcgcttttccattctgatgacgtcctgtacttcgtggctgcaggctcctcaagccccaggtctgtgcagagacgagcaaagcagcagaat

SEQ ID NO: 753358 - DNA, 120 bp, Artificial Sequence
  ENSG00000212719_5 (sequence is synthesized)
atccgtgccacagctttctggagcacccattttactaccagatttggaaggaacgaagttaagtaatttccaagaatcatctcccctgccccacaaacatgaaagaaaagacaagagaag

SEQ ID NO: 753359 - DNA, 120 bp, Artificial Sequence
  ENSG00000212719_6 (sequence is synthesized)
caccccagaagaggaggggagaagtgccccagaaaaaatcatccagtctctgaagctttgcccagggcaccactcgcccctgatccatcttggtttcccgcacaaggcagcaggattgcc

SEQ ID NO: 753360 - DNA, 120 bp, Artificial Sequence
  ENSG00000212719_7 (sequence is synthesized)
catgaatgaacatgggtgaaatcgttggatacaggtagtaaatacattctatttcctgaaaaatattacctaactacatgtctagatatggaattgcattttcaagccaagctggaatta

SEQ ID NO: 753361 - DNA, 120 bp, Artificial Sequence
  ENSG00000212719_8 (sequence is synthesized)
caaattgtagcccatttgaaaatgcatacaaatgtgtgacatatacacccagaggaaaagaagtcacagttatgaaagaacaaagtgggaaaatatctttttcatgtaagattgagcatt

SEQ ID NO: 753362 - DNA, 120 bp, Artificial Sequence
  ENSG00000212719_9 (sequence is synthesized)
ttggttgatactgtgataaaaaatcttgtgactgattctcttttgcattggtttttagtgtcatgtgcactctgcccaactcagataaaattgtatatgatgtaaatagcaggaaactat

SEQ ID NO: 753363 - DNA, 120 bp, Artificial Sequence
  ENSG00000212719_10 (sequence is synthesized)
tgtgtgcagccggaaagggggcgtctaggttccaagggcaaatcccacccccttagaggggattggagagcctgggaaagaggctgggctgcctgtgatccccaccccacaccctgcctc

SEQ ID NO: 753364 - DNA, 120 bp, Artificial Sequence
  ENSG00000212719_11 (sequence is synthesized)
ctacaagcccctagaaggtccacactttgagttgtcagccagagacagtaactcaaaacctcggcttcgggcagccagaagcccagaaatgggggagagggcaggcctagacaccaggga

SEQ ID NO: 753365 - DNA, 120 bp, Artificial Sequence
  ENSG00000212719_12 (sequence is synthesized)
agacaccagggatgaaaataaagtgaatattaaaaattacctgcatgtaatgtttcatatattctacatattttaatataaatgccagaggtttttgaaccagagcaactccatcttgaa

SEQ ID NO: 753366 - DNA, 120 bp, Artificial Sequence
  ENSG00000212719_13 (sequence is synthesized)
taggggctgggtaaataaggctccaccctcaagcctggagaatcttgaataaggctgaggcctactgggctgcgttcccaggaaagtaggcgttctaagtcacaggatgagataggaggt

SEQ ID NO: 753367 - DNA, 120 bp, Artificial Sequence
  ENSG00000212719_14 (sequence is synthesized)
aaagaccttgctgataaaacaggttgcggtaaagaagccagccacaaccaagatggtgatgaaagtggcatctggttgtcctcattgctcattacacgctaattatgatgcattagcatg

SEQ ID NO: 753368 - DNA, 120 bp, Artificial Sequence
  ENSG00000212719_15 (sequence is synthesized)
ttagcatgctaaaagacactctcaccagcaccatgagagtttatgaatgccatggcaacgtcaggaagttatcctataccgtctaaaagggggaggaacactcaattccaggaattgccc

SEQ ID NO: 753369 - DNA, 120 bp, Artificial Sequence
  ENSG00000212719_16 (sequence is synthesized)
acacctttcctggaaaactcatggataatacaccccttgtttggtatataagcaaaaagtaacaataagtacaagcagttgagcaccccattccactgctctgcctatggagtggccatt

SEQ ID NO: 753370 - DNA, 63 bp, Artificial Sequence
  ENSG00000212719_17 (sequence is synthesized)
gagcaccccattccactgctctgcctatggagtggccattcttttattattattgttattatt

SEQ ID NO: 753371 - DNA, 70 bp, Artificial Sequence
  ENSG00000212719_18 (sequence is synthesized)
aacttcaggtgatccgcctgtggccactggagtcgccattgttttattcctttactttctctaataaact

SEQ ID NO: 753372 - DNA, 120 bp, Artificial Sequence
  ENSG00000212719_19 (sequence is synthesized)
tctgaagctttgcccaggagccagctgaggaggtgtgtcatgcaacttgcccccccagccctccccttctaaggaacccccacacctgctctgtcttcctgctacagtctctgagaaaag

SEQ ID NO: 753373 - DNA, 120 bp, Artificial Sequence
  ENSG00000212719_20 (sequence is synthesized)
ccctttcatctgtcaagaactacaaaagtcattctttaagtgctaaataaacaatgaaacagacacaaagttaaagttacctgatccaaaaaggagtgaagcctagaccccagcccactg

SEQ ID NO: 753374 - DNA, 120 bp, Artificial Sequence
  ENSG00000212719_21 (sequence is synthesized)
actcagtctctaagacccctcactcaaatcttcaatcaacagtggagatggctgtgagctcttctgattccagatgacaatactcctccctttaattccttgatatgtttaattatgtaa

SEQ ID NO: 753375 - DNA, 120 bp, Artificial Sequence
  ENSG00000212719_22 (sequence is synthesized)
gtaaatttaatataaaaatcattgcattagagttcattgtttttatacaagattcagtgtgagatcaatgttatacttccaatttgtcacacttacagagaactgagaagaatcacatta

SEQ ID NO: 753376 - DNA, 120 bp, Artificial Sequence
  ENSG00000212719_23 (sequence is synthesized)
tttaaaatcttagcaaatgtgcataattcctttggataattttaaagtgataggattggatcacatatgatgcaattgcctgggtctgttttgtttttagttgtatttgtctctcatatt

SEQ ID NO: 753377 - DNA, 120 bp, Artificial Sequence
  ENSG00000212719_24 (sequence is synthesized)
gtgaatctcatatttatgtgactaattatcagaagattttatctttattatgcatatttagtataaaatgatcatacagtgaagagtgtgtaaaatcaaaataaaatgccattcatcacc

SEQ ID NO: 753378 - DNA, 120 bp, Artificial Sequence
  ENSG00000212719_25 (sequence is synthesized)
gtttctcagcggcctagatgcctcttggtctggctgaatatcttctatgaagatcacttccccgtccatcagggagacaattcctggagattcgtgtcatgactgtttctctctccaaac

SEQ ID NO: 753379 - DNA, 120 bp, Artificial Sequence
  ENSG00000212719_26 (sequence is synthesized)
ctgtttctgctggattgcgcaggtctgatgaccctggagctcttggcttccatacgtgtctcagacaggacaagtgcatttcctctgcacttcctgtctcattcttgagaaacatcctcc

SEQ ID NO: 753380 - DNA, 120 bp, Artificial Sequence
  ENSG00000212719_27 (sequence is synthesized)
cctctgctcgtgggtggactgactccttgaatcttttggctgtaaggaacgtcagggatccaatggtactgggctggggctggagctggatgcaggggaggttccgtcagagctacctgg

SEQ ID NO: 753381 - DNA, 120 bp, Artificial Sequence
  ENSG00000212719_28 (sequence is synthesized)
gcattggaggattgggggtggattgaactttgcagaaacttctttactcctccagcaggcttttcaaaatgtggcttggactcatgcaataagaaatttaggagttgaaagggccccttt

SEQ ID NO: 753382 - DNA, 120 bp, Artificial Sequence
  ENSG00000212719_29 (sequence is synthesized)
tagggaaataagaaaaaaattgaaaggaaaaggaagtccaaggacctgccccagaagaatcacagatatgtttgaatacttagtcgttatttgccccagatagaaaatgttttttaatca

SEQ ID NO: 753383 - DNA, 120 bp, Artificial Sequence
  ENSG00000212719_30 (sequence is synthesized)
aaaggcaaaagttataatgaggaagataatattgcctggggcaatgttgagacaaataagatgaagatcaaccaaatgccctgagtcctttggcccaaatccctgctggggacccaaata

SEQ ID NO: 753384 - DNA, 120 bp, Artificial Sequence
  ENSG00000212719_31 (sequence is synthesized)
cttttgatatagcatcttgctacctgaggaatgcaaggagaataatactcataagcaaagagcctctgttttcccataggactgactctaactatgtgaagaactgctacatattctaca

SEQ ID NO: 753385 - DNA, 120 bp, Artificial Sequence
  ENSG00000212719_32 (sequence is synthesized)
gtgcttgataggcggttcccatctaacaggagctgtttggcttgtggatagcagttccaagataaacaaatgacattgtgtttgaaagccactgctcttattaaagaagagtcaagcaaa

SEQ ID NO: 753386 - DNA, 120 bp, Artificial Sequence
  ENSG00000212719_33 (sequence is synthesized)
ggtgtcggggctccgaggctccggcctgacttctccacggggtccacaggagcgtctccggatgccaggacctgaaatgggccgaccaggatgaggaaaccacaggcagaggccggggaa

SEQ ID NO: 753387 - DNA, 120 bp, Artificial Sequence
  ENSG00000212719_34 (sequence is synthesized)
cagaaaaaatcatccagtctctgaagctttgcccaggtgggcacaggccagccagcctctcctctggttgcccagctggctgcaggctgtcatttaaccttccgcccagcatgcttttga

SEQ ID NO: 753388 - DNA, 120 bp, Artificial Sequence
  ENSG00000212719_35 (sequence is synthesized)
gtgtgcagaagtgctgcatgccctcttctttgaaaacctgttgagcaaatgcctccgcattttatgcaccttcaacctccacagccaaaggcccccaagaccaaacatgctgtgcacaca

SEQ ID NO: 753389 - DNA, 120 bp, Artificial Sequence
  ENSG00000212719_36 (sequence is synthesized)
cagcagctctttgtgtcccactcctggccgatctcctgcatcatctcgttgagcttcattgaaccccgcagtctgcatgctctgtggaactcagggtcttcattttgcatgaaactcagg

SEQ ID NO: 753390 - DNA, 120 bp, Artificial Sequence
  ENSG00000212719_37 (sequence is synthesized)
gtcttcattttccgtggaactcaaagtcttcttgctctgtggaacttggagtctcagggcctttgtgctccatggaacttggggtctgtgtgattcatggaactcagaatccttgtgctc

SEQ ID NO: 753391 - DNA, 120 bp, Artificial Sequence
  ENSG00000212719_38 (sequence is synthesized)
tgtggtactcagggtgtgcgtgctctgtggaactcggggtctgcatgctccatggaaagcaccaggatgcacttgaccccccacacccatacatacatccttcattttattcctggccct

SEQ ID NO: 753392 - DNA, 120 bp, Artificial Sequence
  ENSG00000212719_39 (sequence is synthesized)
cacctgtccactctgtgaggcttcttcacccccactctcctttgagctcatgccgggtctttcagactggcctgaagcatgggtgttcgtaggggggagtggctgatgtcacaccttcag

SEQ ID NO: 753393 - DNA, 120 bp, Artificial Sequence
  ENSG00000212719_40 (sequence is synthesized)
gcaaattctgctagtgtcacacctgatggagctgcctagggaggatgtttccttggaggatgcgccctggcagccactggcttcttacggtgcctgcactgctgctgctgccatgggggt

SEQ ID NO: 753394 - DNA, 120 bp, Artificial Sequence
  ENSG00000212719_41 (sequence is synthesized)
gccacagggccacactgggggctgttctggaattggtggttttcatttccaggttaggtagggactggcaggcaccttggctgtccttgtggcttctgtcttgaccctggtcctccccag

SEQ ID NO: 753395 - DNA, 120 bp, Artificial Sequence
  ENSG00000212719_42 (sequence is synthesized)
gcagctgattttctgggctgctgctcttccaggaagaattaaaggtgggaatggctgaaacctcagctttggattcacagagaccctaggctgtgtcatgcagaaagggaaaggattgca

SEQ ID NO: 753396 - DNA, 120 bp, Artificial Sequence
  ENSG00000212719_43 (sequence is synthesized)
gatggtggtgggatcagccgaaggcagggccttcactgtgatgctggagccctccatgctgggatgtttgcatacagcccaggttcagttcggtggtccatcagcgagtcctggatctgg

SEQ ID NO: 753397 - DNA, 120 bp, Artificial Sequence
  ENSG00000212719_44 (sequence is synthesized)
tctcactcacaagccatggacaacatgagctcagtttgccaggactcttggggttagggagagctcagcatccgggtggctctggttccttctcatgctgaaactctgctggtgttcctc

SEQ ID NO: 753398 - DNA, 120 bp, Artificial Sequence
  ENSG00000212719_45 (sequence is synthesized)
catggggcaaatgtgggtttttctgaggtgcccctcttgctggagttgaggatgagaaatgttttcagtgggtttgcaccctccacacatatgtaagaggtgttgtgtttcattcctgtc

SEQ ID NO: 753399 - DNA, 120 bp, Artificial Sequence
  ENSG00000212719_46 (sequence is synthesized)
aggatccattgctgcagcttcctgaagttgtgtccgttaaaaggcagggacccggtgtccaggctacagagggtgactccaggttccacaccaccactgtggaccagtgtgcctatggac

SEQ ID NO: 753400 - DNA, 120 bp, Artificial Sequence
  ENSG00000212719_47 (sequence is synthesized)
ttaggagagttcccagatcgcacaagggggctgccccagagggtgttcagcttgttgccaacagttgctgaagccaaagtctgcaaccttgatgttcaggtcaagtagccagaaacaggt

SEQ ID NO: 753401 - DNA, 120 bp, Artificial Sequence
  ENSG00000212719_48 (sequence is synthesized)
gttctggctttaggtccctgtggacaatgccattctctccttcccaggctactgatgtcctgggttgctcctcttatggtagaagctcaagatggaatggctggagcttggctgcctccg

SEQ ID NO: 753402 - DNA, 120 bp, Artificial Sequence
  ENSG00000212719_49 (sequence is synthesized)
gttagagcctgggctctgtattgcagacatcacctggcagaattcctcatgggccccttttgtcgtgggtgcgactgctgggccagggttgtcgtgggtagtaaaggtatttaccaagac

SEQ ID NO: 753403 - DNA, 120 bp, Artificial Sequence
  ENSG00000212719_50 (sequence is synthesized)
aaccgtgagtaaagaaaggcaaatttattacagaaactatgaaaatacattgcaagaatgcaacatgcagcacagcagagaaggggctgtctgcaaagataaagggctggagggaagttt

SEQ ID NO: 753404 - DNA, 120 bp, Artificial Sequence
  ENSG00000212719_51 (sequence is synthesized)
tctaaggttgtgctggacggcgctatgtgcaggtgagcttgtgctatatgctaagaatatgttggaataattttaactgccagacctttcctcttctggtgcccgagggaaacgccctgc

SEQ ID NO: 753405 - DNA, 120 bp, Artificial Sequence
  ENSG00000212719_52 (sequence is synthesized)
tgcttttagctgtcttgtaacccacacgccttttcacttctgaagttgcaagaataacggctgtggtttttcacacaaaagggttgcagactgggttaggtccctgttccgccaacctgg

SEQ ID NO: 753406 - DNA, 120 bp, Artificial Sequence
  ENSG00000212719_53 (sequence is synthesized)
ctgtttcccagtttcagttaacttagtggtttactagagccccacacctttctctttcatatggccatgatccaggaggtaatccgtcacctcccctccactagagtgctccatggccag

SEQ ID NO: 753407 - DNA, 120 bp, Artificial Sequence
  ENSG00000212719_54 (sequence is synthesized)
ggataatccgtcacctcccctccaccagagtgctccatggccaggggtaatcctcacctctcctccgctagagtgttccatggccaggcagtgtttcctgggtccagagcacctcaaaca

SEQ ID NO: 753408 - DNA, 120 bp, Artificial Sequence
  ENSG00000212719_55 (sequence is synthesized)
atttcagtgttgtggtgactcagggccttcaccatacagacttgacagcatagtctagaggctggaggggctctgtgactcccattaatgacagtcactgccacggtttccccaggcagg

SEQ ID NO: 753409 - DNA, 120 bp, Artificial Sequence
  ENSG00000212719_56 (sequence is synthesized)
atgtgccaggagaactgctccatgttggctcagcagaatgttattataggtagctcaaaaagagagggaacagggcttctctagattatttcagggaacgagctattatttgaatgttaa

SEQ ID NO: 753410 - DNA, 120 bp, Artificial Sequence
  ENSG00000212719_57 (sequence is synthesized)
tttaagactattttatcaattaaaaatgtaaggcccaagaaacttcagtgaggaagaatgaacaaattgaataaatactgttaaactttatgcttctttcagcaaatattttctgctcgt

SEQ ID NO: 753411 - DNA, 120 bp, Artificial Sequence
  ENSG00000212719_58 (sequence is synthesized)
aaaaataaaagtgctatataagaaacctctcagtgccctggaggcagggtccagagacatatcctgtggatgactggggctgaggtttaagggatgagcctcggtgatgagacagacggg

SEQ ID NO: 753412 - DNA, 120 bp, Artificial Sequence
  ENSG00000212719_59 (sequence is synthesized)
agagggcaccctaggaaaagcgtcttcaggcaatcgtggttcagtgagctgcagccgtcgcggcaggagattgaggagcgcggcctatctggtgatttgctgtggttatgttctgtaaac

SEQ ID NO: 753413 - DNA, 120 bp, Artificial Sequence
  ENSG00000212719_60 (sequence is synthesized)
tcgccttgggtcctgaagtattgcttctggggaaacacagggtaaggttcctgcaagcctctggttgcaatattttcaactgccaaggcaccattcatgttccatgggttcattttccaa

SEQ ID NO: 753414 - DNA, 120 bp, Artificial Sequence
  ENSG00000212719_61 (sequence is synthesized)
catccctgtaaaacaaggcagtcccatcagtgttgaaaactgctctccacatacccttttcccgtagagtacttcctgatctacagagctgccactcctgaaaagctaacactttccatg

SEQ ID NO: 753415 - DNA, 120 bp, Artificial Sequence
  ENSG00000212719_62 (sequence is synthesized)
ccatgctgccttttgaaaggtgccagccaggcagcattagctaaggcctctttttggctctcctcacaacagtgctgcccgctgtgctttcattggtcatcatctcatgaagtcacaaat

SEQ ID NO: 753416 - DNA, 120 bp, Artificial Sequence
  ENSG00000212719_63 (sequence is synthesized)
gtagctgcttttctatggtttccatggttttgccacactctaggggatattagttttgcactttcccaagcagcctcgtgtacaggttggtgaagctccccttcctctttctggatgcac

SEQ ID NO: 753417 - DNA, 120 bp, Artificial Sequence
  ENSG00000212719_64 (sequence is synthesized)
tgtagtgtttgtcattagcgttgaactcacagttcgcagcactagaacccacacctgaaccaagcttggctaacaagcgttttctctgtaaggcacattacagccttcttgctcataagg

SEQ ID NO: 753418 - DNA, 120 bp, Artificial Sequence
  ENSG00000212719_65 (sequence is synthesized)
acactagacagcgcttcagcattatgcttggaggccgtttcaaacagtgaaatcaacaacaagaagctcaaaactgcaaaagaagtggtactatagagaccatgagaagactggtttgca

SEQ ID NO: 753419 - DNA, 120 bp, Artificial Sequence
  ENSG00000212719_66 (sequence is synthesized)
ggttgagagtaggaacaagaaggcagcgtggggccctgcatggcctccgctgggaggccgatggctcaaattgttgccctactctgcacatgttttcctgtgactgtgaaagcaacacga

SEQ ID NO: 753420 - DNA, 120 bp, Artificial Sequence
  ENSG00000212719_67 (sequence is synthesized)
gtattgattcgggggttaaaaatacattttaacaagcagaaaagttcacaaatatgaaatagtggctagtgaggaccacccccatgctggagctgcagacagaggcttttgtgagtgcga

SEQ ID NO: 753421 - DNA, 120 bp, Artificial Sequence
  ENSG00000212719_68 (sequence is synthesized)
ggcttgctcctatcccgggagcttctggttgccaccagcaccttgtaagccagggagtggtgtcacctgtactgtagcaaaagcaccttttctaaatgtgaagtatggcttgaagagagg

SEQ ID NO: 753422 - DNA, 120 bp, Artificial Sequence
  ENSG00000212719_69 (sequence is synthesized)
aagatggaagatggctgtgttagggatgaagcaaggatgggggtggattgaccaagctgggccagaggtgcgaggagctgatctgcgagccctgtgtgcctgtgagtcctggcggagtgg

SEQ ID NO: 753423 - DNA, 120 bp, Artificial Sequence
  ENSG00000212719_70 (sequence is synthesized)
ccgtgcgtggtgacagggaggaggcatccaggacagcacccacgttcccgcctgaggcacatgagggtggatgacagggttcggggccctagccttcaagtcagacacacctgagttcaa

SEQ ID NO: 753424 - DNA, 120 bp, Artificial Sequence
  ENSG00000212719_71 (sequence is synthesized)
atccagactccaccactgactggctatgtagccttagacatgttccttcacttccctaagcgtccattttctcatgtccaatacatagattactatgccataggaatattaaatcactca

SEQ ID NO: 753425 - DNA, 120 bp, Artificial Sequence
  ENSG00000212719_72 (sequence is synthesized)
gtgattttgaggttaaaatgagtgctggtgctttttattgaaataaaatgggaaaagaagcagcatttgaggtgtgagggaggggaatctgggcatggggagttggatgtgcctgtggac

SEQ ID NO: 753426 - DNA, 120 bp, Artificial Sequence
  ENSG00000212719_73 (sequence is synthesized)
acccatggacaaatgtccagcagccatccaatgtgctttcgggatgctggggccaggatgtggggcagcaacatacagacctggaagttacaagcaggcaggcagctgctgcagctgtga

SEQ ID NO: 753427 - DNA, 120 bp, Artificial Sequence
  ENSG00000212719_74 (sequence is synthesized)
agagcaggcagtgcaggatcagaggcccagggtaaagcctggggaatgccagcatttagaaagaggccgctggagatcagaaaagagcaacaggaaaagcaggagggtgtggagggatgg

SEQ ID NO: 753428 - DNA, 120 bp, Artificial Sequence
  ENSG00000212719_75 (sequence is synthesized)
gaggtgcaggaggagagtttccaagagggaggggcaggagtcggtgttctgcaggcatggactggaagtcgtagtacttttgaactgtagggacctaagacatcttttagtctaatcccc

SEQ ID NO: 753429 - DNA, 120 bp, Artificial Sequence
  ENSG00000212719_76 (sequence is synthesized)
ttatctatccggaagaagaaatcatgattccaaggtgacatgagttgcttgctttaggtcacagtgatttcacattgggatacctcgatttctaatgagtaatagaatatttaataaata

SEQ ID NO: 753430 - DNA, 120 bp, Artificial Sequence
  ENSG00000212719_77 (sequence is synthesized)
ctctcgaatttggaattgctcctattccagtcacactggatattttcccaatttggtgaaactgatattttaacaactgttaaccattccatgtactaagatgcttatagtcaaactgtg

SEQ ID NO: 753431 - DNA, 120 bp, Artificial Sequence
  ENSG00000212719_78 (sequence is synthesized)
cctcttaaacctatttttattgtgtatttaacaaattttgctataatgttaaaaacaacttataactcatcaaactgcattttaattttagtaaacacaaattacactgaaacgggagtg

SEQ ID NO: 753432 - DNA, 120 bp, Artificial Sequence
  ENSG00000212719_79 (sequence is synthesized)
ttccctggcccctctcacaggacgtgtgacaagggttcggctcgctgcctgttcaaaccccttacgggagggggatcacgcagagggacaggtgcaggagcccaagtgggtgtgtgctac

SEQ ID NO: 753433 - DNA, 120 bp, Artificial Sequence
  ENSG00000212719_80 (sequence is synthesized)
agtgtgctcttttagccttggcatctgtggatggcttgagtgttaactagctcagtggaccctcagcctttctgcaaaggcagagggtcattgtgacagctttctgtatcccaagctctt

SEQ ID NO: 753434 - DNA, 120 bp, Artificial Sequence
  ENSG00000212719_81 (sequence is synthesized)
gtccatgatcctggaagaatcaggtcacacacagacttgaaggataaatgcaggggtttcactgaggggtagaagtggctctcagtaggatgcatggggagctggaagtggggagggagt

SEQ ID NO: 753435 - DNA, 120 bp, Artificial Sequence
  ENSG00000212719_82 (sequence is synthesized)
gcgaagacgatcttcccctggagtttggccactggacggccaaactcctctcttaccacccgcagctgaactcctctcagcgttcaggtgttcctcatcttctcactttctctgccatgc

SEQ ID NO: 753436 - DNA, 120 bp, Artificial Sequence
  ENSG00000212719_83 (sequence is synthesized)
cgttctgctgtttgactgcttttctcttcatctcttcatctgctcctggagcctggggtttggggtttatatgggtacaggatacgggggtgtggtgggccaaagggcaactttttgggt

SEQ ID NO: 753437 - DNA, 120 bp, Artificial Sequence
  ENSG00000212719_84 (sequence is synthesized)
acgaaaacagaaatgcctgttcccagttagggccatgggtctccaggcttgagggtggggcctttgctggggagccgccctcttctatgcagtatttccctgtctcttttctatatcaat

SEQ ID NO: 753438 - DNA, 120 bp, Artificial Sequence
  ENSG00000212719_85 (sequence is synthesized)
tccgggtcggggcttggagataatgggtgtaatggaaggcctgaggaccgggccccacgccagtcagcgtccgggcgggataccccatcccccgttcacactctcggaaggcccagcgat

SEQ ID NO: 753439 - DNA, 120 bp, Artificial Sequence
  ENSG00000212719_86 (sequence is synthesized)
tcccgcgtgtactaattgacccgctcaggccacagcactccgagctcaagagcgcgcctacaacgctgaccctcaggtttaatctccgacgaaaggacgaagagtacacccagcaaagcc

SEQ ID NO: 753440 - DNA, 120 bp, Artificial Sequence
  ENSG00000212719_87 (sequence is synthesized)
gggctcatcctgccagcgctgccagtcccctggaactctgcaccgcgccctgtggccaaatcccctttcttgccggcttcgccagagcgccggagagaaaaccttaacagtgcagccagg

SEQ ID NO: 753441 - DNA, 120 bp, Artificial Sequence
  ENSG00000212719_88 (sequence is synthesized)
aactgggatcgcgtttctcggcctggggcgggtgaaggagctcccagttggcaccgcctggaatggcgcgaccccgcagccgaaggagacttgaaaatttttcctaactaccgttctgct

SEQ ID NO: 753442 - DNA, 120 bp, Artificial Sequence
  ENSG00000212719_89 (sequence is synthesized)
ccgagtgactgctacctgcgaggacagacagcccacgcggctccgggccgggcgatcttccgcgggaaccgggaacgtttccgaagacccccgcaggccggcgccctgcctcggcttccc

SEQ ID NO: 753443 - DNA, 120 bp, Artificial Sequence
  ENSG00000212719_90 (sequence is synthesized)
agcgcagcggggtcccgggctcctcgcggattagaaagttttgctgggctctggcggcgggagagacagtgaagttgaaaccgtgaaagggagaacatgggtgaatcgcttttattctgt

SEQ ID NO: 753444 - DNA, 120 bp, Artificial Sequence
  ENSG00000212719_91 (sequence is synthesized)
cttttcggaatggggaagcctttctaaagcattaaataaacccagaagccatcaaggaaatgattgatcggcttgacaacataaagtttgaacaaaatacacaagcaaagtcaaaagata

SEQ ID NO: 753445 - DNA, 120 bp, Artificial Sequence
  ENSG00000212719_92 (sequence is synthesized)
acaaatgagtgtggggatcgcttatgcataagataagaatattgatttcattcacagtagccaagatacggaagcaacctagccaagatatggaagcatctactagtggctgaacggata

SEQ ID NO: 753446 - DNA, 120 bp, Artificial Sequence
  ENSG00000212719_93 (sequence is synthesized)
aagaaaatgtggtgtatgtacaccacggggtactgtcccgcctttgaataaaaggaaatcctgccattggcgacaacatggatgaacgtggaggtcattgtactaagaaaagtaagccag

SEQ ID NO: 753447 - DNA, 120 bp, Artificial Sequence
  ENSG00000212719_94 (sequence is synthesized)
gcacagaaacaaataccacctggtctctcctgtatgtggaatctgaaaatagttgaactcatagaaacggagagtagaacggtggctacttgaggccgggggaagggcaggagggggaag

SEQ ID NO: 753448 - DNA, 120 bp, Artificial Sequence
  ENSG00000212719_95 (sequence is synthesized)
atgttagtcaaagggtacaaggattcagttagacaagaggaatatgttttagtgatccacatggcacggtgactgtagttaatgcattttatatgtcaaaattccttaaatagtagattt

SEQ ID NO: 753449 - DNA, 120 bp, Artificial Sequence
  ENSG00000212719_96 (sequence is synthesized)
taaataatctcaccacaaaaaaatagatgtgttggtgatggatatcttaattagcttaaagtaattgttccaccaatgtatacatatatcaaaacatcacattgtatcccatgaatatat

SEQ ID NO: 753450 - DNA, 120 bp, Artificial Sequence
  ENSG00000212719_97 (sequence is synthesized)
gtacctttccacgcctcttctctgcgaaatgaagccacaccatgacacaatcttgaagaggaagccgggaatgggagacggcaacaatccctgtccctggaacgctggcctctatggaca

SEQ ID NO: 753451 - DNA, 120 bp, Artificial Sequence
  ENSG00000212719_98 (sequence is synthesized)
gcaggattgcccatgaatgaacatgggtgaaatcgttggatacagctcagtcttgcctgtgcttaagcctggaaaaaaataaatggtgcttcacagtggattactacaaccttaacattg

SEQ ID NO: 753452 - DNA, 120 bp, Artificial Sequence
  ENSG00000212719_99 (sequence is synthesized)
ggaacttactgaccccatccaatcaacaactgatttgatgttttgccattttaaagaatactagacaagaggatctcaatctggatcactatattgggctcctaatatcctgatataatt

SEQ ID NO: 753453 - DNA, 120 bp, Artificial Sequence
  ENSG00000212719_100 (sequence is synthesized)
ttaaatcatcccaaacaacgcattattaccatatacatcagcatttcccaaactgtgctataagctatgtatactattgatatttttgagctaaaatatacttataaatacataaaaata

SEQ ID NO: 753454 - DNA, 120 bp, Artificial Sequence
  ENSG00000212719_101 (sequence is synthesized)
ctctcccaaattctagttgcccatctgcttggttgggctgctggtcgatctgatcagctttctgaggccacatcaaaactgcagaaatgaggctgatcgacccagcaactctaacaaaga

SEQ ID NO: 753455 - DNA, 120 bp, Artificial Sequence
  ENSG00000212719_102 (sequence is synthesized)
tcatccatgggacatctggtcgcccctctatctcggagccagaggctatacgctcttccccggtggggagggtggggccccaaagtccaaccacaagatcccattatgcgggccacggct

SEQ ID NO: 753456 - DNA, 120 bp, Artificial Sequence
  ENSG00000212719_103 (sequence is synthesized)
aaatccactgcgccttccccgtttttctcgtactgcccaagccagtctccacctccaaaacaagactcagaaaaaggtgtgaagctcaagtcggatgaccatgacccacgcgtggccacg

SEQ ID NO: 753457 - DNA, 120 bp, Artificial Sequence
  ENSG00000212719_104 (sequence is synthesized)
gaaaaaatcatccagtctctgaagctttgcccagccagtctccacctccaaaacaagactcagaaaaaggtgtgaagctcaagtcggatgaccatgacccacgcgtggccacggacgggc

SEQ ID NO: 753458 - DNA, 120 bp, Artificial Sequence
  ENSG00000212719_105 (sequence is synthesized)
aagggacactctcacagcctgttcgccacggaatccaggaggcaggtccattttggtggctgtctccacaacatggctttttccccttgaagaccatcagaagagcctgtatctccgcat

SEQ ID NO: 753459 - DNA, 120 bp, Artificial Sequence
  ENSG00000212719_106 (sequence is synthesized)
ctgcggaaatcgtctttgccatgtaatgtgccataaccatgggagtgacatcgcatcacatcccagggccaccgctgaggaggaggttcagaggccaggagtcctaaacctgcctcactg

SEQ ID NO: 753460 - DNA, 120 bp, Artificial Sequence
  ENSG00000212719_107 (sequence is synthesized)
ggccggaatcaaggtgtcagcagggccgcgctccctctgcaggctccgggagaccccaatcctcgcctcctccagtttctagtggctgctggccacctccaccctctgcctccgtggtca

SEQ ID NO: 753461 - DNA, 120 bp, Artificial Sequence
  ENSG00000212719_108 (sequence is synthesized)
catggccacctcctcttctgtctgtagtaaaatctccctctgcctccctctgataaagacacatgtgattgcatttaggaccacctgggtcatctatcataatcccccacttctcaagac

SEQ ID NO: 753462 - DNA, 120 bp, Artificial Sequence
  ENSG00000212719_109 (sequence is synthesized)
cttaatttaaatcacatctgcaaagatcctttctctgtgtcagggaactgtcctaggttccaggggtgagggcctggataattcaggggccgtgattccacccactgcaatgtgtcttct

SEQ ID NO: 753463 - DNA, 120 bp, Artificial Sequence
  ENSG00000212719_110 (sequence is synthesized)
ctgaccctgcttgagtgtgctggcaaggactgctgccttgtcatccattcgtattagtgtctgcagcatttggcaatatggtgtttctattgagagaaagtcataatcaagtaaaattct

SEQ ID NO: 753464 - DNA, 120 bp, Artificial Sequence
  ENSG00000212719_111 (sequence is synthesized)
ttttttcctttgcctgagagagaaaaatctccattccactattctcccagatcagctgcttttggaaggcagggaacaaggcagcatcagtgaattccacaagcactgacccgttgccac

SEQ ID NO: 753465 - DNA, 120 bp, Artificial Sequence
  ENSG00000212719_112 (sequence is synthesized)
attcctttgatataaagtagcttcctgagtcagagcaattctgagtgggacaccatgatggtgaaaaggtctgtggttaacagatcatacttccatggaaggattgcgggcagagaagat

SEQ ID NO: 753466 - DNA, 120 bp, Artificial Sequence
  ENSG00000212719_113 (sequence is synthesized)
aagcccatattcagagtaagtgcctcttccagggagaacatcttgctgccctcttcatcctggaagtgatcaaatgcaatcagtctgccacggggatcctgggaaaaggtgtcacctcag

SEQ ID NO: 753467 - DNA, 120 bp, Artificial Sequence
  ENSG00000212719_114 (sequence is synthesized)
gcttttccttggcttgtagacagccatcttctccctgtgtcctcacatggttgaccctctgtgcacaccttcattctaatctcttcttataaggacatcagtccgattgaattaggacca

SEQ ID NO: 753468 - DNA, 120 bp, Artificial Sequence
  ENSG00000212719_115 (sequence is synthesized)
ccctcatcacctcactcaactttaattacctgtttaaagatcccatcttcaaatgcagtcacattctgaggcaccagggttagggcttcaacatatgaattgcggggacacagcccatag

SEQ ID NO: 753469 - DNA, 120 bp, Artificial Sequence
  ENSG00000212719_116 (sequence is synthesized)
catgaggaaaacagctcccttgcatttggtgggcgagcacaggaggagccaggggtggaaaagtcctttgataggtgagggatgattcggatgaaagggacagaaaatgcaatttagaaa

SEQ ID NO: 753470 - DNA, 120 bp, Artificial Sequence
  ENSG00000212719_117 (sequence is synthesized)
gtggagtttgggtacagcctcatcacgggagctgctctgcgttctcgggtcatgcaggctggcatctaatgccaactttcccctgtccatcagcgcctgtagcctccacgtcctcctcac

SEQ ID NO: 753471 - DNA, 120 bp, Artificial Sequence
  ENSG00000212719_118 (sequence is synthesized)
ccatggtggcctccacggaccccactcagccccttccatcagcaccacctgctccccatctatcacttcttcctgggagagccccactcttggtcttttctaagcctgcttcatagtaag

SEQ ID NO: 753472 - DNA, 120 bp, Artificial Sequence
  ENSG00000212719_119 (sequence is synthesized)
tggctgaaacctgtgggataagctcccattagcttgtagattctgctgccataaatgtatggtctgaccattggtcaactccaacactgtgtgggaactgtccatccatccgtgcgtcca

SEQ ID NO: 753473 - DNA, 120 bp, Artificial Sequence
  ENSG00000212719_120 (sequence is synthesized)
tccgcccatctgtctgtccattcatccattacagataatttgaaaagtgccttccttatgagctagaatgtctgtgcacaaaacagacaaagttggctgcttcttggagcttacatcaga

SEQ ID NO: 753474 - DNA, 120 bp, Artificial Sequence
  ENSG00000212719_121 (sequence is synthesized)
gatctccaaactttttctataaatggtgagatattaaatattttaggctttgtaggccatatggtctctgtcacaactactcaattctgccatggttttgtaaaagcagccatcaacaat

SEQ ID NO: 753475 - DNA, 120 bp, Artificial Sequence
  ENSG00000212719_122 (sequence is synthesized)
tcatgaacaattcatgaaatgagtgtggttctgtgccaaaggacattgggatttcattccacgttcatgcatcatgaatactatgcttcattaatagagcacaaaggaagccttcctttg

SEQ ID NO: 753476 - DNA, 120 bp, Artificial Sequence
  ENSG00000212719_123 (sequence is synthesized)
accctaaagaaccatgttatctgcacagtacaattgctttgattcctcctgtttttgtcttcatgctgccatcgtgggtacctagcacactgtcaaataaggctttattgcctcttagct

SEQ ID NO: 753477 - DNA, 120 bp, Artificial Sequence
  ENSG00000212719_124 (sequence is synthesized)
cacgtaacaaaaatacttctgttttgtaagttccctcgtttaaagggaaacatgcttcatctgatttagatatatcagtctattccaacttaatttggagtcttaaaaattaaggatggc

SEQ ID NO: 753478 - DNA, 120 bp, Artificial Sequence
  ENSG00000212719_125 (sequence is synthesized)
atcccagcactttgggaggcctaggtgggagaattgcttgaggtcaggagttcaagacctgcctgggcaacacagcgagaccctgtctctaaaaaaaaattaaggatgcattgtttgaac

SEQ ID NO: 753479 - DNA, 120 bp, Artificial Sequence
  ENSG00000212719_126 (sequence is synthesized)
aaattaaggatgcattgtttgaacatataccttactattttagagatgaatgttttatttttgtgtcgtagatactgatgaatagatgtttaattgttgccagagttcaataaacagccc

SEQ ID NO: 753480 - DNA, 120 bp, Artificial Sequence
  ENSG00000212719_127 (sequence is synthesized)
acccattttactaccagatttggaaggaacgaagttaagtaatttccaagagatggggtctcactctattgtccaggctggtcttgaactcctagcctcaaacaatcctcctgcctcagc

SEQ ID NO: 753481 - DNA, 120 bp, Artificial Sequence
  ENSG00000212719_128 (sequence is synthesized)
ggaggagggtgaggatcttgacccttatcttagaattctgccctgcctggcttccacttgtcctcttctaaatctatcttaactcattcctttggtgcctgtttttactgccttaatttt

SEQ ID NO: 753482 - DNA, 120 bp, Artificial Sequence
  ENSG00000212719_129 (sequence is synthesized)
ggcaataaagggaggaataaaaacacatcttttttttctttttttgaattctcattacatccacacacaagaaatgtgtcacatgaaggaagtgtatttagaataccagttttcctattt

SEQ ID NO: 753483 - DNA, 120 bp, Artificial Sequence
  ENSG00000212719_130 (sequence is synthesized)
ggttcatgatatttttccagggtaaaattgccaacagaatttggaagcccaaagcaggacatgatataaattaatgctggtgatctgtaaattatattttatttcataaaatggtaaatt

SEQ ID NO: 753484 - DNA, 120 bp, Artificial Sequence
  ENSG00000212719_131 (sequence is synthesized)
ttcccctttagtctggtcaattttatgcaatttggcatcacattttataaacgtattacccttttgaacatttactgaactgaatgcacaaagagaattataaaagaaaatctggaagca

SEQ ID NO: 753485 - DNA, 120 bp, Artificial Sequence
  ENSG00000212719_132 (sequence is synthesized)
atgaggaaaccacaggcagaggccggggaagcagcgcggcatcccatcctcaggcctgcccggacggtgttcgggatcaagaggaccacactccagcccaggacaaaagccccacggtag

SEQ ID NO: 753486 - DNA, 120 bp, Artificial Sequence
  ENSG00000212719_133 (sequence is synthesized)
aaatattgaagcctcagcatcgtctttggagaaaggcacagaccacagattgtttatatgattctgtgttttttccttccaacttgtccttaatcttggcaaaataaacttctaaattga

SEQ ID NO: 753487 - DNA, 120 bp, Artificial Sequence
  ENSG00000212721_0 (sequence is synthesized)
caaacacaagaacttcactctcctagaaacccaactagatccttcaccctctgacaccatggtaaactcctgttgtggctccgtgtgctctcaccaaggctgtggccgagacctctgcca

SEQ ID NO: 753488 - DNA, 120 bp, Artificial Sequence
  ENSG00000212721_1 (sequence is synthesized)
ggagacctgctgccgccccagctgctgtgagaccacctgctgcaggaccacctactgtcgccccagctgctgtgtgtccagctgctgcaggccccagtgctgccagtctgtgtgctgcca

SEQ ID NO: 753489 - DNA, 120 bp, Artificial Sequence
  ENSG00000212721_2 (sequence is synthesized)
gcccacctgctgccgccccagatgctgcatctccagctgctgtcgccccagctgctgtgtgtccagctgctgcaagccccagtgctgccagtctatgtgctgccagcccacttgctgccg

SEQ ID NO: 753490 - DNA, 120 bp, Artificial Sequence
  ENSG00000212721_3 (sequence is synthesized)
ctatgtgctgccagcccacttgctgccgccccagatgctgcatctccagctgctgtcgccccagctgctgtgtgtccagctgctgcagaccccagtgctgccagtctgtgtgctgccagc

SEQ ID NO: 753491 - DNA, 120 bp, Artificial Sequence
  ENSG00000212721_4 (sequence is synthesized)
gtgtcatctccagctgcccccgccccttgtgctgtgcctcctcttgctgctgagcccactgccctggctcatctctcccttcactgcaggcccacagttgtagaccattcttctgtgctg

SEQ ID NO: 753492 - DNA, 120 bp, Artificial Sequence
  ENSG00000212721_5 (sequence is synthesized)
actattaggacacatggagtgggattgatgtcattcagcagggtggacttcatgtttccaatgagcccatcaccatcccactgactctgtgagaacattctggttcattttaaactccct

SEQ ID NO: 753493 - DNA, 120 bp, Artificial Sequence
  ENSG00000212721_6 (sequence is synthesized)
cccttgctttctttctcttccagtcatggcaccaaatatgaaataatttgtaatccactagctaagaaattattccaatcctctaaattcctcattttttaaatcgttttgagcctacag

SEQ ID NO: 753494 - DNA, 120 bp, Artificial Sequence
  ENSG00000212721_7 (sequence is synthesized)
aatatccttcccagtgaggtacacattatctccatttcaaacatattatttgtctgtcagcctttcagtcattcttttctcttggaaaggtaggaggctgcccctcccatgctctcctgc

SEQ ID NO: 753495 - DNA, 120 bp, Artificial Sequence
  ENSG00000212721_8 (sequence is synthesized)
tttctccctgttctctctttgtctctgtttgttcaagtttgccagaatttttctattttattggttctttatctttattgtgttcacaaaatatattgtattaaacttttcatttagaaa

SEQ ID NO: 753496 - DNA, 120 bp, Artificial Sequence
  ENSG00000212722_0 (sequence is synthesized)
atggtcagctcctgttgtggctccgtgtgctctgaccagggctgcggccaagacctctgtcaggagacctgctgccgccccagctgctgtgagaccacctgctgcaggaccacctgctgc

SEQ ID NO: 753497 - DNA, 120 bp, Artificial Sequence
  ENSG00000212722_1 (sequence is synthesized)
cgccccagctgttgtgtatccagctgctgcaggccccagtgctgccagtctgtgtgctgccaacccacttgttaccgccccagctgttgtgtgtccagctgctgcaggccccagtgctgc

SEQ ID NO: 753498 - DNA, 120 bp, Artificial Sequence
  ENSG00000212722_2 (sequence is synthesized)
gtgctgccagtctgtgtgctgccagcccaactgctgccgccccagctgcagcatctccagctgctgccgcccctcttgctgtgaatccagctgctgccgcccctgctgctgcgtgcgtcc

SEQ ID NO: 753499 - DNA, 120 bp, Artificial Sequence
  ENSG00000212722_3 (sequence is synthesized)
ccctgctgctgcgtgcgtccagtctgtggccgagtctcctgccacaccacttgctatcgcccaacctgtgtcatctccagctgcccccgccccttgtgctgtgcctcctcttgctgctga

SEQ ID NO: 753500 - DNA, 120 bp, Artificial Sequence
  ENSG00000212722_4 (sequence is synthesized)
cccacttgttcccgccccagctgctgtcagaccacctgttgcaggaccacctgctaccgccccagctgttgtgtgtccagctgctgcaggccccagtgctgccagcctgcgtgctgccaa

SEQ ID NO: 753501 - DNA, 120 bp, Artificial Sequence
  ENSG00000212722_5 (sequence is synthesized)
gaatggaactcatgtttccaatgagcccatcaccatttcactgactctttgagaacattctgattcattttaaactccctcccttgctttctttttcttccggtggtggcaccaaatgtg

SEQ ID NO: 753502 - DNA, 120 bp, Artificial Sequence
  ENSG00000212722_6 (sequence is synthesized)
aattaatttgtaatccactagctagaaattattccaatcctctaatttcctcattttctttatcactttgaggtacagatcttcttctcagtgaggcagacattatctgcaggaccagtt

SEQ ID NO: 753503 - DNA, 120 bp, Artificial Sequence
  ENSG00000212722_7 (sequence is synthesized)
ttgtcactgaggttgcaccctcagatccagccgcccagttatattctgtgtttctcctagtgtgaatttcttatgctttgttgcatctctgctttttaataaaatttctgtacataagaa

SEQ ID NO: 753504 - DNA, 120 bp, Artificial Sequence
  ENSG00000212724_0 (sequence is synthesized)
attcacacctgagaacatccagctcctctcaacagcccaacccacaccagcctcagacaccaccatgaccggctcctgctgcggctccaccttgtcctccctgagctacgggggaggctg

SEQ ID NO: 753505 - DNA, 120 bp, Artificial Sequence
  ENSG00000212724_1 (sequence is synthesized)
ctgccagccctgctgctgccgcgacccctgctgctgccgccccgtgacctgccagaccaccgtgtgccgccccgtgacctgcgtgccccgctgcacgcgccccatctgcgagccctgccg

SEQ ID NO: 753506 - DNA, 120 bp, Artificial Sequence
  ENSG00000212724_2 (sequence is synthesized)
ccgcccggtgtgctgcgacccctgctccctgcaggaaggctgctgccgccccatcacctgctgcccctcgtcgtgcacggctgtggtgtgcaggccctgctgctgggccaccacctgctg

SEQ ID NO: 753507 - DNA, 120 bp, Artificial Sequence
  ENSG00000212724_3 (sequence is synthesized)
ctccctgcggccagccgaccccttgcagcaccacctgcaggacctcctcctgctgagaccccacctctcctctcaacgcacgaaacattcccaggtgcacagaagcttgtgcagactctt

SEQ ID NO: 753508 - DNA, 120 bp, Artificial Sequence
  ENSG00000212724_4 (sequence is synthesized)
ctaccccttctggatcagatgagagactccacctttgcagcctagctgatcctcaagcacgaattcaacaataacatcctatctatttccccacataattatgcagctaatcctggccct

SEQ ID NO: 753509 - DNA, 120 bp, Artificial Sequence
  ENSG00000212724_5 (sequence is synthesized)
ctctgacaatcttgagaaaaattccagctttcatcattcgaattcctggcttgaaaaaaaaaacgagtaaataaaaatcaaagctcctcttgaatagaactctgtcccactgactcatca

SEQ ID NO: 753510 - DNA, 120 bp, Artificial Sequence
  ENSG00000212724_6 (sequence is synthesized)
cccttttttctactgtttcaaggttctcagatgagatttttttcttccaggataatactatttgtatgctgtatttttgcactgtaaaaaaaaataaaattatatttctggggaagcaaa

SEQ ID NO: 753511 - DNA, 120 bp, Artificial Sequence
  ENSG00000212725_0 (sequence is synthesized)
catccagctcctctccacagcccaacccacaccagcctcagacaccaccatgaccggctcctgctgcggctccaccttctcctccctgagctacgggggaggctgctgccagccctgctg

SEQ ID NO: 753512 - DNA, 120 bp, Artificial Sequence
  ENSG00000212725_1 (sequence is synthesized)
ctgccgcgacccctgctgctgccgccccgtgacctgccagaccaccgtgtgccgccccgtgacctgcgtgccccgctgcacgcgccccatctgcgagccctgccgccgcccggtgtgctg

SEQ ID NO: 753513 - DNA, 120 bp, Artificial Sequence
  ENSG00000212725_2 (sequence is synthesized)
cgacccctgctccctgcaggaaggctgctgccgccccatcacctgctgcccctcgtcgtgcacggctgtggtgtgcaggccctgctgctgggccaccacctgctgccagcctgtgtctgt

SEQ ID NO: 753514 - DNA, 120 bp, Artificial Sequence
  ENSG00000212725_3 (sequence is synthesized)
gcaggacctcctcctgctgagccaccacctgctgccagcctgtgtctgtgcagtccccctgcggccagccgaccccttgcagcaccacctgcaggacctcctcctgctgagcagtgcact

SEQ ID NO: 753515 - DNA, 120 bp, Artificial Sequence
  ENSG00000212725_4 (sequence is synthesized)
gactgcccggaacgcgtaactcaccttctgaaaaagtcacactcccatttctctactttaacaaacctcctgccctgagcccacaaaaccccacatcaaccaagcagggaaccgagcact

SEQ ID NO: 753516 - DNA, 120 bp, Artificial Sequence
  ENSG00000212725_5 (sequence is synthesized)
gggctcatctattaagacctgggccattctgaagtctgtaaaagaagcaatttccttcttcttaagatttcgtggcatgtttattttctaataaatatctgttctttggccttgcaaaaa

SEQ ID NO: 753517 - DNA, 120 bp, Artificial Sequence
  ENSG00000212747_0 (sequence is synthesized)
atgcacttcccgctacgcctcggtgcagcccccggcgaagcccagcgcagctcagctaaactcagcggagccagcgcggcgcgatggaaggtcgagtgcagctgatgaaggccctcctgg

SEQ ID NO: 753518 - DNA, 120 bp, Artificial Sequence
  ENSG00000212747_1 (sequence is synthesized)
ctcggcccctccggcccgcggcgcgtcgctggaggaacccgattccctttcccgagacgtttgatggcgataccgaccggctcccggagttcatcgtgcagacgagctcctacatgttcg

SEQ ID NO: 753519 - DNA, 120 bp, Artificial Sequence
  ENSG00000212747_2 (sequence is synthesized)
tggacgagaacacgttctccaacgacgccctgaaggtgacgttcctcatcacccgcctcacggggcccgccctgcagtgggtgatcccctacatcaagaaggagagccccctcctcagtg

SEQ ID NO: 753520 - DNA, 120 bp, Artificial Sequence
  ENSG00000212747_3 (sequence is synthesized)
attaccggggcttcctggctgagatgaagcgggtctttggatgggaggaggacgaggacttctaggccgggagaccctcgggcctggggaccggtgctctgggaagggtccgctgtgtta

SEQ ID NO: 753521 - DNA, 120 bp, Artificial Sequence
  ENSG00000212747_4 (sequence is synthesized)
ctggccgccgccagggtcgccaccggcgccctccctccgcgcctccctccccctcgagccgccacgatgtcccctgcgctcctgtcccctcccgcgtagtgcttgcctttgttccaggaa

SEQ ID NO: 753522 - DNA, 120 bp, Artificial Sequence
  ENSG00000212747_5 (sequence is synthesized)
tagcgctccaggctcctgctgccgcccctgggcctcactctggagcgggctgcctccgccctctcgtgccagctcagcccctcccatgcacatttggacgctgtcctgcgctccagttgc

SEQ ID NO: 753523 - DNA, 120 bp, Artificial Sequence
  ENSG00000212747_6 (sequence is synthesized)
acaaagctgagctcctgttacacactgacagaccactgacagccgccgctgccaacccccctcctcctcaccagacttccagacgactacatcatgctgcccacagacctgcgctgccac

SEQ ID NO: 753524 - DNA, 120 bp, Artificial Sequence
  ENSG00000212747_7 (sequence is synthesized)
tgccatcgccatccatcgcattccaccgacagactgctgcttctagtgatctgtactcacctcggaggtatctgggctggacacagcccctggacaatgatccagacagctggctgcccc

SEQ ID NO: 753525 - DNA, 120 bp, Artificial Sequence
  ENSG00000212747_8 (sequence is synthesized)
agtctctcattttctcttgtggaccagttagttttgcccagaatccatttctcttctgaatttgcagcattttctcaggtgctttttgatcaacaaaataacttgtatcttctgcttaac

SEQ ID NO: 753526 - DNA, 120 bp, Artificial Sequence
  ENSG00000212747_9 (sequence is synthesized)
tcctttatactacctggagaaaagtattttccatattttcaataaatgtcagacactattgagaaagaaatagagtctgaatgaatatggcacctttccctccctggtcctgtaaatgtg

SEQ ID NO: 753527 - DNA, 120 bp, Artificial Sequence
  ENSG00000212747_10 (sequence is synthesized)
gtccatatcttgttcagaagcgatatcccctgccattcagtgactgatgttgactcctgcattataaaacatctaagatagagtcctgtggtaacctgggggatagtgtccccactggtg

SEQ ID NO: 753528 - DNA, 120 bp, Artificial Sequence
  ENSG00000212747_11 (sequence is synthesized)
atccttctgtcccagatgttgaatcctctaaaccagttaggattatcccaagcctcttagtaaatgaatcgttacctcattttggtcaacactatgtgagaagtcagccagcaggctctt

SEQ ID NO: 753529 - DNA, 120 bp, Artificial Sequence
  ENSG00000212747_12 (sequence is synthesized)
ggaaaatgtatcctcatttccagaaagtggtttgaaaacacaattcccaaattgttacaaaccataaatcccacacagattattggtgaacagctgtaaaattttactcaacccatgatt

SEQ ID NO: 753530 - DNA, 120 bp, Artificial Sequence
  ENSG00000212747_13 (sequence is synthesized)
cagggaaccaacagaattatataggtgcttttcaaaagcatttataaattcttgattatgtaggtagtggggggaaatgcagaaatgagatcattaatttagatacaaacctggttgatg

SEQ ID NO: 753531 - DNA, 120 bp, Artificial Sequence
  ENSG00000212747_14 (sequence is synthesized)
accagggggttttattttgcagaagaattgggtatttggtatcattttattcaattacatgtgatcctggtacatttcataagcttgggtaaaaaaattttttgttattttccatgcaca

SEQ ID NO: 753532 - DNA, 120 bp, Artificial Sequence
  ENSG00000212747_15 (sequence is synthesized)
ataagggaaatgttttaattggctttgtgcctcctgctttacaacagttctggcctcaagttaccaggtagcctgaactttgattttattttaccattaaattgctttaataccattgta

SEQ ID NO: 753533 - DNA, 120 bp, Artificial Sequence
  ENSG00000212807_0 (sequence is synthesized)
atgggggaaaatcagacaatggtcacagagttcctcctactgggatttctcctgggcccaaggattcagatgctcctctttgggctcttctccctgttctatatcttcaccctgctgggg

SEQ ID NO: 753534 - DNA, 120 bp, Artificial Sequence
  ENSG00000212807_1 (sequence is synthesized)
aacggggccatcctggggctcatctcactggactccagactccacacccccatgtacttcttcctctcacacctggctgtcgtcgacatcgcctacacccgcaacacggtgccccagatg

SEQ ID NO: 753535 - DNA, 120 bp, Artificial Sequence
  ENSG00000212807_2 (sequence is synthesized)
ctggcgaacctcctgcatccagccaagcccatctcctttgctggttgcatgacgcagacctttctctgtttgagttttggacacagcgaatgtctcctgctggtgctgatgtcctacgat

SEQ ID NO: 753536 - DNA, 120 bp, Artificial Sequence
  ENSG00000212807_3 (sequence is synthesized)
tccctcctggctctggcccatgtggttctcatcctaagactgcccttctctgggcctcatgaaatcaaccacttcttctgtgaaatcctgtctgtcctcaggctggcctgtgctgacacc

SEQ ID NO: 753537 - DNA, 120 bp, Artificial Sequence
  ENSG00000212807_4 (sequence is synthesized)
tggctcaaccaggtggtcatctttgcagcctgcgtgttcttcctggtggggccacccagcctggtgcttgtctcctactcgcacatcctggcggccatcctgaggatccagtctggggag

SEQ ID NO: 753538 - DNA, 120 bp, Artificial Sequence
  ENSG00000212807_5 (sequence is synthesized)
ggccgcagaaaggccttctccacctgctcctcccacctctgcgtggtgggactcttctttggcagtgccatcatcatgtacatggcccccaagtcccgccatcctgaggagcagcaaaag

SEQ ID NO: 753539 - DNA, 120 bp, Artificial Sequence
  ENSG00000212807_6 (sequence is synthesized)
gtcttttttctattttacagttttttcaacccaacacttaaccccctgatttacagcctgaggaacggagaggtcaagggtgccctgaggagagcactgggcaaggaaagtcattcctaa

SEQ ID NO: 753540 - DNA, 120 bp, Artificial Sequence
  ENSG00000212807_7 (sequence is synthesized)
tcactgtggacatatacagctggaacacaggagatgagcatgcaggaggtttcatggcccagctcctccagtgatccctcagctgtcaaccaggctgagcacatcagagaataacacctc

SEQ ID NO: 753541 - DNA, 120 bp, Artificial Sequence
  ENSG00000212807_8 (sequence is synthesized)
cttttctgaggattctgatacattttcaatcagaaacagaagcaaagattctgcagctcccacagaaactcccagaaaccttcaggtgcttcactcttctgagatccttgagtccaaatg

SEQ ID NO: 753542 - DNA, 120 bp, Artificial Sequence
  ENSG00000212807_9 (sequence is synthesized)
aatcttggtaccaaataccacctaagttcactactctctttatatctgagactgaatgaaccaagagactctgcaaagcattcctttttcctgcctgggaagtatttagtttttgatgca

SEQ ID NO: 753543 - DNA, 120 bp, Artificial Sequence
  ENSG00000212807_10 (sequence is synthesized)
tttgttatacttaacattttttaatttaagcacttattgagttgagaatgttggggaaagatttattttgtacactgctatgagtccagaagtttaaaacagacactccacctgtgactt

SEQ ID NO: 753544 - DNA, 120 bp, Artificial Sequence
  ENSG00000212807_11 (sequence is synthesized)
agtcaggtatgctcagtagtagaggaatagcagttattaccagataaagtcatatctataaaaagtttttaaaaatacagccacaggcagagactccagaacccattgatacctctgtcc

SEQ ID NO: 753545 - DNA, 120 bp, Artificial Sequence
  ENSG00000212807_12 (sequence is synthesized)
attttcatcctcatttggatgtttcccctcaattgtacttcctttcttataagcagtaaatgtacctaagtgcctacttcagcttggagggaaattgatttttataaaatcctacaaact

SEQ ID NO: 753546 - DNA, 120 bp, Artificial Sequence
  ENSG00000212807_13 (sequence is synthesized)
gacaatttctgttgtcagagagagtgaatccataaacattcagctggcaatctgaagcaattacacaacaaaatccactttccaacctgccctgagactgtgatggtcacttgtttctac

SEQ ID NO: 753547 - DNA, 120 bp, Artificial Sequence
  ENSG00000212807_14 (sequence is synthesized)
tcttctcacctcctccaggggactgtctatgattgtctctaaataagcacatgctcttcacttagaggaagttagtaccaccacacaacttttcactgctggggacgaatggaaagcccc

SEQ ID NO: 753548 - DNA, 120 bp, Artificial Sequence
  ENSG00000212807_15 (sequence is synthesized)
acacagagacaattcaatggaaaaaagcgttttaataataatgttaatagttagcattattataaattactctgcaccatccactgcacattgataggtactttatagagataacctcag

SEQ ID NO: 753549 - DNA, 120 bp, Artificial Sequence
  ENSG00000212807_16 (sequence is synthesized)
tttatcattatagccaattcatttcccattattatcccattttatagatgtgaacttcaagcagatggtaaatgttagactcatacccaaacaatctggctcccaagccttctttactta

SEQ ID NO: 753550 - DNA, 120 bp, Artificial Sequence
  ENSG00000212807_17 (sequence is synthesized)
accaggacaatgtgggactttattagcaacatttcaaattaagaataagtctaaccaatcctaacgtaggatatgttaagtgaatgtgggtttcttccccatctagaatgtgccatgatg

SEQ ID NO: 753551 - DNA, 120 bp, Artificial Sequence
  ENSG00000212807_18 (sequence is synthesized)
tggaaggcttcttatcctgtttgacgagtcctgtgggcatggctgcaaaggaggttaagagattcagaggaacacagaacacagacagggtgggagtagaggctgttctcaatgagatta

SEQ ID NO: 753552 - DNA, 120 bp, Artificial Sequence
  ENSG00000212807_19 (sequence is synthesized)
gagagtaagtttagaactatacttggttctgggtggtaagatccagaacaaagacatctctagttcacgtacaacactcacatgctcacgtacatgcgtgcgcgcacacacacacacaca

SEQ ID NO: 753553 - DNA, 120 bp, Artificial Sequence
  ENSG00000212807_20 (sequence is synthesized)
catatacgcacagtgcttagtgaagcactattccaagaaccttacaagtaagagctctttaagtcctcataaaaaccctatgaggtagagactattactactatttttaggcgagaaaac

SEQ ID NO: 753554 - DNA, 120 bp, Artificial Sequence
  ENSG00000212807_21 (sequence is synthesized)
agaactatagagagattatataatttaaccaatgctcccagctaataagtacctagtccagaatcaaacttaggcaatatgactgctgaacccataatcgtaaccattatataaaaatca

SEQ ID NO: 753555 - DNA, 120 bp, Artificial Sequence
  ENSG00000212807_22 (sequence is synthesized)
aagagatcatgaaatttccaaagatgaagaggaggagagatgaaaagcaattttcaatctctagccaaagataggcattgggctccagacagaaaagtacttaaagctgggggaaaaaca

SEQ ID NO: 753556 - DNA, 120 bp, Artificial Sequence
  ENSG00000212807_23 (sequence is synthesized)
aacaaacaaacaaacaaacaaaaaacagctttttttatactggtgcgtgaaatgagatgaggtggtagcaagaaggaactgtgactccaagggtcagagacggaggaggagcctcttgac

SEQ ID NO: 753557 - DNA, 120 bp, Artificial Sequence
  ENSG00000212807_24 (sequence is synthesized)
tgacgggcaggatggtgaaaccaaaaacaatggataaaacttttaagttgatggttcatcaattgaagaacattagaaagtgtttttgtaaattatctagccgggcatggcaacgtgtgc

SEQ ID NO: 753558 - DNA, 89 bp, Artificial Sequence
  ENSG00000212807_25 (sequence is synthesized)
tgtttttgtaaattatctagccgggcatggcaacgtgtgcctacatccccagctattcagggattttgaggctgcagtgagccatgatc

SEQ ID NO: 753559 - DNA, 120 bp, Artificial Sequence
  ENSG00000212807_26 (sequence is synthesized)
gtctccaacaataataacaatgaaataatttattaaattttttaaaattacccaaactggatatacaatttgtaattccattgctgccgaacagtttttaaacggttgtttagtttcacg

SEQ ID NO: 753560 - DNA, 120 bp, Artificial Sequence
  ENSG00000212807_27 (sequence is synthesized)
gcagatgctgcatactgcattgcaactaacactgggaagggatacattcaagtggcaggacaaaggtgaggagctctaataccaggggtaggtttcaagggatgaatactcccctggtac

SEQ ID NO: 753561 - DNA, 120 bp, Artificial Sequence
  ENSG00000212807_28 (sequence is synthesized)
cagaggagcagcaggaaatcatggtgtgcagaaaccatgctcaggcggttgcctgtgtggaccctaaattctgtgtgtgcagtcctctcttaggattggcccaggcatccaggaagccca

SEQ ID NO: 753562 - DNA, 120 bp, Artificial Sequence
  ENSG00000212807_29 (sequence is synthesized)
cgatgctgcctaccccttaaatacacaaggtgcgtaccggaggccctggttctagttccagatgtaccatttgctagctgtgttttttgcagagaagtcccttaaactgcttaagcttca

SEQ ID NO: 753563 - DNA, 120 bp, Artificial Sequence
  ENSG00000212807_30 (sequence is synthesized)
gtccttcatctgaaaattatgcatatggaagctgtttaggacaccacagagtgccactgaaaacccaaagcaagatgcaaatggacacattttttttctgaagacttaaaagtgctatgt

SEQ ID NO: 753564 - DNA, 120 bp, Artificial Sequence
  ENSG00000212807_31 (sequence is synthesized)
gaacataagataaactgttatgattaccctgctgtcagaagttattttaaacctgtcagggttgctaaactttctgatctggaaccaaaattgctctttaaacaggaagagcattggtgc

SEQ ID NO: 753565 - DNA, 120 bp, Artificial Sequence
  ENSG00000212807_32 (sequence is synthesized)
tggtaggtcacctacgcctttgccctcatggcttccccatgtcccccctagaggcacaggaggccactcactcttggagggcatagctggaccaggagcatgagctgtggcccagactca

SEQ ID NO: 753566 - DNA, 120 bp, Artificial Sequence
  ENSG00000212807_33 (sequence is synthesized)
gggaacctctgtgagtcagctggcaaaggctcccggggagcctgtctctgaatctggtcctagcccgttcacttggaaaaaacaggagacttctcccaaggtcaaggaattcagattttg

SEQ ID NO: 753567 - DNA, 120 bp, Artificial Sequence
  ENSG00000212807_34 (sequence is synthesized)
gttttggtttccaactttttgtaatcctcaacctgggatttacagtgcatgtctcaattatgtttcattcattgcttcacaaagggaaggacaagcactggttcatctctttacacctat

SEQ ID NO: 753568 - DNA, 120 bp, Artificial Sequence
  ENSG00000212807_35 (sequence is synthesized)
acattcctagcacagagtgagtactcacaaaaaacatacggaatacatagaggacactttatctgttgaccccatttccaaattttcagtgttgagccatcttctgatttctaaacttct

SEQ ID NO: 753569 - DNA, 120 bp, Artificial Sequence
  ENSG00000212807_36 (sequence is synthesized)
ttaaatccctctaattttaggtcatactacagtagaaatttaattgtagctgataattattgagcacttactatgtggttggcactgcataaaatgctttagaaaaattcttacatcaaa

SEQ ID NO: 753570 - DNA, 120 bp, Artificial Sequence
  ENSG00000212807_37 (sequence is synthesized)
tatgtggagtaggtactaatactatcctaacattaaaggggggggggaaataaagtttagtgtaattaattaatttattcaaggtcgccaaatcattcagtggtagaaacatgaatcaag

SEQ ID NO: 753571 - DNA, 120 bp, Artificial Sequence
  ENSG00000212807_38 (sequence is synthesized)
accaggcagtctgactgtaaataaattctgagccactctcttgcagaggacctcctgatattcatctcctgaatggttggcaacaggcctgttcatagtagacactcaataaactttgac

SEQ ID NO: 753572 - DNA, 120 bp, Artificial Sequence
  ENSG00000212864_0 (sequence is synthesized)
cggggccccccccaggcctggcgggaccaggatgctgccctgtcacctgccccccagccccacacaacgcccccacccacccgaacatccagtctgactggagacagccggatgccctct

SEQ ID NO: 753573 - DNA, 120 bp, Artificial Sequence
  ENSG00000212864_1 (sequence is synthesized)
gaccccgggcccgaggcgggcagtggctggccgggcctcctcatgtcctgcctgaagggtccccatgtcatcctcaagatggaggccatgaagattgtccaccctgaaaagttccctgag

SEQ ID NO: 753574 - DNA, 120 bp, Artificial Sequence
  ENSG00000212864_2 (sequence is synthesized)
ctaccggctgccccctgcttcccgcctgctccccggcccaccccaactctggcacccaagcgtgcctggccctcagacacagagatcattgtcaaccaggcctgtgggggggacatgcct

SEQ ID NO: 753575 - DNA, 120 bp, Artificial Sequence
  ENSG00000212864_3 (sequence is synthesized)
gccttggaaggggcaccccataccccgccactgccacggcggccccgtaagggaagctcggagctgggctttccccgcgtggccccagaggatgaggtcattgtgaatcagtacgtgatt

SEQ ID NO: 753576 - DNA, 120 bp, Artificial Sequence
  ENSG00000212864_4 (sequence is synthesized)
ctgcactctgtgtgtgagcagtgcctgcagattctctacgagtcctgccccaagtacaagttcatctcctgccccacctgccgccgtgagactgtgctcttcaccgactacggcctggcc

SEQ ID NO: 753577 - DNA, 120 bp, Artificial Sequence
  ENSG00000212864_5 (sequence is synthesized)
gcgctggctgtcaacacgtccatcctgagccgcctgccgcctgaggcgctgacggccccatccgggggtcagtggggggctgagcccgagggcagctgctaccagaccttccggcagtac

SEQ ID NO: 753578 - DNA, 120 bp, Artificial Sequence
  ENSG00000212864_6 (sequence is synthesized)
tgtggggccgcgtgcacctgccacgtgcggaacccactgtccgcctgctccatcatgtagtagcgcctgcctgcccgccactgcccgctgagcctcgctcgctgcttcttcagggacccg

SEQ ID NO: 753579 - DNA, 120 bp, Artificial Sequence
  ENSG00000212864_7 (sequence is synthesized)
gccctgccctgccgcccgctgacccttccttccccaccatggcttccggccccaccccgagtggcattgtcgctgcagccaactttgccattaaaactctttgccaaagtttgcacctgt

SEQ ID NO: 753580 - DNA, 120 bp, Artificial Sequence
  ENSG00000212899_0 (sequence is synthesized)
attcacacctcagaagccttatccttcttttcaatcaaacccataaataccacagactctaatagccatggattgctgtgcctctcgaggctgcagtgtccccaccgggcctgccaccac

SEQ ID NO: 753581 - DNA, 120 bp, Artificial Sequence
  ENSG00000212899_1 (sequence is synthesized)
catctgctcctctgacaaatcctgccgctgtggagtctgcctgcccagcacctgcccacacacagtttggttactggagcccacctgctgtgacaactgtcccccaccctgccacattcc

SEQ ID NO: 753582 - DNA, 120 bp, Artificial Sequence
  ENSG00000212899_2 (sequence is synthesized)
tcagccctgcgtgcccacctgcttcctgctcaactcctgccagccaactccaggcctggagaccctcaacctcaccaccttcactcagccctgctgtgagccctgcctcccaagaggctg

SEQ ID NO: 753583 - DNA, 120 bp, Artificial Sequence
  ENSG00000212899_3 (sequence is synthesized)
tttgctcagtgcctgagattgaaaaagtcaacatagaagctttagcattcacctatctcagtacctacaactaatgtactctgctttagaaattggaacaaggatggtactaccacaatc

SEQ ID NO: 753584 - DNA, 120 bp, Artificial Sequence
  ENSG00000212899_4 (sequence is synthesized)
accccctgcaaaaaaaaagagaccaagaaactttcaatgaccattcagctataaccaactgcagtttgaatcagtggatgcctatagcttcctgaagctgttcgattccttcatattaaa

SEQ ID NO: 753585 - DNA, 120 bp, Artificial Sequence
  ENSG00000212899_5 (sequence is synthesized)
gtgtctctttctgtgggtggtttgggaattctgttttcagtcttgggtggtatctttctgaaaattaaggaagttcttcatgattatcctaataaattttacatctctggcatagcacaa

SEQ ID NO: 753586 - DNA, 120 bp, Artificial Sequence
  ENSG00000212900_0 (sequence is synthesized)
gtacctcagaatcctcatctaagaaactgaaagctaaccagacgcccattgccatggattgctgtgcctctcgcagctgcagtgtccccactgggcctgccaccaccatctgctcctccg

SEQ ID NO: 753587 - DNA, 120 bp, Artificial Sequence
  ENSG00000212900_1 (sequence is synthesized)
acaaatcctgccgctgtggagtctgcctgcccagcacctgcccacacacagtttggttactggagcccatctgctgtgacaactgtcccccaccctgccacattcctcagccctgcgtgc

SEQ ID NO: 753588 - DNA, 120 bp, Artificial Sequence
  ENSG00000212900_2 (sequence is synthesized)
tggctactttgctcagtgcccgacaacgaagaatccagaagctgtcccttcagtattcacttgcctcagtagtttgccagatgttaaggtagaccagatgacccagatatgaagaactta

SEQ ID NO: 753589 - DNA, 120 bp, Artificial Sequence
  ENSG00000212900_3 (sequence is synthesized)
cctttggttttaatgggggaaaaaaagaaaagtattttttatggttatttagctgaaaaaccatttggttcctgtgggcaggtgaatgagttttattagcaaaatactgtttcaatcttt

SEQ ID NO: 753590 - DNA, 120 bp, Artificial Sequence
  ENSG00000212900_4 (sequence is synthesized)
aagacctcagattacatgttcttgatcatattgcttcctggctcttgtttcttgtactgggtattttcatagaagaaaatttcttggtgggttttccaataaactatatttctctggcaa

SEQ ID NO: 753591 - DNA, 120 bp, Artificial Sequence
  ENSG00000212901_0 (sequence is synthesized)
atcgagacaccaacagacttctctcaactcaacaaaaacccacctcccattgccatgtattgctgtgctctccgctcctgcagcgtccccaccggccctgccaccaccttctgctcattt

SEQ ID NO: 753592 - DNA, 120 bp, Artificial Sequence
  ENSG00000212901_1 (sequence is synthesized)
gataaaagctgccgctgtggagtctgcctacccagcacctgcccacatgagatcagcctccttcagcccatctgctgtgacacctgccccccaccctgctgcaagcctgatacctatgtg

SEQ ID NO: 753593 - DNA, 120 bp, Artificial Sequence
  ENSG00000212901_2 (sequence is synthesized)
ctggctgctcaacaactgtcacccgactcccggactgagtgggatcaacctgaccacctatgttcagcctggctgtgagagtccctgtgagccccgctgttaaccagccgagtctgcaca

SEQ ID NO: 753594 - DNA, 120 bp, Artificial Sequence
  ENSG00000212901_3 (sequence is synthesized)
ggttccgtgaggtggctgcccaatgtcctctgcaccatctgggcttcagcactcactactgcctacatcaaggctaaggccatcccaatccccggggccaagtcttgatgaatcttctta

SEQ ID NO: 753595 - DNA, 120 bp, Artificial Sequence
  ENSG00000212901_4 (sequence is synthesized)
attatttgcacatttgggtaccattggagacctcccttctgtcttttaggctatttcatcactctttgagaaataaccattttgaccatttgttaataaactttattctggcttagcaaa

SEQ ID NO: 753596 - DNA, 120 bp, Artificial Sequence
  ENSG00000212901_5 (sequence is synthesized)
cagggctcccattgattctacattatggggtccccaagccccgggttgcagagcgatacctgtccctggcctgttaggaactggatcacatggcaggagcgtccccaccggccctgccac

SEQ ID NO: 753597 - DNA, 120 bp, Artificial Sequence
  ENSG00000212907_0 (sequence is synthesized)
atgcccctcatttacataaatattatactagcatttaccatctcacttctaggaatactagtatatcgctcacacctcatatcctccctactatgcctagaaggaataatactatcgctg

SEQ ID NO: 753598 - DNA, 120 bp, Artificial Sequence
  ENSG00000212907_1 (sequence is synthesized)
cctattgccatactagtctttgccgcctgcgaagcagcggtgggcctagccctactagtctcaatctccaacacatatggcctagactacgtacataacctaaacctactccaatgctaa

SEQ ID NO: 753599 - DNA, 120 bp, Artificial Sequence
  ENSG00000212916_0 (sequence is synthesized)
tttttgccagtgtattcacactccgtgtgtgtgtggtgtgtctgtctcagtactactgtaattgatgaggcaggggctccctggccatcccagcagtgtcaccatcttttgggtagaaca

SEQ ID NO: 753600 - DNA, 120 bp, Artificial Sequence
  ENSG00000212916_1 (sequence is synthesized)
gcagacacagagatggcccactgtggacagttaactaactggctctgtttagcatgggaaaggaaggagagtcctgattttctttcaatattcctcaggtatattgatctgacccccaag

SEQ ID NO: 753601 - DNA, 120 bp, Artificial Sequence
  ENSG00000212916_2 (sequence is synthesized)
ttacataagatctgcagtgataaaaccattacccaaaaaactcactgtcttttaccacttatatcctcagcattatcatcaattgtcttaatacaaggttggtggcaaaaaacggctcac

SEQ ID NO: 753602 - DNA, 120 bp, Artificial Sequence
  ENSG00000212916_3 (sequence is synthesized)
aagtatgcatacaaaggggccaaacacattgagcagcaaaacccccaaagcagacaccgcccgagacccgctggagcgcttccgcaaatctcgcgagatagcaggcagcgatgccttttg

SEQ ID NO: 753603 - DNA, 120 bp, Artificial Sequence
  ENSG00000212916_4 (sequence is synthesized)
ctccggtttctcgtgagaccccggggcttcagcttctcgtttgcggagcccgcggcggcgtttcctggggcaacagcaatggcggcctcgctgtccgagcggctcttctcgctggagctg

SEQ ID NO: 753604 - DNA, 120 bp, Artificial Sequence
  ENSG00000212916_5 (sequence is synthesized)
ctggtggactgggtgcgtttggaagcccggctgctgccgtcccccgctgccgcagtggagcaggaggaggaagaggaggaaaaggagcagggggaggcctcgtcgccgcgcggtctgtgc

SEQ ID NO: 753605 - DNA, 120 bp, Artificial Sequence
  ENSG00000212916_6 (sequence is synthesized)
cccgccgtggccttccgcctgctggacttccccacgctgttggtttaccctcctgacggccccggcgctcccgccgccgaaccgtggcccggtgtcatccgcttcggtcgcggcaagtcc

SEQ ID NO: 753606 - DNA, 120 bp, Artificial Sequence
  ENSG00000212916_7 (sequence is synthesized)
tgcctcttccgcctgcagcctgctaccctgcactgccggctcctgcggaccccgcttgccaccttgctgctgcagctgccccctgggcgcccgacgcccaccccacagctcctgggggcc

SEQ ID NO: 753607 - DNA, 120 bp, Artificial Sequence
  ENSG00000212916_8 (sequence is synthesized)
tgcgacatttcgctggccaccgcagcgcacagggtcgtggggccggccgcctccggatgctcccaccgtcaccggggacgtttccccctgcataatcgagtgggcgagcggactggggac

SEQ ID NO: 753608 - DNA, 120 bp, Artificial Sequence
  ENSG00000212916_9 (sequence is synthesized)
attgcactggcctaccgcctgactgacctgggaagccgcctgctgagccaacttgagcggcccctcaccttcacccgcacaggaggaggagcggaggtcagtccccaaacccagcaggaa

SEQ ID NO: 753609 - DNA, 120 bp, Artificial Sequence
  ENSG00000212916_10 (sequence is synthesized)
agacagcagctgcagcagccagcctcacagccaagcccaaaagaggctgataagccgctgggggagttagaaatcccagaggcacagaaggatttgaaggaaatggttaaaagtaaggcc

SEQ ID NO: 753610 - DNA, 120 bp, Artificial Sequence
  ENSG00000212916_11 (sequence is synthesized)
gaatgtgataatgtgggttctgtggagaatggcaaaaccaattctgttgttacatgttcaggtgctggcaatgggagaaatgttagctccctaaatgaggaagtcacagaattggacatg

SEQ ID NO: 753611 - DNA, 120 bp, Artificial Sequence
  ENSG00000212916_12 (sequence is synthesized)
gagaccaatatattttgccctcctcctttgtattacactaacttgacccaagaaaaaccgccccctgcacaggctaaaatcaccattgagcctcaaatgaatgcacctgaggaaatggat

SEQ ID NO: 753612 - DNA, 120 bp, Artificial Sequence
  ENSG00000212916_13 (sequence is synthesized)
gatgcttctcctgaaaaaaagcgtgtaaatcccccagcacacaggagttgtctaaagcatccaagttctgcagcacacgaacatcctccaatgcttgtaaatcctccacatattcagaat

SEQ ID NO: 753613 - DNA, 120 bp, Artificial Sequence
  ENSG00000212916_14 (sequence is synthesized)
aatcgaattaatacaataaggcagttgcctttgttaaatgctttgttagttgagttgtccttgttatatgaccaacctgtgacaagtcctgctcatatacatcctcacctagcctggtta

SEQ ID NO: 753614 - DNA, 120 bp, Artificial Sequence
  ENSG00000212916_15 (sequence is synthesized)
tataggactgaggataagaagtcacccgaatcttctgccaaatccacatgccggtctgaagccaagaaggataagcgttctgtggggggatgtgaaaagtcagtgagtcttcagtataaa

SEQ ID NO: 753615 - DNA, 120 bp, Artificial Sequence
  ENSG00000212916_16 (sequence is synthesized)
aagaaccaaattgaaaactataaggaagataaatattctgaaaagagcagtggtgccctccataaaagagttccaaaagggaggctactttatggcttaacaaatacactaagactacgt

SEQ ID NO: 753616 - DNA, 120 bp, Artificial Sequence
  ENSG00000212916_17 (sequence is synthesized)
ttaaagctgacaaatcctgatatgttggtggtacatgaaaaaagagaactatatagaaaaagacaatcacaaatgttgggtacaaaattcagaattccgtcatccaaagttaaactatta

SEQ ID NO: 753617 - DNA, 120 bp, Artificial Sequence
  ENSG00000212916_18 (sequence is synthesized)
agctctgcagaacaaagtcagaagccacaactgcctgaagataagtatttagattcagatgcatctttcactgaaaatagtgatacctcaagacaaatcagtggagtttttgatgagccc

SEQ ID NO: 753618 - DNA, 120 bp, Artificial Sequence
  ENSG00000212916_19 (sequence is synthesized)
agcacaagtaaagaaactaaactgaaatatgcaactgaaaaaaagacagttgattgtagtaaaaatagaatcaataatgtttcattggaagaagttgtgagtcctgcaaattccattatt

SEQ ID NO: 753619 - DNA, 120 bp, Artificial Sequence
  ENSG00000212916_20 (sequence is synthesized)
ccagaaaggcttacccctacaaatattctgggaggaaatgtggaaatgaaaatccaaagtccatgtgttttccaacaggatgctgttgttgacagaattgtagataaggaaatagatatt

SEQ ID NO: 753620 - DNA, 120 bp, Artificial Sequence
  ENSG00000212916_21 (sequence is synthesized)
agacaggtcaaaaccacagataatgacattcttatggctgatataagtgacaagagaacaggtaaaaatagttgctatgaaaacatctcagaactgaagtattcagatgatttgtctagc

SEQ ID NO: 753621 - DNA, 120 bp, Artificial Sequence
  ENSG00000212916_22 (sequence is synthesized)
ccttgctattctgaagatttctgtaccagtgaggacaccagcagaagtttcaaagctcatgatagcagttcaaggacagaaaatccaaaacatagtcaatatacaagcaagtctagtgac

SEQ ID NO: 753622 - DNA, 120 bp, Artificial Sequence
  ENSG00000212916_23 (sequence is synthesized)
acaggagtgtccaaaaagaaaaatagtagtgacaggagttctatccttagcccacctttttcagccgggtcacctgtacactcatacagaaaatttcatatttcaaagactcaggataaa

SEQ ID NO: 753623 - DNA, 120 bp, Artificial Sequence
  ENSG00000212916_24 (sequence is synthesized)
agtttggaggaagcatctagtatctctgctagtgatttatcttcaacacattggactgaacaaaaagaaaaccagatagatcaaaatagtatgcacaattctgaaattacaaagagagct

SEQ ID NO: 753624 - DNA, 120 bp, Artificial Sequence
  ENSG00000212916_25 (sequence is synthesized)
caagacatctctgttaaaacaagaagtagttggaaatctttagaaaaaagccagtcaccacaaacatcccaggtgagttcttacctgccttcaaatgtgtccgaacttaatgtcctggat

SEQ ID NO: 753625 - DNA, 120 bp, Artificial Sequence
  ENSG00000212916_26 (sequence is synthesized)
agcagtacatcagatcactttgaagaaggcaatgatgatgttggttcactaaatatttccaagcaatgcaaagatatttgtgaattagtaataaataaacttccaggatacacaatgtaa

SEQ ID NO: 753626 - DNA, 120 bp, Artificial Sequence
  ENSG00000212916_27 (sequence is synthesized)
aaatacatgcttttaaaaaactttcaaggacctatgtgtactgttagtgaaaaaaattttaaagctgttttagttcatgaattatgtgaataattttttaaagaaatatgaattaacgtt

SEQ ID NO: 753627 - DNA, 120 bp, Artificial Sequence
  ENSG00000212933_0 (sequence is synthesized)
agaccagccctgtcctctgcgccccccacctgtccacactccatcatgtgccacaccagccactcttcgggctgcccaatggcctgccctggctccccgtgctgtgtccccagcacctgc

SEQ ID NO: 753628 - DNA, 120 bp, Artificial Sequence
  ENSG00000212933_1 (sequence is synthesized)
tgctgccagccagcctgctgtgtgcccagcccctgccaggtggcctgctgtgtgcctgtgagctgcaagcctgttttgtgtgtggcttccttctgcccaacctctgggtgctgccagccc

SEQ ID NO: 753629 - DNA, 120 bp, Artificial Sequence
  ENSG00000212933_2 (sequence is synthesized)
ttctgccccaccctggtctatagacctgtcacctggagcacccccactggctgctgagcaggtggcctcctatgaccctcgtaggtgcgaggtcagaagccagcaggctctctgaactcc

SEQ ID NO: 753630 - DNA, 120 bp, Artificial Sequence
  ENSG00000212935_0 (sequence is synthesized)
cgatcactcactcactccctcactcactcccacactcactcactcacgtctcccccagctcacctcctccccaccccagcatggccacgtctaccatgtccgtctgctccagcgcttact

SEQ ID NO: 753631 - DNA, 120 bp, Artificial Sequence
  ENSG00000212935_1 (sequence is synthesized)
ctgactcctggcaggtggacgcctgcccagagagctgctgtgagcccccctgctgcgccaccagctgctgcgccccggccccctgcctgaccctggtctgcaccccagtgagctgtgtgt

SEQ ID NO: 753632 - DNA, 120 bp, Artificial Sequence
  ENSG00000212935_2 (sequence is synthesized)
ccagcccctgctgccaggcggcctgtgagcccagcccctgccagtcaggctgcaccagctcctgcacgccctcgtgctgccagcagtctagctgccagccagcttgctgcacatcctccc

SEQ ID NO: 753633 - DNA, 120 bp, Artificial Sequence
  ENSG00000212935_3 (sequence is synthesized)
cctgccagcaggcctgctgcgtgcctgtctgctgcaagccagtctgctgtgtgcccgtctgctgcaagcctgtctgctgcaagcccatctgctgtgtgcccgtctgctctggggcttcct

SEQ ID NO: 753634 - DNA, 120 bp, Artificial Sequence
  ENSG00000212935_4 (sequence is synthesized)
ctcctgctgcagaccctcctcctccgtgtccctcctctgccgccccgtgtgcaggtccacctgctgtgtgcccatcccctcctgctgtgcccctgcctccacctgccagcccagctgctg

SEQ ID NO: 753635 - DNA, 120 bp, Artificial Sequence
  ENSG00000212935_5 (sequence is synthesized)
ccgcccggcctcctgcgtgtccctcctctgccgccccacgtgctcccgcctctcttccgcgtgctgcggcctctcctcaggccagaagtccagctgctgacgggcaggtcccgtttctcc

SEQ ID NO: 753636 - DNA, 120 bp, Artificial Sequence
  ENSG00000212935_6 (sequence is synthesized)
agagttgttccagggccatctctgacttccgaaaatccttgcagccctgagccctgtctgagtctcctctgcccatagccactgcacctccagccagcaatgctgagctttcatgccgat

SEQ ID NO: 753637 - DNA, 120 bp, Artificial Sequence
  ENSG00000212935_7 (sequence is synthesized)
tccctccaggcatgcatctctcccacaccctcatctccatgctggccagccggtggtcactgtgtcctgccccatgtgagtgatcagtctgtcaacaaataaagtcaccaatgtgccctc

SEQ ID NO: 753638 - DNA, 120 bp, Artificial Sequence
  ENSG00000212938_0 (sequence is synthesized)
ccaaggatgacctcaacaaccaacaccatgtgtggcagctactacagaaactacaatggtggccatggctatgggtgctgtggctacggaggcctgggctgtggttatggcggctgtggc

SEQ ID NO: 753639 - DNA, 120 bp, Artificial Sequence
  ENSG00000212938_1 (sequence is synthesized)
tatgggtgctgtggctacggaggcctgggctttggctatggaggcctggactgtggctatggaggcctgggctgtggctatggctccttctgtggctgtggctacagaggcctggactgt

SEQ ID NO: 753640 - DNA, 120 bp, Artificial Sequence
  ENSG00000212938_2 (sequence is synthesized)
ttctgtggctgtggctataggtgcggctctggctatggctccagctttggctactactattgaggacaccatgggagactctcaccctctatcctgtgacattgcaattcaccaattctg

SEQ ID NO: 753641 - DNA, 120 bp, Artificial Sequence
  ENSG00000212938_3 (sequence is synthesized)
aagcccacatgctctgagcctttcccttgattgatgatatcctgcagtggaagtctaatatgatctgttgttgatctaccatctaacccaaaaataccctgagtttccatcatgaagtgg

SEQ ID NO: 753642 - DNA, 120 bp, Artificial Sequence
  ENSG00000212938_4 (sequence is synthesized)
gataaggtgaagttcacctgtcacttctccttttatcaggatgatggtgtcacagtgactcctttgatgactttcatgctgtagtttgtttctctgctgacctaataaacacatttaatc

SEQ ID NO: 753643 - DNA, 120 bp, Artificial Sequence
  ENSG00000212993_0 (sequence is synthesized)
caaaaggtcattctctctgggtgaatccagctgacatgttgtgaggacactcaagcagctttatggaaaagcccacatggtgagcaactgaggcctcctaccaacagccaacaagaaacc

SEQ ID NO: 753644 - DNA, 120 bp, Artificial Sequence
  ENSG00000212993_1 (sequence is synthesized)
ggggcctttgccaacagccaagaaataagaatcagaaagaaggacacaccattccatagcacagaacacaagtagatggctcccatgaagaatctagcatcatggtatggcagaagcaga

SEQ ID NO: 753645 - DNA, 120 bp, Artificial Sequence
  ENSG00000212993_2 (sequence is synthesized)
atggactcaggaatcatggtgcctacactggaatttcagatcggccactgacacaatggacacattattcaacatttccaaatcttggcattcttatccacaaagtgaagataataattg

SEQ ID NO: 753646 - DNA, 120 bp, Artificial Sequence
  ENSG00000212993_3 (sequence is synthesized)
tcaattcacaggtgattatgatttaaagagattacttttgaagagttcctaacacattcagtcaacatttaatgatgcttcaggcactgtgttcattgctagtgagcgtatgacacacac

SEQ ID NO: 753647 - DNA, 120 bp, Artificial Sequence
  ENSG00000212993_4 (sequence is synthesized)
agccatacggtcacagagctttcaatgaaaagtaacataattgctcatttcaccaggcccccggcttggggcgccttccttccccatggcgggacacctggcttcggatttcgccttctc

SEQ ID NO: 753648 - DNA, 120 bp, Artificial Sequence
  ENSG00000212993_5 (sequence is synthesized)
gccccctccaggcggtgggggtgatgggccatggggggcggagccgggctgggttgatcctctgacctggctaagcttccaaggccctcctggagggccaggaatcgggccgggggttgg

SEQ ID NO: 753649 - DNA, 120 bp, Artificial Sequence
  ENSG00000212993_6 (sequence is synthesized)
gccaggctctgaggtgtgggggattcccccttgccccccgccgtatgagttatgtggggggatggcgtactgtgggcctcaggttggagtggggctagtgccccaaggcggcttggagac

SEQ ID NO: 753650 - DNA, 120 bp, Artificial Sequence
  ENSG00000212993_7 (sequence is synthesized)
ctctcagcctgagagcgaagcaggagtcggggtggagagcaactccaatggggcctccccggaaccctgcaccgtcccccctggtgccgtgaagctggagaaggagaagctagagcaaaa

SEQ ID NO: 753651 - DNA, 120 bp, Artificial Sequence
  ENSG00000212993_8 (sequence is synthesized)
cccggagaagtcccaggacatcaaagctctgcagaaagaactcgagcaatttgccaagctcctgaagcagaagaggatcaccctgggatatacacaggccgatgtggggctcatcctggg

SEQ ID NO: 753652 - DNA, 120 bp, Artificial Sequence
  ENSG00000212993_9 (sequence is synthesized)
ggttctatttgggaaggtgttcagccaaaagaccatctgccgctttgaggctctgcagcttagcttcaagaacatgtgtaagctgcggcccttgctgcagaagtgggtggaggaagctga

SEQ ID NO: 753653 - DNA, 120 bp, Artificial Sequence
  ENSG00000212993_10 (sequence is synthesized)
caacaatgaaaatcttcaggagatatgcaaagcagaaaccctcatgcaggcccgaaagagaaagcgaaccagtatcgagaaccgagtgagaggcaacctggagaatttgttcctgcagtg

SEQ ID NO: 753654 - DNA, 120 bp, Artificial Sequence
  ENSG00000212993_11 (sequence is synthesized)
cccgaaacccacactgcagatcagccacatcgcccagcagcttgggctcgagaaggatgtggtccgagtgtggttctgtaaccggcgccagaagggcaagcgatcaagcagcgactatgc

SEQ ID NO: 753655 - DNA, 120 bp, Artificial Sequence
  ENSG00000212993_12 (sequence is synthesized)
acaacgagaggattttgaggctgctgggtctcctttctcagggggaccagtgtcctttcctccggccccagggccccattttggtaccccaggctatgggagccctcacttcactgcact

SEQ ID NO: 753656 - DNA, 120 bp, Artificial Sequence
  ENSG00000212993_13 (sequence is synthesized)
gtactcctcagtccctttccctgagggggaagtctttcccccagtctccgtcatcactctgggctctcccatgcattcaaactgaggtgcctgcccttctaggaatggggaacaggggag

SEQ ID NO: 753657 - DNA, 120 bp, Artificial Sequence
  ENSG00000212993_14 (sequence is synthesized)
gggaggagctagggaaagagaacctggagtttgtggcagggcttttgggattaagttcttcattcactaaggaaggaattgggaacactaagggtgggggcaggggagtttggggcaact

SEQ ID NO: 753658 - DNA, 120 bp, Artificial Sequence
  ENSG00000212993_15 (sequence is synthesized)
aactggttggagggaaggtgaagttcaatgatgctcttgattttaatcccacatcatgtatcacttttttcttaaataaagaagcctgggacacagtaaaaaaaaaaaaaaaagaaagaa

SEQ ID NO: 753659 - DNA, 120 bp, Artificial Sequence
  ENSG00000212993_16 (sequence is synthesized)
aaagtaacataattgagtaataattttttaagtgtggtaaaatgtgtggcacgtagtaggtattcaataaatacttgcttttttcctcctttttaccttttcctagagtgctacttgatg

SEQ ID NO: 753660 - DNA, 120 bp, Artificial Sequence
  ENSG00000212993_17 (sequence is synthesized)
gtagctgtagtttttcttcaagacatcctatttgtcctgatacaaaacctcttttgaccgctaacggcatagttcggccctcaccattccctcacatattccacaaaaatgtgagcatta

SEQ ID NO: 753661 - DNA, 120 bp, Artificial Sequence
  ENSG00000212993_18 (sequence is synthesized)
tattccacaaaaatgtgagcattaaccattccccatgatacagataattcattttttaatttaattttttaaaattttatttatttacttatttattttgagaccaggttatgagactgg

SEQ ID NO: 753662 - DNA, 72 bp, Artificial Sequence
  ENSG00000212993_19 (sequence is synthesized)
cggataattttttttctttttttgaggtagtgccttcctttatagctcaggctggagtgcagtggtgtgatc

SEQ ID NO: 753663 - DNA, 120 bp, Artificial Sequence
  ENSG00000212993_20 (sequence is synthesized)
atctgcctgccttggcctcccaaagtattgggattgtaggcgtgaaccaccacgcccggccctgaaaattcatttttaaaagaacatcatatctaccttaaatgcattaagatttcacat

SEQ ID NO: 753664 - DNA, 120 bp, Artificial Sequence
  ENSG00000212993_21 (sequence is synthesized)
atatctaccttaaatgcattaagatttcacattagactcattattcatagtgaacattaggaacttaagtccactcagtaataatgcacctattcatgactcttgattcaaagatgtgca

SEQ ID NO: 753665 - DNA, 120 bp, Artificial Sequence
  ENSG00000212993_22 (sequence is synthesized)
cctatttaccctggaccagctccttggaaggacatgaaatagagggtaataatcacatctttccaaatttgctatgaaactgcatcgccaaaaactgagactcattttccgattgatgaa

SEQ ID NO: 753666 - DNA, 120 bp, Artificial Sequence
  ENSG00000212993_23 (sequence is synthesized)
tcaaatgacaacaaaatctccagggcattctgaaacccaacagggattaatgattaggcataccagtggtagttaggagacttgcccaaatttccagttttctgcagatggcatctaagt

SEQ ID NO: 753667 - DNA, 120 bp, Artificial Sequence
  ENSG00000212993_24 (sequence is synthesized)
tagaagactgtcataaatttattcatggcttggctttctgctatttgctcattggtgacacttttatatacaatggtgtttctatggctaggaaatcccagtggagatcaagaaacctgg

SEQ ID NO: 753668 - DNA, 120 bp, Artificial Sequence
  ENSG00000212993_25 (sequence is synthesized)
gttctacaaactaatggggtgacctttgattagtcctaactcccttcctaagcctcagtttctttagacatgaaatgaaagcaatggattacattgccttagactttttcctagatcgaa

SEQ ID NO: 753669 - DNA, 120 bp, Artificial Sequence
  ENSG00000212993_26 (sequence is synthesized)
aatgtgataattgtgcctttccaacaataattgataccactagtgaacattctttcttaagcacatctattaaggacttcatttatattatttttctaatctttaagcaaactctgagat

SEQ ID NO: 753670 - DNA, 120 bp, Artificial Sequence
  ENSG00000212993_27 (sequence is synthesized)
aagtgactatgatgtttattccataggtgcaaaagatttgtcaagtaactctccaaagtaaaagagagggctggagtttagactcatgactgttctgctctaacccaagtgattctggat

SEQ ID NO: 753671 - DNA, 120 bp, Artificial Sequence
  ENSG00000212993_28 (sequence is synthesized)
cccagactccccaaatgacaagttattccagaaatactcagaaaaaggagggtgccgtatgtcgcacatggaaaaatagaaaaagtaacagaatccagccaaaggattcccagaaattga

SEQ ID NO: 753672 - DNA, 120 bp, Artificial Sequence
  ENSG00000212993_29 (sequence is synthesized)
ggctcttctgttcttggcatttgcatctttggatgtgtgttttttacattgctctatgcaaaaggtatgtttcaatgtgattttttttttctcctcccatcctaccactgaggaatcaca

SEQ ID NO: 753673 - DNA, 120 bp, Artificial Sequence
  ENSG00000212993_30 (sequence is synthesized)
gggaatagactcgacacctgtgaactcaatttaccctagaaaaatgtttcagtcacacttaaaataaaaagggcatcaattagaataagaaggacactttgttgcctaggaggactgaac

SEQ ID NO: 753674 - DNA, 120 bp, Artificial Sequence
  ENSG00000212993_31 (sequence is synthesized)
ttttttggacctggggcaccttatcagcttcatttttagctctagtataatcaaaaggtcaggatctccactggaccttagaaattttttatttttcgataagattttctgaatgcctgc

SEQ ID NO: 753675 - DNA, 120 bp, Artificial Sequence
  ENSG00000212993_32 (sequence is synthesized)
catgtgtgaagggaaatgcctggacttctatgcatatgtatttcattgtctccccacatctacccaggaagacaggcacagtgagccttgcatgttgtagataaggaagctaagtctcaa

SEQ ID NO: 753676 - DNA, 120 bp, Artificial Sequence
  ENSG00000212993_33 (sequence is synthesized)
agacagagaaggaatttctcaaggtcacactgtaagtaaaaggcaaaggagggattagaaccctggatcctctttattacaccaagcctgcctcacaaggatgccaatctctcatcactt

SEQ ID NO: 753677 - DNA, 120 bp, Artificial Sequence
  ENSG00000212993_34 (sequence is synthesized)
actgggaaagacccactcctcccattcatgataaggtaatgctatccaataaaaaccccaaagcaggcataaaatatgaagtagcgaaactcaggcaggcagaaagcagagtggtttaga

SEQ ID NO: 753678 - DNA, 120 bp, Artificial Sequence
  ENSG00000212993_35 (sequence is synthesized)
catggctgctgtctgcagcagggagaagttcctggcaacatgaccctgaaaataacaatgagtgactgaagctaagaaggaagaatcttccaaggactctgaaactagatattttctcaa

SEQ ID NO: 753679 - DNA, 120 bp, Artificial Sequence
  ENSG00000212993_36 (sequence is synthesized)
gccccacctatggacaaacacaaatcatggagaaataaagatgccagtctccaggaagcaccagagttaaattcattctggaatttaactcctggcattaacagttagctgggagattaa

SEQ ID NO: 753680 - DNA, 120 bp, Artificial Sequence
  ENSG00000212993_37 (sequence is synthesized)
aacaaaccaacacacaaacacaaaaaaataatcagtggaaaaaagttaaaaaaaatcaatggacagtggtttcatagcagatggcaaagaggaatattaaaagctgtattttatttggaa

SEQ ID NO: 753681 - DNA, 120 bp, Artificial Sequence
  ENSG00000212993_38 (sequence is synthesized)
gattacaggcgcccaccaccaaaaaaaaaataacccagcctcagaggtgcttatttagcaaattcaaccttaaacctgagtgcatggaaactattgatgcagtgtccaaggtggagaaag

SEQ ID NO: 753682 - DNA, 80 bp, Artificial Sequence
  ENSG00000213015_0 (sequence is synthesized)
gccttttcccagggactccgccaacccctcgcacccccgcgcccccagtccccgcgtccccggcgccgccggcccggagc

SEQ ID NO: 753683 - DNA, 120 bp, Artificial Sequence
  ENSG00000213015_1 (sequence is synthesized)
gaagcccggggccgcccgggacctcggcccgttcctccggacccgagaggccgccgcacgggctgccgctccagatgctgctgctgccgccgcggccaccccaccctcggtcctcctctc

SEQ ID NO: 753684 - DNA, 120 bp, Artificial Sequence
  ENSG00000213015_2 (sequence is synthesized)
ggccatggacccaccgccccccaaggctccccctttccccaaggcggaaggcccctcctccactccttcctcggcggcggggccccgacccccgcggctgggccgccacctcctcatcga

SEQ ID NO: 753685 - DNA, 120 bp, Artificial Sequence
  ENSG00000213015_3 (sequence is synthesized)
tcgacgccaatggggtcccctacacatacacggtgcagctggaggaggagccccggggcccgccccagcgcgaggcgcccccaggagagcccggccctcgcaagggctacagctgcccgg

SEQ ID NO: 753686 - DNA, 120 bp, Artificial Sequence
  ENSG00000213015_4 (sequence is synthesized)
caagcccttcacgtgcggcgcctgcggcaaggccttcaagcgctccagccacctgtcgcggcatcgcgccacgcaccgcgcccgcgccgggccgccgcacacctgcccgctctgcccacg

SEQ ID NO: 753687 - DNA, 120 bp, Artificial Sequence
  ENSG00000213015_5 (sequence is synthesized)
cgccgcggagctggcgcagcacgtgcgcctccactaagctcgagacccggcctgtgctgccctgcccgtctcagggccaccaagtctgacccacacagcgtcactcactcccacacacac

SEQ ID NO: 753688 - DNA, 120 bp, Artificial Sequence
  ENSG00000213015_6 (sequence is synthesized)
cccctggctctgctgaggttactgccttaccctgggcctcagtttccccaccttccaaagggaggagcatcattccttccttaccccctttctagctgtgtgatgtagaccaaagtcgtt

SEQ ID NO: 753689 - DNA, 120 bp, Artificial Sequence
  ENSG00000213015_7 (sequence is synthesized)
gcccctccctgggcctgggaaccagtcggaactgggttccagtccagctgtgctgtgtgagcctgtgcaagtgacatgacctctctaaaccttggttttctgctctctggagcggtgaac

SEQ ID NO: 753690 - DNA, 120 bp, Artificial Sequence
  ENSG00000213015_8 (sequence is synthesized)
cggtggttgtctgcggggaagagatgataaagagcacgggcacggtctggttcatttctgtatctaccccccttccgcccacgcccccgaccctttgctcaataaacattccgcactcca

SEQ ID NO: 753691 - DNA, 120 bp, Artificial Sequence
  ENSG00000213015_9 (sequence is synthesized)
ggaaggcatttgagccattttggggtgtatagatgtagtaagacgatgggttccgtagtggggagaggtgactagacttcgaggtgctaagtgtaggaacaggatggaaaagccctagtg

SEQ ID NO: 753692 - DNA, 120 bp, Artificial Sequence
  ENSG00000213015_10 (sequence is synthesized)
aaatgtggggaattgggttagtggggctctggggaggtacctagagaggaagtgagggaggccacggaatatgaagatggggaggccctgcggcatgtagtggggacggagggccaggag

SEQ ID NO: 753693 - DNA, 120 bp, Artificial Sequence
  ENSG00000213015_11 (sequence is synthesized)
gccgatacgggggccggtgggggggtagggggcggcaaagggaggggaagtaaactgaactggggctgggcaacaggaaaaaagaagaaaccacagattagagaaatctcggcggtcagg

SEQ ID NO: 753694 - DNA, 120 bp, Artificial Sequence
  ENSG00000213015_12 (sequence is synthesized)
aggcccggggtctaagatgtaaagaggtaaacagatttagggattgattgtctgctggggtgggttgagaggagaaaagggaagaaaagtcgggggactacgtcctcagacctgacctga

SEQ ID NO: 753695 - DNA, 120 bp, Artificial Sequence
  ENSG00000213015_13 (sequence is synthesized)
gtggtgagaggtggacccaggaggagtggcaggtggtggcggggttttgcagagctcagttggaggccctctccgaggcagcttgatggaacgtgggagagccgggctggagtcacagtt

SEQ ID NO: 753696 - DNA, 120 bp, Artificial Sequence
  ENSG00000213015_14 (sequence is synthesized)
tttattttgctagggaggtagtcagtggcgcacaaagggtaacaagcagtgatagtggggatgctttccattttaggaaacttttcctaaaaggaagtggcaattttaactaatctcccc

SEQ ID NO: 753697 - DNA, 120 bp, Artificial Sequence
  ENSG00000213015_15 (sequence is synthesized)
ccggacgtgaaagtttgctgcgtagggatagggagaccgggccggattgcggggagtgagcaggttcagcagtgacggcattcttaagagtcctgcccaagtgagggacttggggtgtgg

SEQ ID NO: 753698 - DNA, 120 bp, Artificial Sequence
  ENSG00000213015_16 (sequence is synthesized)
gacagagtggcccccagggcagtgggcgttggaaactgagaggccctgcgaaggaggcttggggaggggctacggtgaccaggggacgaggtataggaagaggagggcggaaagccttga

SEQ ID NO: 753699 - DNA, 120 bp, Artificial Sequence
  ENSG00000213015_17 (sequence is synthesized)
gggtgggcttcttggatcccaattgccccagaggcacaggcctgggcatcactgtattatttcccgaggggagaaggggctatttcccatgggaagacaaagtgggatgaatagtggacc

SEQ ID NO: 753700 - DNA, 120 bp, Artificial Sequence
  ENSG00000213015_18 (sequence is synthesized)
ttgagaagagggggtggccaggaaaaggttcctgaaggaggcaggacccagactgcaggctggggagggtttgggcagccagagggaggtgagggtgctggagcgggggtcaatcggtca

SEQ ID NO: 753701 - DNA, 120 bp, Artificial Sequence
  ENSG00000213015_19 (sequence is synthesized)
ccagcctcgctggaccgttgagaggattcatcgagaccctggatatgaatatgcagtgtgaactgaagtttggggacatgagtaatcagtcacagtggcccaagatttgaggtgtaaatg

SEQ ID NO: 753702 - DNA, 120 bp, Artificial Sequence
  ENSG00000213020_0 (sequence is synthesized)
aatgctgtgtatttacttgaactcatacatcagaagatagtgatcttaacacattatgtttgggaagtttaaaatatctcttccaaatgcttgatgaaaaaggtgggaggatcacttgag

SEQ ID NO: 753703 - DNA, 120 bp, Artificial Sequence
  ENSG00000213020_1 (sequence is synthesized)
ccagggagttgaaggctgcagtgagccctgtttttgccaccacactccagcttggagaggtgaggggctgtcctctggatggcaattgatgaaggatgagtctgtgccctgaaggggaga

SEQ ID NO: 753704 - DNA, 120 bp, Artificial Sequence
  ENSG00000213020_2 (sequence is synthesized)
tcagtccagcccagctccccactgctgcctcgtgtgtggtggcttctccaggagagaggattgattcctaaagactcatgttacgtgaggaagcagctcagaagaggaaaggaaaggagc

SEQ ID NO: 753705 - DNA, 120 bp, Artificial Sequence
  ENSG00000213020_3 (sequence is synthesized)
caggcatggctcttcctcagggacgcttgactttccgggatgtggctatagaattctcattggcagagtggaaatgcctgaacccttcacagagggctttgtacagggaagtgatgttgg

SEQ ID NO: 753706 - DNA, 120 bp, Artificial Sequence
  ENSG00000213020_4 (sequence is synthesized)
agaactacaggaacctggaggctgtggatatctcttccaaatgcatgatgaaggaggtcttgtcaacagggcaaggcaatacagaagtgatccacacagggacattgcaaagacatgaaa

SEQ ID NO: 753707 - DNA, 120 bp, Artificial Sequence
  ENSG00000213020_5 (sequence is synthesized)
gtcatcacattggagatttttgcttccaggaaattgagaaagaaattcatgacattgagtttcagtgtcaagaagatgaaagaaatggccttgaagcacccatgacaaaaataaaaaagt

SEQ ID NO: 753708 - DNA, 120 bp, Artificial Sequence
  ENSG00000213020_6 (sequence is synthesized)
tgactggtagcacagaccaacatgatcacaggcatgctggaaacaagcctattaaagatcagcttggatcaagcttttattcacatctgcctgaactccacatatttcagatcaaaggtg

SEQ ID NO: 753709 - DNA, 120 bp, Artificial Sequence
  ENSG00000213020_7 (sequence is synthesized)
aaattggtaatcaacttgagaagtctactaatgatgctccctcagtttcaacattccaaagaatttcctgtaggccccaaacccagatttctaataactatgggaataatcccctgaatt

SEQ ID NO: 753710 - DNA, 120 bp, Artificial Sequence
  ENSG00000213020_8 (sequence is synthesized)
cttcattactcccacaaaaacaggaagtacacatgagagaaaaatctttccaatgtaataagagtggcaaagcctttaattgtagctcactcttaaggaaacaccagataccccatttag

SEQ ID NO: 753711 - DNA, 120 bp, Artificial Sequence
  ENSG00000213020_9 (sequence is synthesized)
gagacaaacaatataaatgtgatgtatgtggcaagctctttaatcacgagcaataccttgcatgccatgatagatgtcacactgttgagaaaccttacaagtgtaaagagtgtggcaaga

SEQ ID NO: 753712 - DNA, 120 bp, Artificial Sequence
  ENSG00000213020_10 (sequence is synthesized)
ccttcagtcaggagtcatcccttacctgccatcgtagacttcatactggagtaaaacgttacaattgtaatgagtgtggcaagatctttggtcaaaattcagcccttctaattgataagg

SEQ ID NO: 753713 - DNA, 120 bp, Artificial Sequence
  ENSG00000213020_11 (sequence is synthesized)
agcccttctaattgataaggcaattgatactggagaaaatccttacaagtgtaatgaatgtgacaaggcttttaatcaacaatcacaactttcacatcatagaattcatactggagagaa

SEQ ID NO: 753714 - DNA, 120 bp, Artificial Sequence
  ENSG00000213020_12 (sequence is synthesized)
taagagaattcatactggagagaaaccatacagatgtaaggtttgtgacacagctttcacgtggcattcacagctggctcgacatagaagaattcatactgcaaagaaaacttataaatg

SEQ ID NO: 753715 - DNA, 120 bp, Artificial Sequence
  ENSG00000213020_13 (sequence is synthesized)
ataaatgtaatgagtgtggcaagaccttcagtcacaagtcatcccttgtatgccatcatagacttcatggtggagagaaatcttacaaatgtaaggtttgtgacaaggcttttgtgtgga

SEQ ID NO: 753716 - DNA, 120 bp, Artificial Sequence
  ENSG00000213020_14 (sequence is synthesized)
gttcacaactggcaaaacatactagaattgactgtggagaaaaaccttacaagtgtaatgaatgtgggaagacctttggtcaaaattcagatcttttaattcataagtcaattcatactg

SEQ ID NO: 753717 - DNA, 120 bp, Artificial Sequence
  ENSG00000213020_15 (sequence is synthesized)
aagtcaattcatactggggagcaaccttacaaatgtgatgaatgtgaaaaggttttcagtcgtaaatcaagccttgagacacataagataggtcatactggagagaaaccatacaaatgt

SEQ ID NO: 753718 - DNA, 83 bp, Artificial Sequence
  ENSG00000213020_16 (sequence is synthesized)
gaacagcaagaccttcagtcacaggtcataccttgtatgccatcatagagttcatagtggtgagaaaccttacaagtgtaatg

SEQ ID NO: 753719 - DNA, 90 bp, Artificial Sequence
  ENSG00000213020_17 (sequence is synthesized)
gagttcatagcagcaagaccttcagtcgcaggtcatcccttcattgccatcgtagacttcatagtggtgagaaaccttacaagtgtaatg

SEQ ID NO: 753720 - DNA, 120 bp, Artificial Sequence
  ENSG00000213020_18 (sequence is synthesized)
agtgtggcaataccttccgtcactgctcatcccttatataccatcgtagacttcatactggagagaaatcttacaaatgtacaatttgtgacaaggctttcgtgcgtaattcactcctgt

SEQ ID NO: 753721 - DNA, 90 bp, Artificial Sequence
  ENSG00000213020_19 (sequence is synthesized)
acaatttgtgacaaggctttcgtgcgtaattcactcctgtcaagacataccagaattcacactgcgaaggcttttaatcaacaatcacac

SEQ ID NO: 753722 - DNA, 120 bp, Artificial Sequence
  ENSG00000213020_20 (sequence is synthesized)
agaaatgtgaagcatgtgacaaagtttccatttggaaatcacaccttaaagacataggagaatttatactggagagaaagcttacaaatgtaaggtttctgacaagacttgggagtgatt

SEQ ID NO: 753723 - DNA, 86 bp, Artificial Sequence
  ENSG00000213020_21 (sequence is synthesized)
ggcaagcagtcaacacttattcaccatcaggcaattcatggtgtagggaaacttgactaatgtaatgattgtcacaaagtcttcag

SEQ ID NO: 753724 - DNA, 120 bp, Artificial Sequence
  ENSG00000213020_22 (sequence is synthesized)
ggaaacttgactaatgtaatgattgtcacaaagtcttcagtaatgctacaacgattacaaatcattggagaatccataatgaagagagatcttacaagtgtaataaatgtggcaaatttt

SEQ ID NO: 753725 - DNA, 120 bp, Artificial Sequence
  ENSG00000213020_23 (sequence is synthesized)
tcagagatcgttcacatattgcaggtcatcggtgaactcatactggagagaaaccttacaaatgtcatgactgtgccaaggtcttcagtcaagcttcatcctatgcaaaacataggagaa

SEQ ID NO: 753726 - DNA, 120 bp, Artificial Sequence
  ENSG00000213020_24 (sequence is synthesized)
tttatacaggagagaaacctcacaagtgtgatgattgtggcaaagcctttgcttcacgttcacacgtcattagacatcagagaatctatactggacagaaatcttacaaatgtcatcagt

SEQ ID NO: 753727 - DNA, 120 bp, Artificial Sequence
  ENSG00000213020_25 (sequence is synthesized)
gtggcaaggtcttcagtccaagatcactccatgcagaacatcagaaaattcatttttgagataaccgttcccaatgaaatgagtatagcaaaccatcaagcattaattgacattggagtc

SEQ ID NO: 753728 - DNA, 120 bp, Artificial Sequence
  ENSG00000213020_26 (sequence is synthesized)
agattaacgcaaacccggaagcggatcgggtggagtgtaggtcatatcgccgcgatatctcttccaaatgcttgatgaaaaaggtgggaggatcacttgagccagggagttgaaggctgc

SEQ ID NO: 753729 - DNA, 120 bp, Artificial Sequence
  ENSG00000213020_27 (sequence is synthesized)
ttattgacattcaagtgtttatgttaagaggatggggccaggtgtggtggctccgacctgtaatcccagcacgtcgggaggccaaggcacataggtcacttgaggtcaggagtttgaaac

SEQ ID NO: 753730 - DNA, 120 bp, Artificial Sequence
  ENSG00000213020_28 (sequence is synthesized)
ctgttttttgtttcttattttctattatttttttgagccagtactttttaaagagatagtacttttttcagttagtactttttgaaagggatatatcatagtaatttttaaaagggatat

SEQ ID NO: 753731 - DNA, 68 bp, Artificial Sequence
  ENSG00000213020_29 (sequence is synthesized)
gcacggagggtcaggagatcgagactttcctggctaacagggtgaatccctgtctctactaaaaatac

SEQ ID NO: 753732 - DNA, 120 bp, Artificial Sequence
  ENSG00000213020_30 (sequence is synthesized)
tggctggcgcctgtagtcccagctactccagatgctgaggcaggagaatggcatgaacctgtgaggcggagcttgcagggagtcgagatcgcaccactgggctccagcctgggcgacaga

SEQ ID NO: 753733 - DNA, 90 bp, Artificial Sequence
  ENSG00000213020_31 (sequence is synthesized)
ctcgcctcggtacgtggtggctcatccctgcaatcagagtactttggtcgacccatgtgaactggtcacctaaggtcacaatttcaaaag

SEQ ID NO: 753734 - DNA, 82 bp, Artificial Sequence
  ENSG00000213020_32 (sequence is synthesized)
tacgtggtggctcatccctgcaatcagagtactttggtcgacccatgtgaactggtcacctaaggtcacaatttcaaaagca

SEQ ID NO: 753735 - DNA, 120 bp, Artificial Sequence
  ENSG00000213020_33 (sequence is synthesized)
ctacttgggaggctggggcatgagaattgcttaaacctaggaggtagaagttgcagtgaaccaaaattgtgccactatactgcagcctgggtggcagagtgagtctccatctcaaacaaa

SEQ ID NO: 753736 - DNA, 120 bp, Artificial Sequence
  ENSG00000213020_34 (sequence is synthesized)
caaacaaaaaataacaaaaaaagacctcaaaaatgcttttcttctcgtataatggacttccttctttttctttctggttcctcttcatttctctctttattttttatttatttatttatt

SEQ ID NO: 753737 - DNA, 120 bp, Artificial Sequence
  ENSG00000213020_35 (sequence is synthesized)
ttgcagtttgagtttgagataaatctaagttataaaagttgtatttcttaatacataatgacttctgaaagatgcctttgcagcatcctataatcagctcacatcattcgtttctgtact

SEQ ID NO: 753738 - DNA, 120 bp, Artificial Sequence
  ENSG00000213020_36 (sequence is synthesized)
tgtatattttccagttattttccggttgaccccagaattcgttagatttttttaaaaaacaatttcaaaatagttgctgttttaaattagttgcatccagttcatatcaatgtctgcatg

SEQ ID NO: 753739 - DNA, 120 bp, Artificial Sequence
  ENSG00000213020_37 (sequence is synthesized)
ctttctagtctttgttatttattgaaaacctttggtacctaaacttaagtttgattgtttcagtgtgtacttggtaaatatgtcagtggccttttaactaaacatcaaaatgtactttaa

SEQ ID NO: 753740 - DNA, 120 bp, Artificial Sequence
  ENSG00000213020_38 (sequence is synthesized)
agattaacgcaaacccggaagcggatcgggtggagtgtaggtcatatcgccgcgttgactagataacgaaggacaatgcatatatacaaaattgctgtattgcctggtgatatgcagctg

SEQ ID NO: 753741 - DNA, 120 bp, Artificial Sequence
  ENSG00000213020_39 (sequence is synthesized)
gtgcaatggtgcgatctcagctcactgcaccctccacctcctgagttcaaatgattcttttgcctcagcctccaaagtagctgagattataggcgccctccaccaggcccagctgatttt

SEQ ID NO: 753742 - DNA, 120 bp, Artificial Sequence
  ENSG00000213020_40 (sequence is synthesized)
cttttgcctcagcctccaaagtagctgagattataggcgccctccaccaggcccagctgatttttttgtattcttcgtaggatggggtttccccatgttggtcaggctgttcttgaactc

SEQ ID NO: 753743 - DNA, 71 bp, Artificial Sequence
  ENSG00000213020_41 (sequence is synthesized)
tgagccaccgtgcccagccattagccaattcttatttcttaagatgctgtgtattttctttattttatttc

SEQ ID NO: 753744 - DNA, 79 bp, Artificial Sequence
  ENSG00000213020_42 (sequence is synthesized)
tggaggctgtgggctgaagtgcaatggcacaatctgagttcaccgcaacctccacctcccggattcaaatgagagtctc

SEQ ID NO: 753745 - DNA, 62 bp, Artificial Sequence
  ENSG00000213020_43 (sequence is synthesized)
acccttcacagagggctttgtacagggaagtgatgttggagaactacaggaacctggaggct

SEQ ID NO: 753746 - DNA, 120 bp, Artificial Sequence
  ENSG00000213020_44 (sequence is synthesized)
gccaccacactccagcttggtgaggagcgtctctgcctggccacccattgtctgagatgtgaggagcctctctgcccggctgcccagtctgggaaatgaggagcacctctgcacggccgc

SEQ ID NO: 753747 - DNA, 120 bp, Artificial Sequence
  ENSG00000213020_45 (sequence is synthesized)
gtgaggagcgcctctgcccagccaccaccccgtttgggaagtgaggagcgtctcttcctggccgccccgtctaggaagtgaggagcccctctgctcggctgccctgtctgggaagtgagg

SEQ ID NO: 753748 - DNA, 65 bp, Artificial Sequence
  ENSG00000213020_46 (sequence is synthesized)
aggagcccctctgctcggctgccctaccgctgcctggcctccccgtctgggaagtgaggagtgcc

SEQ ID NO: 753749 - DNA, 120 bp, Artificial Sequence
  ENSG00000213020_47 (sequence is synthesized)
tgagccctgtttttgccaccacactccagcttggagataggagaaaactgccttatggctgtaggtgagacatgctggtggcaatactgctgtttactgcactgagatgtttgtgtaaag

SEQ ID NO: 753750 - DNA, 86 bp, Artificial Sequence
  ENSG00000213020_48 (sequence is synthesized)
tcgtgtctgagatgtgaggagcctctctgcccggctgcccagtctgggaaatgaggagcacctctgcacggccgccatcccatcta

SEQ ID NO: 753751 - DNA, 120 bp, Artificial Sequence
  ENSG00000213020_49 (sequence is synthesized)
gagaatttaacagggagagcagaggagatggagagataagagaagaggcggtaatatatagagattgaggacgattgaaagattggggagaaggagcaacaagaggttaaataaggtttg

SEQ ID NO: 753752 - DNA, 90 bp, Artificial Sequence
  ENSG00000213020_50 (sequence is synthesized)
gtctatgtagaaagaagtagacataagaaaccccattttggtctgtactaagagaaattagtctgctgcaaccctgtgctcacagaaaca

SEQ ID NO: 753753 - DNA, 65 bp, Artificial Sequence
  ENSG00000213020_51 (sequence is synthesized)
catcgccattctccagtctcgagtaccctgggacagaatacactgctccactgagacagcctgag

SEQ ID NO: 753754 - DNA, 120 bp, Artificial Sequence
  ENSG00000213020_52 (sequence is synthesized)
agggaaagacctgaccatcccccagccagacacccgtaaagggtctgtgctgaggacggttagtgaaagagatagccctctttgcagttgagataagaggaaggcctctgtctcctgctc

SEQ ID NO: 753755 - DNA, 120 bp, Artificial Sequence
  ENSG00000213020_53 (sequence is synthesized)
tccttccacatccccctctctgagatggtagagatagtgatcaataaatattgagggaactcagagacctcggctggtgcggatcctccgtatgctgagtgctggtcctctgagcccact

SEQ ID NO: 753756 - DNA, 120 bp, Artificial Sequence
  ENSG00000213020_54 (sequence is synthesized)
gctggtcctctgagcccactgttctttctctatacgttgtctctgtcttatttcttttctcagtctctcatctcacctgatgagaaatactcacaggtgtggaggggctggcccccttca

SEQ ID NO: 753757 - DNA, 71 bp, Artificial Sequence
  ENSG00000213020_55 (sequence is synthesized)
aagactcatgttacgtgaggaagcagctcagaagaggaaaggaaaggagccaggcatggctcttcctcagg

SEQ ID NO: 753758 - DNA, 120 bp, Artificial Sequence
  ENSG00000213020_56 (sequence is synthesized)
ggcctcccaaagtggtgggattacaggcttgagccaaggcgcctggcctaatgctgtgtattttcttggcctcatacatcagaagatatctcttccaaatgcatgatgaaggaggtcttg

SEQ ID NO: 753759 - DNA, 85 bp, Artificial Sequence
  ENSG00000213020_57 (sequence is synthesized)
aggtgggaggatcacttgagccagggagttgaaggctgcagtgagccctgtttttgccaccacactccagcttgtctgagatgtg

SEQ ID NO: 753760 - DNA, 120 bp, Artificial Sequence
  ENSG00000213022_0 (sequence is synthesized)
actggacgccgggtgcacgttccaggatccaggtgcccaggggtcatgaagctgggactcctctgtgctctgctctctctgctggcagggcatggctgggcagacacccgtgccatcggg

SEQ ID NO: 753761 - DNA, 120 bp, Artificial Sequence
  ENSG00000213022_1 (sequence is synthesized)
gccgaggaatgtcgccccaactcccagccttggcaggccggcctcttccaccttactcggctcttctgtggggcgaccctcatcagtgaccgctggctgctcacagctgcccactgccgc

SEQ ID NO: 753762 - DNA, 120 bp, Artificial Sequence
  ENSG00000213022_2 (sequence is synthesized)
aagccgtatctgtgggtccgccttggagagcaccacctctggaaatgggagggtccggagcagctgttccgggttacggacttcttcccccaccctggcttcaacaaggacctcagcgcc

SEQ ID NO: 753763 - DNA, 120 bp, Artificial Sequence
  ENSG00000213022_3 (sequence is synthesized)
aatgaccacaatgatgacatcatgctgatccgcctgcccaggcaggcacgtctgagtcctgctgtgcagcccctcaacctcagccagacctgtgtctccccaggcatgcagtgtctcatc

SEQ ID NO: 753764 - DNA, 120 bp, Artificial Sequence
  ENSG00000213022_4 (sequence is synthesized)
tcaggctggggggccgtgtccagccccaaggcgctgtttccagtcacactgcagtgtgccaacatcagcatcctggagaacaaactctgtcactgggcataccctggacacatctcggac

SEQ ID NO: 753765 - DNA, 120 bp, Artificial Sequence
  ENSG00000213022_5 (sequence is synthesized)
accttggcaggcgtggtgtctgggggtgctgagccctgctccagaccccggcgccccgcagtctacaccagcgtatgccactaccttgactggatccaagaaatcatggagaactgagcc

SEQ ID NO: 753766 - DNA, 120 bp, Artificial Sequence
  ENSG00000213022_6 (sequence is synthesized)
cgcgcgccacgggggcaccttggaagaccaagagaggccgaagggcacggggtagggggttctcgtagggtcccagcctcaatggttcccgccctggacctccagctgccctgactcccc

SEQ ID NO: 753767 - DNA, 120 bp, Artificial Sequence
  ENSG00000213022_7 (sequence is synthesized)
tctggacactaagactccgcccctgaggctccgccccctcacgaggtcaagcaagacacagtcgcgccccctcggaacggagcagggacacgcccttcagagcccgtctctatgacgtca

SEQ ID NO: 753768 - DNA, 120 bp, Artificial Sequence
  ENSG00000213022_8 (sequence is synthesized)
ccgacagccatcacctccttcttggaacagcacagcctgtggctccgccccaaggaaccacttacacaaaatagctccgcccctcggaactttgcccagtgggacttcccctcgggactc

SEQ ID NO: 753769 - DNA, 120 bp, Artificial Sequence
  ENSG00000213022_9 (sequence is synthesized)
caccccttgtggccccgcctccttcaccagagatctcgcccctcgtgatgtcaggggcgcagtagctccgcccacgtggagctcgggcggtgtagagctcagccccttgtggccccgtcc

SEQ ID NO: 753770 - DNA, 120 bp, Artificial Sequence
  ENSG00000213022_10 (sequence is synthesized)
tgggcgtgtgctgggtttgaatcctggcggagacctggggggaaattgagggagggtctggatacctttagagccaatgcaacggatgatttttcagtaaacgcgggaaacctcaccttc

SEQ ID NO: 753771 - DNA, 120 bp, Artificial Sequence
  ENSG00000213022_11 (sequence is synthesized)
catggaggaggaaggagatggcatggcttaccataaagaagcactggacgccgggtgcacgttccaggatccaggtgcccaggggtcatgaagctgggactcctctgtgctctgctctct

SEQ ID NO: 753772 - DNA, 120 bp, Artificial Sequence
  ENSG00000213023_0 (sequence is synthesized)
actctatgtctcctctcgttggattgtgacaccgggaggtcagggaactccaggaccttgttctctgctggattcgcagcaaccagcacagcacgtagggcgtagttggtgctggatgga

SEQ ID NO: 753773 - DNA, 120 bp, Artificial Sequence
  ENSG00000213023_1 (sequence is synthesized)
tgtttgttgaatgaatgaatgatgaatggctggcaccttgtctgctcatccctaactcctgttccttcatctgtgcagccctaatctttgtttcctcatctgtccatccctttatttgtg

SEQ ID NO: 753774 - DNA, 120 bp, Artificial Sequence
  ENSG00000213023_2 (sequence is synthesized)
catcctcattcttagccccttcactgcccttctccatctcttcctccttgttcatttgtccctgttctctgtcctctactccactcatgcccatctctgtccccttgacttacccagtcc

SEQ ID NO: 753775 - DNA, 120 bp, Artificial Sequence
  ENSG00000213023_3 (sequence is synthesized)
ctgctactatctccatccctaatttctgccctcttgtctgtctactcctaattccttttccttgtccatccctaatacctgtcaccttgtccttcttcctcgaatctccatccctaatcc

SEQ ID NO: 753776 - DNA, 120 bp, Artificial Sequence
  ENSG00000213023_4 (sequence is synthesized)
atctgcccctaatctctgtcccctttgcccatccttccttttctcggtgtctctttccacccttatctccacacctgcccaccctgcactcccattctgtttcccatctgcacccttgcc

SEQ ID NO: 753777 - DNA, 120 bp, Artificial Sequence
  ENSG00000213023_5 (sequence is synthesized)
ccatccctcccacacacaggaccagacggccaccatgtcaggagactacgaggatgacctctgccggcgggcactcatcctggtctcggacctctgtgcgcgggtccgagatgctgacac

SEQ ID NO: 753778 - DNA, 120 bp, Artificial Sequence
  ENSG00000213023_6 (sequence is synthesized)
caacgacaggtgccaggagttcaatgaccgaatccgaggctatccccggggtccagatgcagacatctccgtgagcctgctgtcggtcatcgtgacattctgtggcattgtccttctggg

SEQ ID NO: 753779 - DNA, 120 bp, Artificial Sequence
  ENSG00000213023_7 (sequence is synthesized)
tgtctctctcttcgtgtcctggaagttgtgctgggtgccctggcgggacaagggaggctcggcagtgggcggtggccccctgcgcaaagacctaggccctggtgtcgggctggcaggcct

SEQ ID NO: 753780 - DNA, 120 bp, Artificial Sequence
  ENSG00000213023_8 (sequence is synthesized)
ggtaggcggaggcgggcaccacctggcggctggcctgggtggccatcctctgctgggcggcccacaccaccatgcccatgccgcccaccatccaccctttgctgagctgctggagccagg

SEQ ID NO: 753781 - DNA, 120 bp, Artificial Sequence
  ENSG00000213023_9 (sequence is synthesized)
cagcctggggggttctgacacccctgagccctcctacttggacatggactcgtatccagaggctgcagcagcagcagtggccgctggggtcaaaccgagccaaacatcccctgagctgcc

SEQ ID NO: 753782 - DNA, 120 bp, Artificial Sequence
  ENSG00000213023_10 (sequence is synthesized)
ctctgaggggggagcaggctctgggttgctcctgctgccccccagtggtgggggcttgcccagtgcccagtcacatcagcaggtcacaagcctggcacccactaccaggtacccagccct

SEQ ID NO: 753783 - DNA, 120 bp, Artificial Sequence
  ENSG00000213023_11 (sequence is synthesized)
gccccgacccctcacccagcagactctgacctcccagccggaccccagcagtgaggagcggccacctgccctgcccttacccctgcctggaggcgaggaaaaagccaaactcattgggca

SEQ ID NO: 753784 - DNA, 120 bp, Artificial Sequence
  ENSG00000213023_12 (sequence is synthesized)
gtggccggcggagcggtgggggcccaggctctggagaggcaggcacaggggcaccctgtggccgtatcagcttcgccctgcggtacctctatggctcggaccagctggtggtgaggatcc

SEQ ID NO: 753785 - DNA, 120 bp, Artificial Sequence
  ENSG00000213023_13 (sequence is synthesized)
tgcaggccctggacctccctgccaaggactccaacggcttctcagacccctacgtcaagatctacctgctgcctgaccgcaagaaaaagtttcagaccaaggtgcacaggaagaccctga

SEQ ID NO: 753786 - DNA, 120 bp, Artificial Sequence
  ENSG00000213023_14 (sequence is synthesized)
accccgtcttcaatgagacgtttcaattctcggtgcccctggccgagctggcccaacgcaaactgcacttcagcgtctatgactttgaccgcttctcgcggcacgacctcatcggccagg

SEQ ID NO: 753787 - DNA, 120 bp, Artificial Sequence
  ENSG00000213023_15 (sequence is synthesized)
tggtgctggacaacctcctggagctggccgagcagccccctgaccgcccgctctggagggacatcgtggagggcggctcggaaaaagcagatcttggggagctcaacttctcactctgct

SEQ ID NO: 753788 - DNA, 120 bp, Artificial Sequence
  ENSG00000213023_16 (sequence is synthesized)
acctccccacggccgggcgcctcaccgtgaccatcatcaaagcctctaacctcaaagcgatggacctcactggcttctcagacccctacgtgaaggcctccctgatcagcgaggggcggc

SEQ ID NO: 753789 - DNA, 120 bp, Artificial Sequence
  ENSG00000213023_17 (sequence is synthesized)
gtctgaagaagcggaaaacctccatcaagaagaacacgctgaaccccacctataatgaggcgctggtgttcgacgtggcccccgagagcgtggagaacgtggggctcagcatcgccgtgg

SEQ ID NO: 753790 - DNA, 120 bp, Artificial Sequence
  ENSG00000213023_18 (sequence is synthesized)
tagactacgactgcatcgggcacaacgaggtgatcggcgtgtgccgtgtgggccccgacgctgccgacccgcacggccgcgagcactgggcagagatgctggccaatccccgcaagcccg

SEQ ID NO: 753791 - DNA, 120 bp, Artificial Sequence
  ENSG00000213023_19 (sequence is synthesized)
tggagcactggcatcagctagtggaggaaaagactgtgaccagcttcacaaaaggcagcaaaggactatcagagaaagagaactccgagtgaggggtctggcctaggcccgggatcggac

SEQ ID NO: 753792 - DNA, 120 bp, Artificial Sequence
  ENSG00000213023_20 (sequence is synthesized)
caggctccctcaggaccccatcctttcctgcccggaccgtgaattcatctccttgaagccataacgtccgagctgctggtgcggggcagccctggccctaggcttcctaaccctggaagc

SEQ ID NO: 753793 - DNA, 120 bp, Artificial Sequence
  ENSG00000213023_21 (sequence is synthesized)
gagaggatgagaggaggccggcccagctccttctttcagggtgggggtcattcagcctccactgtgtctgtcttttcttccctggggctccccctcgaggcgaggggccatgcatgtctg

SEQ ID NO: 753794 - DNA, 120 bp, Artificial Sequence
  ENSG00000213023_22 (sequence is synthesized)
ggggacccctgccccccaaaaccctctgtctgtctctgtctctttgctgtttgtccaagactcagtgtcccgacccttgttctcgccgtgaatgtcaatgggccaatcctctctgtcctt

SEQ ID NO: 753795 - DNA, 120 bp, Artificial Sequence
  ENSG00000213023_23 (sequence is synthesized)
tcagacacacacacacctgtgtccaccccttctgttcgccacacccctgcgtctggccggtccccccactgctgctgctatcaacgccagaataaacacactctgtgggtctcactccaa

SEQ ID NO: 753796 - DNA, 120 bp, Artificial Sequence
  ENSG00000213023_24 (sequence is synthesized)
ggcggcggcggcggcagcggcggcagcggcggctccggcccctagatcagacattctctctcattacccggcgcgtgggaacgggtccacagccccttgtccgccctagaacccccatgg

SEQ ID NO: 753797 - DNA, 120 bp, Artificial Sequence
  ENSG00000213023_25 (sequence is synthesized)
gtagtctctaagccctcaacgggagctgggggcccggaggtgggagggggtggccgggctcccagtgggtcgcctggggtcgggcagctggctcgagtagggcaagatgtgactgttaag

SEQ ID NO: 753798 - DNA, 120 bp, Artificial Sequence
  ENSG00000213023_26 (sequence is synthesized)
ggaagcctgagccctggatgtcagggtgtaaagcaggaggctccgaccggagagaaaatcagggagagttgaagaggggctgaggcaagatatcgctgaccttttccccaactgcaggaa

SEQ ID NO: 753799 - DNA, 120 bp, Artificial Sequence
  ENSG00000213023_27 (sequence is synthesized)
ctagtggaggtgagtaggggtcccacaccgacccctgacaagcacccgtgcaccctcggccccttcatccatgcaacgaacgccctgcatgttcgtgagtcgcagagccaggcgtcctag

SEQ ID NO: 753800 - DNA, 120 bp, Artificial Sequence
  ENSG00000213023_28 (sequence is synthesized)
tgggactgttgatagcatcttctgttaggatagaggtgagatgtgctgagttaaacgttctgtaggtggtcgctgctgttgttacccatgaggctaagttgaaaatagagggggctgggc

SEQ ID NO: 753801 - DNA, 120 bp, Artificial Sequence
  ENSG00000213023_29 (sequence is synthesized)
gtgagccaccgcgcctggctattggcttctctctcgggtaggtgtttgcagtggcaatgagatggtcacttggagctccaggtgtataatgctgtatctgttatgataccttcggctgaa

SEQ ID NO: 753802 - DNA, 120 bp, Artificial Sequence
  ENSG00000213024_0 (sequence is synthesized)
agctctttcactacggggcactggtgggctactgcgcaggaacaaccaagcacgaagaatcgtttagaaaaaaaaaaaacacaccctcccctggagtgctcaggcccagctgcacgcggg

SEQ ID NO: 753803 - DNA, 120 bp, Artificial Sequence
  ENSG00000213024_1 (sequence is synthesized)
ctgacaaacatcgagtctagaactctcccacccggccccgggcccagtgcgcatgcgcagccgcgcgccttcggcccaccgtactacttctgcgcctgcgcgaccgtgattccccgctcg

SEQ ID NO: 753804 - DNA, 120 bp, Artificial Sequence
  ENSG00000213024_2 (sequence is synthesized)
cgactccccaccccccagggctccctaaagagggccacgagctgcgaaagggcgggaaaggcagttggagaagaggtaagcggttactcactccatggctgcagcaaggagaggcggcgg

SEQ ID NO: 753805 - DNA, 120 bp, Artificial Sequence
  ENSG00000213024_3 (sequence is synthesized)
cggcctcggctgaagaaagaaggtgggagcggagagcgcaggcgtgaaacccaccttgtcccatccacatcaggacatcccagctggagttcaaccttcatcccttctgtggcagttagg

SEQ ID NO: 753806 - DNA, 120 bp, Artificial Sequence
  ENSG00000213024_4 (sequence is synthesized)
agactgaatcaaggtccagagaaggtggaggaatcctgatactgagcgaaatcttcccaaggctgcagacaccgacggatttgctttgggagccagagtagctgccgccaccagagtccg

SEQ ID NO: 753807 - DNA, 120 bp, Artificial Sequence
  ENSG00000213024_5 (sequence is synthesized)
gagccatgagcgggtttaattttggaggcactggggcccctacaggcgggttcacgtttggcactgcaaagacggcaacaaccacacctgctacagggttttctttctccacctctggca

SEQ ID NO: 753808 - DNA, 120 bp, Artificial Sequence
  ENSG00000213024_6 (sequence is synthesized)
ctggagggtttaattttggggctcccttccaaccagccacaagtaccccttccaccggcctgttctcacttgccacccagactccggccacacagacgacaggcttcacttttggaacag

SEQ ID NO: 753809 - DNA, 120 bp, Artificial Sequence
  ENSG00000213024_7 (sequence is synthesized)
cgactcttgcttcggggggaactggattttctttggggatcggtgcttcaaagctcaacttgagcaacacagctgccaccccagccatggcaaaccccagcggctttgggctgggcagca

SEQ ID NO: 753810 - DNA, 120 bp, Artificial Sequence
  ENSG00000213024_8 (sequence is synthesized)
gcaacctcactaatgccatatcgagcaccgtcacctccagccagggcacagcacccaccggctttgtgtttggcccctccaccacctctgtggctccagctaccacatctggaggcttct

SEQ ID NO: 753811 - DNA, 120 bp, Artificial Sequence
  ENSG00000213024_9 (sequence is synthesized)
cattcactggtggaagcacggcccaaccctccggtttcaacattggctcagcagggaattcagcccagcccacggcacctgccacgttgcccttcactccggccacgccagcagccacca

SEQ ID NO: 753812 - DNA, 120 bp, Artificial Sequence
  ENSG00000213024_10 (sequence is synthesized)
cagcaggtgccacacagccagctgctcccacacccacagccaccatcaccagcactgggcccagcctctttgcgtcaatagcaactgctccaacctcatctgccaccactggactctccc

SEQ ID NO: 753813 - DNA, 120 bp, Artificial Sequence
  ENSG00000213024_11 (sequence is synthesized)
accgccaccgccaccaccaccagcagcagcagcaccaccggctttgccttgaatttaaaaccactggcgccagccgggatccccagcaatacagcagctgccgtgaccgctccacctggc

SEQ ID NO: 753814 - DNA, 120 bp, Artificial Sequence
  ENSG00000213024_12 (sequence is synthesized)
cctggcgcagctgcaggggcggctgccagctccgccatgacctacgcgcagctggagagcctgatcaacaaatggagcctggagctagaggaccaggagcggcacttcctccagcaggcc

SEQ ID NO: 753815 - DNA, 120 bp, Artificial Sequence
  ENSG00000213024_13 (sequence is synthesized)
acccaggtcaacgcctgggaccgcacgctgatcgagaatggagaaaagatcaccagcctgcaccgcgaggtggagaaggtgaagctggaccagaagaggctggaccaggagctcgacttc

SEQ ID NO: 753816 - DNA, 120 bp, Artificial Sequence
  ENSG00000213024_14 (sequence is synthesized)
atcctgtcccagcagaaggagctggaagacctgctgagcccactggaggagttggtcaaggagcagagcgggaccatctacctgcagcacgcggatgaggagcgtgagaaaacctacaag

SEQ ID NO: 753817 - DNA, 120 bp, Artificial Sequence
  ENSG00000213024_15 (sequence is synthesized)
ctggctgagaacatcgatgcacagctcaagcgcatggcccaggatctcaaggacatcatcgagcacctgaacacgtccggggcccccgccgacaccagtgacccactgcagcagatctgc

SEQ ID NO: 753818 - DNA, 120 bp, Artificial Sequence
  ENSG00000213024_16 (sequence is synthesized)
aagatcctcaatgcgcacatggactcactgcagtggatcgaccagaactcggccctgctgcagaggaaggtggaggaggtgaccaaggtgtgcgagggccggcgcaaggagcaggagcgc

SEQ ID NO: 753819 - DNA, 120 bp, Artificial Sequence
  ENSG00000213024_17 (sequence is synthesized)
agcttccggatcacctttgactgagcgacagcagccctggggcccgcaggtccctagggagttcatgaggggaatgcgccctgttgtctgtagtttggggttgtggcaagatacttgttt

SEQ ID NO: 753820 - DNA, 120 bp, Artificial Sequence
  ENSG00000213024_18 (sequence is synthesized)
gtttgtttctttctttcacatgactgcccttgacatgatcgctgtgtgctttgcgtttttccatttaggagggtattctgggccttctgcccaggcagcagcctcatgggtgtggcttct

SEQ ID NO: 753821 - DNA, 120 bp, Artificial Sequence
  ENSG00000213024_19 (sequence is synthesized)
gtggctttcatttgagtatctttggccccttttcacctactgcgaccacccacctcatcctggctcagcctggtgatggagaagtgctgatggtcttggtcccagccagggtcgtggggg

SEQ ID NO: 753822 - DNA, 120 bp, Artificial Sequence
  ENSG00000213024_20 (sequence is synthesized)
gccagggtcgtgggggcagccactctctccaaagcatagtcataggtgtcatgaaaaaataccaaatgtaagagaacctccaagtcagggcgcagtggctcacccctgtaatctcagcac

SEQ ID NO: 753823 - DNA, 120 bp, Artificial Sequence
  ENSG00000213024_21 (sequence is synthesized)
aaaaaaagaaactcccaggagacagcagcctagttttcgagtgtgagcttgtgcttgtgaaagctaaccatgctaaccaccaaggcaaagcagcacagtgtgaatagaacagagcgggat

SEQ ID NO: 753824 - DNA, 120 bp, Artificial Sequence
  ENSG00000213024_22 (sequence is synthesized)
caagaatttcacagaagacaggtcagctgaggggcctgcacacacagggtgttgaggaaccacagatgggcgccgagaggcctgccttttgcctggcccaggctcacccccaccttgggc

SEQ ID NO: 753825 - DNA, 120 bp, Artificial Sequence
  ENSG00000213024_23 (sequence is synthesized)
ctcacctcctccaggaagccttcccagctacccgaagctcaggtggccttcttgcaggtccccgtagcaccctgagcctgtaccttgggtggcacttgttatgctatcctgtgctagccg

SEQ ID NO: 753826 - DNA, 120 bp, Artificial Sequence
  ENSG00000213024_24 (sequence is synthesized)
tttgtgcctcgtctcgctgttagattgtgagttcccatgggcagagacccactgtcgttccccgtgtgtccccagcccggtccctgtcacatttgttaaatgaaagaacaatgaagccca

SEQ ID NO: 753827 - DNA, 120 bp, Artificial Sequence
  ENSG00000213024_25 (sequence is synthesized)
gtgtaacgtcagtccacagaaatagccacagcttccagtggtggccgtagacttggctcggaacttagtggcaccagagtaactctagtcagttacagtaaaatccactgtgtgtggaag

SEQ ID NO: 753828 - DNA, 120 bp, Artificial Sequence
  ENSG00000213024_26 (sequence is synthesized)
gcagaagctagcggttgtatcccaagcatcttttgtatttgtctttatactttgctgaattctctgaaatacctattactgtatgttgcttttctaaataaatgtattgtgaaaccaaaa

SEQ ID NO: 753829 - DNA, 120 bp, Artificial Sequence
  ENSG00000213024_27 (sequence is synthesized)
tacgcaggcagaggcggcgacactgtagtgagaagagactgtgatccgaggacagggaatgaggcggccccggggactggggacagatatatactgggtggcggagcacggccctcccgg

SEQ ID NO: 753830 - DNA, 120 bp, Artificial Sequence
  ENSG00000213024_28 (sequence is synthesized)
atccttccgcgccccgccctcgcgcggccccaaccgggaggcagccgggtcccctcctcctggggatcaggggatccgagcctttccttcccactcctagggtccgggaccctcctccct

SEQ ID NO: 753831 - DNA, 120 bp, Artificial Sequence
  ENSG00000213024_29 (sequence is synthesized)
ctcagctggggatccgacctcttccctctgagccggggatccagccctctccttgtggctccggggtctggtttcctcctcctgactctaagctctggtttctttctctttctgcctctg

SEQ ID NO: 753832 - DNA, 120 bp, Artificial Sequence
  ENSG00000213024_30 (sequence is synthesized)
aggtctgggcctgcttcctcctgtgattttgaggatccagcctcattctcttcccgcagacctgcaccagttcatttctctttccctttccttgcttgcagaatttcctgccagtcactt

SEQ ID NO: 753833 - DNA, 120 bp, Artificial Sequence
  ENSG00000213024_31 (sequence is synthesized)
ttcacttcttcatcccccagctgctgactctgagaaaccctcgtgggttagagtccagcatgagtcacagcactctcccaaatacagacctgccaggatggcctcgggcaaataacttaa

SEQ ID NO: 753834 - DNA, 120 bp, Artificial Sequence
  ENSG00000213024_32 (sequence is synthesized)
gttctcttacttcatttccctatctgtaaaataagaaaaatcaactcgcctggtgggtttatgagactcaaataagacgatgtctggcaagccttatgcacagagctcaactcatacatt

SEQ ID NO: 753835 - DNA, 79 bp, Artificial Sequence
  ENSG00000213024_33 (sequence is synthesized)
tgtctggcaagccttatgcacagagctcaactcatacattcctgttcaactgttttttttttttgagacggagtctctc

SEQ ID NO: 753836 - DNA, 120 bp, Artificial Sequence
  ENSG00000213024_34 (sequence is synthesized)
tgggattacaggcgtgagccatcgctcccggcctcagcatattttattaataggaactctggggcccagtctcatttcttccttaccacttgtaagagccgcagacgttggactgtccaa

SEQ ID NO: 753837 - DNA, 120 bp, Artificial Sequence
  ENSG00000213024_35 (sequence is synthesized)
accacttgtaagagccgcagacgttggactgtccaacacctgctgtcattcttctgtctccctcatccctctaaagtgtctgtttccagctatcctcatcttccattccaaatgatgggt

SEQ ID NO: 753838 - DNA, 120 bp, Artificial Sequence
  ENSG00000213024_36 (sequence is synthesized)
gcccaggccccatcccctggcagggattcagacatcgaggccccagctgcgtccttttctccatcccttgcccttggcttcctttcaaaccgtccttcagcttccactggataggaacta

SEQ ID NO: 753839 - DNA, 120 bp, Artificial Sequence
  ENSG00000213024_37 (sequence is synthesized)
tctcccaaccctgccaaaaatggaagatctccgttttcgtttagtcacagggtagccatcttgccccttctcatgcactgggccctcctccaccagccgaggtggatgtccgtcttttct

SEQ ID NO: 753840 - DNA, 120 bp, Artificial Sequence
  ENSG00000213024_38 (sequence is synthesized)
catcactccagtctgctcgtgtcaccacaagctttcttcccttctccagtcagtcaaatccgtcttctaaggatactgctgatcatctttagggctcacgcctgtagtcctggcactttg

SEQ ID NO: 753841 - DNA, 120 bp, Artificial Sequence
  ENSG00000213024_39 (sequence is synthesized)
gaagaccagggcaacagaggaattcagcccagcccacggcacctgccacgttgcccttcactccggccacgccagcagccaccacagcaggtgccacacagccagctgctcccacaccca

SEQ ID NO: 753842 - DNA, 120 bp, Artificial Sequence
  ENSG00000213024_40 (sequence is synthesized)
aagaaggtgggagcggagagcgcaggcgtgacagggcctccctctttccatttccagcttttagagctgcttctgccttccttggctcctggctttctcacatcttcagattccaaagcg

SEQ ID NO: 753843 - DNA, 120 bp, Artificial Sequence
  ENSG00000213024_41 (sequence is synthesized)
gattccccgctcgcgactccccaccccccagggctccctaaagagggccacgagctgcgaaagggcgggaaaggcagttggagaagaggtccttaatgcaagtcggttatgcctgtaggt

SEQ ID NO: 753844 - DNA, 120 bp, Artificial Sequence
  ENSG00000213024_42 (sequence is synthesized)
tgaaaggcatcagggaggaaaatgggaccagaatgccaggtgacctaaggaggagagagagaggacagttgaaaacccacagaaatcttcccaaggctgcagacaccgacggatttgctt

SEQ ID NO: 753845 - DNA, 120 bp, Artificial Sequence
  ENSG00000213024_43 (sequence is synthesized)
gctcagcttctccctggaacctgctcccacagcatgtggcccggccctgtgcctgccctgagccctggttgtagagctgacatttgactctggctgccttgagggcagggaccgtggctt

SEQ ID NO: 753846 - DNA, 120 bp, Artificial Sequence
  ENSG00000213024_44 (sequence is synthesized)
gttactcactccatggctgcagcaaggagaggcggcggcggcctcggctgaagaaagaaggtccttaatgcaagtcggttatgcctgtaggttgaaaggcatcagggaggaaaatgggac

SEQ ID NO: 753847 - DNA, 120 bp, Artificial Sequence
  ENSG00000213024_45 (sequence is synthesized)
cagaatgccaggtgacctaaggaggagagagagaggacagttgaaaacccacaggtaatccacccacctcggcctgccagagtactgggattacaggcgcgagccaccatccctggccca

SEQ ID NO: 753848 - DNA, 120 bp, Artificial Sequence
  ENSG00000213024_46 (sequence is synthesized)
ccccaggcagggtagttatgtaagagagcaggacaggaaagcccaggccaccgccagctcccgccaggcgactgcaacagtctcctcactcctcccacacagagtctcgggcctccctct

SEQ ID NO: 753849 - DNA, 120 bp, Artificial Sequence
  ENSG00000213029_0 (sequence is synthesized)
attttatttcaaaaagtatctgaagcaaattctcagactgaactacttcttagacctcactgtaagaatattttattcaatgtctcatttatgatagatttgcaagctgctcatttttga

SEQ ID NO: 753850 - DNA, 120 bp, Artificial Sequence
  ENSG00000213030_0 (sequence is synthesized)
agtccagcacctttctcgggtcacggcctcctcctggctcccaggaccccaccataggcagaggcaggccttcctacaccctactccctgtgcctccaggctcgactagtccctagcact

SEQ ID NO: 753851 - DNA, 120 bp, Artificial Sequence
  ENSG00000213030_1 (sequence is synthesized)
cgacgactgagtctctgaggtcacttcaccgtggtctccgcctcacccttggcgctggaccagtgagaggagagggctggggcgctccgctgagccactcctgcgcccccctggccttgt

SEQ ID NO: 753852 - DNA, 120 bp, Artificial Sequence
  ENSG00000213030_2 (sequence is synthesized)
ctacctcttgccccccgaagggttagtgtcgagctcactccagcatcctacaacctcctggtggccttgccgcccccacaaccccgaggtttaaagccaggtacacgaggcaggggacac

SEQ ID NO: 753853 - DNA, 120 bp, Artificial Sequence; identical to SEQ ID NO: 144598
  ENSG00000213030_3 (sequence is synthesized)

SEQ ID NO: 753854 - DNA, 120 bp, Artificial Sequence; identical to SEQ ID NO: 144494
  ENSG00000213030_4 (sequence is synthesized)

SEQ ID NO: 753855 - DNA, 120 bp, Artificial Sequence; identical to SEQ ID NO: 144495
  ENSG00000213030_5 (sequence is synthesized)

SEQ ID NO: 753856 - DNA, 120 bp, Artificial Sequence; identical to SEQ ID NO: 696984
  ENSG00000213030_6 (sequence is synthesized)

SEQ ID NO: 753857 - DNA, 80 bp, Artificial Sequence
  ENSG00000213047_0 (sequence is synthesized)
gccgggggcgcagccgacatgggcccgccgccacggctgctgtgagcagcctctttccctgtgtggccgccggcgtgggc

SEQ ID NO: 753858 - DNA, 120 bp, Artificial Sequence
  ENSG00000213047_1 (sequence is synthesized)
caggccagcgcgcgggggccggacggacagccccacaccgacatgtaaccatggactgcaggaccaaggcaaatccagacagaacctttgacttggtgttgaaagtgaaatgtcatgcct

SEQ ID NO: 753859 - DNA, 120 bp, Artificial Sequence
  ENSG00000213047_2 (sequence is synthesized)
ctgaaaatgaagatcctgtggtattgtggaaattcccagaggactttggagaccaggaaatactacagagtgtgccaaagttctgttttccctttgacgttgaaagggtgtctcagaatc

SEQ ID NO: 753860 - DNA, 120 bp, Artificial Sequence
  ENSG00000213047_3 (sequence is synthesized)
aagttggacagcactttacctttgtactgacagacattgaaagtaaacagagatttggattctgcagactgacgtcaggaggcacaatttgtttatgcatccttagttaccttccctggt

SEQ ID NO: 753861 - DNA, 120 bp, Artificial Sequence
  ENSG00000213047_4 (sequence is synthesized)
ttgaagtgtattacaagcttctaaatactcttgcagattacttggctaaggaactggaaaatgatttgaatgaaactctcagatcactgtataaccacccagtaccaaaggcaaatactc

SEQ ID NO: 753862 - DNA, 120 bp, Artificial Sequence
  ENSG00000213047_5 (sequence is synthesized)
ctgtaaatttgagtgtgaaccaagagatatttattgcctgtgagcaagttctgaaagatcagcctgctctagtaccgcattcctacttcattgcccctgatgtaactggactcccaacaa

SEQ ID NO: 753863 - DNA, 120 bp, Artificial Sequence
  ENSG00000213047_6 (sequence is synthesized)
tacccgagagtagaaatcttacagaatattttgttgccgtggatgtgaacaacatgctgcagctgtatgccagtatgctgcatgaaaggcgcatcgtgattatctcgagcaaattaagca

SEQ ID NO: 753864 - DNA, 120 bp, Artificial Sequence
  ENSG00000213047_7 (sequence is synthesized)
ctttaactgcctgtatccatggatcagctgctcttctatacccaatgtattggcaacacatatacatcccagtgcttcctccacacctgctggactactgctgtgccccaatgccatacc

SEQ ID NO: 753865 - DNA, 120 bp, Artificial Sequence
  ENSG00000213047_8 (sequence is synthesized)
tgattggaatacactccagcctcatagagagagtgaaaaacaaatcattggaagatgttgttatgttaaatgttgatacaaacacattagaatcaccatttagtgacttgaacaacctac

SEQ ID NO: 753866 - DNA, 120 bp, Artificial Sequence
  ENSG00000213047_9 (sequence is synthesized)
gccttgaaaaataaactgaagaagcagtctacagctacgggtgatggagtagctagggcctttcttagagcacaggctgctttgtttggatcctacagagatgcactgagatacaaacct

SEQ ID NO: 753867 - DNA, 120 bp, Artificial Sequence
  ENSG00000213047_10 (sequence is synthesized)
ggtgagcccatcactttctgtgaggagagttttgtaaagcaccgctcaagcgtgatgaaacagttcctggaaactgccattaacctccagctttttaagcagtttatcgatggtcgactg

SEQ ID NO: 753868 - DNA, 120 bp, Artificial Sequence
  ENSG00000213047_11 (sequence is synthesized)
gcaaaactaaatgcaggaaggggtttctctgatgtatttgaagaagagatcacttcaggtggcttttgtggaggtaaagacaagttacaatatgattatccattttctcaataacaattt

SEQ ID NO: 753869 - DNA, 120 bp, Artificial Sequence
  ENSG00000213047_12 (sequence is synthesized)
tcttggtctttgcacttgtgtctgataaaacctatttcataaacaactaatgatttcctcctaaatatgtaatgtcttaaatacatttttcatcttataaaagctatggaattagcttat

SEQ ID NO: 753870 - DNA, 120 bp, Artificial Sequence
  ENSG00000213047_13 (sequence is synthesized)
tttgcctgatacctgttactcaaggcattaagttggcctcctgaattggcagctgttggcctcgataatctcttaatattgctggaaattagtaatacagaaatccaatcaactcatatc

SEQ ID NO: 753871 - DNA, 120 bp, Artificial Sequence
  ENSG00000213047_14 (sequence is synthesized)
ttcctgtctttccttctgaatagtagtattctctgctagaaaactactagtgatggttattactgagtatgaatttaagaactgaggttatgattggtaatacaatccaaaaagaagggt

SEQ ID NO: 753872 - DNA, 120 bp, Artificial Sequence
  ENSG00000213047_15 (sequence is synthesized)
ctgaacaccaaaattctttatacatatttaagtaactgtattattattatacagatgtctttacctttttgactttatagatcactgcagcattaagaaagtttccagtttaccattcca

SEQ ID NO: 753873 - DNA, 120 bp, Artificial Sequence
  ENSG00000213047_16 (sequence is synthesized)
taagtacaattaatccttctagtgtaaatgttcaaatactgttataattatctaggcaattaataatttacaaactgatatttttgcacgattgtagtggtgtatagtcttgacttgcag

SEQ ID NO: 753874 - DNA, 120 bp, Artificial Sequence
  ENSG00000213047_17 (sequence is synthesized)
agcattttgcttgagtccttgaaatgtcgtgttcattcattatttgctgagtgcttacaatgtattaggcactgttctaaatattaagtgtactaaataaacaaaaatccttgtattctg

SEQ ID NO: 753875 - DNA, 120 bp, Artificial Sequence
  ENSG00000213047_18 (sequence is synthesized)
ggacagtccagcttatctgccgaggattccccctggaaaagtacgccgattcgcattttgcattaagaaactggaaaactttcctgtcggtcctggcgtagcgcctcccgtgtccggggt

SEQ ID NO: 753876 - DNA, 120 bp, Artificial Sequence
  ENSG00000213047_19 (sequence is synthesized)
gcaagaaggtgcaggagccgcagcgggcggccccggtcgcaggaactgagaggcctcagctttggtggcggctaccggcggagacgggggcggcggccacgccaccgctgctgtcacaga

SEQ ID NO: 753877 - DNA, 120 bp, Artificial Sequence
  ENSG00000213047_20 (sequence is synthesized)
tggagggaacccgaggtcatatcaacaatgggtgcatacagtcaagaaaggaggtgcactgttcaacacagcaatgaccaaagcaacccctgctgtacggacagcatataaatttgcaaa

SEQ ID NO: 753878 - DNA, 120 bp, Artificial Sequence
  ENSG00000213047_21 (sequence is synthesized)
aaatcatgcaaagctgggactaaaggaagtgaagagtaaactaaaacacaaggaaaatgaagaagattatgggacctgttctagttctgtacaatatacaccagtttacaaattacacaa

SEQ ID NO: 753879 - DNA, 120 bp, Artificial Sequence
  ENSG00000213047_22 (sequence is synthesized)
tgaaaagggaggaaactcagaaaagcgtaagcttgctcaggcacgcttaaaaaggcctcttaagagccttgatggtgctctatatgatgatgaagatgatgatgacattgaaagagcaag

SEQ ID NO: 753880 - DNA, 120 bp, Artificial Sequence
  ENSG00000213047_23 (sequence is synthesized)
caagttatcttctgaagatggtgaagaagcttctgcttatctctatgagagtgatgactctgttgaaacaagagtgaagactccttactcaggtgaaatggacttactaggagagattct

SEQ ID NO: 753881 - DNA, 120 bp, Artificial Sequence
  ENSG00000213047_24 (sequence is synthesized)
tgatacattgagcacacacagctcagatcaggggaagctggcagctgcaaagagcttggatttctttagatcaatggatgacattgattacaaacctacgaataaatctaatgctcctag

SEQ ID NO: 753882 - DNA, 120 bp, Artificial Sequence
  ENSG00000213047_25 (sequence is synthesized)
tgagaataacctggctttcctctgtggtggttctggtgaccaagcagagtggaatcttgggcaagacgatagtgccctccatggcaaacacctccctccatctcctaggaagcgggtttc

SEQ ID NO: 753883 - DNA, 120 bp, Artificial Sequence
  ENSG00000213047_26 (sequence is synthesized)
ctctagtggtttgacagattctctgtttatcctgaaagaggaaaacagtaacaagcacctcggtgctgacaatgtgagtgaccctacttcaggactggatttccaactcacttcccctga

SEQ ID NO: 753884 - DNA, 120 bp, Artificial Sequence
  ENSG00000213047_27 (sequence is synthesized)
agtttcccagactgataaaggaaaaacagaaaagagggaaacactaagccagatttcagatgatctgcttatacccggtcttgggcggcattcatcgacttttgttccttgggagaaaga

SEQ ID NO: 753885 - DNA, 120 bp, Artificial Sequence
  ENSG00000213047_28 (sequence is synthesized)
agggaaagaagccaaagagacttcagaagatattggactgctccatgaagtagtgtcattatgtcatatgacatctgacttccaacaaagcttgaacatttcagacaaaaacacaaatgg

SEQ ID NO: 753886 - DNA, 120 bp, Artificial Sequence
  ENSG00000213047_29 (sequence is synthesized)
aaaccaaacttaaatcttgcatccaagcttctatggagacattttgagattcaatgcaatctgtataataaacagaattatttgtaggaatggcaactcatactatttaaattttttttt

SEQ ID NO: 753887 - DNA, 120 bp, Artificial Sequence
  ENSG00000213047_30 (sequence is synthesized)
gcatttgcaacatttttctcacttgttcatttcgaggatatatgaaatgcattgatttttaaatataaagcgaattctactgtgcttttaaatcaggtactagtgtgtatgtatgtttaa

SEQ ID NO: 753888 - DNA, 120 bp, Artificial Sequence
  ENSG00000213047_31 (sequence is synthesized)
agtatgtattgaccatgagatttcccagtgtttggtgcttaatgccgtttattttatttaagctaagaatgcatatgtaacccatgcacataaccagtagctactatactaatctggttg

SEQ ID NO: 753889 - DNA, 120 bp, Artificial Sequence
  ENSG00000213047_32 (sequence is synthesized)
agcatgaactgatcaagatatcaaaacttatcaaaactagcctgaagctgatgaaactgttaacccactaattgccttaatcttaaagctgttttttaagcatacttaaataatgtatga

SEQ ID NO: 753890 - DNA, 120 bp, Artificial Sequence
  ENSG00000213047_33 (sequence is synthesized)
aagtatgtataaagtttgaaggataagttattagtgttctgcagagcaataatgcctttttctattcatcaaatcaaggtcaaaattcatcttttcaagattaaaaagctctcttaatgg

SEQ ID NO: 753891 - DNA, 120 bp, Artificial Sequence
  ENSG00000213047_34 (sequence is synthesized)
aaatatttaatttgcttatataaagcactatagccatgttttccaaaaagtataaaaatatacacttacctttcattcagtgaaatataggaagtgctgaattacaatgtgaagttaatg

SEQ ID NO: 753892 - DNA, 120 bp, Artificial Sequence
  ENSG00000213047_35 (sequence is synthesized)
acttctgtttacaaatgagacactctaacgagttttcagtctctctgtatgcctttgctatttaggggtccaccccaagaaagccaaatacaacataaaccgtcctgacaaaaaaaaaaa

SEQ ID NO: 753893 - DNA, 120 bp, Artificial Sequence
  ENSG00000213047_36 (sequence is synthesized)
actaataattctctatcaaaatgcttcatatcatcatctcaaatttactttttaaaataattgactttgtattttagaagttttagatttacagaaaaattgcaaagatagtacagagag

SEQ ID NO: 753894 - DNA, 120 bp, Artificial Sequence
  ENSG00000213047_37 (sequence is synthesized)
aagatagtacagagagttcccatctacccctgttactaacatcttacgttactatggtacatctgccccaattagtgaaccaatattgatattccatactttattcagattttcttagtt

SEQ ID NO: 753895 - DNA, 120 bp, Artificial Sequence
  ENSG00000213047_38 (sequence is synthesized)
ttctcctaatatccattttccacatcaagatcctattcagaataccacactatattgagttggaatgtctccttaggctcctcttgcctgtgacagtttcttagactttccttatttttg

SEQ ID NO: 753896 - DNA, 120 bp, Artificial Sequence
  ENSG00000213047_39 (sequence is synthesized)
atgacattgacagctttgaagagtactgtcagataaattgtagcatgctcctctcttggagtttgttgggtatttttttcatgattagactgggattgtgggttttgaggagatgatcac

SEQ ID NO: 753897 - DNA, 120 bp, Artificial Sequence
  ENSG00000213047_40 (sequence is synthesized)
agaagtaaagtgccattttcatcaggtcatatcaagggtacgtactgtcaacatgatttgtgaatgctgacagggaccttgataacctggctgaggtagcgtttgtcactctaaagttct

SEQ ID NO: 753898 - DNA, 120 bp, Artificial Sequence
  ENSG00000213047_41 (sequence is synthesized)
gaagtatctacataaataactgggaattctgtatagaaaatttgtttcttctttctcaaattcactgttgagctttggaattcatctgagaaggaatcatgtactaattacttcatgata

SEQ ID NO: 753899 - DNA, 120 bp, Artificial Sequence
  ENSG00000213047_42 (sequence is synthesized)
gactagattaccaggcacaatcagggaaaaaagcagtgatagtatggttaaattgttattagcattttcagtatatccactttatacatccccaatcatgattttttttacatttctttt

SEQ ID NO: 753900 - DNA, 120 bp, Artificial Sequence
  ENSG00000213047_43 (sequence is synthesized)
tagaaaagatgttcaagaaatcattaaagaaccccaataagactatattctaaatatttattgaaagaatataatttcagctaaaatcctagaagagggtttgaaataatttaaagaaaa

SEQ ID NO: 753901 - DNA, 120 bp, Artificial Sequence
  ENSG00000213047_44 (sequence is synthesized)
tgaccaagtttttttaaaacctacgtttcaaaatctaaatggatatgtgttatttgggacacttattcattatgattatataagaagacaattcttgtttcccttataagtatggactgt

SEQ ID NO: 753902 - DNA, 120 bp, Artificial Sequence
  ENSG00000213047_45 (sequence is synthesized)
atacattaaggaaaacaatgtttaatccttattttttaatacagaagtctcaaggttcttgtcaaattttgcctttataagcttattacaaaattacaacttactttactgaagtttata

SEQ ID NO: 753903 - DNA, 120 bp, Artificial Sequence
  ENSG00000213047_46 (sequence is synthesized)
atggaagaagtccatatagcaaaagagctgttttaaatcagaaggaaaaaaggttactctggttgttaatctgcttggcaaatattccttcataatttgtgaaaagaatgcaaatcagca

SEQ ID NO: 753904 - DNA, 120 bp, Artificial Sequence
  ENSG00000213047_47 (sequence is synthesized)
ttttaatatgaattttgaaatgaggtatggttttttgtttgtttttttcagaactcagtctgaaaaacaactgtgagtgtagcatgggtcaaatttggtttttagtccatttgctttatc

SEQ ID NO: 753905 - DNA, 120 bp, Artificial Sequence
  ENSG00000213047_48 (sequence is synthesized)
aacatcacggcttcagaaatccaaattttgttctacttttcagccacctttcaaggtgtttggttataatactgtgttgctttgaggatatttagccactcataaataattgtctcaagg

SEQ ID NO: 753906 - DNA, 120 bp, Artificial Sequence
  ENSG00000213047_49 (sequence is synthesized)
tatttaaaagtgatttgtgccttattttaatgcaaaattagcagttttattctattttaaaaacaaaggcagaaaaacaattctgcatgttattctttaaaaacatccagaataatacta

SEQ ID NO: 753907 - DNA, 120 bp, Artificial Sequence
  ENSG00000213047_50 (sequence is synthesized)
ccaagtatttgtatttcaaaccagtaaaattttgaatattcaaagtctgctcttaaacttagacttcctagtattatggtggttatagtgagaatgaaattaaactgggtgagttccgaa

SEQ ID NO: 753908 - DNA, 120 bp, Artificial Sequence
  ENSG00000213047_51 (sequence is synthesized)
ataaaggaaagtgttatattctacagtgcccatattttctatggtaactaaatcaaatatttgtaagttcctctgctttttgaaattatttttcaaagaagcaacacctgttatacaaca

SEQ ID NO: 753909 - DNA, 120 bp, Artificial Sequence
  ENSG00000213047_52 (sequence is synthesized)
gaattgtataaactaaaaagacttttggccttggtacatagtctttatctggcctgcaatggagtcatggttctttctgaatcccactctcacttttttctttttacccttagatattgc

SEQ ID NO: 753910 - DNA, 120 bp, Artificial Sequence
  ENSG00000213047_53 (sequence is synthesized)
atccgtggtatttcaggggtatagagaaataatattggaatttaggagctatttttttaagtgaaaatattactaagtggtatcttttgatgattacctactttaatgtgtcttagaaaa

SEQ ID NO: 753911 - DNA, 120 bp, Artificial Sequence
  ENSG00000213047_54 (sequence is synthesized)
gcaccaaaacatagcatgattattttttcagttaattaaaattagttaataacatgttcatttaaaaactattcattgactttttgtaccagtcatatgcagggtacagtaactgaggat

SEQ ID NO: 753912 - DNA, 120 bp, Artificial Sequence
  ENSG00000213047_55 (sequence is synthesized)
atgcagggtacagtaactgaggatatgggaaataaaataactgacatagtccctgctctgaaggaacaaaggaaaaggaattgcaaatttttattaaaataataataataataataataa

SEQ ID NO: 753913 - DNA, 120 bp, Artificial Sequence
  ENSG00000213047_56 (sequence is synthesized)
gttttgcctggaagttattagctgagattctaacacacaaaaagttcaaaaaaaaagaacaaaaactggctgcttaatttaaagcatgctctaagtatgaaccatagtatcatttctaat

SEQ ID NO: 753914 - DNA, 120 bp, Artificial Sequence
  ENSG00000213047_57 (sequence is synthesized)
ttcattaactttctcaattattatgctaagtatattatgctgctaagatacccacatttaaggggcagatttagagactcttttagaaactgagtgtctttatcttattatcagataacc

SEQ ID NO: 753915 - DNA, 120 bp, Artificial Sequence
  ENSG00000213047_58 (sequence is synthesized)
aggctgcacagggctctctataatggaatgatgctccttttcaatacttagagccactgtactcagtttaggagtaactgaaggtgtggatgcatgttaatgggaatccaatttttacta

SEQ ID NO: 753916 - DNA, 120 bp, Artificial Sequence
  ENSG00000213047_59 (sequence is synthesized)
tttttatatgaataacagcgttctgtagaaacagtctctcccttctaaataaaaactatgtgactgctgttactagtgctattctatgcgaatatcctaataataggattcaggaattct

SEQ ID NO: 753917 - DNA, 120 bp, Artificial Sequence
  ENSG00000213047_60 (sequence is synthesized)
aatgaattgtttcttaattaaggtgaacaagtagactcctgatcaagaggagaacactgtgaatgtctcataatcaatagaccttcattctcttgtagaaaatgtggattttcaggaaaa

SEQ ID NO: 753918 - DNA, 120 bp, Artificial Sequence
  ENSG00000213047_61 (sequence is synthesized)
gactgattattttcatgaataaattttcttatacaaattccattttgtttgacataaaagaccctgaatcttaagatatttgtaaatcagaatatttaagaatgtaaaatgaatccccaa

SEQ ID NO: 753919 - DNA, 120 bp, Artificial Sequence
  ENSG00000213047_62 (sequence is synthesized)
atctagtttcctccaaagcacttcttaatgtaggaaatagtttttacaaaccctatgtcagtactaatgttcctgggtcaaacccagtaatattgttagtgtatgttgttacaccttatt

SEQ ID NO: 753920 - DNA, 120 bp, Artificial Sequence
  ENSG00000213047_63 (sequence is synthesized)
taagaggcagagtggttttgagcaagtcagttaacgtgatttgatgaagaaataaggaattatatacatttagacagaagaatattttattttgaaaataggatttcgtgcaataatttt

SEQ ID NO: 753921 - DNA, 120 bp, Artificial Sequence
  ENSG00000213047_64 (sequence is synthesized)
tcttgcataacttagttcatataaatatgtacatctgtttttctggcagatgccttaaggtcatgtttttcagtatttgagtaaatctgtatgtagcaatgttctcattgatttcagaaa

SEQ ID NO: 753922 - DNA, 120 bp, Artificial Sequence
  ENSG00000213047_65 (sequence is synthesized)
aaaatatattctttatattgttgccaggagaaatgtttttgtttatttaaaattattatggatattgtgttgttgtatcataactaactgcctcagcaacaataaatatgcaataagaaa

SEQ ID NO: 753923 - DNA, 120 bp, Artificial Sequence
  ENSG00000213047_66 (sequence is synthesized)
atcctgtaccttagattagattgacaatactgttactttaaaagaaatatatacggtacaaattgctgattctacatgtgtacatttaacagatactcagttctgcaccacctaaatcaa

SEQ ID NO: 753924 - DNA, 120 bp, Artificial Sequence
  ENSG00000213047_67 (sequence is synthesized)
aatggcatttgtatgctgatgattacatatgtggattgtagtatcctttgtgatgaatctttgataagatttataaagggcattgccaatactttttgactgtgtaaattaattttttgt

SEQ ID NO: 753925 - DNA, 120 bp, Artificial Sequence
  ENSG00000213047_68 (sequence is synthesized)
atgatgtacagtttgtttaatcttagagcttctatagatttctactttattatacttgaatgaggcagaaaagcactgtggaaaatctgtagctctggatgcaacatgcagacataccaa

SEQ ID NO: 753926 - DNA, 120 bp, Artificial Sequence
  ENSG00000213047_69 (sequence is synthesized)
aaaaataataataaagcaaggtactgaagagcaatgttaacagaatgctttatatccagaatgctatgtttttttcaagccacattttagttgaatgaagtaaagttattcaatctttta

SEQ ID NO: 753927 - DNA, 120 bp, Artificial Sequence
  ENSG00000213047_70 (sequence is synthesized)
ttttaaaatattggaaagtcacaaatgattacttctttgatatgatgaacctataagtctattcatctctgttatttcatttctcaaatgtgagccttgttgaggtccattatcaaatct

SEQ ID NO: 753928 - DNA, 120 bp, Artificial Sequence
  ENSG00000213047_71 (sequence is synthesized)
acactttggttgattatatgatgtttaggacaaggcagaatttaaaacctgcatgtttagtgcatcacatgtcaagtcaccatccttctgacagtgtaacttccataacgttattttgag

SEQ ID NO: 753929 - DNA, 120 bp, Artificial Sequence
  ENSG00000213047_72 (sequence is synthesized)
agccatttaataatcatatttgaaaaagtggatttcttgagtctgttgtagtttagtacttacagcagtgcctaaaacagcaactaatatgaactgcctgagtcctacaacataaatgca

SEQ ID NO: 753930 - DNA, 120 bp, Artificial Sequence
  ENSG00000213047_73 (sequence is synthesized)
taaagcttttttatgtaaaagccacaggaggggttcaaaattgaacttttccaaagtttatttctcttgcgttagatgaaaaactatttaaaaggactgaaaaccctgagctttttgctc

SEQ ID NO: 753931 - DNA, 120 bp, Artificial Sequence
  ENSG00000213047_74 (sequence is synthesized)
gtcttggtagcagatatctgtaaaaacctacccagaattgtgattttacttcattgttcttgcatccttgaggctacagtataaatcatctccaaacttgactactattgggaagatgtg

SEQ ID NO: 753932 - DNA, 120 bp, Artificial Sequence
  ENSG00000213047_75 (sequence is synthesized)
tataaaagcatcgctttgggaatttttttaaaaatatgcaaaaataaatattgaataaaatctacattaccataaaacacccaaaaatgcagttctaaaataaaattggtcacaattaaa

SEQ ID NO: 753933 - DNA, 120 bp, Artificial Sequence
  ENSG00000213047_76 (sequence is synthesized)
actagcgctccccctgcaccctctggccgcccgggcgcggggacctggcccccgcctcctccacagtctccgacttgcgagccgcacggcccagggcaaatccagacagaacctttgact

SEQ ID NO: 753934 - DNA, 120 bp, Artificial Sequence
  ENSG00000213047_77 (sequence is synthesized)
ggaacccgaggtcatatcaacaatgggtgcatacagtcaagaaaggaggtgcactgttcaacacagcaatgaccaaagcaacccctgctgtacggacagcatataaatttgtaagttttt

SEQ ID NO: 753935 - DNA, 120 bp, Artificial Sequence
  ENSG00000213047_78 (sequence is synthesized)
aaattaggattaatattgaccaaagcaaattcaattgttaaaattataacattgcatgcagagggtagtttcttttatataatctaaaaatggttctcattttattccaaagctatcggc

SEQ ID NO: 753936 - DNA, 120 bp, Artificial Sequence
  ENSG00000213047_79 (sequence is synthesized)
aaagttgtgcagcaaattgaaacagttattgatggggtaccattttgtaaaatgtcattatttcatttaacaacattttacattcttgctgtgtacttgcggctcaagtagaaaaaaaaa

SEQ ID NO: 753937 - DNA, 120 bp, Artificial Sequence
  ENSG00000213047_80 (sequence is synthesized)
ctggtgtttctttatgcagcaactgtagatgcatggttcttgcaaaacggtatccaattagagggtacttttatgtgtgtgctaaagtatttatcaacgactactttgctcaggagatta

SEQ ID NO: 753938 - DNA, 120 bp, Artificial Sequence
  ENSG00000213047_81 (sequence is synthesized)
gatggccccaacctgtattttcgagtaataccctttagaattcataaaagtctaagaacactttgtaaatggaatgtttcatagttcacactaaagtaaacataaactgttaagcaaaac

SEQ ID NO: 753939 - DNA, 120 bp, Artificial Sequence
  ENSG00000213047_82 (sequence is synthesized)
tttagatcacttcttctaacaaaggaaatgtacccgagaacccatgagaagtagcttcagagtatttttttttaacagtgaattctctgaggtcttggacttttaaattttatttagttt

SEQ ID NO: 753940 - DNA, 120 bp, Artificial Sequence
  ENSG00000213047_83 (sequence is synthesized)
aattgccaaaagccaaggtggagctgtgtagcattctgaggaaataaaaccacttgaagcagaggtatagtagaataaagccattctgcctccagtatttgggtggatgtatttggtact

SEQ ID NO: 753941 - DNA, 120 bp, Artificial Sequence
  ENSG00000213047_84 (sequence is synthesized)
ttgttttatgaaatgttcttttaaattttgttaaaattttgtccgctttttctacagaagtaggaatgaaatatttaacattttctgccagttcttacttatccactgtgttccagagtc

SEQ ID NO: 753942 - DNA, 120 bp, Artificial Sequence
  ENSG00000213047_85 (sequence is synthesized)
tttaatttaaatatttttgtttgccaggcttagattttcatgtgtctattaaaagagtaggaacatactcctccatgccagacatctgctatgtataagcattgattattttccccctta

SEQ ID NO: 753943 - DNA, 120 bp, Artificial Sequence
  ENSG00000213047_86 (sequence is synthesized)
tgaataaatgtatttcttttgttaagtttgttgtaggttaaaaaaaaagcatatttatgtttctcctaaaatttgggaaatcaatttatattactctatggagtatgtaacaaatgatgt

SEQ ID NO: 753944 - DNA, 120 bp, Artificial Sequence
  ENSG00000213047_87 (sequence is synthesized)
attctttaattctgaatcctgtatacagtagttacacccttatctttcattaattgctgtctgtttgtagggttttgaactattctgattattttgcaaagtttttttttttaaattacg

SEQ ID NO: 753945 - DNA, 120 bp, Artificial Sequence
  ENSG00000213047_88 (sequence is synthesized)
aatgtaatgtattgcagtcaattttgaaagaaggaaaaagatttttctttttataccaataacacaaaacatctatttttgtgtattcctttttagatttcaatatgagcttattaaatg

SEQ ID NO: 753946 - DNA, 120 bp, Artificial Sequence
  ENSG00000213047_89 (sequence is synthesized)
tggttgtaatcatatatagttttcacttaattttcaatatttgttgttgctattggtttaaattacaaaatatttcataaactgcagcagtccccaaagccccttgtaaatattcatgaa

SEQ ID NO: 753947 - DNA, 120 bp, Artificial Sequence
  ENSG00000213047_90 (sequence is synthesized)
ctcaaccataacttaatatacttgagagaattatctttcactaccatcatatgactgaatttaaatttatctaatgtgtttaactttttacaggttaaaaaatttacagatagtttttat

SEQ ID NO: 753948 - DNA, 120 bp, Artificial Sequence
  ENSG00000213047_91 (sequence is synthesized)
aagaatggtttggtttatatactcttttcatttctaagttttaatcagttatctactttttagtttactgtttctcttctgttcaatattttaaaacttattcaggaatatgaaaagata

SEQ ID NO: 753949 - DNA, 120 bp, Artificial Sequence
  ENSG00000213047_92 (sequence is synthesized)
tgacagttttattttgacttctgcattttgattgggtccttcagtgaaaaatacagtagcagaatttctaatgataaatatttaatgtaaatactgcaaataaaatataatttcttgtaa

SEQ ID NO: 753950 - DNA, 120 bp, Artificial Sequence
  ENSG00000213047_93 (sequence is synthesized)
cacagggggcaccttgcctttctggctaggtggcaaagcggtacgtgggccatcccagcaggcactagcgctccccctgcaccctctggccgcccgggcgcggggacctggcccccgcct

SEQ ID NO: 753951 - DNA, 120 bp, Artificial Sequence
  ENSG00000213047_94 (sequence is synthesized)
aattactaagttatttttcccacttttaatatctgaaataaaagggttgggtatttgcatggggtgtgagagaaatcaatgttgattctatatttaatatttttaccttttagcagttga

SEQ ID NO: 753952 - DNA, 120 bp, Artificial Sequence
  ENSG00000213047_95 (sequence is synthesized)
gattttgaatggaacatcatattccttattgtaaaagtaagatcataattaaaaagctagatgcattcattaggcagagtttctttaaacctaagtctcttcatctcatcttaatcatta

SEQ ID NO: 753953 - DNA, 120 bp, Artificial Sequence
  ENSG00000213047_96 (sequence is synthesized)
tattacaaagtaggcatttctgtctgcctagtggcatgtcttgcaaaagaatgagagagtttttgaaggcaagaagaagaagggggccaattatcggcttttgcttccctgccacctgcc

SEQ ID NO: 753954 - DNA, 120 bp, Artificial Sequence
  ENSG00000213047_97 (sequence is synthesized)
tcaactttctgaaacatttatttgttttctctaaattatttcagttttattttaatcttttctatcctgctgagggctgcaagaatgaaaacctacactgtttgtcatttgctttggcag

SEQ ID NO: 753955 - DNA, 120 bp, Artificial Sequence
  ENSG00000213047_98 (sequence is synthesized)
agcaaagactgcttacttagaattctatttgtaaattaaactgcaaacccagtttgtcataaaagacatctgatccttttgaaatgacgaaaactgtcttttgtctgtaaaggctgataa

SEQ ID NO: 753956 - DNA, 120 bp, Artificial Sequence
  ENSG00000213047_99 (sequence is synthesized)
attaagtgccagttctcttctggtctttgatcttgcggagggttgtgtgtgtgtgtgcgtgtgtctgcagcttataatgggacatattctgtatgtcacgttaaatagtctccaaaagtg

SEQ ID NO: 753957 - DNA, 120 bp, Artificial Sequence
  ENSG00000213047_100 (sequence is synthesized)
cattatttttggccttcatattccttagtacaggacaaaaatgcaaactagtactgtttctgtatatattttaatggctacttaaaaatatctttataacatagttctaagttaaaataa

SEQ ID NO: 753958 - DNA, 120 bp, Artificial Sequence
  ENSG00000213047_101 (sequence is synthesized)
cttcctttttaaaaaaacaaagcatttattctttatatggatattaaaatttgggaataaaaatgccttcagagcatatttttctgtaatattgaactactttgaaatccattattaagg

SEQ ID NO: 753959 - DNA, 120 bp, Artificial Sequence
  ENSG00000213047_102 (sequence is synthesized)
agtttgagaaagtgaatttaaaaatcctaaactcaaaaatacactaataccagccttgattgtccttctgtctaatgataggaaaaatatgattttaaagtcaaaatcagattatttatg

SEQ ID NO: 753960 - DNA, 120 bp, Artificial Sequence
  ENSG00000213047_103 (sequence is synthesized)
cccataataccgtaaaatacttgctgaccttgagacatattaaaattcaactaccttatcttactgtagtaaaacttatgctatgaatgtacaaatctaatcctaggccagtgaaaaatt

SEQ ID NO: 753961 - DNA, 120 bp, Artificial Sequence
  ENSG00000213047_104 (sequence is synthesized)
acatctttttagctcattataactagattacctcattataaaatttttgcaaaaacaaaatcacaaagaaattattagagttactcatttaaaaactaatcaaagtattattcaatggat

SEQ ID NO: 753962 - DNA, 120 bp, Artificial Sequence
  ENSG00000213047_105 (sequence is synthesized)
agagaaataattatgaaaatagaatcccaacttttaagaatgctttccttatatgcatgtacttcctaccgttaatgccttagggagaaagattgttaaaaagagaaagaagaaaaaaaa

SEQ ID NO: 753963 - DNA, 120 bp, Artificial Sequence
  ENSG00000213064_0 (sequence is synthesized)
acccggaagagccgtcaacttagcgagcgcaacaggctgccgctgaggagctggagctggtggggactgggccgcaatggacaagctgaagaaggtgctgagcgggcaggacacggagga

SEQ ID NO: 753964 - DNA, 120 bp, Artificial Sequence
  ENSG00000213064_1 (sequence is synthesized)
ccggagcggcctgtccgaggttgttgaggcatcttcattaagctggagtaccaggataaaaggcttcattgcgtgttttgctataggaattctctgctcactgctgggtactgttctgct

SEQ ID NO: 753965 - DNA, 120 bp, Artificial Sequence
  ENSG00000213064_2 (sequence is synthesized)
gtgggtgcccaggaagggactacacctcttcgcagtgttttatacctttggtaatatcgcatcaattgggagtaccatcttcctcatgggaccagtgaaacagctgaagcgaatgtttga

SEQ ID NO: 753966 - DNA, 120 bp, Artificial Sequence
  ENSG00000213064_3 (sequence is synthesized)
gcctactcgtttgattgcaactatcatggtgctgttgtgttttgcacttaccctgtgttctgccttttggtggcataacaagggacttgcacttatcttctgcattttgcagtctttggc

SEQ ID NO: 753967 - DNA, 120 bp, Artificial Sequence
  ENSG00000213064_4 (sequence is synthesized)
attgacgtggtacagcctttccttcataccatttgcaagggatgctgtgaagaagtgttttgccgtgtgtcttgcataattcatggccagttttatgaagctttggaaggcactatggac

SEQ ID NO: 753968 - DNA, 120 bp, Artificial Sequence
  ENSG00000213064_5 (sequence is synthesized)
agaagctggtggacagttttgtaactatcttcgaaacctctgtcttacagacatgtgccttttatcttgcagcaatgtgttgcttgtgattcgaacatttgagggttacttttggaagca

SEQ ID NO: 753969 - DNA, 120 bp, Artificial Sequence
  ENSG00000213064_6 (sequence is synthesized)
acaatacattctcgaacctgaatgtcagtagcacaggatgagaagtgggttctgtatcttgtggagtggaatcttcctcatgtacctgtttcctctctggatgttgtcccactgaattcc

SEQ ID NO: 753970 - DNA, 120 bp, Artificial Sequence
  ENSG00000213064_7 (sequence is synthesized)
catgaatacaaacctattcagcaacagcacataagccttgggtgcaagtgattcccaggtggcaaaaggcagccccatcagagatcacgggagcaacagtaagggacagagttttggggt

SEQ ID NO: 753971 - DNA, 120 bp, Artificial Sequence
  ENSG00000213064_8 (sequence is synthesized)
ccacttgtccctcagcatggaagccatcaccgtggtcctgcatagagtgagtctgcttctactctggcatctgagaacaagtgactctgctttagacaagcccctggagagcctggccat

SEQ ID NO: 753972 - DNA, 120 bp, Artificial Sequence
  ENSG00000213064_9 (sequence is synthesized)
ggagtgaggtagaaaagaagcactttttggtggtatatgctgtttctgaatttgaatctaagcattcttggtgttctgattctgcgcctgactgtggaatgtattttctgacattaggtg

SEQ ID NO: 753973 - DNA, 120 bp, Artificial Sequence
  ENSG00000213064_10 (sequence is synthesized)
cagactctttttctcttgggttttatttcccatccctccctccctctccctgcatatctttctttatgacctcctggcactagatggggaaagaacagagcagcagcagaaaatgctgct

SEQ ID NO: 753974 - DNA, 120 bp, Artificial Sequence
  ENSG00000213064_11 (sequence is synthesized)
gttttttttttggacgagagcccataggagttgaaaaatcctgctgctctcagctatatttttttctccattatttataaatgtttgcttttaaactgattttattttccattctcccct

SEQ ID NO: 753975 - DNA, 120 bp, Artificial Sequence
  ENSG00000213064_12 (sequence is synthesized)
ggagttgggccaggggagagtggggtgggaagacagatccctgctgtgcagccagcaggaagtaggcacgcctgcccagtgacctttaaatagtcccagtgtttgcacttagcctgtgct

SEQ ID NO: 753976 - DNA, 120 bp, Artificial Sequence
  ENSG00000213064_13 (sequence is synthesized)
ggggacactggggataaactgcaggtggtctcatgtcagcctgatgcctaacctacaaagtgcttttgtgtccacgatcttacctggttcttatggagagccttgtgaggaagcagggat

SEQ ID NO: 753977 - DNA, 120 bp, Artificial Sequence
  ENSG00000213064_14 (sequence is synthesized)
tgttataccactgtgcagtcaagggaatcaaggcccacactggtttttggatccacccaaagccacagcttcagcctccttcatgaccccagagtttcctggcctgtttctggttgtgcc

SEQ ID NO: 753978 - DNA, 120 bp, Artificial Sequence
  ENSG00000213064_15 (sequence is synthesized)
tcctgtaactgcctgtgactgtttccctcgttttcatcagccaagccatctcctccctggccctccctgcccatctcttttggaagcttcttcctggatctgcaggatgttcactgtccc

SEQ ID NO: 753979 - DNA, 120 bp, Artificial Sequence
  ENSG00000213064_16 (sequence is synthesized)
ttgtgttccctttcagctcctccttgttgcctgactacgattagtgccctgtcttgtcagccagcattcctggccctccaggacctccagagtcatcctacaaatgacgtttatctggat

SEQ ID NO: 753980 - DNA, 120 bp, Artificial Sequence
  ENSG00000213064_17 (sequence is synthesized)
tgcctttctgttctttgcacagggccaactggtccactagggctcctcctctgtcactgctaaaccaaaggaagtggcctgctggttgtcccctttcttgtggctaattgctgaaccttt

SEQ ID NO: 753981 - DNA, 73 bp, Artificial Sequence
  ENSG00000213064_18 (sequence is synthesized)
gctggttgtcccctttcttgtggctaattgctgaacctttctttgtcctactgtggctaagaactctgactgg

SEQ ID NO: 753982 - DNA, 64 bp, Artificial Sequence
  ENSG00000213064_19 (sequence is synthesized)
tgatcttttcttctgaggctggggaggtgtgaacaagcctgacggggccagagagaggagctag

SEQ ID NO: 753983 - DNA, 120 bp, Artificial Sequence
  ENSG00000213064_20 (sequence is synthesized)
aggtgtgaacaagcctgacggggccagagagaggagctagtcttcccaggttctttctaggctattgatgacatccagtcatctgctcaggtcactaacctgtcctcagccaggaaagga

SEQ ID NO: 753984 - DNA, 120 bp, Artificial Sequence
  ENSG00000213064_21 (sequence is synthesized)
aattttatgctacccctctggcttttgtgggattctttcacatcccaggtgcctcttggagacagatctcagaagggctgtggtgtcagaagggacatggaggaggtcaggagggctcat

SEQ ID NO: 753985 - DNA, 120 bp, Artificial Sequence
  ENSG00000213064_22 (sequence is synthesized)
ggttccttttctttagaactgatacgaggcttggctagtcactgtgagctccagcagctccagcagcctggaataagacacctagaaggctcatccctccatgtccatgtcctttttttt

SEQ ID NO: 753986 - DNA, 120 bp, Artificial Sequence
  ENSG00000213064_23 (sequence is synthesized)
tttttagattgaacaaccatgctttgtttaaaaaataatctcagcaaactagggatacaagagaatttcctcaacctgtcgaagggcatctttaaaatatctactgctaacatcctatgt

SEQ ID NO: 753987 - DNA, 120 bp, Artificial Sequence
  ENSG00000213064_24 (sequence is synthesized)
aatgatgaaaggctgaatgttttcccctaagattgagaataagacagagatgtcaactcttaccacttctattcaacgttgtactgaaaattctagccactgcaatcatgttttaattgg

SEQ ID NO: 753988 - DNA, 120 bp, Artificial Sequence
  ENSG00000213064_25 (sequence is synthesized)
gagtagggggaaagagggagggaaggagaaaaatgaaaggcctttagattgaaaagaaatgagtaaaactgtctattcacagatattatcatctatgtagaaaaccaaatcaaatccatt

SEQ ID NO: 753989 - DNA, 120 bp, Artificial Sequence
  ENSG00000213064_26 (sequence is synthesized)
actaagttactgaaaccagcaagtgagtttcgcaacacagcaggatatataattgatatacacaaatcaattgtgtttctccatgttagaagtaaagaattaggaattgaaaatttaaaa

SEQ ID NO: 753990 - DNA, 120 bp, Artificial Sequence
  ENSG00000213064_27 (sequence is synthesized)
ataataccatttacaatagcattaaaatataaaattcttgggaataaacccgacaaactatgtggattatctgtacactgataactaaaaagcattgctaagaaaaattaagacctaagt

SEQ ID NO: 753991 - DNA, 120 bp, Artificial Sequence
  ENSG00000213064_28 (sequence is synthesized)
aaatatcttgttgataggttgagagactcaacattgttgatgttaattctttcccatattaatctatagatataatgcagtccccatccaaagccaagcaggcttttttttttttttttt

SEQ ID NO: 753992 - DNA, 120 bp, Artificial Sequence
  ENSG00000213064_29 (sequence is synthesized)
tgtagaaattaaaaactggttttaagattcacatggcatgcagatgatctagaagatccacagtaactctcctgctgtgcagctggttcctaacaggtcatggacctgtccatggcctgt

SEQ ID NO: 753993 - DNA, 120 bp, Artificial Sequence
  ENSG00000213064_30 (sequence is synthesized)
aggttgggaacctctgctacagaggatccagatttaaattcagaagaagcttcatctatttctgtagtttcattttcttgcaataactgctgcatcaaacttgaacttcgcaggattttc

SEQ ID NO: 753994 - DNA, 120 bp, Artificial Sequence
  ENSG00000213064_31 (sequence is synthesized)
tgaagctgctcaatttggccatcttgctttttaattgtatttcttaacactagaattttctatttcaagtttttgtacgtggccttgcgtctccttagtacattttatagtcgctgtaag

SEQ ID NO: 753995 - DNA, 120 bp, Artificial Sequence
  ENSG00000213064_32 (sequence is synthesized)
ttgattccatttttcttgaaattgaattctcatctgacctaatttcttccttgaatcctacatctcactttctcaatggacgcagtgacgcaatgaagcatccagcaaagcttttgttgt

SEQ ID NO: 753996 - DNA, 120 bp, Artificial Sequence
  ENSG00000213064_33 (sequence is synthesized)
tgattgtttaggacgtcaccctgtttttgttgaagttgtctcacaactacttctctttctgctttctctctttcatattgacattgtttttctttcaaatgattaactttattgatcatc

SEQ ID NO: 753997 - DNA, 120 bp, Artificial Sequence
  ENSG00000213064_34 (sequence is synthesized)
ctcttgttcttctagcaaaagacggtgctttatgcactcagcttgaagattttgtgctgtagcatcacatttggcttgactatcaattactgttttttcttgattgtcagctttgttgtg

SEQ ID NO: 753998 - DNA, 120 bp, Artificial Sequence
  ENSG00000213064_35 (sequence is synthesized)
aacatcatccagttgctgttgaagcaacatattttgtcttcgtagttgacataatcttacttgcttttctgtgcatttttctactttatcttggccacttgtgtacattttttcaatgtc

SEQ ID NO: 753999 - DNA, 120 bp, Artificial Sequence
  ENSG00000213064_36 (sequence is synthesized)
cttcatttgacaccgtttggtttagctctctttgtatgtgttcaaaaaccaaagcgttttctttcagagcctctcttgtgttatggagctcagttttgaggcacctggacttactctcag

SEQ ID NO: 754000 - DNA, 120 bp, Artificial Sequence
  ENSG00000213064_37 (sequence is synthesized)
ctttagaaagttgctgagaaagaatcagaacatgagaattcaaattttcctgtaaatgacgcaatttatctactgtgccctggaaatcaagctcttggtctctttctgttgagtgacttt

SEQ ID NO: 754001 - DNA, 120 bp, Artificial Sequence
  ENSG00000213064_38 (sequence is synthesized)
gatcatgatcatgtagagcaacattcagtctacgatggtatgattccatttcgtcagtctttgcctgctttgtttttccttctccagtttagaacggagcattgtgttctcatctgtcag

SEQ ID NO: 754002 - DNA, 120 bp, Artificial Sequence
  ENSG00000213064_39 (sequence is synthesized)
agcagtaagctgtccactataatgggctatcgtttttgttgatttttccccattctgttttagagccttttgaaggtcttcatgctttctttttataatttcaatgtcttttaagtattt

SEQ ID NO: 754003 - DNA, 120 bp, Artificial Sequence
  ENSG00000213064_40 (sequence is synthesized)
cttttccaggatttgattttttattgtgtgtatttccagcctgagcctggcaatttcatcttgcatcaaatggtttttatgcaacaggtcttcttctttttcatgactatcagaaatctc

SEQ ID NO: 754004 - DNA, 120 bp, Artificial Sequence
  ENSG00000213064_41 (sequence is synthesized)
aaactgcagagttcttgttcccattcaagtttttgatattctgtgatatttcttttttttcagatagtctcttttgtagtacactagtctttttcattttttaatttttactgtaagtca

SEQ ID NO: 754005 - DNA, 120 bp, Artificial Sequence
  ENSG00000213064_42 (sequence is synthesized)
ctcagtgattatctttaagttccactgatcttttacataaataaactgcatttttaattttctttttttatatgagattctggaaatacttctttttttaaattatactttaagttctgg

SEQ ID NO: 754006 - DNA, 120 bp, Artificial Sequence
  ENSG00000213064_43 (sequence is synthesized)
ggtacatgtgcagaacatgcgggtttgttacataggtatacatgtaatgttatccctcccctagcccccacccccggacaggccccggtatgtgatgttcccctcccttttccatgtgtt

SEQ ID NO: 754007 - DNA, 60 bp, Artificial Sequence
  ENSG00000213064_44 (sequence is synthesized)
ctgtcctttccagcatctgtggccaccatgccactttttaatgattgccattctaactgg

SEQ ID NO: 754008 - DNA, 120 bp, Artificial Sequence
  ENSG00000213064_45 (sequence is synthesized)
ttcttttgagaagtgtctatccttcgcccacttttcgatggggttgttttgctcttataaatttgtttaagttctatgtagattctggatcttagccctttgtcagatggatagattgca

SEQ ID NO: 754009 - DNA, 60 bp, Artificial Sequence
  ENSG00000213064_46 (sequence is synthesized)
ataaatttccctctacacactgctttaattttgaaatggagttttgctcagtttcccagg

SEQ ID NO: 754010 - DNA, 120 bp, Artificial Sequence
  ENSG00000213064_47 (sequence is synthesized)
cctttttaatgcctggattgactttgtgggacatgaggccaaggtaccttttaagatgtcacctgtatagcatactagtagtgaatgtaggctttgaagtcagatgcatctggctgtgag

SEQ ID NO: 754011 - DNA, 120 bp, Artificial Sequence
  ENSG00000213064_48 (sequence is synthesized)
ctgtgactagtcatatactagttgtgtcattttgaacaggttacctaacctctggctcctcagtttgttcatctgtttaaaaattgtgggaataacagttcctgctgggtcattgcaaga

SEQ ID NO: 754012 - DNA, 120 bp, Artificial Sequence
  ENSG00000213064_49 (sequence is synthesized)
tgtcagtgagacgtgtcaagtgcttagaatagggcttggcataagtagagtctcagtagggtaggtgttatttaatcccagaaataactgacaactttggaagatgagagtgaatgtctc

SEQ ID NO: 754013 - DNA, 120 bp, Artificial Sequence
  ENSG00000213064_50 (sequence is synthesized)
cgatcattaatttatttaacaaatacttatctagtactatgtgcccggcgctgtagacactgccatgttttatctcattcaatattcacagtgactgcccagtgaatggtattgcctcca

SEQ ID NO: 754014 - DNA, 120 bp, Artificial Sequence
  ENSG00000213064_51 (sequence is synthesized)
tcctctgagaaggtaaagagcctatcccagaccccacgagtggaggcgtcagggaggggttcttggcaggagatgggtcttgtagaaaggcttctgctttgctttcactcacggcctgtg

SEQ ID NO: 754015 - DNA, 120 bp, Artificial Sequence
  ENSG00000213064_52 (sequence is synthesized)
gccagtttgctcagacagctcccatcaggacaccattggcagcttttgcatgaccctgcctcccagggtcttcctgcgtttttccttaagttgccttattctttggttgtttccctactt

SEQ ID NO: 754016 - DNA, 120 bp, Artificial Sequence
  ENSG00000213064_53 (sequence is synthesized)
gtttttgttagactgtgggaggaagaaatccatttcaaatctgctgaaacctgttaccaagcaacagcagtgattaaaagcaacctgatgagtgagtaaagaattagggtttcagacctg

SEQ ID NO: 754017 - DNA, 120 bp, Artificial Sequence
  ENSG00000213064_54 (sequence is synthesized)
tagttaatgatggtctctgtctccctgctgccctgcattcccttcccttccgttcactgctgggtgaaggagggcttgctgcattttggaagttaagggaaccaataaggtgactctttt

SEQ ID NO: 754018 - DNA, 120 bp, Artificial Sequence
  ENSG00000213064_55 (sequence is synthesized)
gcagattggaatatggtgctcagccagccatatggaagcactgtcctggcgtgatctgccctgggctgttggctctctgagtgctgtcttgggaggagcactgcccttcagaacagaaga

SEQ ID NO: 754019 - DNA, 120 bp, Artificial Sequence
  ENSG00000213064_56 (sequence is synthesized)
gatggcttccagtcccctctcccccttctcccagtctctctgaggctgcttgttgggtattgggcgtgctgtgtactaactcactcccgtctcttgtctcattatctgaaatgcatcccc

SEQ ID NO: 754020 - DNA, 120 bp, Artificial Sequence
  ENSG00000213064_57 (sequence is synthesized)
ttttgcagaaagggctcaaacggagccttcagttctgctcctctgcatagccgtagctcagatcctagctcaagatgtcttgtctgggaagggcaaaacatggtccccagtgtagcattt

SEQ ID NO: 754021 - DNA, 120 bp, Artificial Sequence
  ENSG00000213064_58 (sequence is synthesized)
tcactgggttgattatctcagtggtggatcatctatcacccttgtgtggtgactttgtgaattatctgcctgagtgccacttcccttccaccctaatcactgcaggctcagggagcaaga

SEQ ID NO: 754022 - DNA, 86 bp, Artificial Sequence
  ENSG00000213064_59 (sequence is synthesized)
ttcccttccaccctaatcactgcaggctcagggagcaagaaataaaatcatgaaatgcattccaaataaaattacctgagcacttt

SEQ ID NO: 754023 - DNA, 82 bp, Artificial Sequence
  ENSG00000213064_60 (sequence is synthesized)
cagcaaaaaaatcagccaggctagctggtgtgcgcctataatcccagctacttgggagggaggctgaggcacaagaattgct

SEQ ID NO: 754024 - DNA, 67 bp, Artificial Sequence
  ENSG00000213064_61 (sequence is synthesized)
ccgagatcgcaccaaaaaaaatcactttttgatacttctgttaaaatagataataaggaaccatatc

SEQ ID NO: 754025 - DNA, 120 bp, Artificial Sequence
  ENSG00000213064_62 (sequence is synthesized)
tttgatacttctgttaaaatagataataaggaaccatatcttaaagtgtggaggatctggcttggcttctgtttttgatagctctatgaaagtgacagatttgcatcatgagacttagtg

SEQ ID NO: 754026 - DNA, 120 bp, Artificial Sequence
  ENSG00000213064_63 (sequence is synthesized)
gaatgaattgggaaattgaagggcagcccagtggctatggattctattttctatgggactgtctacgccaggctttattttctctttgctcagataacttctgactagagtcgacggtag

SEQ ID NO: 754027 - DNA, 120 bp, Artificial Sequence
  ENSG00000213064_64 (sequence is synthesized)
gattataaatggtttaaaatacgtattctcaaacctcattttcagcatataaatttttaagaatcagtgtttaaaggtacgtgaaaccatttgctagatttttgtcctagtttttttttt

SEQ ID NO: 754028 - DNA, 120 bp, Artificial Sequence
  ENSG00000213064_65 (sequence is synthesized)
ttaatttaaaaatcttaagttttttttagtaagcttaagatgtccagtagtttatttgcagacagcatttttaaaaagtgaatagatgtttaactgaagttaaatacaaatttatgtctg

SEQ ID NO: 754029 - DNA, 120 bp, Artificial Sequence
  ENSG00000213064_66 (sequence is synthesized)
tgtaactcttggtaagatataacaaaacctagacatctaaattttttggaaatttttattttaaaagtttgttgggaggtaaaattgtgtgactttaccttctggttaatagttttatag

SEQ ID NO: 754030 - DNA, 120 bp, Artificial Sequence
  ENSG00000213064_67 (sequence is synthesized)
ttaagaagaaagtccagcgaagtttacttgatctcagttgcactcaagaataggggatttagttccactttggttattttcacttctaccctaaattcatagtccctgatacttaagctt

SEQ ID NO: 754031 - DNA, 120 bp, Artificial Sequence
  ENSG00000213064_68 (sequence is synthesized)
tacccttggcttaccagttttcattgcagcgagtaaatggggagtagcagagcctttgttaatgtaaattgacaaaaagtatgtccttttctagcaggagcagataaactgataatggtc

SEQ ID NO: 754032 - DNA, 120 bp, Artificial Sequence
  ENSG00000213064_69 (sequence is synthesized)
ttagaaatgtagaaaatgattttttgtagacaggatgatctgtctagattgtagcaaatgatggtacatattcacaacaaagttgtgccactacatttaataaacagccacaaacaacaa

SEQ ID NO: 754033 - DNA, 120 bp, Artificial Sequence
  ENSG00000213064_70 (sequence is synthesized)
aaggacaactggtccccgatataaatggactagctacctggacataatatccttgtgaggcatccttaaaggacaaattgcagctggtatttgggtgaatgttgttgctctgtgcctgtt

SEQ ID NO: 754034 - DNA, 120 bp, Artificial Sequence
  ENSG00000213064_71 (sequence is synthesized)
gaatgtccatgctacaagaagttatgagccttgttctaagtacagatgaaccttgtatttgtgtaatctcccaagggagagctatggtttacattcaattttttggtctttctgctatga

SEQ ID NO: 754035 - DNA, 120 bp, Artificial Sequence
  ENSG00000213064_72 (sequence is synthesized)
aacgtgtttattttgcctctgtcaatgtgtttgcaaccttaagtaaggaaagggaaaaaaaaaatagccctctgaactctgatcttttgccgcttctgtagattttgattgtgaagttgg

SEQ ID NO: 754036 - DNA, 120 bp, Artificial Sequence
  ENSG00000213064_73 (sequence is synthesized)
gagtgaggacattcaaaagcccatggtgaatgcatatgcctttagaatattgtgcctgttttaaaatgtttgagcttttaaaatacgttgttaaaacatgaatccatttttgtaattgta

SEQ ID NO: 754037 - DNA, 120 bp, Artificial Sequence
  ENSG00000213064_74 (sequence is synthesized)
taaatactcataactaattttgaatgctactgattgtgtaactgaatttttgtatccaaaaatacattcttgagtactacttttcctaccttgaaaatctatttcatttactaaatattg

SEQ ID NO: 754038 - DNA, 120 bp, Artificial Sequence
  ENSG00000213064_75 (sequence is synthesized)
ttttctttatgctaacttaactttaaaaggaatgttgccaagctgtctctcctcccccatcacaattgttagttttttttgctttctttcttcaataaatgatagcattatgatctttaa

SEQ ID NO: 754039 - DNA, 120 bp, Artificial Sequence
  ENSG00000213066_0 (sequence is synthesized)
gtcttggagaagcaagatggcggcgacggcggccgcagtggtggccgaggaggacacggagctgcgggacctgctggtgcagacgctggagaacagcggggtcctgaaccgcatcaaggc

SEQ ID NO: 754040 - DNA, 120 bp, Artificial Sequence
  ENSG00000213066_1 (sequence is synthesized)
tgaactccgagcagctgtgtttttagcactagaggagcaagaaaaagtagagaacaaaactcctttagttaatgagagcctgaaaaagtttttaaataccaaagacggtcgtttagtggc

SEQ ID NO: 754041 - DNA, 120 bp, Artificial Sequence
  ENSG00000213066_2 (sequence is synthesized)
tagtcttgttgcagaatttcttcagttttttaaccttgactttactttggctgtttttcaacctgaaactagcacactgcaaggtctcgaaggtcgagagaatttagcccgagatttagg

SEQ ID NO: 754042 - DNA, 120 bp, Artificial Sequence
  ENSG00000213066_3 (sequence is synthesized)
tataattgaagcagaaggtactgtgggtggacccttattattagaagtgatcaggcgctgtcaacagaaagaaaaagggccaaccactggggaaggtgcacttgatctatctgatgtaca

SEQ ID NO: 754043 - DNA, 120 bp, Artificial Sequence
  ENSG00000213066_4 (sequence is synthesized)
ttctccaccaaagtcaccagagggaaaaacaagtgcacagacaacaccaagtaagataccaaggtataaaggacaaggtaagaagaagacaagcgggcagaaggctggtgacaagaaggc

SEQ ID NO: 754044 - DNA, 120 bp, Artificial Sequence
  ENSG00000213066_5 (sequence is synthesized)
caatgatgaggccaatcagagtgatacaagtgtctccttgtcagaacccaagagcaaaagcagccttcacttactgtcccatgaaacaaaaattggatcttttctaagcaacagaacttt

SEQ ID NO: 754045 - DNA, 120 bp, Artificial Sequence
  ENSG00000213066_6 (sequence is synthesized)
agatggcaaagacaaagctggcctttgtccagatgaagatgatatggaaggagattctttctttgatgatcccattcctaagccagagaaaacttacggtttgaggaaggaacctaggaa

SEQ ID NO: 754046 - DNA, 120 bp, Artificial Sequence
  ENSG00000213066_7 (sequence is synthesized)
gcaagcaggaagtctggcctcgctctcggatgcaccccccttaaaaagtggactcagctccctggcgggagccccttctttaaaagactctgagagtaaaaggggaaatacagttttgaa

SEQ ID NO: 754047 - DNA, 120 bp, Artificial Sequence
  ENSG00000213066_8 (sequence is synthesized)
agatctgaaattgatcagtgataaaattggatcacttggattaggaactggagaagatgatgactatgttgatgattttaatagtaccagccatcgctcagagaaaagtgagataagtat

SEQ ID NO: 754048 - DNA, 120 bp, Artificial Sequence
  ENSG00000213066_9 (sequence is synthesized)
tggtgaagagatagaagaagacctttctgtggaaatagatgacatcaataccagtgataagcttgatgacctcacacaagatctgactgtatcccagctcagtgatgttgcggattatct

SEQ ID NO: 754049 - DNA, 120 bp, Artificial Sequence
  ENSG00000213066_10 (sequence is synthesized)
ggaagatgttgcatagacacgaagaaggaagtattctaattaacaaggacagaggactgaccggttccattttttttttttccagacaatcactcagctggaatgtctgctctctattgg

SEQ ID NO: 754050 - DNA, 120 bp, Artificial Sequence
  ENSG00000213066_11 (sequence is synthesized)
tgccttgcatttcaaaaacactgcagatattttttaaaagtaattttcattttactaaacaaaatacttcctatttgagcccatgtgtggaagatttaatattcttaatttaactgtaca

SEQ ID NO: 754051 - DNA, 120 bp, Artificial Sequence
  ENSG00000213066_12 (sequence is synthesized)
tttctttatggaaattgattatctacactcagtttcattacagggaaggaacccatgaaaacatcagtgttaagagcatgatgaaaggtgtcaataaagccgtaggatcgcgcaaccctt

SEQ ID NO: 754052 - DNA, 120 bp, Artificial Sequence
  ENSG00000213066_13 (sequence is synthesized)
tgtgtgtgtggctgctggtacgtgtgatctttgaaaaccttggctttagccctctggaatcagagcttacccaccatagtatattttgatattaggtggttctacacatagttggcaaaa

SEQ ID NO: 754053 - DNA, 120 bp, Artificial Sequence
  ENSG00000213066_14 (sequence is synthesized)
tgacttggtaaatttgtaatgctgaagtatattagtataagttaaatttgatgtgtcaactttattttgtatttccttccatttggaaggtttgttagaccattaaggttatattaaagt

SEQ ID NO: 754054 - DNA, 120 bp, Artificial Sequence
  ENSG00000213066_15 (sequence is synthesized)
actcttgtgtgtgctatttagttttgcttgttttaaagaaatctagaagtggttatgagttttaattcatagaattgtcaataacataacatttgcaatcgtcattcctcctgttatcca

SEQ ID NO: 754055 - DNA, 120 bp, Artificial Sequence
  ENSG00000213066_16 (sequence is synthesized)
tgtaagcagctttagtcgtaggttctcttcattataatttattatctgtaaagattccttgaaacttaaatgcatctgaaaccattaagcagtgcttttatttcagatctgtaagttaat

SEQ ID NO: 754056 - DNA, 120 bp, Artificial Sequence
  ENSG00000213066_17 (sequence is synthesized)
tgtattaaaatccaaattggaatgaaatagtagtaatggcctaagaccatgttcagtttgacaagctttatatactgtacataatttcattgtaacccttaaaaatagagccaataatag

SEQ ID NO: 754057 - DNA, 120 bp, Artificial Sequence
  ENSG00000213066_18 (sequence is synthesized)
aatttccacagtctcatttatacggttaaagcattattgctattatgtaggtcacggatgtttataatactaaagtattttaaaatgtgcaagtagaaaaaacagtagaaagtgatgcat

SEQ ID NO: 754058 - DNA, 120 bp, Artificial Sequence
  ENSG00000213066_19 (sequence is synthesized)
gcatatttatatataagtaaagcaggattgtgctgtttttgcactttataatttcaattaagttgcggctttttactacaagttaactttattagtaaaaggagcaaattagacctaatt

SEQ ID NO: 754059 - DNA, 120 bp, Artificial Sequence
  ENSG00000213066_20 (sequence is synthesized)
cattgatctcggttaagtgagcagactgcatgacttgtgtaatgccagtttctcatttcatattagcctaaatattacagaaattactccttgggctctaaaatgtagaggaaatgaaaa

SEQ ID NO: 754060 - DNA, 120 bp, Artificial Sequence
  ENSG00000213066_21 (sequence is synthesized)
tgtaaggattaaggctgtgtaacagaatctggctttttaaaatttaagtgaaactaagctgtaaacatcaagaggaagtaggacataaactgggccggtacagcctgggagccctgtgta

SEQ ID NO: 754061 - DNA, 120 bp, Artificial Sequence
  ENSG00000213066_22 (sequence is synthesized)
tttctgccctccgtctgtgagctgctatctcagtctccttcagctcttcatgtcttagtaaacagcaccacgtgcagatgtaatcttgttgcagtcccccagtgtggttgttataaaatg

SEQ ID NO: 754062 - DNA, 120 bp, Artificial Sequence
  ENSG00000213066_23 (sequence is synthesized)
catttctttgtaagtcatctctgtaaacagtcactttctaaaagcactatagttctggtcccctggaatctggatcacatgtatgatttatttttaatatttgataggaactaggtttca

SEQ ID NO: 754063 - DNA, 120 bp, Artificial Sequence
  ENSG00000213066_24 (sequence is synthesized)
gtgaaatgatttgaaagcatagcaggatgtggctttttaaatttatgaaactttcgaacagtagcaactgaaatttgtcacttttctgttacgcagagaatcagaccttttgataatatt

SEQ ID NO: 754064 - DNA, 120 bp, Artificial Sequence
  ENSG00000213066_25 (sequence is synthesized)
tgggagggtaaaagaaatatgccaaatatgaaacttttttgtcagcactacatacatcttttttttgcggggggcgggggggacagagtctcactgtgtcactcagactggagtacagtg

SEQ ID NO: 754065 - DNA, 79 bp, Artificial Sequence
  ENSG00000213066_26 (sequence is synthesized)
tcaggctggtcttgaactcctgacctcgttcctgccttagcctcctgtactacatccattttattgaatgattttgaat

SEQ ID NO: 754066 - DNA, 120 bp, Artificial Sequence
  ENSG00000213066_27 (sequence is synthesized)
acatccattttattgaatgattttgaatgacttaaagttcaactatgaaaaagctttcttttcacatgtactttttgattaggtattatcaacttatgaaacttgaagatgtgaagtgac

SEQ ID NO: 754067 - DNA, 120 bp, Artificial Sequence
  ENSG00000213066_28 (sequence is synthesized)
aggttttgcatgtgatgagtgttttctgttaaaaaataaatattgaaatattaacccattaaatacatttttatggtaacctatgttttacagtggagttttaaaaatgctaggtctttc

SEQ ID NO: 754068 - DNA, 120 bp, Artificial Sequence
  ENSG00000213066_29 (sequence is synthesized)
tttcattttattgataactacaaatgaataaaaagcatttattctctttgttgatattcggttgtgcttttatactttatgttggataacaacctgtgggcagttgtgtagatgccatta

SEQ ID NO: 754069 - DNA, 120 bp, Artificial Sequence
  ENSG00000213066_30 (sequence is synthesized)
gtccctgcctcatgcttgcccacagctcttcctcccctccttacttccctctcctgcccatgcaccagagctgtgccagcccactgctgcacagcctctgcacctgagcttgccaaagcc

SEQ ID NO: 754070 - DNA, 120 bp, Artificial Sequence
  ENSG00000213066_31 (sequence is synthesized)
cttcctgtctcaaggtgtgatatttgcccctccttgtctggaatgtccttcccctagaactgcatgaagctggtttatttcagtctcatgttcaaagacgcttccagacctaagggagat

SEQ ID NO: 754071 - DNA, 120 bp, Artificial Sequence
  ENSG00000213066_32 (sequence is synthesized)
agggagatgtccattctcctccctgtccctgccccaccacttgcatttaccccttttattttattcatctcagcatactctgaaatggtcttgcttattttgtgtgtgtgtgtgtgtgtg

SEQ ID NO: 754072 - DNA, 120 bp, Artificial Sequence
  ENSG00000213066_33 (sequence is synthesized)
actatgagctcgtgagaacagggattttcttttaaactgctgtgtacctggcacaacatttgtcccctagtatgagcttggcatctttggggctgtaaacaggcttgagcactgacatgg

SEQ ID NO: 754073 - DNA, 120 bp, Artificial Sequence
  ENSG00000213066_34 (sequence is synthesized)
ggcctggagaatgtggtttctggctaggcagctggaacaatctacaaaatctgaggggaaagctgtccttaccctaaacctggggaggtccctaggttcaagtctgcaggaaggggatct

SEQ ID NO: 754074 - DNA, 120 bp, Artificial Sequence
  ENSG00000213066_35 (sequence is synthesized)
ggttcaggagaaggccgtcctgtgaatttgccccacccaccaagctcagctggagcagggcctctgaaggaggtgccctctgtgtggctctgctgtggtgttggttcatgaaggacatgg

SEQ ID NO: 754075 - DNA, 120 bp, Artificial Sequence
  ENSG00000213066_36 (sequence is synthesized)
gaggggggcaggacaggagaggcagctcttcctggagaaaaacacacccagcccaagttggagccctcctgtggcattgggtggggaggattcccgccatcagttctctgtccatgggtg

SEQ ID NO: 754076 - DNA, 89 bp, Artificial Sequence
  ENSG00000213066_37 (sequence is synthesized)
gtggggaggattcccgccatcagttctctgtccatgggtgctagtctcacccctgccctccgagcagtccgtgctcccagtgtccaggt

SEQ ID NO: 754077 - DNA, 120 bp, Artificial Sequence
  ENSG00000213066_38 (sequence is synthesized)
tagtcttcctgctctaggaagggacgtgtttggggaggaaatccagggcagctacctttgtgagttgtcctaatgctgcgttcagagttccacacgttcaacaagcatctgacatttaag

SEQ ID NO: 754078 - DNA, 120 bp, Artificial Sequence
  ENSG00000213066_39 (sequence is synthesized)
gaaagtgaatgtatgtcatgaaagacagatgaacaaagaactgatcttgaagaaaatgtaatcaggaaacgagataattcaagaacaaaaacctgtgaaggactgaatgtgtcccccaaa

SEQ ID NO: 754079 - DNA, 120 bp, Artificial Sequence
  ENSG00000213066_40 (sequence is synthesized)
atgtgtatgtcgaaacctaatcccacataggatggaattaggtagggcctctggaagttgatgagatcattagcgcccttataggaggcccgggagagctgctttgccccttccagcgtg

SEQ ID NO: 754080 - DNA, 120 bp, Artificial Sequence
  ENSG00000213066_41 (sequence is synthesized)
tgaggacacagtgaggaggtgttgcctatgaggaaacaggccctcccagatggtgaacctgccggtaccttgatcttggacttaagccatctgagctgtgagccctacacttccattctt

SEQ ID NO: 754081 - DNA, 120 bp, Artificial Sequence
  ENSG00000213066_42 (sequence is synthesized)
tataaattatccagtccaaggtactttaggaacctgaatggattaagacaaacctgattatgccactccgagatttgaggtaacatttgaatctaaaagaggctatatgaaagaggttat

SEQ ID NO: 754082 - DNA, 120 bp, Artificial Sequence
  ENSG00000213066_43 (sequence is synthesized)
aataaaaatgatttttgactaaaaaattgttggcctaagataattcagtagcagggctgaataatgggatgactcaaaatcagtaagctcaaaggcaatttcaaagaaatctttatgttt

SEQ ID NO: 754083 - DNA, 120 bp, Artificial Sequence
  ENSG00000213066_44 (sequence is synthesized)
agcaagaagaccaagatgacaagatgcgccaggagacttggccagaggacctccaggctgacaaagtttccccgaggaagtcagattggaaaagtgtcctcaggttcaaggaaacctggg

SEQ ID NO: 754084 - DNA, 120 bp, Artificial Sequence
  ENSG00000213066_45 (sequence is synthesized)
tgtgcaccgggtgaatgagagtggcagacagaaggaaacagcaaggcctctgaggtaggagggacagcgtttttgaatgtgaaatttattccctgatacatgtttttaaaaatgaatctt

SEQ ID NO: 754085 - DNA, 120 bp, Artificial Sequence
  ENSG00000213066_46 (sequence is synthesized)
gctgcccttagaaaatgaacccccgaacaaggtaaggtcgagctggcccctcgtgtcatccgactttgcgttgtggccctgcctgcagaaacgtgtgctctgctacagccctgggaggag

SEQ ID NO: 754086 - DNA, 120 bp, Artificial Sequence
  ENSG00000213066_47 (sequence is synthesized)
gggccgggctcccaactcctgccccgcttctagcacatgctgtgcttggccacttctctgcctcttagtttaacagcagcactgggcaaggtttgccctctgcacaccagaccggcttcc

SEQ ID NO: 754087 - DNA, 120 bp, Artificial Sequence
  ENSG00000213066_48 (sequence is synthesized)
caagaaccggggaagaggagagggcatgcctggggcctgagcttagtgggccgggtggaggcaggaggtactgcatggaggagcgtggacagtggcatgcaggaggccagtcattctgcg

SEQ ID NO: 754088 - DNA, 120 bp, Artificial Sequence
  ENSG00000213066_49 (sequence is synthesized)
tgcggttttagctggaggtttgtttttggtagtttgtagaatcatcagatttgatgatgaaactttttttccataaatgttaaattttcagacacttgtattttttttttcctttttttt

SEQ ID NO: 754089 - DNA, 81 bp, Artificial Sequence
  ENSG00000213066_50 (sequence is synthesized)
cctgagtagctgggattacagatgtgtttcaccatgcccggcgaattttttttgtatttttagtagacacgggatctggtg

SEQ ID NO: 754090 - DNA, 68 bp, Artificial Sequence
  ENSG00000213066_51 (sequence is synthesized)
tgaactcctgacctatggtgatccgcacccctccccgccccccccgcggtgtattttctttaaaaacc

SEQ ID NO: 754091 - DNA, 120 bp, Artificial Sequence
  ENSG00000213066_52 (sequence is synthesized)
acgattttggcatgttttgtaagttgccagactattggatatacctcttaatcatactttgtttgaaatcctttgtggtttctaaagcactagtagctttctgaaaggaaaatttttaat

SEQ ID NO: 754092 - DNA, 120 bp, Artificial Sequence
  ENSG00000213066_53 (sequence is synthesized)
gaatgaagcatgcttcatcctgcacatcccctcctgccccagcacccctactgcccatgcgcctctcctgccccagcacccctactgccccagtgccaggccttttctagcagctctcat

SEQ ID NO: 754093 - DNA, 120 bp, Artificial Sequence
  ENSG00000213066_54 (sequence is synthesized)
gggttcatccctgctgcgggcattgctccaccaaggggcagtgctctccctgccggtaagtgttggaacttcacgtttccctctagttttctctttacattttaacatacactattatgt

SEQ ID NO: 754094 - DNA, 120 bp, Artificial Sequence
  ENSG00000213066_55 (sequence is synthesized)
gtcaatatattaattatatattaattacatttatagaggttaggtatatatggcagatcatatctgagcgtgaattacattctccaatatttttatttgtcatgatttattgcagggttc

SEQ ID NO: 754095 - DNA, 120 bp, Artificial Sequence
  ENSG00000213066_56 (sequence is synthesized)
acttatttgatctaccccaacttaacacacatttccaagaaaatatccatcacactagaaagaaagaaagaggaaggaaggaagggagggagggagagaaggagaaaggaagaaagggaa

SEQ ID NO: 754096 - DNA, 120 bp, Artificial Sequence
  ENSG00000213066_57 (sequence is synthesized)
ggaaaatggaatggaggaagggaaaaatggaaggaggaaggaaggaagggaaagaatgaagaaagccatttgttcctgcaaacctaaacctctttgtagtaagttctggcagaaggtgtg

SEQ ID NO: 754097 - DNA, 120 bp, Artificial Sequence
  ENSG00000213066_58 (sequence is synthesized)
tttctggagttaaactacaggcttggaaatggaatttcttagcctaatttctaaattagaactgcttatgcaaattaacactccgtacatttcaacaagcagttggctgatttcttctgt

SEQ ID NO: 754098 - DNA, 120 bp, Artificial Sequence
  ENSG00000213066_59 (sequence is synthesized)
ccactccacctgcagatgcagaggtggccccatcctgtgatgtgccaccacatcccttttcagtgaagggctttgttggctgctgtgggcattctcatggcctctccagggatggcctcc

SEQ ID NO: 754099 - DNA, 120 bp, Artificial Sequence
  ENSG00000213066_60 (sequence is synthesized)
actgtagagacctatgtcaccaaggccaggccctctcagggggctccatccaacgaccattctgcctcagggtaagaggcccggccctctcagcctgagtccattctggctccagagctc

SEQ ID NO: 754100 - DNA, 120 bp, Artificial Sequence
  ENSG00000213066_61 (sequence is synthesized)
cctgagagcttgcctggcaagttactcttgcaattctagcttccagcaggcgttgatttctggggcacttttgataaactcctggcaggaaactcaatctctgggggtcagagtccactt

SEQ ID NO: 754101 - DNA, 120 bp, Artificial Sequence
  ENSG00000213066_62 (sequence is synthesized)
cctggggagcccaatctgtgacccctaggagtggggaccatggaagcacttggctctccagcatgtgctgaatagggggcgctgcctgcaatgtccacgtggaaacctggctgggagaat

SEQ ID NO: 754102 - DNA, 120 bp, Artificial Sequence
  ENSG00000213066_63 (sequence is synthesized)
gcctgtgtgctctgcatggggatgtaaaggtgtgagcaaaccttcttcagagaggggatgttcaatgcgaaatttgaacattgggacctgaaaaactgatgggctgatggggtctgccca

SEQ ID NO: 754103 - DNA, 120 bp, Artificial Sequence
  ENSG00000213066_64 (sequence is synthesized)
tgattggcagccttcatagaatcacgagggaggagcacaggccaccctagacaggaggggtcccctactgacagggaggtgctgtcggggcagcaggcacgtgcaggaaaacggaaaagc

SEQ ID NO: 754104 - DNA, 120 bp, Artificial Sequence
  ENSG00000213066_65 (sequence is synthesized)
agagtaattgaatgtaaatcatgcaactccactacagtggctagaagcctggatgggcaacttggctgagtgatgttgggcaagttatttaatatcagtattctcagttttctcatctgt

SEQ ID NO: 754105 - DNA, 120 bp, Artificial Sequence
  ENSG00000213066_66 (sequence is synthesized)
aaaggggattaaatacttccttcccttacagggctgccctggtcttaagtaatgcccacagagagcttagcattgttcttggcaagtcactagtactcagtaaatactatttttattaag

SEQ ID NO: 754106 - DNA, 120 bp, Artificial Sequence
  ENSG00000213066_67 (sequence is synthesized)
aaggtaagattcacaggacttagtgtcttaactagatgttgagagtaaggagaagagagaatacttctcggatgattgttcagtttctgatgaatgtctgttcccctttcaaaacctaat

SEQ ID NO: 754107 - DNA, 120 bp, Artificial Sequence
  ENSG00000213066_68 (sequence is synthesized)
tcagatgtcacttcctcctcaaagctctcgccccgcgccgagctactgtgatgtatttttatgacctggcagcttttttctcatatccctgttagcggtatgtggtaagaacatgagaca

SEQ ID NO: 754108 - DNA, 120 bp, Artificial Sequence
  ENSG00000213066_69 (sequence is synthesized)
cagaatcagaaaccatggatttctggtcttgactccactaccactcagaggaacctcacggtggatgccgtaagtgtttacactgaaaaggattttcacgaaaacctgcattttcatttc

SEQ ID NO: 754109 - DNA, 120 bp, Artificial Sequence
  ENSG00000213066_70 (sequence is synthesized)
gttcacaagagaattatgagactagaaaaacaacaattcttagtataccacagactgtggtgcctaggaataacagacaagctttaactcacacgatgagcatctttatttagctctgct

SEQ ID NO: 754110 - DNA, 120 bp, Artificial Sequence
  ENSG00000213066_71 (sequence is synthesized)
catctttatttagctctgcttttagatatctgcatgataaagatgagtgatccaacgttagaaatcatctggacattaaaactgaattgtaggcaggcgtggtggctcacacctgtaatc

SEQ ID NO: 754111 - DNA, 120 bp, Artificial Sequence
  ENSG00000213066_72 (sequence is synthesized)
ggcgggcagattgcttgagctcaggagtttgtgagactagcctgggcaacatagtaagacccctatctctacaaaaaatataaaaattagctaggcatcatggcctgtgcctgtagtcct

SEQ ID NO: 754112 - DNA, 89 bp, Artificial Sequence
  ENSG00000213066_73 (sequence is synthesized)
ttctgggcaatacggtgaaaccctgtctctacaaaaaaatgcaaagattagctaggcatgatggcacatgcctgtggtcccagctactc

SEQ ID NO: 754113 - DNA, 120 bp, Artificial Sequence
  ENSG00000213066_74 (sequence is synthesized)
actcgggaggctgaggcaggaggattgcaggaggtttgcttgagccggggaggtcgagtctgcagtgaactgagattgcatcactgcactacagcctgggtgacagagtaagaccctatc

SEQ ID NO: 754114 - DNA, 120 bp, Artificial Sequence
  ENSG00000213066_75 (sequence is synthesized)
tgacagagtaagaccctatctcaaaaaaaagaactaattgtaacaaactatctttcaaattatatcaaaacagtgattcataaattccatgttgcccagagatcatgaggagctcttcta

SEQ ID NO: 754115 - DNA, 120 bp, Artificial Sequence
  ENSG00000213066_76 (sequence is synthesized)
tgatttgacagtgcaattactgaaggggaagacaccatgcaaatacatggtaaaaatattcaaattattactgatttgacacaaaatattgatgtaaataacataaaactgtaatatgcc

SEQ ID NO: 754116 - DNA, 120 bp, Artificial Sequence
  ENSG00000213066_77 (sequence is synthesized)
attatgatgacattaatgaaaaattggttaatgaatgtcattgaaagagcatgtacatcactaaatgttcttagtcactgaaagtgtgaaatagcctctaaactcatatgtggaaaaaga

SEQ ID NO: 754117 - DNA, 120 bp, Artificial Sequence
  ENSG00000213066_78 (sequence is synthesized)
acttgaaaaaggtttccagaaatgtgacaattctagtactttcatgacattttaaaaaagggattgtaaagactgatgaaacccttaaaacctctcaagaattaaaaatcatttttgatc

SEQ ID NO: 754118 - DNA, 120 bp, Artificial Sequence
  ENSG00000213066_79 (sequence is synthesized)
aacagagtaaactgattttttatctctgttgaaagatatttttaaaatcattgtcctatggaaaagtcatatagaacgtttgctgtttaatgtagcacagatgtatcaaaaagccatgcc

SEQ ID NO: 754119 - DNA, 120 bp, Artificial Sequence
  ENSG00000213066_80 (sequence is synthesized)
aggcagttatagatatcttagttttctggattttgtgacgtttgtggtatttgtcagatttttaaaatttgtgatttgttgggatttgttcctcattcacaggtaattttatatactttt

SEQ ID NO: 754120 - DNA, 120 bp, Artificial Sequence
  ENSG00000213066_81 (sequence is synthesized)
gtattcactttcgaaaagaaggcaactctaaattttatgaacttcaagtgctataaaacaattaccacagtaaattttgaaaaattcaccccaaaaagaaaccttgtatccattggcagt

SEQ ID NO: 754121 - DNA, 120 bp, Artificial Sequence
  ENSG00000213066_82 (sequence is synthesized)
aactccctatgctccgccattcctctcagctccctgtctggcaaccacttcctgtctcttcagagttgcctcttctggacattacatataaacggaattatacactatgtggccttttat

SEQ ID NO: 754122 - DNA, 120 bp, Artificial Sequence
  ENSG00000213066_83 (sequence is synthesized)
gactggcttctttcacttagcataatgttttcaagagtcatctgtgttgtagcatttgtcagtacttcatttatttttgtttcctaacaatactccattgtagggattgaccacacttta

SEQ ID NO: 754123 - DNA, 120 bp, Artificial Sequence
  ENSG00000213066_84 (sequence is synthesized)
tccattcattggttgatggacatttgggttgtttccactttttctgctgttgtgaataacagtgctaagcacattcatatgcagtgtttgtgtagatatataatatgctttattttctct

SEQ ID NO: 754124 - DNA, 120 bp, Artificial Sequence
  ENSG00000213066_85 (sequence is synthesized)
tgagtacataaaagtggagcctctgagtaatataataactctatgtttggtgttttgaagaattgctaaattgttttccaaagcagctgcaccattttatatccctaccagcaatgcatg

SEQ ID NO: 754125 - DNA, 120 bp, Artificial Sequence
  ENSG00000213066_86 (sequence is synthesized)
aagcttccagtttctccacatcatcacgaatactccttattctctctctttttagatatagacattctggcaggtgtgacattgtatctcttgtggtttagatttgcatttggagcatgt

SEQ ID NO: 754126 - DNA, 120 bp, Artificial Sequence
  ENSG00000213066_87 (sequence is synthesized)
cttatgtgcacttaaaaatattaatatctattctgctgttgttgggtaaactgttctatagatgttgatatggcttcgctgtgtccccactcaaaatctcatcttgacttgtaatcccca

SEQ ID NO: 754127 - DNA, 77 bp, Artificial Sequence
  ENSG00000213066_88 (sequence is synthesized)
ctagggtggttttccctactctgttttcatgatagtgagtctcacaaggtctgatggttttataagcatctggcatt

SEQ ID NO: 754128 - DNA, 120 bp, Artificial Sequence
  ENSG00000213066_89 (sequence is synthesized)
catttcccctgcttgcactcaggctgtcctgccacactgtgaagaaggtgccttgcttctcctttgccttctgccatgagtgtaagtttcatgaggcctccccagccatgctgaactgtg

SEQ ID NO: 754129 - DNA, 120 bp, Artificial Sequence
  ENSG00000213066_90 (sequence is synthesized)
aaacctctttcctttataaattaccaagctgcggctatttcttcatagcagtgtgagaacggactaatacaggtgttttttaggtcttgttattgtgtcgttcacgtcttttatttcctt

SEQ ID NO: 754130 - DNA, 120 bp, Artificial Sequence
  ENSG00000213066_91 (sequence is synthesized)
gtgttttttaggtcttgttattgtgtcgttcacgtcttttatttccttgttgatcttactcttagttgttctatccatcattgaaaatggggcattggccaggcgtggtggctcacgcct

SEQ ID NO: 754131 - DNA, 80 bp, Artificial Sequence
  ENSG00000213066_92 (sequence is synthesized)
tcacttgaggtcaggggttcgagaccagcgtggctaacatggagaaccagtgcgtgcccgcctatagtcccatctacttg

SEQ ID NO: 754132 - DNA, 120 bp, Artificial Sequence
  ENSG00000213066_93 (sequence is synthesized)
aaaaaagaaagaaaatgagacattggatttgtaagtttctgacaggttcattttgcctgctgcccagatagagccgatttatgaggacagggaaattgcaatagagaaagagtttaatac

SEQ ID NO: 754133 - DNA, 120 bp, Artificial Sequence
  ENSG00000213066_94 (sequence is synthesized)
ctggagttttattattactcaaatcagcctccacaaaaatttggaggctaggtcttttcaaagatagtttggtgggcaggggtttgtgtactaagaaactaaatgtttcttgtgtactaa

SEQ ID NO: 754134 - DNA, 120 bp, Artificial Sequence
  ENSG00000213066_95 (sequence is synthesized)
aactaaatgtttcttgtgtactaagtcagcttctgggtgggggccagaggaccagttgagccaagaattcaagaggtacaggttcaagtagggccatctggttgtcagaaatgcaaaagc

SEQ ID NO: 754135 - DNA, 120 bp, Artificial Sequence
  ENSG00000213066_96 (sequence is synthesized)
ctggaaagtcatctcaaatgttaggttctacaatagtcaagttatttatagtaattgggaaagttgcaaatcttgtgacctctgtagaaaataggtggtaatctttacacctatatctta

SEQ ID NO: 754136 - DNA, 120 bp, Artificial Sequence
  ENSG00000213066_97 (sequence is synthesized)
gtagaattcaggcccctcacttcctcctaacctggtagcctttcattagttttacaaaggcagtttaattttggggggcagggctattatcatctaaactataaactataatcgtttgtc

SEQ ID NO: 754137 - DNA, 120 bp, Artificial Sequence
  ENSG00000213066_98 (sequence is synthesized)
ccaaagttagcttggcccatgcccaggaatgaccaagggcaatttggagattaaagtcaagatggagttggttagatcagatctctttcactgttataattttctcactgttaaaattta

SEQ ID NO: 754138 - DNA, 120 bp, Artificial Sequence
  ENSG00000213066_99 (sequence is synthesized)
caaaggcagtttcaaaatctgaaacttttattgttaaattatgtatttattcctttagttctgtcatgttctgcttcttatattttggaactctgttgttaggtgcatacatatttataa

SEQ ID NO: 754139 - DNA, 120 bp, Artificial Sequence
  ENSG00000213066_100 (sequence is synthesized)
ttgttatatcttcctgatggattggtattgtaatcactgtaaaatacactattatcattgtaaaatattcctttttatctctagtattttttgtctgtttgacttaaagtctattttgtt

SEQ ID NO: 754140 - DNA, 120 bp, Artificial Sequence
  ENSG00000213066_101 (sequence is synthesized)
tgatattagcatagctattcttgctcttactgtggcaatttgtatgatacctttttcttttagcctatttatatctttgaatcaaaagtttgtctcctgtagatagcatatagttggata

SEQ ID NO: 754141 - DNA, 120 bp, Artificial Sequence
  ENSG00000213066_102 (sequence is synthesized)
atttttagttcttttgattggattgtttaattcattcatttttagtgttactattgatatggctggatttgtgtctgcaattttaatttttgttttctatatgtctcgtgtttttgtggc

SEQ ID NO: 754142 - DNA, 120 bp, Artificial Sequence
  ENSG00000213066_103 (sequence is synthesized)
tttgcttcttcttctttgctttcttttgcattaagtattttctagtttaacaacttaatttcttaaattatttttaactatatttttacgtatttccttaatgaatgcttgatggctcac

SEQ ID NO: 754143 - DNA, 120 bp, Artificial Sequence
  ENSG00000213066_104 (sequence is synthesized)
aatctccttctcagtttatcagaatctacttaagtttatactaacttatgtccagtgagatagaaacacatttcttctttatagctctaggtcctcttcacttgtttttgtgctattatt

SEQ ID NO: 754144 - DNA, 120 bp, Artificial Sequence
  ENSG00000213066_105 (sequence is synthesized)
gttatacttactacctctgtatatgttacaagcccaagaatactattctacttatttatataattttatgttttttaaagaacctgagactggaagtgagggaaatagggcgtgcaggaa

SEQ ID NO: 754145 - DNA, 120 bp, Artificial Sequence
  ENSG00000213066_106 (sequence is synthesized)
ggaaggaagaggaaggaaaagtgtgtgaaagggggctccacctcctttagtggataccctgagcttatttccaggggcctttgtaaattcccagtgacaactctttggaagatgaaatcc

SEQ ID NO: 754146 - DNA, 120 bp, Artificial Sequence
  ENSG00000213066_107 (sequence is synthesized)
ccctcttccctgcatcttattagaacagtgtatcctggaggacatcccttgcctttcaccaagtgaccctatactggcggcagaacttctcgattttgcggatttcaaaatggctccacg

SEQ ID NO: 754147 - DNA, 120 bp, Artificial Sequence
  ENSG00000213066_108 (sequence is synthesized)
tactcatagttttcatgacagacttcattgcgatagtcaaatactgttccacttactgcagttgcctacagtctgggttttgttcagttgaaattaaataaattttatgcacaaaccttt

SEQ ID NO: 754148 - DNA, 120 bp, Artificial Sequence
  ENSG00000213066_109 (sequence is synthesized)
ttttttcccaggaaaatcactaaaataacctatcattttatcactcagagatatttcctgttaatattttgttgtgttttgttacttctaaggtggtcctattttatatgttgttttgta

SEQ ID NO: 754149 - DNA, 120 bp, Artificial Sequence
  ENSG00000213066_110 (sequence is synthesized)
ttctggcccttcctatacctatataccatcggaatacttttgggaagttgactttttagctgatttttattatctatagaaataaaatttttaaatcatctctccttttttggacattta

SEQ ID NO: 754150 - DNA, 120 bp, Artificial Sequence
  ENSG00000213066_111 (sequence is synthesized)
ttagaagtgatcaggcggtcttaccaaaggataggttggggtctgtcttagtctgttcaggctgccaagtaccatagattgggcagcttacaaacaacacatttttcctcacagttctgg

SEQ ID NO: 754151 - DNA, 120 bp, Artificial Sequence
  ENSG00000213066_112 (sequence is synthesized)
tcctggtaactgagttgctggttgtgctgccatctgctctttgtgcgtcctggttgctggctggccagctaggaactggagaagatgatgactatgttgatgattttaatagtaccagcc

SEQ ID NO: 754152 - DNA, 120 bp, Artificial Sequence
  ENSG00000213066_113 (sequence is synthesized)
gatcatgaggagctcttctatgatttgacagtgcaattactgaaggggaagacaccatgcaaatacatggaatcccaggagcccgcctcgagggccgtatcctgcttccagaggcatcgt

SEQ ID NO: 754153 - DNA, 120 bp, Artificial Sequence
  ENSG00000213066_114 (sequence is synthesized)
ggacagagaaaggaagcccgaggcccatccctggcttgactgcgtgggacgcgttctccgctgcccttgcttccctcacgtggagcggagagcaggcgctgagaaggggccctgcgtggt

SEQ ID NO: 754154 - DNA, 120 bp, Artificial Sequence
  ENSG00000213066_115 (sequence is synthesized)
gctgttctcacgcatgctcagtggcgctccctgagtgctgagagccacggtcggtgagagaggagcttcctgatgagcctcagacggtgctgaaaccagccgactctgcccaggatcctg

SEQ ID NO: 754155 - DNA, 120 bp, Artificial Sequence
  ENSG00000213066_116 (sequence is synthesized)
agtcctggtttcctgttgacccttccttccctcacgacttatttcccctgggaactatcgatgttcttttggccagtgggcttccgttgaggccatcctaatcatcagagaggttttagt

SEQ ID NO: 754156 - DNA, 120 bp, Artificial Sequence
  ENSG00000213066_117 (sequence is synthesized)
cgagttaaacctcaaaagagaaggtgtttcttaattttcccaggggtgcccttggccctgatacagatttagctaccttcccccgaaagcctcaaagttctgcaaactcacagccaagca

SEQ ID NO: 754157 - DNA, 120 bp, Artificial Sequence
  ENSG00000213066_118 (sequence is synthesized)
aaacgcagctgcagtcgagccagcctcgaaaggtcttacaactttctgcagtggccagcttgttctctgtttccatgccttccagaatgaagaagatcagttctaaggtttcttactatt

SEQ ID NO: 754158 - DNA, 120 bp, Artificial Sequence
  ENSG00000213066_119 (sequence is synthesized)
tctaccaagagacgaccatcggcattccacagacggctcctctagctgtgcacaatgcctgttcttatcgttatcacccgcttcgcgccagcggttctcaatacaaattccttgaggttt

SEQ ID NO: 754159 - DNA, 120 bp, Artificial Sequence
  ENSG00000213066_120 (sequence is synthesized)
cggcgggcactgggggcgcgccccggcatggcctccgtcctgcccgccccacagagggggtcggctcgttcgttcgtgtggtcccggagggcaccgcggactgggggtgcctggcccatc

SEQ ID NO: 754160 - DNA, 120 bp, Artificial Sequence
  ENSG00000213066_121 (sequence is synthesized)
ggcccatcccctgcctcattccgtgggggcgggaccgcggggcttgggggccacacgggcggcccgcagctgggccctggagtgcggccccagcgtctcttcctcaggctcgggcatgat

SEQ ID NO: 754161 - DNA, 120 bp, Artificial Sequence
  ENSG00000213066_122 (sequence is synthesized)
tgacctttgcacctgccctcccagctcgttggcttgctcgtgtttgttgctggataaatgtgagcttgttgtgaaaattgtcttgaaattataatttcctgtttcttaacttttttttaa

SEQ ID NO: 754162 - DNA, 120 bp, Artificial Sequence
  ENSG00000213079_0 (sequence is synthesized)
cggccgccggggctcgcacggtccagtcgccagggggcgcgctagccggcgccgcggatccccgaactgcgcggcccgactcgagtccgccatattggatgccgcagccgctgctgccag

SEQ ID NO: 754163 - DNA, 120 bp, Artificial Sequence
  ENSG00000213079_1 (sequence is synthesized)
cgcttcctcctctgtcttcgccgagcggggctggttcctgcggcccgagcggcggggaggtgaaacaggagcccgtcggaggaaggggcagaagggagtggagagtgtaggggaaggggc

SEQ ID NO: 754164 - DNA, 120 bp, Artificial Sequence
  ENSG00000213079_2 (sequence is synthesized)
tagagggagggggaccgaaacggagcggggcagagaagagaaggcgccgcggcccagcccctcccccgcccgccgccgacccgccccggcagcgcctctgttccctagaacggcgctccc

SEQ ID NO: 754165 - DNA, 120 bp, Artificial Sequence
  ENSG00000213079_3 (sequence is synthesized)
ctagaacggcgctccccccgccctagcggccatgccggtgccgctctgccgctgagggagcccttccccgccagcgcgtgcccttccactccgccccgaggtcgcagcggcccgctctcc

SEQ ID NO: 754166 - DNA, 120 bp, Artificial Sequence
  ENSG00000213079_4 (sequence is synthesized)
tcgcggccacgcagcagcccgcgtctcgctctccccacccagtgcagtggccgccgcctcttccgccgccgggctcggggcctccgcagcgacaacatggaggccgtgaagaccttcaat

SEQ ID NO: 754167 - DNA, 120 bp, Artificial Sequence
  ENSG00000213079_5 (sequence is synthesized)
agcgagttgtattccctgaatgactataaaccacccatttcgaaagcgaaaatgacccaaattactaaggcagccatcaaagctattaagttctataaacatgtggtacagagtgttgag

SEQ ID NO: 754168 - DNA, 120 bp, Artificial Sequence
  ENSG00000213079_6 (sequence is synthesized)
aagtttattcagaaatgtaaaccagaatacaaagtacctggactttatgttattgactccattgtgcgacaatcccgacatcagtttggtcaagaaaaggatgtgtttgcacccagattt

SEQ ID NO: 754169 - DNA, 120 bp, Artificial Sequence
  ENSG00000213079_7 (sequence is synthesized)
agtaataacatcattagcactttccagaatttatatcgttgccctggggatgacaagagtaaaatagtgagagtactaaacttatggcagaagaataatgtatttaagagtgagattatt

SEQ ID NO: 754170 - DNA, 120 bp, Artificial Sequence
  ENSG00000213079_8 (sequence is synthesized)
cagccccttttggatatggcagccgggattccgcctccagttgtcacacctgttttggccagcactaccactgctatgagcaatactccaggaactcctgtgacacctgttactccggcc

SEQ ID NO: 754171 - DNA, 120 bp, Artificial Sequence
  ENSG00000213079_9 (sequence is synthesized)
aatgtggtccaaggcttacctgatccgtgggtatctcagataacaaatacagatacacttgcggctgtagctcagatcttgcaaagtcctcaaggccagcagcttcaacaattaatacaa

SEQ ID NO: 754172 - DNA, 120 bp, Artificial Sequence
  ENSG00000213079_10 (sequence is synthesized)
accttacagatacaacaacagaagccccagccttccattctgcaggccctagatgctggtcttgttgttcagttgcaagctcttacggcacaacttacagctgcagctgcagctgccaac

SEQ ID NO: 754173 - DNA, 120 bp, Artificial Sequence
  ENSG00000213079_11 (sequence is synthesized)
actcttactcccttagaacagggagtctcctttaacaagaagttgatggataggtttgattttggggaagactctgagcatagtgaagaacccaaaaaggaaattccagcttcacaactt

SEQ ID NO: 754174 - DNA, 120 bp, Artificial Sequence
  ENSG00000213079_12 (sequence is synthesized)
tctcacgtttcagaatctgtgaacaattccatttttcatcagatagcagaacaactacaacagcaaaacctagaacatctcagacagcagctcttggagcagcaacagcctcaaaaggcc

SEQ ID NO: 754175 - DNA, 120 bp, Artificial Sequence
  ENSG00000213079_13 (sequence is synthesized)
actcctcaggatagtcaggaaggaacctttgggtcagagcattcagcgtcaccatcacaagggagtagtcagcagcattttcttgaacctgaagtcaatttggatgattccatagatatt

SEQ ID NO: 754176 - DNA, 120 bp, Artificial Sequence
  ENSG00000213079_14 (sequence is synthesized)
cagcaacaggatatggatatagatgaagggcaagatggagtggaagaggaggtctttgaacaagaagctaagaaagtggcggttcgctcaagatcaagaacacattcacgatctcgttca

SEQ ID NO: 754177 - DNA, 120 bp, Artificial Sequence
  ENSG00000213079_15 (sequence is synthesized)
agatcaccaagaaaacgaaggtctaggtcacggtctggctctagaaagcgtaaacacagaaagcgatcacgctcccgctcaagagaaagaaagaggaaatcatcacggtcgtattcaagt

SEQ ID NO: 754178 - DNA, 120 bp, Artificial Sequence
  ENSG00000213079_16 (sequence is synthesized)
gaaaggagagccagagaaagggagaaagaacgacagaaaaagggattacctccaattagatctaaaacactaagtgtatgtagtactactctctgggttgggcaagtggacaagaaggca

SEQ ID NO: 754179 - DNA, 120 bp, Artificial Sequence
  ENSG00000213079_17 (sequence is synthesized)
acacagcaagacttaaccaacctgtttgaagagtttggacagattgaatccattaatatgattcctccccggggctgtgcttatgtctgcatggttcatcgacaagatgcatttcgagct

SEQ ID NO: 754180 - DNA, 120 bp, Artificial Sequence
  ENSG00000213079_18 (sequence is synthesized)
cttcagaaactcagttctggatcatataaaattgggtccaaggtcattaagatcgcttgggctttaaacaaaggtgtaaaaacagaatacaaacaattctgggatgtggatcttggagtt

SEQ ID NO: 754181 - DNA, 120 bp, Artificial Sequence
  ENSG00000213079_19 (sequence is synthesized)
acatatataccatgggaaaaagttaaagtggatgacttggaaggttttgcagaaggaggcatgattgatcaggagactgtaaatactgagtgggaaactgtgaaaagctcagaacctgtt

SEQ ID NO: 754182 - DNA, 120 bp, Artificial Sequence
  ENSG00000213079_20 (sequence is synthesized)
aaagagacggtccagacaactcagagcccaactccagttgaaaaggagacagtggtcacaacccaggcagaggttttccctcctcctgttgctatgttgcagattccagtggcgccagcc

SEQ ID NO: 754183 - DNA, 120 bp, Artificial Sequence
  ENSG00000213079_21 (sequence is synthesized)
agtcccaccagcatttcctgtgtcgatgccggttcctcctcctggattcagtccaatccctccacctccttttttaagagcaagttttaacccttcacaaccaccacctggtttcatgcc

SEQ ID NO: 754184 - DNA, 120 bp, Artificial Sequence
  ENSG00000213079_22 (sequence is synthesized)
gcctccagttcccccacctgttgtgccaccccctacgattccaccagtagtaccaacatctttagtgcagccgtcattatccatgacaccggaaactgtgaaagatgttggatttggtag

SEQ ID NO: 754185 - DNA, 120 bp, Artificial Sequence
  ENSG00000213079_23 (sequence is synthesized)
ccttgttataccaggcggttctgttgccagcaatcttgctacttccgctctgccagctggaaatgtttttaatgctccaactaaacaggcagagcctgaagaaaaagtacctcatcttat

SEQ ID NO: 754186 - DNA, 120 bp, Artificial Sequence
  ENSG00000213079_24 (sequence is synthesized)
agaccaccagatttcttctggtgaaaacaccagatcagtgattccaaatgatatttcaagtaatgctgcaattttaggaggacagccgccaaatgtgacaagcaattctggaattctggg

SEQ ID NO: 754187 - DNA, 120 bp, Artificial Sequence
  ENSG00000213079_25 (sequence is synthesized)
agtccaaagaccaaatgtatcaagtaattctgaaattcttggggtccggccatctaatgtttccagtagttctgggattattgcagcccaaccaccaaatattctaaataactctggaat

SEQ ID NO: 754188 - DNA, 120 bp, Artificial Sequence
  ENSG00000213079_26 (sequence is synthesized)
attgggaatacagccacccagtgtgtcaaatagttctggacttttgggagtgctacccccaaatatacctaacaattctggacttgtaggagtacagccaccaaatgttccaaatactcc

SEQ ID NO: 754189 - DNA, 120 bp, Artificial Sequence
  ENSG00000213079_27 (sequence is synthesized)
tggacttctgggaacacagccaccagctggacctcaaaacttaccccctttaagtatccctaatcaaaggatgcccacaatgccaatgttagacattcgtccgggactaataccacaggc

SEQ ID NO: 754190 - DNA, 120 bp, Artificial Sequence
  ENSG00000213079_28 (sequence is synthesized)
acctgggccaagattccctttaatacagcctggaattccaccccaacggggaatcccacccccatcggtacttgattcagctcttcatccaccaccccgtggaccttttcctccaggaga

SEQ ID NO: 754191 - DNA, 120 bp, Artificial Sequence
  ENSG00000213079_29 (sequence is synthesized)
tatttttagtcaaccagaaagaccttttttagctcctggaagacaaagcgtagacaatgttactaacccagaaaaaaggataccacttgggaatgataacattcaacaggaaggagatag

SEQ ID NO: 754192 - DNA, 120 bp, Artificial Sequence
  ENSG00000213079_30 (sequence is synthesized)
agattaccggtttcctcctatagaaaccagggaaagcattagtagacctccccctgtggatgttagagatgtggttgggcggcctatagatccaagagaaggtcctggacggcctccact

SEQ ID NO: 754193 - DNA, 120 bp, Artificial Sequence
  ENSG00000213079_31 (sequence is synthesized)
agatggtagggatcattttggaagacctcctgtagatataagagagaatcttgtgaggccaggtatagatcatcttggtcgaagagaccactttggctttaatccagagaagccctgggg

SEQ ID NO: 754194 - DNA, 120 bp, Artificial Sequence
  ENSG00000213079_32 (sequence is synthesized)
gcatagaggagattttgatgagagagagcatcgggttctaccggtctatggtggtccaaaaggcttacatgaagaaagaggtagatttcggtctggaaactatcgatttgatcctagaag

SEQ ID NO: 754195 - DNA, 120 bp, Artificial Sequence
  ENSG00000213079_33 (sequence is synthesized)
tggtccttggaaccgaggatttggacaagaagttcacagagattttgatgaccgcagaagaccctgggagaggcaaagggatagggatgacagagattttgatttctgcagagaaatgaa

SEQ ID NO: 754196 - DNA, 120 bp, Artificial Sequence
  ENSG00000213079_34 (sequence is synthesized)
tggaaatcgtcttggacgagacagaattcaaaacacttgggttccccctcctcatgctcgggtttttgattattttgaaggggccacttctcaacgaaaaggtgataatgtgcctcaggt

SEQ ID NO: 754197 - DNA, 120 bp, Artificial Sequence
  ENSG00000213079_35 (sequence is synthesized)
taatggtgaaaatacagagagacatgctcagccaccacctataccagtacagaatgatcctgaactttatgaaaaactgacatcttcaaatgaaataaacaaggagaagagtgacacagt

SEQ ID NO: 754198 - DNA, 120 bp, Artificial Sequence
  ENSG00000213079_36 (sequence is synthesized)
tgctgatatagaaagtgaaccagtggtagaaagcacagaaactgaggggacataatcatcactcagtaggtaaaagataccttttgtaaagttgtcatctctctgtaatagataatggct

SEQ ID NO: 754199 - DNA, 120 bp, Artificial Sequence
  ENSG00000213079_37 (sequence is synthesized)
gactggaccatagttgttcacttttgtctgccagaattaagttaatctgatgttcatgttcacctttctcttaaaataattgtacaactgacttgtatagacattgttcttaatatgaac

SEQ ID NO: 754200 - DNA, 120 bp, Artificial Sequence
  ENSG00000213079_38 (sequence is synthesized)
atggtaggtaaactttttttttatttttttctgataaaatacaaatgttggccccagattcttttaacgtcaaggaaatgaataacagcttgtcagagacttcctatggaagaaagaatt

SEQ ID NO: 754201 - DNA, 120 bp, Artificial Sequence
  ENSG00000213079_39 (sequence is synthesized)
ttttagatactatcattaggttggatatggtaatagatatatttcagaatagcaagtggtggtatatcttatccatatctttaggctgctgcagaattttaaggttatagataaagctgt

SEQ ID NO: 754202 - DNA, 120 bp, Artificial Sequence
  ENSG00000213079_40 (sequence is synthesized)
gatattttatgcaaagactggctctaggtatttgaggagcacaatacagagattttaaaaagtgattttgtaaaatctacactacggtctctgtttctccaaagtaagtgtttgtgattt

SEQ ID NO: 754203 - DNA, 120 bp, Artificial Sequence
  ENSG00000213079_41 (sequence is synthesized)
gttcctcatactgcagtgagtaaaaaagaaacaagaaaacaacaacataaatattaaagtacgtttcaatgttgggtgaattttgtttttagatgccaataaaacttatttgtttgataa

SEQ ID NO: 754204 - DNA, 120 bp, Artificial Sequence
  ENSG00000213079_42 (sequence is synthesized)
ggggagtgcagtggccgccgcctcttccgccgccgggctcggggcctccgcagcgacaacatggaggccgtgaagaccttcaatagcgaggattgtgcctctactcctgcttgtacagac

SEQ ID NO: 754205 - DNA, 120 bp, Artificial Sequence
  ENSG00000213079_43 (sequence is synthesized)
tgtgcttattttttgcaaaagctttctatcataacaacaatgaactatgtggtggaaaaagcatgtactttgatataaaaatcatgcagcctcctcagtatgtgtataatatctgtgtat

SEQ ID NO: 754206 - DNA, 120 bp, Artificial Sequence
  ENSG00000213079_44 (sequence is synthesized)
cttaaagatgtgccaaggtagatgaaggatttagatgtgaaataaatgaatacaaagaagaaaatgaaaagttgcacctatccaaaggaaatcaatttcaactattttgtttagagtggg

SEQ ID NO: 754207 - DNA, 88 bp, Artificial Sequence
  ENSG00000213079_45 (sequence is synthesized)
aactgtgaaaagctcagaacctgttaaagagacggtccagacaactcagagcccaactccagttgaaaaggagacagtggtcacaacc

SEQ ID NO: 754208 - DNA, 120 bp, Artificial Sequence
  ENSG00000213085_0 (sequence is synthesized)
aacactagggccttggcggcgccgaggcggcagcagaagtccggagtcagggcgtgtggctgaggagatgccactaagcacagctggcatcctgagctcctcttctgccgcttccaacag

SEQ ID NO: 754209 - DNA, 120 bp, Artificial Sequence
  ENSG00000213085_1 (sequence is synthesized)
gtcaaggaataaggctcgctatcggaccaaagccgtgagctctgaggtggatgagagcctctttggagatatcaagtccccagcccagggccagagcgacagccccattgtgctgctccg

SEQ ID NO: 754210 - DNA, 120 bp, Artificial Sequence
  ENSG00000213085_2 (sequence is synthesized)
agataagcatacccttcaaaaaactctcactgctttgggcttggatcgcaagccagagaccatccagctcatcacccgggacatggtccgagaactcattgttcccacagaggatccctc

SEQ ID NO: 754211 - DNA, 120 bp, Artificial Sequence
  ENSG00000213085_3 (sequence is synthesized)
cggggagtccctaatcatcagccctgaggagtttgagcgaatcaaatgggcatcccatgtcctgaccagagaagaacttgaggccagggaccaggccttcaagaaggagaaggaagccac

SEQ ID NO: 754212 - DNA, 120 bp, Artificial Sequence
  ENSG00000213085_4 (sequence is synthesized)
catggatgcagtgatgacacgaaagaagatcatgaaacagaaggagatggtgtggaacaacaacaagaagctcagtgacctggaggaggtggccaaggaacgggcccagaacctcctgca

SEQ ID NO: 754213 - DNA, 120 bp, Artificial Sequence
  ENSG00000213085_5 (sequence is synthesized)
gagagccaacaagctgcggatggagcaggaggaggagctcaaggacatgagcaagattatcctcaatgctaagtgccatgccatccgggatgcccaaatcctggagaagcagcagatcca

SEQ ID NO: 754214 - DNA, 120 bp, Artificial Sequence
  ENSG00000213085_6 (sequence is synthesized)
aaaagaactggacacagaagagaagcggttggatcagatgatggaagtggagcggcagaaatccattcaaaggcaggaggaactggagaggaagaggagggaggaaagaattagaggaag

SEQ ID NO: 754215 - DNA, 120 bp, Artificial Sequence
  ENSG00000213085_7 (sequence is synthesized)
cgctgcttgctgagcagcgggagcaggagaaggagcagatgctggaatatatggaacagctccaagaggaagatctaaaggacatggaacgaaggcagcaacaaaaactgaagatgcaag

SEQ ID NO: 754216 - DNA, 120 bp, Artificial Sequence
  ENSG00000213085_8 (sequence is synthesized)
ctgagattaagcgcatcaatgatgaaaaccagaaacagaaagcagaactgctggctcaggagaagctggcagaccagatggtgatggagtttaccaagaagaagatggctcgagaagcag

SEQ ID NO: 754217 - DNA, 120 bp, Artificial Sequence
  ENSG00000213085_9 (sequence is synthesized)
agtttgaggctgagcaggagagaatccggagggagaaagagaaggagatcgcacgcttgagggccatgcaggagaaggcccaggattaccaggcagaacaggatgccttgcgggccaagc

SEQ ID NO: 754218 - DNA, 120 bp, Artificial Sequence
  ENSG00000213085_10 (sequence is synthesized)
gcaaccaggaggttgcagacagagagtggcgcagaaaggaaaaggaaaatgcgcggaagaagatggaaacagaggctgagctgcgaaaaagtcggctcgaacaggtggctttcaaggagc

SEQ ID NO: 754219 - DNA, 120 bp, Artificial Sequence
  ENSG00000213085_11 (sequence is synthesized)
acgctctggctgttcaggtgcaacgggaccgggatgagttcgagaggattcttcgggctcagagagaacagattgagaaggagcggctggaggaggagaaaaaggccacagggcgcttac

SEQ ID NO: 754220 - DNA, 120 bp, Artificial Sequence
  ENSG00000213085_12 (sequence is synthesized)
agcatgccaatgagctccggcgccaggtgcgcgagaaccagcagaaggaagtgcagaaccggattgccacctttgaggagggccggcgcctcaaagaggaggcccagaaacgccgtgagc

SEQ ID NO: 754221 - DNA, 120 bp, Artificial Sequence
  ENSG00000213085_13 (sequence is synthesized)
gcatcgatgagatcaagaggaaaaagcttgaagagctgagagccactggccttcccgagaagtactgcattgaagctgagcgcaaagctaacatcctgccagctacctctgtgaactgag

SEQ ID NO: 754222 - DNA, 120 bp, Artificial Sequence
  ENSG00000213085_14 (sequence is synthesized)
gggagccttcgtggccctcaggatgccttcgggggacagattctgcccagtctctgggcatccataattgctgctaacctagacatttcatagttacagattaaatctacttgactttaa

SEQ ID NO: 754223 - DNA, 120 bp, Artificial Sequence
  ENSG00000213085_15 (sequence is synthesized)
gatggccaacttggtcccaattgaagaaagaggataattgcgtggatcactcagagtaaaaggcaaggggtctcgtgcatgggaatctccctttcttggtaaccaaagtctacagaaagg

SEQ ID NO: 754224 - DNA, 120 bp, Artificial Sequence
  ENSG00000213085_16 (sequence is synthesized)
gaagtagaaccaggccaagagtttgaagcctgaatttgccagcctgcggagactgtgcaaaagaagaactagatctcagaatggccactaagcacagctggcatcctgagctcctcttct

SEQ ID NO: 754225 - DNA, 120 bp, Artificial Sequence
  ENSG00000213085_17 (sequence is synthesized)
gtccatattggatagagagaagctttctggcatgttaacagatgctcgtcgatcttgtctgggttggtgggatcattataactagatggatgattgaaacttttaaaaatcacttgagcc

SEQ ID NO: 754226 - DNA, 120 bp, Artificial Sequence
  ENSG00000213085_18 (sequence is synthesized)
aagaattatgtgattagagaattgggagatagcacctggaattgcttaaggaattggtgatgactgggattatttaccctggaacagtaaaagtataaataaaggtaaaattctggtcca

SEQ ID NO: 754227 - DNA, 120 bp, Artificial Sequence
  ENSG00000213085_19 (sequence is synthesized)
aagcatgcccatgacatacagtcatgcgaccctggagctagtcctggctgggtaggagaagggggcatgcatgtgcagcagcttttgggggctgatccttgagttacaaaatggggctgg

SEQ ID NO: 754228 - DNA, 120 bp, Artificial Sequence
  ENSG00000213085_20 (sequence is synthesized)
agcccagagggctgtggtctctgaggcatgtctactgaaggagcccacccaggaggctcccccaccacctttcctggcctgggccagctcagctgagttcattccattcctgtttccctc

SEQ ID NO: 754229 - DNA, 120 bp, Artificial Sequence
  ENSG00000213088_0 (sequence is synthesized)
attagtccttggctcttatcttggaagcacaggcgctgacagccgtcccagcccttctgtctgcgggcctgaaccaaacggtgccatggggaactgtctgcacagggcggagctctcccc

SEQ ID NO: 754230 - DNA, 120 bp, Artificial Sequence
  ENSG00000213088_1 (sequence is synthesized)
ctcaactgagaactcaagtcagctggacttcgaagatgtatggaattcttcctatggtgtgaatgattccttcccagatggagactatggtgccaacctggaagcagctgccccctgcca

SEQ ID NO: 754231 - DNA, 120 bp, Artificial Sequence
  ENSG00000213088_2 (sequence is synthesized)
ctcctgtaacctgctggatgactctgcactgcccttcttcatcctcaccagtgtcctgggtatcctagctagcagcactgtcctcttcatgcttttcagacctctcttccgctggcagct

SEQ ID NO: 754232 - DNA, 120 bp, Artificial Sequence
  ENSG00000213088_3 (sequence is synthesized)
ctgccctggctggcctgtcctggcacagctggctgtgggcagtgccctcttcagcattgtggtgcccgtcttggccccagggctaggtagcactcgcagctctgccctgtgtagcctggg

SEQ ID NO: 754233 - DNA, 120 bp, Artificial Sequence
  ENSG00000213088_4 (sequence is synthesized)
ccacagactgggtgcaggccaggtcccaggcctcaccctggggctcactgtgggaatttggggagtggctgccctactgacactgcctgtcaccctggccagtggtgcttctggtggact

SEQ ID NO: 754234 - DNA, 120 bp, Artificial Sequence
  ENSG00000213088_5 (sequence is synthesized)
ctgcaccctgatatacagcacggagctgaaggctttgcaggccacacacactgtagcctgtcttgccatctttgtcttgttgccattgggtttgtttggagccaaggggctgaagaaggc

SEQ ID NO: 754235 - DNA, 120 bp, Artificial Sequence
  ENSG00000213088_6 (sequence is synthesized)
attgggtatggggccaggcccctggatgaatatcctgtgggcctggtttattttctggtggcctcatggggtggttctaggactggatttcctggtgaggtccaagctgttgctgttgtc

SEQ ID NO: 754236 - DNA, 120 bp, Artificial Sequence
  ENSG00000213088_7 (sequence is synthesized)
aacatgtctggcccagcaggctctggacctgctgctgaacctggcagaagccctggcaattttgcactgtgtggctacgcccctgctcctcgccctattctgccaccaggccacccgcac

SEQ ID NO: 754237 - DNA, 120 bp, Artificial Sequence
  ENSG00000213088_8 (sequence is synthesized)
cctcttgccctctctgcccctccctgaaggatggtcttctcatctggacacccttggaagcaaatcctagttctcttcccacctgtcaacctgaattaaagtctacactgcctttgtgaa

SEQ ID NO: 754238 - DNA, 120 bp, Artificial Sequence
  ENSG00000213088_9 (sequence is synthesized)
caagggagagaagtgtgttcacttccttttgctaagcccttcctttccagagagtgtcttggggggcatctgactgcttccccccaccctctgccaggcattgctggagaatgttaagac

SEQ ID NO: 754239 - DNA, 120 bp, Artificial Sequence
  ENSG00000213088_10 (sequence is synthesized)
ggcgatggagatgccatcaaccccaccctgcagagcatcaccagacacccgccaagcccctcacatacagatatgtgcacaatgatacacagcaaacgtacacagagttcagtacacaca

SEQ ID NO: 754240 - DNA, 120 bp, Artificial Sequence
  ENSG00000213088_11 (sequence is synthesized)
aagagctcacgcccacgtgcacacacccctcagttgggacagagttgaccaccaccacctttctcccaaacacatggcttttgaactgcctttccttggatccagttcaaggggatggag

SEQ ID NO: 754241 - DNA, 120 bp, Artificial Sequence
  ENSG00000213088_12 (sequence is synthesized)
gagcagtgagagtcagccgcccttccactccaatttcccagcacctcccttatctctgcctcacaagtcacccagcccccctctcttccttccttgtgcttgaagaatctctccttgctg

SEQ ID NO: 754242 - DNA, 120 bp, Artificial Sequence
  ENSG00000213088_13 (sequence is synthesized)
gaaagccccctgttttctcaatctccctttccacttcggtaaaatctctacttgctggaaagccccctgttttctcaatctccctttccacttcggtaaaatgcccactttctggtcccc

SEQ ID NO: 754243 - DNA, 120 bp, Artificial Sequence
  ENSG00000213088_14 (sequence is synthesized)
acctttttcctgagtgtagtcccaaccagccaaatccaacctcaaaacaggaagacccaaggccagtgacccccataggcctgaggcttgtgcaggcagtgggcgtggggtaaggcttcc

SEQ ID NO: 754244 - DNA, 120 bp, Artificial Sequence
  ENSG00000213088_15 (sequence is synthesized)
attagtccttggctcttatcttggaagcacaggcgctgacagccgtcccagcccttctgtctgcgggcctgaaccaaacggtgccatggggaactgtctgcacagggagactcttccggt

SEQ ID NO: 754245 - DNA, 120 bp, Artificial Sequence
  ENSG00000213088_16 (sequence is synthesized)
ggcttccccaggactgttcctgctccggctcttcaggctccctgctttgtccttttccactgtccgcactgcatctgactcctgcagagaccttgttctcccacccgaccttcctctctg

SEQ ID NO: 754246 - DNA, 120 bp, Artificial Sequence
  ENSG00000213096_0 (sequence is synthesized)
gtctctcgctgtcgccggagtcccaggtctgtcttcactgctctgtgtcctctgctcctagaggcccagcctctgtggcgctgttaccagcaggtattggagatccacagctaagatgcc

SEQ ID NO: 754247 - DNA, 81 bp, Artificial Sequence
  ENSG00000213096_1 (sequence is synthesized)
cacctggacattgcacagcagaatttatatagaaatgtgatgttagagaactacagaaacctggccttcctgggtattgct

SEQ ID NO: 754248 - DNA, 120 bp, Artificial Sequence
  ENSG00000213096_2 (sequence is synthesized)
gttagagaactacagaaacctggccttcctgggtattgctgtctctaagccagacctgatcacctgtctggaacaagggaaagagccctggaatatgaagcgacatgagatggtggatga

SEQ ID NO: 754249 - DNA, 120 bp, Artificial Sequence
  ENSG00000213096_3 (sequence is synthesized)
acccccaggtatgtgtcctcattttgctcaagacctttggccagagcagggcatggaagattcttttcaaaaagcaatactgagaagatatggaaaatatggacatgagaatttacagtt

SEQ ID NO: 754250 - DNA, 120 bp, Artificial Sequence
  ENSG00000213096_4 (sequence is synthesized)
aagaaaaggctgtaaaagtgtggatgagtataaggtgaacaaagaaggttataatggacttaaccagtgtttcacaactgcccagagcaaagtatttcaatgtgataaatatttgaaagt

SEQ ID NO: 754251 - DNA, 120 bp, Artificial Sequence
  ENSG00000213096_5 (sequence is synthesized)
cttctataaatttttaaattcaaacagacctaagataagacatactgaaaagaaatctttcaaatgtaaaaaacgtgtcaaattattttgcatgctttcacataaaacccaacacaaaag

SEQ ID NO: 754252 - DNA, 120 bp, Artificial Sequence
  ENSG00000213096_6 (sequence is synthesized)
catttatcatagagagaagtcctacaaatgtaaagaatgtggaaaaacctttaattggtcctcaacccttactaatcataggaaaatttatactgaagagaaaccttacaaatgtgaaga

SEQ ID NO: 754253 - DNA, 120 bp, Artificial Sequence
  ENSG00000213096_7 (sequence is synthesized)
aatttatactgaagagaaaccttacaaatgtgaagaatataacaaatctcctaagcaactctcaacccttactacacatgaaataattcatgctggagagaaactctacaaatgtgaaga

SEQ ID NO: 754254 - DNA, 88 bp, Artificial Sequence
  ENSG00000213096_8 (sequence is synthesized)
agagaaaccttacaagtgtgaagaatgtggcaaagcatttatctggtcctcaacccttactgagcataagaaaattcatactagaagc

SEQ ID NO: 754255 - DNA, 88 bp, Artificial Sequence
  ENSG00000213096_9 (sequence is synthesized)
agaaaattcatactagaagcatttatatggtcctcaacactaactagacataagaggatgcacactggagagaaaccctacaaatgtg

SEQ ID NO: 754256 - DNA, 120 bp, Artificial Sequence
  ENSG00000213096_10 (sequence is synthesized)
cataagataattcatactggagagaaacgctacaaatgcttagaatgtggcaaagcttttaagcaactctcaactcttactacacataaaataattcatgttggagagaaactctacaaa

SEQ ID NO: 754257 - DNA, 90 bp, Artificial Sequence
  ENSG00000213096_11 (sequence is synthesized)
aactctcaactcttactacacataaaataattcatgtcggcaaaggttttaatcgatcttcaaatcttactacacataagataattcata

SEQ ID NO: 754258 - DNA, 84 bp, Artificial Sequence
  ENSG00000213096_12 (sequence is synthesized)
agagaaaccttacaagtgtgaagaatgtggcaaagcatttatctggtcctcaacccttactaaacataagagaattcatactgc

SEQ ID NO: 754259 - DNA, 76 bp, Artificial Sequence
  ENSG00000213096_13 (sequence is synthesized)
aggcatttatatggtcctcaaccctaactagacataagaggatcttttagccaatcctcaacccttactacacata

SEQ ID NO: 754260 - DNA, 85 bp, Artificial Sequence
  ENSG00000213096_14 (sequence is synthesized)
ttactaaacataagaaaatgtggcaaagcctttaagcagtcttcaatccttactaaccataagagaattcatactggagagaaac

SEQ ID NO: 754261 - DNA, 120 bp, Artificial Sequence
  ENSG00000213096_15 (sequence is synthesized)
agagaattcatactggagagaaaccctataaatgtgaagaatgtggcaaatcttttaaccggtcttcaacttttactaaacataaggtaattcatactggagtaaaaccctacaaatgtg

SEQ ID NO: 754262 - DNA, 120 bp, Artificial Sequence
  ENSG00000213096_16 (sequence is synthesized)
ctaaacataagagaattcatactggagagcaaccctacaaatgggaaaaatttggcaaagcctttaatcggtcctcgcacctcaccacagataagataactcattggagagaaatcttac

SEQ ID NO: 754263 - DNA, 120 bp, Artificial Sequence
  ENSG00000213096_17 (sequence is synthesized)
ctcaccacagataagataactcattggagagaaatcttacaagtatgaataatgtgccaaagcctaagaaaaccctcaattcttaatagatataagattattcctactggagagaaacta

SEQ ID NO: 754264 - DNA, 120 bp, Artificial Sequence
  ENSG00000213096_18 (sequence is synthesized)
caaacctgagagaggcgctaatgcttttgacagtacctaaaactttaaagaaaatcattctgctgaaaaatcctagaaatgtgaagaatgtgaaaaagcctttaaatgattgtcacactt

SEQ ID NO: 754265 - DNA, 120 bp, Artificial Sequence
  ENSG00000213096_19 (sequence is synthesized)
gattgtaggtaagataattcatactggagaaaactaccagtgtgaacaacgtggccaagcttcgacaatgctcacaccctattgcacaggaaagcatttatacttgagaagaaatgtaca

SEQ ID NO: 754266 - DNA, 120 bp, Artificial Sequence
  ENSG00000213096_20 (sequence is synthesized)
aatattggcaaagtaaaaaatccattaacacctgctcacatcttactcaaaattgtagagttcatagtaaataaaagcattaaaattctaattactctcagaagatctgtcagaaagtat

SEQ ID NO: 754267 - DNA, 120 bp, Artificial Sequence
  ENSG00000213096_21 (sequence is synthesized)
gtctttaaagtatagaagagcatttattttgaaaaaaacattacacatatgaagaggattgtaatatctttacttgtaccacagatcttattgtacacattttatactagagaaaaaccc

SEQ ID NO: 754268 - DNA, 120 bp, Artificial Sequence
  ENSG00000213096_22 (sequence is synthesized)
tcaggcagttgttaaaattttgttgaacatcagggagtttaagaaaaccctgcaagtataatgaatttggaaaaacattttttcaaaaactacaaattataaaacaccaaagtgttcata

SEQ ID NO: 754269 - DNA, 120 bp, Artificial Sequence
  ENSG00000213096_23 (sequence is synthesized)
ctaaaatatatttttgcagatacattaaatatgaaagatattcaatccaaaattaagtctatgtaaatatcagggaataattcacagtagaaatatctagggcattcaagctttagacat

SEQ ID NO: 754270 - DNA, 120 bp, Artificial Sequence
  ENSG00000213096_24 (sequence is synthesized)
tacactaaatcagagtgctgagtatagaaaataatacaaacagatttgtctaaacatttgtatataactttaaaaatagaatattttttggagggttataattacattcaaagtactttt

SEQ ID NO: 754271 - DNA, 120 bp, Artificial Sequence
  ENSG00000213096_25 (sequence is synthesized)
ttttgaaaatacagattttttttaaaagtgaataatgtgttcaactcttaaattcatgctgtttcatcattgctggtgtattcatatgtgaaagcatgtgactaattgttgctgcataaa

SEQ ID NO: 754272 - DNA, 120 bp, Artificial Sequence
  ENSG00000213096_26 (sequence is synthesized)
agatatgagattcttttttattaggcattatttatgaccttttctatgaaaagataaggacattaaaatgtaagatgcgtgaggaaaatttaggtagagaggctctttgtggttaactta

SEQ ID NO: 754273 - DNA, 120 bp, Artificial Sequence
  ENSG00000213096_27 (sequence is synthesized)
taatattgagtgatgcatgaggtaggtgttcagaataatattcctctgcattattatgaatgaaaagcattcttaattttagttaaaattaagttagtcatatgttattttattaattgt

SEQ ID NO: 754274 - DNA, 120 bp, Artificial Sequence
  ENSG00000213096_28 (sequence is synthesized)
acttctatgaaataatatgcagtctatttttaaattataaattatgtgtgaacttagcttttcaattcaacatttttaacatattaaatactattgtgaattcaatgaagtgttcttatg

SEQ ID NO: 754275 - DNA, 120 bp, Artificial Sequence
  ENSG00000213096_29 (sequence is synthesized)
ccactaactttaacctattcccttactcaaggatgtaggtaaaagatggtaacaatacactatttggtaagataatgtactgacatctctagcaatcttttttgccagtggctttaaatt

SEQ ID NO: 754276 - DNA, 120 bp, Artificial Sequence
  ENSG00000213096_30 (sequence is synthesized)
aattgccaataagttaaagaatattgttcctatgggttaaatttttattcttattttcacatttaaatttatttttcttaatttttgtggatacataatatgtgtatatatgtatgccat

SEQ ID NO: 754277 - DNA, 120 bp, Artificial Sequence
  ENSG00000213096_31 (sequence is synthesized)
ggtatattttgatgcaggcatactctatataataatcacattagaggaaatgagatatccattacctctagcatttattctttttattacaagcaattcaattgtacacttttagttatt

SEQ ID NO: 754278 - DNA, 120 bp, Artificial Sequence
  ENSG00000213096_32 (sequence is synthesized)
attgtacacttttagttatttttaaatttacaatgttattgattacagggtcatttttatggtcataataaaaaattttatacaaacgtgtaaaatctatacatttctgagttctgaata

SEQ ID NO: 754279 - DNA, 86 bp, Artificial Sequence
  ENSG00000213096_33 (sequence is synthesized)
tgcaagctctgtctcccgggttcacgccgttctcagcctctcgagcagctggaactaccaatggcacaatctcggctcactgcaac

SEQ ID NO: 754280 - DNA, 120 bp, Artificial Sequence
  ENSG00000213096_34 (sequence is synthesized)
ttactgtgaagaaaaacactggaattttgataaggagttctttaaatctacaggtcactttggataatatggcagtttcataatacttattctttcaatagaaataaaacattttaaaat

SEQ ID NO: 754281 - DNA, 120 bp, Artificial Sequence
  ENSG00000213096_35 (sequence is synthesized)
cctggggacaaaaagaagagaaacttatatttttctctctgtggagcagctcattgttcctgaatcttttttgttgtaaaggacagaaatgggtagagtttttgtgtcttgagccttctg

SEQ ID NO: 754282 - DNA, 120 bp, Artificial Sequence
  ENSG00000213096_36 (sequence is synthesized)
actttgagtgtggtggtaacaggtgaacatgtgctcaaatttttaaaggcatattgtcaagatgcaggtgtaattagtccagaatatctcatctgagaaagaattctagaggaggaggag

SEQ ID NO: 754283 - DNA, 120 bp, Artificial Sequence
  ENSG00000213096_37 (sequence is synthesized)
agagaaaaagtgactttttttttcagctaaacgtgtcccagatcaagagctgtgtctactctgctttctggaatgccttgcatttagtacttgcaaatcttcacttctatacctgtgttt

SEQ ID NO: 754284 - DNA, 120 bp, Artificial Sequence
  ENSG00000213096_38 (sequence is synthesized)
tttctccctaataagtttttcttaactacttttaaaaatgcttatgatagtcgagggtgtctgaaaaatttttctatatacaagaatcttctctacatcatggctttttatatgccatgt

SEQ ID NO: 754285 - DNA, 120 bp, Artificial Sequence
  ENSG00000213096_39 (sequence is synthesized)
aagattctcaccatgaatttgtgatctgcaatattaaaaatgttctccttgtggctgatgaacatggagaggggtggatactcaatatttctgtggggaaaacctggggttcttagtaaa

SEQ ID NO: 754286 - DNA, 120 bp, Artificial Sequence
  ENSG00000213096_40 (sequence is synthesized)
gacatagaatatgtaatgttgaggttctatctgtgttctttattatctgtatgcattacacaattaagaaaatactcatttaaacaggatggcatttattacccagaaagctctgaaaaa

SEQ ID NO: 754287 - DNA, 120 bp, Artificial Sequence
  ENSG00000213096_41 (sequence is synthesized)
attatcaagagatacctccttattagggtgctatagaaagactacttaaaatcactattacaaattacagaacatgaaagatatctgtatcttgaacttcccataaaactgatgttttct

SEQ ID NO: 754288 - DNA, 120 bp, Artificial Sequence
  ENSG00000213096_42 (sequence is synthesized)
tatgattaaattcagactgtaatttagtgggtacaatatctcagtagtaatgtcgtgtccttctgggtgcatcagcacactataaaaacctgtcctagtgcagttgatgttgatgctaat

SEQ ID NO: 754289 - DNA, 120 bp, Artificial Sequence
  ENSG00000213096_43 (sequence is synthesized)
aactcaataagctctcttacagattttttcactatagaattatttttctcttcatcattagatatctttatggagctgatgtgcataaaccatcacgtttaatctggctgccttttgttt

SEQ ID NO: 754290 - DNA, 120 bp, Artificial Sequence
  ENSG00000213096_44 (sequence is synthesized)
tgccttttgttttttgtctttttcttttttttaggttttctttacatttatttttctttggtaaatgaaagctctcatctttgtttacaggctagaaaaactaaaaaaaaaaacaaaaaa

SEQ ID NO: 754291 - DNA, 120 bp, Artificial Sequence
  ENSG00000213096_45 (sequence is synthesized)
gctcttccacttactggatgtttgacaaaatagtcttttggggccaaaacattggcattactggtgagcttggtagagattcattaactcagactttatttcagatctccccaaaaaata

SEQ ID NO: 754292 - DNA, 120 bp, Artificial Sequence
  ENSG00000213096_46 (sequence is synthesized)
atctgcattaacaagatgtccagtttattgtacacgttaaaatttgagtggtaccttctaactcaagatgtctattttgtctgaaaaatataaacaactatgtctttttcatctgaaaaa

SEQ ID NO: 754293 - DNA, 120 bp, Artificial Sequence
  ENSG00000213096_47 (sequence is synthesized)
tatacataactcattctgcattatgtaaacgtagcactcaaaaatgtatgttagtgtttatgccttcaattttacatgttatcttccagacaagtatcacatatacactgatgtggatat

SEQ ID NO: 754294 - DNA, 120 bp, Artificial Sequence
  ENSG00000213096_48 (sequence is synthesized)
catgtgttgacaattattttattggataatttcaatcactcttataagtcagaaccagttctatttactctaattttaccttgagtcaaatgaaaaattctgccgatagccactttgtaa

SEQ ID NO: 754295 - DNA, 120 bp, Artificial Sequence
  ENSG00000213096_49 (sequence is synthesized)
gatttctgttttcaagaaaatactggggatttgtctgttgagaaaggaatttcttcaagatgtttcatcttgacctgaactttccacattcctgagctaatctgtgtcctgcactttaga

SEQ ID NO: 754296 - DNA, 120 bp, Artificial Sequence
  ENSG00000213096_50 (sequence is synthesized)
ttaaggctaatttcagaagtttagtggcataaaatattgttacatcttaaaatccatttggcatcaccaatttttgattcagtagtaccaggcagtgaaattaagaacctaaaaaattaa

SEQ ID NO: 754297 - DNA, 120 bp, Artificial Sequence
  ENSG00000213096_51 (sequence is synthesized)
aatatttcctaaatatttaaaaatttctgttataaattagtgtattagaataactttgttagcatattctattatatcctccttactgagcacattactaagttggtaattggagaatat

SEQ ID NO: 754298 - DNA, 120 bp, Artificial Sequence
  ENSG00000213096_52 (sequence is synthesized)
aagcaagattcatttagttatttttaataaaacaggtattgctgtctctaagccagacctgatcacctgtctggaacaagggaaagagccctggaatatgaagcgacatgagatggtgga

SEQ ID NO: 754299 - DNA, 120 bp, Artificial Sequence
  ENSG00000213096_53 (sequence is synthesized)
tgaacccccaggtaggtgagagtgaatacaacagatgacatggatgagaggtccaaagtcaagaagaaagccactctttaaagtgatttaagaagctgtgatccaaaggaaatagtttct

SEQ ID NO: 754300 - DNA, 120 bp, Artificial Sequence
  ENSG00000213096_54 (sequence is synthesized)
gggaagcctaaattttttttttaaattatactctcacataggggcatcttctgcttatgcctataaaatctaagaattctactttcccttcaatgatcttcctccaagtttacagtgaca

SEQ ID NO: 754301 - DNA, 120 bp, Artificial Sequence
  ENSG00000213096_55 (sequence is synthesized)
gccgaagtactgttcatggcatacaaaagagtgtacaatctgacttcttttttcttgttttgtggacagacagatctgtctccataattttgagatactgtatgttaaactgttttttaa

SEQ ID NO: 754302 - DNA, 120 bp, Artificial Sequence
  ENSG00000213096_56 (sequence is synthesized)
gttctctttttgcatcatgtctgaaatgtgtgagagtagtagtttctgttatattgggttttttctttttggtttatttttctgcacatttcatcctgttttcattactgtagtcttgaa

SEQ ID NO: 754303 - DNA, 120 bp, Artificial Sequence
  ENSG00000213096_57 (sequence is synthesized)
aatcaagcgcgcagttgaagaggagtgcatggtttccggcatttggctgggcctttgtctctcgctcccaccagagcttggaatccgtctctgctcttctgcattctccacctcgggagc

SEQ ID NO: 754304 - DNA, 120 bp, Artificial Sequence
  ENSG00000213096_58 (sequence is synthesized)
ccctggggactctgtgacggcctctgttgccctgtgatctgcaggtccggagagacgcacagctaagatgtcaggacatcctggaagctgggaaagggtcttgccatctctaagctggac

SEQ ID NO: 754305 - DNA, 120 bp, Artificial Sequence
  ENSG00000213123_0 (sequence is synthesized)
gccctggagacgctttccctgctgccggccgcgaccgcaacccgctaggccttcatcgcgagctacgcccggaccgagaagccccggcatggccacgtccatcggagtgtccttctcggt

SEQ ID NO: 754306 - DNA, 120 bp, Artificial Sequence
  ENSG00000213123_1 (sequence is synthesized)
gggcgacggggtgcctgaggctgagaagaacgcaggggagcccgagaacacctatattctgcggcctgttttccagcagaggttcaggccctctgtggttaaagactgtatccatgctgt

SEQ ID NO: 754307 - DNA, 120 bp, Artificial Sequence
  ENSG00000213123_2 (sequence is synthesized)
gaatattctccagaagaaatgcctcagcttacaaaacatttatcagaaaacattaaagataaattaaaagaaatgggatttgaccgatacaaaatggtggtgcaagtagtgattggagaa

SEQ ID NO: 754308 - DNA, 120 bp, Artificial Sequence
  ENSG00000213123_3 (sequence is synthesized)
caaagaggtgaaggagtattcatggcttctcgctgtttctgggatgctgacactgacaactatactcatgatgttttcatgaatgacagtttattctgcgttgtagcagcatttggctgt

SEQ ID NO: 754309 - DNA, 120 bp, Artificial Sequence
  ENSG00000213123_4 (sequence is synthesized)
ttctactactgaatgaatctttgaaaagctggtaaaagacatgaccatgaagaaatctgaactttttaatattgttaaatatcttgacaaaataaagatgttagtagtttgacaactgaa

SEQ ID NO: 754310 - DNA, 120 bp, Artificial Sequence
  ENSG00000213123_5 (sequence is synthesized)
gtcagagtacctggctggtcacctctagttgcaagcagcttcatctgactctagtttctccggtttacccagtatactctctggtacaaatacaatactctgtgggtacctacctgtgaa

SEQ ID NO: 754311 - DNA, 120 bp, Artificial Sequence
  ENSG00000213123_6 (sequence is synthesized)
tatgttcctttttttcatttcatgttctgagttacctatttttattgcattttacaaaagcatccttccatgaaggaccggaagttaaaaacaaagcaggtcctttatcacagcactgtc

SEQ ID NO: 754312 - DNA, 120 bp, Artificial Sequence
  ENSG00000213139_0 (sequence is synthesized)
gtagccattcctgaatttctttcagcactgggaaaaccagtctatgcaccaaaaatgtctaaaactggaaccaagattactttctatgaagacaaaaattttcaaggccgtcgctatgac

SEQ ID NO: 754313 - DNA, 120 bp, Artificial Sequence
  ENSG00000213139_1 (sequence is synthesized)
tgtgattgcgactgtgcagatttccacacatacctaagtcgctgcaactccattaaagtggaaggaggcacctgggctgtttatgaaaggcccaactttgctgggtacatgtacatctta

SEQ ID NO: 754314 - DNA, 120 bp, Artificial Sequence
  ENSG00000213139_2 (sequence is synthesized)
ccacagggagagtaccctgaataccagcgttggatgggcctcaacgaccgcctcagctcctgcagagctgttcatctgcctagtggaggccagtataagattcagatctttgagaaaggg

SEQ ID NO: 754315 - DNA, 120 bp, Artificial Sequence
  ENSG00000213139_3 (sequence is synthesized)
ttagtggtcagatgtatgaaaccaccgaagattgcccttccatcatggagcaatttcacatgcgagagatccactcctgtaaggtgctggagggtgtctggattttctatgagctaccca

SEQ ID NO: 754316 - DNA, 120 bp, Artificial Sequence
  ENSG00000213139_4 (sequence is synthesized)
actaccgtggcaggcagtacctcctggacaagaaggagtaccggaagcccatcgattggggtgcagcctccccagctgtccagtctttccgccgcattgtggagtaatgacatgaatggg

SEQ ID NO: 754317 - DNA, 120 bp, Artificial Sequence
  ENSG00000213139_5 (sequence is synthesized)
gccatattcttcctggggcccaaatgctggctggccttgtggtccaaataggcatcatcaataaaacagttggcatgcatcccactgctgactataatgcctctccttaaatgcttctag

SEQ ID NO: 754318 - DNA, 120 bp, Artificial Sequence
  ENSG00000213139_6 (sequence is synthesized)
ggaccagcaatacagtgctcgccacagtgggcagtcacacaaagctacccatctgccagatcaccaatctagatctttgtgccaaacaaaatgagatctcattaaaaggttagaaagtca

SEQ ID NO: 754319 - DNA, 120 bp, Artificial Sequence
  ENSG00000213139_7 (sequence is synthesized)
ggcgtgagccaccgtgcccagccttctgttctatttaagaactttgatttccattccattttcatttattactgtttaggccgaattttcgctaaacttctgactttcatataaacatat

SEQ ID NO: 754320 - DNA, 120 bp, Artificial Sequence
  ENSG00000213139_8 (sequence is synthesized)
ggttttcaggaactgcttggtgaatccttgggagttcctaggaactctgtctcctgtttcagccagaaaagctctgagagttgttttaaagccagaacttccagtctgctgtagtcttca

SEQ ID NO: 754321 - DNA, 120 bp, Artificial Sequence
  ENSG00000213139_9 (sequence is synthesized)
aataggaagctgaagctcagagaggtggctggatgaagatagtaaggctaattgtagagagggagctctgtagtccagacttactgtttctgctttcacagggctgcatatttttcagtg

SEQ ID NO: 754322 - DNA, 120 bp, Artificial Sequence
  ENSG00000213139_10 (sequence is synthesized)
ccatcagagacttaccccaggcattgtggtagaaacttgataagcgttggaggcaaagaggattcttatcattttgttactttgcaactactctgttggcaataaactaataataaagaa

SEQ ID NO: 754323 - DNA, 120 bp, Artificial Sequence
  ENSG00000213139_11 (sequence is synthesized)
catgatatgatacattttcatgtatgaaagctctacatctatctaaaataagctctgtaaagctaaggttcatgctttatttttctctatgtatcctccatatcacctaggagtcatctt

SEQ ID NO: 754324 - DNA, 120 bp, Artificial Sequence
  ENSG00000213139_12 (sequence is synthesized)
catgaaacaattattgaagtcaagtgatgggcacagaggattgatagctcaaataaggcttggtacttgcccttggaaaaagtatgctaggattctggtgggaggggtagacatataaat

SEQ ID NO: 754325 - DNA, 120 bp, Artificial Sequence
  ENSG00000213139_13 (sequence is synthesized)
ggataatttataatatgatgtaagtacagagagctgtgggaacataaaggaaggaaaatgaacttgagtctgagactgctcacttctattagagccctcttctgttttgcttcatgttca

SEQ ID NO: 754326 - DNA, 120 bp, Artificial Sequence
  ENSG00000213139_14 (sequence is synthesized)
aattgaggtgaaaggaatttctaaagtaggcattatgttcttaatttttatctgtgaattaagccacccagctcctcagctctttctctgttggccctctacttcagattactttctatg

SEQ ID NO: 754327 - DNA, 120 bp, Artificial Sequence
  ENSG00000213145_0 (sequence is synthesized)
aactttgcagcgtacttggaccgctctggccgccctgggcgctacccgcagagataagggcccctccctgcgcccggtccgggcatctccgagccggcctgggggtggctgaactctctt

SEQ ID NO: 754328 - DNA, 120 bp, Artificial Sequence
  ENSG00000213145_1 (sequence is synthesized)
ttgccggccgaaaccccagcccccgcagcccccgcagccgatcggtcctcaagctacagctcccctctctgggagtccccgcttttgaattccccggggatgttcccgctgcggtccgat

SEQ ID NO: 754329 - DNA, 120 bp, Artificial Sequence
  ENSG00000213145_2 (sequence is synthesized)
ggacctcccagagcagcggaggtcaggggagctagcagaggcggggacgtcccttgggagtgaggggactgacaggggcggcctcgtaaccctgcgtgggatggaaggtcagagtgggtt

SEQ ID NO: 754330 - DNA, 120 bp, Artificial Sequence
  ENSG00000213145_3 (sequence is synthesized)
cctcggtggggggcaacagcgggggctctccggcaattgtccccgaccctccgtcctggggagggcaggatcagcgcgcgggctgctttgcatctctttgcattttagtgatgtttggtc

SEQ ID NO: 754331 - DNA, 120 bp, Artificial Sequence
  ENSG00000213145_4 (sequence is synthesized)
cagtcctggcccgggcagatctggggttcgggcgggtgccggtggggtagggctgggggtgggagcggcgtttcctgctgcgggtgagccttttgcctcggaactggacccgggagacat

SEQ ID NO: 754332 - DNA, 120 bp, Artificial Sequence
  ENSG00000213145_5 (sequence is synthesized)
cctgcctgaaggcgggggtggaccagatgatctttcttgggccctgggcctagattcgaggtccccagggtccaagtcctgggttcagagggcggggcgcgaggggcggggtctccaagg

SEQ ID NO: 754333 - DNA, 120 bp, Artificial Sequence
  ENSG00000213145_6 (sequence is synthesized)
ggcggggtcccggggtccctgaaaggcgcggaccaggccggatccacccagtctcgcgcctgcagcccgtgccgccccagccgctgccgcctgcaccggacccggagccgtcatgcccaa

SEQ ID NO: 754334 - DNA, 120 bp, Artificial Sequence
  ENSG00000213145_7 (sequence is synthesized)
gtgtcccaagtgcaacaaggaggtgtacttcgccgagagggtgacctctctgggcaaggactggcatcggccctgcctgaagtgcgagaaatgtgggaagacgctgacctctgggggcca

SEQ ID NO: 754335 - DNA, 120 bp, Artificial Sequence
  ENSG00000213145_8 (sequence is synthesized)
cgctgagcacgaaggcaaaccctactgcaaccacccctgctacgcagccatgtttgggcctaaaggctttgggcggggcggagccgagagccacactttcaagtaaaccaggtggtggag

SEQ ID NO: 754336 - DNA, 120 bp, Artificial Sequence
  ENSG00000213145_9 (sequence is synthesized)
accccatccttggctgcttgcagggccactgtccaggcaaatgccaggccttgtccccagatgcccagggctcccttgttgcccctaatgctctcagtaaacctgaacacttggaaaacc

SEQ ID NO: 754337 - DNA, 120 bp, Artificial Sequence
  ENSG00000213145_10 (sequence is synthesized)
cttttgcctcggaactggacccgggagacatcacagcgctgggctaggggcgcggcttgaactcgcctaaagagctgcgccctctcatctcgcgcctgcagcccgtgccgccccagccgc

SEQ ID NO: 754338 - DNA, 120 bp, Artificial Sequence
  ENSG00000213145_11 (sequence is synthesized)
aagggagctgcagtggggtcctggcagcaggctctgccaccggcgcctgctcttctgctgcccattgccctccccagggggccgttccagggtctcataggcgagggctccctgtgcagg

SEQ ID NO: 754339 - DNA, 120 bp, Artificial Sequence
  ENSG00000213145_12 (sequence is synthesized)
tttcctgctgcgggtgagccttttgcctcggaactggacccgggagacatcacagcgctgggctaggggcgcggcttgaactcgcctaaagagctgcgccctctcacccgtgccgcccca

SEQ ID NO: 754340 - DNA, 120 bp, Artificial Sequence
  ENSG00000213145_13 (sequence is synthesized)
aacaaggaggtgtacttcggtgagcgcgcccacaccggccccgcgaggaggcgccgccgacggggcgacgaggctggggaccgctcaggaggaccgggggcgctgggtccctggggcggc

SEQ ID NO: 754341 - DNA, 120 bp, Artificial Sequence
  ENSG00000213145_14 (sequence is synthesized)
ctgccccgggatgagggtggaggcccctgcgtccgagggccctggcgatctctgcctgctagtggtcttgctgtgctcggcgggctacctctggctctgagcctccccgtctctgggtcc

SEQ ID NO: 754342 - DNA, 120 bp, Artificial Sequence
  ENSG00000213145_15 (sequence is synthesized)
tacggtctctgccgtttcctctcaggcgcgccctgagtgggggacccgcagggctggaaggaacgcggggctggggccgcgccccccagcgctaagtggaaacagacgcggaaaccgacg

SEQ ID NO: 754343 - DNA, 120 bp, Artificial Sequence
  ENSG00000213145_16 (sequence is synthesized)
gcgatcccgggcgcccgcctccctgccccgcgcccgcgcgccccgaggggagggaggaagtgggaagtcacccctgtccccgccgagaagggctgtcgcaggctccacccttgccaccgc

SEQ ID NO: 754344 - DNA, 120 bp, Artificial Sequence
  ENSG00000213145_17 (sequence is synthesized)
gccaccgcagaggcccggggctgaaagcaggcagccaggcccaggccctgctgacctaagccgcgacccctgaccctcggcctcgccctctagccccacccagccttcaggagcaagatt

SEQ ID NO: 754345 - DNA, 120 bp, Artificial Sequence
  ENSG00000213145_18 (sequence is synthesized)
ggccgcacccgaaagtgccccggggaccagcgaccccgcgctttgtttagttgtattggctctggggattggagatgttcccctcatggagggtgctgagaccttagggtgggctgccag

SEQ ID NO: 754346 - DNA, 120 bp, Artificial Sequence
  ENSG00000213145_19 (sequence is synthesized)
gctgggcggatgcgggctaagtgcacagggccttgggcagagctggctgcaagaggcgggtacgccagtggtgggtaggcgccgcgtcctgcagcgtctcaccggggcctgtctgtgcct

SEQ ID NO: 754347 - DNA, 120 bp, Artificial Sequence
  ENSG00000213145_20 (sequence is synthesized)
tcatccccaccccaccccaccccacagcctcctccaccccagcctgttgactttttccaccttctctgcaggctttgggcggggcggagccgagagccacactttcaagtaaaccaggtg

SEQ ID NO: 754348 - DNA, 120 bp, Artificial Sequence
  ENSG00000213160_0 (sequence is synthesized)
aagagaggcgcctgcgcttgcgagctgggcttgtgagtggggctgccgagagggcaggcgtggggcgaggccaaaggactgaacccgcaggagcgtcacgggcgccggggcggctgccga

SEQ ID NO: 754349 - DNA, 120 bp, Artificial Sequence
  ENSG00000213160_1 (sequence is synthesized)
cggcgggactgggttttctatcagatgttccacgtaataatgctggagttaagaagtttccattattttgctccaaaccagaagactctgttccctgtatatagaataggagtaatattt

SEQ ID NO: 754350 - DNA, 120 bp, Artificial Sequence
  ENSG00000213160_2 (sequence is synthesized)
gaaaacaactggctgatgtttaaaactgaagattgtcatgattgtttatcctaatcccaatgctgaagtaagattgtcttggaaatactaagttggccatggctctaaaaggacaagaag

SEQ ID NO: 754351 - DNA, 120 bp, Artificial Sequence
  ENSG00000213160_3 (sequence is synthesized)
attatatttatcttttcaaggattcaacacatccagtggattttctggatgcattcagaacattttacttggatggattatttactgatattactcttcagtgtccttcaggcataattt

SEQ ID NO: 754352 - DNA, 120 bp, Artificial Sequence
  ENSG00000213160_4 (sequence is synthesized)
tccattgtcaccgagccgttttagctgcttgcagcaattattttaaggcaatgttcacagctgacatgaaagaaaaatttaaaaataaaataaaactctctggcatccaccatgatattc

SEQ ID NO: 754353 - DNA, 120 bp, Artificial Sequence
  ENSG00000213160_5 (sequence is synthesized)
tggaaggccttgtaaattatgcatacacttcccaaattgaaataactaaaagaaatgttcaaagcctgcttgaggcagcggatctgctacagttcctttcagtaaagaaggcttgtgagc

SEQ ID NO: 754354 - DNA, 120 bp, Artificial Sequence
  ENSG00000213160_6 (sequence is synthesized)
ggtttttggtaaggcacttggatattgataattgtattggaatgcactcctttgcagaatttcatgtgtgtccagaactagagaaggaatctcgaagaattctatgttcaaagtttaagg

SEQ ID NO: 754355 - DNA, 120 bp, Artificial Sequence
  ENSG00000213160_7 (sequence is synthesized)
aagtgtggcaacaagaagaatttctggaaatcagccttgaaaagtttctctttatcttgtccagaaagaatctcagtgtttggaaagaagaagctatcatagagccagttattaagtgga

SEQ ID NO: 754356 - DNA, 120 bp, Artificial Sequence
  ENSG00000213160_8 (sequence is synthesized)
agctatatcaacattgatatagatccagtgtacttaaaaacagccttaggccttcaaagaagctgcctgctcaccgaaaataagatccgctccctaatatacaatgccttgaatcccatg

SEQ ID NO: 754357 - DNA, 120 bp, Artificial Sequence
  ENSG00000213160_9 (sequence is synthesized)
cataaagagatttcccagaggtccacagccacaatgtatataattggaggctattactggcatcctttatcagaggttcacatatgggatcctttgacaaatgtttggattcagggagca

SEQ ID NO: 754358 - DNA, 120 bp, Artificial Sequence
  ENSG00000213160_10 (sequence is synthesized)
gaaataccagattataccagggagagctatggtgttacatgtttaggacccaacatttatgtaactgggggctacaggacggataacatagaagctcttgacacagtgtggatctataac

SEQ ID NO: 754359 - DNA, 120 bp, Artificial Sequence
  ENSG00000213160_11 (sequence is synthesized)
agtgaaagtgatgaatggacagaaggtttgccaatgctcaatgccaggtattaccactgtgcagtcaccttgggtggctgtgtctatgctttaggtggttacagaaaaggggctccagca

SEQ ID NO: 754360 - DNA, 120 bp, Artificial Sequence
  ENSG00000213160_12 (sequence is synthesized)
gaagaggctgagttctatgatcctttaaaagagaaatggattcctattgcaaacatgattaaaggtgtgggaaatgctactgcctgtgtcttacatgatgttatctacgtcattggtggc

SEQ ID NO: 754361 - DNA, 120 bp, Artificial Sequence
  ENSG00000213160_13 (sequence is synthesized)
cactgtggctacagaggaagctgcacctatgacaaagttcagagctacaattccgatatcaacgaatggagcctcatcacctccagtccacatccagaatatggattgtgctcagttccg

SEQ ID NO: 754362 - DNA, 120 bp, Artificial Sequence
  ENSG00000213160_14 (sequence is synthesized)
tttgaaaataagctctatctagtcggcggacaaactacaatcacagaatgctatgaccctgaacaaaatgaatggagagagatagctcccatgatggaaaggaggatggagtgcggtgcc

SEQ ID NO: 754363 - DNA, 120 bp, Artificial Sequence
  ENSG00000213160_15 (sequence is synthesized)
gtcatcatgaatggatgtatttatgtcactggaggatactcctactcaaagggaacgtatcttcagagcattgagaaatatgatccagatcttaataagtgggaaatagtgggtaatctt

SEQ ID NO: 754364 - DNA, 120 bp, Artificial Sequence
  ENSG00000213160_16 (sequence is synthesized)
cccagtgccatgcggtctcatgggtgtgtttgtgtgtataatgtctaattgaatctgcagaaatgaccaagcaatcacttttttggagtatagttttataaaaaaagaatgcagggtttg

SEQ ID NO: 754365 - DNA, 120 bp, Artificial Sequence
  ENSG00000213160_17 (sequence is synthesized)
gccccgctcgccgcacggcccggcgacgggggagttcccgcgagtggcctcgcgcccagaccgtgcggggggctgttcgggtggaggcgggggagccgccgggacaccaaaataggagct

SEQ ID NO: 754366 - DNA, 120 bp, Artificial Sequence
  ENSG00000213160_18 (sequence is synthesized)
gcttgtggggtggagcggcactagctggcggcttccgagcgcctcttccaaagatggtcagaggggccggaggcgtccccgctcccgctcgctactagcccgcgggccagcgccgcgtcc

SEQ ID NO: 754367 - DNA, 120 bp, Artificial Sequence
  ENSG00000213160_19 (sequence is synthesized)
ttgtgtctggcacatgataggggatcagtaaattgtaattcctaaccctactgtactcccaaacatggtgattcatggtcaagaaaaatcttatatatatatatatatacacacacacat

SEQ ID NO: 754368 - DNA, 120 bp, Artificial Sequence
  ENSG00000213160_20 (sequence is synthesized)
tatatgtgtgtatatatatacacatatatacgtatatatgtgtatatatatacacagttgaatcagtgggattaatacctataatctctggttttcaaaggtaatatagaatatttgaca

SEQ ID NO: 754369 - DNA, 120 bp, Artificial Sequence
  ENSG00000213160_21 (sequence is synthesized)
tttcaaaggtaatatagaatatttgacacttggtaaaaggtgaactacctttgtagtgaatcttttcctcttggtagcatcaacactggggataaatcagaaccattctgtggaatgaaa

SEQ ID NO: 754370 - DNA, 85 bp, Artificial Sequence
  ENSG00000213160_22 (sequence is synthesized)
caacactggggataaatcagaaccattctgtggaatgaaatgtttctcaagagcctataatatagtagatagtgcatattaagat

SEQ ID NO: 754371 - DNA, 120 bp, Artificial Sequence
  ENSG00000213160_23 (sequence is synthesized)
agaccctgtctcaaaaaaaaaaaaaaatcaatttagctagcaggaatttgacatttaaagagggaatcttctctacctctacaaaatcaacccttaacacttttttcaccttcagaatta

SEQ ID NO: 754372 - DNA, 120 bp, Artificial Sequence
  ENSG00000213160_24 (sequence is synthesized)
acacttttttcaccttcagaattatttagaatgtggatttactttgtctagttttttcctttatagtgtaatttattgttactctctatttactgactaccagagatatacaaaatactg

SEQ ID NO: 754373 - DNA, 120 bp, Artificial Sequence
  ENSG00000213160_25 (sequence is synthesized)
tgcaaaagattgttactgttcaaagagcttacaaactaaatttaaaagaatagcaagtctgaaaaatagaagatagtcaaatatttgtttatgctaagaactgtttttaattttcagctt

SEQ ID NO: 754374 - DNA, 120 bp, Artificial Sequence
  ENSG00000213160_26 (sequence is synthesized)
tgatgtaaattgctagcttagttgtctttagttcaagcatgttaggaaatcctctttattcttaaatatagatacatgtctgcatatatgattgaattttagagccagaaagcatgtaga

SEQ ID NO: 754375 - DNA, 120 bp, Artificial Sequence
  ENSG00000213160_27 (sequence is synthesized)
gcagttgtgattagtagaaaatacactgacaagaagatatttgcatttatttcccaaagctgccagtaactagattttgtgacttaagtcatttaacctctccttgattagagcttcctg

SEQ ID NO: 754376 - DNA, 120 bp, Artificial Sequence
  ENSG00000213160_28 (sequence is synthesized)
agccatgcacactggcactgcaaatcacagacaggcctagatacagatcccctcaccccttgctacatccaaaggtggcctgggtggctggagcctctgggccagaaccacctttgtcca

SEQ ID NO: 754377 - DNA, 120 bp, Artificial Sequence
  ENSG00000213160_29 (sequence is synthesized)
ttttcctcagtgtgcctacagcatcgctttccatgtgtgccataacttgggaatagttgggatgtgttgcttaactcctttacaccattagttatctgtgagaccatctattccacactc

SEQ ID NO: 754378 - DNA, 120 bp, Artificial Sequence
  ENSG00000213160_30 (sequence is synthesized)
ttcattttttaaaaagagacaataattatttttaactcactgaagtttaaaactacctagcatttctgattaaaaaaaatttagaaggaaaattttaatgcatttatttcagatggcgtt

SEQ ID NO: 754379 - DNA, 120 bp, Artificial Sequence
  ENSG00000213160_31 (sequence is synthesized)
ttaaatagatacaaccctttggaaacacaatatggtactacatagcaagggctgtaaaaatgaccatatcctttgccccataaattctacttctatacttttaaccttaaaaataattca

SEQ ID NO: 754380 - DNA, 120 bp, Artificial Sequence
  ENSG00000213160_32 (sequence is synthesized)
gaaaaaagataaatgcatgaagacatttatgtctgcattctttataataacaaaaattggggaaaaaaactccatgtcaagaaagtgggataagaaaaatagtgaagtattatactgcca

SEQ ID NO: 754381 - DNA, 120 bp, Artificial Sequence
  ENSG00000213160_33 (sequence is synthesized)
ttaaaataattatttggaagactgtagaaacgtggacatgtttgatatggtaagtaaaatgagcacaatacaaaatagtatgcatactatgattgtgactttgtaaaatctttatgcatg

SEQ ID NO: 754382 - DNA, 120 bp, Artificial Sequence
  ENSG00000213160_34 (sequence is synthesized)
tggaaggtaatctgcaaaacaaattcattgtgttagtgtagcgggatatggaatgactttatttatttaaatcttttctttaatattactttgtattttcaataaaaataaatcactgta

SEQ ID NO: 754383 - DNA, 120 bp, Artificial Sequence
  ENSG00000213160_35 (sequence is synthesized)
taggcatttagtgatacaaggatccagaataacaaaaactatgtaccagccacattcacacaacaggtgtgggaaatgctactgcctgtgtcttacatgatgttatctacgtcattggtg

SEQ ID NO: 754384 - DNA, 120 bp, Artificial Sequence
  ENSG00000213160_36 (sequence is synthesized)
ccgatatcaacgaatggagcctcatcacctccagtccacatccaggcctgcccacaaaaaaaaccacaagaagatgaggtgaaaaattcctaggccctgccgtgcagccacagaaaatag

SEQ ID NO: 754385 - DNA, 120 bp, Artificial Sequence
  ENSG00000213160_37 (sequence is synthesized)
gaacctgcctgactgtggacatcaaatgaatttcaaggcctggaacctggatagcatggttcactgagtctaagaatgaatcaccttatatggtagtataagttgtttctgagctgatat

SEQ ID NO: 754386 - DNA, 120 bp, Artificial Sequence
  ENSG00000213160_38 (sequence is synthesized)
aagggaggcaatgggaagcaacatttatccttctgcatctctatcttgtttatattctttgctctgcttcttagttcatccaaaactaaaccaaagtaaaatcaacttgaatgaaatcca

SEQ ID NO: 754387 - DNA, 120 bp, Artificial Sequence
  ENSG00000213160_39 (sequence is synthesized)
agtctttattctctccattccccaaacctaggccagattctatggtctgattttcagcttacattctattgtccagctctgtttttacagtaaacacacacatttaataaaaggtgacaa

SEQ ID NO: 754388 - DNA, 120 bp, Artificial Sequence
  ENSG00000213160_40 (sequence is synthesized)
atgccttcttctggaatacctcttgaaggacctgccagaggcgtagatttatttacaacagcatcaccagaaacacatgagaatgctttatgccatgtctttaaaacagctaccacagta

SEQ ID NO: 754389 - DNA, 120 bp, Artificial Sequence
  ENSG00000213160_41 (sequence is synthesized)
tcactaggtgataggacattttccactccattataattttatggagatcattgtgcgtggtgcatggctgtgtttgtgtgcacgtctcaccctctcttaagagcacaaagagccttcctt

SEQ ID NO: 754390 - DNA, 120 bp, Artificial Sequence
  ENSG00000213160_42 (sequence is synthesized)
tagcacttagcacagtaccttgcattttaccatcagtaataacaaaaacaacaataaatttagcccagggttcactgcaaaaaagaacaaaagatcaatctaaagatgtgattttaatta

SEQ ID NO: 754391 - DNA, 120 bp, Artificial Sequence
  ENSG00000213171_0 (sequence is synthesized)
ttgtgtcctctaaggggacgggttcatctgagtaaacataaaccccaacttgtgccattctttataaaatgattttaaaggcaagaagtgtgtgtgtcagagggtgggggagattcttaa

SEQ ID NO: 754392 - DNA, 120 bp, Artificial Sequence
  ENSG00000213171_1 (sequence is synthesized)
attagattacctgcatgcctgctctccagtctcattcctgggtcaagactcaggtttccagctcagcaatccatcagcattatacagatccaacccaccctcacccgacccctgcagttt

SEQ ID NO: 754393 - DNA, 120 bp, Artificial Sequence
  ENSG00000213171_2 (sequence is synthesized)
ctccccaggtggagcagtccctcagtgaggactgtgaacgaatcttcaggaacccccactgtaggagcctcaaactgagccccacgggagatgctctagactgagaacttcccataaatg

SEQ ID NO: 754394 - DNA, 120 bp, Artificial Sequence
  ENSG00000213171_3 (sequence is synthesized)
atacccacggggaacgtttagatttagaggttgcacagaattgctccacatctgggagaccaaaagacagtcctctggaaggtggctggcccaagctccccagtgggggaatcaggatgt

SEQ ID NO: 754395 - DNA, 120 bp, Artificial Sequence
  ENSG00000213171_4 (sequence is synthesized)
cagagagatcctctagaacctgctgttcttgctattgcatgacccctccctggcaccagagcctccctcctggctccctcccctgtcacttgccagcctgtagtggtgcttgctgcagcc

SEQ ID NO: 754396 - DNA, 120 bp, Artificial Sequence
  ENSG00000213171_5 (sequence is synthesized)
ctccctggttgctttatttatttattttgcaccaacagggttgctgcagactcattcttgcctggtttaaaaagagagagagagagagaggaaaaaaaaaaaggagaaatgctttctggc

SEQ ID NO: 754397 - DNA, 120 bp, Artificial Sequence
  ENSG00000213171_6 (sequence is synthesized)
tcttttctccacctcagtcttggcagcagcggccgcagcagcaacagcagcagcagcagcggcaggcagcagccgggcagccaggcagcgggggttgaggcacacagggaaggtgcaggg

SEQ ID NO: 754398 - DNA, 120 bp, Artificial Sequence
  ENSG00000213171_7 (sequence is synthesized)
gcctgaggtgcagctcgaatgggacagggcccccagcgctggacagatgcagtgccaaacttgatgccaccttccagcttctccggactgaagagggaatggatgcagccacagctccaa

SEQ ID NO: 754399 - DNA, 120 bp, Artificial Sequence
  ENSG00000213171_8 (sequence is synthesized)
agcaagcctggcccccatggcccccgctccttttcctcctcctcctacctggagggagcggtggcagctgccctgctgtgtgtgactgcacctcccagccccaggctgtgctctgtggcc

SEQ ID NO: 754400 - DNA, 120 bp, Artificial Sequence
  ENSG00000213171_9 (sequence is synthesized)
acaggcaactggaggctgtacctggaggactcccactggacactgagctcctggacctgagtgggaaccgcctgtgggggctccagcagggaatgctctcccgcctgagcctgctccagg

SEQ ID NO: 754401 - DNA, 120 bp, Artificial Sequence
  ENSG00000213171_10 (sequence is synthesized)
aattggacctcagctacaaccagctctcaacccttgagcctggggccttccatggcctacaaagcctactcaccctgaggctgcagggcaatcggctcagaatcatggggcctggggtct

SEQ ID NO: 754402 - DNA, 120 bp, Artificial Sequence
  ENSG00000213171_11 (sequence is synthesized)
tctcaggcctctctgctctgaccctgctggacctccgcctcaaccagattgttctcttcctagatggagcttttggggagctaggcagcctccagaagctggaggttggggacaaccacc

SEQ ID NO: 754403 - DNA, 120 bp, Artificial Sequence
  ENSG00000213171_12 (sequence is synthesized)
tggtatttgtggctccgggggcctttgcagggctagccaagttgagcaccctcaccctggagcgctgcaacctcagcacagtgcctggcctagcccttgcccgtctcccggcactagtgg

SEQ ID NO: 754404 - DNA, 120 bp, Artificial Sequence
  ENSG00000213171_13 (sequence is synthesized)
ccctaaggcttagagaactggatattgggaggctgccagctggggccctgcgggggctggggcagctcaaggagctggagatccacctctggccatctctggaggctctggaccctggga

SEQ ID NO: 754405 - DNA, 120 bp, Artificial Sequence
  ENSG00000213171_14 (sequence is synthesized)
cagcagcctggccatcactcgctgcaatctgagctcggtgcccttccaagcactgtaccacctcagcttcctcagggtcctggatctgtcccagaatcccatctcagccatcccagcccg

SEQ ID NO: 754406 - DNA, 120 bp, Artificial Sequence
  ENSG00000213171_15 (sequence is synthesized)
aaggctcagccccctggtgcggctccaggagctacgcctgtcaggggcatgcctcacctccattgctgcccatgccttccatggcttgactgccttccacctcctggatgtggcagataa

SEQ ID NO: 754407 - DNA, 120 bp, Artificial Sequence
  ENSG00000213171_16 (sequence is synthesized)
cgcccttcagacactagaggaaacagctttcccttctccagacaaactggtcaccttgaggctgtctggcaaccccctaacctgtgactgccgcctcctctggctgctccggctccgccg

SEQ ID NO: 754408 - DNA, 120 bp, Artificial Sequence
  ENSG00000213171_17 (sequence is synthesized)
ccacctggactttggcatgtccccccctgcctgtgctggcccccatcatgtccaggggaagagcctgaaggagttttcagacatcctgcctccagggcacttcacctgcaaaccagccct

SEQ ID NO: 754409 - DNA, 120 bp, Artificial Sequence
  ENSG00000213171_18 (sequence is synthesized)
gatccgaaagtcggggcctcgatgggtcattgcagaggagggcgggcatgcggttttctcctgctctggagatggagacccagcccccactgtctcctggatgaggcctcatggggcttg

SEQ ID NO: 754410 - DNA, 120 bp, Artificial Sequence
  ENSG00000213171_19 (sequence is synthesized)
gctgggcagggctgggagagtaagggtcctagaggatgggacactggagatccgctcagtgcagctacgggacagaggggcctatgtctgtgtggttagcaatgtcgctgggaatgactc

SEQ ID NO: 754411 - DNA, 120 bp, Artificial Sequence
  ENSG00000213171_20 (sequence is synthesized)
cctgaggacctggctggaagtcatccaggtggaaccaccaaacggcacactttctgaccccaacatcaccgtgccagggatcccagggcctttttttctggatagcagaggtgtggccat

SEQ ID NO: 754412 - DNA, 120 bp, Artificial Sequence
  ENSG00000213171_21 (sequence is synthesized)
ggtgctggcagtcggcttcctccccttcctcacctcagtgaccctctgctttggcctgattgccctttggagcaagggcaaaggtcgggtcaaacatcacatgacctttgactttgtggc

SEQ ID NO: 754413 - DNA, 120 bp, Artificial Sequence
  ENSG00000213171_22 (sequence is synthesized)
acctcggccctctggggataaaaactctgggggtaaccgggtcactgccaagctcttctgacctttccttccccagtggggaacccaccaagtccgcttcagataccaaaggggaagaca

SEQ ID NO: 754414 - DNA, 120 bp, Artificial Sequence
  ENSG00000213171_23 (sequence is synthesized)
gaaccaaggctgcttgaaccagaacctagtcccgagcagcaccgctctcctgcacctcccgcctgcgttgtgcctcctgccggagagtctgcttcctgagcttttccggtctgaggatag

SEQ ID NO: 754415 - DNA, 120 bp, Artificial Sequence
  ENSG00000213171_24 (sequence is synthesized)
cattgtcatttcttctctgagggtcccagggagctgcagatgcagaccccgtcgttagtccagcccctgcttcaccccctccacacacaaaacaggaaacataatcaaagcgctagtcag

SEQ ID NO: 754416 - DNA, 120 bp, Artificial Sequence
  ENSG00000213171_25 (sequence is synthesized)
ctagtctaaccactaggctttcttcacacatgcttatatcctttaataaccaattgccaaccacggctataagattatttcagaggtggggctgggaagtgccacttgctccttagagtc

SEQ ID NO: 754417 - DNA, 120 bp, Artificial Sequence
  ENSG00000213171_26 (sequence is synthesized)
tgtttgtcaaccaggcagagtccctttcttttctgctccccaccccaaccctgcccctatgtacaggaataagagcaaaggacccacaggctacagagaagaggatggggacagagtgtg

SEQ ID NO: 754418 - DNA, 120 bp, Artificial Sequence
  ENSG00000213171_27 (sequence is synthesized)
ggatggagaggacagaccatatactgcactgtgtttgcatgagcctctaccaccttcctctatctaccagatcattaaacctgctgtcaaagggccacaacagtagcagccaaaactaaa

SEQ ID NO: 754419 - DNA, 120 bp, Artificial Sequence
  ENSG00000213185_0 (sequence is synthesized)
ggagaccatgcgcaggcgcggtgcactgtgcgcgggcaccacggcggtttttcgacgctggcggtggacgcaggcagcatggaccacggttgctgggcggatggggagcgtctatggtca

SEQ ID NO: 754420 - DNA, 120 bp, Artificial Sequence
  ENSG00000213185_1 (sequence is synthesized)
gttgccttagaagtggtgagatgggaagctgcagttggaagaccctggaggatgcctgacaaggggatgtctgacacatgattggagctctttttgaaatgtttcttgcccttcctggag

SEQ ID NO: 754421 - DNA, 120 bp, Artificial Sequence
  ENSG00000213185_2 (sequence is synthesized)
tacacaacgcgctaaaagctgcaaaggaacctgaagctgtggctgtaaaaaatcacaacccagacaaggtgtggtgggccaagaacagccaggccaaaaccattgccacggagtcttgtc

SEQ ID NO: 754422 - DNA, 120 bp, Artificial Sequence
  ENSG00000213185_3 (sequence is synthesized)
ctgccctgcagtgctgtgaaggatatagaatgtgtgccagttttgattccctgccaccttgctgttgcgacataaatgagggcctctgagttaggaaaggtgggcacaaaaatcttcatg

SEQ ID NO: 754423 - DNA, 120 bp, Artificial Sequence
  ENSG00000213185_4 (sequence is synthesized)
agcaatacttcttagtagattgttttgttattcaaatcaagttctagtgtttttatgtgagattatataatttacagtgttgttttatatacttttgaataaatgtacactattaaaaat

SEQ ID NO: 754424 - DNA, 120 bp, Artificial Sequence
  ENSG00000213185_5 (sequence is synthesized)
gaatcatgtgagtatgagaagaatgcctcccaagaaatgagaggttgatttgacagactcagtcttgtcacattttgtggaagttaagcctgtgagttagagggcaaatcccagagccca

SEQ ID NO: 754425 - DNA, 120 bp, Artificial Sequence
  ENSG00000213185_6 (sequence is synthesized)
gtgcgtggcagattgtgatcttcctcatcgtgcctgcaccgccgggggatctgcatggatcacctagacaggcactgataaggtagaacatggtaattcatcactaagtttgcagttttt

SEQ ID NO: 754426 - DNA, 120 bp, Artificial Sequence
  ENSG00000213185_7 (sequence is synthesized)
tctctttggttcttttaaaactgattttacagtcataaagtttggtgagggaaagactggatgggaatttcggagatgggaagagaggtgtaatctggttctgggacgtatagtaaaatg

SEQ ID NO: 754427 - DNA, 120 bp, Artificial Sequence
  ENSG00000213186_0 (sequence is synthesized)
agcatccgcctggagctcgtggcgctgtgtttccgtgctgtggagttgcctggtccgcttcctccccgcgaataagaataaaagattctggaggagttggagaagagtgtattcagcccc

SEQ ID NO: 754428 - DNA, 120 bp, Artificial Sequence
  ENSG00000213186_1 (sequence is synthesized)
caaaccacgagatcaacaaagaaatgcacaattttgaggaagagttaacttgtcccatatgttatagtatttttgaagatcctcgtgtactgccatgctctcatacattttgtagaaatt

SEQ ID NO: 754429 - DNA, 120 bp, Artificial Sequence
  ENSG00000213186_2 (sequence is synthesized)
gtttggaaaacattcttcaggcatctggtaacttttatatatggagacctttacgaattccactcaagtgccctaattgcagaagtattactgaaattgctccaactggcattgaatctt

SEQ ID NO: 754430 - DNA, 120 bp, Artificial Sequence
  ENSG00000213186_3 (sequence is synthesized)
tacctgttaattttgcactaagggctattattgaaaagtaccagcaagaagaccatccagatattgtcacctgccctgaacattacaggcaaccattaaatgtttactgtctattagata

SEQ ID NO: 754431 - DNA, 120 bp, Artificial Sequence
  ENSG00000213186_4 (sequence is synthesized)
aaaaattagtttgtggtcattgccttaccataggtcaacatcatggtcatcctatagatgaccttcaaagtgcctatttgaaagaaaaggacactcctcaaaaactgcttgaacagttga

SEQ ID NO: 754432 - DNA, 120 bp, Artificial Sequence
  ENSG00000213186_5 (sequence is synthesized)
ctgacacacactggacagatcttacccatcttattgaaaagctgaaagaacaaaaatctcattctgagaaaatgatccaaggcgataaggaagctgttctccagtattttaaggagctta

SEQ ID NO: 754433 - DNA, 120 bp, Artificial Sequence
  ENSG00000213186_6 (sequence is synthesized)
atgatacattagaacagaaaaaaaaaagtttcctaacggctctctgtgatgttggcaatctaattaatcaagaatatactccacaaattgaaagaatgaaggaaatacgagagcagcagc

SEQ ID NO: 754434 - DNA, 120 bp, Artificial Sequence
  ENSG00000213186_7 (sequence is synthesized)
ttgaattaatggcactgacaatatctttacaagaagagtctccacttaaatttcttgaaaaagttgatgatgtacgccagcatgtacagatcttgaaacaaagaccacttcctgaggttc

SEQ ID NO: 754435 - DNA, 120 bp, Artificial Sequence
  ENSG00000213186_8 (sequence is synthesized)
aacccgttgaaatttatcctcgagtaagcaaaatattgaaagaagaatggagcagaacagaaattggacaaattaagaacgttctcattcccaaaatgaaaatttctccaaaaaggatgt

SEQ ID NO: 754436 - DNA, 120 bp, Artificial Sequence
  ENSG00000213186_9 (sequence is synthesized)
catgttcctggcctggtaaggatgaaaaggaagttgaatttttaaaaattttaaacattgttgtagttacattaatttcagtaatactgatgtcgatactctttttcaaccaacacatca

SEQ ID NO: 754437 - DNA, 120 bp, Artificial Sequence
  ENSG00000213186_10 (sequence is synthesized)
taacctttttaagtgaaatcactttaatatggttttctgaagcctctctatctgtttaccaaagtttatctaacagtctgcataaggtaaagaatatactgtgtcacattttctatttgt

SEQ ID NO: 754438 - DNA, 120 bp, Artificial Sequence
  ENSG00000213186_11 (sequence is synthesized)
tgaaggaatttgtgtggaaaatagtttcccattgaaaatgtcaacctgaattgtttaaatgggcttattctgtacattgctaaacaaaaaatggggtagcatggataaagagcaaactaa

SEQ ID NO: 754439 - DNA, 120 bp, Artificial Sequence
  ENSG00000213186_12 (sequence is synthesized)
gctttattagtgctgcaactaatataaacaaatgtttatatttgttgcttcttttggttagcaatgatatgtcaaagttatatctgaaatagtcaaatctttgggaaacagaatctagta

SEQ ID NO: 754440 - DNA, 120 bp, Artificial Sequence
  ENSG00000213186_13 (sequence is synthesized)
acaatttgaaaagtaatacactatcccatttttattggctttatgatggttgacataatgttgctgtgacatttaaacattcttgtaccaatattgtcttttaccattattatatactgc

SEQ ID NO: 754441 - DNA, 120 bp, Artificial Sequence
  ENSG00000213186_14 (sequence is synthesized)
agttaattggctttacagttctttatatatatagcaaaatcctgaaagaacatatacctttattttgatgtggcttgaagcttttgaatgggtgaataaggatgatagaaaggtttcaaa

SEQ ID NO: 754442 - DNA, 120 bp, Artificial Sequence
  ENSG00000213186_15 (sequence is synthesized)
ttcactccaaataaaactattgcttttggataactgttagagtaaagtggctttttaaaagaaatttttgagactgggtctcaccttgttgcccaggctggagtgtagttgtctggtcat

SEQ ID NO: 754443 - DNA, 120 bp, Artificial Sequence
  ENSG00000213186_16 (sequence is synthesized)
gactcactgcagtttcgaccacccaggctcaatcgatcctcccgcctctgcctctggagcagctgggacaaggcacacacccccatgcctggctaattaaaaaaattgttttttgtagaa

SEQ ID NO: 754444 - DNA, 83 bp, Artificial Sequence
  ENSG00000213186_17 (sequence is synthesized)
ccccatgcctggctaattaaaaaaattgttttttgtagaaacgaggttttgccatattgcccaggttggtctcaaacttctgg

SEQ ID NO: 754445 - DNA, 120 bp, Artificial Sequence
  ENSG00000213186_18 (sequence is synthesized)
cattttctaatacttgtcatattctatagtttgtgcaaatttaagattgtttttttttctgctcgtcagtcaaatcagttcttggattaaaaactcattcttattagaacagaatcatgt

SEQ ID NO: 754446 - DNA, 120 bp, Artificial Sequence
  ENSG00000213186_19 (sequence is synthesized)
tggtaacttggtctgcaacaggttttgatggcatcatgtggactttattcatcttaactcatttaaattttctaccacattcccttaagctaatgcaaaagtaccaacaacttaatcttt

SEQ ID NO: 754447 - DNA, 120 bp, Artificial Sequence
  ENSG00000213186_20 (sequence is synthesized)
ccaaaatgctgggattataggcgtgagccgccacgcccggcccaacaacttaatcttttattagctttgcttaagagggccaattaaatcaaagccctttagttccctttaacagggact

SEQ ID NO: 754448 - DNA, 120 bp, Artificial Sequence
  ENSG00000213186_21 (sequence is synthesized)
ctttagttccctttaacagggactggagttatgatgcatgtgttacgacttttggcccactgtccatgcaactctaagtgcaggttgatttgctttccagaaatcccaaaggggctgctc

SEQ ID NO: 754449 - DNA, 120 bp, Artificial Sequence
  ENSG00000213186_22 (sequence is synthesized)
ttggatcaccgaagagccttacctatatcaaatcaaaaagacattctgggtcagattagactatgctcctggccctacagattgcacataaactatcataaatacagctttttcagggaa

SEQ ID NO: 754450 - DNA, 120 bp, Artificial Sequence
  ENSG00000213186_23 (sequence is synthesized)
ctagttctaaaactcttacctgctgagaataagtcttaacactaagatgactgtattatatcaatttattattagaatcagacttatacctagcacaattaactattgtgtgggcaaaga

SEQ ID NO: 754451 - DNA, 120 bp, Artificial Sequence
  ENSG00000213186_24 (sequence is synthesized)
acatttaaagggcatagtagaggtaaggagagacacatactcagctagagataaaaatactaagttgcactgattacttaaaatactagtcacaccataaaagtgccctgtagtttcaaa

SEQ ID NO: 754452 - DNA, 120 bp, Artificial Sequence
  ENSG00000213186_25 (sequence is synthesized)
aacacgtaagcaatgaaatgttagccattatgtgttaaactacttaatctcatttctgtgatgtgaatatttttaaccccctttttgtagatgagggaactgacaagtgacttgtccaag

SEQ ID NO: 754453 - DNA, 120 bp, Artificial Sequence
  ENSG00000213186_26 (sequence is synthesized)
gccatatagctgtgagaaaacccatgcattctcttttcagagttcatgctatcactcaactttaaagtaggccaagattaatgttggtaagggtttgtaatctgtaagaatgctaaaaac

SEQ ID NO: 754454 - DNA, 120 bp, Artificial Sequence
  ENSG00000213186_27 (sequence is synthesized)
gtaagtatatatatcattttagatttgacattttgtatcttgccagtttttaggagaacttttcattttgttaagtatgcatgaatatagttgagtatatgagtaactggttcttatgct

SEQ ID NO: 754455 - DNA, 120 bp, Artificial Sequence
  ENSG00000213186_28 (sequence is synthesized)
gctgttttgtatttttaccagcaggaagattgcaaaagttgatgtatgtaaatcttgaaatatttctaagttttatgtataacaaaatatgtattttaataaacttcttttgatatttta

SEQ ID NO: 754456 - DNA, 120 bp, Artificial Sequence
  ENSG00000213186_29 (sequence is synthesized)
gtgtttccgtgctgtggagttgcctggtccgcttcctccccgcggtgagtctaaggacctttacggatgcggagaagaataagaataaaagattctggaggagttggagaagagtgtatt

SEQ ID NO: 754457 - DNA, 120 bp, Artificial Sequence
  ENSG00000213186_30 (sequence is synthesized)
gcgctgtgtttccgtgctgtggagttgcctggtccgcttcctccccgcgaataagaataaaagattctggaggagttggagaagagtgtattcagcccccaaaccacgagatcaacaaat

SEQ ID NO: 754458 - DNA, 120 bp, Artificial Sequence
  ENSG00000213186_31 (sequence is synthesized)
taggtccacaaagatgtgagccccagtttgggtggtggcaccacttgaattttcccatacttaaagctgactcactagaagtcttgggacaagtcatcgaattctataatgaaatgcaca

SEQ ID NO: 754459 - DNA, 120 bp, Artificial Sequence
  ENSG00000213186_32 (sequence is synthesized)
ctccccgcggtgagtctaaggacctttacggatgcggagaaggtggttctgagtcctttttcttttcctgtagcacagtctggtgtgcctagtgtgttgggcggggagtcctgggggcgc

SEQ ID NO: 754460 - DNA, 120 bp, Artificial Sequence
  ENSG00000213186_33 (sequence is synthesized)
gacgatggagggagtggcttgggacctgcactcattccctcttgtcccatactggagtttggggagccactttcccgtccctccactgtggagctgcgttcctgtgagggaggaggccct

SEQ ID NO: 754461 - DNA, 83 bp, Artificial Sequence
  ENSG00000213186_34 (sequence is synthesized)
gagacccctttcttgtctctgcatagcgcccacccctggcctagagcctcttcagctttccatcactaagctaagctctcacc

SEQ ID NO: 754462 - DNA, 120 bp, Artificial Sequence
  ENSG00000213186_35 (sequence is synthesized)
agcctcttcagctttccatcactaagctaagctctcacctctactttagcctcttccttacttagacttgtgttatgggcttcctccactctgattaacccatccacatgctccgatctt

SEQ ID NO: 754463 - DNA, 120 bp, Artificial Sequence
  ENSG00000213186_36 (sequence is synthesized)
aactgtgttggtgtttgtggcttttctgaaaacacgatgaagcatcgtgaagataaatatcaaagacagtgaactaacaaccatttttatgacatgagacaataaattgaaaacattaaa

SEQ ID NO: 754464 - DNA, 120 bp, Artificial Sequence
  ENSG00000213186_37 (sequence is synthesized)
gcactgtcttaatgagacttccatactcaggagtggtagctatgggattttcacatgggttctgggtacttctaattctttgaaacttagtactgcaggctgggtgcagtggctcatgcc

SEQ ID NO: 754465 - DNA, 120 bp, Artificial Sequence
  ENSG00000213186_38 (sequence is synthesized)
tgtgcacctgtagtcccagctactcatgtggctgaggcacttgaatcgcttgaacccgtgaggcagggttgcagtgagccaagatcttgccacagcactccaccctgggtgatgcagtga

SEQ ID NO: 754466 - DNA, 120 bp, Artificial Sequence
  ENSG00000213186_39 (sequence is synthesized)
gtgagactttcaaaaaaaaaaaaaaaatctgagctctactgcattggttattaaaatataataaaagtattaaattctattttcgcaccaaatgaaaacacttgattatcattatagcac

SEQ ID NO: 754467 - DNA, 120 bp, Artificial Sequence
  ENSG00000213186_40 (sequence is synthesized)
tttaaacttacttttcccttatatattcttgatttagaacaaattaccgtacttgaatttccgatcttgctttctttaaatctttatttaaaagtccatgctaataatgtgtttacattt

SEQ ID NO: 754468 - DNA, 120 bp, Artificial Sequence
  ENSG00000213186_41 (sequence is synthesized)
ttacagttacattatgatagaaactgttggattttttaaatatctaaaacaatggcccactgaagaaaggaacaattaactctttaattaattccttaggataaatacccagaaatttaa

SEQ ID NO: 754469 - DNA, 120 bp, Artificial Sequence
  ENSG00000213186_42 (sequence is synthesized)
tgccaacttatgtcccttagcattataacattcttgagccaatagtgtaaaaatacgctgacaattttataggcaaacattactcaaggtatcttactttccacttattactaaagtaat

SEQ ID NO: 754470 - DNA, 120 bp, Artificial Sequence
  ENSG00000213186_43 (sequence is synthesized)
taacccctaaatagatgctcctcaacagtgggactacatcctggtaaacctatcataagttgaaactatcaagttgaaatgcatttagtacccggataaacctatcataaagttgaaaat

SEQ ID NO: 754471 - DNA, 120 bp, Artificial Sequence
  ENSG00000213186_44 (sequence is synthesized)
ttgtaaattgaaccagtgtaaatcagaggccatcttacttcatactcatgaagcaactatagtgggatatttttcaacttacgagatagcctaggcttgttgaaacactgtcctaattta

SEQ ID NO: 754472 - DNA, 120 bp, Artificial Sequence
  ENSG00000213186_45 (sequence is synthesized)
ctggctctctggtaattaagtcataaatggtcaaacatcaaattctagaaaagcatatatttaaattctcatcactataattcagaatgactggtttacaaaaatatgttcatagtattt

SEQ ID NO: 754473 - DNA, 120 bp, Artificial Sequence
  ENSG00000213186_46 (sequence is synthesized)
gggtaataactgtggtgattgtctcaactggcaagctaagtggaatgccttaaagaatctatccaagattagttggcaggcatttccagtgttggtaaatcaaaggcccacgaaggtatg

SEQ ID NO: 754474 - DNA, 120 bp, Artificial Sequence
  ENSG00000213186_47 (sequence is synthesized)
ctgagccttgatagcacaaccttgcttaggactttgcctcaactaacatactttttagtttggcaagttacctgaccctccaggtaactcatttttctccatagtctgctacttacaaga

SEQ ID NO: 754475 - DNA, 120 bp, Artificial Sequence
  ENSG00000213186_48 (sequence is synthesized)
ttgtcatatttttgtaatctagaagcaattatagagaatattttattagactttacaaatgacaactgcataaaacagaaaccagtttcatgatctagtttagggagtatgtattttata

SEQ ID NO: 754476 - DNA, 120 bp, Artificial Sequence
  ENSG00000213186_49 (sequence is synthesized)
caactcataatcctttacaaatagaaaaaaatcagtaatacactgaatcaacttgaagaatcttcagcataaagttcaacaaagtcccttagatgcaatttcttttggatttacagcaac

SEQ ID NO: 754477 - DNA, 120 bp, Artificial Sequence
  ENSG00000213186_50 (sequence is synthesized)
actttttgttatgttgtatgtcttgtaaattccaataagtctatccgaaatctcaaacatattatttcgaagagaaattattatgaactgtgcattttttgtttgttcctaaagagaaac

SEQ ID NO: 754478 - DNA, 120 bp, Artificial Sequence
  ENSG00000213186_51 (sequence is synthesized)
aaagaaaagtcaaacattaagtaataacaggtaaatcacacaaacatgtaacctcaaatattttttggacaataaacattacattgataacatgtaaaggaatgatggcaggaataattc

SEQ ID NO: 754479 - DNA, 120 bp, Artificial Sequence
  ENSG00000213186_52 (sequence is synthesized)
ataaaacagtatttgagtgtgaaaggaatttggttattttgacttctagtggaaaagatctaggaagatgacctaggattctagctgtgattctgctactaatttgcatttttaatttat

SEQ ID NO: 754480 - DNA, 120 bp, Artificial Sequence
  ENSG00000213186_53 (sequence is synthesized)
attttactcctccaaaatggaaatatttggttcaaataaaaaataatttggtctccactgataccagaggagatggagatggagttattagacaataaagaaaaagctcaattgtaagaa

SEQ ID NO: 754481 - DNA, 120 bp, Artificial Sequence
  ENSG00000213186_54 (sequence is synthesized)
ataaagaattccatgtgtaatgtttaggatacccctaaaagtttctggaatgaaaatcccaaaatgattacttacatatatataaaatgcaacaatggacacatttttaaaatcaagggc

SEQ ID NO: 754482 - DNA, 120 bp, Artificial Sequence
  ENSG00000213186_55 (sequence is synthesized)
tgcatcaatctcatccatgaagtaaaggggagtgggcttgtagtggtgaagagcaaatactaaagccaatgaactaagtgttttctctcctcccgaaaggttgaagatctttttccaact

SEQ ID NO: 754483 - DNA, 120 bp, Artificial Sequence
  ENSG00000213186_56 (sequence is synthesized)
tttcttaggtggtcgaacactgaaatgattaagaaaatcatagtcaaattacctgtaaagctaaagttaagactttgtgatttgctttccataattgagttctactatcttttttaggaa

SEQ ID NO: 754484 - DNA, 120 bp, Artificial Sequence
  ENSG00000213186_57 (sequence is synthesized)
tctgtaacttgcttttcacaaatatgaattctcttttctgttattttataaaaacgttattggaggatgcatacataggagcacataccaaagttttaagatttaaagagcaagctaagt

SEQ ID NO: 754485 - DNA, 120 bp, Artificial Sequence
  ENSG00000213186_58 (sequence is synthesized)
attatacttcttgctattctttctccttatcaaatacaatttctcaatcctcatgttaaaaatgccttgaaaatttaagaaaagatgaactagacaaatattttgtaaatactggctgtc

SEQ ID NO: 754486 - DNA, 120 bp, Artificial Sequence
  ENSG00000213186_59 (sequence is synthesized)
tgcccctgtaaactgcaagcataaatagcatgcaagcaaattagtatttactagtaaatgaaacaagttgtacatcttgccttcacatcctacctccaagaaatactgagtttggagaat

SEQ ID NO: 754487 - DNA, 120 bp, Artificial Sequence
  ENSG00000213186_60 (sequence is synthesized)
atgtagaaaaaggtaacagtgggattataaactcagcataattacacacctgaacatgattccttcagagaaaggatccaagctgtctacaagctcgagttcggcgtcccctcccaaagt

SEQ ID NO: 754488 - DNA, 120 bp, Artificial Sequence
  ENSG00000213190_0 (sequence is synthesized)
aacagccttgagatgagatcacacaaacactcaaatgtagcttctaggggaggggagaacccaggaggctgggctttctcttctcttctcaccactggaagggaggagtaaccagaagga

SEQ ID NO: 754489 - DNA, 120 bp, Artificial Sequence
  ENSG00000213190_1 (sequence is synthesized)
gcggaagctaaaacacgctgtccagagaggggagctgtggtcagtgggacgtcagtgagtcagtcatagggtttgtcctgatggtggtggtggcaggtggtaagggttggggaaaaatga

SEQ ID NO: 754490 - DNA, 120 bp, Artificial Sequence
  ENSG00000213190_2 (sequence is synthesized)
agaattagaggaaacccccaacaccagcaggcaggctgtactgtgactggactctccctcaacatcccccactctgctcaaagctgagggacagaggtggatagtgctgggagggaagag

SEQ ID NO: 754491 - DNA, 120 bp, Artificial Sequence
  ENSG00000213190_3 (sequence is synthesized)
aagagagggggaggagaaggagagagggaaaggggcagtggagagaacaaggccatttctgtttcttttccagggacctgaccagagctgggtggagggaaagcgtgtgtgtgggacttg

SEQ ID NO: 754492 - DNA, 120 bp, Artificial Sequence
  ENSG00000213190_4 (sequence is synthesized)
gcatgaaatgaccaatgatgacgagaagtgaccaggaaattccattccctaggacattagggtctctgaaacttgagggtggggtcagagtgtgaagaagacaggtcagggtgaatgtga

SEQ ID NO: 754493 - DNA, 120 bp, Artificial Sequence
  ENSG00000213190_5 (sequence is synthesized)
tggtagcgcagggcagtgggggatgggaacaaagccagaaaaggaagtaagagccactggcggccactcttctttaaagcagccagaagagagtgggttgaggaaaaatgaagtcctgag

SEQ ID NO: 754494 - DNA, 120 bp, Artificial Sequence
  ENSG00000213190_6 (sequence is synthesized)
ctggtcagcccaggcggaagagccacccgaatccaaccccacagtgaatagggaaggggctgagaaaacaacaggagggatgaggattagacctcataaggccacgtcctgagagccaag

SEQ ID NO: 754495 - DNA, 120 bp, Artificial Sequence
  ENSG00000213190_7 (sequence is synthesized)
tggtgctcagaactcgacctctctgagttccaaatggcaagagtgaaatatggaaccgggaaagccaccccccgcccccaccaagatcatactaggacttgagggtctcagagctgttgg

SEQ ID NO: 754496 - DNA, 120 bp, Artificial Sequence
  ENSG00000213190_8 (sequence is synthesized)
gaggtgagcagaagggatgggaaagaggtgccagggaggaaggatgtacaggctagttctctggtcctgttcgggccccaaaccggttctcccggtcccaccgcctctggccctaaggcc

SEQ ID NO: 754497 - DNA, 120 bp, Artificial Sequence
  ENSG00000213190_9 (sequence is synthesized)
tccaacccgcggcctgacaagccctcacatgaagcagctggagagaaagaaagaatcgagagaatggcatgggcaattctggctagaagcccggggcagcagctggtccctgtgtggaga

SEQ ID NO: 754498 - DNA, 120 bp, Artificial Sequence
  ENSG00000213190_10 (sequence is synthesized)
ccccgagacatggagggctgctgagggactctggagaagcggtgtggactccatatttcagccaagtgacaggcccaacaccaaccttcccttccccaggaaaggtcttctgggggctta

SEQ ID NO: 754499 - DNA, 120 bp, Artificial Sequence
  ENSG00000213190_11 (sequence is synthesized)
agaggaaagagggctaggccctaagcctcccctccccaaatatattcaatcacacagattccgtatctgtctccccccactacacaactctacctagaagttctctgctgttctcaaccc

SEQ ID NO: 754500 - DNA, 120 bp, Artificial Sequence
  ENSG00000213190_12 (sequence is synthesized)
ttaaccggactgggacctctctgggaatctttcggaccctctccctcccacctcccccaacattccagttccttcttttccttctactcttcagcggcctcagcctgcgcaccccaggag

SEQ ID NO: 754501 - DNA, 120 bp, Artificial Sequence
  ENSG00000213190_13 (sequence is synthesized)
cgtggatgactacggccaccccgggcgcgcacccctttcccaccaccccagcatctctgcagcccaggacacccgcctcccccacaccccgcatccggtgtgtctccgcctggcccggcc

SEQ ID NO: 754502 - DNA, 120 bp, Artificial Sequence
  ENSG00000213190_14 (sequence is synthesized)
ggcgcggcaggcgggccaggggaccaactgcacggcctcacctgctcttctccaccatccagacgttcagctacagctggtgggggtgagggactctgctccgtggccgccagtgtgggc

SEQ ID NO: 754503 - DNA, 120 bp, Artificial Sequence
  ENSG00000213190_15 (sequence is synthesized)
ttcccgggctagctctgcggcgaggtgggggagccgagtacgagccggcagaggtggggccggctgagggcggaagcggcggcgacgcgattacgaaacccgtccggctcggagcccggc

SEQ ID NO: 754504 - DNA, 120 bp, Artificial Sequence
  ENSG00000213190_16 (sequence is synthesized)
agatgaggccctggcacccaagctggggcccccggaatctcacgttccctttactcgccaggcatttcggggcaaaacgaagcggagccccccaaacccccagacctaaccaagttcaga

SEQ ID NO: 754505 - DNA, 120 bp, Artificial Sequence
  ENSG00000213190_17 (sequence is synthesized)
gattcgcagaagcacgccccccaccccaaatttattgtgctctacccaaaatggaataggactaggtttatttacccattgtgagggtagagaggcgagtctggaggagcagggattggg

SEQ ID NO: 754506 - DNA, 120 bp, Artificial Sequence
  ENSG00000213190_18 (sequence is synthesized)
agaaggggtggaaaaatactctgattcttaaaaatactttgtaacctaaagtccttaaattgtggaagaaaggaatactcctcctttccattgtagtctagagttaagatttcaaatcca

SEQ ID NO: 754507 - DNA, 120 bp, Artificial Sequence
  ENSG00000213190_19 (sequence is synthesized)
taaattagaggacctaaaattagagggcaattaactgctcattcattgggcccccagtcagcacgggggtgctggaagagatcgggaataatagcgcagaccaatgagcctagggagatg

SEQ ID NO: 754508 - DNA, 120 bp, Artificial Sequence
  ENSG00000213190_20 (sequence is synthesized)
ctttcatcgtctctccttccctcaagtgttctggaacctatcatttgaattagccgagtcaggcaggagggggcggggaatccttccgcccttcttaggaggggctgcattgcaggggga

SEQ ID NO: 754509 - DNA, 120 bp, Artificial Sequence
  ENSG00000213190_21 (sequence is synthesized)
gagtgaactgacagactcagtcactgaagagggaaaaggagtgagaagacaaagccgtcaaagccccaacagctttgtatttctccagcccggcgcagaccccggagctcccgaggcact

SEQ ID NO: 754510 - DNA, 120 bp, Artificial Sequence
  ENSG00000213190_22 (sequence is synthesized)
ccctccatctttggaacacgccagtaattgattgataacaggaagctatgagggaccctgtgagtagccagtacagttcctttcttttctggaggatgcccatcccagaactggatctgt

SEQ ID NO: 754511 - DNA, 120 bp, Artificial Sequence
  ENSG00000213190_23 (sequence is synthesized)
cggagctggaaggcctgggtctgtcagatacagccacctacaaggtcaaagacagcagcgttggcaaaatgatcgggcaagcaactgcagcagaccaggagaaaaaccctgaaggtgatg

SEQ ID NO: 754512 - DNA, 120 bp, Artificial Sequence
  ENSG00000213190_24 (sequence is synthesized)
gcctccttgagtacagcaccttcaacttctggagagctcccattgccagcatccactccttcgaactggacttgctctaaggccaagacttctctctcccatcaccttgccctcattgtc

SEQ ID NO: 754513 - DNA, 120 bp, Artificial Sequence
  ENSG00000213190_25 (sequence is synthesized)
ttccctctcaagccccttcctttccactcctttcccattttaatcttgttctctccctactgtgttggtggtgctgatgaatctgccagagttgagttctatgtatttatttatctatct

SEQ ID NO: 754514 - DNA, 120 bp, Artificial Sequence
  ENSG00000213190_26 (sequence is synthesized)
gtctactccatttctctcaaaagccctcaagtcacaaagtaaatggttcaagcaatggagtactgggtcacagggattcctcctttcccccccaaatattaactccagaaactaggcctg

SEQ ID NO: 754515 - DNA, 120 bp, Artificial Sequence
  ENSG00000213190_27 (sequence is synthesized)
actggggacacctgagagtagtatagtagtgcaaaatggaagactgatttttgactctattataatcagcttcagagattccttaaaccttcctaatttcctgctccagggcagtaaaca

SEQ ID NO: 754516 - DNA, 120 bp, Artificial Sequence
  ENSG00000213190_28 (sequence is synthesized)
caaatatttcttcaaggggtgatgaaaacctcggaagttttaatttgaggttatctgctacgaaacagtatttctaaaaggctaaagtgataagtctcttgcttttttttgatcctgctc

SEQ ID NO: 754517 - DNA, 120 bp, Artificial Sequence
  ENSG00000213190_29 (sequence is synthesized)
ttatattcttttttttcctcagagaaatcaggagggtagttagaggtataaaacaggaggaaatattatggaaaatgaaaatagggaaaataattgaatcattttagaagtagctaattt

SEQ ID NO: 754518 - DNA, 120 bp, Artificial Sequence
  ENSG00000213190_30 (sequence is synthesized)
cttttctcaaaagagtgtcccttcttcacacctactcactttacaactttgctcctaactgtgggttgaaaactctagctaaagaaagttatcaaatcttaacatgcattcctactatta

SEQ ID NO: 754519 - DNA, 120 bp, Artificial Sequence
  ENSG00000213190_31 (sequence is synthesized)
tgatagtttttaaggtttcaattcaatcttctgaacggcataagtcctattttagccttacctcctgcatttgcaatacgtaatactgatcagtgggcacagttcttcagctacattgag

SEQ ID NO: 754520 - DNA, 120 bp, Artificial Sequence
  ENSG00000213190_32 (sequence is synthesized)
accctgaaatgaacaattatattctgactcgacatcttgtccccaatccttccaaaaatattgatggtgatttgtgctaccatttactcgtttatttaataaagacattcaatcccagga

SEQ ID NO: 754521 - DNA, 120 bp, Artificial Sequence
  ENSG00000213199_0 (sequence is synthesized)
ctctgcagcagcgccggctcagcaccgccggctcagcaccgctccgcagcccctgcctgccacggtcagctacgtcccacctggtctgctgcggagtccccagcccagtgcctagcccag

SEQ ID NO: 754522 - DNA, 120 bp, Artificial Sequence
  ENSG00000213199_1 (sequence is synthesized)
tggagccaccgcctgttcctcgggaaggaacagtgggacctgaccggccagatcacctcctccaatcctgccaggctagtgcctccctgccttccaaccttggctgtctcccaccctctc

SEQ ID NO: 754523 - DNA, 120 bp, Artificial Sequence
  ENSG00000213199_2 (sequence is synthesized)
ttctcctctccttgcctggcctcctgaatcctatcttagcctccttagccccctgactgactctctctcgcttcttccaagcctctgtagctggttccgctcctgggttctggccatgaa

SEQ ID NO: 754524 - DNA, 120 bp, Artificial Sequence
  ENSG00000213199_3 (sequence is synthesized)
gcccacctcaggcccagaggaggcccggcggccagcctcggacatccgcgtgttcgccagcaactgctcgatgcacgggctgggccacgtcttcgggccaggcagcctgagcctgcgccg

SEQ ID NO: 754525 - DNA, 120 bp, Artificial Sequence
  ENSG00000213199_4 (sequence is synthesized)
ggggatgtgggcagcggccgtggtcctgtcagtggccaccttcctctaccaggtggctgagagggtgcgctactacagggagttccaccaccagactgccctggatgagcgagaaagcca

SEQ ID NO: 754526 - DNA, 120 bp, Artificial Sequence
  ENSG00000213199_5 (sequence is synthesized)
ccggctcatcttcccggctgtcaccctgtgcaacatcaacccactgcgccgctcgcgcctaacgcccaacgacctgcactgggctgggtctgcgctgctgggcctggatcccgcagagca

SEQ ID NO: 754527 - DNA, 120 bp, Artificial Sequence
  ENSG00000213199_6 (sequence is synthesized)
cgccgccttcctgcgcgccctgggccggccccctgcaccgcccggcttcatgcccagtcccacctttgacatggcgcaactctatgcccgtgctgggcactccctggatgacatgctgct

SEQ ID NO: 754528 - DNA, 120 bp, Artificial Sequence
  ENSG00000213199_7 (sequence is synthesized)
ggactgtcgcttccgtggccaaccttgtgggcctgagaacttcaccacgatcttcacccggatgggaaagtgctacacatttaactctggcgctgatggggcagagctgctcaccactac

SEQ ID NO: 754529 - DNA, 120 bp, Artificial Sequence
  ENSG00000213199_8 (sequence is synthesized)
ggcaatgggctggacatcatgctggacgtgcagcaggaggaatatctacctgtgtggagggacaatgaggagaccccgtttgaggtggggatccgagtgcagatccacagccaggaggag

SEQ ID NO: 754530 - DNA, 120 bp, Artificial Sequence
  ENSG00000213199_9 (sequence is synthesized)
ccgcccatcatcgatcagctgggcttgggggtgtccccgggctaccagacctttgtttcttgccagcagcagcagctgagcttcctgccaccgccctggggcgattgcagttcagcatct

SEQ ID NO: 754531 - DNA, 120 bp, Artificial Sequence
  ENSG00000213199_10 (sequence is synthesized)
ctgaaccccaactatgagccagagccctctgatcccctaggctcccccagccccagccccagccctccctatacccttatggggtgtcgcctggcctgcgaaacccgctacgtggctcgg

SEQ ID NO: 754532 - DNA, 120 bp, Artificial Sequence
  ENSG00000213199_11 (sequence is synthesized)
aagtgcggctgccgaatggtgtacatgccaggcgacgtgccagtgtgcagcccccagcagtacaagaactgtgcccacccggccatagatgccatgcttcgcaaggactcgtgcgcctgc

SEQ ID NO: 754533 - DNA, 120 bp, Artificial Sequence
  ENSG00000213199_12 (sequence is synthesized)
cccaacccgtgcgccagcacgcgctacgccaaggagctctccatggtgcggatcccgagccgcgccgccgcgcgcttcctggcccggaagctcaaccgcagcgaggcctacatcgcggag

SEQ ID NO: 754534 - DNA, 120 bp, Artificial Sequence
  ENSG00000213199_13 (sequence is synthesized)
aacgtgctggccctggacatcttctttgaggccctcaactatgagaccgtggagcagaagaaggcctatgagatgtcagagctgcttggtgacattgggggccagatggggctgttcatc

SEQ ID NO: 754535 - DNA, 120 bp, Artificial Sequence
  ENSG00000213199_14 (sequence is synthesized)
ggggccagcctgctcaccatcctcgagatcctagactacctctgtgaggtgttccgagacaaggtcctgggatatttctggaaccgacagcactcccaaaggcactccagcaccaatctg

SEQ ID NO: 754536 - DNA, 120 bp, Artificial Sequence
  ENSG00000213199_15 (sequence is synthesized)
cttcaggaagggctgggcagccatcgaacccaagttccccacctcagcctgggccccagacctcccacccctccctgtgccgtcaccaagactctctccgcctcccaccgcacctgctac

SEQ ID NO: 754537 - DNA, 120 bp, Artificial Sequence
  ENSG00000213199_16 (sequence is synthesized)
cttgtcacacagctctagacctgctgtctgtgtcctcggagccccgccctgacatcctggacatgcctagcctgcacgtagcttttccgtcttcaccccaaataaagtcctaatgcatca

SEQ ID NO: 754538 - DNA, 120 bp, Artificial Sequence
  ENSG00000213199_17 (sequence is synthesized)
ctaaaatcaagggagggcaggggcaggctcaggacagtgggtgtgcccgttcccaccccagcactctgctctgttccgaagacctcccacccctccctgtgccgtcaccaagactctctc

SEQ ID NO: 754539 - DNA, 120 bp, Artificial Sequence
  ENSG00000213199_18 (sequence is synthesized)
ctccacacctactacttcaagcccacaccacctcagaccctaaaccctcagctcctcagacctgtctaggggcctctccccagctggcctctcacgctctccgggaagcctccttaaccc

SEQ ID NO: 754540 - DNA, 120 bp, Artificial Sequence
  ENSG00000213199_19 (sequence is synthesized)
tgtccccccacagctgagcttcctgccaccgccctggggcgattgcagttcagcatctctgaaccccaactatgagccagagccctctgatcccctaggctcccccagccccagccccag

SEQ ID NO: 754541 - DNA, 120 bp, Artificial Sequence
  ENSG00000213199_20 (sequence is synthesized)
tacaggggttgcaactgggagcctagggggccccaaggcatctccaggcccaatctacctctgggcttttctcaagctctccctaggattactgcggtttcctcctggcgcctctcgtct

SEQ ID NO: 754542 - DNA, 120 bp, Artificial Sequence
  ENSG00000213199_21 (sequence is synthesized)
aagcctagaccaccatcccgccccagctgaggagaaacaggcaggagggtgtgcagtgacctcgactggtccctgggaggaggaccactccccacctctgaccctctcgtcctcacacag

SEQ ID NO: 754543 - DNA, 120 bp, Artificial Sequence
  ENSG00000213199_22 (sequence is synthesized)
tgggccccagctctagacctgctgtctgtgtcctcggagccccgccctgacatcctggacatgcctagcctgcacgtagcttttccgtcttcaccccaaataaagtcctaatgcatcagc

SEQ ID NO: 754544 - DNA, 120 bp, Artificial Sequence
  ENSG00000213203_0 (sequence is synthesized)
cttctgcactcacagccgaagggaaagcagcaggttggggcttcttgtggccaacttcagagcctgtcaccaggaaaggtaagcatgggaggaaggaagatggcgacagatgaagaaaat

SEQ ID NO: 754545 - DNA, 120 bp, Artificial Sequence
  ENSG00000213203_1 (sequence is synthesized)
gtctatggtttagaagagaacgctcagtcccggcaggagtccacgcggaggctcatccttgttgggagaacaggggccgggaagagcgccactgggaacagcatcctgggccagagacgg

SEQ ID NO: 754546 - DNA, 120 bp, Artificial Sequence
  ENSG00000213203_2 (sequence is synthesized)
ttcttctccaggctgggggccacgtctgtgaccagggcctgcaccacgggcagccgcaggtgggacaagtgccacgtggaagtcgtggacactccggacattttcagctcccaagtgtcc

SEQ ID NO: 754547 - DNA, 120 bp, Artificial Sequence
  ENSG00000213203_3 (sequence is synthesized)
aagacagatcctggctgtgaggagagaggtcactgctacctgctctcggcccccggaccccacgcgctgctcctggtgacccagttgggtcggttcaccgcccaggaccagcaggcggtg

SEQ ID NO: 754548 - DNA, 120 bp, Artificial Sequence
  ENSG00000213203_4 (sequence is synthesized)
aggcaggtgagggacatgttcggggaggacgtcctaaaatggatggtcatcgtcttcaccaggaaggaggacctggccgggggctccctgcacgattacgtgagcaacacagagaaccgg

SEQ ID NO: 754549 - DNA, 120 bp, Artificial Sequence
  ENSG00000213203_5 (sequence is synthesized)
gccttgcgcgagctggtggccgagtgcgggggccgggtctgtgcctttgataaccgggccaccggccgggagcaggaagcccaggtggagcagctgctggggatggtcgagggcttggtg

SEQ ID NO: 754550 - DNA, 120 bp, Artificial Sequence
  ENSG00000213203_6 (sequence is synthesized)
ctggagcacaagggcgcccattactccaacgaggtgtatgagctggcgcaggtgctgcgctgggcaggccctgaggagcggctccggcgggtggcggagcgcgtggcagccagggtgcag

SEQ ID NO: 754551 - DNA, 120 bp, Artificial Sequence
  ENSG00000213203_7 (sequence is synthesized)
aggaggccatggggcgcctggctgtcggcccggctgtggaagtggctgaagtcccccaggagctggaggctgggcctggccctgctgctggggggcgcgctcctgttctgggtgctgctc

SEQ ID NO: 754552 - DNA, 120 bp, Artificial Sequence
  ENSG00000213203_8 (sequence is synthesized)
cacaggcggtggtcggaggccgttgcggaggtcgggcctgactgacagcgcaggtcctaaaactgaaggcaacttggttaagggaggctgaattcttggagctgaagggaaaacttcatt

SEQ ID NO: 754553 - DNA, 120 bp, Artificial Sequence
  ENSG00000213203_9 (sequence is synthesized)
ccaacggaaggaatcctgtagtttcaggcatagttttaatgacacagaaaactttgctgcatcacctttgcaactttgccaaagctcagagttcactttttaagtttttaactcatttta

SEQ ID NO: 754554 - DNA, 120 bp, Artificial Sequence
  ENSG00000213203_10 (sequence is synthesized)
aatgatgtgtatgcagagttttaaaataaattcgtctaacaataacttcctttggtagttttggtagtctaatgtcaagtagcttgtagtggggacaaacgcatggcacagggaaaacaa

SEQ ID NO: 754555 - DNA, 120 bp, Artificial Sequence
  ENSG00000213203_11 (sequence is synthesized)
gtgccattattttcgagctttttaaaaaatttagactgcccctccttgataattttctagttcttatacatgggtagataggttcctttgtgatccttgtagacttttagcatcaataaa

SEQ ID NO: 754556 - DNA, 120 bp, Artificial Sequence
  ENSG00000213203_12 (sequence is synthesized)
agaaatgtgggggttacacacgtgaatgttacttctgagacatcagtttatagtacaatgatttactaccaaaaagatgaatgtaactgtactgttacaaagtggaaaataacagtttcc

SEQ ID NO: 754557 - DNA, 87 bp, Artificial Sequence
  ENSG00000213203_13 (sequence is synthesized)
atgtaactgtactgttacaaagtggaaaataacagtttccacttttctagaacatattatggttcatggcattccaaaatgaagtaa

SEQ ID NO: 754558 - DNA, 75 bp, Artificial Sequence
  ENSG00000213203_14 (sequence is synthesized)
tccaggctgggtgacaaagcaagaagtaggatattgggaaaataacatataatatcttctatatggttattcata

SEQ ID NO: 754559 - DNA, 79 bp, Artificial Sequence
  ENSG00000213203_15 (sequence is synthesized)
ttttatctcgagctcctctctggttatggagaagaggcagagcaccaggtgcataggctgagactgcagacacctgagc

SEQ ID NO: 754560 - DNA, 120 bp, Artificial Sequence
  ENSG00000213203_16 (sequence is synthesized)
gagcaccaggtgcataggctgagactgcagacacctgagcatcctatgctgtgaggcgaaagcatccggttttttcgggatgggcctgtccaggaaggttctcgaatgccacgtgattag

SEQ ID NO: 754561 - DNA, 120 bp, Artificial Sequence
  ENSG00000213203_17 (sequence is synthesized)
ccttatttctatttctgagcataatgagaaccctttaagggaactcattgtctttaaatcagccagcctctagtgaggtcatggagacatgggaagcaggtattcacattagctctattc

SEQ ID NO: 754562 - DNA, 120 bp, Artificial Sequence
  ENSG00000213203_18 (sequence is synthesized)
aagaggaagaggaggagggagtgtgcgcaggcgccctagggtcttccccagcacacgttgggaagaaggggtctgcaagcatgcgcacaattgccagctcaggctaaggactgcaggagg

SEQ ID NO: 754563 - DNA, 120 bp, Artificial Sequence
  ENSG00000213203_19 (sequence is synthesized)
ttccaggtgggttgcgggcttcgggcaggctatggtgaggggtcctgagggccttggtgaccgctgcagggagttggactttttgaagcgtggctcaagaaaaacccatgtttaattcct

SEQ ID NO: 754564 - DNA, 120 bp, Artificial Sequence
  ENSG00000213203_20 (sequence is synthesized)
gcctttcgcttcctcagcagcctttctgggcccaggcaggggcctcgagccagggaaggatcctttgatgaccagaggggacagcagggagggcacagcgtggtcgtccacggtcacttg

SEQ ID NO: 754565 - DNA, 120 bp, Artificial Sequence
  ENSG00000213203_21 (sequence is synthesized)
cgcacgagccagtgctgctgctggtgttagacaacaacttttatcaaagtggtttaatgtacagcagcaacaaagctgctttgtggagcagggctcccaataggcagtgtgcccagagta

SEQ ID NO: 754566 - DNA, 120 bp, Artificial Sequence
  ENSG00000213203_22 (sequence is synthesized)
gcagctcggaagcagtactgcaatcacatttatacccactttcaactatatgcaaatttaggggtggattatgccaaaatttctagaaaaaaggtcgtaacttccaggtcgtgggattgt

SEQ ID NO: 754567 - DNA, 120 bp, Artificial Sequence
  ENSG00000213203_23 (sequence is synthesized)
tgctatggaaaggagccaaaacttccagctgttgccttagcaatggtaacctgacgtggcactggtgagtgtgttttatggagagactctttcacctcttccctttcagcttgtcttcag

SEQ ID NO: 754568 - DNA, 120 bp, Artificial Sequence
  ENSG00000213203_24 (sequence is synthesized)
tgtggtctggagcccaatccccacctccagagtctagtcctgcctcctacctcagtaataaaaagtagtagtatatggttaattgtcaaatacatttgcaaagtgtaatcaaagatacat

SEQ ID NO: 754569 - DNA, 120 bp, Artificial Sequence
  ENSG00000213203_25 (sequence is synthesized)
taccaatctgaatctcaaaatgtgctatcatctttgaatttgaataatgtattattaaagaagttacagttttcctttacattcaataacatttctttagtggttttctttttcagatac

SEQ ID NO: 754570 - DNA, 120 bp, Artificial Sequence
  ENSG00000213203_26 (sequence is synthesized)
tttgattatgatcttttttttttcatctttgtatccccgttatacaacccagtgcctggcatagaaagtgggatcaacaaatgtttggaaaatgaattgtaaagttgactttcctgtacc

SEQ ID NO: 754571 - DNA, 120 bp, Artificial Sequence
  ENSG00000213203_27 (sequence is synthesized)
tttttaatattagatttctagctaccagacttttgaccattttctaaattttctaccatagataacagaaaattctttcgcgcaagcatgtcattgtattaatgatattctcctgcccta

SEQ ID NO: 754572 - DNA, 120 bp, Artificial Sequence
  ENSG00000213203_28 (sequence is synthesized)
aggaaatttacttcccttcaagcacagggtcccccaaattactgtatttccacccctttcagcttattttatccttttctcctgctacagaacagttggcattcaccattcccttcggta

SEQ ID NO: 754573 - DNA, 120 bp, Artificial Sequence
  ENSG00000213203_29 (sequence is synthesized)
aagtctttttttaggctgtggcttaaaggttgctttttcccccatagctcaaggttaggccttgtgacctcacttatgtaatttgagtgatttgatagcacaaatcaattttatacttaa

SEQ ID NO: 754574 - DNA, 120 bp, Artificial Sequence
  ENSG00000213203_30 (sequence is synthesized)
attacagcataaaacagcactgcctcctgttggaaaaacttgcttgctaattttaaccagacacagtaaaaatactgtccaatacctcaaaaattgtgtaaatatatatccatttcaatt

SEQ ID NO: 754575 - DNA, 120 bp, Artificial Sequence
  ENSG00000213203_31 (sequence is synthesized)
gtcccccttcctctcctctccttttatctcttggaagataaaaatgtatgggtcctgtgctgataatgtttctgttcatatttctatgccctggtacctggatcagcttttgttctacac

SEQ ID NO: 754576 - DNA, 120 bp, Artificial Sequence
  ENSG00000213203_32 (sequence is synthesized)
aaaaagacttgtatctggcttatttctgaaagctagtgttggccatgatgaacttttagagcaaaagatttcaggcagagtacattcttacatattcttacacaatcaatattcagttcc

SEQ ID NO: 754577 - DNA, 120 bp, Artificial Sequence
  ENSG00000213203_33 (sequence is synthesized)
agcccgcacagtagccctagcaaatgccagtgctccttccagagattcacctatggattcagtaccccagaagagaatttctgtaaattcttggggaagctatagctagactatggctca

SEQ ID NO: 754578 - DNA, 120 bp, Artificial Sequence
  ENSG00000213203_34 (sequence is synthesized)
acactcatttttcccccatgattcttaatctaacagtggcaatgttggcctcttcttaggcaactagattcggttcttgcttattctgccaataaaatactttattgagatgcttacaaa

SEQ ID NO: 754579 - DNA, 120 bp, Artificial Sequence
  ENSG00000213203_35 (sequence is synthesized)
tgactagcctgctcccttggttccacagtataaaataaggataataaacctactccgatcaccgcagaagaagtgcagaggggattaaatcatgcactacagtgaacatgatttgtgagg

SEQ ID NO: 754580 - DNA, 120 bp, Artificial Sequence
  ENSG00000213203_36 (sequence is synthesized)
tagaatgtttagagaacaaggatagagggttaaaacatatattctttttaggcagccagtttaagagagagataagagaggaaggagagaaagagggagagaaagagagaagaaggaaag

SEQ ID NO: 754581 - DNA, 120 bp, Artificial Sequence
  ENSG00000213213_0 (sequence is synthesized)
aagctgagcccagggaggctttgaggtacacagggtcccttggggggcctgagagcagccatgaggaggcacagtgagacagatgtggaagagcagacccaggagctgaagaccatcact

SEQ ID NO: 754582 - DNA, 120 bp, Artificial Sequence
  ENSG00000213213_1 (sequence is synthesized)
cagctccaggagcagtgtcgggcactccagatccaaggggtgaaagagaatatggaccagaacaaggccacgctggccctcctgcgcagcaacatccgccgcggggcccaggactgggct

SEQ ID NO: 754583 - DNA, 120 bp, Artificial Sequence
  ENSG00000213213_2 (sequence is synthesized)
ttggccaagaagtatgaccagtggaccatctccaaggcctgcgggaaaaacttgcctttgcgactggcgcactgccgcagcaccatggaggtggtgcgggagaagctgcgcaagtacgtc

SEQ ID NO: 754584 - DNA, 120 bp, Artificial Sequence
  ENSG00000213213_3 (sequence is synthesized)
ttcgaccgcgtgaacatgcacaacctactgatccacctggtgcggcggcgcgggcagaagctggagagcatgcagctggagctggacagcctgcggagccagcccgacgccagcaaggag

SEQ ID NO: 754585 - DNA, 120 bp, Artificial Sequence
  ENSG00000213213_4 (sequence is synthesized)
gagctgcggctgctgcagatcatccgccagctggagaacaacatcgagaagacaatgatcaagatcatcaccagccagaacatccacctgctgtatttggacctgctggattatctgaag

SEQ ID NO: 754586 - DNA, 120 bp, Artificial Sequence
  ENSG00000213213_5 (sequence is synthesized)
acagtgctggcaggataccccattgagctggacaagctgcagaacctcgtggtcaactactgctcagagctgtcggatatgaagatcatgtcccaagatgccatgatgatcacggatgag

SEQ ID NO: 754587 - DNA, 120 bp, Artificial Sequence
  ENSG00000213213_6 (sequence is synthesized)
gtcaagaggaacatgaggcaaagggaggcgtccttcatcgaggagcgccgggcaagggagaaccggctcaaccagcagaagaagctgatcgacaagatccacacgaaggagaccagcgag

SEQ ID NO: 754588 - DNA, 120 bp, Artificial Sequence
  ENSG00000213213_7 (sequence is synthesized)
tcgaacctgatgagcacggagaccctgaaattgaggagaaaagagacctccacagcagaaatggaataccagtcgggcgtgactgctgtggtggagaaggtcaagagtgctgtacggtgc

SEQ ID NO: 754589 - DNA, 120 bp, Artificial Sequence
  ENSG00000213213_8 (sequence is synthesized)
tctcacgtctgggacatcactagccgcttcctggcccagaggaacacggaggagaacctggagctgcagatggaggactgtgaggagtggcgggtgcagctgaaggccctggtgaagcag

SEQ ID NO: 754590 - DNA, 120 bp, Artificial Sequence
  ENSG00000213213_9 (sequence is synthesized)
ctggagctggaggaggccgtgctcaagttccgccagaagcctagctccatcagcttcaagtccgttgagaagaaaatgacagacatgctaaaagaggaagaagagaggctccagctggcg

SEQ ID NO: 754591 - DNA, 120 bp, Artificial Sequence
  ENSG00000213213_10 (sequence is synthesized)
cacagcaacatgaccaagggccaggagctgctgctgaccatccagatgggcatcgacaacctctatgtccggctgatgggcattaacttgcctgcgacccagagagaagtggtgctctcc

SEQ ID NO: 754592 - DNA, 120 bp, Artificial Sequence
  ENSG00000213213_11 (sequence is synthesized)
aacaccctcgatttgaacagcaagctggcgtactgcgaggggaagctcacgtacctggctgacagagtgcagatggtgtccaggaccgaggagggcgacacaaaggtgagggacaccctg

SEQ ID NO: 754593 - DNA, 120 bp, Artificial Sequence
  ENSG00000213213_12 (sequence is synthesized)
gagtcctcgactctgatggagaagtacaacaccaggatcagctttgagaaccgggaggaggatatgatcgacaccttccagttccccgacatggaccacagctacgtcccttcgcgcgcc

SEQ ID NO: 754594 - DNA, 120 bp, Artificial Sequence
  ENSG00000213213_13 (sequence is synthesized)
gagatcaagaggcaggcgcagcggctaatcgaggggaagctcaaggcggccaagaaaaagaagaagtagccccgccgccccgctccctgctttgctacacaaataaacatttttccagga

SEQ ID NO: 754595 - DNA, 120 bp, Artificial Sequence
  ENSG00000213213_14 (sequence is synthesized)
ggaggcatgccatgccagacgggcccggaggagaggcaccagggctggagcagggaggagcgcggtgaagacaccttccagttccccgacatggaccacagctacgtcccttcgcgcgcc

SEQ ID NO: 754596 - DNA, 120 bp, Artificial Sequence
  ENSG00000213213_15 (sequence is synthesized)
tgccaacaagcctgtgtgtcccacagaggggccaggggactccacttgcacacacctgagcttctgagtccctgattctggcacagcacccaactcaggactgggctcctgggtggccca

SEQ ID NO: 754597 - DNA, 120 bp, Artificial Sequence
  ENSG00000213213_16 (sequence is synthesized)
gcccagccccaggttccctgtggggttgccacgagcctccacccgcccgcctgctggcgggctccatggcggccccctacgcaaccacgagtgggcggtgcccttcccgacccaggtggt

SEQ ID NO: 754598 - DNA, 120 bp, Artificial Sequence
  ENSG00000213213_17 (sequence is synthesized)
gggaagggcgggggtcaggggctgggatctgggaggggcgggagcgtcctggggcggagccgccccgcacccgccagggagagggagctctgcctgaccaccggctacgcaggacgccga

SEQ ID NO: 754599 - DNA, 120 bp, Artificial Sequence
  ENSG00000213213_18 (sequence is synthesized)
ggcatgtggaaaacgtttttttaaacttcatttttggctattccaaaaaagcatatcgtggggtatatcagaattcttcggactttcttgcacgtattaaatgatttggtattgtttgta

SEQ ID NO: 754600 - DNA, 120 bp, Artificial Sequence
  ENSG00000213213_19 (sequence is synthesized)
aacttgcctgcgacccaggtaccgggagtgaggctgagctgccacacaccaggtccctgggcagggccagaggggagatgagaccctcctcccggcctacagagagaagtggtgctctcc

SEQ ID NO: 754601 - DNA, 120 bp, Artificial Sequence
  ENSG00000213213_20 (sequence is synthesized)
ccaccacccaacccgagggcttggcatctgtgagcccacatcctgcagcaggggccccctctggctctccggccagctaggggacacccaggccctcctctgcatacccccctaccacgt

SEQ ID NO: 754602 - DNA, 120 bp, Artificial Sequence
  ENSG00000213213_21 (sequence is synthesized)
cgcctccgaacttggatggccaggatggggtcccgcggctctctgctcctcgtggaagcagggatctcgctactgggctagcgtgggatacaagaggccctggggagaatgcctggagga

SEQ ID NO: 754603 - DNA, 120 bp, Artificial Sequence
  ENSG00000213213_22 (sequence is synthesized)
gccagcggctgcgggtgcgcaaagggcccgctctagctcagccgccgccgctccgcagtatgaccagtggaccatctccaaggcctgcgggaaaaacttgcctttgcgactggcgcactg

SEQ ID NO: 754604 - DNA, 120 bp, Artificial Sequence
  ENSG00000213214_0 (sequence is synthesized)
ggccgcgggtggggcggccgggcctgcgctggggacggctctggggactgcggccggcgccgggacctggaggggacgctggggccgaagcagcatgtgacaccgaccaggattcagccc

SEQ ID NO: 754605 - DNA, 120 bp, Artificial Sequence
  ENSG00000213214_1 (sequence is synthesized)
ttcagccctgatggaggctgaggaggcccagcatggagcctctcctcccatctctgccatagaggaattcagcattatccctgaggctcccatgaggagcagccaggtctctgccttggg

SEQ ID NO: 754606 - DNA, 120 bp, Artificial Sequence
  ENSG00000213214_2 (sequence is synthesized)
gcttgaagctcaagaagatgaggacccatcctataagtggagagaggaacacagactctcagcaactcagcagagtgagttaagggatgtgtgtgactatgcgattgagacgatgccctc

SEQ ID NO: 754607 - DNA, 120 bp, Artificial Sequence
  ENSG00000213214_3 (sequence is synthesized)
ttttcccaaggaaggttctgcagatgtggagcccaatcaggaaagccttgtggctgaggcctgtgacactccggaacactgggaggcagtaccccagagcctagcaggccgacaagcaag

SEQ ID NO: 754608 - DNA, 120 bp, Artificial Sequence
  ENSG00000213214_4 (sequence is synthesized)
gactctagctcccccagagctctgggcctgccccattcagagtgagcatctagacatggccccattttccagtgacctgggaagcgaagaagaggaggtggaattttggccaggacttac

SEQ ID NO: 754609 - DNA, 120 bp, Artificial Sequence
  ENSG00000213214_5 (sequence is synthesized)
ttctttgacattgggatctggacaggcagaagaagaagaggaaacctcttcagataactctggtcagaccagatattattctccctgcgaagagcatcctgcagagaccaaccagaatga

SEQ ID NO: 754610 - DNA, 120 bp, Artificial Sequence
  ENSG00000213214_6 (sequence is synthesized)
aggcgctgaaagtgggactatcaggcagggggaagagctgccatctgaggagctgcaggaaagtcaagggctcttgcatccccaggaggtccaagttctggaggagcagggacagcagga

SEQ ID NO: 754611 - DNA, 120 bp, Artificial Sequence
  ENSG00000213214_7 (sequence is synthesized)
agcaggatttcggggggaaggaactctgagggaggatgtttgtgccgatgggctattaggggaggaacagatgatagagcaggttaatgatgaaaagggagaacagaagcaaaaacagga

SEQ ID NO: 754612 - DNA, 120 bp, Artificial Sequence
  ENSG00000213214_8 (sequence is synthesized)
acaggtacaagatgtgatgcttgggagacaaggagaaagaatggggctcactggggagccagagggtctgaatgacggtgagtgggagcaggaggatatggagaggaaggctcagggtca

SEQ ID NO: 754613 - DNA, 120 bp, Artificial Sequence
  ENSG00000213214_9 (sequence is synthesized)
gggaggtccagaacagggagaagagaggaagagggagctgcaggtgccagaagagaacagggcggactctcaggacgaaaagagtcaaacctttttgggaaaatcagaggaagtaactgg

SEQ ID NO: 754614 - DNA, 120 bp, Artificial Sequence
  ENSG00000213214_10 (sequence is synthesized)
ggggtcccagtcagcgggcaggaggcgaaagagccagagagttgggatgggggcaggctgggggcagtgggaagagcgaggagcagggaagaggagaatgagcatcatgggccttcaatg

SEQ ID NO: 754615 - DNA, 120 bp, Artificial Sequence
  ENSG00000213214_11 (sequence is synthesized)
cccgctctgatagcccctgaggactctcctcactgtgacctgtttccaggtgcctcatatctcgtgactcagattcccgggactcagacagagtccagggctgaggaactgtcccccgca

SEQ ID NO: 754616 - DNA, 120 bp, Artificial Sequence
  ENSG00000213214_12 (sequence is synthesized)
gctctgtctcccttgctagagcccatcagatgctctcaccagcccatttctctactgggctcctttttgactgaggagtcacctgacaaggaaaaacttctatcagtactttgatatgtc

SEQ ID NO: 754617 - DNA, 120 bp, Artificial Sequence
  ENSG00000213214_13 (sequence is synthesized)
acagtttcatgtttatccagttcaatgtatttttaaatttttccttgagacttctttgactgatagattattgtgaagtgtgtttttaaatttccaaatgtttagggattttcatatctt

SEQ ID NO: 754618 - DNA, 120 bp, Artificial Sequence
  ENSG00000213214_14 (sequence is synthesized)
tcttatgctgatttccaattggattccctacaatgatttctggttttcatctgctctggatgattactatctcttttaaatttgttgtggcgagttttagggcctaggacagctctatct

SEQ ID NO: 754619 - DNA, 120 bp, Artificial Sequence
  ENSG00000213214_15 (sequence is synthesized)
tgccatgtgtttcgtcagcactcaaaaaaaatatgtgtattctgctgttactgtgtggaatattctgtaaatgccaaatagattcttttggttaatggcattttgagttgttttatattc

SEQ ID NO: 754620 - DNA, 120 bp, Artificial Sequence
  ENSG00000213214_16 (sequence is synthesized)
ttgttgattttcttttttttcctctttttaaaaacatgaaatgcttcacaaaattttgtgtaatctatattcaagaaccattttaatcttgttggcatcattctgattttagaaagtgct

SEQ ID NO: 754621 - DNA, 120 bp, Artificial Sequence
  ENSG00000213214_17 (sequence is synthesized)
gccaaagccaacactccttgctgattttctgtctagttctatcaattattgaaaaaggcatgaggaaatttctaactataattgtggattcatctatatctcctttcagttttctttttt

SEQ ID NO: 754622 - DNA, 120 bp, Artificial Sequence
  ENSG00000213214_18 (sequence is synthesized)
taaaaaaaatcaatgaaaatttattaaattaagcataaagttactttcacatttatctacaaccacagtgaatacagttcttggcatgaagacaccacaacctttagaatttaaagcctc

SEQ ID NO: 754623 - DNA, 120 bp, Artificial Sequence
  ENSG00000213214_19 (sequence is synthesized)
ctcacctgcaagattacatatataaaactcccactattgtttctctaagagtggattagttcaccaagttaaaagttatatgatctagaatataataaaatggaaatgatttactcataa

SEQ ID NO: 754624 - DNA, 120 bp, Artificial Sequence
  ENSG00000213215_0 (sequence is synthesized)
tttttctgactcccttcacagattaataatccttgaatattttaatgggaacagataaccagacttgggtgagtgaatttattctcctcggcctgtccagtgactgggacactcgggtct

SEQ ID NO: 754625 - DNA, 120 bp, Artificial Sequence
  ENSG00000213215_1 (sequence is synthesized)
ccctgtttgtcctgttcttggtcatgtatgtggtgaccgtgctggggaactgtctcattgtccttctgatcagactggacagccgactccacactcccatgtatttctttctcaccaacc

SEQ ID NO: 754626 - DNA, 120 bp, Artificial Sequence
  ENSG00000213215_2 (sequence is synthesized)
tctcccttgtcgatgtctcctatgccacaagtgtagtccctcagctgctggcacattttcttgcagaacataaagccatcccattccagagctgtgcagcccagttatttttctccctgg

SEQ ID NO: 754627 - DNA, 120 bp, Artificial Sequence
  ENSG00000213215_3 (sequence is synthesized)
ccttgggtgggattgagtttgttctcctggcggtgatggcctatgaccgctatgtggctgtgtgtgatgccctgcgatactcggccatcatgcatggagggctgtgtgctaggttggcca

SEQ ID NO: 754628 - DNA, 120 bp, Artificial Sequence
  ENSG00000213215_4 (sequence is synthesized)
gggtcagtggcttcatcagctctcctgtgcagactgctatcacctttcagctgcccatgtgcagaaacaagtttattgatcacatatcctgtgaactcctagctgtggtcaggctggctt

SEQ ID NO: 754629 - DNA, 120 bp, Artificial Sequence
  ENSG00000213215_5 (sequence is synthesized)
gtgtggacacctcctccaatgaggtcaccatcatggtgtctagcattgttcttctgatgacacccttctgcctggttcttttgtcctacatccagatcatctccaccatcctaaagatcc

SEQ ID NO: 754630 - DNA, 120 bp, Artificial Sequence
  ENSG00000213215_6 (sequence is synthesized)
agtccagagaaggaagaaagaaagctttccacacgtgtgcctctcacctcacagtggttgccctgtgctatggtgtggccattttcacttacatccagccccactccagtccctctgtcc

SEQ ID NO: 754631 - DNA, 120 bp, Artificial Sequence
  ENSG00000213215_7 (sequence is synthesized)
ttcaggagaagttgttctctgtcttttatgccattttaacaccaatgctgaaccccatgatttacagcctaaggaataaagaggtgaagggggcctggcagaaactattatggaaattct

SEQ ID NO: 754632 - DNA, 120 bp, Artificial Sequence
  ENSG00000213215_8 (sequence is synthesized)
ctgggttaacatcaaagctggcaacttgactcatgagtatgacttagagaaaacagctttgcctcagtgttctccacccagctgagatctgacaggtgtaaactacattgccctggcaac

SEQ ID NO: 754633 - DNA, 120 bp, Artificial Sequence
  ENSG00000213215_9 (sequence is synthesized)
aataaagaaaatagattccatggaatcaatgaattgatttgctttactaaagagagatcttgactgattgaaatttaactgttaaattagagtttttttgttatgtaaaatgaactgtgt

SEQ ID NO: 754634 - DNA, 120 bp, Artificial Sequence
  ENSG00000213215_10 (sequence is synthesized)
gaggaatctaaacacttatttttttgttctttctttgtcgttgatagaagaatatttcagtcctgatatttgctgtaactaataattactggataaacagagaagacacatggaggatat

SEQ ID NO: 754635 - DNA, 120 bp, Artificial Sequence
  ENSG00000213215_11 (sequence is synthesized)
tttacctgggtccaacaaaaccatagcaacagcagcaagttgaaaagagcaaaaaaaaaaaaaagagagagaccgaagtacaattacaatcccatcccacaaaaaggtcaagggctacct

SEQ ID NO: 754636 - DNA, 120 bp, Artificial Sequence
  ENSG00000213215_12 (sequence is synthesized)
cgtggggttatatttatgaacagtggagttagatactgctgttataaaacctcccacacttcttccacctccactcttacagcctgacaatcgttgaaaaaaaattactacttactgttt

SEQ ID NO: 754637 - DNA, 120 bp, Artificial Sequence
  ENSG00000213215_13 (sequence is synthesized)
tgatttgtcatatcgtttgtaatgatagacctactcatggatcttaccttggaccactggtacttacacatccacattttataaaaggttatggggcttccattgaaaacaaaatgcatt

SEQ ID NO: 754638 - DNA, 120 bp, Artificial Sequence
  ENSG00000213215_14 (sequence is synthesized)
tttacatttgaagactcactttaaataatttgtagtgtatgtcatcacatgcagtaattgtgtgagtcaacattctgagaaaagtgttattgtcaaggctgactaaaatgtttttgtgca

SEQ ID NO: 754639 - DNA, 120 bp, Artificial Sequence
  ENSG00000213215_15 (sequence is synthesized)
ggacctacaaaaggtgaacataatgtcttctcctgagtgctggagctaattcagtgaaaaaatatcaactcaaggtcttgtttcacctcgatagggtgacagtcaatggttgtttgtact

SEQ ID NO: 754640 - DNA, 120 bp, Artificial Sequence
  ENSG00000213215_16 (sequence is synthesized)
gaagacaattattgaccaagaaaagttaagcttcaggtgcttcttgacagtattcaaacagtttgagaaggattttactgcatatataggtatatcgttgaaaatattaaaaatgatcaa

SEQ ID NO: 754641 - DNA, 120 bp, Artificial Sequence
  ENSG00000213215_17 (sequence is synthesized)
tctctgaaaaatctgtaagctctttctcagaatcttcagaaacacacaaaaaagcacacaaattatgagatactgtgaaaaatgtcaaagacatagttaatttaaggaaaaactcttcag

SEQ ID NO: 754642 - DNA, 120 bp, Artificial Sequence
  ENSG00000213215_18 (sequence is synthesized)
ccaaagtcaatgaagggtaagataatttaatatgaagtttggaacgtcaaggaaggtcagtcaactatgcaaatgttaccctcaagtcttcacattgagaacttctcttgccacctccgt

SEQ ID NO: 754643 - DNA, 120 bp, Artificial Sequence
  ENSG00000213215_19 (sequence is synthesized)
cataggtgaatttttgtaaatcttgtaacctgggcttgtctgagaatggacttccctttgaaaaggagcataactgatgtaaaaggagaagacataattgaaaaagtggaaagaaaagaa

SEQ ID NO: 754644 - DNA, 120 bp, Artificial Sequence
  ENSG00000213215_20 (sequence is synthesized)
agaatatgatcatagctgctcttcctactcccttgaaggagtcagtcttttcttccttttgtgtcttctttaagtcagttgatttgcagttcttacatttgtcaacacatcatcatagaa

SEQ ID NO: 754645 - DNA, 120 bp, Artificial Sequence
  ENSG00000213215_21 (sequence is synthesized)
tctaagagtttttacagtgttgaaggcatataactcaaagcccatttgacatctgaattttatattaatagtaatgcaatcttaaattttgcaagataggcaggcatcctaaaagatgac

SEQ ID NO: 754646 - DNA, 120 bp, Artificial Sequence
  ENSG00000213215_22 (sequence is synthesized)
aatgctggcaaattaaatttttattttaagtattatcagtggagtatctattctgtgtcagtgtcaataaatggttgttgcacacaatagtcaatatgataccatcataacaaggataat

SEQ ID NO: 754647 - DNA, 120 bp, Artificial Sequence
  ENSG00000213215_23 (sequence is synthesized)
ctcacatagtagggaggacagatgatgaaacaatgataatgcattgtggtaagtgttacagtgaaggggagcccactggaaatgattgcagaaggcttcctataaaaggacccttggatt

SEQ ID NO: 754648 - DNA, 120 bp, Artificial Sequence
  ENSG00000213215_24 (sequence is synthesized)
gagaccagaaatgtaagaacaagttatccagaagacaagaaacccaaaaaagaaacaacctgtacaaagttgtagagatgtgagcaagcatgaaagtccaaaaaatgttggaagttcaat

SEQ ID NO: 754649 - DNA, 120 bp, Artificial Sequence
  ENSG00000213215_25 (sequence is synthesized)
ttcagggcagagaagagtgagagagtagtgaggacgaagcagacgggttagacacggtcagatcctggaaggcgtcgaatgtctaagtatcttttaactttattctaatagaaaacaata

SEQ ID NO: 754650 - DNA, 120 bp, Artificial Sequence
  ENSG00000213215_26 (sequence is synthesized)
gtccgtcaaaaatttttagaaggagtatagattgaaaacaattacattttaaaagtatcactctggcaaatgagatagtggaagaaaagattagaggcaagatgaccagcctgtctgctg

SEQ ID NO: 754651 - DNA, 120 bp, Artificial Sequence
  ENSG00000213215_27 (sequence is synthesized)
ggtctgcttcagtaatactcttgagacattcgagacatctgaattaagttagatgcaattggaaggagacaagtaaagtggtgtcatttaaaagtgatgtcagctaaaacacttcatctc

SEQ ID NO: 754652 - DNA, 120 bp, Artificial Sequence
  ENSG00000213215_28 (sequence is synthesized)
ccagattggaaatgccatctgaatatcattcctcttctaaaatgtgaggatgctgtctgaacattctgtaaattgtgtagtaaactggaaaattcaccatcgtgaacatgctctatatga

SEQ ID NO: 754653 - DNA, 120 bp, Artificial Sequence
  ENSG00000213215_29 (sequence is synthesized)
aatggtatgggaaagagataagaagaaagtaatcaaaaatacaaacatacacataatacatcaaggaggaaaatacgtgaagatgctatatcttcatttctgccagcggtcgtgtggtca

SEQ ID NO: 754654 - DNA, 120 bp, Artificial Sequence
  ENSG00000213215_30 (sequence is synthesized)
cggtgttcgtgacatttctccatcaaccatcacacaatcctttgccttcaaacaactcctaagcatgttggggttcttcctggaagggttatccaagtcttgatatctcaggaagcagaa

SEQ ID NO: 754655 - DNA, 120 bp, Artificial Sequence
  ENSG00000213215_31 (sequence is synthesized)
atgctgagagtgggcattaggtatgtagaaatagactactatagtctcatattctgtattagtcaggtttctttagagagacaagactaataggatagatgaatatatgaaaaggagttt

SEQ ID NO: 754656 - DNA, 89 bp, Artificial Sequence
  ENSG00000213215_32 (sequence is synthesized)
aaaggtaaagtaccacaataggccttctgtaagctgaggagcacagaagccagttggagttccaaaacctcaaaagtagggaagccaac

SEQ ID NO: 754657 - DNA, 120 bp, Artificial Sequence
  ENSG00000213215_33 (sequence is synthesized)
tgtggccaaaggcccgagagcccctggtcaaccactggtgtaggtccaagagtccgaaagctgaagaaattggagtggagtctgatgtttaaggtcaggaagcatccagcacaggagaaa

SEQ ID NO: 754658 - DNA, 77 bp, Artificial Sequence
  ENSG00000213215_34 (sequence is synthesized)
attggagtggagtctgatgtttaaggtcaggaagcatccagcacaggagaaagatagaggccagaagactcaggcat

SEQ ID NO: 754659 - DNA, 120 bp, Artificial Sequence
  ENSG00000213215_35 (sequence is synthesized)
gggcctgcctctcctagtccactgactcagatgttaatctcctttggcatcacctccatagacacacccaggaacaatactttgtaaccttcaatccaatcaagttgatggtcaatatta

SEQ ID NO: 754660 - DNA, 120 bp, Artificial Sequence
  ENSG00000213215_36 (sequence is synthesized)
accatcatatattccatctattaaatttcaatttttatcttttttatttgatagagtttttaatttcaaggctgcactttctcggtaactttaatcttcataaattaaattagttggatc

SEQ ID NO: 754661 - DNA, 120 bp, Artificial Sequence
  ENSG00000213215_37 (sequence is synthesized)
accttaagactacacacacttctaattcatagctgcttgtgaaggacattcccaatagaaggcatgaacattgtcttgatacaggaatacaaaataagatgctattctaaactttattgt

SEQ ID NO: 754662 - DNA, 120 bp, Artificial Sequence
  ENSG00000213215_38 (sequence is synthesized)
ttatttagccattaaatagaaaaaatttaaaaagacactgaaaagtatttgaaaataaaatatttttcattagttaataaccataaaaacaccactgaaggttttccttaaaaatctaat

SEQ ID NO: 754663 - DNA, 120 bp, Artificial Sequence
  ENSG00000213215_39 (sequence is synthesized)
agaaataaaagccaaagtgataacttaaaaatgaagctgccacccacaggggatgaggacttggatggagcccagcatcaacaaggcggatcacttgagcctgggagtttgaggctgcag

SEQ ID NO: 754664 - DNA, 82 bp, Artificial Sequence
  ENSG00000213215_40 (sequence is synthesized)
cactgcacttcagcctgggacaaaagagtccaataaccttcatggacacacaaccattcttaataaaatgttagccaatcaa

SEQ ID NO: 754665 - DNA, 120 bp, Artificial Sequence
  ENSG00000213218_0 (sequence is synthesized)
ccatgcataaatgtacacagaaacaggtggggtcaagcagggagagagaactggccagggtataaaaagggcccacaagagaccggctctaggatcccaaggcccaactccccgaaccac

SEQ ID NO: 754666 - DNA, 120 bp, Artificial Sequence
  ENSG00000213218_1 (sequence is synthesized)
tcagggtcctgtggacagctcacctagcggcaatggctgcaggctcccggacgtccctgctcctggcttttgccctgctctgcctgccctggcttcaagaggctggtgccgtccaaaccg

SEQ ID NO: 754667 - DNA, 120 bp, Artificial Sequence
  ENSG00000213218_2 (sequence is synthesized)
ttccgttatccaggctttttgaccacgctatgctccaagcccatcgcgcgcaccagctggccattgacacctaccaggagtttgaagaaacctatatcccaaaggaccagaagtattcat

SEQ ID NO: 754668 - DNA, 120 bp, Artificial Sequence
  ENSG00000213218_3 (sequence is synthesized)
tccaatctagagctgctccgcatctccctgctgctcatcgagtcgtggctggagcccgtgcggttcctcaggagtatgttcgccaacaacctggtgtatgacacctcggacagcgatgac

SEQ ID NO: 754669 - DNA, 120 bp, Artificial Sequence
  ENSG00000213218_4 (sequence is synthesized)
tatcacctcctaaaggacctagaggaaggcatccaaacgctgatggggaggctggaagacggcagccgccggactgggcagatcctcaagcagacctacagcaagtttgacacaaactca

SEQ ID NO: 754670 - DNA, 120 bp, Artificial Sequence
  ENSG00000213218_5 (sequence is synthesized)
cacaaccatgacgcactgctcaagaactacgggctgctctactgcttcaggaaggacatggacaaggtcgagacattcctgcgcatggtgcagtgccgctctgtagagggtagctgtggc

SEQ ID NO: 754671 - DNA, 120 bp, Artificial Sequence
  ENSG00000213218_6 (sequence is synthesized)
ttctaggtgcccgcgtggcatcctgtgaccgacccctccccagtgcctctcctggccctggaaggtgccactccagtgcccatcagccttgtcctaataaaattaagttgtatcatttca

SEQ ID NO: 754672 - DNA, 120 bp, Artificial Sequence
  ENSG00000213218_7 (sequence is synthesized)
aggacctagaggaaggcatccaaacgctgatgggggtgagggtggcgccaggggtcgccaatcctggaaccccactggcttagagggctgggggagagaaacactgctgccctctttgta

SEQ ID NO: 754673 - DNA, 120 bp, Artificial Sequence
  ENSG00000213218_8 (sequence is synthesized)
gcagtcaggcgctgacccaagagaactcaccttattcttcatttcgcctggtgaatcctccaggcccttctctacaccctgaaggggagggaggaaaatggatgaatgagagagggaggg

SEQ ID NO: 754674 - DNA, 120 bp, Artificial Sequence
  ENSG00000213218_9 (sequence is synthesized)
accggctctaggatcccaaggcccaactccccgaaccactcagggtcctgtggacagctcacctagcggcaatggctgcaggtaagcgcccctaaaatccctttgggcacaacgtgtcct

SEQ ID NO: 754675 - DNA, 120 bp, Artificial Sequence
  ENSG00000213218_10 (sequence is synthesized)
gaggggagaggcagcgccctgtagatgggacgggggcactaaccctcaggtttggggcttatgaatgtgagtatcgccatctaaggccagatatttggccaatctctgaatgttcctggt

SEQ ID NO: 754676 - DNA, 120 bp, Artificial Sequence
  ENSG00000213218_11 (sequence is synthesized)
ctctggagggatggagagagagaaaaaaacaaacagctcctggagcagggagagcgctggcctcttcctctccggctccctccattgccctccggtttctccccaggctcccggacgtcc

SEQ ID NO: 754677 - DNA, 120 bp, Artificial Sequence
  ENSG00000213218_12 (sequence is synthesized)
ctggccattgacacctaccaggagtttgtaagttcttggggaatgggtgcgggtcaggggtggcaagaaggggtgactttcccccactggggaagtaatgggaggagactaaggagctca

SEQ ID NO: 754678 - DNA, 120 bp, Artificial Sequence
  ENSG00000213218_13 (sequence is synthesized)
gggttgttttctgaagcgaaaatgcaggcagatgagcataggctgagccaggttcccagaaaagcaacaatgggagctggtctccagcatagaaaccagcagtccttcttggtggggggt

SEQ ID NO: 754679 - DNA, 120 bp, Artificial Sequence
  ENSG00000213218_14 (sequence is synthesized)
ctccaacatggaggaaacgcaacagaaatccgtgagtggatgccgtctcccctaggcggggatgggggagacctgtggtcagggctcccgggcagcacagccactgccggtccttcccct

SEQ ID NO: 754680 - DNA, 120 bp, Artificial Sequence
  ENSG00000213218_15 (sequence is synthesized)
aggatcccaaggcccaactccccgaaccactcagggtcctgtggacagctcacctagcggcaatggctgcaggaagaaacctatatcccaaaggaccagaagtattcattcctgcatgac

SEQ ID NO: 754681 - DNA, 80 bp, Artificial Sequence
  ENSG00000213221_0 (sequence is synthesized)
ggggcagggcggacggagccggcgagcgggatgctgcggactgcgctgcgcggcgcgccgaggttgctgagtcgcgtgca

SEQ ID NO: 754682 - DNA, 120 bp, Artificial Sequence
  ENSG00000213221_1 (sequence is synthesized)
cggcgggcctgggcctggggctggcggcgctcaagctccgagcaggggccggggcccgcggcggctctggggcgcgtggaggcggcgcactaccagctcgtctacacctgcaaggtctgc

SEQ ID NO: 754683 - DNA, 120 bp, Artificial Sequence
  ENSG00000213221_2 (sequence is synthesized)
ctcgtctacacctgcaaggtctgcgggactaggtcctccaagcgcatctccaagctggcctatcaccaaggcgtggtcattgtgacctgccccggctgccagaaccaccatatcatcgct

SEQ ID NO: 754684 - DNA, 120 bp, Artificial Sequence
  ENSG00000213221_3 (sequence is synthesized)
gacaacctgggctggttctcggacctgaatgggaagagaaatatcgaagagatcctgacggccagaggcgagcaggtgcaccgtgtggcgggcgagggggccctggaactggttctggag

SEQ ID NO: 754685 - DNA, 120 bp, Artificial Sequence
  ENSG00000213221_4 (sequence is synthesized)
gctgcaggggcccccacatccactgcagctccggaagcgggtgaggatgagggtccccccagccctggcaagacggagccgagctgactcctgcgctccccggcactgtgggacttcggc

SEQ ID NO: 754686 - DNA, 120 bp, Artificial Sequence
  ENSG00000213221_5 (sequence is synthesized)
cttccagaaggaggttttggccctgggcctctctggacgtggcctgttttctatcaataaacagacattacttccagatgctggggcctgtggccctcgtggcctttctttttctggagt

SEQ ID NO: 754687 - DNA, 120 bp, Artificial Sequence
  ENSG00000213221_6 (sequence is synthesized)
tagaacgattgctctgaatccctggtgctgctgggtgggacataggagccgcaggacctctcgcctcaccacagttccttctacacagagtcacccagctcttgcccacagaggccacag

SEQ ID NO: 754688 - DNA, 120 bp, Artificial Sequence
  ENSG00000213221_7 (sequence is synthesized)
tcgcgtggaaagggggctggatgtggcgtcagagcccttcctggctgtcgctgcgtgactttgagcaggtcaccacccctgtgagcctcagccttcctctgcaaggcccttgccgccccc

SEQ ID NO: 754689 - DNA, 120 bp, Artificial Sequence
  ENSG00000213221_8 (sequence is synthesized)
ctggccagctctggcggcctcccttccgtgagccagtgcagacctgagccctggtcctcggccgccggccgtcggcgaaacagtgagcaaaccaggctgcctgctggcccaggcaggacg

SEQ ID NO: 754690 - DNA, 120 bp, Artificial Sequence
  ENSG00000213221_9 (sequence is synthesized)
agcagctatggcgtggccgtgtgttaggagctccagacccctcccgggggagccacctgggcctccttccctcggtggacagcgctctggacgtccccagggccctccgaggtgtgtggg

SEQ ID NO: 754691 - DNA, 120 bp, Artificial Sequence
  ENSG00000213221_10 (sequence is synthesized)
gtttgtctcccagccttgtctgtgcgcaggatgttcccgtgtttatgaaagcgagcaaacacagcagcctgtttatttgcagaagcgttctgggcagcgtaaccttcagcattcatcacc

SEQ ID NO: 754692 - DNA, 120 bp, Artificial Sequence
  ENSG00000213221_11 (sequence is synthesized)
cgccacactccggcagggaagagaatggggcgaggtgggaggtggaggcaggactgagcacgacagggacccagtgcggcccctcccagcgggacacggccaggactgccagctcacatc

SEQ ID NO: 754693 - DNA, 120 bp, Artificial Sequence
  ENSG00000213221_12 (sequence is synthesized)
accctctattattcccacccagagccttctgtgccatttgtggaaactgtcctcttctcggctgagccaccggcacccaggcctgctcctccatggaggcactggctgggggtctcttgg

SEQ ID NO: 754694 - DNA, 120 bp, Artificial Sequence
  ENSG00000213221_13 (sequence is synthesized)
gggcttggaagtgcagtggggctgggcttggcttggctgcctcactgcctccagagggcctggaccagcatgtggggaggtccagggagccgtctggacctggaagtgcagaattagagc

SEQ ID NO: 754695 - DNA, 120 bp, Artificial Sequence
  ENSG00000213221_14 (sequence is synthesized)
aaggagagccgcttgggccaacccctcctcttacggatggggagatggcggctggtagttgggatgtggacgttaccatgtcttttctgtctgatgccagcacctctgggcccaggctgg

SEQ ID NO: 754696 - DNA, 120 bp, Artificial Sequence
  ENSG00000213221_15 (sequence is synthesized)
ccctggagggaaatccttcccaaggctggcacgttcctagagaagacctatggctaccccccgcgtgccagaagcatcccgccagctcctgcctgaggccccctggaccctgtctccctc

SEQ ID NO: 754697 - DNA, 120 bp, Artificial Sequence
  ENSG00000213221_16 (sequence is synthesized)
cgcccttccctccccgcagccccaatcccacagccaggtttctgcaaggggctttgccatcctaatctcctgccactctacacccccccgccccaggacatccctgcctcccgggcacgg

SEQ ID NO: 754698 - DNA, 120 bp, Artificial Sequence
  ENSG00000213221_17 (sequence is synthesized)
ttgctggcctgggcatccctcgtcacagcgtctctccaagcaggttcctcggccgcaccttcagaggctgtcccagccagtagcgtgggcggcactgctgcgcttccctggctgtgcgcg

SEQ ID NO: 754699 - DNA, 120 bp, Artificial Sequence
  ENSG00000213221_18 (sequence is synthesized)
gtcctgggccctgcacggttacttggaccctgtgtgcgtgtaccaccacacgcaagctggctgggaccctggacctggagtacacgttgattctggttcccaaggccccttctggggtgg

SEQ ID NO: 754700 - DNA, 120 bp, Artificial Sequence
  ENSG00000213221_19 (sequence is synthesized)
aggaggcaacggagtcaaccagcacagaggctgtggctgccaacatggccaggtgggctgtggcgaggggcagcaggactgcccggcgcacctgtgtgtcccctgacgggggccccgtgg

SEQ ID NO: 754701 - DNA, 120 bp, Artificial Sequence
  ENSG00000213221_20 (sequence is synthesized)
gggtgccacccaccacaagcagcgcccagacaagccccaagactgcagatctgccgtcggctcctccactgtggctcagtgtccagaccctgagcccagccggatcagactccaggaaag

SEQ ID NO: 754702 - DNA, 120 bp, Artificial Sequence
  ENSG00000213221_21 (sequence is synthesized)
gacctccctcccccgggtgctgggtgggcggcagcaggctgggtcctcagggggtcgtggggctgacctgggggctgctgcttctgggggctggtcccggccacgtgagtgtcagctcag

SEQ ID NO: 754703 - DNA, 120 bp, Artificial Sequence
  ENSG00000213221_22 (sequence is synthesized)
agcatgctctgtttccctaggggctgggagcgtgaggaggtaggggtgcaggaatcagtggtgacagcaggcagccacttcacccctctgtgccccagctcccccgtggttaaatgcagt

SEQ ID NO: 754704 - DNA, 120 bp, Artificial Sequence
  ENSG00000213221_23 (sequence is synthesized)
gggaactccatctctctgaggtctcagagggcccagacagtgggtatctgtggacactttgcacagtgcagcctcttaccgggttaggcccccacccgggactaagcccatacggaccac

SEQ ID NO: 754705 - DNA, 120 bp, Artificial Sequence
  ENSG00000213221_24 (sequence is synthesized)
actcacttggccgactttatttttcaggaaaaacagaaaaacaaatgtacctcttgggttggaaaggacccattgacaacatggcacagacgtgagcaataaatacgcacatacattcaa

SEQ ID NO: 754706 - DNA, 120 bp, Artificial Sequence
  ENSG00000213231_0 (sequence is synthesized)
acacgtgtgagcctagaggcgggtcccggttgcagacttgccatggcctccgaagcttctgtgcgtctaggggtgccccctggccgtctgtggatccagaggcctggcatctacgaagat

SEQ ID NO: 754707 - DNA, 120 bp, Artificial Sequence
  ENSG00000213231_1 (sequence is synthesized)
gaggaggggagaacctgggtgactgtggtcgtgcggttcaatccctcgcgtagggaatgggccagggcctcccagggcagcagatatgaacccagcatcacagtgcacttgtggcagatg

SEQ ID NO: 754708 - DNA, 120 bp, Artificial Sequence
  ENSG00000213231_2 (sequence is synthesized)
gcagtgcatacccgggagctactctcctccggccagatgcccttctcccagctgcccgccgtgtggcagctctaccccgggaggaagtaccgagcagcggattccagtttctgggaaata

SEQ ID NO: 754709 - DNA, 120 bp, Artificial Sequence
  ENSG00000213231_3 (sequence is synthesized)
gcagaccatggccagattgactctatggagcagctggtcctaacatatcagccggagaggaaagactgacactgggagtggctggccctgctggccctgcctcttctggcctggtgtctc

SEQ ID NO: 754710 - DNA, 120 bp, Artificial Sequence
  ENSG00000213231_4 (sequence is synthesized)
ctccttgcaggcagaaggcagtagggcccctgcacactcagtttctctcgttttccttagttatcagtcctgtcctgtcccactcaggtctgtacttagggcagctggcctggatgggct

SEQ ID NO: 754711 - DNA, 120 bp, Artificial Sequence
  ENSG00000213231_5 (sequence is synthesized)
tcactggggccctgtctgtgtgctgagccagtttcccctgctggctgcaagctgtgggttctttctcctctgtgcccctcatgctgatcttctagatgccactcccaaatccccttcata

SEQ ID NO: 754712 - DNA, 120 bp, Artificial Sequence
  ENSG00000213231_6 (sequence is synthesized)
cccaccaggatgtgtgcccagccaggcctccagcacccccagtgcagctcgtgattggaaactcaccatcggcaggcagtggttcggtttaagagatggcattagagggagcccagtctg

SEQ ID NO: 754713 - DNA, 120 bp, Artificial Sequence
  ENSG00000213231_7 (sequence is synthesized)
gatgtggacttggatgccctgtgggtatcagttctgctgacactttggcccgaaatagatccagtgctgagcaagcaatgtacaccagagcctcagtgagcccatctgcacagtggggag

SEQ ID NO: 754714 - DNA, 120 bp, Artificial Sequence
  ENSG00000213231_8 (sequence is synthesized)
catggagggatgggtttggcctgtgcttctgcttattcagtccttcagctcacggaagggatgctagtccgtgaaggtgacctcacagtactggttaattaaactttattgctcactgtc

SEQ ID NO: 754715 - DNA, 120 bp, Artificial Sequence
  ENSG00000213231_9 (sequence is synthesized)
tcaaacaaaacaaagcaaaacaaaaaaaacagttaagattttttttttttttaaatgattcagtggaaatagaatggattcttcaaataacttagccacgggtgggataagggacctact

SEQ ID NO: 754716 - DNA, 120 bp, Artificial Sequence
  ENSG00000213231_10 (sequence is synthesized)
gaagacctctcctcttttcagaaagacggcgtggcctcctcctccctgctgtttgctgagatttttcttacatagccacctgtcacctctgttccccagccccttggatgtgatggtaca

SEQ ID NO: 754717 - DNA, 120 bp, Artificial Sequence
  ENSG00000213231_11 (sequence is synthesized)
cagtgggtgggcccccataataagttcctaaagcatgggatctcatcgaataagactcatcatttaatccttgtgagaattttgtgaggtgtacgtgttaatgtcccatttcacgacgaa

SEQ ID NO: 754718 - DNA, 120 bp, Artificial Sequence
  ENSG00000213231_12 (sequence is synthesized)
aagacaagactctggggatgggaatgacttcctcgagaccatacagccaggaaatagcggtgaatctagtgatctcgggtccctagatttaaccatggcactgaggtgccgtgtgacggt

SEQ ID NO: 754719 - DNA, 120 bp, Artificial Sequence
  ENSG00000213231_13 (sequence is synthesized)
atgggcagcagcttggagcaggccaggcagggcctgggccattggaggggctggcactggacttgcctttgaccccagcagcttggatggggtgccgggctcccccatagttcactgact

SEQ ID NO: 754720 - DNA, 120 bp, Artificial Sequence
  ENSG00000213246_0 (sequence is synthesized)
atttacttcctgcgggtgcacaggctgtggtcgtctatctccctgttgttcttcccatcggcgaagatggccctggagacggtgccgaaggacctgcggcatctgcgggcctgtttgctg

SEQ ID NO: 754721 - DNA, 120 bp, Artificial Sequence
  ENSG00000213246_1 (sequence is synthesized)
tgttcgctggtcaagactatagaccagtttgaatatgatggttgtgacaattgtgatgcatatctacaaatgaagggtaaccgagagatggtatatgactgcactagctcttcctttgat

SEQ ID NO: 754722 - DNA, 120 bp, Artificial Sequence
  ENSG00000213246_2 (sequence is synthesized)
ggaatcattgcgatgatgagtccagaggacagctgggtctccaagtggcagcgagtcagtaactttaagccaggtgtatatgcggtgtcagtcactggtcgcctgccccaaggaatcgtg

SEQ ID NO: 754723 - DNA, 120 bp, Artificial Sequence
  ENSG00000213246_3 (sequence is synthesized)
cgggagctgaaaagtcgaggagtggcctacaaatccagagacacagctataaagacctagcaagatgcaaggctgccagcatctttgctctccacctcctgcctctgcttatttcttgtt

SEQ ID NO: 754724 - DNA, 120 bp, Artificial Sequence
  ENSG00000213246_4 (sequence is synthesized)
ctggaactaaatgaacagaacttcaaatacttcctaccctccaattcagactcagctgactgttgagagagcagcacatcattttatcattttatcttctttggactacaggtggggtgg

SEQ ID NO: 754725 - DNA, 120 bp, Artificial Sequence
  ENSG00000213246_5 (sequence is synthesized)
gagggatttgggttggtggattaacagatggaattgaggagagagtaggatgctgattttcctacccgtggcccaggtctgtgccttccccatgccaaggactctaggtcaaatgtcaat

SEQ ID NO: 754726 - DNA, 120 bp, Artificial Sequence
  ENSG00000213246_6 (sequence is synthesized)
tccctcttccattctcttaggcacagtaatagcttatttgccctataagaaccttcccagagcagcagaggcccttctactccctcttgactgtctcagcctctgggattgcagcctttg

SEQ ID NO: 754727 - DNA, 120 bp, Artificial Sequence
  ENSG00000213246_7 (sequence is synthesized)
tagtgtgcttccttgcttcctatcggagggtgctgatccagaggctcagtaaccccatcaacttggtggccctggtgtctcacacttgtatccttctgccctcgagacctggcacagcag

SEQ ID NO: 754728 - DNA, 120 bp, Artificial Sequence
  ENSG00000213246_8 (sequence is synthesized)
tatcccttgaagaaatcctgaggctttgtagagtgctccttgaccatgtttaataattcttccctcccctgcttgtctattttcttctcttcacggctcttcctataccttaggccagtc

SEQ ID NO: 754729 - DNA, 120 bp, Artificial Sequence
  ENSG00000213246_9 (sequence is synthesized)
tcaagcactcactggagacccttgggccttgggcgaccattgagtcctagtctcccttgtttgtgcccctgtaggaggtaggtccttttctcctccggcctagtaggggaccttgggtaa

SEQ ID NO: 754730 - DNA, 120 bp, Artificial Sequence
  ENSG00000213246_10 (sequence is synthesized)
catcccatttttcggccaaggtgagttgttttaggataaaaaaatttaccacaaattctcatttaaatttccacagaaatcctgttcgtatccccattttgatttccctaagttccttgt

SEQ ID NO: 754731 - DNA, 120 bp, Artificial Sequence
  ENSG00000213246_11 (sequence is synthesized)
tctccctctaaaaagagaatgattgcaccctgcctgtttacctcaggattgttgtgattgtagaaacgaagctatgtgaaaattatataagtattataaaggtgaaatacttttgctctc

SEQ ID NO: 754732 - DNA, 120 bp, Artificial Sequence
  ENSG00000213246_12 (sequence is synthesized)
acaaatgactgcgttctgcctgcactcgggctattgcgaggacagagagctggtgctccattggcgtgaagtctccagggccagaaggggcctttgtcgcttcctcacaaggcacaagtt

SEQ ID NO: 754733 - DNA, 120 bp, Artificial Sequence
  ENSG00000213246_13 (sequence is synthesized)
cgctgactaccccacacagcctccgccgcgccctcggcgggctcaggtggctgcgacgcgctccggcccaggtggcggccggccgcccagcctccccgcctgctggcgggagaaaccatc

SEQ ID NO: 754734 - DNA, 120 bp, Artificial Sequence
  ENSG00000213246_14 (sequence is synthesized)
gatggccctggagacggtgccgaaggacctgcggcatctgcgggcctgtttgctgtgttcgctggtcaaggtgtcagtcggggacctggttgtagggcccatgggggaccaagactatag

SEQ ID NO: 754735 - DNA, 120 bp, Artificial Sequence
  ENSG00000213246_15 (sequence is synthesized)
agctttgagagtagtaggtggggaaccttaggatacacagtcaacatagggaaacaagaaattgagcaggtcgaagtattgagaaagctactttttctcttggtcttgttcatgcttatc

SEQ ID NO: 754736 - DNA, 120 bp, Artificial Sequence
  ENSG00000213265_0 (sequence is synthesized)
cacaaattccctctgtctcctccagaatccagaaaagaataattacgatattttcaaaatggaaagttcccatgccaaagactttgccttcttcaccaaactatgatttcgtgatgttct

SEQ ID NO: 754737 - DNA, 120 bp, Artificial Sequence
  ENSG00000213265_1 (sequence is synthesized)
taaaggtagtgtacaccaggtttttacattcttattttgaatgtagttttagtgtttgtgtgatttgtttttcagcctggcctgcagactagcaacccaagacttatactgcccaatttg

SEQ ID NO: 754738 - DNA, 120 bp, Artificial Sequence
  ENSG00000213265_2 (sequence is synthesized)
acagctcatttttattttagtttcaccatatacatgaattggacttacaattccagaaaaattaaaggctcaagaatggggcatgagtacacactgtgtgctaaggaaagaatatttgga

SEQ ID NO: 754739 - DNA, 120 bp, Artificial Sequence
  ENSG00000213265_3 (sequence is synthesized)
ttgaattgaacccctgcagaacgtggactatttagagacctgaatttggccttgggtgaatacctgccttgggttggccaactagcagtcaacagcaatgagccaaaagagacaaaccaa

SEQ ID NO: 754740 - DNA, 120 bp, Artificial Sequence
  ENSG00000213265_4 (sequence is synthesized)
gtttcaaaatggcaaatcaaagacttcagaaaatagctcagctaaacgtgagaaaggaatggttgtcaatagcaaagagatttctgatgcagtcgggcaatcaaaatttgttctagagaa

SEQ ID NO: 754741 - DNA, 120 bp, Artificial Sequence
  ENSG00000213265_5 (sequence is synthesized)
aaggccactgccctgcagaaattcctggctcaaaacaggaaaaacaccagcttcatgttaaaagtaacacagtatgaccaggataagacgttactgattatgaccaacaacccacctccc

SEQ ID NO: 754742 - DNA, 120 bp, Artificial Sequence
  ENSG00000213265_6 (sequence is synthesized)
tgctcaatcacccagcaagacaaggagagtgcatcaaaatatttttccaaggagttactgctcaaggtcatggaaagtcatcatcagcacaaacccactgagaacctctggctgccccgc

SEQ ID NO: 754743 - DNA, 120 bp, Artificial Sequence
  ENSG00000213265_7 (sequence is synthesized)
atgcctcagaaaaaaaagttaagatctaagctgaaaccaatcttccctttgatactgtcggatgatcccacatccaagcgagaacaatggtttaggttttccactgacaatgatttcaag

SEQ ID NO: 754744 - DNA, 120 bp, Artificial Sequence
  ENSG00000213265_8 (sequence is synthesized)
agcgaagggaagtattcaaaagtctacgctttgaggacacagaagaaaatgtaccctcagctcacctttgctccagtccatgagagagatatgaggaaagatgcttccaagaagtcagcg

SEQ ID NO: 754745 - DNA, 120 bp, Artificial Sequence
  ENSG00000213265_9 (sequence is synthesized)
agtgaaaggccaatttccaaagtgattcgggaaccactgacactcgcatcgctcttggaagacatgcccaccagaaccgcgcccggggagagcgccttccgcaacgggagggccccgcag

SEQ ID NO: 754746 - DNA, 120 bp, Artificial Sequence
  ENSG00000213265_10 (sequence is synthesized)
tggattatcaaaaaggccacggtcatcgggtgaacacagacccctcagtcctcccgcctcgctctcttgagactgaggggtccgcagaagtcgccacccaaataaaaccacattcctgct

SEQ ID NO: 754747 - DNA, 120 bp, Artificial Sequence
  ENSG00000213265_11 (sequence is synthesized)
gaatgcataagatacaaagcactgggaggggggcacaaatatgtttaaaatttacatttccacttttaagggactcacagcttaagaggcagacaagacccgcacataagaaaagtgaaa

SEQ ID NO: 754748 - DNA, 120 bp, Artificial Sequence
  ENSG00000213265_12 (sequence is synthesized)
acagaactacaagacactatacaatgacatgcacaaaacccagtgactatagtctagagtttgggattgcattaatctagaaaatcttctctttaaaggaatgacctgagtagtaacata

SEQ ID NO: 754749 - DNA, 120 bp, Artificial Sequence
  ENSG00000213265_13 (sequence is synthesized)
tgagactgtgccactgcactccagccttgtgacagtgtgaggctccgtcagaagaaagagaaggagaaggagaaggagaagattcaaatggctgaagagattggggacagcattttaaaa

SEQ ID NO: 754750 - DNA, 120 bp, Artificial Sequence
  ENSG00000213265_14 (sequence is synthesized)
aaaatccagaaaagaataattacgatattttcaaaatggaaagttcccatgccaaagactttgccttcttcaccaaactatgatttcgtgatgttcttaaaggctcaagaatggggcatg

SEQ ID NO: 754751 - DNA, 80 bp, Artificial Sequence
  ENSG00000213265_15 (sequence is synthesized)
cgagccgaagtctccggcgggccgcaagaggagaagggggcgtggctgcgtcccgggggccgagggcggccggggagggc

SEQ ID NO: 754752 - DNA, 120 bp, Artificial Sequence
  ENSG00000213265_16 (sequence is synthesized)
gtgagagcgcggggccggccttcctgcagcctcttccgctcgccggctgcggcgcctgggacggttgcggtgggtctgggcgctgggaagtcgtccaagatgattaaaaaattcgacaag

SEQ ID NO: 754753 - DNA, 120 bp, Artificial Sequence
  ENSG00000213281_0 (sequence is synthesized)
ggggccggaagtgccgctccttggtgggggctgttcatggcggttccggggtctccaacatttttcccggctgtggtcctaaatctgtccaaagcagaggcagtggagcttgaggttctt

SEQ ID NO: 754754 - DNA, 120 bp, Artificial Sequence
  ENSG00000213281_1 (sequence is synthesized)
gctggtgtgaaatgactgagtacaaactggtggtggttggagcaggtggtgttgggaaaagcgcactgacaatccagctaatccagaaccactttgtagatgaatatgatcccaccatag

SEQ ID NO: 754755 - DNA, 120 bp, Artificial Sequence
  ENSG00000213281_2 (sequence is synthesized)
aggattcttacagaaaacaagtggttatagatggtgaaacctgtttgttggacatactggatacagctggacaagaagagtacagtgccatgagagaccaatacatgaggacaggcgaag

SEQ ID NO: 754756 - DNA, 120 bp, Artificial Sequence
  ENSG00000213281_3 (sequence is synthesized)
gcttcctctgtgtatttgccatcaataatagcaagtcatttgcggatattaacctctacagggagcagattaagcgagtaaaagactcggatgatgtacctatggtgctagtgggaaaca

SEQ ID NO: 754757 - DNA, 120 bp, Artificial Sequence
  ENSG00000213281_4 (sequence is synthesized)
agtgtgatttgccaacaaggacagttgatacaaaacaagcccacgaactggccaagagttacgggattccattcattgaaacctcagccaagaccagacagggtgttgaagatgcttttt

SEQ ID NO: 754758 - DNA, 120 bp, Artificial Sequence
  ENSG00000213281_5 (sequence is synthesized)
acacactggtaagagaaatacgccagtaccgaatgaaaaaactcaacagcagtgatgatgggactcagggttgtatgggattgccatgtgtggtgatgtaacaagatacttttaaagttt

SEQ ID NO: 754759 - DNA, 120 bp, Artificial Sequence
  ENSG00000213281_6 (sequence is synthesized)
tgtcagaaaagagccactttcaagctgcactgacaccctggtcctgacttccctggaggagaagtattcctgttgctgtcttcagtctcacagagaagctcctgctacttccccagctct

SEQ ID NO: 754760 - DNA, 120 bp, Artificial Sequence
  ENSG00000213281_7 (sequence is synthesized)
cagtagtttagtacaataatctctatttgagaagttctcagaataactacctcctcacttggctgtctgaccagagaatgcacctcttgttactccctgttatttttctgccctgggttc

SEQ ID NO: 754761 - DNA, 120 bp, Artificial Sequence
  ENSG00000213281_8 (sequence is synthesized)
ttccacagcacaaacacacctctgccaccccaggtttttcatctgaaaagcagttcatgtctgaaacagagaaccaaaccgcaaacgtgaaattctattgaaaacagtgtcttgagctct

SEQ ID NO: 754762 - DNA, 120 bp, Artificial Sequence
  ENSG00000213281_9 (sequence is synthesized)
aaagtagcaactgctggtgattttttttttctttttactgttgaacttagaactatgctaatttttggagaaatgtcataaattactgttttgccaagaatatagttattattgctgttt

SEQ ID NO: 754763 - DNA, 120 bp, Artificial Sequence
  ENSG00000213281_10 (sequence is synthesized)
ggtttgtttataatgttatcggctctattctctaaactggcatctgctctagattcataaatacaaaaatgaatactgaattttgagtctatcctagtcttcacaactttgacgtaatta

SEQ ID NO: 754764 - DNA, 120 bp, Artificial Sequence
  ENSG00000213281_11 (sequence is synthesized)
aatccaactttcacagtgaagtgcctttttcctagaagtggtttgtagacttcctttataatatttcagtggaatagatgtctcaaaaatccttatgcatgaaatgaatgtctgagatac

SEQ ID NO: 754765 - DNA, 120 bp, Artificial Sequence
  ENSG00000213281_12 (sequence is synthesized)
gtctgtgacttatctaccattgaaggaaagctatatctatttgagagcagatgccattttgtacatgtatgaaattggttttccagaggcctgttttggggctttcccaggagaaagatg

SEQ ID NO: 754766 - DNA, 120 bp, Artificial Sequence
  ENSG00000213281_13 (sequence is synthesized)
aaactgaaagcacatgaataatttcacttaataatttttacctaatctccacttttttcataggttactacctatacaatgtatgtaatttgtttcccctagcttactgataaacctaat

SEQ ID NO: 754767 - DNA, 120 bp, Artificial Sequence
  ENSG00000213281_14 (sequence is synthesized)
attcaatgaacttccatttgtattcaaatttgtgtcataccagaaagctctacatttgcagatgttcaaatattgtaaaactttggtgcattgttatttaatagctgtgatcagtgattt

SEQ ID NO: 754768 - DNA, 120 bp, Artificial Sequence
  ENSG00000213281_15 (sequence is synthesized)
tcaaacctcaaatatagtatattaacaaattacattttcactgtatatcatggtatcttaatgatgtatataattgccttcaatccccttctcaccccaccctctacagcttcccccaca

SEQ ID NO: 754769 - DNA, 120 bp, Artificial Sequence
  ENSG00000213281_16 (sequence is synthesized)
gcaataggggcttgattatttcagttgagtaaagcatggtgctaatggaccagggtcacagtttcaaaacttgaacaatccagttagcatcacagagaaagaaattcttctgcatttgct

SEQ ID NO: 754770 - DNA, 120 bp, Artificial Sequence
  ENSG00000213281_17 (sequence is synthesized)
cattgcaccagtaactccagctagtaattttgctaggtagctgcagttagccctgcaaggaaagaagaggtcagttagcacaaaccctttaccatgactggaaaactcagtatcacgtat

SEQ ID NO: 754771 - DNA, 120 bp, Artificial Sequence
  ENSG00000213281_18 (sequence is synthesized)
atttttttttcttttagccatgtagaaactctaaattaagccaatattctcatttgagaatgaggatgtctcagctgagaaacgttttaaattctctttattcataatgttctttgaagg

SEQ ID NO: 754772 - DNA, 120 bp, Artificial Sequence
  ENSG00000213281_19 (sequence is synthesized)
gtttaaaacaagatgttgataaatctaagctgatgagtttgctcaaaacaggaagttgaaattgttgagacaggaatggaaaatataattaattgatacctatgaggatttggaggcttg

SEQ ID NO: 754773 - DNA, 120 bp, Artificial Sequence
  ENSG00000213281_20 (sequence is synthesized)
gcattttaatttgcagataataccctggtaattctcatgaaaaatagacttggataacttttgataaaagactaattccaaaatggccactttgttcctgtctttaatatctaaatactt

SEQ ID NO: 754774 - DNA, 120 bp, Artificial Sequence
  ENSG00000213281_21 (sequence is synthesized)
actgaggtcctccatcttctatattatgaattttcatttattaagcaaatgtcatattaccttgaaattcagaagagaagaaacatatactgtgtccagagtataatgaacctgcagagt

SEQ ID NO: 754775 - DNA, 120 bp, Artificial Sequence
  ENSG00000213281_22 (sequence is synthesized)
tgtgcttcttactgctaattctgggagctttcacagtactgtcatcatttgtaaatggaaattctgcttttctgtttctgctccttctggagcagtgctactctgtaattttcctgaggc

SEQ ID NO: 754776 - DNA, 120 bp, Artificial Sequence
  ENSG00000213281_23 (sequence is synthesized)
ttatcacctcagtcatttcttttttaaatgtctgtgactggcagtgattctttttcttaaaaatctattaaatttgatgtcaaattagggagaaagatagttactcatcttgggctcttg

SEQ ID NO: 754777 - DNA, 120 bp, Artificial Sequence
  ENSG00000213281_24 (sequence is synthesized)
tgccaatagcccttgtatgtatgtacttagagttttccaagtatgttctaagcacagaagtttctaaatggggccaaaattcagacttgagtatgttctttgaataccttaagaagttac

SEQ ID NO: 754778 - DNA, 60 bp, Artificial Sequence
  ENSG00000213281_25 (sequence is synthesized)
tcagacttgagtatgttctttgaataccttaagaagttacaattagccgggcatggtggc

SEQ ID NO: 754779 - DNA, 120 bp, Artificial Sequence
  ENSG00000213281_26 (sequence is synthesized)
cagcctgggtgacaagagagacttgtctccaaaaaaaaagttacacctaggtgtgaattttggcacaaaggagtgacaaacttatagttaaaagctgaataacttcagtgtggtataaaa

SEQ ID NO: 754780 - DNA, 120 bp, Artificial Sequence
  ENSG00000213281_27 (sequence is synthesized)
cgtggtttttaggctatgtttgtgattgctgaaaagaattctagtttacctcaaaatccttctctttccccaaattaagtgcctggccagctgtcataaattacatattccttttggttt

SEQ ID NO: 754781 - DNA, 120 bp, Artificial Sequence
  ENSG00000213281_28 (sequence is synthesized)
ttttaaaggttacatgttcaagagtgaaaataagatgttctgtctgaaggctaccatgccggatctgtaaatgaacctgttaaatgctgtatttgctccaacggcttactatagaatgtt

SEQ ID NO: 754782 - DNA, 120 bp, Artificial Sequence
  ENSG00000213281_29 (sequence is synthesized)
acttaatacaatatcatacttattacaatttttactataggagtgtaataggtaaaattaatctctattttagtgggcccatgtttagtctttcaccatcctttaaactgctgtgaattt

SEQ ID NO: 754783 - DNA, 120 bp, Artificial Sequence
  ENSG00000213281_30 (sequence is synthesized)
ttttgtcatgacttgaaagcaaggatagagaaacactttagagatatgtggggtttttttaccattccagagcttgtgagcataatcatatttgctttatatttatagtcatgaactcct

SEQ ID NO: 754784 - DNA, 120 bp, Artificial Sequence
  ENSG00000213281_31 (sequence is synthesized)
aagttggcagctacaaccaagaaccaaaaaatggtgcgttctgcttcttgtaattcatctctgctaataaattataagaagcaaggaaaattagggaaaatattttatttggatggtttc

SEQ ID NO: 754785 - DNA, 120 bp, Artificial Sequence
  ENSG00000213281_32 (sequence is synthesized)
tataaacaagggactataattcttgtacattatttttcatctttgctgtttctttgagcagtctaatgtgccacacaattatctaaggtatttgttttctataagaattgttttaaaagt

SEQ ID NO: 754786 - DNA, 120 bp, Artificial Sequence
  ENSG00000213281_33 (sequence is synthesized)
attcttgttaccagagtagttgtattatatttcaaaacgtaagatgatttttaaaagcctgagtactgacctaagatggaattgtatgaactctgctctggagggaggggaggatgtccg

SEQ ID NO: 754787 - DNA, 120 bp, Artificial Sequence
  ENSG00000213281_34 (sequence is synthesized)
tggaagttgtaagacttttatttttttgtgccatcaaatataggtaaaaataattgtgcaattctgctgtttaaacaggaactattggcctccttggccctaaatggaagggccgatatt

SEQ ID NO: 754788 - DNA, 120 bp, Artificial Sequence
  ENSG00000213281_35 (sequence is synthesized)
ttaagttgattattttattgtaaattaatccaacctagttctttttaatttggttgaatgttttttcttgttaaatgatgtttaaaaaataaaaactggaagttcttggcttagtcataa

SEQ ID NO: 754789 - DNA, 120 bp, Artificial Sequence
  ENSG00000213316_0 (sequence is synthesized)
cttcctctcctgggccgtcctctgagcagcagacggggctaagcgttccccagctcgccttcacacacagcccgtgccaccacaccgacggtaccatgaaggacgaggtagctctactgg

SEQ ID NO: 754790 - DNA, 120 bp, Artificial Sequence
  ENSG00000213316_1 (sequence is synthesized)
ctgctgtcaccctcctgggagtcctgctgcaagcctacttctccctgcaggtgatctcggcgcgcagggccttccgcgtgtcgccgccgctcaccaccggcccacccgagttcgagcgcg

SEQ ID NO: 754791 - DNA, 120 bp, Artificial Sequence
  ENSG00000213316_2 (sequence is synthesized)
tctaccgagcccaggtgaactgcagcgagtacttcccgctgttcctcgccacgctctgggtcgccggcatcttctttcatgaaggggcggcggccctgtgcggcctggtctacctgttcg

SEQ ID NO: 754792 - DNA, 120 bp, Artificial Sequence
  ENSG00000213316_3 (sequence is synthesized)
ctctggctgctggtggcgctggctgcgctcggcctgctcgcccacttcctcccggccgcgctgcgcgccgcgctcctcggacggctccggacgctgctgccgtgggcctgagaccaaggc

SEQ ID NO: 754793 - DNA, 120 bp, Artificial Sequence
  ENSG00000213316_4 (sequence is synthesized)
gggccgacggagccgggaaagaagagccggagcctccagctgccccggggaggggcgctcgcttccgcatcctagtctctatcattaaagttctagtgaccgagacccgggctgcgttct

SEQ ID NO: 754794 - DNA, 120 bp, Artificial Sequence
  ENSG00000213316_5 (sequence is synthesized)
ctgggtccgcgggggtggcgcaccgcgggctacggagcctggaggggcccagcccgagtccgggcagcccggggcgggcttcctagtggcggcgtgagagtggctgcgaaggaacgagcc

SEQ ID NO: 754795 - DNA, 120 bp, Artificial Sequence
  ENSG00000213316_6 (sequence is synthesized)
cgggagggcgcggggcggggagcgagccccaggcgggtccgggtcgcaggaccatcccggccggcgcgctcatcccacccgcccaccgcagggtgaactgcagcgagtacttcccgctgt

SEQ ID NO: 754796 - DNA, 120 bp, Artificial Sequence
  ENSG00000213316_7 (sequence is synthesized)
gcgcagggcgctcaccaggcccgtgcgtacctctcgcaggggcggcggccctgtgcggcctggtctacctgttcgcgcgcctccgctacttccagggctacgcgcgctccgcgcagctca

SEQ ID NO: 754797 - DNA, 80 bp, Artificial Sequence
  ENSG00000213316_8 (sequence is synthesized)
tcctggggagcgggaccgaagctgggggcgggcgacgggccggagcccagcgcctttggggattcggtgggcgagccctg

SEQ ID NO: 754798 - DNA, 120 bp, Artificial Sequence
  ENSG00000213337_0 (sequence is synthesized)
ggggcggatcgactgacgccggggccgggatggcgacgcctcggccctgcgcggacgggccctgctgctcgcatcccagcgcggtgctcggcgtacagcagacgctggaggagatggact

SEQ ID NO: 754799 - DNA, 120 bp, Artificial Sequence
  ENSG00000213337_1 (sequence is synthesized)
tcgagaggggaatctggtcggcagccctgaatggagacctgggccgagtgaagcatttaatccagaaggccgaggacccaagtcagcccgactcggccggctacactgcgctgcactatg

SEQ ID NO: 754800 - DNA, 120 bp, Artificial Sequence
  ENSG00000213337_2 (sequence is synthesized)
ccagccgcaatgggcactacgctgtgtgccagttcctgctggaaagcggagctaagtgtgatgcccagacccacgggggtgccactgctctgcaccgagccagctactgcgggcacactg

SEQ ID NO: 754801 - DNA, 120 bp, Artificial Sequence
  ENSG00000213337_3 (sequence is synthesized)
cgacggcatgaccagtctgcataaggctgctgagaggggtcacggggacatctgctccctcctcctgcaacacagcccagccctgaaggccatccgggaccgaaaggcacggctagcatg

SEQ ID NO: 754802 - DNA, 120 bp, Artificial Sequence
  ENSG00000213337_4 (sequence is synthesized)
tgacctgctgccttgcaacagtgacctgcgggacctgctatccagctgagccgccaccctatctccagctgcctttaaagggtacacagaccagttctccaagcccctgccttggtcagc

SEQ ID NO: 754803 - DNA, 120 bp, Artificial Sequence
  ENSG00000213337_5 (sequence is synthesized)
atccatgctgctgggcagggaactgaggccagaccacccaggaagagccccagtctggtcactgtggaagcgagggagtagatttggtgtggctaaaagtgtttaagactggacagatga

SEQ ID NO: 754804 - DNA, 120 bp, Artificial Sequence
  ENSG00000213337_6 (sequence is synthesized)
tcatattctaaattagttcatatgagacatctatttatttggaaaaaaataaagttatatccttacctcatcccacacccaaagataaattgcaagattaaagatctaaatataaaaaca

SEQ ID NO: 754805 - DNA, 120 bp, Artificial Sequence
  ENSG00000213337_7 (sequence is synthesized)
gcctttaaagggtaagtggagaaagagttgaagggaaagtgttgggatttggacatggagttcctgaccctggagcctggcctagtgactggaggaggggcccccaagaggctgtggccc

SEQ ID NO: 754806 - DNA, 120 bp, Artificial Sequence
  ENSG00000213337_8 (sequence is synthesized)
gggagaagctgaaattggaagaagagaagaagaagaaacttgaaagatttaacagtaccagatttaatctggataacctggctgacttggaaaacttggttcaaagacggaaaaagcgac

SEQ ID NO: 754807 - DNA, 120 bp, Artificial Sequence
  ENSG00000213337_9 (sequence is synthesized)
tgagacacagagtcccccccaggaaacctgagcccctggttaagccgcagtcccaggcccaggtggagcctgtgggcctggagatgttcctgaaggcagctgctgagaaccaggagtacc

SEQ ID NO: 754808 - DNA, 120 bp, Artificial Sequence
  ENSG00000213337_10 (sequence is synthesized)
tgattgacaagtacttgacagacggaggggaccccaatgcccatgacaaggtagcacaggttgggtgagtcggctggcagcagctgcagctgcaggagcgctgccttcagtgtgttcaag

SEQ ID NO: 754809 - DNA, 120 bp, Artificial Sequence
  ENSG00000213337_11 (sequence is synthesized)
tcctggcctaggaggctgcagggattttcactcttatgggcatgaatccagtggcacctgcagacggaggagagggagcggcccatcgcgtggtgggggaagtggcaattccattcaggg

SEQ ID NO: 754810 - DNA, 120 bp, Artificial Sequence
  ENSG00000213337_12 (sequence is synthesized)
acctggccctgggaaggggaccgcgtggggtctctaggggtggctgcactccctctgcctaatcttccatctctgccctcagctccaccgcaccgccttgcactgggcctgtctgaaggg

SEQ ID NO: 754811 - DNA, 120 bp, Artificial Sequence
  ENSG00000213337_13 (sequence is synthesized)
tcacagccagctggtgaacaagctgctggtggcaggtgccacagtggacgcgcgagacttgctggacaggacacctgtgttctgggcctgccgcggaggacatctggtcatcctcaaaca

SEQ ID NO: 754812 - DNA, 120 bp, Artificial Sequence
  ENSG00000213337_14 (sequence is synthesized)
gctgcttaaccagggagcccgggtcaatgcccgggacaagatcgggagcacccccctgcacgtggcagtgcgcacccggcaccccgactgcctggagcacctcatcgagtgtggcgccca

SEQ ID NO: 754813 - DNA, 120 bp, Artificial Sequence
  ENSG00000213337_15 (sequence is synthesized)
cctgaacgcacaggataaggtaaggcaggcgcttggtcttttccggctcggacagctccagaggagcagggactgaggagccccagccaggaccagaggtgctgtctgctcggtgacagc

SEQ ID NO: 754814 - DNA, 120 bp, Artificial Sequence
  ENSG00000213337_16 (sequence is synthesized)
agccctgaccttcctgcatgaggagggcagcacgcggaggcagaagcttgactgcctgcgttctcagcaggaaggggacacggctctgcacgaggccgtgcggcacggcagctacaaagc

SEQ ID NO: 754815 - DNA, 120 bp, Artificial Sequence
  ENSG00000213337_17 (sequence is synthesized)
catgaagctactgctgctctatggggccgagctgggggtgcggaacgcggtgagtgtgggcgcagccctggctcctgacccgagggcgggtggagcgcctgcaagggactgacccacacc

SEQ ID NO: 754816 - DNA, 120 bp, Artificial Sequence
  ENSG00000213337_18 (sequence is synthesized)
gttgctcccaggcctccgtgaccccggtgcagctggctcgagactggcagcgcggcatccgggaggccctgcaggcccacgtggcgcatccccgcacccggtgctgaccgcagcaccgcc

SEQ ID NO: 754817 - DNA, 120 bp, Artificial Sequence; identical to SEQ ID NO: 493821
  ENSG00000213337_19 (sequence is synthesized)

SEQ ID NO: 754818 - DNA, 120 bp, Artificial Sequence; identical to SEQ ID NO: 493822
  ENSG00000213337_20 (sequence is synthesized)

SEQ ID NO: 754819 - DNA, 120 bp, Artificial Sequence
  ENSG00000213337_21 (sequence is synthesized)
agaaagcgcgggtccagatgagggccaggaaggggaggagagtgagggccaagaacgagccttaagggagcagtcccaagctggagccacccagggctgggtctgggagtcctcagtgtc

SEQ ID NO: 754820 - DNA, 120 bp, Artificial Sequence
  ENSG00000213337_22 (sequence is synthesized)
gtctgtgtgtgtggggactcagcccgtggccggcagatgccatccaggatgtacaaggtgcagccaaggcaggccatgcaggggccgggcctgtctgcagctggtggatgcctgtgggca

SEQ ID NO: 754821 - DNA, 120 bp, Artificial Sequence
  ENSG00000213337_23 (sequence is synthesized)
tggctttctctggggaccccattcctgtcagtagcaaccctggcagtgtccggagcggctctagacaactttggtcataggaactctggaggtgggttctggtcatctgaggtggctact

SEQ ID NO: 754822 - DNA, 120 bp, Artificial Sequence
  ENSG00000213337_24 (sequence is synthesized)
caacaggtttgaggccccacagcaacagaagtccaggacccactaggttgcctcagaagccctaagactgatgagctggagcgcgcatttgagagaagcctcgcacccactgtgtactgg

SEQ ID NO: 754823 - DNA, 120 bp, Artificial Sequence
  ENSG00000213337_25 (sequence is synthesized)
ccccgctcaggccggcctggcacaccgttgcctgctggcggctctcatggggaagcgcctgggcactggggattgcttgtggcccactcaactcttggggcagtggcccgtaaccctagt

SEQ ID NO: 754824 - DNA, 120 bp, Artificial Sequence
  ENSG00000213337_26 (sequence is synthesized)
ttgcctgaggcccttatgtccccttatgttcctggtactggagcttgagctcttgcctggaacgctgcagctgcacccaccctgcttgatcccacctgggaggccaggacactgaggagc

SEQ ID NO: 754825 - DNA, 120 bp, Artificial Sequence
  ENSG00000213337_27 (sequence is synthesized)
tctgaacccagcccacagggaagcagaggaaggtgagcccccgccgccccccagcccttcccatcccttccctgctccctggtggtctaaggacccaagctccctagacttcctcttcca

SEQ ID NO: 754826 - DNA, 120 bp, Artificial Sequence
  ENSG00000213337_28 (sequence is synthesized)
ccgtctgtacgtttcaaattacactggtgtaggcctgtactgctggtggggctgggcccctaaacgccagaaagtgaatcttaagaagctctgccctaaactgagaaccacatgctgagg

SEQ ID NO: 754827 - DNA, 120 bp, Artificial Sequence
  ENSG00000213337_29 (sequence is synthesized)
gaagggctgaaaggtgaaggctcagcctccctcacatgggtcctgggttacattaggtaccgggctgattgataggcatttggccatggttccttttcgtctacctttgggggccttctc

SEQ ID NO: 754828 - DNA, 120 bp, Artificial Sequence
  ENSG00000213337_30 (sequence is synthesized)
aggcccagaacaaggctgttgttactatgtggaaaagctgaccagtgctgcacactaggggcacacacctttccatgagcagctcctgccctgtggcgacagccagcgtgcacccagacg

SEQ ID NO: 754829 - DNA, 120 bp, Artificial Sequence
  ENSG00000213337_31 (sequence is synthesized)
ctggtgccatggcgaagcaggcgttcaagaccatggagaagacaactcctcatctagaaaatgaggacacctcagtgacaaacacacctttttataccaatcagtatcctctgttcatta

SEQ ID NO: 754830 - DNA, 120 bp, Artificial Sequence
  ENSG00000213337_32 (sequence is synthesized)
aaactggctatccattacagcctagccgtctttcctgggccgagaggagcccatgcttcagtcaccagggactgtctgatagggcccacgcctgttagccatgccggccgacagcaagat

SEQ ID NO: 754831 - DNA, 120 bp, Artificial Sequence
  ENSG00000213337_33 (sequence is synthesized)
aggccgagtgcagagtgggcgggatgcggggtcctggcactaggcttttgtgcttaaggcacctctgctcactgacgacaaggtcaaagagcagtggttctccacctcagctgcttatca

SEQ ID NO: 754832 - DNA, 120 bp, Artificial Sequence
  ENSG00000213337_34 (sequence is synthesized)
gaatcaccaggaaggtttaaaaagtcctgatgtccagaccctaagtcagaagccctgaggggaggatccaggtattctcatgcagaggccatgcttgtctatgtgggaaatcctaggaat

SEQ ID NO: 754833 - DNA, 120 bp, Artificial Sequence
  ENSG00000213337_35 (sequence is synthesized)
ctacagaaagcagacaactagggagtccagcaaaatctcgggtgcaagataaacacacaaaaacctgtttctacctcctagaaatgaacatgtagacacaaaagttaaaaatatgtactg

SEQ ID NO: 754834 - DNA, 120 bp, Artificial Sequence
  ENSG00000213337_36 (sequence is synthesized)
tttacaattgctgaaaaagggaaatacttcggtttaaatctaacaaaatatgcaaggacttgtatgctgaaaattataaaacgtgatgaaatcaaagatttaaatagacatgccatgttc

SEQ ID NO: 754835 - DNA, 120 bp, Artificial Sequence
  ENSG00000213337_37 (sequence is synthesized)
atggattgctagacagaatacagtaaagatatcaattctcctcaaattaacatacaggttaaatgcagttcctatcaaaatcctagaagatgttttgtagatgtagacaaggttattcta

SEQ ID NO: 754836 - DNA, 120 bp, Artificial Sequence
  ENSG00000213337_38 (sequence is synthesized)
aaattcatatacaaatttatagcaaaaatattttgaaaaagaatagagtgagaggaggaatcagtccagctgatttcaagatctactatatagctatgtgaaccaagagtgcaatgctgg

SEQ ID NO: 754837 - DNA, 120 bp, Artificial Sequence
  ENSG00000213337_39 (sequence is synthesized)
cagaggcacagacacacagatcgacagagccgagatcatcacgggaacaggaccacacaaatatgcccagctgactttaaggtgcaaaagtaattcaatggaggaaggacagcctttcaa

SEQ ID NO: 754838 - DNA, 120 bp, Artificial Sequence
  ENSG00000213337_40 (sequence is synthesized)
caaacggtgctggagcagctggaccagctataggattaaaaaaaaagaactttagcctaagtcttacacattatacaaaaattaacatggctcacatgcatacttaaatttaaaactata

SEQ ID NO: 754839 - DNA, 120 bp, Artificial Sequence
  ENSG00000213337_41 (sequence is synthesized)
aaacttcttttaggaaaaaacagataacctttgggatctaagactaggtagagttgttcttaaatgcaacactaaaagcaacagtccataaaggaaatatcagtaaagtggactttatca

SEQ ID NO: 754840 - DNA, 89 bp, Artificial Sequence
  ENSG00000213337_42 (sequence is synthesized)
acagtccataaaggaaatatcagtaaagtggactttatcaaaactgaaaacttttgctctgtataaaaccctgttaagagggtgaaaag

SEQ ID NO: 754841 - DNA, 120 bp, Artificial Sequence
  ENSG00000213339_0 (sequence is synthesized)
ccacgtggttccgacagtcaagatggcgggagcagctacccaggcttccctggagtcggccccacggatcatgcggctggtggccgaatgcagccgctccagggcccgggcaggcgagct

SEQ ID NO: 754842 - DNA, 120 bp, Artificial Sequence
  ENSG00000213339_1 (sequence is synthesized)
gtggctgccgcatgggacagtggccactcctgtgttcatgccagtgggcacgcaggccaccatgaagggcatcacgaccgaacagctggacgctctgggttgccgcatctgcctgggcaa

SEQ ID NO: 754843 - DNA, 120 bp, Artificial Sequence
  ENSG00000213339_2 (sequence is synthesized)
tacctaccatctgggtctaaggccgggacccgagctgatccagaaagccaacggtctccacggcttcatgaattggcctcataatctgctaacggacagcggcggtttccagatggtgtc

SEQ ID NO: 754844 - DNA, 120 bp, Artificial Sequence
  ENSG00000213339_3 (sequence is synthesized)
gctggtgtctctgtccgaggtgacggaggagggcgtccgcttccgctccccctacgacggcaatgagaccctgctgagcccggagaaatccgtgcagatccagaatgcgctgggctcgga

SEQ ID NO: 754845 - DNA, 120 bp, Artificial Sequence
  ENSG00000213339_4 (sequence is synthesized)
catcatcatgcagctggacgacgtggttagcagtactgtgactgggccacgtgtggaggaggccatgtacaggtcaatccgctggctggaccggtgcattgcagcccatcagcggccgga

SEQ ID NO: 754846 - DNA, 120 bp, Artificial Sequence
  ENSG00000213339_5 (sequence is synthesized)
cctcttcgccattatccagggtgggctggacgcagatctccgggccacctgccttgaagagatgaccaagcgagacgtgcctggcttcgccatcgggggcctgagcgggggtgagagcaa

SEQ ID NO: 754847 - DNA, 120 bp, Artificial Sequence
  ENSG00000213339_6 (sequence is synthesized)
gtcgcagttctggcggatggtggcgctgagcacctctcggctgccgaaggacaagccccgatatctgatgggggttggctatgccactgatctggtagtctgcgtggctcttggatgtga

SEQ ID NO: 754848 - DNA, 120 bp, Artificial Sequence
  ENSG00000213339_7 (sequence is synthesized)
catgttcgactgcgtcttccccacacggacagcgcgctttggctctgccctggtgcccactgggaacctgcagttgaggaagaaggtgtttgagaaggacttcggccccatagacccgga

SEQ ID NO: 754849 - DNA, 120 bp, Artificial Sequence
  ENSG00000213339_8 (sequence is synthesized)
gtgcacctgccccacgtgccaaaagcacagccgcgccttcctgcacgcactgctgcacagtgacaacacggccgcgctgcaccacctcacggtccacaacatcgcctaccagctgcagct

SEQ ID NO: 754850 - DNA, 120 bp, Artificial Sequence
  ENSG00000213339_9 (sequence is synthesized)
catgagcgccgtccgcaccagcatcgtggagaagcgcttcccggacttcgtgcgggacttcatgggcgccatgtacggggatcccaccctctgtcccacctgggccactgacgctctggc

SEQ ID NO: 754851 - DNA, 120 bp, Artificial Sequence
  ENSG00000213339_10 (sequence is synthesized)
ctctgtgggaatcacactgggctgacctggcattgggagagggagggaggaaggaagggagggaggggctggaagatactgaaggattcctttttgaaaggttttttttattgtaactta

SEQ ID NO: 754852 - DNA, 120 bp, Artificial Sequence
  ENSG00000213339_11 (sequence is synthesized)
tgggaagtggattcctggggaccccctaccctgcttggggaggtggcatttgggggaaacggacacaggtctgatctgaggagactaggaagacatggctgtcccttgggggccattctg

SEQ ID NO: 754853 - DNA, 120 bp, Artificial Sequence
  ENSG00000213339_12 (sequence is synthesized)
agggaatatggcccagtctggggcagtgtgagggttgggaggggccctgggaagcccctgaggttctctgccccctcccgtcatggctgcaaccccagctatgccactgatctggtagtc

SEQ ID NO: 754854 - DNA, 120 bp, Artificial Sequence
  ENSG00000213339_13 (sequence is synthesized)
ttaagccccgcatgcgttatgtatttgtcctaatgctctcactcccctttcctccaccaagtcttaacatattttgttgtacaaatattacagtgtttgatgacaggctattgggtgttt

SEQ ID NO: 754855 - DNA, 72 bp, Artificial Sequence
  ENSG00000213339_14 (sequence is synthesized)
acaaatattacagtgtttgatgacaggctattgggtgttttgttgttgttgttgtttcgttttatctgatct

SEQ ID NO: 754856 - DNA, 70 bp, Artificial Sequence
  ENSG00000213339_15 (sequence is synthesized)
tgggactgcgggtgcaaccacgttggttagcctgctttcgaactcctgacctcgtaatctgcctgccttg

SEQ ID NO: 754857 - DNA, 70 bp, Artificial Sequence
  ENSG00000213339_16 (sequence is synthesized)
ttagcctgctttcgaaaaggcatgagtcaccgcgcccggcccttttttttgagatggagtctcactttgt

SEQ ID NO: 754858 - DNA, 71 bp, Artificial Sequence
  ENSG00000213339_17 (sequence is synthesized)
gacagggtttcaccatgttggccagattgttcttcaacaccagacttcaagtgatctgcttaacatgacag

SEQ ID NO: 754859 - DNA, 120 bp, Artificial Sequence
  ENSG00000213339_18 (sequence is synthesized)
catgacagctgttactcagcatgtgggatgtttactgttctcacatctggaaaactctgaattctgaaacacatctggttccaacagtttcagctaagggactgtgggctgtgcctcttc

SEQ ID NO: 754860 - DNA, 120 bp, Artificial Sequence
  ENSG00000213339_19 (sequence is synthesized)
tgagtactgaaggaaaaggtcttgcatacagcaggcactcaataaatgttagctgagatcagcagtagtcccagcccctagacagacagacaaactgatggaccctctcctctgtctccc

SEQ ID NO: 754861 - DNA, 120 bp, Artificial Sequence
  ENSG00000213339_20 (sequence is synthesized)
acgggtgggggactagggaggcaaggttaggggtggggggtggggagaatgaagccctgggtgacgcccctttccctgcccttcctctcccacagcgctttggctctgccctggtgccca

SEQ ID NO: 754862 - DNA, 120 bp, Artificial Sequence
  ENSG00000213339_21 (sequence is synthesized)
aacctcttcgccattatccagggtgggctggacgcagatctccgggccacctgccttgaaggtcctcagagcgaaagtctaaaatccagaacattggccgggtaccatagctcacacctg

SEQ ID NO: 754863 - DNA, 120 bp, Artificial Sequence
  ENSG00000213339_22 (sequence is synthesized)
aatcccagcactttaggaggccaagagatgaccaagcgagacgtgcctggcttcgccatcgggggcctgagcgggggtgagagcaagtcgcagttctggcggatggtggcgctgagcacc

SEQ ID NO: 754864 - DNA, 120 bp, Artificial Sequence
  ENSG00000213339_23 (sequence is synthesized)
cattgcagcccatcagcggccggacaagcagaacctcttcgccattatccagggtgggctggacgcagatctccgggccacctgccttgaagggacagggtttcaccatgttggctaggc

SEQ ID NO: 754865 - DNA, 76 bp, Artificial Sequence
  ENSG00000213339_24 (sequence is synthesized)
gcctcacctgcgttcttgatggcatggcctcttcgggttgaactgggcagctggggcacaagataagcctggactt

SEQ ID NO: 754866 - DNA, 120 bp, Artificial Sequence
  ENSG00000213341_0 (sequence is synthesized)
gaaccggccttggaacaactgtggaacctgaggccgcttgccctcccgccccatggagcggcccccggggctgcggccgggcgcgggcgggccctgggagatgcgggagcggctgggcac

SEQ ID NO: 754867 - DNA, 120 bp, Artificial Sequence
  ENSG00000213341_1 (sequence is synthesized)
gcggctgggcaccggcggcttcgggaacgtctgtctgtaccagcatcgggaacttgatctcaaaatagcaattaagtcttgtcgcctagagctaagtaccaaaaacagagaacgatggtg

SEQ ID NO: 754868 - DNA, 120 bp, Artificial Sequence
  ENSG00000213341_2 (sequence is synthesized)
ccatgaaatccagattatgaagaagttgaaccatgccaatgttgtaaaggcctgtgatgttcctgaagaattgaatattttgattcatgatgtgcctcttctagcaatggaatactgttc

SEQ ID NO: 754869 - DNA, 120 bp, Artificial Sequence
  ENSG00000213341_3 (sequence is synthesized)
tggaggagatctccgaaagctgctcaacaaaccagaaaattgttgtggacttaaagaaagccagatactttctttactaagtgatatagggtctgggattcgatatttgcatgaaaacaa

SEQ ID NO: 754870 - DNA, 120 bp, Artificial Sequence
  ENSG00000213341_4 (sequence is synthesized)
aattatacatcgagatctaaaacctgaaaacatagttcttcaggatgttggtggaaagataatacataaaataattgatctgggatatgccaaagatgttgatcaaggaagtctgtgtac

SEQ ID NO: 754871 - DNA, 120 bp, Artificial Sequence
  ENSG00000213341_5 (sequence is synthesized)
atcttttgtgggaacactgcagtatctggccccagagctctttgagaataagccttacacagccactgttgattattggagctttgggaccatggtatttgaatgtattgctggatatag

SEQ ID NO: 754872 - DNA, 120 bp, Artificial Sequence
  ENSG00000213341_6 (sequence is synthesized)
gccttttttgcatcatctgcagccatttacctggcatgagaagattaagaagaaggatccaaagtgtatatttgcatgtgaagagatgtcaggagaagttcggtttagtagccatttacc

SEQ ID NO: 754873 - DNA, 120 bp, Artificial Sequence
  ENSG00000213341_7 (sequence is synthesized)
tcaaccaaatagcctttgtagtttagtagtagaacccatggaaaactggctacagttgatgttgaattgggaccctcagcagagaggaggacctgttgaccttactttgaagcagccaag

SEQ ID NO: 754874 - DNA, 120 bp, Artificial Sequence
  ENSG00000213341_8 (sequence is synthesized)
atgttttgtattaatggatcacattttgaatttgaagatagtacacatcctaaatatgacttctgcaaagataatttcttttctgttaccacctgatgaaagtcttcattcactacagtc

SEQ ID NO: 754875 - DNA, 120 bp, Artificial Sequence
  ENSG00000213341_9 (sequence is synthesized)
tcgtattgagcgtgaaactggaataaatactggttctcaagaacttctttcagagacaggaatttctctggatcctcggaaaccagcctctcaatgtgttctagatggagttagaggctg

SEQ ID NO: 754876 - DNA, 120 bp, Artificial Sequence
  ENSG00000213341_10 (sequence is synthesized)
tgatagctatatggtttatttgtttgataaaagtaaaactgtatatgaagggccatttgcttccagaagtttatctgattgtgtaaattatattgtacaggacagcaaaatacagcttcc

SEQ ID NO: 754877 - DNA, 120 bp, Artificial Sequence
  ENSG00000213341_11 (sequence is synthesized)
aattatacagctgcgtaaagtgtgggctgaagcagtgcactatgtgtctggactaaaagaagactatagcaggctctttcagggacaaagggcagcaatgttaagtcttcttagatataa

SEQ ID NO: 754878 - DNA, 120 bp, Artificial Sequence
  ENSG00000213341_12 (sequence is synthesized)
tgctaacttaacaaaaatgaagaacactttgatctcagcatcacaacaactgaaagctaaattggagttttttcacaaaagcattcagcttgacttggagagatacagcgagcagatgac

SEQ ID NO: 754879 - DNA, 120 bp, Artificial Sequence
  ENSG00000213341_13 (sequence is synthesized)
gtatgggatatcttcagaaaaaatgctaaaagcatggaaagaaatggaagaaaaggccatccactatgctgaggttggtgtcattggatacctggaggatcagattatgtctttgcatgc

SEQ ID NO: 754880 - DNA, 120 bp, Artificial Sequence
  ENSG00000213341_14 (sequence is synthesized)
tgaaatcatggagctacagaagagcccctatggaagacgtcagggagacttgatggaatctctggaacagcgtgccattgatctatataagcagttaaaacacagaccttcagatcactc

SEQ ID NO: 754881 - DNA, 120 bp, Artificial Sequence
  ENSG00000213341_15 (sequence is synthesized)
ctacagtgacagcacagagatggtgaaaatcattgtgcacactgtgcagagtcaggaccgtgtgctcaaggagctgtttggtcatttgagcaagttgttgggctgtaagcagaagattat

SEQ ID NO: 754882 - DNA, 120 bp, Artificial Sequence
  ENSG00000213341_16 (sequence is synthesized)
tgatctactccctaaggtggaagtggccctcagtaatatcaaagaagctgacaatactgtcatgttcatgcagggaaaaaggcagaaagaaatatggcatctccttaaaattgcctgtac

SEQ ID NO: 754883 - DNA, 120 bp, Artificial Sequence
  ENSG00000213341_17 (sequence is synthesized)
acagagttctgcccggtcccttgtaggatccagtctagaaggtgcagtaacccctcagacatcagcatggctgcccccgacttcagcagaacatgatcattctctgtcatgtgtggtaac

SEQ ID NO: 754884 - DNA, 120 bp, Artificial Sequence
  ENSG00000213341_18 (sequence is synthesized)
tcctcaagatggggagacttcagcacaaatgatagaagaaaatttgaactgccttggccatttaagcactattattcatgaggcaaatgaggaacagggcaatagtatgatgaatcttga

SEQ ID NO: 754885 - DNA, 120 bp, Artificial Sequence
  ENSG00000213341_19 (sequence is synthesized)
ttggagttggttaacagaatgagttgtcacttgttcactgtccccaaacctatggaagttgttgctatacatgttggaaatgtgtttttcccccatgaaaccattcttcagacatcagtc

SEQ ID NO: 754886 - DNA, 120 bp, Artificial Sequence
  ENSG00000213341_20 (sequence is synthesized)
aatggaagaaatggctatgaacagaaactacatttctactatgatcagaagaacatgattttacaagtataacagttttgagtaattcaagcctctaaacagacaggaatttagaaaaag

SEQ ID NO: 754887 - DNA, 120 bp, Artificial Sequence
  ENSG00000213341_21 (sequence is synthesized)
tcaatgtacttgtttgaatatttgttttaataccacagctatttagaagcatcatcacgacacatttgccttcagtcttggtaaaacattacttatttaactgattaaaaataccttcta

SEQ ID NO: 754888 - DNA, 120 bp, Artificial Sequence
  ENSG00000213341_22 (sequence is synthesized)
tgtattagtgtcaacttttaacttttgggcgtaagaccaaatgtagttttgtatacagagaagaaaacctcaagtaataggcattttaagtaaaagtctacctgtgtttttttctaaaaa

SEQ ID NO: 754889 - DNA, 120 bp, Artificial Sequence
  ENSG00000213341_23 (sequence is synthesized)
ggctgctcacaagttctatttcttgaagaataaattctacctccttgtgttgcactgaacaggttctcttcctggcatcataaggagttggtgtaatcattttaaattccactgaaaatt

SEQ ID NO: 754890 - DNA, 120 bp, Artificial Sequence
  ENSG00000213341_24 (sequence is synthesized)
taacagtatccccttctcatcgaagggattgtgtatctgtgcttctaatattagttggctttcataaatcatgttgttgtgtgtatatgtatttaagatgtacatttaataatatcaaag

SEQ ID NO: 754891 - DNA, 120 bp, Artificial Sequence
  ENSG00000213341_25 (sequence is synthesized)
agaagatgcctgttaatttataatgtatttgaaaattacatgttttttcatttgtaaaaatgagtcatttgtttaaacaatctttcatgtcttgtcatacaaatttataaaggtctgcac

SEQ ID NO: 754892 - DNA, 120 bp, Artificial Sequence
  ENSG00000213341_26 (sequence is synthesized)
tcctttatctgtaattgtaattccaaaatccaaaaagctctgaaaacaaggtttccataagcttggtgacaaaattcatttgcttgcaatctaatctgaactgaccttgaatctttttat

SEQ ID NO: 754893 - DNA, 120 bp, Artificial Sequence
  ENSG00000213341_27 (sequence is synthesized)
cccatttagtgtgaatattcctttattttgctgcttgatgatgagagggagggctgctgccacagactgtggtgagggctggttaatgtagtatggtatatgcacaaaactacttttcta

SEQ ID NO: 754894 - DNA, 120 bp, Artificial Sequence
  ENSG00000213341_28 (sequence is synthesized)
aaatctaaaatttcataattctgaaacaacttgccccaagggtttcagagaaaggactgtggacctctatcatctgctaagtaatttagaagatattatttgtcttaaaaaatgtgaaat

SEQ ID NO: 754895 - DNA, 120 bp, Artificial Sequence
  ENSG00000213341_29 (sequence is synthesized)
tgtgaaatgcttttatattctaatagtttttcactttgtgtattaaatggtttttaaattactttcttgatctctattcattataaaaatcagattataataaaacagttgaatatggct

SEQ ID NO: 754896 - DNA, 120 bp, Artificial Sequence
  ENSG00000213341_30 (sequence is synthesized)
gactcccagttttctggctaatgaatcagataccacagatacacagtgatagcatttgtttaggttatattttttaaaactttgaggcagccctgtcaacataccatgaagctcagaaat

SEQ ID NO: 754897 - DNA, 120 bp, Artificial Sequence
  ENSG00000213341_31 (sequence is synthesized)
aaactgctacccaggtagcttctttgagtgtcaccttgagtgacaaactgtaacaagattgtgtctgtcattggggcctattatataatcacacttgatttgtggcctctattgtctttt

SEQ ID NO: 754898 - DNA, 120 bp, Artificial Sequence
  ENSG00000213341_32 (sequence is synthesized)
ctagcttagagttgacttgaatctcttgttcatctgaaatggttaaaaccagctttcttcattatcctggagaaggctaaagttctgagggctttcactgtcttaaggagctagttatat

SEQ ID NO: 754899 - DNA, 120 bp, Artificial Sequence
  ENSG00000213341_33 (sequence is synthesized)
gagaaagctcttggcttggtccatggtatttaggaaggaatgctgtttggagaagaacctttttggagccttgcatttgattgttggtgaggaggagacaacagagatgtgtggggaata

SEQ ID NO: 754900 - DNA, 120 bp, Artificial Sequence
  ENSG00000213341_34 (sequence is synthesized)
aagttgggctatgggggaagtatttggagtgatagataacaaaggacacaacgttttttaaacctcctttgatgctcatcatttcctttttggtaaaatgggggtaacaaaagtagtctt

SEQ ID NO: 754901 - DNA, 120 bp, Artificial Sequence
  ENSG00000213341_35 (sequence is synthesized)
ctcacatgactgctgtgaggattaaatgggaaaattataagcagagagtagcaaatattattattattgcatttaggcttaattattgtccaaagaatataccagcatgatgcataagca

SEQ ID NO: 754902 - DNA, 120 bp, Artificial Sequence
  ENSG00000213341_36 (sequence is synthesized)
actttcaactcctttagccattttctgaaatataacaattaatgatttttttttaaaatcgaggtcacattttaaactgtagaacccattgtgaccaacagccatcccatttgagggtat

SEQ ID NO: 754903 - DNA, 120 bp, Artificial Sequence
  ENSG00000213341_37 (sequence is synthesized)
ctggctgctgccagttggctttaagatgtcatactgccctcaaatggaactttcaggatgtctacaggtccctttactagttggtttcaatgagcttttttcaaagtttttctgggttgt

SEQ ID NO: 754904 - DNA, 120 bp, Artificial Sequence
  ENSG00000213341_38 (sequence is synthesized)
aaacagacggataaacatgaaattccaagcaacctagttcaagggcctccttcctttaggtaatgaaagtttgatgaattgtcctactgtttctaaatatgtggttaatcatccaagaaa

SEQ ID NO: 754905 - DNA, 120 bp, Artificial Sequence
  ENSG00000213341_39 (sequence is synthesized)
aattgttcccttggccagaggctgcatttgtgtctagggcttgggttagtatgggttaaagatagccaagactattgttctcaagcacaggcaactaaggtctcttactgataaatttat

SEQ ID NO: 754906 - DNA, 120 bp, Artificial Sequence
  ENSG00000213341_40 (sequence is synthesized)
tcaagcacaggcaactaaggtctcttactgataaatttatatatacattatacacctgcaaactttattttttatatataactagattttatttataggtaatctttatatcttttatct

SEQ ID NO: 754907 - DNA, 120 bp, Artificial Sequence
  ENSG00000213341_41 (sequence is synthesized)
aaattagtttcagagtttcagggatttttgaggaattttttgtttggaggctgatatgttacagaagaaaggttatatccactgactgatgtcttttatagatcactcctacagtgacag

SEQ ID NO: 754908 - DNA, 120 bp, Artificial Sequence
  ENSG00000213341_42 (sequence is synthesized)
cacagagatggtgaaaatcattgtgcacactgtgcagagtcaggaccgtgtgctcaaggagctgtttggtcatttgaggtaggaaaattgcttcatttcctactgaaaaaccaggatacg

SEQ ID NO: 754909 - DNA, 120 bp, Artificial Sequence
  ENSG00000213341_43 (sequence is synthesized)
tttatcttgttcctctcaaagtacaaaagccctctttggtaaagtatacttacccaggaagaattctgaaggtaccttgggtagcttggccatagctatctgcatttatgtgtccttttg

SEQ ID NO: 754910 - DNA, 120 bp, Artificial Sequence
  ENSG00000213341_44 (sequence is synthesized)
tatgcattactttggagataagtcattaaatctgatgctgattgtggttcatttcctcagctgggttttgggaatatggtgtacagtcttggggcatgtgaaagtgtctgacactgattt

SEQ ID NO: 754911 - DNA, 120 bp, Artificial Sequence
  ENSG00000213341_45 (sequence is synthesized)
tgggccctcttgaagacatgtatattttgcattgggatgacatccatgttccttgcttggtgtccagactagcaattgagatgcaggacttattatcatctctcctttccaatttctctg

SEQ ID NO: 754912 - DNA, 120 bp, Artificial Sequence
  ENSG00000213341_46 (sequence is synthesized)
ttgttatactcctcttagcccttgactactgtggtattccaacctaacttggggatagatgtacctgcctagataatgaaattgaccatctattcaactgggttttttttttctttcttc

SEQ ID NO: 754913 - DNA, 120 bp, Artificial Sequence
  ENSG00000213341_47 (sequence is synthesized)
aactaaaatggtataagatgagtggatatatttggttttagtcaatgaagaaagggtccaaggacaggttactaatggtgtgtaaaggtgggaatagttttgtactgaaatactctggtt

SEQ ID NO: 754914 - DNA, 120 bp, Artificial Sequence
  ENSG00000213341_48 (sequence is synthesized)
gcagtggtataggaatgaggcagtagttgttaaggtagtcttctgtgccttcagaccagggttgagtcctgactatccctttgtaataatcttaggcaacttacttgacttttttgatgt

SEQ ID NO: 754915 - DNA, 120 bp, Artificial Sequence
  ENSG00000213341_49 (sequence is synthesized)
tcatatttcctcacctgtaaaacaggaatgtctcatagaactgctgtggaaatttgattagacaatgtatataaagtgcttgggaaataaatgttcagcaaatgttgcgtattattagct

SEQ ID NO: 754916 - DNA, 120 bp, Artificial Sequence
  ENSG00000213341_50 (sequence is synthesized)
caaatgttgcttattattagctaagtccaagttctaagtcctttcttttattggcttattactttcttttactcaaaccttactccttcattaacagtttatgagaaattatgctatcat

SEQ ID NO: 754917 - DNA, 120 bp, Artificial Sequence
  ENSG00000213341_51 (sequence is synthesized)
tttgcatttatcattttggggatccttgattacccttctaataaatttttgagatctattttataactttgtatttctaagattagacttttttcagtgttttaaatcagttttgcaaga

SEQ ID NO: 754918 - DNA, 120 bp, Artificial Sequence
  ENSG00000213341_52 (sequence is synthesized)
actcagattccaagccctatattttattaattcctactcttttgctaaaagctgaatgactatccatttctgttattttctcagcttaagatgtgccgtatccaaagccagtggctcttt

SEQ ID NO: 754919 - DNA, 120 bp, Artificial Sequence
  ENSG00000213341_53 (sequence is synthesized)
gctagcttgtgtattgtcgcttttctcacaactcatggagacctctacagcaccagcatttcctggaagctctgcccataattagttttgcagaagtgcagccatgttacatcactgctc

SEQ ID NO: 754920 - DNA, 120 bp, Artificial Sequence
  ENSG00000213341_54 (sequence is synthesized)
tggcatttgggatgcatatgggaaatagaagaactcaagaggaaagagcatttggggaatatcctcaaccttaaatccttatctgccgttactcagggatatactaggattatgtcatca

SEQ ID NO: 754921 - DNA, 120 bp, Artificial Sequence
  ENSG00000213347_0 (sequence is synthesized)
cggccggaggccccgcccccgcggcacccacgtgcagcggctgggcccggcgctttcaggggaccaccaggcccccagagcgccgtgctatgttgggggctagtcactagcacggggctg

SEQ ID NO: 754922 - DNA, 120 bp, Artificial Sequence
  ENSG00000213347_1 (sequence is synthesized)
gaagctgagatcaaagacgccaatgagccggcgtgggtggatgagtgaggcgggcaagaagcagcaccggttagcctgagggttcgctccagggccaggcctggagccagcgcccttacc

SEQ ID NO: 754923 - DNA, 120 bp, Artificial Sequence
  ENSG00000213347_2 (sequence is synthesized)
tgcccctggaaagtctgagaccactcggggcggggcggctgccggagggtgggctgcggctccgtggcgggttccagaggggcggagccaagggctgggcgttcccgcgggcggggcgtc

SEQ ID NO: 754924 - DNA, 120 bp, Artificial Sequence
  ENSG00000213347_3 (sequence is synthesized)
ccgggggcggggcgggcccctgtgtttgttgcaccgtgtcagttactttgtaacaaaagtgctgcagccgcttgctccggccggcaccctaggccggcccgccgccagctgtcgccgaca

SEQ ID NO: 754925 - DNA, 120 bp, Artificial Sequence
  ENSG00000213347_4 (sequence is synthesized)
tggaacccttggccagcaacatccaggtcctgctgcaggcggccgagttcctggagcgccgtgagagagaggccgagcatggttatgcgtccctgtgcccgcatcgcagtccaggcccca

SEQ ID NO: 754926 - DNA, 120 bp, Artificial Sequence
  ENSG00000213347_5 (sequence is synthesized)
tccacaggaggaagaagcgacccccccaggctcctggcgcgcaggacagcgggcggtcagtgcacaatgaactggagaagcgcaggagggcccagttgaagcggtgcctggagcggctga

SEQ ID NO: 754927 - DNA, 120 bp, Artificial Sequence
  ENSG00000213347_6 (sequence is synthesized)
gctgagcctgctgcgccgtgccaggatgcacatccagaagctggaggatcaggagcagcgggcccgacagctcaaggagaggctgcgcagcaagcagcagagcctgcagcggcagctgga

SEQ ID NO: 754928 - DNA, 120 bp, Artificial Sequence
  ENSG00000213347_7 (sequence is synthesized)
gcagctccgggggctggcaggggcggccgagcgggagcggctgcgggcggacagtctggactcctcaggcctctcctctgagcgctcagactcagaccaagaggagctggaggtggatgt

SEQ ID NO: 754929 - DNA, 120 bp, Artificial Sequence
  ENSG00000213347_8 (sequence is synthesized)
ggagagcctggtgtttgggggtgaggccgagctgctgcggggcttcgtcgccggccaggagcacagctactcgcacggcggcggcgcctggctatgatgttcctcacccagggcgggcct

SEQ ID NO: 754930 - DNA, 120 bp, Artificial Sequence
  ENSG00000213347_9 (sequence is synthesized)
ctgccctctactcgtgccaggcccacttgccaggcaggagccctccccaagccttcagggctgctcggagtcacctgttggaatggactaaaaggacccttgtgtgggaacaggtgctcc

SEQ ID NO: 754931 - DNA, 120 bp, Artificial Sequence
  ENSG00000213347_10 (sequence is synthesized)
ccaaacaccctgctgctggctgccaggcaggccctctggaagggaaggggcaggactcatcaggacctccctggacccctgcagggcaggcagcttgggcccgagcccaagcatttggct

SEQ ID NO: 754932 - DNA, 120 bp, Artificial Sequence
  ENSG00000213347_11 (sequence is synthesized)
ctgctgcccccaaggggacaggaagcctcttgggcctcttcccttcctggacaaggccccctgcctttgcctcacataaactgtacagtattttcattaaaagcctctttcataacttcc

SEQ ID NO: 754933 - DNA, 120 bp, Artificial Sequence
  ENSG00000213347_12 (sequence is synthesized)
gtgggggtgggggtgggcgccgcccctggtcgggccctcctctgcccacttgttgcttgcatcttttgggccaggtgtcccgctccaggaagcgttcagacccctcctgccatctcccca

SEQ ID NO: 754934 - DNA, 120 bp, Artificial Sequence
  ENSG00000213347_13 (sequence is synthesized)
ctctccaaacacactcacacctttctattcattcaaggactatttcttgagcacctctagatgtgccgggaactgccaacagcagttggggtcccgcttccactcgcactcccgcacccc

SEQ ID NO: 754935 - DNA, 120 bp, Artificial Sequence
  ENSG00000213347_14 (sequence is synthesized)
acacatcaggccactcacctcccccgctggcttcctcctcttctctcctctccccagccctttgcatatgctgttccctcctatttgaatgcccctccctccagtaccggcttgggaaac

SEQ ID NO: 754936 - DNA, 120 bp, Artificial Sequence
  ENSG00000213347_15 (sequence is synthesized)
atctgtttccgcagttagctgtcacctctgggaggtcctttctggccagctggcaggcgcccttgttagggccctcatacccacctgggcaggcttctgttaagcatttggctccgtgtg

SEQ ID NO: 754937 - DNA, 120 bp, Artificial Sequence
  ENSG00000213347_16 (sequence is synthesized)
tctttgactcccctcgccctgccaggggactctggtgtctgaggccagcatgagctctccacaggggacttgtttggggcagacatctgtagtggctcttgagccactgggggccctggg

SEQ ID NO: 754938 - DNA, 120 bp, Artificial Sequence
  ENSG00000213347_17 (sequence is synthesized)
attggggcatgggcagtagctgattccccttcacctcatcctctctggcattggcaggtcagtgcacaatgaactggagaagcgcaggtgagtcccagtcctgccctgacagcgccagcc

SEQ ID NO: 754939 - DNA, 120 bp, Artificial Sequence
  ENSG00000213347_18 (sequence is synthesized)
cccaggggccactgccctctggccttccctcccctgccattcctgtggccggcaaggtggggctggcactgccctccagacctcttccccacaggagggcccagttgaagcggtgcctgg

SEQ ID NO: 754940 - DNA, 120 bp, Artificial Sequence
  ENSG00000213347_19 (sequence is synthesized)
ggcaagactagcctggtggagcgctacgtgcacgaccgctttctggtggggccttatcagaacaccatcggggccgccttcgtggccaaggtgatgtcggtcggagaccggactgtgaca

SEQ ID NO: 754941 - DNA, 120 bp, Artificial Sequence
  ENSG00000213347_20 (sequence is synthesized)
ttaggtatttgggacacagcaggctctgagcgctatgaggccatgagtagaatctactatcggggtgccaaggctgccatcgtctgctatgacctcacagacagcagcagctttgagcga

SEQ ID NO: 754942 - DNA, 120 bp, Artificial Sequence
  ENSG00000213347_21 (sequence is synthesized)
gcaaagttctgggtgaaggaactgcgcagcctagaggagggctgccaaatctacttatgtggcaccaagagtgacctgctggaagaagaccggaggcgtcgacgtgtggacttccacgac

SEQ ID NO: 754943 - DNA, 120 bp, Artificial Sequence
  ENSG00000213347_22 (sequence is synthesized)
gtccaggactatgcagacaatatcaaagctcagctctttgaaacatccagcaagacaggccagagtgtggacgagctcttccagaaagtggcagaggattacgtcagtgtggctgccttc

SEQ ID NO: 754944 - DNA, 120 bp, Artificial Sequence
  ENSG00000213347_23 (sequence is synthesized)
caggtgatgacagaggacaagggcgtggatctgggccagaagccaaacccctacttctacagctgttgtcatcactgagtcagcactcacctggcctgggggaattaaaggaattccccg

SEQ ID NO: 754945 - DNA, 120 bp, Artificial Sequence
  ENSG00000213347_24 (sequence is synthesized)
taagggctggacccagctcctttctgggcttgggtagtcaaatgtctgagctaccccaggtcctcatgtcagcagagtggcgcctgcctgtgctggcccatggaacggagacagcattgg

SEQ ID NO: 754946 - DNA, 120 bp, Artificial Sequence
  ENSG00000213347_25 (sequence is synthesized)
gctgactgtgggcatgaggagggataaggctgatttggaccccaggcttctgccctggacagcacttgtgtctgcagattatttaagtggcttttgatctgtaaataaaatcagtgcact

SEQ ID NO: 754947 - DNA, 120 bp, Artificial Sequence
  ENSG00000213347_26 (sequence is synthesized)
ttggccctgtggccgtggcccggtactgagtggtgctggggtgcagcccaagcccccacgccgctgaccccagccccttgctcctttgggatccgcagaagctggaggatcaggagcagc

SEQ ID NO: 754948 - DNA, 120 bp, Artificial Sequence
  ENSG00000213347_27 (sequence is synthesized)
ccaaccacagacccactggaagaggaaataatatcagttcccatcactgacactgttggccgtgccaggcagtgcacttaattctcacaacttgaggctgttctgtctccacttcacgga

SEQ ID NO: 754949 - DNA, 120 bp, Artificial Sequence
  ENSG00000213347_28 (sequence is synthesized)
tggtagaaatgaggctgagtgacgtgactcgcctgaggtccaaaaacagtgaagccaagattcaaaccagagccttccgactccagagctggggccaactgaattcaacaagtatttatt

SEQ ID NO: 754950 - DNA, 120 bp, Artificial Sequence
  ENSG00000213347_29 (sequence is synthesized)
gagtgtctattatgtgctagatactgagacacatcagagaacaaaaccaaaagccctgcccttgtcgggcttacagtctagcacttaccgccagttaacctgcaggctacctggagcccc

SEQ ID NO: 754951 - DNA, 120 bp, Artificial Sequence
  ENSG00000213347_30 (sequence is synthesized)
gggcaagtcaccgcacctctgtgcctcggtcctcagctgcccaatgggagaataagcagacctggctcagacatgaatcatgtgcttggtgtactgcagatgccaaactgcatccccaca

SEQ ID NO: 754952 - DNA, 120 bp, Artificial Sequence
  ENSG00000213347_31 (sequence is synthesized)
gtagactggctacacaaactgttgctgctgctgctgcttcttggtggccgccttgctggcgaggtccttggccttctctgtagctgccagtgccgtctcctttgccttctccttggcttc

SEQ ID NO: 754953 - DNA, 120 bp, Artificial Sequence
  ENSG00000213347_32 (sequence is synthesized)
cttggctgtctcaacaagtgttttggaaggggcctcgcctgtcgcgaacggcaggtggctgcctttagaagatgcctgaaagaccaacctaatttccctcccccatgacaccaatctcct

SEQ ID NO: 754954 - DNA, 120 bp, Artificial Sequence
  ENSG00000213347_33 (sequence is synthesized)
ctgggccaggctccactaaaaaggtggtattcaccctcctcccacccccagtacagacaaggagtcccagctcagagcagggcaatgactaacccagactccacgcccgctaggctgaat

SEQ ID NO: 754955 - DNA, 120 bp, Artificial Sequence
  ENSG00000213347_34 (sequence is synthesized)
gagcctctccctatgaggaatatccacatacccagaaactcaccttgcagcttagccaagatatattcaaaacccttcatagtcttggtcacgttgcttttgaatcgggcaagaccaaat

SEQ ID NO: 754956 - DNA, 120 bp, Artificial Sequence
  ENSG00000213347_35 (sequence is synthesized)
tcctggcatgagatgagaatgggaaggatactgagttgcccactgaccccagcccagccccaacaccgaaagcactgggtcccagagccccagcagccccaacaacactgctcacctgga

SEQ ID NO: 754957 - DNA, 120 bp, Artificial Sequence
  ENSG00000213347_36 (sequence is synthesized)
cagctctggagacaccaaataagctagaggagacccaggcttcccggcggatttcagtccagccactgttgtcagagttcacacagtaaacacatcgttcctccaccacctatgcagagg

SEQ ID NO: 754958 - DNA, 120 bp, Artificial Sequence
  ENSG00000213347_37 (sequence is synthesized)
ccaaccacaatcgtggaacagtctttcattttgccaacttgcacataaatctgactccctgtcacttttcatgaggcgaagcaatacaatgaaaatccattccttcccctgactgcacct

SEQ ID NO: 754959 - DNA, 120 bp, Artificial Sequence
  ENSG00000213347_38 (sequence is synthesized)
ccaagtggcactgacagaacaagaagccataaataaggtcgttttgctctcgaaaacctctcttctgactcttaaactagaaggcaaaaggtctctctcttgagatcaacaaagggcctt

SEQ ID NO: 754960 - DNA, 120 bp, Artificial Sequence
  ENSG00000213347_39 (sequence is synthesized)
ccagcccatcctgctcctggattttgttttgtgcatctagacgcatgcagtgttttagccgccttccaccagctgcagctctggagcttcctgacagtccaaataaaaacatttgcccgg

SEQ ID NO: 754961 - DNA, 120 bp, Artificial Sequence
  ENSG00000213347_40 (sequence is synthesized)
gaagcgacccccccaggctcctggcgcgcaggacagcgggcggagggcccagttgaagcggtgcctggagcggctgaagcagcagatgcccctgggggccgactgtgcccggtacaccac

SEQ ID NO: 754962 - DNA, 120 bp, Artificial Sequence
  ENSG00000213366_0 (sequence is synthesized)
acaaacgctgagccccgccccgctgaggcctgtctgcagaatccacagcaaccagcaccatgcccatgacactggggtactggaacatccgcgggctggcccattccatccgcctgctcc

SEQ ID NO: 754963 - DNA, 120 bp, Artificial Sequence
  ENSG00000213366_1 (sequence is synthesized)
tggaatacacagactcaagctacgaggaaaagaagtacacgatgggggacgctcctgattatgacagaagccagtggctgaatgaaaaattcaagctgggcctggactttcccaatctgc

SEQ ID NO: 754964 - DNA, 120 bp, Artificial Sequence
  ENSG00000213366_2 (sequence is synthesized)
cctacttgattgatgggactcacaagatcacccagagcaacgccatcctgcggtacattgcccgcaagcacaacctgtgcggggaatcagaaaaggagcagattcgcgaagacattttgg

SEQ ID NO: 754965 - DNA, 120 bp, Artificial Sequence
  ENSG00000213366_3 (sequence is synthesized)
agaaccagtttatggacagccgtatgcagctggccaaactctgctatgacccagattttgagaaactgaaaccagaatacctgcaggcactccctgaaatgctgaagctctactcacagt

SEQ ID NO: 754966 - DNA, 120 bp, Artificial Sequence
  ENSG00000213366_4 (sequence is synthesized)
tttgagcccagctgcctggatgccttcccaaacctgaaggacttcatctcccgatttgagggcttggagaagatctctgcctacatgaagtccagccgcttcctcccaagacctgtgttc

SEQ ID NO: 754967 - DNA, 120 bp, Artificial Sequence
  ENSG00000213366_5 (sequence is synthesized)
acaaagatggctgtctggggcaacaagtagggccttgaaggccaggaggtgggagtgaggagcccatactcagcctgctgcccaggctgtgcagcgcagctggactctgcatcccagcac

SEQ ID NO: 754968 - DNA, 120 bp, Artificial Sequence; identical to SEQ ID NO: 308664
  ENSG00000213366_6 (sequence is synthesized)

SEQ ID NO: 754969 - DNA, 120 bp, Artificial Sequence; identical to SEQ ID NO: 308665
  ENSG00000213366_7 (sequence is synthesized)

SEQ ID NO: 754970 - DNA, 120 bp, Artificial Sequence; identical to SEQ ID NO: 308666
  ENSG00000213366_8 (sequence is synthesized)

SEQ ID NO: 754971 - DNA, 120 bp, Artificial Sequence
  ENSG00000213366_9 (sequence is synthesized)
gcaagcacaacctgtgtgagtagatttggttgcaagatgcggggagggaccgtggcctcctcctcggcttggctgggctgtgaggctgagagtgaatctgctttacgagggtaggcgggg

SEQ ID NO: 754972 - DNA, 120 bp, Artificial Sequence
  ENSG00000213366_10 (sequence is synthesized)
gcctgctttaggaatacacaaactatgaggaaaacaagtgcaaaacaaaggagtaatggcacctgaaattttggtgtcttccgagtgctctcttgacatacactgagatcagcgaatttt

SEQ ID NO: 754973 - DNA, 120 bp, Artificial Sequence
  ENSG00000213366_11 (sequence is synthesized)
cctaacagacagcttaggggcagccagaggctctttttccccctcctttcttccacttatcctctgaatatctcctcatctttccagaaaccactcaatgtccattgtattctactgctg

SEQ ID NO: 754974 - DNA, 120 bp, Artificial Sequence
  ENSG00000213366_12 (sequence is synthesized)
cccaactaggaggaaatttctacttctttctctgagctcctttagttctttgcatccttgattctgctcatatctggtccagagcctaccaggtgctcaggtgctcctggggctgaccca

SEQ ID NO: 754975 - DNA, 120 bp, Artificial Sequence
  ENSG00000213366_13 (sequence is synthesized)
gaggttgttgggaggtcagtggggacagatttagggacagtgtcacattccgctctgccatcccatcacctcagaaagactccagctacccagttggagtctaataaatgctgatgtatc

SEQ ID NO: 754976 - DNA, 120 bp, Artificial Sequence
  ENSG00000213366_14 (sequence is synthesized)
ctcctgatccccgtccacagacccactttccccgctggtgtgatccttgtggccactatggcagctactttggagagccgctagtccagtccttcccgccttccgcagagctctactcct

SEQ ID NO: 754977 - DNA, 120 bp, Artificial Sequence
  ENSG00000213366_15 (sequence is synthesized)
gcttctgaagaagccacctggggcctggccttcttcctggctcctcagagtccttgcaacagcaggcactacttctctctcctgcactcaacccctctcccactccactgcctctcagtg

SEQ ID NO: 754978 - DNA, 120 bp, Artificial Sequence
  ENSG00000213366_16 (sequence is synthesized)
tgccaaaacacgaagatgtgtcctgattttcaaaatctctcccctgaagttcccacctgatatgtagttggagatgggcaaatacagcgtccttgaagcatcattttattcatagtgcct

SEQ ID NO: 754979 - DNA, 120 bp, Artificial Sequence
  ENSG00000213366_17 (sequence is synthesized)
cttcccaaacctgaaggacttcatctcccgatttgaggtgttccccctgtgagatgagtagcacgctgattttactcctgttcactgaccttctcctctgcatgaggcagggtgtgaggc

SEQ ID NO: 754980 - DNA, 120 bp, Artificial Sequence
  ENSG00000213366_18 (sequence is synthesized)
acagtgggagatgcatagatgacagccccatcctggaaatgagtgcagtgagaggcctgcaggcagagcagcctgtgaagtgtgtgctgaacttgtttgagagcagcaaatcctacatta

SEQ ID NO: 754981 - DNA, 120 bp, Artificial Sequence
  ENSG00000213366_19 (sequence is synthesized)
ctacagatttggggatttgaggcatttgtccaacaggcttctgagccttgaatctgtttcccttttccactccccatcaagagatctgcttgctcagctagttcccatcagctctggttc

SEQ ID NO: 754982 - DNA, 120 bp, Artificial Sequence
  ENSG00000213366_20 (sequence is synthesized)
tatgcagctggccaaactctgctatgacccagattttgcactccctgaaatgctgaagctctactcacagtttctggggaagcagccatggtttcttggggacaagatcacctttgtgga

SEQ ID NO: 754983 - DNA, 86 bp, Artificial Sequence
  ENSG00000213366_21 (sequence is synthesized)
aaggaatgaccaaatatattaatacgacttttctccccatctaattaagaataagtcgtaacttctcttagaagcaaaatttattc

SEQ ID NO: 754984 - DNA, 120 bp, Artificial Sequence
  ENSG00000213366_22 (sequence is synthesized)
attctgaaatatctgctagctgtaataaagaaattaatgtactttatgttcttaactcccacaatttagcctaaatacttgccctggcatgcttatactgatccaaacaagcatgaggtc

SEQ ID NO: 754985 - DNA, 71 bp, Artificial Sequence
  ENSG00000213366_23 (sequence is synthesized)
ttccacaagtgagttcccccttcctttgttctcctctgcctctgcctcttttaaaaagttctaagttgcta

SEQ ID NO: 754986 - DNA, 120 bp, Artificial Sequence
  ENSG00000213366_24 (sequence is synthesized)
agtctcccctttccctgcagagtttgtgtccaaaattgattccttctggtgagttcttggtcttgctgactctaagaatgaagccgcggtcctacacggtgagtgttacagttcttaaag

SEQ ID NO: 754987 - DNA, 120 bp, Artificial Sequence
  ENSG00000213366_25 (sequence is synthesized)
ttgttccttcagatgttcagatgtgtccgcagtttcttccttccggtgggtttgtggtcttgctgacttcaggggtgaagccgcagaccttcgcagtgagtgctacagctcttaaaggtg

SEQ ID NO: 754988 - DNA, 120 bp, Artificial Sequence
  ENSG00000213366_26 (sequence is synthesized)
gggtgaagccgcagaccttcgcagtgagtgctacagctcttaaaggtggcgcgtctggagttgtttattcctcttggtgggttcatggtctggctggcttcaggagtgaagctgcagacc

SEQ ID NO: 754989 - DNA, 120 bp, Artificial Sequence
  ENSG00000213366_27 (sequence is synthesized)
aacccaaagagtgagcaacagcaggatttatggtgacgagtgaaagaaaatacacttccacagcctggaagacaacctgagcaggttgctactgctgcttgggaagggcggaggtggggg

SEQ ID NO: 754990 - DNA, 86 bp, Artificial Sequence
  ENSG00000213366_28 (sequence is synthesized)
ggagctcgagaaggaatctggatactgtgtgccggaccagccaaagaatcctgtgtcaaaaccgagagaacgaataagccttcatc

SEQ ID NO: 754991 - DNA, 61 bp, Artificial Sequence
  ENSG00000213366_29 (sequence is synthesized)
taatatggacatttatcagttcccaaattattactttttacatatgtcacctcaggaccac

SEQ ID NO: 754992 - DNA, 120 bp, Artificial Sequence
  ENSG00000213366_30 (sequence is synthesized)
aattgattgtaaaacatgtgtgtttgcacaatatgaaatcagtgcaccttgaagaagaacagaataacagtgatttttaggcaacaagagaagacaaccataaggtctgactgcgtgcag

SEQ ID NO: 754993 - DNA, 120 bp, Artificial Sequence
  ENSG00000213366_31 (sequence is synthesized)
caagagaagacaaccataaggtctgactgcgtgcagggtcaggcaaaatagagccatatttttcttcttgcagggagcctataaatggacatggaagtagggaagatattgctaaattct

SEQ ID NO: 754994 - DNA, 120 bp, Artificial Sequence
  ENSG00000213366_32 (sequence is synthesized)
tgctgaacatagacccttatcaggagttctacttttgcccttgtcctgtttcctcagaagcatgtgatctctgttctgttttttgccccttaaagcatgtgatctttgtacctacccccc

SEQ ID NO: 754995 - DNA, 120 bp, Artificial Sequence
  ENSG00000213366_33 (sequence is synthesized)
gatctttgtacctaccccccgttcgtacaccccctccccttttgcaatccttaataaaagcttgctggttttgaggctcgggccggcatcacggtcctactgatatgtgatgtcacccct

SEQ ID NO: 754996 - DNA, 120 bp, Artificial Sequence
  ENSG00000213366_34 (sequence is synthesized)
ttttactactgttaaacagggtcgcagtgaattacatcctgattttttggctaaattacaagatgctgttcaaaatctgtctctgatgattacgctcaaggtattctccttcatatgtta

SEQ ID NO: 754997 - DNA, 120 bp, Artificial Sequence
  ENSG00000213366_35 (sequence is synthesized)
gcttttgagaatgcgaaccatgagtgtaaagtggtcatgcgttctgtctaatgacaaaatttacctgatcacgaggtgtgcctgcatatattaaagcttgtgaaagcattggatcagaga

SEQ ID NO: 754998 - DNA, 120 bp, Artificial Sequence
  ENSG00000213366_36 (sequence is synthesized)
cccacaaagctattctgtgggcacgggccatgaaggatggcaatcaaactggcttgactgaattcttttcttggagcctgctataattgtggtcaacttcatcatacccaaaaaaattgc

SEQ ID NO: 754999 - DNA, 120 bp, Artificial Sequence
  ENSG00000213366_37 (sequence is synthesized)
actgttaaaagcggccaagccagctcaacaaacatggccaaatgctcctgctactgtttgccctcattgtcgtaaaggtaaacactgggcaagtacttgccactctaagtctgatataga

SEQ ID NO: 755000 - DNA, 120 bp, Artificial Sequence
  ENSG00000213366_38 (sequence is synthesized)
tggcaatcccttgccacagaaccagggaaatgggaagcagggccagtcccaggccccagtatcaaatgggacacctcagactcagaccaatattgtgtttctgcttcaagcggtcccaat

SEQ ID NO: 755001 - DNA, 120 bp, Artificial Sequence
  ENSG00000213366_39 (sequence is synthesized)
acagcccccagcacaagcaaatttacctacagccaacccagatgggtcccagtcgcttcttctgtctcagtacaatgcttgtctacctccacagtagggggcagggcggtcaatctctgt

SEQ ID NO: 755002 - DNA, 120 bp, Artificial Sequence
  ENSG00000213366_40 (sequence is synthesized)
agtaccactcctctaaatttactaccgaattctttgcctttaattgtccccacgggggccactggccctttacctcaaggtttggtgggcctggtgttaggtagggcatccacctctgct

SEQ ID NO: 755003 - DNA, 120 bp, Artificial Sequence
  ENSG00000213366_41 (sequence is synthesized)
aaaggtatcatagttcatactggtctcattaattctgattcctctgatgagattaaaataatcgtgtctgccaaggttcctgtttccattccggccagtgagtcaattgctcaactactt

SEQ ID NO: 755004 - DNA, 120 bp, Artificial Sequence
  ENSG00000213366_42 (sequence is synthesized)
ttactacctaatattgttttaaacaaaggagataagacagggggccctgggatgggctctggcggtgaaaaagccgcttattggattaaagtaatttctaaacaacagcccacctgcacc

SEQ ID NO: 755005 - DNA, 120 bp, Artificial Sequence
  ENSG00000213366_43 (sequence is synthesized)
atacatattaaaggaaaaaagtttgagggcctagtagatactggggctgatgtttctattatttcctctaatttatggccttcttcctggcttaaacatcccactaacatgggactagta

SEQ ID NO: 755006 - DNA, 120 bp, Artificial Sequence
  ENSG00000213366_44 (sequence is synthesized)
agggttggaaaagctgatgaagttcaccaaagcacatttatcttgccttgcactgggcctgatggtcaaaagggaacaattcagccttatatcatgccaatccccattaatctttggggt

SEQ ID NO: 755007 - DNA, 120 bp, Artificial Sequence
  ENSG00000213366_45 (sequence is synthesized)
agatatttgctggaacaatggggggctgaaattaatattccacataactcttctcgtgctcccagtcaacatataatggaaaacgtggggactgttcctggactcagtctcggtccaaaa

SEQ ID NO: 755008 - DNA, 120 bp, Artificial Sequence
  ENSG00000213366_46 (sequence is synthesized)
catgaaggaattactaaattcctttatggtttaaaagcataatttaaccactccccactcccaattccatttagcattgtttactttaaactttctaaatgttcctaaagacaatactct

SEQ ID NO: 755009 - DNA, 120 bp, Artificial Sequence
  ENSG00000213366_47 (sequence is synthesized)
gactgcagccgaacaccattatacaggcaaaaaattctccctaaatgaaagcaagccagtgttatggaaaaactcccagacaaatacctgggaacctggaacaattataatgtggggaag

SEQ ID NO: 755010 - DNA, 120 bp, Artificial Sequence
  ENSG00000213366_48 (sequence is synthesized)
catcaatcccctgtctgggtgcccactagaagactttaacttcgtgtgaatactgacaatgaaaaacacagggaagagatgtccacgtcagagactgccctcatacctggtgagatctgt

SEQ ID NO: 755011 - DNA, 120 bp, Artificial Sequence
  ENSG00000213366_49 (sequence is synthesized)
gactgccctcatacctggtgagatctgtgccaactcctcaaaaactggcacaccaaatcaaaatggatctcattcaatcctccctaatggcaacagagacccctctaactaatcccactt

SEQ ID NO: 755012 - DNA, 75 bp, Artificial Sequence
  ENSG00000213366_50 (sequence is synthesized)
tccctaatggcaacagagacccctctaactaatcccacttctcctaattacctttctttttctccttacaaacct

SEQ ID NO: 755013 - DNA, 120 bp, Artificial Sequence
  ENSG00000213366_51 (sequence is synthesized)
cagcactggatctcgcttacaataggttttatttaataattctactccttatactttctgtctcaccagtttcccctcacactgatttgcctgctacacaaaattattcttattgggctt

SEQ ID NO: 755014 - DNA, 89 bp, Artificial Sequence
  ENSG00000213366_52 (sequence is synthesized)
tccacttattcgacctctcacctggatgaatgctcctgcggaaatctacactaacgatagtgtgtagatgcctggagctatagatgacc

SEQ ID NO: 755015 - DNA, 120 bp, Artificial Sequence
  ENSG00000213366_53 (sequence is synthesized)
tactatgggttataaataccctcctctgtgcctcggacatgcaactcgttgtatccatctagaaactcaagtctgggctgcttatcttctggagagattagctacaggaaaatggggaca

SEQ ID NO: 755016 - DNA, 120 bp, Artificial Sequence
  ENSG00000213366_54 (sequence is synthesized)
tttggtctccggcctctccctttgtcctttaagacaaatgaaaaggggagtaataggagataccccatactttcaatataaacctgtaggaaaactatgtcctaaaaattttgagggccc

SEQ ID NO: 755017 - DNA, 77 bp, Artificial Sequence
  ENSG00000213366_55 (sequence is synthesized)
gagggcccatctaaaactttaatttggggagattgtgttaactcacatgcagtagtattaaaaaatgactcatatgt

SEQ ID NO: 755018 - DNA, 120 bp, Artificial Sequence
  ENSG00000213366_56 (sequence is synthesized)
tgggggaggggaattcctggaggctacttattttatttcttattgggaggacgaggatcatcatcctactttgcataggtggttcggctcattctttaccttaaaatgggaagataagga

SEQ ID NO: 755019 - DNA, 120 bp, Artificial Sequence
  ENSG00000213366_57 (sequence is synthesized)
ttctgagcccagaacacccagaactttcgaaattggctattgtcatgtctggactgccagtatctgtgattctgaaccccatgataaatcccctttgaacctttttcctctttttgatgc

SEQ ID NO: 755020 - DNA, 120 bp, Artificial Sequence
  ENSG00000213366_58 (sequence is synthesized)
atgataaatcccctttgaacctttttcctctttttgatgccgatcctcctttacgggactccaattggcattacgataattcttatcgacccaggtatgcccctctacttcttcagcatc

SEQ ID NO: 755021 - DNA, 120 bp, Artificial Sequence
  ENSG00000213366_59 (sequence is synthesized)
cccaggcacctcggtttgcttctttatggtggagaacatcgggcattgccaccgccgctcctctccctcagtatcaacatagattcaagcattctgctttgtttacctccaacctgacta

SEQ ID NO: 755022 - DNA, 120 bp, Artificial Sequence
  ENSG00000213366_60 (sequence is synthesized)
ttcctatacagagttgtgttaagcttccttacatgctgttagtggcaaatatcaaaatttggacaaacaatcaaactgtccaatgcattgtcatttatacacttgtgttgactcccgttt

SEQ ID NO: 755023 - DNA, 79 bp, Artificial Sequence
  ENSG00000213366_61 (sequence is synthesized)
actcagcattccacaagtgagttcccccttcctttgttctcctctgcctctgcctcttttaaaaagttctaagttgcta

SEQ ID NO: 755024 - DNA, 120 bp, Artificial Sequence
  ENSG00000213366_62 (sequence is synthesized)
tggaatacacagactcaagctacgaggaaaagaagtacacgatgggggacggtaatggcaccctcgagtctgggccctgccccctcacactaagttggcaccaagcaaccgatagtggcc

SEQ ID NO: 755025 - DNA, 120 bp, Artificial Sequence
  ENSG00000213366_63 (sequence is synthesized)
caggctgtcccttccctgagccctggtgagggagctccttgcaaggcagaatgctggggcgggatgctgggcccccgtctgggtaattatgatgggtgtccctcagggcttgcctaaacc

SEQ ID NO: 755026 - DNA, 120 bp, Artificial Sequence
  ENSG00000213366_64 (sequence is synthesized)
ctggaagccttagctgtgtggggtccagagccctcactggaattctttttctctgaatcctgggatgtgggactgagtggtcagattctagatccacctgtctcaggggtcttgccactg

SEQ ID NO: 755027 - DNA, 120 bp, Artificial Sequence
  ENSG00000213380_0 (sequence is synthesized)
ttcttcctgtcctaagttcggagtcagcgccccttgtggtccggaagggaagtgacgttgttgctgggaagatggcgaccgcggcgactatcccatcggtagccacggccacagcagcgg

SEQ ID NO: 755028 - DNA, 120 bp, Artificial Sequence
  ENSG00000213380_1 (sequence is synthesized)
ctctcggcgaggtggaggatgaagggctcctggcgtcgctgttccgggaccgcttccccgaggcccagtggcgcgagcggcccgatgtgggccgctacctccgggagttgagcggctcgg

SEQ ID NO: 755029 - DNA, 120 bp, Artificial Sequence
  ENSG00000213380_2 (sequence is synthesized)
ggctggagcggctgcggcgcgagcccgagcgcctggcggaggagcgggcgcagctgctgcagcagacgcgcgacttggccttcgctaactacaagaccttcatccgcggcgccgagtgca

SEQ ID NO: 755030 - DNA, 120 bp, Artificial Sequence
  ENSG00000213380_3 (sequence is synthesized)
ccgagcgcatccaccgcctgtttggcgacgtggaggcgtcgctcggccgcctgctcgaccgtttgcccagcttccagcagagctgcaggaactttgtgaaggaagccgaggagatcagct

SEQ ID NO: 755031 - DNA, 120 bp, Artificial Sequence
  ENSG00000213380_4 (sequence is synthesized)
ccaaccgccggatgaatagcctgaccctaaaccggcacacagaaattttggaaatactggagattcctcagctcatggacacctgtgtccggaacagttattatgaagaggccctggagc

SEQ ID NO: 755032 - DNA, 120 bp, Artificial Sequence
  ENSG00000213380_5 (sequence is synthesized)
ttgcagcctacgtacgccgactggagaggaaatactcttccatccctgtcatccagggcatcgtgaacgaagtgcgccagtccatgcagctgatgctgagccagctgatccagcaactga

SEQ ID NO: 755033 - DNA, 120 bp, Artificial Sequence
  ENSG00000213380_6 (sequence is synthesized)
ggaccaacatccagcttcctgcctgcctccgtgtcattggctacctgcggcgcatggacgtcttcactgaggctgagttgagggtgaagtttcttcaggcccgagatgcttggctccggt

SEQ ID NO: 755034 - DNA, 120 bp, Artificial Sequence
  ENSG00000213380_7 (sequence is synthesized)
ccatcctgactgccattcctaatgatgatccctatttccatattacaaaaaccatcgaggcctcccgtgtccatctctttgatatcatcacccagtaccgtgccatcttctcagacgagg

SEQ ID NO: 755035 - DNA, 120 bp, Artificial Sequence
  ENSG00000213380_8 (sequence is synthesized)
acccactgctgccccctgccatgggtgagcacactgtgaatgagagtgccatcttccatggctgggtgctacagaaggtctcacaattcctgcaggtgctggagaccgacctttaccggg

SEQ ID NO: 755036 - DNA, 120 bp, Artificial Sequence
  ENSG00000213380_9 (sequence is synthesized)
gcataggcggccacctggactctctgctgggccagtgcatgtactttgggctgtccttcagccgggtgggagctgatttccggggtcagttggctcctgttttccagcgggtggccatca

SEQ ID NO: 755037 - DNA, 120 bp, Artificial Sequence
  ENSG00000213380_10 (sequence is synthesized)
agtaacatgcctgctgctgtgccagccacccagccggggacgctgcagccacccatggtgctcctagatttcccacccctcgcctgctttctcaacaatattctggttgccttcaatgat

SEQ ID NO: 755038 - DNA, 120 bp, Artificial Sequence
  ENSG00000213380_11 (sequence is synthesized)
ctgcgcctctgctgccctgtggccctggcgcaggatgtgactggggccttggaagatgcccttgccaaggtaactaaaataatcctggccttccatcgcgctgaagaggctgccttcagc

SEQ ID NO: 755039 - DNA, 120 bp, Artificial Sequence
  ENSG00000213380_12 (sequence is synthesized)
agcggggagcaagagctctttgtccagttctgcactgtcttcctggaagaccttgttccgtatttaaatcgctgtctccaagtcctttttccaccagctcagatagcacagactttaggc

SEQ ID NO: 755040 - DNA, 120 bp, Artificial Sequence
  ENSG00000213380_13 (sequence is synthesized)
attcctcccactcagctctccaagtacggtaacctagggcatgtgaacatcggcgccattcaggagcccctcgcctttatcctgccaaagagagagacgcttttcaccctggatgaccag

SEQ ID NO: 755041 - DNA, 120 bp, Artificial Sequence
  ENSG00000213380_14 (sequence is synthesized)
ccaggcgctggggcccgagctcacagctccagcaccagagcctcccgccgaggagccacgcctggagcccgcgggcccagcctgcccggagggagggcgagcggagacgcaggccgaacc

SEQ ID NO: 755042 - DNA, 120 bp, Artificial Sequence
  ENSG00000213380_15 (sequence is synthesized)
agcgtggggccctagccggcgtcccctgcctccagaacgcgggctggaccccaatggagaacaggtggtgtggcaggcgagcgggtgggcagcccgcatcatccagcacgagatggacca

SEQ ID NO: 755043 - DNA, 120 bp, Artificial Sequence
  ENSG00000213380_16 (sequence is synthesized)
cctgcagggctgcctgtttattgacaaaatggacagcaggacgttcacaaacgtctattggatgaaggtgaatgactaaagctttgctactggggctgaggattccggataccaagacgc

SEQ ID NO: 755044 - DNA, 120 bp, Artificial Sequence
  ENSG00000213380_17 (sequence is synthesized)
aaacactttcactttgagctgggcaaatcttacttggcatcaacttggatggctcgcatatgacaggaaactggattgccaaggcatggcagactgagctggaggaagatgtcagaaatg

SEQ ID NO: 755045 - DNA, 120 bp, Artificial Sequence
  ENSG00000213380_18 (sequence is synthesized)
tttgccctgaaatcagttacggacaaaatgttggctacaacttgaggagaaaaatcacccccaaaggagtggacatttcctaacaattctgtatggaggaaggtggggtaattgcattcg

SEQ ID NO: 755046 - DNA, 120 bp, Artificial Sequence
  ENSG00000213380_19 (sequence is synthesized)
tctgcagtagacacgagttcctcggacctgtataatctcccaaagccaaggtttggtaataatgtagtccccaaatacctgaaagctgtctttaaaaatgcaggtaagcatgtgactggc

SEQ ID NO: 755047 - DNA, 120 bp, Artificial Sequence
  ENSG00000213380_20 (sequence is synthesized)
agggcttgtggccttagacgccagtttgcttatggaaatgaaagagaatagtccctgttcaaggatgtgtttcatgacagcacgagtgtaaatgagtgcccacacattttaacagccttg

SEQ ID NO: 755048 - DNA, 120 bp, Artificial Sequence
  ENSG00000213380_21 (sequence is synthesized)
ggcaggattttgctgctgagatccctagagcagctggttcttggctcattcttggggtagaggccgtggatcagggctgggggcaggggtgacaattgagaagtgcactgagccctttcc

SEQ ID NO: 755049 - DNA, 120 bp, Artificial Sequence
  ENSG00000213380_22 (sequence is synthesized)
tgttaacaattgggcatagaaagcaggattagtacttcctggttatacacttattttgtaaaaatagaattaatatcacagcaaccaatgtgtaggtttaagaaagtggccaggtgcagt

SEQ ID NO: 755050 - DNA, 120 bp, Artificial Sequence
  ENSG00000213380_23 (sequence is synthesized)
agcctgggcgacagagcgagactcaaaagtatgattctggctgtagagttttctttttttctctgtctcaaaaaaaaaaagtgtcagctttgtcttgtcaagaggtgaaggaacttgttt

SEQ ID NO: 755051 - DNA, 120 bp, Artificial Sequence
  ENSG00000213380_24 (sequence is synthesized)
agaggtgaaggaacttgttttattcttttattttttttttaagatagagacgggggtcttactatgttgcccaggctggcctcaaattcctggtctcaggcaatcctcctgcctcggcct

SEQ ID NO: 755052 - DNA, 120 bp, Artificial Sequence
  ENSG00000213380_25 (sequence is synthesized)
tgtgagccacactacccagccaaactccagttttagttaaactgtttcacctcatttttatgctgagttttgtaaagtaggtattcttgctgaacagagtcctgaaaatcaaactataca

SEQ ID NO: 755053 - DNA, 120 bp, Artificial Sequence
  ENSG00000213380_26 (sequence is synthesized)
agtagtaggaagtccattaagctgtttagaggaaaaagtgttataaatggcagttaaatgaacccaggaaagacccatcctcctttgtggctttctctgaggccccatgaggccaagcag

SEQ ID NO: 755054 - DNA, 84 bp, Artificial Sequence
  ENSG00000213380_27 (sequence is synthesized)
tcctttgtggctttctctgaggccccatgaggccaagcagaagcaaactggctctaggtgcagccagactttgaaaaggaatcc

SEQ ID NO: 755055 - DNA, 120 bp, Artificial Sequence
  ENSG00000213380_28 (sequence is synthesized)
gggaggctgaggcgggagaatcgctcaaacctgggaggcagaggttgcagtgggctgagatctcgccactgtactccagcctgggcgacagaccaaggctctgtctcaaaaaaaaaaaaa

SEQ ID NO: 755056 - DNA, 120 bp, Artificial Sequence
  ENSG00000213380_29 (sequence is synthesized)
caaccagatactggtgcaaggtcagagatgcagccaatggggagatttgtagaaagctcatagatgctaaaaacatgggtctttaggaaaattagaattcagctgagcctcctttcattt

SEQ ID NO: 755057 - DNA, 120 bp, Artificial Sequence
  ENSG00000213380_30 (sequence is synthesized)
ggacaatgttcagaagctcttacagggggctatggcaatcttttgatgcttcttatagctttctgaggttaacgcttttgtggtgggcatcggtagcaataaaatgcaaactttattgca

SEQ ID NO: 755058 - DNA, 120 bp, Artificial Sequence
  ENSG00000213380_31 (sequence is synthesized)
cacaaagaaaaaggattcatgcaaagctcttattatcgggtctgacacagttaacattataggtgtgagctgaatatatgtgcacatttatatacttattttatacgaaagcgtggaccg

SEQ ID NO: 755059 - DNA, 120 bp, Artificial Sequence
  ENSG00000213380_32 (sequence is synthesized)
gaggtcatctgcttcaaaacttccattgacgggaaggtgacaaggaaatcctcgcatttgagggcatcagatatcaaaaagtctctccatttggatggctggatgtggtggctcagcctg

SEQ ID NO: 755060 - DNA, 120 bp, Artificial Sequence
  ENSG00000213380_33 (sequence is synthesized)
tgcccagcttccagcagagctgcaggtgcgacgcgcctggcgctaaaggggttttataactgtaaaagctgacatttacgatggtagaaataactaacacataaagcgtttaccacgttc

SEQ ID NO: 755061 - DNA, 120 bp, Artificial Sequence
  ENSG00000213380_34 (sequence is synthesized)
tgcacacccccaacaccagccacaagggcagacccttgccaggatggcacgggccaggctatgcaggtgaggcgctgcctttgcaactgcgtcacagtcttgacacattcactgcctcac

SEQ ID NO: 755062 - DNA, 120 bp, Artificial Sequence
  ENSG00000213380_35 (sequence is synthesized)
tgcaccgcaaagccaaacccatggattgacgtcatattatctggacctgactttacttgctaaagaatataaaatgcaggctaggtgtggtggctcagctcatgcttgtaatcccagcac

SEQ ID NO: 755063 - DNA, 120 bp, Artificial Sequence
  ENSG00000213380_36 (sequence is synthesized)
gcactttgggaggccacgctgagaggatcacttgagcccagcagtttcagactggcctgggcaacactgtgaggccgtttctaaaaaaaaaaggaaaaattagctgggcatgatggtgtg

SEQ ID NO: 755064 - DNA, 120 bp, Artificial Sequence
  ENSG00000213380_37 (sequence is synthesized)
tgttgctactcaggaggctgaggtcagaagattgtgtgagctcgtgaggtcaagcctgcagtgagctatcactgcaccactgcatctagcctttctctgtatgtacaaaatgctaatgct

SEQ ID NO: 755065 - DNA, 120 bp, Artificial Sequence
  ENSG00000213380_38 (sequence is synthesized)
tacaggcgtgagctaccatgcctggcctggagaagaccgtttttattctggacccaaaccctcaattttctgggctctgtgcagccctcttccctcccctgtcaagtcacttaccatgca

SEQ ID NO: 755066 - DNA, 120 bp, Artificial Sequence
  ENSG00000213380_39 (sequence is synthesized)
agtcacttaccatgcaaaccacaggctctaagagtttgtccccagggacatccatccaagtcatctccatggctcctgggtcccctggtgagcatggagtcaggaggtcatcaatcatca

SEQ ID NO: 755067 - DNA, 120 bp, Artificial Sequence
  ENSG00000213380_40 (sequence is synthesized)
tgctggggttggtgcgagaggggccacagacctgaaaccaaatggatctgactggggcagctgcccctcagtgtcagaggggctcgacccctccggtctctaaggaagtcccaaagagaa

SEQ ID NO: 755068 - DNA, 120 bp, Artificial Sequence
  ENSG00000213380_41 (sequence is synthesized)
tgctctgtgggtccctagcatctgaggaggacgggctccttcagaactcgggctgggtggtccgagcgactcatgatttgcatgggactctggcaatctgtagccccaatgccttgatgt

SEQ ID NO: 755069 - DNA, 120 bp, Artificial Sequence
  ENSG00000213380_42 (sequence is synthesized)
cttcctcattaacactgtcacgtctcaccaggaatacagtgacattaaaagtgtgatatggtttagctgtgcccccacccacatttcaacttgaactgtatctatctcccagaattccca

SEQ ID NO: 755070 - DNA, 73 bp, Artificial Sequence
  ENSG00000213380_43 (sequence is synthesized)
gggggaggtaactgaatcatgggggctggtctttcccgtgctattctcgtgatggtttcttcattttctcttg

SEQ ID NO: 755071 - DNA, 78 bp, Artificial Sequence
  ENSG00000213380_44 (sequence is synthesized)
gggtttatcaggggtttccacttttgtttcttcattttctcttgccaccagcatgtaagaagtgcctttggtctcctc

SEQ ID NO: 755072 - DNA, 120 bp, Artificial Sequence
  ENSG00000213380_45 (sequence is synthesized)
atacctgaaagctgtctttaaaaatgcagagagcccagcacacggcaggagttgacagcggatgatggaatggtattcacggaaggggaggcacgaagatttgagtgaaacggacgcatt

SEQ ID NO: 755073 - DNA, 120 bp, Artificial Sequence
  ENSG00000213380_46 (sequence is synthesized)
tcatgggccagtgatgctggcggcacatcctcaacaagccagcctcacaaagggctctgcttggcaggcagacgggaagactccagggaaaaggggccaggctgcacccgggctgccagc

SEQ ID NO: 755074 - DNA, 120 bp, Artificial Sequence
  ENSG00000213380_47 (sequence is synthesized)
agcaggcggaccgtgaccatggtgggaggaagcctccagccctggcttctcctggggaagactcacctcctcctgatggccgaatccaacacccatgggatgtttgtggctccaagaacc

SEQ ID NO: 755075 - DNA, 120 bp, Artificial Sequence
  ENSG00000213380_48 (sequence is synthesized)
gaccccgggggctttgtgtgtcagcaattgaagccatccctgtgccacccaccactggcagggtcccaagtgagattaaaccacatcttggtctggctgtgccaggtgagacctatggca

SEQ ID NO: 755076 - DNA, 120 bp, Artificial Sequence
  ENSG00000213380_49 (sequence is synthesized)
ctgcctgccatgggaggggtggagtggcccgtgaggcagaggcctcaggcacctcttgggaattgaagtccacccgtgccctgaggggctggagctggggagtgcctctccgaggctgag

SEQ ID NO: 755077 - DNA, 120 bp, Artificial Sequence
  ENSG00000213380_50 (sequence is synthesized)
aacaaccaaatccagccgcagctcagaataaagcccagggttggcttcaggtgcaacaagaaccaagggggccctgggcccggcacacaccctgcatctggaccaagaactccgttttga

SEQ ID NO: 755078 - DNA, 120 bp, Artificial Sequence
  ENSG00000213380_51 (sequence is synthesized)
tcctccgggcggcctcactctcattttcatttcgggacccgcagagggaatccacctcatcgatgaagatgatggagggcttgtgctgcctggccagctcaaacaggttcttgaccagcc

SEQ ID NO: 755079 - DNA, 120 bp, Artificial Sequence
  ENSG00000213390_0 (sequence is synthesized)
gctgacgaagatggcgactgaggcacagagtgaaggggaggtgccagcccgcgaatccggccggagtgatgccatctgcagttttgtgatctgcaatgattcttcccttcgaggtcagcc

SEQ ID NO: 755080 - DNA, 120 bp, Artificial Sequence
  ENSG00000213390_1 (sequence is synthesized)
cattatctttaatcctgacttttttgtggagaaactccgacatgagaaacctgagattttcactgagttggtggtcagcaatatcacaaggctcatcgatttacctggaactgagttggc

SEQ ID NO: 755081 - DNA, 120 bp, Artificial Sequence
  ENSG00000213390_2 (sequence is synthesized)
tcagctgatgggggaagtggaccttaagttgcctggcggggctggcccagcatcaggattcttccggtctctcatgtctctcaagcgaaaggaaaaaggagtgatatttgggtccccact

SEQ ID NO: 755082 - DNA, 120 bp, Artificial Sequence
  ENSG00000213390_3 (sequence is synthesized)
gacggaggaaggcattgcccagatataccaactgattgagtatctacacaaaaacttgcgagtagagggtttgtttagagtaccgggtaatagtgtccgacagcagattttaagggatgc

SEQ ID NO: 755083 - DNA, 120 bp, Artificial Sequence
  ENSG00000213390_4 (sequence is synthesized)
tctcaataatggaactgacattgacttggaatcaggggaatttcactcaaatgatgttgccactttgctgaagatgtttctaggagagttgccggagcctctgctgacacataaacactt

SEQ ID NO: 755084 - DNA, 120 bp, Artificial Sequence
  ENSG00000213390_5 (sequence is synthesized)
caatgcacacctcaaaatcgctgatttgatgcagtttgatgataaaggaaacaagaccaatataccagacaaggaccggcaaattgaggctctccagttgctcttcctcattctccctcc

SEQ ID NO: 755085 - DNA, 120 bp, Artificial Sequence
  ENSG00000213390_6 (sequence is synthesized)
tcctaatcgtaatttgctgaagttattgcttgatctcctataccagacagcaaagaaacaagacaagaacaagatgtcagcctataaccttgcccttatgtttgcaccccatgtcctgtg

SEQ ID NO: 755086 - DNA, 120 bp, Artificial Sequence
  ENSG00000213390_7 (sequence is synthesized)
gccaaaaaatgtcactgcaaatgaccttcaggagaatatcacaaagttaaacagtgggatggcttttatgattaaacactcccagaaactttttaaggctcctgcttacattcgggagtg

SEQ ID NO: 755087 - DNA, 120 bp, Artificial Sequence
  ENSG00000213390_8 (sequence is synthesized)
tgcgagattgcactatttgggatccagaactcaggcatcaaaggatgaccttgacctcatagcttcatgtcatactaagtcctttcagctggcaaagtctcagaaacggaaccgggtaga

SEQ ID NO: 755088 - DNA, 120 bp, Artificial Sequence
  ENSG00000213390_9 (sequence is synthesized)
ttcctgccctcaccaggaggagacccagcaccatacggaagaggcactgagagagctgtttcaacacgttcatgatatgccagagtcagcaaagaagaaacaacttattagacagtttaa

SEQ ID NO: 755089 - DNA, 120 bp, Artificial Sequence
  ENSG00000213390_10 (sequence is synthesized)
taagcaatcattgacccagacaccagggcgagaaccttctacttcccaggtacaaaagagggctcgttcgcgctccttcagtgggcttattaagcggaaggtcctgggaaatcagatgat

SEQ ID NO: 755090 - DNA, 120 bp, Artificial Sequence
  ENSG00000213390_11 (sequence is synthesized)
gtcagaaaagaaaaagaagaaccctactccagaatctgtggccattggtgaattgaagggaaccagcaaagaaaataggaacttattattttctggctctccagctgtcacgatgacacc

SEQ ID NO: 755091 - DNA, 120 bp, Artificial Sequence
  ENSG00000213390_12 (sequence is synthesized)
aacaagattgaagtggtctgaagggaagaaagaggggaaaaaaggatttctctgaaggatccagagttgtctcctatggtccatgcagaattttctgtttagtgggcaggtgttattcct

SEQ ID NO: 755092 - DNA, 120 bp, Artificial Sequence
  ENSG00000213390_13 (sequence is synthesized)
gcccacagcaaagcttggacttgcagcttgcttgctgcattttgaattgtcaaagccaactaataccgtgacccgactgatacctctaaccccactcactggatgatgtttgcaagctgt

SEQ ID NO: 755093 - DNA, 120 bp, Artificial Sequence
  ENSG00000213390_14 (sequence is synthesized)
gccttctgagagagtgcttaggccctgtctctcttttttaatattatggggaaaccactaactatccaaccagcttatacagcacactaaggtgggcttcagtgctcactcaatgtgttt

SEQ ID NO: 755094 - DNA, 120 bp, Artificial Sequence
  ENSG00000213390_15 (sequence is synthesized)
aggcagattccacttttgaaaaaaaatatgaaatgtgtgctcaactgccagtaattttttaaaaagcactgtcccagtggattgatgttgtttttaatggatattttgggtttttctctg

SEQ ID NO: 755095 - DNA, 120 bp, Artificial Sequence
  ENSG00000213390_16 (sequence is synthesized)
ttttgatagtattgggtatttggttgtttttgtttgtttatttctttgttttaaaagccatgtttttggttgggctctaagctagatatctttccctctttttcactttgagctttggga

SEQ ID NO: 755096 - DNA, 120 bp, Artificial Sequence
  ENSG00000213390_17 (sequence is synthesized)
aaactctttatcttatgaggctgtattcctcaatacctaatttgtgtccaaagaatttatagcttttctggacattttttattatttcttgggtgtgacatcagagtatttgacctgcag

SEQ ID NO: 755097 - DNA, 120 bp, Artificial Sequence
  ENSG00000213390_18 (sequence is synthesized)
tattgaaaaaggagaattcagaatgatacagtattttaacaaatcttaattattaaactcttttccttccttccatttctccctcccttgtccatctctctctctctttccctttcctca

SEQ ID NO: 755098 - DNA, 120 bp, Artificial Sequence
  ENSG00000213390_19 (sequence is synthesized)
gtgatgtgaaaataattgtgttttgctgaacttgttatcttcattcaatttcctcttgactaaaacatctctggtgccaacgtaatacttctgaaccaaatcactgtgactcaaggaaag

SEQ ID NO: 755099 - DNA, 120 bp, Artificial Sequence
  ENSG00000213390_20 (sequence is synthesized)
tcactgacagcataagagaagtttgctaaaatatttgtatgtgggggaagctctggagtgtgcctaggagggggctggctgcctttatgtcccaggatgactctttatgggtgggattac

SEQ ID NO: 755100 - DNA, 120 bp, Artificial Sequence
  ENSG00000213390_21 (sequence is synthesized)
attgcaccctctgagggtgcaggctagaccgtctcctgagaggaagttaggatcagaaagaagaagcaagcagcaacctctgcagggctgacaggatttaaaggagagaatgttcttatt

SEQ ID NO: 755101 - DNA, 120 bp, Artificial Sequence
  ENSG00000213390_22 (sequence is synthesized)
gttactgttccgccctctctttgtcagaagggacacaggtggtaatttggagatggggccagagcttctggcttttggatttggtgtgttcacttgtgttggatagagcagtggcatggc

SEQ ID NO: 755102 - DNA, 120 bp, Artificial Sequence
  ENSG00000213390_23 (sequence is synthesized)
tttgacctagtatgaactggtgtctgcccagagagcagcatgtagcaggggggaatgctcaggtttgtgcctggctctgtggagctgtacaacccttctcaccctgtgggttggagccga

SEQ ID NO: 755103 - DNA, 120 bp, Artificial Sequence
  ENSG00000213390_24 (sequence is synthesized)
gtcaggccactatggggaagcagttgccccacaaaatgtggtttgctgacctatttctaaactgttgaatatgctgcaccattgctgaaatgaaagatgactctgggggagcagagcttg

SEQ ID NO: 755104 - DNA, 120 bp, Artificial Sequence
  ENSG00000213390_25 (sequence is synthesized)
gccttgtgcccagctggcagccccctctgccagcctttctgctgcttttgctgctgtaacagcaatagtggagaaaaatgtaaaatttggtcttccagcttaatgcagtgtgaacaatag

SEQ ID NO: 755105 - DNA, 120 bp, Artificial Sequence
  ENSG00000213390_26 (sequence is synthesized)
atggttaggaaaacaaaactgcttagaagcccctttctctagagcagttttatgtcatttgtaaaaacacatattagcaaattcgtttgcgtaggtttctattaaatatttgactttttt

SEQ ID NO: 755106 - DNA, 120 bp, Artificial Sequence
  ENSG00000213390_27 (sequence is synthesized)
tttcttattaagaaaatgaaatcccttacaccagatatcagttaattcaaacagaaaaccctttgggtatcaccaaattgaaatggtattcttccttaactcttccttctttcctttatt

SEQ ID NO: 755107 - DNA, 120 bp, Artificial Sequence
  ENSG00000213390_28 (sequence is synthesized)
tgtttagacgtgcttcatcccgaagtggtgctatggtctgttaaacagggctggcatcaggtagagggagcagagtggtgacctgatagctcctgtcatcgtgttagtttttgattctat

SEQ ID NO: 755108 - DNA, 120 bp, Artificial Sequence
  ENSG00000213390_29 (sequence is synthesized)
ttaagggaagtagctgagatttagacggatgtagatgctctttgggtgaatggaatcataagcaaaggttgtgttctggggtgaggatcatgagagagatatttatcacatgcacatgcc

SEQ ID NO: 755109 - DNA, 120 bp, Artificial Sequence
  ENSG00000213390_30 (sequence is synthesized)
tttatatagctggtctccttgggtggtttatgtgtgttttgtttatttattgaatatgttttcccttgctttaggggttttataggtcatttttcttaatagaagctgtgatcgacttag

SEQ ID NO: 755110 - DNA, 120 bp, Artificial Sequence
  ENSG00000213390_31 (sequence is synthesized)
aatccaaatttgaggagtaagcagcataaccttctaccttgtaatatgtaactattctaatccagtggaatcttacggaaaacacagagaaaaccccttttatcatttgccacagaaggc

SEQ ID NO: 755111 - DNA, 120 bp, Artificial Sequence
  ENSG00000213390_32 (sequence is synthesized)
tgctgtctcccttctgatttggtgggcaggtattgtttttgagccagtatttaacagagttttttaatctataagattttttttgaatctatttcattgtgtttgtttttcatgttggaa

SEQ ID NO: 755112 - DNA, 120 bp, Artificial Sequence
  ENSG00000213390_33 (sequence is synthesized)
caatctctctggaagtgcctcttcttgtggcttttacaacttcatttctttctggggtcacctgtgatgggctttgatgtggtgtcaatttggggccttgtgtttgtgccagagggatac

SEQ ID NO: 755113 - DNA, 120 bp, Artificial Sequence
  ENSG00000213390_34 (sequence is synthesized)
acatattaaactgcaggccaccttcctggtccagactgtactgtgtgaaccccactgactaaattagtgagaaccataggcgttggaatttctcaccttttacaatgatagacttttgca

SEQ ID NO: 755114 - DNA, 120 bp, Artificial Sequence
  ENSG00000213390_35 (sequence is synthesized)
ttgggaccaatgaatctggtgtgaaaaaccctgctgtagtagtgaaagagcatcaggagatactgactgtacctgagggccaaaacaggagcaggtaacgaaccgtaaaaaaaggagcag

SEQ ID NO: 755115 - DNA, 120 bp, Artificial Sequence
  ENSG00000213390_36 (sequence is synthesized)
gtaatgaatcgtaaccaaaactacagttgatcctccgcaaaggaaagctctttacccagaatgtccttccagagtcattcaggaaggacaagggaacacccttgggaaatgggctagtgg

SEQ ID NO: 755116 - DNA, 120 bp, Artificial Sequence
  ENSG00000213390_37 (sequence is synthesized)
agggctgttgactgcagtgacacctgggtgctccggaggtatctgttctgttgacctgtaaggaagcagtcgatcctagagtgtcagaacagagccattctctcctcctgagtaggaacg

SEQ ID NO: 755117 - DNA, 120 bp, Artificial Sequence
  ENSG00000213390_38 (sequence is synthesized)
tttctgttcagtttccctcacagcagcctgtgttagcatgcagttgaaaatactgccgtctaggagaacctgtggtcactgggaacgtgccccacagtgactggccatgcaaccaggtga

SEQ ID NO: 755118 - DNA, 120 bp, Artificial Sequence
  ENSG00000213390_39 (sequence is synthesized)
tttttaggaatagatgtctctagactctgtctcctttcctacaaggcctcacacagatgcttgaggctaatggcccccattctgaggtcatttttgtgtagaactcctttccccaggaga

SEQ ID NO: 755119 - DNA, 120 bp, Artificial Sequence
  ENSG00000213390_40 (sequence is synthesized)
gagccttatctctgccctcctttaccctgaaggcttcaaacggaagacaggacctagatctaaacctagatactagcattttgtgggattgtctagaatttggggaagatttgggttcct

SEQ ID NO: 755120 - DNA, 120 bp, Artificial Sequence
  ENSG00000213390_41 (sequence is synthesized)
aagatgcacaagcgttttacaccagtggtgattaactcaactaaaacccactgtaggaagttagcttccccagacagctaatgccgagatcttctaccagcgtagagttgacagaagcag

SEQ ID NO: 755121 - DNA, 120 bp, Artificial Sequence
  ENSG00000213390_42 (sequence is synthesized)
gccagcgaggaggtgtgggacataatagcctgagtgcttgggttaccatggagactggagtgtgtgaggccacagcctgtgctaaagagccatggagccctcccctggccatgtctgggg

SEQ ID NO: 755122 - DNA, 120 bp, Artificial Sequence
  ENSG00000213390_43 (sequence is synthesized)
acagatagaacctgttgggggaaatattccctcaccccagggttctttctgcagagcaagggttgcctttgtcctatccctgagcttgctcaacaagagaaacaaggtttcttaagtgtt

SEQ ID NO: 755123 - DNA, 120 bp, Artificial Sequence
  ENSG00000213390_44 (sequence is synthesized)
ttggttaaagttttcattcttatttgactatgtatatgtaattgtaaagaaacgatcctatgcattgtctttcttttatattcttgtaatattctgaaattaaaattgttttgtttcata

SEQ ID NO: 755124 - DNA, 120 bp, Artificial Sequence
  ENSG00000213390_45 (sequence is synthesized)
agtttttataagtagtaacaccttaagtaatagtaatacaaattataaaaactgtctagataaataaataattaaactaaagcaaatattttcagtccctgagagaagacatgattaact

SEQ ID NO: 755125 - DNA, 120 bp, Artificial Sequence
  ENSG00000213390_46 (sequence is synthesized)
taggtagtcatcggggcatcttgattttcatgccctattaatatgtgaaaataatatttaaaaaccaaagttacatagctagagactatagaacagaatgcttgaattttctttttttga

SEQ ID NO: 755126 - DNA, 120 bp, Artificial Sequence
  ENSG00000213390_47 (sequence is synthesized)
agggatggggtcccactttgttgccgatgctggagtgtggtggtgtcatcatagctcactgcagccttgaattcctgggctcaaactctccttctgtttcagcctcccactagctgggac

SEQ ID NO: 755127 - DNA, 120 bp, Artificial Sequence
  ENSG00000213390_48 (sequence is synthesized)
tgacgaagatggcgactgaggcacagagtgaaggggaggtgccagcccgcgaatccggccggagtgatgccatctgcagttttgtgatctgcaatgattcttcccttcgagaaaaaggag

SEQ ID NO: 755128 - DNA, 120 bp, Artificial Sequence
  ENSG00000213397_0 (sequence is synthesized)
gctggaggttgattggcggtcttgccggccagtgaagccagggcatgggcggggcgcggctcggagcgcgaaacatggcggggcaggacgctggctgcggccgtggcggcgacgactact

SEQ ID NO: 755129 - DNA, 120 bp, Artificial Sequence
  ENSG00000213397_1 (sequence is synthesized)
cagaggacgagggcgacagcagcgtgtccagggcggctgtggaggtgttcgggaagctgaaggacctaaactgccccttcctcgagggtctgtatatcacagagccaaagacaattcagg

SEQ ID NO: 755130 - DNA, 120 bp, Artificial Sequence
  ENSG00000213397_2 (sequence is synthesized)
aactgctgtgcagcccctcagagtaccgcttggagatcctagagtggatgtgtacccgggtctggccctcactgcaggacaggttcagctcactgaaaggggtcccaacagaggtgaaga

SEQ ID NO: 755131 - DNA, 120 bp, Artificial Sequence
  ENSG00000213397_3 (sequence is synthesized)
tccaagaaatgacgaagctgggccacgagctgatgctgtgtgcgccagatgaccaggagctcctcaagggctgtgcctgcgcccagaagcagctacacttcatggaccagttgctcgata

SEQ ID NO: 755132 - DNA, 120 bp, Artificial Sequence
  ENSG00000213397_4 (sequence is synthesized)
ccatccggagcctgaccattgggtgctccagttgctcgagcctgatggagcacttcgaggacaccagggagaagaacgaggccttgctgggggagctcttctctagcccccacctgcaga

SEQ ID NO: 755133 - DNA, 120 bp, Artificial Sequence
  ENSG00000213397_5 (sequence is synthesized)
gcccctcctcaacaagcagagtgatgactggcagtgggccagtgcctctgccaagtccgaggaggaggagaagctggcggagcttgccaggcagctgcaggagagtgctgccaagttgca

SEQ ID NO: 755134 - DNA, 120 bp, Artificial Sequence
  ENSG00000213397_6 (sequence is synthesized)
cgcgcttagaacggagtactttgcacagcatgagcaaggggctgctgcgggcgcagccgacatcagcaccctagaccagaagctgcgtctggtcacttccgacttccaccagctaatctt

SEQ ID NO: 755135 - DNA, 120 bp, Artificial Sequence
  ENSG00000213397_7 (sequence is synthesized)
ggcttttctccaagtctacgacgacgagctgggcgagtgctgccagcgcccaggccctgacctccacccgtgcggccccatcatccaggccacgcaccagaatctgacttcctacagcca

SEQ ID NO: 755136 - DNA, 120 bp, Artificial Sequence
  ENSG00000213397_8 (sequence is synthesized)
actgctgcaagtggtcatggcagttgctgacacctctgcgaaggccgtggagaccgtgaagaagcagcaaggcgagcagatctgctggggtggcagcagctccgtcatgagtctagctac

SEQ ID NO: 755137 - DNA, 120 bp, Artificial Sequence
  ENSG00000213397_9 (sequence is synthesized)
caagatgaatgaactaatggagaaatagaaagtcttcagtgatggcctacgccaaagcacaggatggggcgggcaggaagccctctcccaagatcgagttggccgaggatggatgattgt

SEQ ID NO: 755138 - DNA, 120 bp, Artificial Sequence
  ENSG00000213397_10 (sequence is synthesized)
ggcagcagaagccgttgcagccccacgttgtgctctaggcagggacctttggcccctttggggagggagagacagacgggcggtttgacttggacacaaagaaagccttggtttctaagc

SEQ ID NO: 755139 - DNA, 120 bp, Artificial Sequence
  ENSG00000213397_11 (sequence is synthesized)
atgcgcctgggacttgcaatgatgaaacagggccattggcaaagctggggtaccagtcacccagccacgctctagggtggtagccaagaagacggaccccgagcgggaggcagagagaca

SEQ ID NO: 755140 - DNA, 120 bp, Artificial Sequence
  ENSG00000213397_12 (sequence is synthesized)
agaggtggatgaagcagagcaagcgtgagcatggtgaagagaagacggagccccgcgctgggagaggaacgcttcagtccgagttccattctgcacccaaggctccccttggtcctcctg

SEQ ID NO: 755141 - DNA, 120 bp, Artificial Sequence
  ENSG00000213397_13 (sequence is synthesized)
ggaaccagggtgccccttagtggtggtggcccaggagaacccgaccaaggcaggagcgccccctcctggaagagcctcgcttcaacgcatcatcattcccggccggcagcaggggcgacg

SEQ ID NO: 755142 - DNA, 120 bp, Artificial Sequence
  ENSG00000213397_14 (sequence is synthesized)
ccagcaaggcctgcgactcagagccagcttggcccgttcgccccgccccttcccggtgtccgccccgcccctttcccggtgtccgccccgcctccttcccggtgtccgccccgccccctt

SEQ ID NO: 755143 - DNA, 120 bp, Artificial Sequence
  ENSG00000213397_15 (sequence is synthesized)
ccttccctgtgtccgccccgcccccttccctgtgtccgccctgcccgcttcactgtggtcctgcctctgggtggtgccggggcggggggtgggagcccggggcccgcgcaggcggagatg

SEQ ID NO: 755144 - DNA, 120 bp, Artificial Sequence
  ENSG00000213397_16 (sequence is synthesized)
gacacagccccaggaggtcctgagaacatgtgcacaaggtggttgggctacagctggttttctacgatttagggagacataagacgtcagtgaatccatgtgagatgtacactggctggt

SEQ ID NO: 755145 - DNA, 120 bp, Artificial Sequence
  ENSG00000213397_17 (sequence is synthesized)
tgaacacgtgttttccatcctcttgggtgtatagctgggagtggaattgctgggtcacagggtcactctgtgcttaacttttcgaggagcccccaaactgttttccagtgcggcggcacc

SEQ ID NO: 755146 - DNA, 120 bp, Artificial Sequence
  ENSG00000213397_18 (sequence is synthesized)
atcttccttttccagcagcagcgcgggagagctccagtttctcctcgtcctcgctggcacttgctggcatccgtcttgttgattctagccaccctgctcggtgtggggtggcatctcatt

SEQ ID NO: 755147 - DNA, 120 bp, Artificial Sequence
  ENSG00000213397_19 (sequence is synthesized)
atggttttgatttgcatttccccatgaccagtgatacggagcgtctttttgtgagcttgttggccatttctgtatatgctttggaaaaatttccatattcatgtcctttgcccacttttt

SEQ ID NO: 755148 - DNA, 120 bp, Artificial Sequence
  ENSG00000213397_20 (sequence is synthesized)
ggtcctagttctggagctggtaggggctggggtgtcactccccctctgatgctggctggggtgtgacaccccacttggggatctggctggccaatcaggggccgggcagcatacgggcaa

SEQ ID NO: 755149 - DNA, 120 bp, Artificial Sequence
  ENSG00000213397_21 (sequence is synthesized)
ggggcagctgtgtcccaagggtgctggctgttgcccaaggccccgggggtgagtatgaaggtgggatgtgggcctcagagcagacgggccaggcacagaggagggtgagcacctagggtg

SEQ ID NO: 755150 - DNA, 120 bp, Artificial Sequence
  ENSG00000213397_22 (sequence is synthesized)
ctccatgggtgggtaggtaggcgggcaaaaatggaggagccagggcagacaggtggggcaggattctgcgcggtggggcttgtcctggcctctgtgcctggccccgatgtgcttctgggg

SEQ ID NO: 755151 - DNA, 120 bp, Artificial Sequence
  ENSG00000213397_23 (sequence is synthesized)
tgcctgcctgtctgcccatgagcctgctcagacaggatgagaggaagtgggctcgtcaatgtttgcttgtttcgttgttccacatgtgagatccccagaggccaacctaaaaagccggct

SEQ ID NO: 755152 - DNA, 120 bp, Artificial Sequence
  ENSG00000213397_24 (sequence is synthesized)
ttagttacgatgactacagttcccacgtgcgcaactctgcccttggctcaaggattccgtgatgttcattttggttttctaagcgagaggctccgagccttccaacctctgactggctgg

SEQ ID NO: 755153 - DNA, 120 bp, Artificial Sequence
  ENSG00000213397_25 (sequence is synthesized)
ttatatcctgcttgggctcaggggcctcagcagcccctgacaagggaccacagggcaggaccaggggctgggaggggctgggctgggctccctgctggccagtggcgtggcagggctctg

SEQ ID NO: 755154 - DNA, 120 bp, Artificial Sequence
  ENSG00000213397_26 (sequence is synthesized)
ggcccctcagtgggctggggaggtgctgcttctggtccttggacctgcccaccttagcaggcactagctaggcccagatccggtgtggggtcctgcgtgtcccagcctccaggtgctgtt

SEQ ID NO: 755155 - DNA, 120 bp, Artificial Sequence
  ENSG00000213397_27 (sequence is synthesized)
aggccacagccctctcctgtccatttttcttgggacatttattttccccccttgccaattgctggggctgggaggacacgcagtgctggctggcatgtccctaggcatcgagggttgcca

SEQ ID NO: 755156 - DNA, 120 bp, Artificial Sequence
  ENSG00000213397_28 (sequence is synthesized)
gagcgacatgagagtgtggcatccccactgggccaggaagaggggacttaggtccgagaactctgattggtgacttccccgctgggagttctgtccctcacccttggctgtctttcaggt

SEQ ID NO: 755157 - DNA, 120 bp, Artificial Sequence
  ENSG00000213397_29 (sequence is synthesized)
tttcaggtgaatgccacctgatcagtgtgagtgggggtgggaagcaggagatgccgtcgctacgtgagaccagcggcatttagtgcctgctcgctccctccctccctccctccctccctc

SEQ ID NO: 755158 - DNA, 120 bp, Artificial Sequence
  ENSG00000213398_0 (sequence is synthesized)
agtaggcaccagggctggaatggggccgcccggctccccatggcagtgggtgacgctgctgctggggctgctgctccctcctgccgcccccttctggctcctcaatgtgctcttcccccc

SEQ ID NO: 755159 - DNA, 120 bp, Artificial Sequence
  ENSG00000213398_1 (sequence is synthesized)
gcacaccacgcccaaggctgagctcagtaaccacacacggcccgtcatcctcgtgcccggctgcctggggaatcagctagaagccaagctggacaaaccagatgtggtgaactggatgtg

SEQ ID NO: 755160 - DNA, 120 bp, Artificial Sequence
  ENSG00000213398_2 (sequence is synthesized)
ctaccgcaagacagaggacttcttcaccatctggctggatctcaacatgttcctaccccttggggtagactgctggatcgataacaccagggttgtctacaaccggagctctgggctcgt

SEQ ID NO: 755161 - DNA, 120 bp, Artificial Sequence
  ENSG00000213398_3 (sequence is synthesized)
gtccaacgcccctggtgtccagatccgcgtccctggctttggcaagacctactctgtggagtacctggacagcagcaagctggcagggtacctgcacacactggtgcagaacctggtcaa

SEQ ID NO: 755162 - DNA, 120 bp, Artificial Sequence
  ENSG00000213398_4 (sequence is synthesized)
caatggctacgtgcgggacgagactgtgcgcgccgccccctatgactggcggctggagcccggccagcaggaggagtactaccgcaagctcgcagggctggtggaggagatgcacgctgc

SEQ ID NO: 755163 - DNA, 120 bp, Artificial Sequence
  ENSG00000213398_5 (sequence is synthesized)
ctatgggaagcctgtcttcctcattggccacagcctcggctgtctacacttgctctatttcctgctgcgccagccccaggcctggaaggaccgctttattgatggcttcatctctcttgg

SEQ ID NO: 755164 - DNA, 120 bp, Artificial Sequence
  ENSG00000213398_6 (sequence is synthesized)
agggcatccccatcatgtccagcatcaagctgaaagaggagcagcgcataaccaccacctccccctggatgtttccctctcgcatggcgtggcctgaggaccacgtgttcatttccacac

SEQ ID NO: 755165 - DNA, 120 bp, Artificial Sequence
  ENSG00000213398_7 (sequence is synthesized)
ccagcttcaactacacaggccgtgacttccaacgcttctttgcagacctgcactttgaggaaggctggtacatgtggctgcagtcacgtgacctcctggcaggactcccagcacctggtg

SEQ ID NO: 755166 - DNA, 120 bp, Artificial Sequence
  ENSG00000213398_8 (sequence is synthesized)
tggaagtatactgtctttacggcgtgggcctgcccacgccccgcacctacatctacgaccacggcttcccctacacggaccctgtgggtgtgctctatgaggatggtgatgacacggtgg

SEQ ID NO: 755167 - DNA, 120 bp, Artificial Sequence
  ENSG00000213398_9 (sequence is synthesized)
cgacccgcagcaccgagctctgtggcctgtggcagggccgccagccacagcctgtgcacctgctgcccctgcacgggatacagcatctcaacatggtcttcagcaacctgaccctggagc

SEQ ID NO: 755168 - DNA, 120 bp, Artificial Sequence
  ENSG00000213398_10 (sequence is synthesized)
acatcaatgccatcctgctgggtgcctaccgccagggtccccctgcatccccgactgccagcccagagcccccgcctcctgaataaagaccttcctttgctaccgtaagccctgatggct

SEQ ID NO: 755169 - DNA, 120 bp, Artificial Sequence
  ENSG00000213398_11 (sequence is synthesized)
atgtttcaggttgaagggaggcactagagtcccacactaggtttcactcctcaccagccacaggctcagtgctgtgtgcagtgaggcaagatgggctctgctgaggcctgggactgagct

SEQ ID NO: 755170 - DNA, 120 bp, Artificial Sequence
  ENSG00000213398_12 (sequence is synthesized)
tctcttggggctccctggggtggctccatcaagcccatgctggtcttggcctcagagacagggtctcactgcattgcctagtctggtcacggactcctggcctcaagtgatcctcctgcc

SEQ ID NO: 755171 - DNA, 75 bp, Artificial Sequence
  ENSG00000213398_13 (sequence is synthesized)
tttattgatggcttcatctctcttggggctccctggggtggctccatcaagcccatgctggtcttggcctccacc

SEQ ID NO: 755172 - DNA, 120 bp, Artificial Sequence
  ENSG00000213398_14 (sequence is synthesized)
agccccaggcctggaaggaccgctttattgatggcttcatctctcttggggctccctggggtggctccatcaagcccatgctggtcttggcctcaggagtgcctttgcccagggatgtgc

SEQ ID NO: 755173 - DNA, 120 bp, Artificial Sequence
  ENSG00000213398_15 (sequence is synthesized)
ccagcactgacacagctaccacctactccccaccccctgtaccctgggagctggtctggagagagaaacacagtctggacaagagaaacgctcatcagacaccaccaataaacatcaaac

SEQ ID NO: 755174 - DNA, 120 bp, Artificial Sequence
  ENSG00000213398_16 (sequence is synthesized)
ggcccccacccaccaaggacaagatgcccagcccaggatcggtgagcaggagaggcccatccatgcccggcccctattaggcccagcccccatgcccccagacctatctgttcccacctt

SEQ ID NO: 755175 - DNA, 120 bp, Artificial Sequence
  ENSG00000213398_17 (sequence is synthesized)
ggactttggcaataaaggagcgccagactgggtgtttgctctgcagaggcaggggtcagcggccttggcctcagcacctcagcgccttcccttcctcagggaagcctgggctttggctac

SEQ ID NO: 755176 - DNA, 120 bp, Artificial Sequence
  ENSG00000213398_18 (sequence is synthesized)
tggggggacagcagggagagggggtgtaagcaggggagggtaagtgtgctttgtacctgggggttgagggtatgggaggtggggggtgggtctggtcactgcagcatctggggtgacggg

SEQ ID NO: 755177 - DNA, 120 bp, Artificial Sequence
  ENSG00000213398_19 (sequence is synthesized)
ggctccatcaagcccatgctggtcttggcctcaggtgagaaggcctcgaacacttaggtccagcgatgggtgagaccaagctgatcctgggcctgccttcattgcggctcctgctcacag

SEQ ID NO: 755178 - DNA, 120 bp, Artificial Sequence
  ENSG00000213398_20 (sequence is synthesized)
tggcctctaggggtgctatctaccactcctgggctggcatgcttgctgtcactggcccccagagcagtgaccctggcctgagcaattagggtggctccttccagagtctgtgtcagtgat

SEQ ID NO: 755179 - DNA, 120 bp, Artificial Sequence
  ENSG00000213401_0 (sequence is synthesized)
agagaacagcgagattctcgccctgagcaacggcctgacgtcggtggagggaagcaggcgcaggctccgtgaggaggcaaggttctgaggagacaggccccggagcagcactagctcctg

SEQ ID NO: 755180 - DNA, 120 bp, Artificial Sequence
  ENSG00000213401_1 (sequence is synthesized)
cccacactcctacctgctgccctgaccagagtcatcatgccacttgagcagaggagtcagcactgcaagcctgaggaaggccttgaggcccaaggagaggccctgggcttggtgggtgcg

SEQ ID NO: 755181 - DNA, 120 bp, Artificial Sequence
  ENSG00000213401_2 (sequence is synthesized)
caggctcctgctactgaggagcaggagactgcctcctcctcctctactctagtggaagtcaccctgcgggaggtgcctgctgccgagtcaccaagtcctccccacagtcctcagggagcc

SEQ ID NO: 755182 - DNA, 120 bp, Artificial Sequence
  ENSG00000213401_3 (sequence is synthesized)
tccaccctccccactaccatcaactatactctctggagtcaatccgatgagggctccagcaacgaagaacaggaagggccaagcacctttcctgacctggagacgagcttccaagtagca

SEQ ID NO: 755183 - DNA, 120 bp, Artificial Sequence
  ENSG00000213401_4 (sequence is synthesized)
ctcagtaggaagatggctgagttggttcattttctgctcctcaagtatcgagccagggagccattcacaaaggcagaaatgctggggagtgtcatcagaaatttccaggacttctttcct

SEQ ID NO: 755184 - DNA, 120 bp, Artificial Sequence
  ENSG00000213401_5 (sequence is synthesized)
gtgatcttcagcaaagcctccgagtacttgcagctggtctttggcatcgaggtggtggaagtggtccgcatcggccacttgtacatccttgtcacctgcctgggcctctcctacgatggc

SEQ ID NO: 755185 - DNA, 120 bp, Artificial Sequence
  ENSG00000213401_6 (sequence is synthesized)
ggagctgagtgtgttggaggcatctgatgggagggaggacagtgtctttgcgcatcccaggaagctgctcacccaagatttggtgcaggaaaactacctggagtaccggcaggtccccgg

SEQ ID NO: 755186 - DNA, 120 bp, Artificial Sequence
  ENSG00000213401_7 (sequence is synthesized)
cagtgatcctgcatgctacgagttcctgtggggtccaagggccctcgttgaaaccagctatgtgaaagtcctgcaccatttgctaaagatcagtggaggacctcacatttcctacccacc

SEQ ID NO: 755187 - DNA, 120 bp, Artificial Sequence
  ENSG00000213401_8 (sequence is synthesized)
cctgcatgaatgggcttttagagagggggaagagtgagtctgagcacgagttgcagccagggccagtgggagggggtctgggccagtgcaccttccaaggccccatccattagtttccac

SEQ ID NO: 755188 - DNA, 120 bp, Artificial Sequence
  ENSG00000213401_9 (sequence is synthesized)
tgcctcgtgtgacatgaggcccattcttcactctttgaagagagcagtcagtattgttagtagtgagtttctgttctattggatgactttgagatttatctttgtttcctgttggaattg

SEQ ID NO: 755189 - DNA, 120 bp, Artificial Sequence
  ENSG00000213401_10 (sequence is synthesized)
ttcaaatgttccttttaacggatggttgaatgaacttcagcatccaagtttatgaatgacagtagtcacacatagtgctgtttatatagtttaggagtaagagtgttgttttttattcag

SEQ ID NO: 755190 - DNA, 120 bp, Artificial Sequence
  ENSG00000213401_11 (sequence is synthesized)
attgggaaatccattccattttgtgaattgtgacaaataacagcagtggaaaaagtatgtgcttagaattgtgaaagaattagcagtaaaatacatgagataaagacctcaagaagttaa

SEQ ID NO: 755191 - DNA, 120 bp, Artificial Sequence
  ENSG00000213401_12 (sequence is synthesized)
aagatacttaattcttgccttatacctcactctattctgtaaatttgaaaaaaaagcatggatacctggatatccttggcttctttgagaatttaagagaaattaaatctgaataaataa

SEQ ID NO: 755192 - DNA, 120 bp, Artificial Sequence
  ENSG00000213401_13 (sequence is synthesized)
actgacttgcgcgttggaggtcagagaacagcgagattctcgccctgagcaacggcctgacgtcggtggagggaagcaggcgcaggctccgtgaggaggcaagatctcagggagttgagg

SEQ ID NO: 755193 - DNA, 120 bp, Artificial Sequence
  ENSG00000213401_14 (sequence is synthesized)
accttttcttcagagggtgactcaggtcaacacaggggcccccatgtagtcgacagacacagtggtcctaagatctaccaagcatccaggttctgaggagacaggccccggagcagcact

SEQ ID NO: 755194 - DNA, 120 bp, Artificial Sequence
  ENSG00000213401_15 (sequence is synthesized)
aagatgccgagggaggactgaggcgggcctcaccccagacagagggcccccaataatccagcgctgcctctgctgccgggcctggaccaccctgcaggggaagacttctcaggctgagtc

SEQ ID NO: 755195 - DNA, 120 bp, Artificial Sequence
  ENSG00000213402_0 (sequence is synthesized)
acttctcgctcgacacagccagagctggaggtgggtgcccggcacggaggggcctgcggaccaatggctctgccctgcaccttagggctcgggatgctgctggccctgccaggggccttg

SEQ ID NO: 755196 - DNA, 120 bp, Artificial Sequence
  ENSG00000213402_1 (sequence is synthesized)
ggctcgggtggcagcgcggaggacagcgtgggctccagctctgtcaccgttgtcctgctgctgctgctgctcctactgctggccactggcctagcactggcctggcgccgcctcagccgt

SEQ ID NO: 755197 - DNA, 120 bp, Artificial Sequence
  ENSG00000213402_2 (sequence is synthesized)
gactcagggggctactaccacccggcccgcctaggtgccgcgctgtggggccgcacgcggcgcctgctctgggccagccccccaggtcgctggctgcaggcccgagctgagctggggtcc

SEQ ID NO: 755198 - DNA, 120 bp, Artificial Sequence; identical to SEQ ID NO: 586826
  ENSG00000213402_3 (sequence is synthesized)

SEQ ID NO: 755199 - DNA, 120 bp, Artificial Sequence; identical to SEQ ID NO: 586827
  ENSG00000213402_4 (sequence is synthesized)

SEQ ID NO: 755200 - DNA, 120 bp, Artificial Sequence; identical to SEQ ID NO: 586828
  ENSG00000213402_5 (sequence is synthesized)

SEQ ID NO: 755201 - DNA, 120 bp, Artificial Sequence; identical to SEQ ID NO: 586829
  ENSG00000213402_6 (sequence is synthesized)

SEQ ID NO: 755202 - DNA, 120 bp, Artificial Sequence
  ENSG00000213413_0 (sequence is synthesized)
tctgcactgctagggcagaggactgctgtttgctgacacaatcttggtgcgttggaagtgaaagggaagaggcactggtggctgtgctttgggcccgagcagccagaagccagttgccat

SEQ ID NO: 755203 - DNA, 120 bp, Artificial Sequence
  ENSG00000213413_1 (sequence is synthesized)
cacctatgacgaggagacagcgcctggggcagagcccagtatggggcctagccagggctgggttctcacccacctgtgccgccctgccttgttacctggaagcacagccttggggactga

SEQ ID NO: 755204 - DNA, 120 bp, Artificial Sequence
  ENSG00000213413_2 (sequence is synthesized)
gcaggccctcactgtcactttaagaagggaatcagccactttgtgctcaccacctctggggaaggtgtgagaggagagaaggaagtggctgtttggctgctgacaacatgaagacttcct

SEQ ID NO: 755205 - DNA, 120 bp, Artificial Sequence
  ENSG00000213413_3 (sequence is synthesized)
gcgatgagaacagaggcacaggtgccggccctgcagcccccagaacctggactggagggggccatggggcaccggaccctggtcctgccctgggtgctgctgaccttgtgtgtcactgcg

SEQ ID NO: 755206 - DNA, 120 bp, Artificial Sequence
  ENSG00000213413_4 (sequence is synthesized)
gggaccccggaggtgtgggttcaagttcggatggaggccaccgagctctcgtccttcaccatccgttgtgggttcctggggtctggctccatctccctggtgactgtgagctgggggggc

SEQ ID NO: 755207 - DNA, 120 bp, Artificial Sequence
  ENSG00000213413_5 (sequence is synthesized)
cccaacggtgctggggggaccacgctggctgtgttgcacccagaacgtggcatccggcaatgggcccctgctcgccaggcccgctgggaaacccagagcagcatctctctcatcctggaa

SEQ ID NO: 755208 - DNA, 120 bp, Artificial Sequence
  ENSG00000213413_6 (sequence is synthesized)
cgccaacaccaccttctgctgcaagtttgcgtccttccctgagggctcctgggaggcctgtgggagcctcccgcccagctcagacccagggctctctgccccgccgactcctgcccccat

SEQ ID NO: 755209 - DNA, 120 bp, Artificial Sequence
  ENSG00000213413_7 (sequence is synthesized)
tctgcgggcagacctggccgggatcttgggggtctcaggagtcctcctctttggctgtgtctacctccttcatctgctgcgccgacataagcaccgccctgcccctaggctccagccgtc

SEQ ID NO: 755210 - DNA, 120 bp, Artificial Sequence
  ENSG00000213413_8 (sequence is synthesized)
ccgcaccagcccccaggcaccgagagcacgagcatgggcaccaagccaggcctcccaggctgctcttcacgtcccttatgccactatcaacaccagctgccgcccagctactttggacac

SEQ ID NO: 755211 - DNA, 120 bp, Artificial Sequence
  ENSG00000213413_9 (sequence is synthesized)
agctcacccccatggggggccgtcctggtgggcgtcactccccacccacgctgcacaccggccccagggccctgccgcctgggcctccacacccatccctgcacgtggcagctttgtctc

SEQ ID NO: 755212 - DNA, 120 bp, Artificial Sequence
  ENSG00000213413_10 (sequence is synthesized)
tgttgagaatggactctacgctcaggcaggggagaggcctcctcacactggtcccggcctcactcttttccctgaccctcgggggcccagggccatggaaggacccttaggagttcgatg

SEQ ID NO: 755213 - DNA, 120 bp, Artificial Sequence
  ENSG00000213413_11 (sequence is synthesized)
agagagaccatgaggccactgggctttccccctcccaggcctcctgggtgtcacccccttactttaattcttgggcctccaataagtgtcccataggtgtctggccaggcccacctgctg

SEQ ID NO: 755214 - DNA, 120 bp, Artificial Sequence
  ENSG00000213413_12 (sequence is synthesized)
cggatgtggtctctgtgtgtgcgtgtgtgggcacaggtgtgagtgtgtgagtgacagttaccccatttcagtcatttcctgctgcaactaagtcagcaacacagtttctctgatgtcggc

SEQ ID NO: 755215 - DNA, 120 bp, Artificial Sequence
  ENSG00000213413_13 (sequence is synthesized)
cagcttgtgccctcggtctcttgccttggcagctgggtggcttgcctcccacatggcactgctgggcattgtctgttaatattgaataattgttttaagattattttcaataaggcttta

SEQ ID NO: 755216 - DNA, 120 bp, Artificial Sequence
  ENSG00000213413_14 (sequence is synthesized)
attgttttaagattattttcaataaggctttaccttttttaacttgcactgtggccatgagctctgctggaagtgacttgttggtgttatctcctcagttataaagtgaagggatttttc

SEQ ID NO: 755217 - DNA, 120 bp, Artificial Sequence
  ENSG00000213413_15 (sequence is synthesized)
tttttcagattactgagagtcttccgttactagggcagaggactgctgtttgctgacacaatcttggtgcgttggaagtgaaagggaagaggcactggtggctgtgctttgggcccgagc

SEQ ID NO: 755218 - DNA, 120 bp, Artificial Sequence
  ENSG00000213416_0 (sequence is synthesized)
atcaaactcagaacactcactctcctggaaacccaccgagaacctccaccctctgacaccatggtcaactcctgttgtggctctgtgtgctctgaccagggctgtggcctggagaactgc

SEQ ID NO: 755219 - DNA, 120 bp, Artificial Sequence
  ENSG00000213416_1 (sequence is synthesized)
tgccgccccagctgctgccagaccacctgctgcaggaccacctgctgccgccccagctgctgtgtgtccagctgctgcaggccccagtgctgccagtctgtgtgctgtcagcccacctgc

SEQ ID NO: 755220 - DNA, 120 bp, Artificial Sequence
  ENSG00000213416_2 (sequence is synthesized)
ccacctgctgccgccccagctgctgtcagaccacctgctgtaggaccacctgctgccgccccagctgctgtgtgtccagctgctgcagaccccagtgctgccagtctgtgtgctgccagc

SEQ ID NO: 755221 - DNA, 120 bp, Artificial Sequence
  ENSG00000213416_3 (sequence is synthesized)
ccacctgctgccgccccagctgctgtcagaccacctgctgcaggaccacttgctgccgccccagctgctgtgtgtccagctgctgcagaccccagtgctgccagtctgtgtgctgccagc

SEQ ID NO: 755222 - DNA, 120 bp, Artificial Sequence
  ENSG00000213416_4 (sequence is synthesized)
tgctgcatctccagcagctgctgcccctcttgctgtgaatccagctgctgccgcccctgctgctgcctgcgtccagtctgtggccgagtctcctgccacaccacttgctatcgcccaacc

SEQ ID NO: 755223 - DNA, 120 bp, Artificial Sequence
  ENSG00000213416_5 (sequence is synthesized)
tgtgtcatctccacctgcccccgccccttgtgctgtgcctcctcttgctgctaaatctctgctgtgaacacaccacttccttattacgtcctttcctacagatgaaggctctcattgcaa

SEQ ID NO: 755224 - DNA, 120 bp, Artificial Sequence
  ENSG00000213416_6 (sequence is synthesized)
acatgcggactgttcaagagaattgatctgggtcccataagcaaacctcatccttagaaattctgtatttgcattctaccttttgtccaaactcccttccttccaaaggaattcattgac

SEQ ID NO: 755225 - DNA, 120 bp, Artificial Sequence
  ENSG00000213416_7 (sequence is synthesized)
aatctcctaataaattgacaaattgtcctccaacatcctcccacctctttgacttcaggacatttattcatcatgcctaaggaatttgaagattgcctccatcatttgtagggccacaga

SEQ ID NO: 755226 - DNA, 120 bp, Artificial Sequence
  ENSG00000213416_8 (sequence is synthesized)
tcttaaagcctccaaccttgaagtccagtgaagtctctctcttaaagtcttttgcaaacatttttgtaccttgttatttccatgtaccaaaataaacctctattctattggcactgaaaa

SEQ ID NO: 755227 - DNA, 120 bp, Artificial Sequence
  ENSG00000213417_0 (sequence is synthesized)
aatagcccaacccacaccagcctcagacaccaccatgaccggctcctgctgcggctccaccttgtcctccctgagctacgggggaggctgctgccagccctgctgctgccgcgacccctg

SEQ ID NO: 755228 - DNA, 120 bp, Artificial Sequence
  ENSG00000213417_1 (sequence is synthesized)
ctgctgccgccccgtgacctgccagaccaccgtgtgccgccccgtgacctgcgtgccccgctgcacgcgccccatctgcgagccctgccgccgcccggtgtgctgcgacccctgctccct

SEQ ID NO: 755229 - DNA, 120 bp, Artificial Sequence
  ENSG00000213417_2 (sequence is synthesized)
gcaggaaggctgctgccgccccatcacctgctgcccctcgtcgtgcacggctgtggtgtgcaggccctgctgctgggccaccacctgctgccagcctgtgtctgtgcagtccccctgctg

SEQ ID NO: 755230 - DNA, 120 bp, Artificial Sequence
  ENSG00000213417_3 (sequence is synthesized)
ggacctcctcctgctgagaccccaatgcccccacagagcaatacactgaagcctaaacatctatctggtgtttttaaaaagttaaaagaaaaatagattttttttcacaaggtgacaata

SEQ ID NO: 755231 - DNA, 120 bp, Artificial Sequence
  ENSG00000213417_4 (sequence is synthesized)
gtgatttttaccatctggatacagcctggtgtaagcagacgtccattaccaccctcacccacattttcaggtgtctacatcagccttagtcattatggatagtaaatcgacctttaagaa

SEQ ID NO: 755232 - DNA, 120 bp, Artificial Sequence
  ENSG00000213417_5 (sequence is synthesized)
ttcctggggtggactttgcaaacacattctacaacctgatggtttttactgctcaaactgtcaccatcatcttttgcaatgtgttgctcactgttgtcaataaactaatttttcctggca

SEQ ID NO: 755233 - DNA, 120 bp, Artificial Sequence
  ENSG00000213420_0 (sequence is synthesized)
gctcccattgtctcggcagatgccgcctggtccagctatcgtgctcggtattcagttttccggagcagcgctctttctctggcccgcggagcggtcccgcggccgagtaccggattcccg

SEQ ID NO: 755234 - DNA, 120 bp, Artificial Sequence
  ENSG00000213420_1 (sequence is synthesized)
agtttgggaggctctgctttcctccttaggacccactttgccgtcctggggtggctgcagttatgtccgcgctgcgacctctcctgcttctgctgctgcctctgtgtcccggtcctggtc

SEQ ID NO: 755235 - DNA, 120 bp, Artificial Sequence
  ENSG00000213420_2 (sequence is synthesized)
ccggacccgggagcgaggcaaaggtcacccggagttgtgcagagacccggcaggtgctgggggcccggggatatagcttaaacctaatccctcccgccctgatctcaggtgagcacctcc

SEQ ID NO: 755236 - DNA, 120 bp, Artificial Sequence
  ENSG00000213420_3 (sequence is synthesized)
gggtctgtccccaggagtacacctgctgttccagtgagacagagcagaggctgatcagggagactgaggccaccttccgaggcctggtggaggacagcggctcctttctggttcacacac

SEQ ID NO: 755237 - DNA, 120 bp, Artificial Sequence
  ENSG00000213420_4 (sequence is synthesized)
tggctgccaggcacagaaaatttgatgagttttttctggagatgctctcagtagcccagcactctctgacccagctcttctcccactcctacggccgcctgtatgcccagcacgccctca

SEQ ID NO: 755238 - DNA, 120 bp, Artificial Sequence
  ENSG00000213420_5 (sequence is synthesized)
tattcaatggcctgttctctcggctgcgagacttctatggggaatctggtgaggggttggatgacaccctggcggatttctgggcacagctcctggagagagtgttcccgctgctgcacc

SEQ ID NO: 755239 - DNA, 120 bp, Artificial Sequence
  ENSG00000213420_6 (sequence is synthesized)
cacagtacagcttcccccctgactacctgctctgcctctcacgcttggcctcatctaccgatggctctctgcagccctttggggactcaccccgccgcctccgcctgcagataacccgga

SEQ ID NO: 755240 - DNA, 120 bp, Artificial Sequence
  ENSG00000213420_7 (sequence is synthesized)
ccctggtggctgcccgagcctttgtgcagggcctggagactggaagaaatgtggtcagcgaagcgcttaaggtgccggtgtctgaaggctgcagccaggctctgatgcgtctcatcggct

SEQ ID NO: 755241 - DNA, 120 bp, Artificial Sequence
  ENSG00000213420_8 (sequence is synthesized)
gtcccctgtgccggggggtcccctcacttatgccctgccagggcttctgcctcaacgtggttcgtggctgtctcagcagcaggggactggagcctgactggggcaactatctggatggtc

SEQ ID NO: 755242 - DNA, 120 bp, Artificial Sequence
  ENSG00000213420_9 (sequence is synthesized)
tcctgatcctggctgataagctccagggccccttttcctttgagctgacggccgagtccattggggtgaagatctcggagggtttgatgtacctgcaggaaaacagtgcgaaggtgtccg

SEQ ID NO: 755243 - DNA, 120 bp, Artificial Sequence
  ENSG00000213420_10 (sequence is synthesized)
cccgacccggtgcctgcccgcaaccgtcgagccccgccgccccgggaagaggcgggccggctgtggtcgatggtgaccgaggaggagcggcccacgacggccgcaggcaccaacctgcac

SEQ ID NO: 755244 - DNA, 120 bp, Artificial Sequence
  ENSG00000213420_11 (sequence is synthesized)
cggctggtgtgggagctccgcgagcgtctggcccggatgcggggcttctgggcccggctgtccctgacggtgtgcggagactctcgcatggcagcggacgcctcgctggaggcggcgccc

SEQ ID NO: 755245 - DNA, 120 bp, Artificial Sequence
  ENSG00000213420_12 (sequence is synthesized)
tgctggaccggagccgggcggggccggtacttgccgccagtggtcgggggctccccggccgagcaggtcaacaaccccgagctcaaggtggacgcctcgggccccgatgtcccgacacgg

SEQ ID NO: 755246 - DNA, 120 bp, Artificial Sequence
  ENSG00000213420_13 (sequence is synthesized)
cggcgtcggctacagctccgggcggccacggccagaatgaaaacggccgcactgggacacgacctggacgggcaggacgcggatgaggatgccagcggctctggagggggacagcagtat

SEQ ID NO: 755247 - DNA, 120 bp, Artificial Sequence
  ENSG00000213420_14 (sequence is synthesized)
gcagatgactggatggctggggctgtggctcccccagcccggcctcctcggcctccataccctcctagaagggatggttctgggggcaaaggaggaggtggcagtgcccgctacaaccag

SEQ ID NO: 755248 - DNA, 120 bp, Artificial Sequence
  ENSG00000213420_15 (sequence is synthesized)
ggccggagcaggagtgggggggcatctattggttttcacacccaaaccatcctcattctctccctctcagccctggccctgcttggacctcgataacgggggaggggtgccctagcatca

SEQ ID NO: 755249 - DNA, 120 bp, Artificial Sequence
  ENSG00000213420_16 (sequence is synthesized)
gaagggttcatggccctttcccctcctcccccctcagctgggcctggggaggagtcgaagggggctgcagagagggtagagaagggactttgcaggtgaatggctggggccccaaatcca

SEQ ID NO: 755250 - DNA, 120 bp, Artificial Sequence
  ENSG00000213420_17 (sequence is synthesized)
ggagattttcatcagaggtgggtgggtgttcacaatatttattttttcatttggtaatgggaggggggcctgggggtatttatttaggagggagtgtggtttccttagaaggtatagtct

SEQ ID NO: 755251 - DNA, 120 bp, Artificial Sequence
  ENSG00000213420_18 (sequence is synthesized)
ctagccctctaaggctggggctggtgatcagccccaacagagaaaatgaggagtttagagttgcagctggggaaggggtttgaaggaagttggaagtggggaggggtgggggcatctggt

SEQ ID NO: 755252 - DNA, 120 bp, Artificial Sequence
  ENSG00000213420_19 (sequence is synthesized)
ctcagaaatggaccagctggatgcagggcaggggactgagggtgcttgagtaggatgtgagacttcatgggcctgggttctgttgagttttttcagtatcaatttcttaaaccaaatttt

SEQ ID NO: 755253 - DNA, 120 bp, Artificial Sequence
  ENSG00000213420_20 (sequence is synthesized)
aaaaaaaacaaggtgggggggtgctcatctcgtgacctctgccacccacatccttcacaaactccatgtttcagtgtttgagtccatgtttattctgcaaataaatggtaatgtattgga

SEQ ID NO: 755254 - DNA, 120 bp, Artificial Sequence
  ENSG00000213420_21 (sequence is synthesized)
aaggagggggctggagtgaaacctccaatggtccacgatccatgatctctgaccccctcctcccctctgtggacccataccctcctcagtccccaagggcctgctcatctccatagcagt

SEQ ID NO: 755255 - DNA, 120 bp, Artificial Sequence
  ENSG00000213420_22 (sequence is synthesized)
aggagattggatactgcccccgcccaaccccccaggatccctcaatgactccacttccctgctgctgaaggccagatgcctggcttggcctctctcactgcccatcctctacctgacctc

SEQ ID NO: 755256 - DNA, 120 bp, Artificial Sequence
  ENSG00000213420_23 (sequence is synthesized)
ccagcctcaccttctgcctcctgaccgcctcctccctccccagctgtgatgggctcactcttgtccttgaatgttccctccacccctaactgcctctctatttccacccctcccacgaat

SEQ ID NO: 755257 - DNA, 120 bp, Artificial Sequence
  ENSG00000213420_24 (sequence is synthesized)
cagagtcagcaacctggaacctccctcctcagatctgtgacaatctcacctgctgccacgtggggtcaccaaccctaggtgtagggtggggtatgtgatttctgtctgtgcccagcacca

SEQ ID NO: 755258 - DNA, 67 bp, Artificial Sequence
  ENSG00000213420_25 (sequence is synthesized)
taatccccagctggggcaacatagctagacgtcatctcaagaaagaaagagagagagagaaagaaag

SEQ ID NO: 755259 - DNA, 90 bp, Artificial Sequence
  ENSG00000213420_26 (sequence is synthesized)
cagctggggcaacatagctagacgtcatctcgagagagagagacagagaaagaaagaaggaaagaaggaaggaaagaaagaaaaagaaag

SEQ ID NO: 755260 - DNA, 79 bp, Artificial Sequence
  ENSG00000213420_27 (sequence is synthesized)
aaagaaagaaagaaagaaaagaaagaaatcagccaggcatggtagcgcccgcgcctgtagtcccagttactcctgccag

SEQ ID NO: 755261 - DNA, 120 bp, Artificial Sequence
  ENSG00000213420_28 (sequence is synthesized)
cgcccgtgcctctgctcttagcgttcattgattaattcactaattcattcaacgagcatttattgagcgttgccctgaaagactgggggtaacagatcaatgagggggtctgtatccttt

SEQ ID NO: 755262 - DNA, 120 bp, Artificial Sequence
  ENSG00000213424_0 (sequence is synthesized)
gcgcagaccgagcagactgccgcagcgactcatcctatcgataaggttcagttagccaaggtggaggatgggaaaagaatggaactgtcccagctactcaatgagatcagggcaaactat

SEQ ID NO: 755263 - DNA, 120 bp, Artificial Sequence
  ENSG00000213424_1 (sequence is synthesized)
gaaaagatcctcaccagaaatcagatagagacggtgctctcaacaaggatccagctagaagaagacataagcaaaaaaatggacaaagatgaagaggctttgaaggcagctcaagcagaa

SEQ ID NO: 755264 - DNA, 120 bp, Artificial Sequence
  ENSG00000213424_2 (sequence is synthesized)
ctcaaggaggcccgacgccagtggcaccacctgcaagtggaaattgaatctctccatgctgtggaaaggggccttgaaaactccctacatgccagcgagcagcattaccagatgcagctg

SEQ ID NO: 755265 - DNA, 120 bp, Artificial Sequence
  ENSG00000213424_3 (sequence is synthesized)
caagacctagagactgtgattgaaggactagaaaaagagctacaggaagtaaggcgcggcatcgaaaagcagcttcaagagcacgagatgcttctcaacacgaagatgaggctggaacaa

SEQ ID NO: 755266 - DNA, 120 bp, Artificial Sequence
  ENSG00000213424_4 (sequence is synthesized)
gaaatagcaacttatcgccacctcctagaaaaagaagaaatcagatattatggttgtatccaaggtgggaaaaaagacaaaaagcctaccacaagtagagttggttttgttttaccatca

SEQ ID NO: 755267 - DNA, 120 bp, Artificial Sequence
  ENSG00000213424_5 (sequence is synthesized)
gccattataaatgaaatatcttttactacaaaagtcccacaaaagtatgagaatgaaaatgtagaaacagtaaccaaacaggcaatcttaaatgggagtatcgttaaggagagcactgaa

SEQ ID NO: 755268 - DNA, 120 bp, Artificial Sequence
  ENSG00000213424_6 (sequence is synthesized)
gctcatggcactattcagacagagaaagtggatgaagttattaaagaatgggaaggttctttctttaaagataaccctcgattgaggaaaaagtctgtttctcttcgatttgatcttcat

SEQ ID NO: 755269 - DNA, 120 bp, Artificial Sequence
  ENSG00000213424_7 (sequence is synthesized)
ttagcagccactgatgaagggtgtttagagactaagcaggataatctaccagatatagaagtcaggcttatcatgagaagatcatgcagtattccctctatcaaacctccatcaacagct

SEQ ID NO: 755270 - DNA, 120 bp, Artificial Sequence
  ENSG00000213424_8 (sequence is synthesized)
aattaatccaaagatagtatttgacttgattggaaaatgttaggatggaccaaggtgggccataccaactccctctgtcccaaaatgtaagttattacgtatgtatggaaaatgttatga

SEQ ID NO: 755271 - DNA, 120 bp, Artificial Sequence
  ENSG00000213424_9 (sequence is synthesized)
tcaatatgtggttctcttcagaagaaaaaaacaataaaggacatttctctgaatctaattatggagatagacatatatatatatatatgaatgagagggagtagcttaaaaataaaatca

SEQ ID NO: 755272 - DNA, 120 bp, Artificial Sequence
  ENSG00000213424_10 (sequence is synthesized)
caaatccagtacagtctctttctttatattctcccaatagtcttctttttcccttgaaacttcatcagagactgtaagcattaacctggtttagtaaagtctttgtaatttttttcaatg

SEQ ID NO: 755273 - DNA, 120 bp, Artificial Sequence
  ENSG00000213424_11 (sequence is synthesized)
attcaccattattccatgactggttaaacctacaatgtttgttctatttttcaaaaagagcaattataaacaagtttttaaagggggactcactattcacctaatgaggattcttctttt

SEQ ID NO: 755274 - DNA, 120 bp, Artificial Sequence
  ENSG00000213424_12 (sequence is synthesized)
tgagataaatcatttgtatactgagaaaaatgagttattttccatgagaaattctgagcaaactatagaacacaccccagggctaatttgagataagtacaattaagttaatctacatat

SEQ ID NO: 755275 - DNA, 120 bp, Artificial Sequence
  ENSG00000213424_13 (sequence is synthesized)
atctaaaaggttttttttgtaataagtatctgatttccggaagatttactttactcaaggaactttaaaggttgtatcccccaccaaaaaaagaaaaaaaatcagaaggccaactgcgca

SEQ ID NO: 755276 - DNA, 120 bp, Artificial Sequence
  ENSG00000213424_14 (sequence is synthesized)
aacaaaacatgaaaagcaaattgaaaaggtagttactatagttatcagaacagttacccaccatcccagtttttccaactgtaaagctaaatgtgattagattgtttgctataagccgta

SEQ ID NO: 755277 - DNA, 120 bp, Artificial Sequence
  ENSG00000213424_15 (sequence is synthesized)
gataagatactatatgaagtattataaatatttcttgcaatcatttatgtgaactaagataacggtattgttatctaagctaagagtatttagaggatttgtttttaaatcgttcaaatt

SEQ ID NO: 755278 - DNA, 120 bp, Artificial Sequence
  ENSG00000213424_16 (sequence is synthesized)
aattgtaataaatatgggtagaaaatatatttgtgaataagtgaggtattgttgcaaagtttttaaaataacctaatttgtttaatacaggtatatttaagatcttaataaatacctgtt

SEQ ID NO: 755279 - DNA, 120 bp, Artificial Sequence
  ENSG00000213424_17 (sequence is synthesized)
gacattagaaatttataagttcttaattcttttctaagcagaaaaagtagctgagtacaactcaccatactttttcccagctaaagtatcatctaagggctatagctacgttagcatttt

SEQ ID NO: 755280 - DNA, 120 bp, Artificial Sequence
  ENSG00000213424_18 (sequence is synthesized)
cgttagcattttagtacagcctttaaaatatttctctctctctctcctctctcttctcctctatctctctctccatatatacttattatatatatacatatatataatttatatatatgt

SEQ ID NO: 755281 - DNA, 120 bp, Artificial Sequence
  ENSG00000213424_19 (sequence is synthesized)
caaccagaaaaatgtatgttttaaccaggaaaatattatgttaaataatctttaacataatacagggatataaaatttttaattttctttcaattacttcagattccttttagtctggtt

SEQ ID NO: 755282 - DNA, 120 bp, Artificial Sequence
  ENSG00000213424_20 (sequence is synthesized)
tattctatttagtgaaaagggatgattttgttttgtcaaggatataacagcatgttaagtgcttattcttgcataagcatctgacctaaaatacatcctatacataaaaaatgtttcatt

SEQ ID NO: 755283 - DNA, 120 bp, Artificial Sequence
  ENSG00000213424_21 (sequence is synthesized)
tgatattgctaaatgctactaactttattaaagctttaaaaatgcaatcatataagctattgtactaaagttactgtactaagcaacagtgatcataataaagcaatatatctagcataa

SEQ ID NO: 755284 - DNA, 120 bp, Artificial Sequence
  ENSG00000213424_22 (sequence is synthesized)
ggtgctctcaacaaggatccaggtaatgatttcatacagacaggcaccttccagaataaggagacagtccatgtctacccaattcctgtcccggcctctctgagctagaagaagacataa

SEQ ID NO: 755285 - DNA, 120 bp, Artificial Sequence
  ENSG00000213424_23 (sequence is synthesized)
gaaataataataaatatatgtaaagaaattaactttgcgtaatcccagtaattactcttctttgtttaaatgtttccaaacatagttttagtatactgtgatttttttttttttttttga

SEQ ID NO: 755286 - DNA, 120 bp, Artificial Sequence
  ENSG00000213445_0 (sequence is synthesized)
ggcagggtgactggggtcccatgacagctgctgtgaccccagcaccttcctcaggatgtgggggcctggcagagggctgggcccacagttggggctacttcctgtgctgaaggaagtcct

SEQ ID NO: 755287 - DNA, 120 bp, Artificial Sequence
  ENSG00000213445_1 (sequence is synthesized)
cttgccattcctgctgccctgccgctgcctccctgggaacccatgtgtccttgtggcccctctgagcagccccctcctccttcagggcaggaactgctgccacaacctcaggctgggcac

SEQ ID NO: 755288 - DNA, 120 bp, Artificial Sequence
  ENSG00000213445_2 (sequence is synthesized)
caaacacccgtgcccgccaatgcggcccagcccccggagagtcaggcccacagagcatgcccatgtgggccggcggtgtggggagccctcggcggggcatggcccctgcgtccacagatg

SEQ ID NO: 755289 - DNA, 120 bp, Artificial Sequence
  ENSG00000213445_3 (sequence is synthesized)
acctctttgcccgcaagctgcgccagccagcaaggcccccgctgacaccgcacaccttcgagccgaggccagtccggggcccactcctgcgcagcggcagcgatgcaggcgaggccaggc

SEQ ID NO: 755290 - DNA, 120 bp, Artificial Sequence
  ENSG00000213445_4 (sequence is synthesized)
cccccacgccagccagcccccgtgcccgtgcccacagccacgaagaggccagccgacctgcagccacttccacccggctcttcactgacccgctggcactgctggggctgccagcagagg

SEQ ID NO: 755291 - DNA, 120 bp, Artificial Sequence
  ENSG00000213445_5 (sequence is synthesized)
aaccagagcctgccttcccaccagtgcttgagcctcgatggtttgcccactatgacgtgcaaagcctgctctttgattgggctccgaggtctcaggggatggggagccactcagaggcca

SEQ ID NO: 755292 - DNA, 120 bp, Artificial Sequence
  ENSG00000213445_6 (sequence is synthesized)
gctctgggaccctggcttcagccgaggaccaggctgccagctcggacctgctgcatggggcacctggctttgtgtgtgagctcgggggtgagggtgagctaggcctgggtggaccagcat

SEQ ID NO: 755293 - DNA, 120 bp, Artificial Sequence
  ENSG00000213445_7 (sequence is synthesized)
ccccacctgtgccccctgcactgcccaacgcggccgtgtccatcctggaggagccacagaaccgaacctcggcctacagcctggagcacgcagacctgggtgctggctactaccgcaaat

SEQ ID NO: 755294 - DNA, 120 bp, Artificial Sequence
  ENSG00000213445_8 (sequence is synthesized)
acttctatggcaaagaacatcagaacttcttcgggatggacgagtcgctgggcccggtggcagtgagcctgcggcgggaggagaaggagggcagcggagggggcaccctgcacagctacc

SEQ ID NO: 755295 - DNA, 120 bp, Artificial Sequence
  ENSG00000213445_9 (sequence is synthesized)
gcgtcatcgtgcggaccacgcagctccggacactccgtggcaccatctcggaggacgcgctgccgccggggcccccacggggtctgtccccaaggaaacttctggagcacgtggcgccgc

SEQ ID NO: 755296 - DNA, 120 bp, Artificial Sequence
  ENSG00000213445_10 (sequence is synthesized)
agctgagccccagctgcctgcgcctgggctcagcttcacccaaggtaccacggacgctgctcacactggatgagcaagtgctgagcttccaacgcaaggtgggcatcctgtactgccggg

SEQ ID NO: 755297 - DNA, 120 bp, Artificial Sequence
  ENSG00000213445_11 (sequence is synthesized)
cgggccagggctcggaggaggagatgtacaacaaccaggaggcgggaccggccttcatgcagtttctcaccttgctgggcgatgtggtgcggctcaaaggctttgagagttaccgggccc

SEQ ID NO: 755298 - DNA, 120 bp, Artificial Sequence
  ENSG00000213445_12 (sequence is synthesized)
agctagacaccaaaacggattccacaggcacgcactccctctacaccacataccaggaccacgagatcatgttccacgtgtccacgatgctgccttacacccctaataaccagcagcagc

SEQ ID NO: 755299 - DNA, 120 bp, Artificial Sequence
  ENSG00000213445_13 (sequence is synthesized)
tcctccggaagcgccacattggcaacgacattgtgaccatcgtgttccaggagcctggcagcaagcccttctgccccaccaccatccgctcgcacttccagcacgtgttcctagtggtgc

SEQ ID NO: 755300 - DNA, 120 bp, Artificial Sequence
  ENSG00000213445_14 (sequence is synthesized)
gggcacacacaccctgcacgccacacaccacctacagggtggccgtgagccgcacccaggacacccctgccttcgggccagctctgcctgctggcggaggccccttcgcagccaacgccg

SEQ ID NO: 755301 - DNA, 120 bp, Artificial Sequence
  ENSG00000213445_15 (sequence is synthesized)
gctgaatggtgagcaggcggccggccacgcgcgccagttccacgccatggccacgcgcacccgccagcagtacctgcaagacctggccaccaacgaggtgaccactacgtcgctggactc

SEQ ID NO: 755302 - DNA, 120 bp, Artificial Sequence
  ENSG00000213445_16 (sequence is synthesized)
gtcgctggactcggcttcacgcttcggcctgccctccctgggtgggaggcgccgggcggcccctcggggcccaggcgccgagctgcaggcagcgggctcactggtgtggggagtgcgcgc

SEQ ID NO: 755303 - DNA, 120 bp, Artificial Sequence
  ENSG00000213445_17 (sequence is synthesized)
gcgggtcgccgccggggctcaggcgagcggccccgaaggcatcgaggtgccctgcctgctgggcatctcggccgaggctctggtgctggtggcgccgcgcgacggccgcgtagtgttcaa

SEQ ID NO: 755304 - DNA, 120 bp, Artificial Sequence
  ENSG00000213445_18 (sequence is synthesized)
ttgcgcctgtcgcgacgtgctggcctggaccttctccgagcagcagctggacctgtaccacggccgcggggaggcgatcacgctgcgcttcgacgggtcccccggccaagccgtgggcga

SEQ ID NO: 755305 - DNA, 120 bp, Artificial Sequence
  ENSG00000213445_19 (sequence is synthesized)
ggtggtggcgcgcctgcagctggtgagccgtggctgcgagacccgcgagctggcgctgccccgcgacggtcaaggccgcctgggcttcgaggtggacgccgagggattcgtcacgcacgt

SEQ ID NO: 755306 - DNA, 120 bp, Artificial Sequence
  ENSG00000213445_20 (sequence is synthesized)
acgcacgtggagcgcttcacattcgccgagacggcggggctgcggcccggggcgcgcctcctgcgcgtgtgcggccagactctgcccagcctccggcccgaggccgctgcccagctcctg

SEQ ID NO: 755307 - DNA, 120 bp, Artificial Sequence
  ENSG00000213445_21 (sequence is synthesized)
gcccaaggtctgcgtcaccgtcctgccccccgacgagagcggccggccccgcaggagtttttcggagctgtacacgctgtcgctgcaggagcctagccggcggggggccccagatcctgt

SEQ ID NO: 755308 - DNA, 120 bp, Artificial Sequence
  ENSG00000213445_22 (sequence is synthesized)
gcaggatgaggtccagggggtgaccctgctgcccaccacaaagcagctgctgcacctgtgcctgcaagatggtggcagtcctccagggcctggggatctggccgaggagaggactgagtt

SEQ ID NO: 755309 - DNA, 120 bp, Artificial Sequence
  ENSG00000213445_23 (sequence is synthesized)
cctgcacagccagaactcgctgtcaccacgcagctctctgtcggatgaggccccagtcctgcccaacaccaccccggacctcctcctggccaccacagccaagccatcagtacccagtgc

SEQ ID NO: 755310 - DNA, 120 bp, Artificial Sequence
  ENSG00000213445_24 (sequence is synthesized)
tgacagtgagacacccctgacccaggacaggccaggcagtcccagtggctctgaggacaagggcaacccggcgccggagctgagggcctcctttctgccacgtaccttgtctctgcggaa

SEQ ID NO: 755311 - DNA, 120 bp, Artificial Sequence
  ENSG00000213445_25 (sequence is synthesized)
ctccatcagcaggatcatgtcggaggcgggcagtgggaccctggaggacgagtggcaggccatctcggagattgcctctacttgcaacaccattctggagtcgctgtcccgagagggaca

SEQ ID NO: 755312 - DNA, 120 bp, Artificial Sequence
  ENSG00000213445_26 (sequence is synthesized)
gcccatcccagagagtggagaccctaagggaactccaaaatctgatgctgagccagagcctgggaacctctcagagaaggtctctcacttggagtccatgctcaggaagctgcaggagga

SEQ ID NO: 755313 - DNA, 120 bp, Artificial Sequence
  ENSG00000213445_27 (sequence is synthesized)
cctgcagaaggagaaggcggacagggcggccctggaggaggaggtgcggagcctgagacacaacaaccggcggctgcaggcggagtctgagagtgcagccacacgcctcctcctggcctc

SEQ ID NO: 755314 - DNA, 120 bp, Artificial Sequence
  ENSG00000213445_28 (sequence is synthesized)
caagcagctgggctcacccaccgccgacctggcctgagccgtctggaaccacctgggcccctgagggcactgtggtcacactgggccctcctcaggaactctccctgcgcagaggcgtgt

SEQ ID NO: 755315 - DNA, 120 bp, Artificial Sequence
  ENSG00000213445_29 (sequence is synthesized)
cttagcactgcccccctccctagccccttatttggtggcggaagtggcctccaccccttccctgtttgtaaatattctgtggagaaaagaggacttcagggagtaaaaaagccactgatg

SEQ ID NO: 755316 - DNA, 120 bp, Artificial Sequence
  ENSG00000213445_30 (sequence is synthesized)
tctgctgccacatatgcctagaagaccagcggggcccctctcattagctggggctgggagtcagctggtgcactgccccctgccttggtcctgctgagtcttgacccccatgtcttcagg

SEQ ID NO: 755317 - DNA, 120 bp, Artificial Sequence
  ENSG00000213445_31 (sequence is synthesized)
gggcggcggcggctgggcgggagccccagaggtactggcgggagcaggggacgggaggcactactgtcgggcccgacaggggagaggtggcctagccgtgggcccgggtgatgtgtatgg

SEQ ID NO: 755318 - DNA, 120 bp, Artificial Sequence
  ENSG00000213445_32 (sequence is synthesized)
ttcgccgccagcaccctcccaacttccctccgggctccagctcagtcccgagtcaatatgtccagccccctgtctctgaccagccgttcctactctctctgtgtgacggcttagcctggc

SEQ ID NO: 755319 - DNA, 120 bp, Artificial Sequence
  ENSG00000213445_33 (sequence is synthesized)
cagccagccgggcaggaactgctgccacaacctcaggctgggcaccaaacacccgtgcccgccaatgcggcccagcccccggagagtcaggcccacagagcatgcccatgtgggccggcg

SEQ ID NO: 755320 - DNA, 120 bp, Artificial Sequence
  ENSG00000213445_34 (sequence is synthesized)
aggtgcagccctgcttagggcctggagatgggcagacccaggctcacatcctagctctgacacggaattgcttcaggcaagagcatctcctctggacctcatctgaccatctgtcacatg

SEQ ID NO: 755321 - DNA, 120 bp, Artificial Sequence
  ENSG00000213445_35 (sequence is synthesized)
cgggacttagtctagggtcaacatttggtggtgagatgaagcctagggcggggcttagtgatgcgcgtggtcgagcgggggcggggctgccagagggcgggaccaatcgttttcttcggc

SEQ ID NO: 755322 - DNA, 61 bp, Artificial Sequence
  ENSG00000213445_36 (sequence is synthesized)
agcgggaccccagcgcgggcggcggcggctgggcgggagccccagagtctcactctgtccc

SEQ ID NO: 755323 - DNA, 120 bp, Artificial Sequence
  ENSG00000213445_37 (sequence is synthesized)
cccaaggtctgcgtcaccgtcctgccccccgacgagagcggccggccccgcaggcctctgggaaagcggcttccctttctgagccacccctgctctccccagctctctgtcggatgaggc

SEQ ID NO: 755324 - DNA, 120 bp, Artificial Sequence
  ENSG00000213462_0 (sequence is synthesized)
gtctctggcggcagccggagcttctggtgtagtcttcactgctctgtgtcttctgctcctagaggcccagcttctgtggcctcgttacctgcaggtattgggagatccacagctaagacg

SEQ ID NO: 755325 - DNA, 120 bp, Artificial Sequence
  ENSG00000213462_1 (sequence is synthesized)
ccaggacccactggaagcctagaaatgttgcaggaattgtgccttggatccatccatccagtcagctgaaaccagcagcccaggacaagtggaccagccaacaggacctagaccatgcaa

SEQ ID NO: 755326 - DNA, 120 bp, Artificial Sequence
  ENSG00000213462_2 (sequence is synthesized)
cccagctgatcctacgatggaaccaaggtgccagtgagatgacaacagccctgctctggtcactccggaagctgaccagtccacacacggctgaagcttgaggagacaacagccctgctc

SEQ ID NO: 755327 - DNA, 120 bp, Artificial Sequence
  ENSG00000213462_3 (sequence is synthesized)
tagtcaccccagaagctgactagtctatgcacggccgaagcttgagtcatcatcagggaagtaaatgtggttagaaatctgaagtccagtaattttccttgtcatattaattactttgct

SEQ ID NO: 755328 - DNA, 120 bp, Artificial Sequence
  ENSG00000213462_4 (sequence is synthesized)
attaagctgtcactttgcttagccttctccccccaggaaaaagccttttctgtccatgctgggtatgaacatgctactcatcactttgttcttgctactccccttatccatgttaaaagg

SEQ ID NO: 755329 - DNA, 120 bp, Artificial Sequence
  ENSG00000213462_5 (sequence is synthesized)
agaaccctgggagggatgcctccactgcacccacactacgtggtcggggaacatcatgactaaaaccctgttgtatcacacttattatgagtgtgctgggacctgcctaggaacttgtac

SEQ ID NO: 755330 - DNA, 120 bp, Artificial Sequence
  ENSG00000213462_6 (sequence is synthesized)
tcacaaccagacaacctactcagtctgtgacccaggaaggggccagccttatgtgtgttatgaccctaagtcttcacctgggacctggtttgaaattcatgtcgggtcaaaggaagggga

SEQ ID NO: 755331 - DNA, 120 bp, Artificial Sequence
  ENSG00000213462_7 (sequence is synthesized)
tcttctaaaccaaaccaaggtatttccctctggcaaggatgtcgtatccttatactttgatgtttgccagatagtatccatgggctcactctttcccgtaatcttcagttccatggagta

SEQ ID NO: 755332 - DNA, 120 bp, Artificial Sequence
  ENSG00000213462_8 (sequence is synthesized)
ctatagtagctgccataaaaataggtatgcacaccctgcttgttccaccgattccccagtaacaacttgctgggactgcacaacgtggtccactaaccaacaatcactagggccaattat

SEQ ID NO: 755333 - DNA, 120 bp, Artificial Sequence
  ENSG00000213462_9 (sequence is synthesized)
gcttaccaaaataccattagaaccagattgtaaaacaagcacttgcaattctgtaaatcttaccatcttagagccagatcagcccatatggacaacaggtttaaaagcaccgctaggggc

SEQ ID NO: 755334 - DNA, 120 bp, Artificial Sequence
  ENSG00000213462_10 (sequence is synthesized)
acgagtcagcggtgaagaaattggcccaggagcctatgtctatctatatatcataaagaaaactcggacccgctcaacccaacagttccgagtttttgagtcattctatgagcatgttaa

SEQ ID NO: 755335 - DNA, 120 bp, Artificial Sequence
  ENSG00000213462_11 (sequence is synthesized)
ccagaaattgcctgagccccctcccttggccagtaatttattcgcccaactggctgaaaacatagccagcagcctgcacgttgcttcatgttatgtctgtgggggaatgaacatgggaga

SEQ ID NO: 755336 - DNA, 120 bp, Artificial Sequence
  ENSG00000213462_12 (sequence is synthesized)
ccaatggccatgggaagcaagggaactaatgccccaagataatttcacactaaccgcctcttccctcgaacctgcaccatcaagtcagagcatctggttcttaaaaacctccattattgg

SEQ ID NO: 755337 - DNA, 120 bp, Artificial Sequence
  ENSG00000213462_13 (sequence is synthesized)
cactaggaaagactttatggaggggcaaaagcaataattctgaatcaccacacccaagcccattctctcgtttcccatctttaaaccattcttggtaccaacttgaagctccaaatacct

SEQ ID NO: 755338 - DNA, 120 bp, Artificial Sequence
  ENSG00000213462_14 (sequence is synthesized)
ggcaggcaccctctggcctctactggatctgtgggccacaagcatatcgacaactgccagctaaatggtcaggggcctgtgtactggggacaattaggccgtccttcttcctaatgcccc

SEQ ID NO: 755339 - DNA, 120 bp, Artificial Sequence
  ENSG00000213462_15 (sequence is synthesized)
taaaacagggagaagccttaggataccccatctatgatgaaactaaaaggaaaagcaaaagaggcataactataggagattggaaggacaatgaatggcctcctgaaagaataattcaat

SEQ ID NO: 755340 - DNA, 120 bp, Artificial Sequence
  ENSG00000213462_16 (sequence is synthesized)
attatggcccagccacctgggcagaagatggaatgtggggataccgcaccccagtttacatgcttaaccgcattataagattgcaggcagtactagaaatcattaccaatgaaactgcag

SEQ ID NO: 755341 - DNA, 120 bp, Artificial Sequence
  ENSG00000213462_17 (sequence is synthesized)
gggccttgaatctgcttgcccagcaagccacaaaaatgagaaatgtcatttatcaaaatagactggccttagactacctcctagcccaggaagagggagtatgcggaaagttcaacctta

SEQ ID NO: 755342 - DNA, 120 bp, Artificial Sequence
  ENSG00000213462_18 (sequence is synthesized)
ctaactgctgcctggaacttgatgacgaaggaaaggtcatcaaagaaataactgctaaaatccaaaagttagctcacatcccagttcagacttggaaaggatagtctccagattcccttt

SEQ ID NO: 755343 - DNA, 120 bp, Artificial Sequence
  ENSG00000213462_19 (sequence is synthesized)
tcagaggttggttctcatcccttggaggatttaaaaccttagtacaaatagtcctagccatattgggagtttgccttatactcccttgtctcttacccctcattgtcaaaaatatccaaa

SEQ ID NO: 755344 - DNA, 120 bp, Artificial Sequence
  ENSG00000213462_20 (sequence is synthesized)
cagccatagaggctcttgtggacagacggactaccacacgactaatggccctaactaagtattaacccctgccaagaaaagagctacttcctcttgaagtaaatgaagatagtgatgctt

SEQ ID NO: 755345 - DNA, 120 bp, Artificial Sequence
  ENSG00000213462_21 (sequence is synthesized)
tctcttaaactttacttataaaaagcatcaaaggggggaatgaagcaggaaatataaaaggaaaaacaagtaaagggaaaacaagtcctttcctgaccagtctgactcactccaaagtcc

SEQ ID NO: 755346 - DNA, 120 bp, Artificial Sequence
  ENSG00000213462_22 (sequence is synthesized)
tgctggagctatgataattatctgcaaggccaggcaggggctccgaaggagtgggctccaggagcagggatgagaaaaacaagttctccttatcagtttccctgtttgaaattctctccc

SEQ ID NO: 755347 - DNA, 120 bp, Artificial Sequence
  ENSG00000213462_23 (sequence is synthesized)
cataacattattctttgttctgctctcacaactatttttgtaactatttctgcaagtctgtaaagattttgtaagttcttgtttttctttctgtagcatggcaaggtcacaagacatgtt

SEQ ID NO: 755348 - DNA, 120 bp, Artificial Sequence
  ENSG00000213462_24 (sequence is synthesized)
taagtaaggtaggctcatgttgcaaatcctgttgtaaaacctgtcacggtatgattaactgcctttgttctgcttctgtaagactgctttctcacctcgcaggttttgcgccaaaaaccc

SEQ ID NO: 755349 - DNA, 120 bp, Artificial Sequence
  ENSG00000213462_25 (sequence is synthesized)
gacttgcccctgcctgatgcatgtataaaagtcaagccctgtctttgttcagggctcagcctttggatgttaatccgctgggccagtggccacctaaataaaaccttcctgttgcaccca

SEQ ID NO: 755350 - DNA, 120 bp, Artificial Sequence
  ENSG00000213462_26 (sequence is synthesized)
agttcatgaatgggaagagctttggtctgcggggttcccagtccccctttttttctattaaaaatttgtggaagtctccgcagaaatattaaagaatttaattaaagagtaattcaagaa

SEQ ID NO: 755351 - DNA, 120 bp, Artificial Sequence
  ENSG00000213462_27 (sequence is synthesized)
gggagacaggacagcctgaagttggagtgtagcctctcaagggagcaggtggatgccctgaggctgagaggagtctcctggggtactcttcctttgaaaagcaaacccttagagaagtta

SEQ ID NO: 755352 - DNA, 120 bp, Artificial Sequence
  ENSG00000213462_28 (sequence is synthesized)
agattgtcttcaagcaacccgggttccatttctcgaagacacattgctggtcagccaatcagatggtggtaatgagggaaaaacaaataattactgccacctggattctccaagaattat

SEQ ID NO: 755353 - DNA, 120 bp, Artificial Sequence
  ENSG00000213462_29 (sequence is synthesized)
aaaaaaaaaaaaaaaaaaaaatcaaacctggccccagtgagatggtgcagcaacttgcaaagtgaaatgcaccttggggcactcaatggggcctagtacagtgtctctggagagggtggt

SEQ ID NO: 755354 - DNA, 120 bp, Artificial Sequence
  ENSG00000213462_30 (sequence is synthesized)
ctagtacagtgtctctggagagggtggtcactgagcacttaagtgagcaggatgggggtgggagaatctctcaagggattgggtggcctgacttgacatatgagtcaaacacatctgttt

SEQ ID NO: 755355 - DNA, 120 bp, Artificial Sequence
  ENSG00000213462_31 (sequence is synthesized)
tttaatgagcaccgtagctccctgggtttgtcaccttgaaaaggtttgttcacttattttgactacagttttttaactgtaacttgcattttattagtagggcttaaaaggtaagaaaat

SEQ ID NO: 755356 - DNA, 120 bp, Artificial Sequence
  ENSG00000213462_32 (sequence is synthesized)
aatcctatattccattcttaagaatactcatttaaggaagactctgtctcaaaaacaaaaacaaaactcatttacctttttctttcccagaccgagtttagaaattttctcaggtgtgtg

SEQ ID NO: 755357 - DNA, 77 bp, Artificial Sequence
  ENSG00000213462_33 (sequence is synthesized)
gtgtttttttaatgacttggtgacatccaacagaattccaaggcttagtttttagagtgctacaaaggaaaaaaata

SEQ ID NO: 755358 - DNA, 120 bp, Artificial Sequence
  ENSG00000213462_34 (sequence is synthesized)
ccaaggcttagtttttagagtgctacaaaggaaaaaaatagggaaaatctctcttccattttggctgtagaaaatgaatacatttccataagaaaatgtggtagataattggtgagttac

SEQ ID NO: 755359 - DNA, 120 bp, Artificial Sequence
  ENSG00000213462_35 (sequence is synthesized)
attcatgaaaacatcagttcctctttttgcagggtacatttgttacagggaatacctctgttctgtactctatcatcttgatatgtgatgttaatgctaaattttatgagaggaaacttg

SEQ ID NO: 755360 - DNA, 120 bp, Artificial Sequence
  ENSG00000213462_36 (sequence is synthesized)
gtatctcctagaagtgctcccatatgactaattgtttactacatgatttttaatggaaataataacatattgtcttaaaggaataaatgcttttgtatttcttattgaggtatgaaatgt

SEQ ID NO: 755361 - DNA, 120 bp, Artificial Sequence
  ENSG00000213463_0 (sequence is synthesized)
cttttccgggtctcgaggctgctgaaaccgaaaccgctgtgctgtgggcgcagcgccgagattgattcaccttcacctgtgctgcactccagctgacccaagtaggaagccagacgagct

SEQ ID NO: 755362 - DNA, 120 bp, Artificial Sequence
  ENSG00000213463_1 (sequence is synthesized)
gtaaaacatgaacggaagagtggattatttggtcactgaggaagagatcaatcttaccagagggccctcagggctgggcttcaacatcgtcggtgggacagatcagcagtatgtctccaa

SEQ ID NO: 755363 - DNA, 120 bp, Artificial Sequence
  ENSG00000213463_2 (sequence is synthesized)
cgacagtggcatctacgtcagccgcatcaaagaaaatggggctgcggccctggatgggcggctccaggagggtgataagatcctttcggtaaatggccaagacctaaagaacctgctgca

SEQ ID NO: 755364 - DNA, 120 bp, Artificial Sequence
  ENSG00000213463_3 (sequence is synthesized)
ccaggatgctgtagacctctttcgtaatgcaggctatgctgtgtctctgagagtgcagcacaggttacaggtgcagaatggacctataggacatcgaggtgaaggggacccaagtggtat

SEQ ID NO: 755365 - DNA, 120 bp, Artificial Sequence
  ENSG00000213463_4 (sequence is synthesized)
tcccatatttatggtgctggtgccagtgtttgccctcaccatggtagcagcctgggctttcatgagataccggcaacaactttgaaaaacttgctctctttcaatactcccaatgaagat

SEQ ID NO: 755366 - DNA, 120 bp, Artificial Sequence
  ENSG00000213463_5 (sequence is synthesized)
acatttcactcaccctccacccctgctattctgccatgtctttccctctctctgcatagccagatttgaagtgactgatacccaccccaaaccttgctgttcacagtctccaattcttca

SEQ ID NO: 755367 - DNA, 120 bp, Artificial Sequence
  ENSG00000213463_6 (sequence is synthesized)
tattctaatgggaaagtaaaggtattgtttgaaggaaaactgaagaaaagacttggcttagaacaaatgaggagttatatattttactaggacttttgatagaaattcagctacaaccca

SEQ ID NO: 755368 - DNA, 120 bp, Artificial Sequence
  ENSG00000213463_7 (sequence is synthesized)
aagagagaaagattgagtcttcctgtcaccataggcaataccttttttcttagctggcatgccataaaggccagctatgtgatattagaggaagaaaggatttttctttttaatgatctt

SEQ ID NO: 755369 - DNA, 120 bp, Artificial Sequence
  ENSG00000213463_8 (sequence is synthesized)
ccttgggaaattattgtggcctttatttaatttctaactacgtacctgggtgcctatatcgacaaagagtgagaagagcatttttacttttttaaaaaagcaaatacatatatacacata

SEQ ID NO: 755370 - DNA, 120 bp, Artificial Sequence
  ENSG00000213463_9 (sequence is synthesized)
cgtatgcaaatattatagtataatagtgatccctatggagaattaaaggtgagaaagctactttgtggtgtctaggtttctgataaaagggatgatcttaactgaagaatttaaagagat

SEQ ID NO: 755371 - DNA, 120 bp, Artificial Sequence
  ENSG00000213463_10 (sequence is synthesized)
acttaaacagagcaaatgtagtaggaacaagggagtgagccttataagaggacgttcagtctcatttattaaaataataactgagactgggagaggtggctcatgcctgtaaatcccagc

SEQ ID NO: 755372 - DNA, 120 bp, Artificial Sequence
  ENSG00000213463_11 (sequence is synthesized)
actttggtagcctgaagtgggagattgcttgagtccaggagaccagcctgggcaacatagcaaaacctcatctctatttaaaaaaaaaatagaaaaaaatgtaataactgaagcaactaa

SEQ ID NO: 755373 - DNA, 120 bp, Artificial Sequence
  ENSG00000213463_12 (sequence is synthesized)
ttaaaaatcttagaagaacaatatttattcttataacagccaactatggtgagttattataaggtaaattgccataatccagcgctgctcacatctaaaaaactttgaggtgtaaaggta

SEQ ID NO: 755374 - DNA, 120 bp, Artificial Sequence
  ENSG00000213463_13 (sequence is synthesized)
aatcgtaccaatctctgggctgccctagtgacttttttgatacctcagagtcctattgaagaaccaggtggaatgattgtggtaagggctatagtgctggagccaaacaccccagcaaga

SEQ ID NO: 755375 - DNA, 120 bp, Artificial Sequence
  ENSG00000213463_14 (sequence is synthesized)
aaactctaaaaggacaaaagataaggtagtgcctccaaggtggcacctgaaccctctcaggctactttttggtttctactaacaaacctgagggaaggaactgcctccctggcaggatgg

SEQ ID NO: 755376 - DNA, 120 bp, Artificial Sequence
  ENSG00000213463_15 (sequence is synthesized)
tgagggaaggaactgcctccctggcaggatgggcatcaaatcaactctggcttcagatttagttaaaatgaggccgggtgcagcggctcacacctgtcatctcagcactttgggaggccg

SEQ ID NO: 755377 - DNA, 69 bp, Artificial Sequence
  ENSG00000213463_16 (sequence is synthesized)
ccccatgtctactgaaaatacaaaaattacctggacatggtggcgcgtaggacctgggagacggaggtt

SEQ ID NO: 755378 - DNA, 63 bp, Artificial Sequence
  ENSG00000213463_17 (sequence is synthesized)
gcatggattgctagtatttttgaaaggctttatacactacatacggcttttaataaacctttt

SEQ ID NO: 755379 - DNA, 120 bp, Artificial Sequence
  ENSG00000213463_18 (sequence is synthesized)
aaggctttatacactacatacggcttttaataaacctttttgcagcaagagggaggaaaagagttttgtttgctttaggaggtagggaaatgtggtaggtgtttcatgcggcctaggagg

SEQ ID NO: 755380 - DNA, 120 bp, Artificial Sequence
  ENSG00000213463_19 (sequence is synthesized)
aggatatgaatgaatggatactatggaatgccagtgatctcgataaggtgggaaccatcctgttcatgttcttttaaggctggttttaagcactatgggtagctgaattttctggcttta

SEQ ID NO: 755381 - DNA, 120 bp, Artificial Sequence
  ENSG00000213463_20 (sequence is synthesized)
agaaaatcatttccattagccaaatatattggccatactataggccttttataattttgttagcaagattatcaggactcaggcaatcaactgtatttcatttctagcttggacagtctg

SEQ ID NO: 755382 - DNA, 120 bp, Artificial Sequence
  ENSG00000213463_21 (sequence is synthesized)
gtaattaaatgttgattggacatcagctttgtcaagacacttttacaaagaagtacagtgcatatcctccatcccatagggcttttgggttccaactgcgaagacaacactcttattggc

SEQ ID NO: 755383 - DNA, 120 bp, Artificial Sequence
  ENSG00000213463_22 (sequence is synthesized)
cacataggtaggacagtgtaagtaggggtcatgtttatattacagacagcaaaagagaaaagttactgagaactggggcgtttgagaaagttacgtggaggaaagggacaagttgaagac

SEQ ID NO: 755384 - DNA, 120 bp, Artificial Sequence
  ENSG00000213463_23 (sequence is synthesized)
ccttaagggcctcacagcctagttaagagaattcataaacaggtgagaagttaaaagtatatcagcaggctaagtattgaaaacaatattaaaggggtaccatgcaaaacacgatgcagc

SEQ ID NO: 755385 - DNA, 120 bp, Artificial Sequence
  ENSG00000213463_24 (sequence is synthesized)
aacaaagaagatatgcaggtaatcatcacattttcttttagaaattcagggaaaaaaagatgtcacataatggcatcaggctcaattggaaagggaaggcttttgaaaataagaggtccg

SEQ ID NO: 755386 - DNA, 120 bp, Artificial Sequence
  ENSG00000213463_25 (sequence is synthesized)
gtaagaccttgcctctgggtcactactggtatagggagaaacttgctttaaacagtcctgacataaagtgccttttgacatcaactattcaatacctttgagactcacttagacaactgg

SEQ ID NO: 755387 - DNA, 120 bp, Artificial Sequence
  ENSG00000213463_26 (sequence is synthesized)
actcattgtaggttccacagaaaaacacggacaacattctagttgtcactccaaccagccacactaggagggcacagcctctggtaccctttctgttcctgaaggcatgtacagcggctt

SEQ ID NO: 755388 - DNA, 120 bp, Artificial Sequence
  ENSG00000213463_27 (sequence is synthesized)
ctacagcaagcttgcttacctcccaggattcacctcatggtttggacactgattcctgagagagccttgagacacacaaagtgaaaaaaatgtcaagcaggaatgaaagctctagttttt

SEQ ID NO: 755389 - DNA, 120 bp, Artificial Sequence
  ENSG00000213463_28 (sequence is synthesized)
tgcttgttggtatatgtaaatttgtttaaaaagtatccattctgtcgttggtagaagttttgctttggttgataatagagattctgatgtactcttataacttaggttttctcagaaatt

SEQ ID NO: 755390 - DNA, 120 bp, Artificial Sequence
  ENSG00000213463_29 (sequence is synthesized)
atccattataggttgtaaaaaaattcatgttcttcatagattgagtctaatatttcttctatagattgcatctaatgttcctactacctaaattattacgttcaaagttttgaaaattga

SEQ ID NO: 755391 - DNA, 120 bp, Artificial Sequence
  ENSG00000213463_30 (sequence is synthesized)
acgaaggtatttttaagtacttaaaacatttctctatcattctgtattacatgtataattataagatattgtttgcttcaactagctgtactttgttttcctgtgaagtttcaacttatg

SEQ ID NO: 755392 - DNA, 120 bp, Artificial Sequence
  ENSG00000213463_31 (sequence is synthesized)
tgttatcgatttaacttaattgttccatctagccatgtataatggaaaaaggaagttaatatttgttattgtgttctatgccagggactgtaccaaactctgattggtacattatttcat

SEQ ID NO: 755393 - DNA, 120 bp, Artificial Sequence
  ENSG00000213463_32 (sequence is synthesized)
gtctcataactctgggatctaagtattgtcacaaagagactaaaaatgagagaaaaaattacttgactaggattatgtaggtggtaataatagaatcaggatttaaactcaggacttcag

SEQ ID NO: 755394 - DNA, 120 bp, Artificial Sequence
  ENSG00000213463_33 (sequence is synthesized)
atgccagcatcaatgatattctctcactggaagtggttctcaaagcaaggtcctgacaaaagcatcagcgttactggggaacttgttagaaaagcaagttcataggctgggcatggtggc

SEQ ID NO: 755395 - DNA, 120 bp, Artificial Sequence
  ENSG00000213463_34 (sequence is synthesized)
gcctgtaatcccagcactctaggaggcctaggcaggtgggtcacttgagctcaggagttttgagaccagcctgcacaatgtggtgaaaccctgtctttactaaaagtcaaacaaattagt

SEQ ID NO: 755396 - DNA, 120 bp, Artificial Sequence
  ENSG00000213463_35 (sequence is synthesized)
tagtggtgcattcctgtaggcccagctacacgggaggattgcttgagcccaggagactgaggtgcagtgagccgtgattgctccacttcattctagcctgagcaacggagtgagaccttg

SEQ ID NO: 755397 - DNA, 120 bp, Artificial Sequence
  ENSG00000213463_36 (sequence is synthesized)
aaaaacaaacaaacaaaaaacaaaaagcaagttcccagaagagaaaaaagaagttccagacctagtgaatcaaaaactctgagcgtggcatctcacaatctgtgtttttgtaatccttcc

SEQ ID NO: 755398 - DNA, 120 bp, Artificial Sequence
  ENSG00000213463_37 (sequence is synthesized)
tgtaatccttccaggtgactgattcatgctaaagtttgagactcattgctctatgccagtcatcattccctttgctcaggttagaatcatctggagagcttataaacgtccccatgccca

SEQ ID NO: 755399 - DNA, 120 bp, Artificial Sequence
  ENSG00000213463_38 (sequence is synthesized)
ggctgcacacagatcaattaaaaggaacctctgagggtgggactcaagcagcagtaaaataaagttcattgagtgattctggtgtgcagccgcagttgaaaatgttatatagcatttaaa

SEQ ID NO: 755400 - DNA, 120 bp, Artificial Sequence
  ENSG00000213463_39 (sequence is synthesized)
tgcagccgcagttgaaaatgttatatagcatttaaacaagacactatttaattaaacactatttaaattattaaattacatacattgcttcaggcaaaacaacaacaacaacaacaacaa

SEQ ID NO: 755401 - DNA, 120 bp, Artificial Sequence
  ENSG00000213463_40 (sequence is synthesized)
ttctgcacgaagtaagtggaacattcatttcttcctgatttgctaaggattgatcaacctccagcaaaatgtatgattagtgagtgtttcagttggtgcatcaattaaatgagaaccaat

SEQ ID NO: 755402 - DNA, 120 bp, Artificial Sequence
  ENSG00000213463_41 (sequence is synthesized)
catagaacattgaagctaaaaaggaccagagagcttctaggatgaatctgtcttagagatgagaaaaataaaggctcagagagggaagctaacttaactctgatcagacttagtttgttg

SEQ ID NO: 755403 - DNA, 120 bp, Artificial Sequence
  ENSG00000213463_42 (sequence is synthesized)
cagaagtgacctttctgtctcatatttatgtcttgaatatattcactacatgaatacacagactacccattttatcttagtctacttctttcttctctctttgggcctgaataaagacca

SEQ ID NO: 755404 - DNA, 120 bp, Artificial Sequence
  ENSG00000213463_43 (sequence is synthesized)
gaactgatagacagctaaaggatattgcaagcatcattattggaattgggagattccacagaacaatctgagaatgatctcatatcaaatccaatcagatgagttattctgagactaatt

SEQ ID NO: 755405 - DNA, 120 bp, Artificial Sequence
  ENSG00000213463_44 (sequence is synthesized)
ccaatagttctagagacttttttttttatggtggacattgtttttattgtgtaaataagcaatttttaaagtatatttaaagaaatgaaacataaggaagtgtataggctgtcaggtatg

SEQ ID NO: 755406 - DNA, 120 bp, Artificial Sequence
  ENSG00000213463_45 (sequence is synthesized)
tggggaagtgaagttcatgtagttttcatgtggagcccatacagattttattatagtcaattttagtgaaatttatcgttggtcagatgaaggtttttttccttcattcagcaaataact

SEQ ID NO: 755407 - DNA, 120 bp, Artificial Sequence
  ENSG00000213463_46 (sequence is synthesized)
aatgactgcctactatgtgctaggtgccgaagatagagagataaataacacttagtcactctaagctgaaattgctcagcatatgaaagtggaggaatatttgtaggtgattttgatgtt

SEQ ID NO: 755408 - DNA, 120 bp, Artificial Sequence
  ENSG00000213463_47 (sequence is synthesized)
aaagtatttttttaacatcacctggtagtagaagattgagttatgaagctgtctacctctcacctgtaatagttttagagttggttgctattttggtgtaagtcttttttgctgttcctc

SEQ ID NO: 755409 - DNA, 120 bp, Artificial Sequence
  ENSG00000213463_48 (sequence is synthesized)
ttttaactgcaaatctttttgagaccagcactcacatccaaaagggcaattgtgataaaaaagaagacagtattttaaggattctgatcagaaccagattcttttcttttcttttttttt

SEQ ID NO: 755410 - DNA, 120 bp, Artificial Sequence
  ENSG00000213463_49 (sequence is synthesized)
acccatctcggcctcccaaagtgcagaaccagattcttaactgccacagactcttgtattatgtaatttatatacagaacacaaagcacttgatttgcttaactgatgtacttgatgata

SEQ ID NO: 755411 - DNA, 120 bp, Artificial Sequence
  ENSG00000213463_50 (sequence is synthesized)
ctataaaacctatattatgagaaagcattgctccttcaaaggaatcaagtgatagcaaacactcggtcctgtttccaggttttcctcactgttcattttgcctttgttcttgcaggggga

SEQ ID NO: 755412 - DNA, 120 bp, Artificial Sequence
  ENSG00000213463_51 (sequence is synthesized)
gaatgaaaggggcgagagctaaagtgtgttgtcaatgcaagtcaatccttaaccaacaataatttacaaaagaactttatatttgctgtaatcattaaatttagttactaatcccaggaa

SEQ ID NO: 755413 - DNA, 120 bp, Artificial Sequence
  ENSG00000213463_52 (sequence is synthesized)
aagggttagtccttcctcctagtttgtagatttgcaaatggagatgaataattgaatcctattttaatcttttatctgcagtaatctgggcttcttattaccggatatatttgcatttta

SEQ ID NO: 755414 - DNA, 120 bp, Artificial Sequence
  ENSG00000213463_53 (sequence is synthesized)
cctccaggccatgttagttcttagaagattattttcctcatgaaccctgttttgttttgcttcctttctgcttcaattctaatgtcacattgcatacctggatgtaaacagcagtcagtt

SEQ ID NO: 755415 - DNA, 120 bp, Artificial Sequence
  ENSG00000213463_54 (sequence is synthesized)
tctcagatcaaatagagccctgtagcaacttggaagacacagaagacacacggacataaaactgtatttattatccagggaatgtcactacggattaattatgttaatgaggccatcaaa

SEQ ID NO: 755416 - DNA, 120 bp, Artificial Sequence
  ENSG00000213463_55 (sequence is synthesized)
atctatggtaatctttcaggctttgttgtttgataccagatacagcaaatgagataataatgtgtctaattgtgcctagccagtattggtatttaataaaactttgtcattgaatcttta

SEQ ID NO: 755417 - DNA, 120 bp, Artificial Sequence
  ENSG00000213465_0 (sequence is synthesized)
gtcccgggactgggaagaaacggcggccgggagggggctccggggaccatggggctcctgaccattctgaagaagatgaagcagaaagagcgggagctgcgactgctcatgcttggcctg

SEQ ID NO: 755418 - DNA, 120 bp, Artificial Sequence
  ENSG00000213465_1 (sequence is synthesized)
gacaatgctggaaagacaaccatcctgaagaagttcaatggggaggacatcgacaccatctccccaacgctgggcttcaacatcaagaccctggagcaccgaggattcaagctgaacatc

SEQ ID NO: 755419 - DNA, 120 bp, Artificial Sequence
  ENSG00000213465_2 (sequence is synthesized)
tgggatgtgggtggccagaagtccctgcggtcctactggcggaactactttgagagcaccgatggcctcatctgggtagtggacagcgcagaccgccagcgcatgcaggactgccagcgg

SEQ ID NO: 755420 - DNA, 120 bp, Artificial Sequence
  ENSG00000213465_3 (sequence is synthesized)
taacgccatccgcgaggtcctggagctggactccatccgcagccaccactggtgcatccagggctgcagcgccgtcaccggggagaacctgctgccgggcatcgactggctcctggatga

SEQ ID NO: 755421 - DNA, 120 bp, Artificial Sequence
  ENSG00000213465_4 (sequence is synthesized)
catttccagccgcattttcacagctgactgaaccactccagatgccccccacctagcagtccaggtccctcaaccttcaccaaacactacccatggggggttgggagtcagccggccaaa

SEQ ID NO: 755422 - DNA, 120 bp, Artificial Sequence
  ENSG00000213465_5 (sequence is synthesized)
ctaacactccccctcctccaccccagcctgctgctgctactgctgcccgctgctgctctgtggccacccggctcccatggcgggagggctgtgccctggctgtctctctggctcctgacc

SEQ ID NO: 755423 - DNA, 120 bp, Artificial Sequence
  ENSG00000213465_6 (sequence is synthesized)
tggcctttggctaccataccaagaagagagggctgggcggggaggagctgctactgctgctaccgaggctgtgggcctcatccttcactcagttgtgaaataaaccgctccttgccccga

SEQ ID NO: 755424 - DNA, 120 bp, Artificial Sequence
  ENSG00000213465_7 (sequence is synthesized)
actggcatggaactggacagagagcccaggtgcccctggggtctgacaaactctccctgggaccggcggggcttcctggatgggatgacatggagcagggccttgaggaaggcgtggagt

SEQ ID NO: 755425 - DNA, 120 bp, Artificial Sequence
  ENSG00000213465_8 (sequence is synthesized)
ggagcaaccctcctcatctttgctaataagcaggacctgcctggagcactgtcctctaacgccatccgcgaggtgagtccaggccccgggacaggctcgctgagggaaaggggcatacat

SEQ ID NO: 755426 - DNA, 120 bp, Artificial Sequence
  ENSG00000213465_9 (sequence is synthesized)
cctgctggtggaggaggtgggcagctcctaccctttgtgtacatgtatggacgtgtggctgccttctcagcagatgcccagaggggcccgtggccccagagggaaaccagaggcaggatc

SEQ ID NO: 755427 - DNA, 120 bp, Artificial Sequence
  ENSG00000213465_10 (sequence is synthesized)
ccttccttctctgggcccccaccatgggaggcccatggtgccagaggcaggacacatgctgtggactgagattgagttaacgtccctgtggtgttactacgtcactaccctgagcatcag

SEQ ID NO: 755428 - DNA, 120 bp, Artificial Sequence
  ENSG00000213465_11 (sequence is synthesized)
cacccacatcactgggctttagggaggataacccaaggccagtatgaagcttcgagaggccatggagcctggctcaagagtctgactctttgctgtgtgacctcagctgggggtggtggc

SEQ ID NO: 755429 - DNA, 87 bp, Artificial Sequence
  ENSG00000213465_12 (sequence is synthesized)
tctgactctttgctgtgtgacctcagctgggggtggtggcacgcacctatagtcctagctactctggaggctcagacaggaggatca

SEQ ID NO: 755430 - DNA, 120 bp, Artificial Sequence
  ENSG00000213471_0 (sequence is synthesized)
gcaacggcggcggccacgggcttgctagaggaagcgctgccccggcagccgcagccacggccaccgggagctaggagtgaacccctgcgggggagcagcttccccctcgcgatcgtgggg

SEQ ID NO: 755431 - DNA, 120 bp, Artificial Sequence
  ENSG00000213471_1 (sequence is synthesized)
acagccagtcctgtgaaacgaggaggcggttccggacgcccagaaacgcccagggagacctggagccgggggaagaggggacatgagcggccagctgagtccatccccaggcggctaggg

SEQ ID NO: 755432 - DNA, 120 bp, Artificial Sequence
  ENSG00000213471_2 (sequence is synthesized)
gcggacccagcagcccctcagctctcctcgtaaccacggaatctgagagaatggagccgagtacctgtaggaccatggaatcagaggaagactatgttgaggaaaaggaatctgagaagt

SEQ ID NO: 755433 - DNA, 120 bp, Artificial Sequence
  ENSG00000213471_3 (sequence is synthesized)
gtgttaaagagggagttaccaacccctctaactcttcacagcaggctctcttaaaagctgactataaggcattaaaaaatggggttccctcacccattatggccacaaaaattccgaaga

SEQ ID NO: 755434 - DNA, 120 bp, Artificial Sequence
  ENSG00000213471_4 (sequence is synthesized)
aagtcatagccccagttgacacaggcgacttagaagctgggaggaggaagagaaggcggaaacgcagatcactggccatcaacctgaccaactgcaagtatgagagtgtgcgtcgggcag

SEQ ID NO: 755435 - DNA, 120 bp, Artificial Sequence
  ENSG00000213471_5 (sequence is synthesized)
cccaaatgtgtggcctgaaggaggtgggggaggatgaagagtggactctgtactggacagactgcgctgtctcactggaacgagtcatggacatgaagaggtttcagaaaatcaaccact

SEQ ID NO: 755436 - DNA, 120 bp, Artificial Sequence
  ENSG00000213471_6 (sequence is synthesized)
tccctggcatgacagaaatctgccgcaaagatctgctggctcggaacctcaaccgcatgtacaaactctatccctctgagtacaacatcttcccccgcacctggtgcctccccgcagact

SEQ ID NO: 755437 - DNA, 120 bp, Artificial Sequence
  ENSG00000213471_7 (sequence is synthesized)
atggggacttccagtcctacggtcgtcagcgaaaagcccgcacatatatctgcaagccagacagtggctgtcagggacgtggcatcttcattacccgaaatccccgggagatcaagccag

SEQ ID NO: 755438 - DNA, 120 bp, Artificial Sequence
  ENSG00000213471_8 (sequence is synthesized)
gagagcatatgatctgccagcaatacatctccaagcccctcctcattgatggcttcaagtttgatatgcgagtctacgtcctgatcacatcctgtgaccctctccggatcttcacatatg

SEQ ID NO: 755439 - DNA, 120 bp, Artificial Sequence
  ENSG00000213471_9 (sequence is synthesized)
aggagggcctagcccgttttgccaccacgccctatatggagcccagccataacaacctggacaatgtctgcatgcacctgaccaactatgctatcaacaaacacaatgagaattttgtcc

SEQ ID NO: 755440 - DNA, 120 bp, Artificial Sequence
  ENSG00000213471_10 (sequence is synthesized)
gggatggcgctgtgggcagtaagaggaagctgtcgacactcaacatctggctgcaagagcacagctacaaccctggagagctgtggggggacatcgaggacatcatcatcaaaaccatca

SEQ ID NO: 755441 - DNA, 120 bp, Artificial Sequence
  ENSG00000213471_11 (sequence is synthesized)
atcttgctggaccacaagttgaagccctggctgctagaggtaaaccactctccaagctttaccacggactcatgccttgatcaagaagtaaaggatgcacttctctgtgatgctatgacc

SEQ ID NO: 755442 - DNA, 120 bp, Artificial Sequence
  ENSG00000213471_12 (sequence is synthesized)
cttgtcaacctccggggctgtgacaaaaggaaggtgatggaggaggataagcggcgagtcaaggaacggcttttccagtgctaccgacagccacgagaatctaggaaagaaaaaactgag

SEQ ID NO: 755443 - DNA, 120 bp, Artificial Sequence
  ENSG00000213471_13 (sequence is synthesized)
tcatcccatgtggcaatgctggaccaggaacgatatgaggattctcacctgggaaaataccggcggatctaccctgggcctgacacagagaagtatgcccgcttcttcaagcacaatggc

SEQ ID NO: 755444 - DNA, 120 bp, Artificial Sequence
  ENSG00000213471_14 (sequence is synthesized)
tccctcttccaagagactgctgcttccaaggccagagaggagtgtgccaggcagcaactagaggagatccgccttaagcaggaacagcaggagacctcgggcactaagaggcaaaaggcc

SEQ ID NO: 755445 - DNA, 120 bp, Artificial Sequence
  ENSG00000213471_15 (sequence is synthesized)
agggaccagaaccagggtgaatcagctggggagaaaagccgacccagggcagggctccagagcctttccacccacttggcttacaggaaccgcaactgggagaaagagctgctgccggga

SEQ ID NO: 755446 - DNA, 120 bp, Artificial Sequence
  ENSG00000213471_16 (sequence is synthesized)
cagctggacaccatgaggcctcaagaaattgtggaagaggaggagctggagcggatgaaggccctgctacaaagggagactctcatccgaagcctgggtattgtagagcagctcacccgt

SEQ ID NO: 755447 - DNA, 120 bp, Artificial Sequence
  ENSG00000213471_17 (sequence is synthesized)
ctgcagcaccctggcccccagggccagaaaaaacttcatgagagtcgggacaggctgggcagtcaagaactgaaatctatgagtctggtcctactggtgctcctaagaggggctgccaca

SEQ ID NO: 755448 - DNA, 120 bp, Artificial Sequence
  ENSG00000213471_18 (sequence is synthesized)
gagcagggcgctcctcatttcctgcatccagttctgccccatgaatcaatccccaggatcttaggggcactgccaagcatgaatgctgcaatcccacatgttccccggtaccatctgcag

SEQ ID NO: 755449 - DNA, 120 bp, Artificial Sequence
  ENSG00000213471_19 (sequence is synthesized)
cccaagaacttcaactggacaggagagccggcagccatcaactcctgttcattgtcaatgaagaaggctgggaggtgctatttttccagtgccagaatcaggctcactagccaaggacaa

SEQ ID NO: 755450 - DNA, 120 bp, Artificial Sequence
  ENSG00000213471_20 (sequence is synthesized)
gccagcagaaggctagaagccataaaccgagtcctggcaggatcagtgccacccactttaaccccaaagcagggctattttctgcaaccggaaagagtggcatctgactcatggactgaa

SEQ ID NO: 755451 - DNA, 120 bp, Artificial Sequence
  ENSG00000213471_21 (sequence is synthesized)
tgcaccttgccctccatggtaaactctgaacacagagcagccaaggttcccctctgccctgcgtctgcacccatgctgcagcgttccagagcactcctcaacatcaatcagttcaggtaa

SEQ ID NO: 755452 - DNA, 120 bp, Artificial Sequence
  ENSG00000213471_22 (sequence is synthesized)
ctgagagtaaaagtcctcctttagatgaagaatgtggcctggggctgatttgctatcaaaaacaactttttgcatagataatatgttcatatttgcattaaaaaaatcacaggaccaggc

SEQ ID NO: 755453 - DNA, 120 bp, Artificial Sequence
  ENSG00000213471_23 (sequence is synthesized)
tccatggtaaactctgaacacagagcagccaaggttcccctctgccctgcgtctgcacccatgctgcagcgttccagagcactcctcaacatcaatcagttcaggtgcggcccggggctg

SEQ ID NO: 755454 - DNA, 120 bp, Artificial Sequence
  ENSG00000213471_24 (sequence is synthesized)
gccgagcggaagccctgcccaccgaggtggcggagacaggcaggcctgggcagccgctggggcggagggacggctcttggaaacggaatccgtactttaattaaagtttatgcagttttc

SEQ ID NO: 755455 - DNA, 120 bp, Artificial Sequence
  ENSG00000213471_25 (sequence is synthesized)
gcaaaaccaaggtccagaggcctccttgaataggacacctgggacaggggtacactcaggtggtggaacacagaatgggagatgtgaaagccctggggtgggcaggaatgagcagaaggc

SEQ ID NO: 755456 - DNA, 120 bp, Artificial Sequence
  ENSG00000213471_26 (sequence is synthesized)
ataagatctctacccttttgacctgctgagtcaaatcttggtggtttttggcctctaccgtaggaatgcaggtttgggatccccagtgccctaatgtaagtctttagggacacactatct

SEQ ID NO: 755457 - DNA, 120 bp, Artificial Sequence
  ENSG00000213471_27 (sequence is synthesized)
agagaggcaggccagctgatttgctctcactggtctgtgaattggagatctctatggcagagttttgtggccttggaagccagagcatccagcctccccggctgaggccatgggagagga

SEQ ID NO: 755458 - DNA, 120 bp, Artificial Sequence
  ENSG00000213471_28 (sequence is synthesized)
atatcttagaccctctagttaatgcctgcaagaggccaccacctgctcaggtggtctgggaaaggggtgtataatgactcctcctggcaggtaaaccactctccaagctttaccacggac

SEQ ID NO: 755459 - DNA, 120 bp, Artificial Sequence
  ENSG00000213471_29 (sequence is synthesized)
cctccccaggtttccaaagggcattaaatctttgctaaatgaatgactgccaccaagttccactttgaaaagccctgcccaggaaccccatttgtataaggcaaaatacaaagacaccaa

SEQ ID NO: 755460 - DNA, 120 bp, Artificial Sequence
  ENSG00000213471_30 (sequence is synthesized)
gaattcctcaataccctaagattaattggggatcggtaaagactagaagatgaagaggcgccaaggccagccatgtactcatttctgctcatcaagccttagcctgggtttatcgctagg

SEQ ID NO: 755461 - DNA, 120 bp, Artificial Sequence
  ENSG00000213512_0 (sequence is synthesized)
agaactaaagagaagagaataaagactcataactttctcattgaagctgccttcttaccaagtccagaggatctctactctggacagaggaacgccctgaacatggcatcagagatccac

SEQ ID NO: 755462 - DNA, 120 bp, Artificial Sequence
  ENSG00000213512_1 (sequence is synthesized)
atgccaggcccagtgtgcctcactgagaacactaaagggcatctggtggtgaattcagaagctctggaaatcctgtctgccattacacagcctgtagtagtggtggcaattgtgggcctc

SEQ ID NO: 755463 - DNA, 120 bp, Artificial Sequence
  ENSG00000213512_2 (sequence is synthesized)
taccgcacaggcaaatcctacctaatgaacaagctggctgggaagaacaaaggcttccctctgggctgcacagtgaagtctgaaaccaaaggcatctggatgtggtgtgtgccccacccc

SEQ ID NO: 755464 - DNA, 120 bp, Artificial Sequence
  ENSG00000213512_3 (sequence is synthesized)
tccaagccaaaccacaccctgatccttctggacacggagggcctgggtgatatggaaaagagtgaccctaagagtgactcgtggatctttgccctggctgtgcttctaagcagcagcttt

SEQ ID NO: 755465 - DNA, 120 bp, Artificial Sequence
  ENSG00000213512_4 (sequence is synthesized)
gtctacaacagcatgggcaccatcaaccaccaggccctggagcagctgcactacgtgactgagctaacagagctaatcagggcaaaatcgtgccccagacctgatgaagttgaggactcc

SEQ ID NO: 755466 - DNA, 120 bp, Artificial Sequence
  ENSG00000213512_5 (sequence is synthesized)
agcgagtttgtgagtttctttccagactttatttggactgttcgagattttaccctggagctgaagttagatggacaccccatcacagaagatgagtacctggagaatgccttgaagctg

SEQ ID NO: 755467 - DNA, 120 bp, Artificial Sequence
  ENSG00000213512_6 (sequence is synthesized)
atttcaggcaagaatccccaaatccaaaattctaacaagcccagggagtggatcaggcatttctttccaaaacagaagtgctttgtctttgaccggccaataaatgacaaaaaactctta

SEQ ID NO: 755468 - DNA, 120 bp, Artificial Sequence
  ENSG00000213512_7 (sequence is synthesized)
ctccatgttgaagaagtacgagaagaccaactggatagtaatttccagatgcaatcagaaaatttctgttcttatatcttcacccatgcaaagaccaagaccctgagagagggaatcctt

SEQ ID NO: 755469 - DNA, 120 bp, Artificial Sequence
  ENSG00000213512_8 (sequence is synthesized)
gtcactggaaaccggctggggatgctggtggagacctacctggatgccatcaacagtggagcgactccttgtctggagaatgcaatggcagttctggcccagtgtgagaactcagcagcc

SEQ ID NO: 755470 - DNA, 120 bp, Artificial Sequence
  ENSG00000213512_9 (sequence is synthesized)
gtgcagagggcagccaaccactacagccagcagatggcccagcaagtgagattccccacagacacactccaggagctgctggacgtgcatgcagtttgtgagagggaagccattgcagtc

SEQ ID NO: 755471 - DNA, 120 bp, Artificial Sequence
  ENSG00000213512_10 (sequence is synthesized)
aagccaggaatttcagaagaagcttgtggacaccatggagaaaaagaaggaagactttgtgctgcagaatgaagaggcatctgccaaatattgtcaggctgagcttaagcggctttcaga

SEQ ID NO: 755472 - DNA, 120 bp, Artificial Sequence
  ENSG00000213512_11 (sequence is synthesized)
gctcttgacagaaagtatttcaagaggaactttctttgttccgggggggcacaatatctacttagaagcaaaaaagaagattgaacaggactatacactagtgcccagaaaaggagttaa

SEQ ID NO: 755473 - DNA, 120 bp, Artificial Sequence
  ENSG00000213512_12 (sequence is synthesized)
ggcagacgaggtcctccagagcttcctgcagtcacaggtggttatagaggaatccatcctgcagtcagacaaagccctcactgctggagagaaggccatagcagctaagcaggctaagaa

SEQ ID NO: 755474 - DNA, 120 bp, Artificial Sequence
  ENSG00000213512_13 (sequence is synthesized)
ggaggcagctgaaaaggaacaggagctgctaagacaaaaacagaaggaacagcagcaaatgatggaggctcaagagagaagtttccaggaaaacatagctcaactcaagaagaagatgga

SEQ ID NO: 755475 - DNA, 120 bp, Artificial Sequence
  ENSG00000213512_14 (sequence is synthesized)
gagggaaagggaaaactatatgagagaactgagaaagatgttgagtcacaagatgaaggtcctagaagaactgcttactgaaggatttaaagagatatttgagtcgttaaatgaagagat

SEQ ID NO: 755476 - DNA, 120 bp, Artificial Sequence
  ENSG00000213512_15 (sequence is synthesized)
taatcgactgaaagaacaaattgaagcagctgaaaatgaagagccctcagtgttttcacagattcttgatgtggctggcagtatatttattgcagcactacctggggctgctaagctagt

SEQ ID NO: 755477 - DNA, 120 bp, Artificial Sequence
  ENSG00000213512_16 (sequence is synthesized)
tgatttaggaatgaaaattcttagctcattatgtaataggctgagaaatcctggtaagaaaattataagctgaggtttcttttgttaaaatggtataacgctgttgctcattttaaaagt

SEQ ID NO: 755478 - DNA, 120 bp, Artificial Sequence
  ENSG00000213512_17 (sequence is synthesized)
atatgtgttattgcagtttcatttaagaaaagtttaaaattaaaaagcaaatttcaaagaatattatggcctgaagttcataaaaacaaacttaattttgactaaagtaataattaatag

SEQ ID NO: 755479 - DNA, 120 bp, Artificial Sequence
  ENSG00000213512_18 (sequence is synthesized)
aaatggggaacaagttagaagataaaattattcctagaaaagatttaagtaaagcaaaaggacaaatggtaatataaagaaattattttcaattaatgttatagtcacagagataattta

SEQ ID NO: 755480 - DNA, 120 bp, Artificial Sequence
  ENSG00000213512_19 (sequence is synthesized)
agttataattagctcttgcaaatcagtgagaagagagtaacgccacatattttaaacaggcaaaaatatgataataaaaatgtttaattttactgacaataaaagttgtgcaaagaaaaa

SEQ ID NO: 755481 - DNA, 120 bp, Artificial Sequence
  ENSG00000213516_0 (sequence is synthesized)
cacccctcatccagtctcttccagcctagagatcctggcctacccctccgccaaagcgcgcactgagtgcaaaccccagagtcaatccctgtcccggctccgccccccgcgtccgaatcc

SEQ ID NO: 755482 - DNA, 120 bp, Artificial Sequence
  ENSG00000213516_1 (sequence is synthesized)
cgcccagccgggccctcaagcccagtcgggactcgagcctagggaggcgaggttcccgcaccggataggaacattctgttgttttcctctgccatctagtggcaaaagaaagtaattttc

SEQ ID NO: 755483 - DNA, 120 bp, Artificial Sequence
  ENSG00000213516_2 (sequence is synthesized)
ctggttttttgaatggatagccataccttaaaaagcatccagattgcgcagtagtgctagcggcttcgcggttcagtcctcctaactgacagccgccactggtgctgagctgctaggaag

SEQ ID NO: 755484 - DNA, 120 bp, Artificial Sequence
  ENSG00000213516_3 (sequence is synthesized)
cccctgtcggcgagcttgttggagcttgaacccactgtcacccctccgactcaccggcaaaaaaaaaaatggttgaagcagatcgcccaggaaagctcttcattggtgggcttaatacgg

SEQ ID NO: 755485 - DNA, 120 bp, Artificial Sequence
  ENSG00000213516_4 (sequence is synthesized)
aaacaaatgagaaagctcttgaaacagtatttggcaaatatggacgaatagtggaagtactcttgataaaagaccgtgaaaccaacaaatcaagaggatttgcttttgtcacctttgaaa

SEQ ID NO: 755486 - DNA, 120 bp, Artificial Sequence
  ENSG00000213516_5 (sequence is synthesized)
gcccagcagacgctaaggatgcagccagagacatgaatggaaagtcattagatggaaaagccatcaaggtggaacaagccaccaaaccatcatttgaaagaggtagacatggaccgcccc

SEQ ID NO: 755487 - DNA, 120 bp, Artificial Sequence
  ENSG00000213516_6 (sequence is synthesized)
cacctccaagaagtagaggtcctccaagaggttttggagctggaagaggaggaagtggaggaaccaggggacctccttcacgaggaggacacatggatgatggtggatattccatgaatt

SEQ ID NO: 755488 - DNA, 120 bp, Artificial Sequence
  ENSG00000213516_7 (sequence is synthesized)
ttaacatgagttcttccaggggaccactcccagtaaaaagaggaccaccaccaagaagtgggggtccttctcctaagagatctgcaccttcaggactagttcgcagcagcagtggaatgg

SEQ ID NO: 755489 - DNA, 120 bp, Artificial Sequence
  ENSG00000213516_8 (sequence is synthesized)
gaggaagagctcctctatcacgtggaagagatagttatggaggtccacctcgaagggaaccgctcccctctcgtagagatgtttatttgtccccaagagatgatgggtattctactaaag

SEQ ID NO: 755490 - DNA, 120 bp, Artificial Sequence
  ENSG00000213516_9 (sequence is synthesized)
acagctattcaagcagagattacccaagttctcgtgatacaagagattatgcaccaccaccacgagattatacttaccgtgattatggtcattccagttcacgtgatgactatccatcaa

SEQ ID NO: 755491 - DNA, 120 bp, Artificial Sequence
  ENSG00000213516_10 (sequence is synthesized)
gaggctatggcgatagagatggatatggtcgtgatcgtgactattcagatcatccaagtggaggttcctacagagattcatatgagagttatggtaactcacgtagtgctccacttacac

SEQ ID NO: 755492 - DNA, 120 bp, Artificial Sequence
  ENSG00000213516_11 (sequence is synthesized)
gagggcccccgccatcttatggtggaagcagtcgctatgatgattatagcagctcacgtgatggatatggtggaagtcgagacagttactcaagcagccgaagtgatctctactcaagtt

SEQ ID NO: 755493 - DNA, 120 bp, Artificial Sequence
  ENSG00000213516_12 (sequence is synthesized)
gtgacagggttggcagacaagaaagagggcttcccccttctgtagaaagggggtacccttcttcacgtgattcctacagcagttcaagccgcggagcaccaagaggtgctggccctggag

SEQ ID NO: 755494 - DNA, 120 bp, Artificial Sequence
  ENSG00000213516_13 (sequence is synthesized)
gaagccgatctgatagagggggaggcagaagcagatactagaaacaaacaaaactttggaccaaaatcccagttcaaagaaacaaaaaaaagagtggaaactattctatcataactaccc

SEQ ID NO: 755495 - DNA, 120 bp, Artificial Sequence
  ENSG00000213516_14 (sequence is synthesized)
aaggactactaaaaggaaaaattgtgttaccttttttaaattccctgttaagtcccttccgtaatttttatgttcttgtgaggaaaaaagtaaaacatgtttaattttatttgactttat

SEQ ID NO: 755496 - DNA, 120 bp, Artificial Sequence
  ENSG00000213516_15 (sequence is synthesized)
gacattgcttttcaacaagcaaatgttaaatgtgttaagccttgtagtactagtgttgtaactttccaagtaaaggtgtccctaaagaccacttcctatctggtttttcccagtaaatga

SEQ ID NO: 755497 - DNA, 120 bp, Artificial Sequence
  ENSG00000213516_16 (sequence is synthesized)
ggcaagcaattctaagatcttccacaaaacatctagccaactaaaatggagagatgaatcattctgcctatacaaacaagctagctattagagggtggttggagtatgctactcataaga

SEQ ID NO: 755498 - DNA, 120 bp, Artificial Sequence
  ENSG00000213516_17 (sequence is synthesized)
tttcagggtgttttctaactgaaatctcactgttctcagtatgcaaaacctgaaatcagatgcctatgtaaggaaagtgctattcacccagtaaacccaaaaaaagcaaatggataatgc

SEQ ID NO: 755499 - DNA, 120 bp, Artificial Sequence
  ENSG00000213516_18 (sequence is synthesized)
tggccattttgcctttctgacatttccttgggaatctgcaagaacctcccctttcccctcccacaataagaccatttaagtgtgtgctaaacaactacggaatactaaataaaaagtttg

SEQ ID NO: 755500 - DNA, 120 bp, Artificial Sequence
  ENSG00000213516_19 (sequence is synthesized)
gaatttatctccaacttcctaaaggcttatgacttctaaaaagtgaatctatcagcattccacatcagatttaaagcatcaaatgcctgtgaaacagcaaagatggttgaagattgtgct

SEQ ID NO: 755501 - DNA, 120 bp, Artificial Sequence
  ENSG00000213516_20 (sequence is synthesized)
cattatgtttgtggagtgctgattgattcacagtagataacgctggcagtaagagaaatcaaatgctaagagttgttgaagcagaaggcggctgattgttggtaagtcagtgcagttgca

SEQ ID NO: 755502 - DNA, 120 bp, Artificial Sequence
  ENSG00000213516_21 (sequence is synthesized)
taagcagtgctgtcagaattggtttggtgcaggcaatagattttgccttcaagggttcctgtggatctcaggaaggcatcagtgttgattaacactcataactagggagtgagtggtagt

SEQ ID NO: 755503 - DNA, 120 bp, Artificial Sequence
  ENSG00000213516_22 (sequence is synthesized)
tacttaagtaattgaccaaatggaaaaggggaagtaattaaggaaattggtaagtggaggtagtcaggaggttctcgtggtcctttacacagattttacagctttgggtttcattttgtt

SEQ ID NO: 755504 - DNA, 120 bp, Artificial Sequence
  ENSG00000213516_23 (sequence is synthesized)
tagctaaagtcatggggacaactcttcaatttagaacttaagatgaattataaaaatgatggatataagtggtagctctatctggtgaagtgtcttgtcagtaagtgaaacatttttttg

SEQ ID NO: 755505 - DNA, 120 bp, Artificial Sequence
  ENSG00000213516_24 (sequence is synthesized)
tggtggcttatccacaaacagtttagttgtagaataaaacttatgagtgacatctggaaagtaacaaccatgctaagatggcaaacacactggaaacaattgggccacttggctttcttt

SEQ ID NO: 755506 - DNA, 120 bp, Artificial Sequence
  ENSG00000213516_25 (sequence is synthesized)
tgctgtattgttttataagcctgctttacctccccgtcttggaaacaagttttagtttattgctttggagactagagccaatagtgtaatgttctcaaaggaaacagacttgagttgttg

SEQ ID NO: 755507 - DNA, 120 bp, Artificial Sequence
  ENSG00000213516_26 (sequence is synthesized)
gattagaggaactaactcaacttctaattttttttgttgtaattatggcactgtcatgttttaacatttgcaactagggatagtaagtacaacatttttaactctcatttggcagactac

SEQ ID NO: 755508 - DNA, 120 bp, Artificial Sequence
  ENSG00000213516_27 (sequence is synthesized)
tactaatcacagaccacaagggtaatgaccaaatttatgtggttgttacacttccatagttgtcttagccgaatccttccatattcttatgattacttgggttaaagcttctgtgaggac

SEQ ID NO: 755509 - DNA, 120 bp, Artificial Sequence
  ENSG00000213516_28 (sequence is synthesized)
cttttggctcttaagatatcctaaatatttaaaatatttagatatcctaaatataggatatagagtttgtaccaaatatgaatgaatattgttcaaagcaaggagtatgttaaaatgacc

SEQ ID NO: 755510 - DNA, 120 bp, Artificial Sequence
  ENSG00000213516_29 (sequence is synthesized)
agacacctgtttgataaatagtttactgaactagcagacgtgtggaaaaagaatcagatcttgattcttctgggtttatactggttgtaaaacagaatgatattagaaaatgttttcctt

SEQ ID NO: 755511 - DNA, 120 bp, Artificial Sequence
  ENSG00000213516_30 (sequence is synthesized)
gtttaagtggtagttgaacatagaacttgggtattatagatcacttttcactttttggaatgttttgtattgaaacttaatacaactttaacatggcaaaaaaaaaaaaaatccaaaatc

SEQ ID NO: 755512 - DNA, 120 bp, Artificial Sequence
  ENSG00000213516_31 (sequence is synthesized)
tatgagataattttgttaaagttggcttgcttgggcgggtgcttggtccagagggagaaaagaaggcatgatttcagaatactctggcagctttttaaattcagctttatcaagttacag

SEQ ID NO: 755513 - DNA, 120 bp, Artificial Sequence
  ENSG00000213516_32 (sequence is synthesized)
taaactgtatctgtttagaattacaactcaatggttattttgacagatgtatatgccatgaagccactgtcaccatcaacatgcagaacacttccatcgcccccaaaagattcctcaagt

SEQ ID NO: 755514 - DNA, 120 bp, Artificial Sequence
  ENSG00000213516_33 (sequence is synthesized)
tcctttgcagtccatccctcacgctgctgatttgtctttgtcaccatatattagtttgctttgtggtggtgtttagtattttatataaatgggattgtgtagcatgtacttttttgttta

SEQ ID NO: 755515 - DNA, 120 bp, Artificial Sequence
  ENSG00000213516_34 (sequence is synthesized)
tggtttctttcacacacaatgactttgaaattcaccaggttgcagtgtatcagtagcttattccttttattgctgagtagtgtcccattatgtgaatatgccattatttgtttttctact

SEQ ID NO: 755516 - DNA, 120 bp, Artificial Sequence
  ENSG00000213516_35 (sequence is synthesized)
cacctgttgatggaccttgggattgtttccagtttggggctactgtgaataaaactgttaggaacatttgtgtacaagccactgtgtagacataggttttcctttctcttgggtaaatac

SEQ ID NO: 755517 - DNA, 120 bp, Artificial Sequence
  ENSG00000213516_36 (sequence is synthesized)
ctaccagtaaaatggttgggttgcatggcagatttatgtttaataaagtaactgccaaactgtttgttttccaaaggggctatacccttttatattcccaccagggttgtatagagttcc

SEQ ID NO: 755518 - DNA, 120 bp, Artificial Sequence
  ENSG00000213516_37 (sequence is synthesized)
aactgccaacactcagttttcagccattctgatgggaatctagtggtatctcattgtggttttattttcatttccccgggtgactaatgctggtaagcatcttttaaggtactttttggc

SEQ ID NO: 755519 - DNA, 120 bp, Artificial Sequence
  ENSG00000213516_38 (sequence is synthesized)
cagttgtatattttctgtgaagtggctgtcaaatcttttgcccacttttaattggattgtttgtcttattgagttgtaaaagttctttatatatactgtattaaagtcctttgtaagaca

SEQ ID NO: 755520 - DNA, 120 bp, Artificial Sequence
  ENSG00000213516_39 (sequence is synthesized)
gtggcccccaccccttccctcctccatttccatccattccgcgatcgcggcggaccccaccgtcatcgcgcgccgtgagtcacactccacagccaatccctggccacatccgggctcgcc

SEQ ID NO: 755521 - DNA, 120 bp, Artificial Sequence
  ENSG00000213516_40 (sequence is synthesized)
ttcccgcaccggatagcatgtttttggcccagaggagcctctgctctcttagcggtagagcaaaattcctgaagacaatttcttcttccaaaatcctcggattctctacttctgctgaac

SEQ ID NO: 755522 - DNA, 120 bp, Artificial Sequence
  ENSG00000213523_0 (sequence is synthesized)
ttgggcctgggacagggctgggggctaacaccctgtgtgagatgagtgtctttgtgtctgtgcttgatgttggtggctctctgtagtcacatgacagcatgggtgtgatggagatctgac

SEQ ID NO: 755523 - DNA, 120 bp, Artificial Sequence
  ENSG00000213523_1 (sequence is synthesized)
ttcattcaacaaacatattttctaaggagttccctgtgccaggcactaagctgggcactgggaatgtaataaaatagtcaaggtcccaccttctaagactgtccgacagggaaacgaaca

SEQ ID NO: 755524 - DNA, 120 bp, Artificial Sequence
  ENSG00000213523_2 (sequence is synthesized)
agagtcaaataaggcagaagatgtgatgtaatacacctacgaaatctcagagggttgtagggtcgtgggagctcaagtgagacacttaacctggcctgagacattccagaaggcctcctg

SEQ ID NO: 755525 - DNA, 120 bp, Artificial Sequence
  ENSG00000213523_3 (sequence is synthesized)
aagaactgacatctgaactgagaactgaaggaagatgagtactagtgaggctaccggacgtgaatgtggagattgtgcagggcaatgcaagaggaggctgtagaagtcaacctggctaga

SEQ ID NO: 755526 - DNA, 120 bp, Artificial Sequence
  ENSG00000213523_4 (sequence is synthesized)
tcacagcggggtgtatgtggggcaggagcttctttgtttgaatttgctcctgagaggatgaggcctcctagagcactggctcctggacagcaacctcctttggtgccttgtgaccagggc

SEQ ID NO: 755527 - DNA, 120 bp, Artificial Sequence
  ENSG00000213523_5 (sequence is synthesized)
cctgatggttcattagatggagccttcgagtcttagggagttgccgcagggtccccacagcggctcccgacggttgtgaaccagcatccatcctccacggattccggcaacccgcctggc

SEQ ID NO: 755528 - DNA, 120 bp, Artificial Sequence
  ENSG00000213523_6 (sequence is synthesized)
cctggacgtgtctcaactggcccgcgtgaggggccgccccggaaatgacgcgctgccccgctggccaagcggaagtggagatggcggagctgtacgtgaagccgggcaacaaggaacgcg

SEQ ID NO: 755529 - DNA, 120 bp, Artificial Sequence
  ENSG00000213523_7 (sequence is synthesized)
gctggaacgacccgccgcagttctcatacgggctgcagacccaggccggcggacccaggcgctcgctgcttaccaagagggtcgccgcaccccaggatggatcccccagagtccccgcat

SEQ ID NO: 755530 - DNA, 120 bp, Artificial Sequence
  ENSG00000213523_8 (sequence is synthesized)
acctgtggggagtggtcctgcctctggcgtggagcccacaagtttcccagtcgagtctgaggctgtgatggaggatgtgctgagacctttggaacaggcattggaagactgccgtggcca

SEQ ID NO: 755531 - DNA, 120 bp, Artificial Sequence
  ENSG00000213523_9 (sequence is synthesized)
cacaaggaagcaggtatgtgatgacatcagccgacgcctggcactgctgcaggaacagtgggctggaggaaagttgtcaatacctgtaaagaagagaatggctctactggtgcaagagct

SEQ ID NO: 755532 - DNA, 120 bp, Artificial Sequence
  ENSG00000213523_10 (sequence is synthesized)
ttcaagccaccggtgggacgcagcagatgacatccaccgctccctcatggttgaccatgtgactgaggtcagtcagtggatggtaggagttaaaagattaattgcagaaaagaggagtct

SEQ ID NO: 755533 - DNA, 120 bp, Artificial Sequence
  ENSG00000213523_11 (sequence is synthesized)
gttttcagaggaggcagccaatgaagagaaatctgcagccacagctgagaagaaccataccataccaggcttccagcaggcttcataatcctcggttccccagactcaccggacaccatc

SEQ ID NO: 755534 - DNA, 120 bp, Artificial Sequence
  ENSG00000213523_12 (sequence is synthesized)
tcctatgccttggagaccttctgtcacttggctcccttcttaccaccaccaagactgtcccactgggcctgacccacctatgagggaagaagtcccacctgggccagagggagttcatgt

SEQ ID NO: 755535 - DNA, 120 bp, Artificial Sequence
  ENSG00000213523_13 (sequence is synthesized)
gttactcataacatgcatttcaataaaaacatctctgcggtgggccttgggtaggagagatgaacccttccggtgccaagctagtcccctctggtgtcctcgactgccctgctccctgtg

SEQ ID NO: 755536 - DNA, 120 bp, Artificial Sequence
  ENSG00000213523_14 (sequence is synthesized)
tatctgcaaacctctgttctcccttctccattcatcaggaagggatctgctgggtaaagtcagactactgcctaccactttttcccaaagtagactgaaagcacatcctgtgctgggcgg

SEQ ID NO: 755537 - DNA, 120 bp, Artificial Sequence
  ENSG00000213523_15 (sequence is synthesized)
agcagctgtgtttggatggtttcatttcagcatgagaacagactcaaatagaacggggagacttttccctcaacaaaaggaaagacagtcctatttgcactgtatcacccttgagatact

SEQ ID NO: 755538 - DNA, 120 bp, Artificial Sequence
  ENSG00000213523_16 (sequence is synthesized)
actgttacagagattagaaccacattgagtggggttttctgtgtaaatcgaaggagaaaaagaccagattactgagattggggattgtaactctgacttgccaaacaaactgctgcctca

SEQ ID NO: 755539 - DNA, 120 bp, Artificial Sequence
  ENSG00000213523_17 (sequence is synthesized)
gagctgtacgtgaagccgggtgagcgcagccggcgggctagggcactaggttgtcgccccggcctaggctgggggcggttgcggcgcttagtatggaccctctgtctcccccagccccag

SEQ ID NO: 755540 - DNA, 120 bp, Artificial Sequence
  ENSG00000213523_18 (sequence is synthesized)
attgacaccaaatgaccagattccactgtgtccaacgggagcgacaaaactggtccccgccggggcttgtgcaacagaccctccttgccgaattcgggccagtctctctgttccaattgg

SEQ ID NO: 755541 - DNA, 120 bp, Artificial Sequence
  ENSG00000213523_19 (sequence is synthesized)
gggaggtatctttcgatcttgactggcactgactccttttggttggcccaacgttggtggggcagaagtggctgaaagaggtgaagatgatcccgaagaaacagatggaataggagagtc

SEQ ID NO: 755542 - DNA, 120 bp, Artificial Sequence
  ENSG00000213523_20 (sequence is synthesized)
tcttaatcctttgagagttacggactccttcagaatctgctaaggccttcccaaagaaatgaacacaggatttcaggagcattaataagacttttgaagaccaatcagtagaagatgctg

SEQ ID NO: 755543 - DNA, 120 bp, Artificial Sequence
  ENSG00000213523_21 (sequence is synthesized)
tgggaacaagagttgaattcagctcctattagtgaacaacctgattttctgtatctccatgccattcagagcagaagctgctgattttattctcaggaaatttatattgtgcccagttag

SEQ ID NO: 755544 - DNA, 120 bp, Artificial Sequence
  ENSG00000213523_22 (sequence is synthesized)
agaaagaaacctcttctagctatagtgttttcttagttcttagaaaaagagatctgaagaatgtcttaaaagaaagggaaagtagcatggtcatttcacctctttggcgcttagttttct

SEQ ID NO: 755545 - DNA, 120 bp, Artificial Sequence
  ENSG00000213523_23 (sequence is synthesized)
ttttgtgaagtaacgctacaggatgagcttctgagagtctgagaagcccctgaaattttagaattctagtcatagtaggaggtgggttaggaagactggtggtgggaagatgagagaatt

SEQ ID NO: 755546 - DNA, 120 bp, Artificial Sequence
  ENSG00000213523_24 (sequence is synthesized)
cctgtttaatgacctctacttttcaatgaaacatcaggcagtgtcagaagaagacagcagggaaaggaaggtttcatcagtttctcagtggggcctctaatctttgggtaaagaaccaga

SEQ ID NO: 755547 - DNA, 80 bp, Artificial Sequence
  ENSG00000213533_0 (sequence is synthesized)
gggccctgggccctcgcgcccctcccgcgaggcctgtcatgcagggccccgccgggaacgcgagccggggactgccaggc

SEQ ID NO: 755548 - DNA, 120 bp, Artificial Sequence
  ENSG00000213533_1 (sequence is synthesized)
cgagccggggactgccaggcgggccgccctccacagtcgcgtccggggcgggccgctgcgagagcggcgcgctcatgcacagcttcggcatcttcctgcaggggctgctcggcgtcgtgg

SEQ ID NO: 755549 - DNA, 120 bp, Artificial Sequence
  ENSG00000213533_2 (sequence is synthesized)
ccttcagcacgttaatgctcaaacgcttcagagaaccaaagcatgaaagacgtccgtggaggatatggtttttagacacttccaaacaagccataggaatgctgttcatccactttgcaa

SEQ ID NO: 755550 - DNA, 120 bp, Artificial Sequence
  ENSG00000213533_3 (sequence is synthesized)
atgtatacctagcagatctcactgaagaggacccttgttcactgtacctcatcaacttcctcctggacgccactgtgggcatgctgctcatctacgtgggggtgcgcgccgtcagcgtcc

SEQ ID NO: 755551 - DNA, 120 bp, Artificial Sequence
  ENSG00000213533_4 (sequence is synthesized)
tggtagagtggcagcagtgggagtccctgcgcttcggcgaatatggagaccctctgcagtgtggagcctgggtcgggcagtgcgctctttacatcgtgatcatgatttttgaaaagtctg

SEQ ID NO: 755552 - DNA, 120 bp, Artificial Sequence
  ENSG00000213533_5 (sequence is synthesized)
tcgtcttcatcgtcctcctaatacttcagtggaaaaaggtggccctgttgaatcccattgaaaacccagacttgaagctggccatcgtcatgctgatcgtccccttctttgtcaacgctt

SEQ ID NO: 755553 - DNA, 120 bp, Artificial Sequence
  ENSG00000213533_6 (sequence is synthesized)
tgatgttttgggtagtggacaatttcctcatgagaaaggggaagacgaaagctaagctagaagaaaggggagccaaccaggactcgaggaatgggagcaaggtccgctaccggagggccg

SEQ ID NO: 755554 - DNA, 120 bp, Artificial Sequence
  ENSG00000213533_7 (sequence is synthesized)
catcccacgaggagtctgagtctgagatcctgatctcagcggatgatgagatggaggagtccgacgtggaggaggacctccgcagactgacccccctcaagcctgtgaagaaaaagaagc

SEQ ID NO: 755555 - DNA, 120 bp, Artificial Sequence
  ENSG00000213533_8 (sequence is synthesized)
accgctttgggctacccgtatgacacattcccatgctgggggtgacgggagggccccgccagccgctggtgtgcagaggtcatcccgcagcatcgttccttaccctctctctgcccttcc

SEQ ID NO: 755556 - DNA, 120 bp, Artificial Sequence
  ENSG00000213533_9 (sequence is synthesized)
tttctacctctgctcctcttgctgtctctgcccgctctcgcctgcccccagactactgtgacttaaaaagagggaagaggagccagcgcccgagggggccactggcggctggaggtcccc

SEQ ID NO: 755557 - DNA, 120 bp, Artificial Sequence
  ENSG00000213533_10 (sequence is synthesized)
attcagttgcactacaaacactgaccaaatatgcaaggaaggagctgtgtttgtttgttgtcgtcccagacagtgttgtgagggacctgaggccctgccccgtgtccgaccaccgagtgg

SEQ ID NO: 755558 - DNA, 120 bp, Artificial Sequence
  ENSG00000213533_11 (sequence is synthesized)
caaggtggaaggaagcacaggcacacagaccgtgggtgggtctcctcaccgtggctgtgggcagtgcgaacacataacaccctcgggctaaaagtgactcgttgaccaagttggaaccgg

SEQ ID NO: 755559 - DNA, 120 bp, Artificial Sequence
  ENSG00000213533_12 (sequence is synthesized)
aatgctttcttactcaaaatggcttttgtaactattgatttctgaagctggttttatgagttgtgacagtgttaccaggttgggggtatgtgtttatttcctacaaagtacttacgggac

SEQ ID NO: 755560 - DNA, 120 bp, Artificial Sequence
  ENSG00000213533_13 (sequence is synthesized)
taatgggcaaaacagagatttttaagtcttccgtatgctgtttgacttttatatttttaagttatattttcatactattgtatttaaaaactctttttagtccccaaagaaatgggttta

SEQ ID NO: 755561 - DNA, 120 bp, Artificial Sequence
  ENSG00000213533_14 (sequence is synthesized)
tttgcctttcatggggtgtgggctggcaggaggaaaaatcgggagttttttatttggaatattattagatgatgccctatgataagatgagacaaatgatggggagggaaggaggatggc

SEQ ID NO: 755562 - DNA, 120 bp, Artificial Sequence
  ENSG00000213533_15 (sequence is synthesized)
ccttctctagaatcagcaaacccaatggttctgtgaaggtcagacccaagcttggagcagctggtctggatgcagatccaggagctgcagagtgtggaacaggaaaggctctgcccaggg

SEQ ID NO: 755563 - DNA, 120 bp, Artificial Sequence
  ENSG00000213533_16 (sequence is synthesized)
cccatgagctctagcattcctgctggcagattagagatcttagttaaatttgaccaagaaaggagcttagctaagaggtctttgtttccagaggacccaagactaccagactcctgtgca

SEQ ID NO: 755564 - DNA, 120 bp, Artificial Sequence
  ENSG00000213533_17 (sequence is synthesized)
gtctgcctgtctgcagagcctccaatcacggtttaaagtggtcttggcctcccagcccccactgctgcagccttcagagccagcctctggactcagcgccaggagcctcctctcctgctg

SEQ ID NO: 755565 - DNA, 120 bp, Artificial Sequence
  ENSG00000213533_18 (sequence is synthesized)
ccctggtacctgtcatcctagtgtcacctatttgttttgcacagcattctggagaacatgtgcctcacaaagtgatcctgtttttctcaccctccaaagctgaggtggctaagggaggca

SEQ ID NO: 755566 - DNA, 120 bp, Artificial Sequence
  ENSG00000213533_19 (sequence is synthesized)
gtgcttctaggccgtgtcccctccctggggaatggtcactactcctcagcatggccacaggcccctgtggttttgggagtttgctgagtgactgtggaatgggctgaccccagccgtttc

SEQ ID NO: 755567 - DNA, 120 bp, Artificial Sequence
  ENSG00000213533_20 (sequence is synthesized)
cctgctgtggaaacagcaaggtaggggcactgcttggtggtttgtcaagctcagaggcagccacggatggttaggaacaggaagccacactgctaaggtgtgatgagctagaagggagac

SEQ ID NO: 755568 - DNA, 120 bp, Artificial Sequence
  ENSG00000213533_21 (sequence is synthesized)
atcctggacttcaagtgagacaagtgcagaggaggccactccacttaggaccttccttttagacctgcatgagcacgtgtttcacttaagcacattgggtccgaattgggcgcatgaacc

SEQ ID NO: 755569 - DNA, 120 bp, Artificial Sequence
  ENSG00000213533_22 (sequence is synthesized)
cagctgttaaaccaggtaccctgggactgccctctgcctctcagagccctacctgtcctggacttgaaggcgagcatcaggcaggccttctcagcccatcttccaccaggagtgcagagc

SEQ ID NO: 755570 - DNA, 120 bp, Artificial Sequence
  ENSG00000213533_23 (sequence is synthesized)
cagggtgctgagaggagcagggactgtaactacagtaggaggcaactttgctggtgtcattcctgctcggattgactttgtgctccctcccatccacagctatggtagccagtatttccc

SEQ ID NO: 755571 - DNA, 120 bp, Artificial Sequence
  ENSG00000213533_24 (sequence is synthesized)
cagcagctctctagtggggaagagtggctagaaccaggccattctcagtcgaatttaggaagaccaagactcatgttcctgacaggacggtcattccctcatggcatcactgactcagtt

SEQ ID NO: 755572 - DNA, 120 bp, Artificial Sequence
  ENSG00000213533_25 (sequence is synthesized)
ctaattcctcccctcctgtttcattttggtttgaacaacctgtgcctgcagctgtttcttccaccttcctggagctcacaattggagcttcatgttcagtcttgagctcctaatgtttcc

SEQ ID NO: 755573 - DNA, 120 bp, Artificial Sequence
  ENSG00000213533_26 (sequence is synthesized)
agacagggcaggggataggagagccataatctatgaaagctgtgaaacaaaccctgggttatatagatctcagatggtctcatctgaaggctttgcccacttcccagtgagcagagggtt

SEQ ID NO: 755574 - DNA, 120 bp, Artificial Sequence
  ENSG00000213533_27 (sequence is synthesized)
tggggaacaaagaggtagctgaagagtggtggtttttccctgtatcctgattttcagaaagggctttagtctctgagctgtggctagtagctggctggctgaccaggggacgggggtcta

SEQ ID NO: 755575 - DNA, 120 bp, Artificial Sequence
  ENSG00000213533_28 (sequence is synthesized)
atagggtgtctgaccataggacacctctcgtgtttggccttccctttcttgtgtgtttgtgtgtgtgtgtgcacgtgcacgtgcacacacatgtacacacacaaatctgtatccccagga

SEQ ID NO: 755576 - DNA, 120 bp, Artificial Sequence
  ENSG00000213533_29 (sequence is synthesized)
gtgcctcctgcagtcactgggggctcttccgtggtgcaccatcccatgagagcagatcagagggctgtggtcaggacttcctcccgagctgccctccctccctgggatgagtttcctctc

SEQ ID NO: 755577 - DNA, 120 bp, Artificial Sequence
  ENSG00000213533_30 (sequence is synthesized)
cacctgctccaaggtgccttacgaggtgcagctcttcacctggccacatggcatccatcaccgtgttgagaaatggtgggacgttggctggatattgtgtgctatgaatctgatttgtcc

SEQ ID NO: 755578 - DNA, 120 bp, Artificial Sequence
  ENSG00000213533_31 (sequence is synthesized)
aaatctggacctcagccaagccacctgtggtggaaccttgcaagtcaaggtcatgaacaaatttcttgtaactattggaaataaactaatgaggtagaactgtcatatccaaatggaaga

SEQ ID NO: 755579 - DNA, 120 bp, Artificial Sequence
  ENSG00000213533_32 (sequence is synthesized)
ggtggttggtactgttacttccttttgctgtcagagggttgttgacaatggcaaggggggatgttagtgagatccaggtggtggtggcttcttggtccactcagcttgcacacatgcaag

SEQ ID NO: 755580 - DNA, 120 bp, Artificial Sequence
  ENSG00000213533_33 (sequence is synthesized)
aggagggtctgtggcccctcagccgtgctggtggcctccttcctcaagctttaacttgtgccctccctggcaacagggagtcatgggttaatgtcacctgtcatgcctctttcttcaggg

SEQ ID NO: 755581 - DNA, 120 bp, Artificial Sequence
  ENSG00000213533_34 (sequence is synthesized)
aaaatattaaaaggctcaaatccaagctgtgacttcccttagacagtgtaagcctgtagggtgcagccccaagtttatgtccaaaggctgcctcagaaccctggagggagcagcgcccag

SEQ ID NO: 755582 - DNA, 120 bp, Artificial Sequence
  ENSG00000213533_35 (sequence is synthesized)
ctggcagctcactctgcccttgcagttcactggccttttcgcagccaggctaagataggcagtgcaaggagcttcccactggccagagcagctgccttgtagaatgtggggctggctttt

SEQ ID NO: 755583 - DNA, 120 bp, Artificial Sequence
  ENSG00000213533_36 (sequence is synthesized)
agaagtttcacacgcttgcagctaagagtgcagagctctctgttttacttcgtgaaacattagcagctctgaggggcttggcttttggtaagggacttatggtctgacttgccacaagca

SEQ ID NO: 755584 - DNA, 120 bp, Artificial Sequence
  ENSG00000213533_37 (sequence is synthesized)
ccttgagctcctgggttggttggtggttggttggttgggttgttttaaatttgatttttcttttcctgaagtttgttagaagtcagacctatgcaaggaaaaccatggcccacttcagca

SEQ ID NO: 755585 - DNA, 120 bp, Artificial Sequence
  ENSG00000213533_38 (sequence is synthesized)
gccatccagtgggggtgcttaatcggtggtggtaggattcatggaaacgtttttttgaaatgaaagagaagatgatgtacttacattgtaaaatggtttacaataaagtttggcatctta

SEQ ID NO: 755586 - DNA, 120 bp, Artificial Sequence
  ENSG00000213533_39 (sequence is synthesized)
ctgatctcagcggatgatgagatggaggagtccgacgtggaggaggacctccgcagactgacccccctcaagcctgtgaagaaaaagaagcaccgctttgggctacccggaccagagtga

SEQ ID NO: 755587 - DNA, 120 bp, Artificial Sequence
  ENSG00000213533_40 (sequence is synthesized)
gaaggaaccttacgaagcctcatggcaggagtgggagccagcaactgcccagtgaaaagccaaacatgctcttgccatgtccatctccacttcttcgctagtgagaattaaagcaagtcc

SEQ ID NO: 755588 - DNA, 120 bp, Artificial Sequence
  ENSG00000213533_41 (sequence is synthesized)
gagtagcccacatccttgtccctgaggctgcggggctggaaggaggtccctgggcagagccgcagcatcaggtgccatctgcaggggcacccctggaactagtggaaggcccccacaagg

SEQ ID NO: 755589 - DNA, 120 bp, Artificial Sequence
  ENSG00000213533_42 (sequence is synthesized)
cctggcctgccctcagctgcctcttggcccatgtgccacatcctgggcattcctcatgtcagcacttgtctcagatcaagcctggcagtcctctcattggcctcctggagccagggtgtc

SEQ ID NO: 755590 - DNA, 120 bp, Artificial Sequence
  ENSG00000213533_43 (sequence is synthesized)
acagccccggcggttgagaccagatccaggtgacgcatggtgtctgcactctgattaccaggccactctttcccatgtggaagccctgacatctgggtcacggtgcttcatgggtcttgc

SEQ ID NO: 755591 - DNA, 120 bp, Artificial Sequence
  ENSG00000213533_44 (sequence is synthesized)
tgcccatccctggccaaactctcccttttgaaagcctctcgccacagatgtgttccctccttttggcccctattgctgtgacttctactgaggaaataattaaacccaaacaaaacaccc

SEQ ID NO: 755592 - DNA, 120 bp, Artificial Sequence
  ENSG00000213551_0 (sequence is synthesized)
agtcctgggttgtacccggcgcagctgggagcggctgcttcctccggggtcgtatctccgcccggcatggggctgctggacctttgcgaggaagtgttcggcaccgccgacctttaccgg

SEQ ID NO: 755593 - DNA, 120 bp, Artificial Sequence
  ENSG00000213551_1 (sequence is synthesized)
gtgctgggcgtgcgacgcgaggcctccgacggcgaggtccgacgaggctaccacaaggtgtccctgcaggtacacccggaccgggtgggtgagggcgacaaggaggacgccacccgccgc

SEQ ID NO: 755594 - DNA, 120 bp, Artificial Sequence
  ENSG00000213551_2 (sequence is synthesized)
ttccagatcctgggaaaagtctattccgttctcagtgacagagaacagagagcagtgtacgatgagcagggaacagtggacgaggactctcctgtgctcacccaagaccgagactgggag

SEQ ID NO: 755595 - DNA, 120 bp, Artificial Sequence
  ENSG00000213551_3 (sequence is synthesized)
gcgtattggcggctactctttaaaaagatatctttagaggacattcaagcttttgaaaagacatacaaaggttcggaagaagagctggctgatattaagcaggcctatctggacttcaag

SEQ ID NO: 755596 - DNA, 120 bp, Artificial Sequence
  ENSG00000213551_4 (sequence is synthesized)
ggtgacatggatcagatcatggagtctgtgctttgcgtgcagtacacagaggaacccaggataaggaatatcattcagcaagctattgacgccggagaggtcccatcctataatgccttt

SEQ ID NO: 755597 - DNA, 120 bp, Artificial Sequence
  ENSG00000213551_5 (sequence is synthesized)
gtcaaagaatcgaaacaaaagatgaatgcaaggaaaaggagggctcaggaagaggccaaagaagcagaaatgagcagaaaggagttggggcttgatgaaggcgtggatagcctgaaggca

SEQ ID NO: 755598 - DNA, 120 bp, Artificial Sequence
  ENSG00000213551_6 (sequence is synthesized)
gccattcagagcagacaaaaggatcggcaaaaggaaatggacaattttctggctcagatggaagcaaagtactgcaaatcttccaaaggaggagggaaaaaatctgctctcaagaaagaa

SEQ ID NO: 755599 - DNA, 120 bp, Artificial Sequence
  ENSG00000213551_7 (sequence is synthesized)
aagaaataatggaatttttctcttcaaaggtccttaggtgtaaattgatgccatcgtaggcaaggtgcaggcaggatttgaaggcaaaagtcaattcagctcttgagaaaaggtgtcttt

SEQ ID NO: 755600 - DNA, 120 bp, Artificial Sequence
  ENSG00000213551_8 (sequence is synthesized)
ccagcctgaatttttcagattgactagaccaagcagaatctctcaacctgatcttagtatttcctagaaagcacttgacattgtgtgaggtctcacctgaaggaacttggtggtgacatt

SEQ ID NO: 755601 - DNA, 120 bp, Artificial Sequence
  ENSG00000213551_9 (sequence is synthesized)
aggcagtgtccttcctgacagcacttgcctccatggatcttctgtacacagaactcttatctaggatgtggttctgttcatgctgctttctgcgatgtgcgtgtctgttagaataggctc

SEQ ID NO: 755602 - DNA, 120 bp, Artificial Sequence
  ENSG00000213551_10 (sequence is synthesized)
tctacccagctagaacaccttccagacacttgctggacagctatcttccacatacttcccagtttacatttggtcttaatgatcttgaatagatcctctcttcattttactcagccaggt

SEQ ID NO: 755603 - DNA, 120 bp, Artificial Sequence
  ENSG00000213551_11 (sequence is synthesized)
tttgtactgatgtacaggtgttaaattacttcaagcatttttgtaagaggtgtatataattcaataaaaaaggtaaaacatgatgattaagttctgggggctttgtaaatgatcccacta

SEQ ID NO: 755604 - DNA, 120 bp, Artificial Sequence
  ENSG00000213551_12 (sequence is synthesized)
aaatgtgacctaggaaaaatatgaatggtgtttaggatgagagaaaaggggaaaacaatagccctggtcagctttataatagagagcctggtttccctagcatgaagagatgtatgttgt

SEQ ID NO: 755605 - DNA, 120 bp, Artificial Sequence
  ENSG00000213551_13 (sequence is synthesized)
agtcctgccactgattactgaagtcctgccattaattgctgaatgtcttcagttgggccactgagcttgtctgaatctgttcccttttataaaagagttactacatcaaaacaaagagtg

SEQ ID NO: 755606 - DNA, 120 bp, Artificial Sequence
  ENSG00000213551_14 (sequence is synthesized)
aaatccaaatttgtcaaactgtatgtattaaacatgtccagttttttggttaaaaaaaaattgcactggctttgagggaaaacacacagggtgagggaattgggctaaatgacttcttac

SEQ ID NO: 755607 - DNA, 120 bp, Artificial Sequence
  ENSG00000213551_15 (sequence is synthesized)
aggcccctttctgattctttaactttgaaaggcaagccatattgatccagttgttatagtgaactcatggtaatggtttgtgagaacaatagagattttcatttctatgtagatgagttg

SEQ ID NO: 755608 - DNA, 120 bp, Artificial Sequence
  ENSG00000213551_16 (sequence is synthesized)
gtatgagaatatatggaatttttaagggactgtttaaatctttgatttgtagactattaaatataccgtatgcataaagtaagcctttagctctaaggtaaagacgacacgttttcggtt

SEQ ID NO: 755609 - DNA, 120 bp, Artificial Sequence
  ENSG00000213551_17 (sequence is synthesized)
tgtgactacaaataggttaaaaatagattttaattttattaaaaatataatttaatgcaggttgtttgaagcatctgtcttcatatgatggcattagaacaccttggtataataaaaagt

SEQ ID NO: 755610 - DNA, 120 bp, Artificial Sequence
  ENSG00000213551_18 (sequence is synthesized)
taccgtaatttatgattatttgaatttatccattctgaaaattaataagatctaaaactggcatgacaatcaagatttgtatttagtgaaatttaaaataaatgtaagccatagttaaaa

SEQ ID NO: 755611 - DNA, 120 bp, Artificial Sequence
  ENSG00000213551_19 (sequence is synthesized)
tccacaaatggatgagagaattcacctgggcctagagctttctctgtgtgagaactgtttcatttaatttcttgaataattttacaataatccacaaatataataaccttataaaagtat

SEQ ID NO: 755612 - DNA, 120 bp, Artificial Sequence
  ENSG00000213551_20 (sequence is synthesized)
ggaatttttctcttcaaaggtccttaggtgtaaattgatgccatcgtaggcaagagctgcaggagaatatctggcaaggtgcatttaatatttggaaaaaagatatgaccagtaacctac

SEQ ID NO: 755613 - DNA, 120 bp, Artificial Sequence
  ENSG00000213551_21 (sequence is synthesized)
tttaggaagaaaataagcatcacctggcatcagatcccctgccaggtcgggcctgatgaggatactcaactgcacatgagcgacgatactgtgtatccagctacaagacaaaagaggaga

SEQ ID NO: 755614 - DNA, 120 bp, Artificial Sequence
  ENSG00000213551_22 (sequence is synthesized)
cacttcttatgatgcatcttctcacaaaggataatattttagcaggttcacaggaacaccttgaaatcaacagtggtaaaaggcatagactaccaacttgagggaaaagtcagctgagtg

SEQ ID NO: 755615 - DNA, 120 bp, Artificial Sequence
  ENSG00000213551_23 (sequence is synthesized)
cacaaagccatttattgtaaaaattgcagattcttcaatattattactatgccgttaaggaaatcaggagttataaataatccatatggtttaatatttcagttagttctaagggggttc

SEQ ID NO: 755616 - DNA, 120 bp, Artificial Sequence
  ENSG00000213551_24 (sequence is synthesized)
gtctcatttctttttgttggctgctgcatatattttaaatgaatgctttcatttaaaacaaccagccttttcagcaacattgaaatacttatgactttaccaccatatcgaaatttaact

SEQ ID NO: 755617 - DNA, 120 bp, Artificial Sequence
  ENSG00000213551_25 (sequence is synthesized)
ttacatttactttttagcattatgaaatgcaaatatttcacagttacctcaaggaattaaaaaatgtagagatacgactacaatattaaaatgcaaatatcaaataaagctatatatgac

SEQ ID NO: 755618 - DNA, 120 bp, Artificial Sequence
  ENSG00000213551_26 (sequence is synthesized)
atcacggcaactctgggaagtttaaaagatattaatgtatcctggagagtttgaggctttgcagaaacttattggcagagcagaatgattctgaaaaatgctacatcagtgaggggatat

SEQ ID NO: 755619 - DNA, 120 bp, Artificial Sequence
  ENSG00000213551_27 (sequence is synthesized)
ttgataaggtattttctgccaactcgggtattcacttagcattgtttatcctttaagatatgtatacacatacttcctctgtgagtttaccctactaacaaagttttatccccagcctca

SEQ ID NO: 755620 - DNA, 120 bp, Artificial Sequence
  ENSG00000213551_28 (sequence is synthesized)
caagtttctcaccatctcttggatgattgctccagcccactctgctgccacctgggatccaacatgttcaaacccagctgtgaacttcacagagtattaaaagaaagagcctttgcttca

SEQ ID NO: 755621 - DNA, 120 bp, Artificial Sequence
  ENSG00000213551_29 (sequence is synthesized)
gcagtttatgttattaagacggaggcttgggtcatgttatctctctccaccaatgtgtaaggtgaaagtcctattaggtaagacggacgccagatttccagagcaaggggaggagagacc

SEQ ID NO: 755622 - DNA, 120 bp, Artificial Sequence
  ENSG00000213551_30 (sequence is synthesized)
cgagcaacatcacttccctgaagacctagctcctgcgcgcggccggggactgtgactccacatgccggcgttacttacccgggcccgcgcctgactcgccacacctcattttgcggccgc

SEQ ID NO: 755623 - DNA, 80 bp, Artificial Sequence
  ENSG00000213563_0 (sequence is synthesized)
gtcaccggcacacgcctctcggaaggccagggcgggcgagcccccgaggcccgagggagagggaagagcgccgggcccgg

SEQ ID NO: 755624 - DNA, 120 bp, Artificial Sequence
  ENSG00000213563_1 (sequence is synthesized)
tactgcgggcaggcgcgagttcgcgcagcaccgcccccggcgtgacctgctggtcgcttccggcgcgggaggagaatgtggccgccttgcgggacgctccggaccctggccttggcgcgg

SEQ ID NO: 755625 - DNA, 120 bp, Artificial Sequence
  ENSG00000213563_2 (sequence is synthesized)
tcgcggggagcccgggcctgcagcggggatgggggcgtttcctacacgcagggccagagtccggagccgcggacccgcgagtatttctactacgtggaccaccagggccagcttttcctg

SEQ ID NO: 755626 - DNA, 120 bp, Artificial Sequence
  ENSG00000213563_3 (sequence is synthesized)
gatgattccaaaatgaagaatttcatcacctgcttcaaagacccgcagttcctggtcaccttcttctcccgcctgagacccaaccgcagcgggcgctacgaggccgctttccccttcctc

SEQ ID NO: 755627 - DNA, 120 bp, Artificial Sequence
  ENSG00000213563_4 (sequence is synthesized)
tcgccctgcggcagagagcgcaacttcctgcgctgcgaggaccggccggtggtcttcacgcacctgctgaccgcggaccacgggcctccgcgcctctcctactgcggcggtggcgaggcc

SEQ ID NO: 755628 - DNA, 120 bp, Artificial Sequence
  ENSG00000213563_5 (sequence is synthesized)
cgcctgctgcccctggccgccaacgggcgcctgtaccacccggcgccggagcgtgcgggcggcgtgggcctggtgcgctccgccctggccttcgagctcagcgcctgcttcgagtacggg

SEQ ID NO: 755629 - DNA, 120 bp, Artificial Sequence
  ENSG00000213563_6 (sequence is synthesized)
ctcagcgcctgcttcgagtacgggcccggcgcgcctgcgctgccctcgcacgtgcgctggcagggccgccgcctcgccctcaccatggacctggccccgctgctgctcgcggctcggtcg

SEQ ID NO: 755630 - DNA, 120 bp, Artificial Sequence
  ENSG00000213563_7 (sequence is synthesized)
caccatggacctggccccgctgctgctcgcggctcggtcgccctgagcggggccaagggaaaggcgggaggccgcgggcgcctctcgccccgctcccccgggactccacgccccggaaag

SEQ ID NO: 755631 - DNA, 80 bp, Artificial Sequence
  ENSG00000213563_8 (sequence is synthesized)
cctcccggacaccccgctccccacggcgcgcgccccccgcgcacccgactccggcgccctccggattggcctgcgctcga

SEQ ID NO: 755632 - DNA, 80 bp, Artificial Sequence
  ENSG00000213563_9 (sequence is synthesized)
gcctgcgctcgagacgtcaggcactggcggcgggcgcggggctctggtgcgcgtgcgcgagcgtcccccgccccctccca

SEQ ID NO: 755633 - DNA, 120 bp, Artificial Sequence
  ENSG00000213563_10 (sequence is synthesized)
caggcgtgggggcgctgggggatcggggaccatcccggctctgaccctggtgcgctccgagaagggcgtgggtcctggagggggatggggaacgcggaggccacgccctccctgagcccg

SEQ ID NO: 755634 - DNA, 120 bp, Artificial Sequence
  ENSG00000213563_11 (sequence is synthesized)
gccgaaaatcaaccggctctcgtgggtagcagaggaggccgtgggggatacaggcaccaggtcgcagcgctgcagaggtgcgcaagggccgcccaaagaccagcttgggcctcgcactgc

SEQ ID NO: 755635 - DNA, 120 bp, Artificial Sequence
  ENSG00000213563_12 (sequence is synthesized)
gcccgaggcagacacagggcgttccatcctcttccctccccgctcccgcacagaggggcgcccaggaggcagtgacagtcgtcgcggaatcctgcgtgtgacaccccgcccctgcccagc

SEQ ID NO: 755636 - DNA, 120 bp, Artificial Sequence
  ENSG00000213563_13 (sequence is synthesized)
ggattagggagttgtcctctggtaaaaggatttctgggctgcttccagcttggggccctcatccctgccctggcaggcctttctacaccgatctgcatctagtggggggtcagcgtgagc

SEQ ID NO: 755637 - DNA, 120 bp, Artificial Sequence
  ENSG00000213563_14 (sequence is synthesized)
agcagcgccgtgagttctgaggccaagaaccttctccacttgagaagccttcctgggggaggctgagtgggccaggcctggagccacgtaccaacactttatacccaggggaatggatcc

SEQ ID NO: 755638 - DNA, 120 bp, Artificial Sequence
  ENSG00000213563_15 (sequence is synthesized)
caagggcccagataacgcccccaacttcttggggttcacacgcgtcctgagacatctgggaactgcctctgcctgggccaaagctattccattaaaactttattgctgtgcttacttatt

SEQ ID NO: 755639 - DNA, 120 bp, Artificial Sequence
  ENSG00000213563_16 (sequence is synthesized)
tctagtgactttaaataatcatgtgagttacaatttagggcaagatttaaacaccaaggccacttggtcctgtccctttccacatgactcgaaaggaggaagagctgatggacaggcaaa

SEQ ID NO: 755640 - DNA, 120 bp, Artificial Sequence
  ENSG00000213563_17 (sequence is synthesized)
tgtttggggaggccggccagatgaggctgggagacaggacacctgcagccctgttttccctggcttcgggtgggctggctggcttagcccagatccctacttttaaaactgggctccttg

SEQ ID NO: 755641 - DNA, 120 bp, Artificial Sequence
  ENSG00000213563_18 (sequence is synthesized)
ttcctgaaaccagaccccagccttcccatttctttacgacaagtacatgtatatggtcccccagcaaactccctgctccttgctgatctcagaggtcacactgctcccagagcccacttg

SEQ ID NO: 755642 - DNA, 120 bp, Artificial Sequence
  ENSG00000213563_19 (sequence is synthesized)
ggaagccacaccagaaacccagttggtggcccaaggcgtcccctgtcccaccccagctttcccagggccccatctatccccaaagacaggacacctttctggggaccggcatgggaagca

SEQ ID NO: 755643 - DNA, 120 bp, Artificial Sequence
  ENSG00000213563_20 (sequence is synthesized)
cggggagttgggtcggtccgggccgaggctcctacatgggccgcgtccctgctgcgttgtgcagcttcggactctgtcctacaagtccccagccccggcgctgacttctcgccgctgcca

SEQ ID NO: 755644 - DNA, 120 bp, Artificial Sequence
  ENSG00000213563_21 (sequence is synthesized)
gggagacacccgggccgccctgcctttttttggaagccctgtcaaaaggcagctgcatgtccgggaggcagcaggccaggtagtctccgcggaggaggtggtacaactgattacaaactt

SEQ ID NO: 755645 - DNA, 120 bp, Artificial Sequence
  ENSG00000213563_22 (sequence is synthesized)
atttcatcacctgcttcaaaggtaatgctgtgcctccctctccagccccttctttctcccttccgggcagcccctgatgggctccccgactctgccgacgggcccagcgcaccaaggagt

SEQ ID NO: 755646 - DNA, 120 bp, Artificial Sequence
  ENSG00000213563_23 (sequence is synthesized)
gggcgtcctgcgctcaggagccccgctgagtgaggccaggcgaacctcttaccgtcggcgcctgccctcggtatggtcctgggcccggaggccttgggagcccagcgcgctgagtacacg

SEQ ID NO: 755647 - DNA, 120 bp, Artificial Sequence
  ENSG00000213578_0 (sequence is synthesized)
agtgctgaagtaggcgcggacgtgcccggtgcctggcgcgtggtagcaggcgcccggtgccccggccggcgaagaccatggcgttcatggtgaagaccatggtgggcggccagctgaaga

SEQ ID NO: 755648 - DNA, 120 bp, Artificial Sequence
  ENSG00000213578_1 (sequence is synthesized)
acctcactgggagcctgggaggcggcgaggataagggagatggggacaagtcggcagccgaagctcagggcatgagccgggaggagtacgaggagtatcagaagcaactcgtggaagaga

SEQ ID NO: 755649 - DNA, 120 bp, Artificial Sequence
  ENSG00000213578_2 (sequence is synthesized)
agatggagcgggatgcacagttcacacagaggaaggcagagcgggccacactgcggagccacttccgagacaaataccggctacccaagaacgagacagatgagagccagatccagatgg

SEQ ID NO: 755650 - DNA, 120 bp, Artificial Sequence
  ENSG00000213578_3 (sequence is synthesized)
caggtggagacgtggagctgccccgggagctggccaagatgatcgaggaggacacagaggaggaggaggagaaggcctcagtccttgggcagctggccagccttcctggcttgaacctgg

SEQ ID NO: 755651 - DNA, 120 bp, Artificial Sequence
  ENSG00000213578_4 (sequence is synthesized)
gctcactcaaggacaaggcccaggccacactgggggatctcaagcaatcagctgagaagtgtcacgtcatgtgaccacttccccggggttacccactgggctgggcccccatgagggcta

SEQ ID NO: 755652 - DNA, 120 bp, Artificial Sequence
  ENSG00000213578_5 (sequence is synthesized)
agagtgtgtcaacttccagggacccatactccatttggggctttgtttcccttgccccatcctagttccaagacctttcccatccatgccccaagcctatcttctggtttcttcctctcc

SEQ ID NO: 755653 - DNA, 120 bp, Artificial Sequence
  ENSG00000213578_6 (sequence is synthesized)
gctgggagtaaagtccccatcttcactctacccttcaggaccctccccaccagctcagcctgtggaggcctcccaagattgtaggaataggcccatccctctctggccatggccccaagt

SEQ ID NO: 755654 - DNA, 120 bp, Artificial Sequence
  ENSG00000213578_7 (sequence is synthesized)
tcctgcacacaggagcacccacagagagacacacacaggacacaaaacccctggcacgttcagagacagaagccacagatacatcccggcacagacagacacacacgaggccagctccct

SEQ ID NO: 755655 - DNA, 120 bp, Artificial Sequence
  ENSG00000213578_8 (sequence is synthesized)
tgagttccagtctccacctttattgttcttgaaagcccctgctctctctgagccttatttcatcatctgtaaaatgggaatgtcctgaatgacttctaaggctctttctggcttgaactg

SEQ ID NO: 755656 - DNA, 120 bp, Artificial Sequence
  ENSG00000213578_9 (sequence is synthesized)
tcagagccaagcccacatccctccttgggcagggcagcagctgctgccacagcctccagcggctgccactgtgggctctgggagccggagcgatgctgtgtgagaggcagagtgccaagg

SEQ ID NO: 755657 - DNA, 120 bp, Artificial Sequence
  ENSG00000213578_10 (sequence is synthesized)
atgaagctggcactgaacagtaagcggctccaggcctcctctgggcccagggcccagccaatttctgttctgttcctgtagaacgctctctggattccatagctggaatctcctctctta

SEQ ID NO: 755658 - DNA, 120 bp, Artificial Sequence
  ENSG00000213578_11 (sequence is synthesized)
gctcagtgaaaaataaaaatcccaaatggtgtgcctaccttcccacttcttactggcttccaggagtcttggagttcatagccccccgagcctgccttaaaggggtgtcctccacccccc

SEQ ID NO: 755659 - DNA, 120 bp, Artificial Sequence
  ENSG00000213578_12 (sequence is synthesized)
acctacagcttcacaggaggggagaaggcatccagtgctaggagtagaagtgtctccagctctgttctcttggggccctgggtgaaggtggggtctggggcttatgaaataggtctgggc

SEQ ID NO: 755660 - DNA, 120 bp, Artificial Sequence
  ENSG00000213578_13 (sequence is synthesized)
tttgaggaggatggagcagcctcattatgtggggaagatggggcctctggggcgtcactgagaccacaggtggggccggggctggaccgcagctgtcttgggtgcctgtgcctacacccc

SEQ ID NO: 755661 - DNA, 120 bp, Artificial Sequence
  ENSG00000213578_14 (sequence is synthesized)
tcctcaccctagagacggaagatgtgcaaaaagaaagaaggaagggcaactgcattccagccccacactgtgatgactttgagcctgtcctttccctccttgagcctgtcttgcttgtcc

SEQ ID NO: 755662 - DNA, 120 bp, Artificial Sequence
  ENSG00000213578_15 (sequence is synthesized)
cctgtaaaatgaacagtccccctctcccccaaatagtaataatacatgtttcaaagggtgaccatttataaagcatatgacaaaccatatcaataaatgtaactcattcttttaaaaaaa

SEQ ID NO: 755663 - DNA, 120 bp, Artificial Sequence
  ENSG00000213585_0 (sequence is synthesized)
gactcacgcaggtcctcccgcgcgcccgcaacacgcccgcaggctcctgtgtctgctgccggggcagcggggcccggaaggcagaagatggctgtgccacccacgtatgccgatcttggc

SEQ ID NO: 755664 - DNA, 120 bp, Artificial Sequence
  ENSG00000213585_1 (sequence is synthesized)
aaatctgccagggatgtcttcaccaagggctatggatttggcttaataaagcttgatttgaaaacaaaatctgagaatggattggaatttacaagctcaggctcagccaacactgagacc

SEQ ID NO: 755665 - DNA, 120 bp, Artificial Sequence
  ENSG00000213585_2 (sequence is synthesized)
accaaagtgacgggcagtctggaaaccaagtacagatggactgagtacggcctgacgtttacagagaaatggaataccgacaatacactaggcaccgagattactgtggaagatcagctt

SEQ ID NO: 755666 - DNA, 120 bp, Artificial Sequence
  ENSG00000213585_3 (sequence is synthesized)
gcacgtggactgaagctgaccttcgattcatccttctcacctaacactgggaaaaaaaatgctaaaatcaagacagggtacaagcgggagcacattaacctgggctgcgacatggatttc

SEQ ID NO: 755667 - DNA, 120 bp, Artificial Sequence
  ENSG00000213585_4 (sequence is synthesized)
gacattgctgggccttccatccggggtgctctggtgctaggttacgagggctggctggccggctaccagatgaattttgagactgcaaaatcccgagtgacccagagcaactttgcagtt

SEQ ID NO: 755668 - DNA, 120 bp, Artificial Sequence
  ENSG00000213585_5 (sequence is synthesized)
ggctacaagactgatgaattccagcttcacactaatgtgaatgacgggacagagtttggcggctccatttaccagaaagtgaacaagaagttggagaccgctgtcaatcttgcctggaca

SEQ ID NO: 755669 - DNA, 120 bp, Artificial Sequence
  ENSG00000213585_6 (sequence is synthesized)
gcaggaaacagtaacacgcgcttcggaatagcagccaagtatcagattgaccctgacgcctgcttctcggctaaagtgaacaactccagcctgataggtttaggatacactcagactcta

SEQ ID NO: 755670 - DNA, 120 bp, Artificial Sequence
  ENSG00000213585_7 (sequence is synthesized)
ggcaagaacgtcaatgctggtggccacaagcttggtctaggactggaatttcaagcataaatgaatactgtacaattgtttaattttaaactattttgcagcatagctaccttcagaatt

SEQ ID NO: 755671 - DNA, 120 bp, Artificial Sequence
  ENSG00000213585_8 (sequence is synthesized)
tagtgtatcttttaatgttgtatgtctgggatgcaagtattgctaaatatgttagccctccaggttaaagttgattcagctttaagatgttacccttccagaggtacagaagaaacctat

SEQ ID NO: 755672 - DNA, 120 bp, Artificial Sequence
  ENSG00000213585_9 (sequence is synthesized)
ttccaaaaaaggtcctttcagtggtagactcggggagaacttggtggcccctttgagatgccaggtttcttttttatctagaaatggctgcaagtggaagcggataatatgtaggcactt

SEQ ID NO: 755673 - DNA, 120 bp, Artificial Sequence
  ENSG00000213585_10 (sequence is synthesized)
tgtaaattcatattgagtaaatgaatgaaattgtgatttcctgagaatcgaaccttggttccctaaccctaattgatgagaggctcgctgcttgatggtgtgtacaaactcacctgaatg

SEQ ID NO: 755674 - DNA, 120 bp, Artificial Sequence
  ENSG00000213585_11 (sequence is synthesized)
ggacttttttagacagatcttcatgacctgttcccaccccagttcatcatcatctcttttacaccaaaaggtctgcagggtgtggtaactgtttcttttgtgccattttggggtggagaa

SEQ ID NO: 755675 - DNA, 120 bp, Artificial Sequence
  ENSG00000213585_12 (sequence is synthesized)
ggtggatgtgatgaagccaataattcaggacttattccttcttgtgttgtgtttttttttggcccttgcaccagagtatgaaatagcttccaggagctccagctataagcttggaagtgt

SEQ ID NO: 755676 - DNA, 120 bp, Artificial Sequence
  ENSG00000213585_13 (sequence is synthesized)
ctgtgtgattgtaatcacatggtgacaacactcagaatctaaattggacttctgttgtattctcaccactcaatttgttttttagcagtttaatgggtacattttagagtcttccatttt

SEQ ID NO: 755677 - DNA, 120 bp, Artificial Sequence
  ENSG00000213585_14 (sequence is synthesized)
gttggaattagatcctccccttcaaatgctgtaattaacaacacttaaaaaacttgaataaaatattgaaacctcatccttcttctgttgtctttattaataaaatataaataaacaggg

SEQ ID NO: 755678 - DNA, 120 bp, Artificial Sequence
  ENSG00000213585_15 (sequence is synthesized)
gccgctcgctcggctccgctccctggctcggctccctgcctccgcgtcgcagcccccgccgtagccgcctccgagcccgccgccacatcctctgagaagatggctgtgccacccacgtat

SEQ ID NO: 755679 - DNA, 80 bp, Artificial Sequence
  ENSG00000213585_16 (sequence is synthesized)
ccgtccgcgccgccccgcccttggcccagccgctcgctcggctccgctccctggctcggctccctgcctccgcgtcgcag

SEQ ID NO: 755680 - DNA, 80 bp, Artificial Sequence
  ENSG00000213585_17 (sequence is synthesized)
ggaaaaggaccccggcttccttgcgccctggacggcgggggccaggcccctggggagctgagagggaggcgctgagggag

SEQ ID NO: 755681 - DNA, 120 bp, Artificial Sequence
  ENSG00000213585_18 (sequence is synthesized)
tgtcgtcttatagcttggctatagatgatctgaagagaccattgttacggggctgatttactctcattcctcttcgctgctgtagtttctcctgcaagagcactgcctttttgcagtgct

SEQ ID NO: 755682 - DNA, 120 bp, Artificial Sequence
  ENSG00000213585_19 (sequence is synthesized)
gtgcactctccccccaggaactctgccatggtatcagggagcggttatctggaaagatcctgggataggatgagaggctggaggatgtgcccacatgcttgaatttgctgcctgggactt

SEQ ID NO: 755683 - DNA, 120 bp, Artificial Sequence
  ENSG00000213585_20 (sequence is synthesized)
tgcctgctgccctgggatagcacactttggaatttgtaggtgatttccttcccatgaccttagggagctttgcagaggtctccaggccatgcagtataaaacacaaaggaaagttttttg

SEQ ID NO: 755684 - DNA, 120 bp, Artificial Sequence
  ENSG00000213585_21 (sequence is synthesized)
acaggtgtgagccactgtgcctggctaggtgcctgttccatacttatcagacttcctgtaatttagtacctgttttgtgaaatttggtgaacttctgacttcccttaataccagtattgg

SEQ ID NO: 755685 - DNA, 120 bp, Artificial Sequence
  ENSG00000213588_0 (sequence is synthesized)
ggcttccggtctgggacggagctgtagcggcactgtaactgcgagggcagcgccgcgtgtgtaacggcgggggcgtgtcggcgggaaggacaatcgggccgggactcgcggtgtccgggt

SEQ ID NO: 755686 - DNA, 120 bp, Artificial Sequence
  ENSG00000213588_1 (sequence is synthesized)
gaccgcggcttcccgggagcagacctctgtgggcactgtgaggcggaacggagcggcggggcaggagctgttctgggcagccttcatcccgcgtggagtctacccccaagcccttctcct

SEQ ID NO: 755687 - DNA, 120 bp, Artificial Sequence
  ENSG00000213588_2 (sequence is synthesized)
cttcccaattcttgtcaccttcgaggaggccatggaaaccccaacacctttgccgcctgtacccgcctccccgacctgcaacccagccccacggacaatccagatcgagttcccacagca

SEQ ID NO: 755688 - DNA, 120 bp, Artificial Sequence
  ENSG00000213588_3 (sequence is synthesized)
tagctcgtctctgctggaatctctgaaccgccacaggctagagggaaagttctgtgatgtgtccctcctggtgcagggccgggaacttagggctcataaagcagtgttagctgctgcctc

SEQ ID NO: 755689 - DNA, 120 bp, Artificial Sequence
  ENSG00000213588_4 (sequence is synthesized)
tccttacttccatgacaagctgcttctgggggatgcgcctcgtctcactctaccgagtgtcattgaagccgatgccttcgaggggctgctccagctcatttattcagggcgtctccgcct

SEQ ID NO: 755690 - DNA, 120 bp, Artificial Sequence
  ENSG00000213588_5 (sequence is synthesized)
gccactggatgctcttcctgctcatctccttgtggccagtggccttcaaatgtggcaggtagtagatcagtgctcagaaattcttagagaattagaaacttcaggtggtggaatttcagc

SEQ ID NO: 755691 - DNA, 120 bp, Artificial Sequence
  ENSG00000213588_6 (sequence is synthesized)
ccgtggaggaaactcctaccatgcccttctttccactacatcctctacaggaggctggtgcattcgctcttcgcctttccagaccccagtacagtcctctgcttctactgaaagccctgc

SEQ ID NO: 755692 - DNA, 120 bp, Artificial Sequence
  ENSG00000213588_7 (sequence is synthesized)
ttccactgagagccctgtgggaggggagggaagtgaactgggagaagtgctgcaaattcaggtggaagaagaagaggaggaggaggaagatgatgatgatgaggaccaggggtcagccac

SEQ ID NO: 755693 - DNA, 120 bp, Artificial Sequence
  ENSG00000213588_8 (sequence is synthesized)
actctctcagactcctcagccccagagagtatcaggggtttttccccgtcctcatggaccccacccactgcccatgactgctactccccgaaagcttccagagggtgagagtgcaccact

SEQ ID NO: 755694 - DNA, 120 bp, Artificial Sequence
  ENSG00000213588_9 (sequence is synthesized)
tgagcttcctgcccctcctgcactgccccccaaaatcttctacattaagcaggaacccttcgagcctaaggaggagatatcaggaagcggaactcagcctggaggagcaaaggaggaaac

SEQ ID NO: 755695 - DNA, 120 bp, Artificial Sequence
  ENSG00000213588_10 (sequence is synthesized)
caaagtgttttctggaggggacactgaagggaatggggagctagggttcttgttgccttcagggccagggccaacatctgggggagggggtccatcctggaaaccagtggatcttcatgg

SEQ ID NO: 755696 - DNA, 120 bp, Artificial Sequence
  ENSG00000213588_11 (sequence is synthesized)
gacaccccctgcagatggaaaacgctttggttgcctgtgtgggaagcggtttgcagtgaagccaaagcgtgaccggcacatcatgctgaccttcagccttcggccttttggctgtggcat

SEQ ID NO: 755697 - DNA, 120 bp, Artificial Sequence
  ENSG00000213588_12 (sequence is synthesized)
ctgcaacaagcgcttcaagctgaagcaccatctgacagagcacatgaagacccatgctggagccctgcatgcctgtccccactgtggccgtcggttccgagtccatgcctgttttctccg

SEQ ID NO: 755698 - DNA, 120 bp, Artificial Sequence
  ENSG00000213588_13 (sequence is synthesized)
ccaccgggacctatgcaagggccagggctgggccactgcccactggacttacaagtgactgctgaggctatacactagcttctagaacaagataaccactgctgctgatggatacttttc

SEQ ID NO: 755699 - DNA, 120 bp, Artificial Sequence
  ENSG00000213588_14 (sequence is synthesized)
cctcactgccatggcacaccagtcatggatcttgtaatcatgccaagagaatagatacattatggacctcttgttcttagatatgggcctctcagcctggcagatgtggaaactcaaatt

SEQ ID NO: 755700 - DNA, 120 bp, Artificial Sequence
  ENSG00000213588_15 (sequence is synthesized)
tctcgtcccactccaggttttggctagccaaccctgcaggaaagtggtttataggccattcatacttaagttgatcacttgcccatggtggacatttttgtggtggtgatgtccattaag

SEQ ID NO: 755701 - DNA, 120 bp, Artificial Sequence
  ENSG00000213588_16 (sequence is synthesized)
gaaaccagattttcaattatttagtgagagaagagttagagcaaaagacagtggtaaatgttttattccgtctccatgaggaattgaaggagttggtctccacctagagatacatttgat

SEQ ID NO: 755702 - DNA, 120 bp, Artificial Sequence
  ENSG00000213588_17 (sequence is synthesized)
ttacagcttaagtaattcagaggctaagctctaagcttttttctctcattgctggaatgatttaagcagaagtccttttgtgtacttttaaaattgtatctttccaggagcccctcagat

SEQ ID NO: 755703 - DNA, 120 bp, Artificial Sequence
  ENSG00000213588_18 (sequence is synthesized)
tgtaccttgctttctcaccaatagacaccttcccgacacttttttaatgttgtagctgagcactttaacaagttgagcattccatgtttcattcttagaaccttctttaatagagggtct

SEQ ID NO: 755704 - DNA, 120 bp, Artificial Sequence
  ENSG00000213588_19 (sequence is synthesized)
tccctcaacagcctgtgcctctggtctacctttgaccaccactgataactaatatattggtcacaatgactggaatgtgactagtgatctcaggagatggcactgtcctaaagtgctgtc

SEQ ID NO: 755705 - DNA, 120 bp, Artificial Sequence
  ENSG00000213588_20 (sequence is synthesized)
agggtggcaccactgctctctgaacaacttaccttggtcagagggactcaggtttgggacagcacaagctgaaggctggagagtaacttgcatagtaggaccatacctcttcctttccca

SEQ ID NO: 755706 - DNA, 120 bp, Artificial Sequence
  ENSG00000213588_21 (sequence is synthesized)
tcccacccacatatgatagacagcccctctgttgagatatggaggggacagatactggaatcgggggtgggacttgcagttacttaaaattttttaataaactgtgccctgaaacctaaa

SEQ ID NO: 755707 - DNA, 120 bp, Artificial Sequence
  ENSG00000213588_22 (sequence is synthesized)
atatatccacatttatctcttttaaaaattacctagaaataaggtttctttaattgctggttaaaatgctcccgtgcagaaaacaggaaagaacctgcctggttccttagcaaatctgag

SEQ ID NO: 755708 - DNA, 120 bp, Artificial Sequence
  ENSG00000213588_23 (sequence is synthesized)
ttccagtcccaggtccactactattagctgagtgacgcttccagcccgtttcccccgcctggaaactgaggacggcaacccccaccctcgcagggccggtgggaagacacaaagtgatgt

SEQ ID NO: 755709 - DNA, 120 bp, Artificial Sequence
  ENSG00000213588_24 (sequence is synthesized)
gcacttggcgacggtgtccggcggggaggcggcggcttccggtctgggacggagctgtagcggcactgtaactgcgagggcagcgccgcccttcatcccgcgtggagtctacccccaagc

SEQ ID NO: 755710 - DNA, 120 bp, Artificial Sequence
  ENSG00000213588_25 (sequence is synthesized)
catttattcagggcgtctccgcctgccactggatgctcttcctgctcatctccttgtggccagtggccttcaaatgtggcaggaggctggtgcattcgctcttcgcctttccagacccca

SEQ ID NO: 755711 - DNA, 120 bp, Artificial Sequence
  ENSG00000213593_0 (sequence is synthesized)
gagcagtggccgttacggccgaaaagatggcggtcttggcacctctaattgctctcgtgtattcggtgccgcgactttcacgatggctcgcccaaccttactaccttctgtcggccctgc

SEQ ID NO: 755712 - DNA, 120 bp, Artificial Sequence
  ENSG00000213593_1 (sequence is synthesized)
tctctgctgccttcctactcgtgaggaaactgccgccgctctgccacggtctgcccacccaacgcgaagacggtaacccgtgtgactttgactggagagaagtggagatcctgatgtttc

SEQ ID NO: 755713 - DNA, 120 bp, Artificial Sequence
  ENSG00000213593_2 (sequence is synthesized)
tcagtgccattgtgatgatgaagaaccgcagatccatcactgtggagcaacatataggcaacattttcatgtttagtaaagtggccaacacaattcttttcttccgcttggatattcgca

SEQ ID NO: 755714 - DNA, 120 bp, Artificial Sequence
  ENSG00000213593_3 (sequence is synthesized)
tgggcctactttacatcacactctgcatagtgttcctgatgacgtgcaaaccccccctatatatgggccctgagtatatcaagtacttcaatgataaaaccattgatgaggaactagaac

SEQ ID NO: 755715 - DNA, 120 bp, Artificial Sequence
  ENSG00000213593_4 (sequence is synthesized)
gggacaagagggtcacttggattgtggagttctttgccaattggtctaatgactgccaatcatttgcccctatctatgctgacctctcccttaaatacaactgtacagggctaaattttg

SEQ ID NO: 755716 - DNA, 120 bp, Artificial Sequence
  ENSG00000213593_5 (sequence is synthesized)
ggaaggtggatgttggacgctatactgatgttagtacgcggtacaaagtgagcacatcacccctcaccaagcaactccctaccctgatcctgttccaaggtggcaaggaggcaatgcggc

SEQ ID NO: 755717 - DNA, 120 bp, Artificial Sequence
  ENSG00000213593_6 (sequence is synthesized)
ataccagcgggccaagaaactatcaaaggctggagacaatatccctgaggagcagcctgtggcttcaacccccaccacagtgtcagatggggaaaacaagaaggataaataagatcctca

SEQ ID NO: 755718 - DNA, 120 bp, Artificial Sequence
  ENSG00000213593_7 (sequence is synthesized)
ctttggcagtgcttcctctcctgtcaattccaggctctttccataaccacaagcctgaggctgcagccttttatttatgttttccctttggctgtgactgggtggggcagcatgcagctt

SEQ ID NO: 755719 - DNA, 120 bp, Artificial Sequence
  ENSG00000213593_8 (sequence is synthesized)
ctgattttaaagaggcatctagggaattgtcaggcaccctacaggaaggcctgccatgctgtggccaactgtttcactggagcaagaaagagatctcataggacggagggggaaatggtt

SEQ ID NO: 755720 - DNA, 120 bp, Artificial Sequence
  ENSG00000213593_9 (sequence is synthesized)
tccctccaagcttgggtcagtgtgttaactgcttatcagctattcagacatctccatggtttctccatgaaactctgtggtttcatcattccttcttagttgacctgcacagcttggtta

SEQ ID NO: 755721 - DNA, 120 bp, Artificial Sequence
  ENSG00000213593_10 (sequence is synthesized)
gacctagatttaaccctaaggtaagatgctggggtatagaacgctaagaattttcccccaaggactcttgcttccttaagcccttctggcttcgtttatggtcttcattaaaagtataag

SEQ ID NO: 755722 - DNA, 120 bp, Artificial Sequence
  ENSG00000213593_11 (sequence is synthesized)
cctaactttgtcgctagtcctaaggagaaacctttaaccacaaagtttttatcattgaagacaatattgaacaaccccctattttgtggggattgagaaggggtgaatagaggcttgaga

SEQ ID NO: 755723 - DNA, 120 bp, Artificial Sequence
  ENSG00000213593_12 (sequence is synthesized)
ctttcctttgtgtggtaggacttggaggagaaatcccctggactttcactaaccctctgacatactccccacacccagttgatggctttccgtaataaaaagattgggatttccttttga

SEQ ID NO: 755724 - DNA, 120 bp, Artificial Sequence
  ENSG00000213593_13 (sequence is synthesized)
ttggccttgattttcacacatggtaaccaaaggcatctccctctcccctcttaaatatctatacttccactttccttgatccattattttttttcagcatattaaataatatattctttt

SEQ ID NO: 755725 - DNA, 120 bp, Artificial Sequence
  ENSG00000213593_14 (sequence is synthesized)
cagatacaactgtacagggctaaattttgggaaggtggatgttggacgctatactgatgttagtacgcggtacaaagtgagcacatcacccctcaccaagcaactccctaccctgatcct

SEQ ID NO: 755726 - DNA, 120 bp, Artificial Sequence
  ENSG00000213593_15 (sequence is synthesized)
tccagtaagtttagttcacttctcagactcaaggttagatctaatgccctttggaggtgctttgcttcatgttaagagagtggcaatcatttggtaaatttgtcctacgtttaattccaa

SEQ ID NO: 755727 - DNA, 120 bp, Artificial Sequence
  ENSG00000213593_16 (sequence is synthesized)
tttcaaagtgccccatgaagagggacaaagaatgggatataggagtgcacagcccagcctgacctgtgacatctctgtgtttcagtcactgtggagcaacatataggcaacattttcatg

SEQ ID NO: 755728 - DNA, 120 bp, Artificial Sequence
  ENSG00000213593_17 (sequence is synthesized)
ctgtgttgatagacttgattgtggaaaccacagtcccaacagttgcaatcccaaacatgtttctccatacccttcttccatatctcatacctaatgaattatatatgtagctcagatgat

SEQ ID NO: 755729 - DNA, 120 bp, Artificial Sequence
  ENSG00000213614_0 (sequence is synthesized)
atttcacatcacaacgacttgtggttttaatcctccgtttttctgcttctgaagttacttcagcctggcaagtcctttacctccccgtaggcctggcgagctgcatcacaacattcaaga

SEQ ID NO: 755730 - DNA, 120 bp, Artificial Sequence
  ENSG00000213614_1 (sequence is synthesized)
ttcaccctagagccatctgggaaactttcttctccaggtcgccctgcgtcctcgcctccccaccccgttcttctcgagtcgggtgagctgtctagttccatcacggccggcacggccgca

SEQ ID NO: 755731 - DNA, 120 bp, Artificial Sequence
  ENSG00000213614_2 (sequence is synthesized)
ggggtggccggttatttactgctctactgggcccgtgaacagtctggcgagccgagcagttgccgacgcccggcacaatccgctgcacgtagcaggagcctcaggtccaggccggaagtg

SEQ ID NO: 755732 - DNA, 120 bp, Artificial Sequence
  ENSG00000213614_3 (sequence is synthesized)
aaagggcagggtgtgggtcctcctggggtcgcaggcgcagagccgcctctggtcacgtgattcgccgataagtcacgggggcgccgctcacctgaccagggtctcacgtggccagccccc

SEQ ID NO: 755733 - DNA, 120 bp, Artificial Sequence
  ENSG00000213614_4 (sequence is synthesized)
tccgagaggggagaccagcgggccatgacaagctccaggctttggttttcgctgctgctggcggcagcgttcgcaggacgggcgacggccctctggccctggcctcagaacttccaaacc

SEQ ID NO: 755734 - DNA, 120 bp, Artificial Sequence
  ENSG00000213614_5 (sequence is synthesized)
tccgaccagcgctacgtcctttacccgaacaactttcaattccagtacgatgtcagctcggccgcgcagcccggctgctcagtcctcgacgaggccttccagcgctatcgtgacctgctt

SEQ ID NO: 755735 - DNA, 120 bp, Artificial Sequence
  ENSG00000213614_6 (sequence is synthesized)
ttcggttccgggtcttggccccgtccttacctcacagggaaacggcatacactggagaagaatgtgttggttgtctctgtagtcacacctggatgtaaccagcttcctactttggagtca

SEQ ID NO: 755736 - DNA, 120 bp, Artificial Sequence
  ENSG00000213614_7 (sequence is synthesized)
gtggagaattataccctgaccataaatgatgaccagtgtttactcctctctgagactgtctggggagctctccgaggtctggagacttttagccagcttgtttggaaatctgctgagggc

SEQ ID NO: 755737 - DNA, 120 bp, Artificial Sequence
  ENSG00000213614_8 (sequence is synthesized)
acattctttatcaacaagactgagattgaggactttccccgctttcctcaccggggcttgctgttggatacatctcgccattacctgccactctctagcatcctggacactctggatgtc

SEQ ID NO: 755738 - DNA, 120 bp, Artificial Sequence
  ENSG00000213614_9 (sequence is synthesized)
atggcgtacaataaattgaacgtgttccactggcatctggtagatgatccttccttcccatatgagagcttcacttttccagagctcatgagaaaggggtcctacaaccctgtcacccac

SEQ ID NO: 755739 - DNA, 120 bp, Artificial Sequence
  ENSG00000213614_10 (sequence is synthesized)
atctacacagcacaggatgtgaaggaggtcattgaatacgcacggctccggggtatccgtgtgcttgcagagtttgacactcctggccacactttgtcctggggaccaggtatccctgga

SEQ ID NO: 755740 - DNA, 120 bp, Artificial Sequence
  ENSG00000213614_11 (sequence is synthesized)
ttactgactccttgctactctgggtctgagccctctggcacctttggaccagtgaatcccagtctcaataatacctatgagttcatgagcacattcttcttagaagtcagctctgtcttc

SEQ ID NO: 755741 - DNA, 120 bp, Artificial Sequence
  ENSG00000213614_12 (sequence is synthesized)
ccagatttttatcttcatcttggaggagatgaggttgatttcacctgctggaagtccaacccagagatccaggactttatgaggaagaaaggcttcggtgaggacttcaagcagctggag

SEQ ID NO: 755742 - DNA, 120 bp, Artificial Sequence
  ENSG00000213614_13 (sequence is synthesized)
tccttctacatccagacgctgctggacatcgtctcttcttatggcaagggctatgtggtgtggcaggaggtgtttgataataaagtaaagattcagccagacacaatcatacaggtgtgg

SEQ ID NO: 755743 - DNA, 120 bp, Artificial Sequence
  ENSG00000213614_14 (sequence is synthesized)
cgagaggatattccagtgaactatatgaaggagctggaactggtcaccaaggccggcttccgggcccttctctctgccccctggtacctgaaccgtatatcctatggccctgactggaag

SEQ ID NO: 755744 - DNA, 120 bp, Artificial Sequence
  ENSG00000213614_15 (sequence is synthesized)
gatttctacatagtggaacccctggcatttgaaggtacccctgagcagaaggctctggtgattggtggagaggcttgtatgtggggagaatatgtggacaacacaaacctggtccccagg

SEQ ID NO: 755745 - DNA, 120 bp, Artificial Sequence
  ENSG00000213614_16 (sequence is synthesized)
ctctggcccagagcaggggctgttgccgaaaggctgtggagcaacaagttgacatctgacctgacatttgcctatgaacgtttgtcacacttccgctgtgaattgctgaggcgaggtgtc

SEQ ID NO: 755746 - DNA, 120 bp, Artificial Sequence
  ENSG00000213614_17 (sequence is synthesized)
caggcccaacccctcaatgtaggcttctgtgagcaggagtttgaacagacctgagccccaggcaccgaggagggtgctggctgtaggtgaatggtagtggagccaggcttccactgcatc

SEQ ID NO: 755747 - DNA, 120 bp, Artificial Sequence
  ENSG00000213614_18 (sequence is synthesized)
ctggccaggggacggagccccttgccttcgtgccccttgcctgcgtgcccctgtgcttggagagaaaggggccggtgctggcgctcgcattcaataaagagtaatgtggcatttttctat

SEQ ID NO: 755748 - DNA, 120 bp, Artificial Sequence
  ENSG00000213614_19 (sequence is synthesized)
aataaacatggattacctgtgtttaaaaaaaaaagtgtgaatggcgttagggtaagggcacagccaggctggagtcagtgtctgcccctgaggtcttttaagttgagggctgggaatgaa

SEQ ID NO: 755749 - DNA, 120 bp, Artificial Sequence
  ENSG00000213614_20 (sequence is synthesized)
acctatagcctttgtgctgttctgccttgcctgtgagctatgtcactcccctcccactcctgaccatattccagacacctgccctaatcctcagcctgctcacttcacttctgcattata

SEQ ID NO: 755750 - DNA, 120 bp, Artificial Sequence
  ENSG00000213614_21 (sequence is synthesized)
agcctctcccccatgcatactcatccacctccctcccctagagctattctcctttgggtttcttgctgcttcaattttatacaaccattatttaaatattattaaacacatattgttctc

SEQ ID NO: 755751 - DNA, 120 bp, Artificial Sequence
  ENSG00000213614_22 (sequence is synthesized)
aacacatattgttctctaggcactgtggtagtgggtttttttgttgtttttgtttttgagactgtctcaaaaactctgtcgcccaggctgacagtgcagtggcacaatcttggctcactg

SEQ ID NO: 755752 - DNA, 120 bp, Artificial Sequence
  ENSG00000213614_23 (sequence is synthesized)
ggttcaagcgattctcgtgcatcagcctcctgagtaactggaattaataggcacgtgccaccatgtccatctaattcatatatatatattttttttttctgagacggagtctcactgtca

SEQ ID NO: 755753 - DNA, 120 bp, Artificial Sequence
  ENSG00000213614_24 (sequence is synthesized)
ctgggattagaggcgtgagccaccgcacgcgggcctgtggtaaattgttgaatttgaaggactcagaggccctggtcaattccaaaataacgtaggcgacttccatccccctcctcccaa

SEQ ID NO: 755754 - DNA, 120 bp, Artificial Sequence
  ENSG00000213614_25 (sequence is synthesized)
ccattttcagcccaaagcatcttcgcagggaatggatggctgcgcggaggtgggcggtggctctggagagggtctttgcaggtgtgattttctctagaaggaaatgtctcgtcgtggacc

SEQ ID NO: 755755 - DNA, 120 bp, Artificial Sequence
  ENSG00000213614_26 (sequence is synthesized)
cagactgccccctcctggtttcagatgcagaagtgatactgtaagccagaggcgggggcagtaatgcatcgcagccattttaggtgaggatttccttggcggttatttgttaagttcttt

SEQ ID NO: 755756 - DNA, 120 bp, Artificial Sequence
  ENSG00000213614_27 (sequence is synthesized)
ggctgggccctgggctggggtaacaatggacaggttccaggcatttttttcagaaagcttccagtgtagtggatacagaaacttcaggaaggcagggctgagaaggatctgagtaaaact

SEQ ID NO: 755757 - DNA, 120 bp, Artificial Sequence
  ENSG00000213614_28 (sequence is synthesized)
cggtccttcaacaccatccttcagcccctgggtcatgttccttcgaggtcctggtgggaggtagacaagcctagccttgtgctgttcctgtaaggacagggtgggcattttctaccaaca

SEQ ID NO: 755758 - DNA, 120 bp, Artificial Sequence
  ENSG00000213614_29 (sequence is synthesized)
gaattcttggaattttcacacagcccagcctagccaagtccagggctatagcccagatacacaagttaaggtcccagcactggcacccaccacaggagcccccttacctctattacccag

SEQ ID NO: 755759 - DNA, 120 bp, Artificial Sequence
  ENSG00000213614_30 (sequence is synthesized)
aagcttgtaggaggggtggtccgcagacaaggaccctgcacaggtgcgaccctgcttccctcctggtcataactttcatgttactattgcttgggataatgttaagtaaaaatagcagac

SEQ ID NO: 755760 - DNA, 120 bp, Artificial Sequence
  ENSG00000213614_31 (sequence is synthesized)
actgagttttaagtctcaagtggatgaaggcagagatcgtgatacacttgagttaaagcagtagggttctgtcattttctattcctgttgtaaacattttctttaatgttattattttta

SEQ ID NO: 755761 - DNA, 120 bp, Artificial Sequence
  ENSG00000213614_32 (sequence is synthesized)
ccactaaactaacgtggcctggtcacgactttcattggtaaagtgtgctgttcctcaccctccaccgttgctcctttggtccactgatcataagagcatttacctgaaggtcgtcagacc

SEQ ID NO: 755762 - DNA, 120 bp, Artificial Sequence
  ENSG00000213614_33 (sequence is synthesized)
tcgaatgccaacaggtcaactgcagtggcctgcagttaccacccagtctgttccaatgaacagaatcgctgttgccccaactcatctcccttcacctaggctgtaaattgaaagtcccac

SEQ ID NO: 755763 - DNA, 120 bp, Artificial Sequence
  ENSG00000213614_34 (sequence is synthesized)
ccctgagcggaacacaggccatcttgtgtgctgtgcaccaccagggggtggggaagtttccagactgacttcctggctccagtcatcctaggaaaagagttctccagtcgctccccaccc

SEQ ID NO: 755764 - DNA, 120 bp, Artificial Sequence
  ENSG00000213614_35 (sequence is synthesized)
ccaccccttcccattccaggagtctattaaggaggcaaagcaggcctaacgggtatcaaagcaaaggagtgaatggagactgggagagtcttcaacctctcctctccttggtaggagctg

SEQ ID NO: 755765 - DNA, 120 bp, Artificial Sequence
  ENSG00000213614_36 (sequence is synthesized)
aggctgcatgccaggtaccttcccttcgaggaatctaataaagctaggtcactggtgttttcaggtgcttctcaaaggattgccgtaggggtaggatatcaggatgtgggagcacaggtg

SEQ ID NO: 755766 - DNA, 120 bp, Artificial Sequence
  ENSG00000213614_37 (sequence is synthesized)
ccaccacagcactagtgatggagagtcattgcccctagacttctgggacagtgagactgtgaggaaagctgaaatgatactgggaaagggtgaaagaaaggatgtaggtggaatttattt

SEQ ID NO: 755767 - DNA, 120 bp, Artificial Sequence
  ENSG00000213614_38 (sequence is synthesized)
agtattaatgtaggtacacataccttatggcaacattcctagcactctaaattctagatttgtatagtttctgtcaatatcttttgtaagcttaatcaatacagggcatgacaagtatgt

SEQ ID NO: 755768 - DNA, 120 bp, Artificial Sequence
  ENSG00000213614_39 (sequence is synthesized)
gtcacatacttttttttccacgaagaaaaaaaataagtaggaattgggtgctttgtttatcaaaatttgtatttcctttataaataaactttgaaataaaggttgaaaattagtatcttt

SEQ ID NO: 755769 - DNA, 120 bp, Artificial Sequence
  ENSG00000213614_40 (sequence is synthesized)
ctctccgaggtaacaaattggggctgattaaaagagagagagaaaggatgatgtgggaaggttggtgttggtggagtgcagtggcccagtccctgctcactgcaacctctgcctcctagg

SEQ ID NO: 755770 - DNA, 120 bp, Artificial Sequence
  ENSG00000213614_41 (sequence is synthesized)
ctaacacttacagaggcttatagtcagccctcatccacggattcaaccaactgcgataaaaagtattcaggaaaaaaaaaatacaacaaaaaatggtacaaataaaaaatactgtataac

SEQ ID NO: 755771 - DNA, 120 bp, Artificial Sequence
  ENSG00000213614_42 (sequence is synthesized)
ccgggtcttggccccgtccttacctcacaggtctttctctgtcattcagactggagtgcagtggtgtgatcacggcttacagcaacctcgaactccaggactcaagcagtcttcccgcct

SEQ ID NO: 755772 - DNA, 120 bp, Artificial Sequence
  ENSG00000213614_43 (sequence is synthesized)
gcctcactgatgagtagctaggactacagacgcatgccaccgcacccagctaatttttttattttttgcattttgtagagatgggggtcttactgtgttgcccaggctggtcttgaaccc

SEQ ID NO: 755773 - DNA, 120 bp, Artificial Sequence
  ENSG00000213614_44 (sequence is synthesized)
gattacaggtgtgagccaccatttattacctaaagcatgatacttttctagtatccctgtatagtactgagtccaagaagctaaacttgatcaaggtgtatgtgggtagcctgggcctgg

SEQ ID NO: 755774 - DNA, 120 bp, Artificial Sequence
  ENSG00000213614_45 (sequence is synthesized)
tttatgaaaaatttgagttttatttctgtgagctgtaggtgttcccctgctttggatattctgtttgaacacagtatacattggaggactcaggatgtggaacatgattcattcaggagt

SEQ ID NO: 755775 - DNA, 120 bp, Artificial Sequence
  ENSG00000213614_46 (sequence is synthesized)
cagctgagaaagtgtttattaaccccttaactctgtgccttcagactaattgcctaatttccaagctgttgctgctacttccttttttttttttttttttttaactctgcctgccttcca

SEQ ID NO: 755776 - DNA, 120 bp, Artificial Sequence
  ENSG00000213614_47 (sequence is synthesized)
gacatttccgaggataacaagaaaatagttatgaatgttttttcagtctttaagggagggtataatagtgggaagaacttggtgattttaaaaataaaacaataaaaattaaaagtccaa

SEQ ID NO: 755777 - DNA, 120 bp, Artificial Sequence
  ENSG00000213614_48 (sequence is synthesized)
agatatttttgtcagcgaggagaggggaagagggtagggatagttgaaagttctcttctgattgtctgctgagcataagggaggtggtgatcaagtagacttgaggaaggtgtagagaat

SEQ ID NO: 755778 - DNA, 120 bp, Artificial Sequence
  ENSG00000213614_49 (sequence is synthesized)
agaatgaagcaatgatggagatagaagattttcagggtagcatcaagggcccagccaagatggagaccattattttgcagtggtccagtcctgctgttttgtgatttttctcccttccct

SEQ ID NO: 755779 - DNA, 120 bp, Artificial Sequence
  ENSG00000213614_50 (sequence is synthesized)
ccagtagggtacagtagccggggtcaggggcacagcaggcagatgttagattgatccagggttgaaagttttgcccattggttgtgacagaagaaaagagacagatcgttgggagtattg

SEQ ID NO: 755780 - DNA, 120 bp, Artificial Sequence
  ENSG00000213614_51 (sequence is synthesized)
gctagattgcgtttgaggtgatgaatcactacatgtaggccagcagggaaggaagcaagaatgagagaagactgagaacagaagggaaatggaggggtcatagtactggagtctggagaa

SEQ ID NO: 755781 - DNA, 120 bp, Artificial Sequence
  ENSG00000213614_52 (sequence is synthesized)
ggttcaacagtaggactttggtgatagagcgtccttgttattagaattccatgtccagaggtgacctgtctgtgatgaataaggcaaaattactctataaggtactacaggggtagaaaa

SEQ ID NO: 755782 - DNA, 120 bp, Artificial Sequence
  ENSG00000213614_53 (sequence is synthesized)
ctaccagtgatgtttgtctctttactgaggggactaaggaagggtaccaaagatactttttttttttaatcgtaaatattttctactgtttggtagtactgtttgattttttttttaacc

SEQ ID NO: 755783 - DNA, 80 bp, Artificial Sequence
  ENSG00000213614_54 (sequence is synthesized)
attgcccaggctggggtgcagtggtgcagtctctgctcactgtagcctccgtctcttgggttcaagtgattctcctgcct

SEQ ID NO: 755784 - DNA, 89 bp, Artificial Sequence
  ENSG00000213614_55 (sequence is synthesized)
attacagggcccaccaccatgaccagctaatttggtgttggccaggctggtcactaactcccgaccttaagtgatccgcctgcctcagc

SEQ ID NO: 755785 - DNA, 120 bp, Artificial Sequence
  ENSG00000213614_56 (sequence is synthesized)
gcctcagcctcccaaagtgctgagatcatggacctgagccaccgcaccaggcctatacaactgttttgattttaaaaaaagatacaaagttttcagtgaacccaaagagaagagtaggtt

SEQ ID NO: 755786 - DNA, 120 bp, Artificial Sequence
  ENSG00000213614_57 (sequence is synthesized)
tcagtgaacccaaagagaagagtaggtttacatgaaagcagggagatgagtgagctgcagaggtagcaggctgtggtcctggaatgggaccctggagtgtattatctgtctatggaatca

SEQ ID NO: 755787 - DNA, 120 bp, Artificial Sequence
  ENSG00000213614_58 (sequence is synthesized)
caaggtcttagatctgaagaggagtagctggaatctggtcccaccctgccattgtttacagggaaggaaatgggagccctgagacttgctcagcttggcagcagcaaaaccagaaccaga

SEQ ID NO: 755788 - DNA, 120 bp, Artificial Sequence
  ENSG00000213614_59 (sequence is synthesized)
agcaacctgtcctgatttcccagccctctggtctgtttttcatgctacctcctaagccctggaggcttctcaatttcctgctgttccagccagactcatggcacatgtgctcatgacatt

SEQ ID NO: 755789 - DNA, 120 bp, Artificial Sequence
  ENSG00000213614_60 (sequence is synthesized)
gctggctgaccgggctgtttgccatactgtgcttcccacacgttggtgcttctcagtgttcagggtgtgggcgggtgtgtgtagaggcggctgtactactgtcccctgcctatttcctgc

SEQ ID NO: 755790 - DNA, 120 bp, Artificial Sequence
  ENSG00000213614_61 (sequence is synthesized)
cctcttcatagccaggcaaagtagcaacttggaggcggaaaaccacagtggtgataccctatttacatcctttacaatgacctagtgtccctcctgttttgccagctctcatgttgctgc

SEQ ID NO: 755791 - DNA, 120 bp, Artificial Sequence
  ENSG00000213614_62 (sequence is synthesized)
ctcccccaaacatccctctcataatttgtttaaacagcagccatgcccccgtatctacttctttcagcccaaacccagatgagtcactgagagaacttcggacagggattcttcaccatg

SEQ ID NO: 755792 - DNA, 120 bp, Artificial Sequence
  ENSG00000213614_63 (sequence is synthesized)
agattgatggcagggagtggaagaattgtaattctggagaaacagcccttaaattaggggcattgttctgggaaaaaaagtgttttcctattcagcagatctgcaaaggagtctgtgact

SEQ ID NO: 755793 - DNA, 120 bp, Artificial Sequence
  ENSG00000213614_64 (sequence is synthesized)
ctccaaaagactacagatttagggagtacagtgcaggtgtcttttagaaaaataaattttttaaaaatcgaaagattaggtatttttctgtcttccaagtaatagttcagataaacctgg

SEQ ID NO: 755794 - DNA, 120 bp, Artificial Sequence
  ENSG00000213614_65 (sequence is synthesized)
tgtttgtgtggcctctcttattttgtcatgagggcagcgagccatggtagttgcatatggattagttgtgatttctccttatgtggcaggctgagccccagaggattagaactaaagctc

SEQ ID NO: 755795 - DNA, 120 bp, Artificial Sequence
  ENSG00000213614_66 (sequence is synthesized)
aggacttcggctgtcttttggatggctgcctgggtagatatgcagatgaattctccacacaatgatattggggctccatgatgtgtggggttgggagtgggggcaagaagtcagaggatg

SEQ ID NO: 755796 - DNA, 120 bp, Artificial Sequence
  ENSG00000213614_67 (sequence is synthesized)
gggtatagtttttcctcacccttgctcctaggttaagtcctcattggtctccctgtagagtctcctgtggagatgggtttgtagcctgtctgcttggatggccctgcagattctgccttg

SEQ ID NO: 755797 - DNA, 120 bp, Artificial Sequence
  ENSG00000213614_68 (sequence is synthesized)
agtgtggtctttgccttgaaggtctgcttgtccttttgtgttgtaacaatgtagttttagggttcaagtatggagctgtgaattgacctggcccagagttgcctcagattccctcctctt

SEQ ID NO: 755798 - DNA, 120 bp, Artificial Sequence
  ENSG00000213614_69 (sequence is synthesized)
tgcagaatgtaggcaggtattggtgtggggatccagggtatttactggtaagggaaagaatgtgttgttcatgatggtaggaaaggcccccttattggcttgcttcttggcagaccaaag

SEQ ID NO: 755799 - DNA, 120 bp, Artificial Sequence
  ENSG00000213614_70 (sequence is synthesized)
agctgagatacagccatgtggtagtgctcaagaggtctgagcaggcttccgtgagatgatctgagcgcttggattccttctgcctggagatgggtaacatttgagattccagtttggttc

SEQ ID NO: 755800 - DNA, 120 bp, Artificial Sequence
  ENSG00000213614_71 (sequence is synthesized)
tgaattctctcattgccttctgccaggccatcctatccctgacattgtagtgccataagaagtcatggatgttgtgatgccagtgggatgaatatggctccaggaaagaatagaatagag

SEQ ID NO: 755801 - DNA, 120 bp, Artificial Sequence
  ENSG00000213614_72 (sequence is synthesized)
aggggttcattaagttaaggcttggggctataacaccagagccaccctgaaaatcacagggaagaaccagcaggagggtgagaagagacagtgtattcatattttggctttggcattttt

SEQ ID NO: 755802 - DNA, 120 bp, Artificial Sequence
  ENSG00000213614_73 (sequence is synthesized)
tctgcatagacaagggtctgtaaagctatattagatactatgttggttcaaccctccactattagggtaaaatctaccttggatagagaacctgtttgggaagaggaaggaaggaagcaa

SEQ ID NO: 755803 - DNA, 120 bp, Artificial Sequence
  ENSG00000213614_74 (sequence is synthesized)
gatgggtgggtgaccctgatcttctctgaggtatcagttgcatcatctcaggcctcctctgcctgatccttctgtcatctgctccattagctcctaggcttttgcaaaactggaaaccct

SEQ ID NO: 755804 - DNA, 120 bp, Artificial Sequence
  ENSG00000213614_75 (sequence is synthesized)
tcatctggagccctcaagagcagtactacttaatatgccaatcttcaatgagataagaagcatatgtaccagaatgtaagactgatctcttcatcaagaaaatcttgtatgaaaaaatgt

SEQ ID NO: 755805 - DNA, 120 bp, Artificial Sequence
  ENSG00000213614_76 (sequence is synthesized)
agtgaccagccagtaacacagtttgcaaattggcagctaatctgcagaccatacttggagtagcagtgctctagagctgcctttcattcagaagcagttgttgaggtcatggagttgttt

SEQ ID NO: 755806 - DNA, 120 bp, Artificial Sequence
  ENSG00000213614_77 (sequence is synthesized)
gtttggtacaggccaagggcagtcagaaatatagagccctggttaagaagagctgtcacccagagcattcagacatgggtcagggcagctactgaggagaagaggggcacaacgagagtg

SEQ ID NO: 755807 - DNA, 120 bp, Artificial Sequence
  ENSG00000213614_78 (sequence is synthesized)
agacagctgaacagatgatcaggcactgcctatgccaagggtaaatgccatgtcctccctttcctttaccacaggcgtgtgagctgagggactagagctagggtcttggttttgcctgtt

SEQ ID NO: 755808 - DNA, 69 bp, Artificial Sequence
  ENSG00000213614_79 (sequence is synthesized)
tagtagagatgggatttcaccatattgcccaggccagtcttgaactcctgagttgccaccgcgcccagc

SEQ ID NO: 755809 - DNA, 120 bp, Artificial Sequence
  ENSG00000213614_80 (sequence is synthesized)
caaagttctgggattacaggtgtgtgccaccgcgcccagccaggaagctttttttatgggaacaattggcgtgttttcccgtctctgtggaattgtccctggaagttgacaggttttacc

SEQ ID NO: 755810 - DNA, 120 bp, Artificial Sequence
  ENSG00000213614_81 (sequence is synthesized)
ctgtgcagcatcagcaactgctgctgccctagtcaggggctctgggaagcagtaggagagtctgtgggctgatgttctaggtgccagcaggggacaggtagctgggggcagggggaatga

SEQ ID NO: 755811 - DNA, 120 bp, Artificial Sequence
  ENSG00000213614_82 (sequence is synthesized)
tgctaccacagacactgtctgtccagctcttgctaaagacatgtaattggaaaggtttttttaaaaggaaaactataacaaaagaaatagatacatgcaaaaaaaaagataaatagtagt

SEQ ID NO: 755812 - DNA, 120 bp, Artificial Sequence
  ENSG00000213614_83 (sequence is synthesized)
gaaatatttagaactacattatttctggagaaaatgagtttactggctaaactattggcccttgcccttcttctgggtttactgagaaggcatttggtgcctagatacagacttagccaa

SEQ ID NO: 755813 - DNA, 120 bp, Artificial Sequence
  ENSG00000213614_84 (sequence is synthesized)
atatctctcccacttttggtaaaccctctgctggtgaatgatgtgggaaactctctcggaattccacaccttgctttagtttgtcttcattcccttgctccacttctatgcttggagcaa

SEQ ID NO: 755814 - DNA, 120 bp, Artificial Sequence
  ENSG00000213614_85 (sequence is synthesized)
cagcatgctgcctccccttcctgccctcttgtacctttcatgcaggtgctgatggtgagtcaggctagaggtaagggaggacctggaactccagaatgctgggtgtcagagtcagagtgg

SEQ ID NO: 755815 - DNA, 120 bp, Artificial Sequence
  ENSG00000213614_86 (sequence is synthesized)
ggagaagccaaaacagtacactagcagtctgctcaaatcaggtgctgagtgactgctgaggtctcatggattctttcactttgaaactggggactctgataattttcatggggcttctgc

SEQ ID NO: 755816 - DNA, 120 bp, Artificial Sequence
  ENSG00000213614_87 (sequence is synthesized)
agggtttccagaagaggggccccagctgttgagaacatacaatactctgggttcaacatacctgtgtgtgggccttgctagactctaggagacagtgtcagtggactaggggagtccttc

SEQ ID NO: 755817 - DNA, 120 bp, Artificial Sequence
  ENSG00000213614_88 (sequence is synthesized)
tggggcagttgctgtccaccacacctcagctccctatagctgggtctcttcttagactctgaagaggaagagtggatgattttttttatcttctaggtccagccatgaacccaggctcct

SEQ ID NO: 755818 - DNA, 120 bp, Artificial Sequence
  ENSG00000213614_89 (sequence is synthesized)
tggaaacccaagcttatgatcactttctcacaatttattctgggaccccttttctcagctctcttagctcctgataggggttatccatgaaaagtccaactcttgcaggctgagttgtct

SEQ ID NO: 755819 - DNA, 120 bp, Artificial Sequence
  ENSG00000213614_90 (sequence is synthesized)
ctgtgtctgtcctcatgagtatatgtcttggcctctcttctcaatattcttgtgaaggcacaggaaatatagataagaggtatgtgggttttgaaggttagtatgttgtaaggaagggca

SEQ ID NO: 755820 - DNA, 120 bp, Artificial Sequence
  ENSG00000213614_91 (sequence is synthesized)
ctaaaacccttactctgacatctcccaaaatgaaatacagaagtaaagatggatagtggcttcctaatatccccttttcatcagtgttaaaaatcgtcaagcctacactacatccatttt

SEQ ID NO: 755821 - DNA, 120 bp, Artificial Sequence
  ENSG00000213614_92 (sequence is synthesized)
ccctgtgtacccaaatgttatgctctgctacattgagaaccttccaaatagagacatctctttttccactccctgagtctttactctgcctctctacatcttcctaggtctggagacttt

SEQ ID NO: 755822 - DNA, 120 bp, Artificial Sequence
  ENSG00000213614_93 (sequence is synthesized)
ttaccaagtatggttgggtgtgcaaagtttacattttaaggacctctgctgctgccactgtcattgtggttaatgatggctttaaggtttattcttattcccatatctttgagagaggaa

SEQ ID NO: 755823 - DNA, 120 bp, Artificial Sequence
  ENSG00000213614_94 (sequence is synthesized)
ccttacctcacagcaaacatgtactgaatgactgctgtgtgtcaggcactgggaatacaaagacactgagattggtccctcctgttgaggaactcacaacctagggaaacggcatacact

SEQ ID NO: 755824 - DNA, 120 bp, Artificial Sequence
  ENSG00000213614_95 (sequence is synthesized)
gaggtggagggttgggcctgagagcaggagttctcccttagagacccaatcccatctagccacctctggactagtacccttctttcaggcctgagagagagcaggccgtgcaacgagcct

SEQ ID NO: 755825 - DNA, 120 bp, Artificial Sequence
  ENSG00000213614_96 (sequence is synthesized)
tctgaagatttgtgtgcaatattcactctccacatgacttccgtctatatccctccagctgccctttggtatgtgggatagggattgttaaccttacttcccagagagataatgaggcct

SEQ ID NO: 755826 - DNA, 120 bp, Artificial Sequence
  ENSG00000213614_97 (sequence is synthesized)
ggattgctacccacattttaatgaaggtggagctgagccgtagaactctctgggagccatccaacctggctgtggctcataacaaggtattgatcacttcctttggcctgagtgagtcca

SEQ ID NO: 755827 - DNA, 120 bp, Artificial Sequence
  ENSG00000213619_0 (sequence is synthesized)
agtctgcatctgagtaacatggcggcggcggcggtagccaggctgtggtggcgcgggatcttgggggcctcggcgctgaccagggggactgggcgaccctccgttctgttgctgccggtg

SEQ ID NO: 755828 - DNA, 120 bp, Artificial Sequence
  ENSG00000213619_1 (sequence is synthesized)
aggcgggagagcgccggggccgacacgcgccccactgtcagaccacggaatgatgtggcccacaagcagctctcagcttttggagagtatgtggctgaaatcttgcccaagtatgtccaa

SEQ ID NO: 755829 - DNA, 120 bp, Artificial Sequence
  ENSG00000213619_2 (sequence is synthesized)
caagttcaggtgtcctgcttcaatgagttagaggtctgtatccatcctgatggcgtcatcccagtgctgactttcctcagggatcacaccaatgcacagttcaaatctctggttgacttg

SEQ ID NO: 755830 - DNA, 120 bp, Artificial Sequence
  ENSG00000213619_3 (sequence is synthesized)
ttgtctctgcgcttcaactcacggatccgtgtgaagacctacacagatgagctgacgcccattgagtctgctgtctctgtgttcaaggcagccaactggtatgaaagggagatctgggac

SEQ ID NO: 755831 - DNA, 120 bp, Artificial Sequence
  ENSG00000213619_4 (sequence is synthesized)
atgtttggagtcttctttgctaaccaccctgatctaagaaggatcctgacagattatggcttcgagggacatcctttccggaaagactttcctctatctggctatgttgagttacgttat

SEQ ID NO: 755832 - DNA, 120 bp, Artificial Sequence
  ENSG00000213619_5 (sequence is synthesized)
gatgatgaagtgaagcgggtggtggcagagccggtggagttggcccaagagttccgcaaatttgacctgaacagcccctgggaggctttcccagtctatcgccaacccccggagagtctc

SEQ ID NO: 755833 - DNA, 120 bp, Artificial Sequence
  ENSG00000213619_6 (sequence is synthesized)
aagcttgaagccggagacaagaagcctgatgccaagtagctccagggaacgcatgtggatcctagacagcgccttatctatgattgagtgtccgtgtaaataaattcctacttagactta

SEQ ID NO: 755834 - DNA, 120 bp, Artificial Sequence
  ENSG00000213619_7 (sequence is synthesized)
ggtcttcaccctgcatgcagaatcgagccctccctgtgcccttaggcctgttatggccctgattgttccttgtccatttcaatcatcccctttttgtctgattaaactgtcagctctttg

SEQ ID NO: 755835 - DNA, 120 bp, Artificial Sequence
  ENSG00000213619_8 (sequence is synthesized)
aaagcaagcaatataacctttaggcctcagagccctgtaataatagtacctagcgttaattgagtgcttaatgtgtgcctggaacctcgctaagcgttttagtgaatgatcttatttcgt

SEQ ID NO: 755836 - DNA, 120 bp, Artificial Sequence
  ENSG00000213619_9 (sequence is synthesized)
gcaggaggggcacttggccctgtctgggaggcttctttgaaaagagagaatgtttgtgctgaatctaaaatatgagtaggagaccaggtagccttgtgagatggaccagggaaatattcc

SEQ ID NO: 755837 - DNA, 120 bp, Artificial Sequence
  ENSG00000213619_10 (sequence is synthesized)
tgacaaagtgaatagcatgagcaaacacaggcatgctgacatgctaagctacagctgtggcctgggcctttggaagtagttgtaagcataggagaatcttgaggttttgaggttcagaat

SEQ ID NO: 755838 - DNA, 120 bp, Artificial Sequence
  ENSG00000213619_11 (sequence is synthesized)
cagattcctccatcccaagcttggacttttctctcagcattaaaccaggtgactccagctgaagttagctgttccctcagtagctctttgttccctctcccctcactttcatgtgtgcag

SEQ ID NO: 755839 - DNA, 120 bp, Artificial Sequence
  ENSG00000213619_12 (sequence is synthesized)
gggagatctgagaaggttttgggggtaaggatattaatttcagtttgtaacatacaatagaacacagcagttaaactggaacttcagagtcaagtagatctgaagttggatcttggttct

SEQ ID NO: 755840 - DNA, 120 bp, Artificial Sequence
  ENSG00000213619_13 (sequence is synthesized)
gagtaacatggcggcggcggcggtagccaggctgtggtggcgcgggatcttgggggcctcggcgctgaccaggggtgagcacgggcagccagctgagaccggggtcaggcgcagcggcgt

SEQ ID NO: 755841 - DNA, 120 bp, Artificial Sequence
  ENSG00000213619_14 (sequence is synthesized)
tttcccacgctacagggctcacacgtgtctggcctgcgacgcgctctcccttcgccggggtcccagtttcccgcccaggaaacctcggtccctcctccgaggccgccgggccctcctcca

SEQ ID NO: 755842 - DNA, 120 bp, Artificial Sequence
  ENSG00000213619_15 (sequence is synthesized)
gagtcccgccagtcccccagagtccaggccagtccccgccgtcacccggtgcgagcccgcgagaggcctagtgcagctggcagccccgccccggcacccgcctgctcttctcgcgggtcc

SEQ ID NO: 755843 - DNA, 120 bp, Artificial Sequence
  ENSG00000213619_16 (sequence is synthesized)
cgcgagcgcgggggccgacgggtcgccgctgcgccgggccgggatggcggccaccgcgctgctggaggccggcctggcgcgggtgctcttctacccgacgctgctctacaccctgttccg

SEQ ID NO: 755844 - DNA, 120 bp, Artificial Sequence
  ENSG00000213619_17 (sequence is synthesized)
tccgcgggaaggtgccgggtcgggcgcaccgggactggtaccaccgcatcgaccccaccgtgctgctgggcgcgctgccgttgcggagcttgacgcgccagctggtacaggacgagaacg

SEQ ID NO: 755845 - DNA, 120 bp, Artificial Sequence
  ENSG00000213619_18 (sequence is synthesized)
tgcgcggggtgatcaccatgaacgaggagtacgagacgaggttcctgtgcaactcttcacaggtgcacaaatggagtccagaggaggctgtaagagccatcgccaagatccggtcataca

SEQ ID NO: 755846 - DNA, 120 bp, Artificial Sequence
  ENSG00000213619_19 (sequence is synthesized)
tccacatcaggcctggccagctggatgttcttaaagagttccacaagcagattactgcacgggcaacaaaggatgggacttttgtcatttcaaagacatgatgtatggggattagaaaga

SEQ ID NO: 755847 - DNA, 120 bp, Artificial Sequence
  ENSG00000213619_20 (sequence is synthesized)
actcaagacactcctgcttgatacagaacaaaaagagcttaacaggaccaacagggcttaagcccagacttgacgtaacagaaatgtgccaatagccactgtcagaccacggaatgatgt

SEQ ID NO: 755848 - DNA, 71 bp, Artificial Sequence
  ENSG00000213619_21 (sequence is synthesized)
gtttaatctttctgagctttcattttcttaccgggaaaataaatataaagctgtccttatcttatagaatg

SEQ ID NO: 755849 - DNA, 120 bp, Artificial Sequence
  ENSG00000213619_22 (sequence is synthesized)
cgggaaaataaatataaagctgtccttatcttatagaatggttataaggatccaatgagatagttcaagtaaattgcttgcacacagtgttttcaatacatttagctattaatattttac

SEQ ID NO: 755850 - DNA, 120 bp, Artificial Sequence
  ENSG00000213619_23 (sequence is synthesized)
tgattatctactgtttgccagactctgggatggagagagaaataacatgaagtatttgtcctccaggagtcccctacactctagtgaaggagaaagacacctaaacagcttactgtagta

SEQ ID NO: 755851 - DNA, 120 bp, Artificial Sequence
  ENSG00000213619_24 (sequence is synthesized)
acatataatacaaaggatattagagggatgctttaagaaagcaggaggggcacttggccctgtctgggaggcttctttgaaaagagagaatgtttgtgctgaatctaaaatatgagtagg

SEQ ID NO: 755852 - DNA, 120 bp, Artificial Sequence
  ENSG00000213625_0 (sequence is synthesized)
aggctgcccgggccgtggcaggaagccggaagcagccgcggccccagttcgggagacatggcgggcgttaaagctctcgtggcattatccttcagtggggctattggactgacttttctt

SEQ ID NO: 755853 - DNA, 120 bp, Artificial Sequence
  ENSG00000213625_1 (sequence is synthesized)
atgctgggatgtgccttagaggattatggcgtttactggcccttattcgtcctgattttccacgccatctcccccatcccccatttcattgccaaaagagtcacctatgactcagatgca

SEQ ID NO: 755854 - DNA, 120 bp, Artificial Sequence
  ENSG00000213625_2 (sequence is synthesized)
accagtagtgcctgtcgggaactggcatatttcttcactactggaattgttgtttctgcctttggatttcctgttattcttgctcgtgtggctgtgatcaaatggggagcctgcggcctt

SEQ ID NO: 755855 - DNA, 120 bp, Artificial Sequence
  ENSG00000213625_3 (sequence is synthesized)
gtgttggcaggcaatgcagtcattttccttacaattcaagggtttttccttatatttggaagaggagatgattttagctgggagcagtggtagcactttattctgattacagtgcattga

SEQ ID NO: 755856 - DNA, 120 bp, Artificial Sequence
  ENSG00000213625_4 (sequence is synthesized)
atttcttagaactcatactatctgtatacatgtgcacatgcggcattttactatgaaatttaatatgctgggttttttaatacctttatatatcatgttcactttaagaaagacttcata

SEQ ID NO: 755857 - DNA, 120 bp, Artificial Sequence
  ENSG00000213625_5 (sequence is synthesized)
agtaggagatgagttttattctcagcaaatagacctgtcaaatttagattatgttactcaaattatgttacttgtttggctgttcatgtagtcacggtgctctcagaaaatatattaacg

SEQ ID NO: 755858 - DNA, 120 bp, Artificial Sequence
  ENSG00000213625_6 (sequence is synthesized)
cagtcttgtaggcagctgccaccttatgcagtgcatcgaaaccttttgcttggggatgtgcttggagaggcagataacgctgaagcaggcctctcatgacccaggaaggccggggtggat

SEQ ID NO: 755859 - DNA, 120 bp, Artificial Sequence
  ENSG00000213625_7 (sequence is synthesized)
ccctctttgtgttgtagtccatgctattaaaagtgtggcccacagaccaagagcctcaacatttcctagagccttattagaaatgcagaatctgaagccccactctggacccaggacatt

SEQ ID NO: 755860 - DNA, 120 bp, Artificial Sequence
  ENSG00000213625_8 (sequence is synthesized)
ttgatgagatccaaaggagttgtatgcacatgaaagtttgagaagcatcatcatagagaagtaaacatcacacccaacttccttatctttccagtggctaaaccacttaacctctctggg

SEQ ID NO: 755861 - DNA, 120 bp, Artificial Sequence
  ENSG00000213625_9 (sequence is synthesized)
tgttacctgctcatttgtttaaaaaaaaaaaaaaagtctcacctgctttcatgctgaggacaagttcagatgttcaagcctataatatttaggcagttcctcaaatttatgaaaagtgtt

SEQ ID NO: 755862 - DNA, 120 bp, Artificial Sequence
  ENSG00000213625_10 (sequence is synthesized)
ctcagaattgggagacagtcaaagggtacaaagcctcagttaggaggaataagtgtgatttttttttaaagatcacttgcacagcatgctaaatataggaataattgaatgtatatttca

SEQ ID NO: 755863 - DNA, 120 bp, Artificial Sequence
  ENSG00000213625_11 (sequence is synthesized)
atattgctaagagagtaaatttctaatgttctcataaaaaagttaaatatttgagatcatatgttaattagtgtaatcattccaccttatattcaaaaatcataaaaccgtattgtaccc

SEQ ID NO: 755864 - DNA, 120 bp, Artificial Sequence
  ENSG00000213625_12 (sequence is synthesized)
tataaaaatatacaataatttgtcaatatataatcaaaataaaaaacaaaacatactctctcccccaaaaaaacatctcagtggggaacagatgtatcttttcatctgaaagacaatgct

SEQ ID NO: 755865 - DNA, 120 bp, Artificial Sequence
  ENSG00000213625_13 (sequence is synthesized)
gggggaagagctccactgagatgcgggcagggaggctgggctcgagccagcccctgcgttagcaggagggggagaacagataggtaactcttttacatttcctttatgatctggcacttc

SEQ ID NO: 755866 - DNA, 120 bp, Artificial Sequence
  ENSG00000213625_14 (sequence is synthesized)
tccccagctccttccctctgccccccacccctactcctcaacagttctggtttgccctgacttctctacggctctggcttcttcccgaagagatataggagccatgtaagcacgcagtgg

SEQ ID NO: 755867 - DNA, 120 bp, Artificial Sequence
  ENSG00000213625_15 (sequence is synthesized)
gtgaactgcttaatttcactacgtgttgatgtacttgtcttccgtcctgtaggtcttttctatataactttatgccacccttaaatgaatcattgggtatacctgtcatgttggatcctg

SEQ ID NO: 755868 - DNA, 120 bp, Artificial Sequence
  ENSG00000213625_16 (sequence is synthesized)
taatcacagttttccctgctcacctttttgtctaagatctattgagaaagggaaatatgggaaggagaaccatttgatcagaatacaaccaatagtctttaagcattgttaaagtatgaa

SEQ ID NO: 755869 - DNA, 120 bp, Artificial Sequence
  ENSG00000213625_17 (sequence is synthesized)
actgaaatacattcaaaacacttaatccttgaggcttgtgatctgagtaattagcaggtatgatgctgggactggaaaatagaaagtaataactaaagggttaatgtgcaacgttatttt

SEQ ID NO: 755870 - DNA, 120 bp, Artificial Sequence
  ENSG00000213625_18 (sequence is synthesized)
tttataattttaaccggcatttttaataatgacacttgcatttattgtattgtaataaatttcacttttaactttaaaagtttaactttaaaatttttttgtgatgttgccttgcctgaa

SEQ ID NO: 755871 - DNA, 120 bp, Artificial Sequence
  ENSG00000213625_19 (sequence is synthesized)
aagataacaaaaatgagagaatttcttgatgttttaaaatgggcagttttgagcaataatctgtcctaacagaacagtagcaataagttttaggataccatcttgaatgtctagttggtg

SEQ ID NO: 755872 - DNA, 120 bp, Artificial Sequence
  ENSG00000213625_20 (sequence is synthesized)
tgcaatagcttttctttctaagatggcaataatgattcatttctactacattttgcaaaagtgtttttgttgcttatacacattttcaataaccaaggtagccttcatatgtagccttaa

SEQ ID NO: 755873 - DNA, 120 bp, Artificial Sequence
  ENSG00000213625_21 (sequence is synthesized)
agcattacctcttgattgtatctttagattgatataaagtacttgcatatagagtatttgaagtgatagattattagatttgctctatgtctgaaaagagagctattctgcagtgcctaa

SEQ ID NO: 755874 - DNA, 120 bp, Artificial Sequence
  ENSG00000213625_22 (sequence is synthesized)
atatcatttaaacagtaaatattaataggaaatattgctatatctgaatatataatacaaaagtttgatcatggtgacacaaatgttggacatttttttccttataaaaggctctttttt

SEQ ID NO: 755875 - DNA, 120 bp, Artificial Sequence
  ENSG00000213625_23 (sequence is synthesized)
tatatattgtacaatatatttggagattcagagcatagtgactatagtcgaaaactgagattgcacttccaaaattggccacaagtaaataatcttatgaagggattctttatcatgttt

SEQ ID NO: 755876 - DNA, 120 bp, Artificial Sequence
  ENSG00000213625_24 (sequence is synthesized)
caaacaagtgggttacaagcagactttgagacacttttccacagaaacaatactatgaattggtgattgagttcccaggccaagcctccctcaacaggttcaactctaatatacctaacc

SEQ ID NO: 755877 - DNA, 120 bp, Artificial Sequence
  ENSG00000213625_25 (sequence is synthesized)
tgtgatactgaaggtgcctgcctgagttttgggtctctgagacagggtagtgtgagtagtttggaggaaggacagtgcaactttccaccccttttcctaagaacaaggtctttctccttt

SEQ ID NO: 755878 - DNA, 120 bp, Artificial Sequence
  ENSG00000213625_26 (sequence is synthesized)
taatttttccactcattttcacctcctaatgcccttgagatccaggtacactcctgggagttttgttcacctctcccaactgagaaccttcccactgggctccatcctccctcctgaggt

SEQ ID NO: 755879 - DNA, 120 bp, Artificial Sequence
  ENSG00000213625_27 (sequence is synthesized)
tcttcatattccagagtcacccacccttctcctcccattagtcagttctctaagtacagctgatgtcatgtggtgctgagaagaaagcagatcacacttcatcacagaaagaatgccttg

SEQ ID NO: 755880 - DNA, 120 bp, Artificial Sequence
  ENSG00000213625_28 (sequence is synthesized)
tgattatcttctccacatctgaaattccttttgacacctgcattgggccgactgccattcccatgactgctgcacctgcgtttttagagaatgcctcataacccactgattctcattcac

SEQ ID NO: 755881 - DNA, 120 bp, Artificial Sequence
  ENSG00000213625_29 (sequence is synthesized)
agagaatgggagaacggaatgaagaaagattccagcagcttatagaaggatagcaatattttgggacagggaaaatcctgtcatacctcatctcttcctcaggaggagttctgagctggt

SEQ ID NO: 755882 - DNA, 120 bp, Artificial Sequence
  ENSG00000213625_30 (sequence is synthesized)
cctgcttttcatagttgtttcttttcttccacttaagaactcatagatttttcttactgtcctaaggaagtccttacctctgaggtatctcctcaatgaatactgttttcaaggctgaaa

SEQ ID NO: 755883 - DNA, 120 bp, Artificial Sequence
  ENSG00000213625_31 (sequence is synthesized)
tcaatgaatactgttttcaaggctgaaatagttcattatgttaataaccttctttatgttctcagggaaatgcttaggtggtgtcacaaaatgtgccttttcttttcttttttttttttt

SEQ ID NO: 755884 - DNA, 120 bp, Artificial Sequence
  ENSG00000213625_32 (sequence is synthesized)
tgagccactgtgcccagccaaaatgtgcctttgcaaagtttgcgaaatcagattttgtatcccaatagaaccaaaatatttatgaggatgctagcattttccaagcatagtaattagttc

SEQ ID NO: 755885 - DNA, 120 bp, Artificial Sequence
  ENSG00000213625_33 (sequence is synthesized)
acaactgagaaatattatgtctgtagtagataaatattagttgtgcattttaatttaattctcctttttccattttgtctcatgaagtaccttattgcaaaaatcccactgagtaatagc

SEQ ID NO: 755886 - DNA, 120 bp, Artificial Sequence
  ENSG00000213625_34 (sequence is synthesized)
tcataaattataatctttcaaatagccatgctaccagcgtacaacagtgatacatgtaaccccaaatgtgatgtgagaggacgattactttgtaaataaaacttgttattgacattttaa

SEQ ID NO: 755887 - DNA, 120 bp, Artificial Sequence
  ENSG00000213625_35 (sequence is synthesized)
ttttcttatgctgggatgtgccttagaggattatggagatgccacaacacccagctgattttttttagaagtttttgtagagaccgagtctctctgtgttgctcaggctggtcttgaact

SEQ ID NO: 755888 - DNA, 120 bp, Artificial Sequence
  ENSG00000213625_36 (sequence is synthesized)
cttggcctcccaaagctgtatcttgatagtgaaccaggattatcatctatattggaagtcagcaaactgccacatataacctgctacctgtttttgtaataaaggttttattgaaataca

SEQ ID NO: 755889 - DNA, 120 bp, Artificial Sequence
  ENSG00000213625_37 (sequence is synthesized)
tattgttttgcccaaccgttgctgagtttacttcagaggcctgtgtctgggacctccatttcatgctcattacttaggctttatactcaaggccgtgtgtttttagtttctctgttcctc

SEQ ID NO: 755890 - DNA, 120 bp, Artificial Sequence
  ENSG00000213625_38 (sequence is synthesized)
tactttagacctgcctaacagtagttcggccatgccttcagagtgctttctttatttctcttacaacttttagccagacgatatgatttcttactttttctactttaagctattctctgg

SEQ ID NO: 755891 - DNA, 120 bp, Artificial Sequence
  ENSG00000213625_39 (sequence is synthesized)
tcgggagacatggcgggcgttaaagagaagaaaccagtgtgtgtgtagtatgtgttttttgcatggggcagttggtaaaaacaccgcgtcccttatctgtatggcttcagagcaatgcga

SEQ ID NO: 755892 - DNA, 120 bp, Artificial Sequence
  ENSG00000213625_40 (sequence is synthesized)
gccccagttcgggagacatggcgggcgttaaagctctcgtggcattatccttcagtggggctattggactgacttttcttatgctgggatgtgccttagaggattatggagtcacctatg

SEQ ID NO: 755893 - DNA, 120 bp, Artificial Sequence
  ENSG00000213626_0 (sequence is synthesized)
gctgagtgctcagtggagagcggggagttgtgtccaccttgccgacgtcgctagccgtggggctgtcctgggaaggcggacggcgagcgcccggtgtccgcactcggccgcctgccgtgc

SEQ ID NO: 755894 - DNA, 120 bp, Artificial Sequence
  ENSG00000213626_1 (sequence is synthesized)
ccgtctgcgcccgtgtcatcctcactcgggacgcagggaccgtttttaaatcacaggggcgtgtgtcagcctgccctaggacttcatgtctatatatttccccattcactgccccgacta

SEQ ID NO: 755895 - DNA, 120 bp, Artificial Sequence
  ENSG00000213626_2 (sequence is synthesized)
tctgagatcggccaagatgactgaggtgatgatgaacacccagcccatggaggagatcggcctcagcccccgcaaggatggcctttcctaccagatcttcccagacccgtcagattttga

SEQ ID NO: 755896 - DNA, 120 bp, Artificial Sequence
  ENSG00000213626_3 (sequence is synthesized)
ccgctgctgcaaactgaaggaccgtctgccctccatagtggtggaacccacagaaggggaggtggagagcggggagctccggtggccccctgaggagttcctggtccaggaggatgagca

SEQ ID NO: 755897 - DNA, 120 bp, Artificial Sequence
  ENSG00000213626_4 (sequence is synthesized)
agataactgcgaagagacagcgaaagaaaataaagagcagtagagtccctgtggactcccatgggtcataccagccagcatctgttcctgaactgtgtttttcccatcatgacggaagaa

SEQ ID NO: 755898 - DNA, 120 bp, Artificial Sequence
  ENSG00000213626_5 (sequence is synthesized)
gagagtgagccgcaattgttctgaaaatgtcaaacgaggcttctgttttgcacctgcagatcaccgagttggttttcttttcttttcttgcctttttttttttttgaaatttgccgagca

SEQ ID NO: 755899 - DNA, 120 bp, Artificial Sequence
  ENSG00000213626_6 (sequence is synthesized)
gtggagccctctgacaatttgcaaggccctctgagaaaggaagctgcttagagccagggggttagtgggtgaggggagcgagtgctgtttttgagatcattatctgaactcaggcagcct

SEQ ID NO: 755900 - DNA, 120 bp, Artificial Sequence
  ENSG00000213626_7 (sequence is synthesized)
agtagaggcagtggtgggattccaatgggtcttggtgggtgggaggtggggcatgtgcaaagcaagcaaggaacatttggggtaagaaaacaaacatgaggcaaaagaaaaaatacatgt

SEQ ID NO: 755901 - DNA, 120 bp, Artificial Sequence
  ENSG00000213626_8 (sequence is synthesized)
ttttaagaaaacattgagcagagaactgcagccaggatgcgctcagcagacattcactctggctgctgggacatcagaaaacaaagtcttcatctctctctccagtttcacccaccccac

SEQ ID NO: 755902 - DNA, 120 bp, Artificial Sequence
  ENSG00000213626_9 (sequence is synthesized)
cctttgctttcatttcaggtgtgttggtctatatgacagggaggagagtaaaggagagcaggagcaattggctgcctgcaaagccagctggaggtgaagtgcaggaaaggaaaggtcacc

SEQ ID NO: 755903 - DNA, 120 bp, Artificial Sequence
  ENSG00000213626_10 (sequence is synthesized)
ccattctactccatggcctctctgctcccagctgtggtaggctcacatagccagtgtgatcggtttttaagaggcagtgcttttcagcttttctccctgatatatccattttgcttccca

SEQ ID NO: 755904 - DNA, 120 bp, Artificial Sequence
  ENSG00000213626_11 (sequence is synthesized)
gcactttttaggagtagtgagagcacttcctgcccttgttggaagccccagggtggacactcagcacgaaggtctctcccttaactgctgcccttccaagacttgctcccgagatggagt

SEQ ID NO: 755905 - DNA, 120 bp, Artificial Sequence
  ENSG00000213626_12 (sequence is synthesized)
tgccccagccccagcagccatgggtacatgggtccccagctcacctatggattcccgccagtctgcccagctgcagtactcacgccccatgggggatcttggtctgtttttcttgtggga

SEQ ID NO: 755906 - DNA, 120 bp, Artificial Sequence
  ENSG00000213626_13 (sequence is synthesized)
gcctagtggagagcagacgtggctttttatgtgtcttgttggggaggtgacttgcatggtggggacaaggctgtcgtggcaaccttgggatcgagtttgagactaaaggatgtcatgaga

SEQ ID NO: 755907 - DNA, 120 bp, Artificial Sequence
  ENSG00000213626_14 (sequence is synthesized)
tccctggcttctccccatgttgttcccggacaagggcagaagggaggcatggcaagggacctctgctgtccttactcaacagtggtcctcatccctccccacctcccactgcttcctgca

SEQ ID NO: 755908 - DNA, 120 bp, Artificial Sequence
  ENSG00000213626_15 (sequence is synthesized)
agggcaccagttgtatgagaaagttggcctttggacttaggatttcttattgtagctaagagccatctgaagcagcaggttgcaggacaaatgcttcagtccgccgagagcagtaccgtg

SEQ ID NO: 755909 - DNA, 120 bp, Artificial Sequence
  ENSG00000213626_16 (sequence is synthesized)
tggccaagaggtggactcagagccttccttgagctaaactcggccaaccaaggcacgcagcatgtcccctcaggtctccagtcagtccaggttgaccctcagttctggacgtgtgtatat

SEQ ID NO: 755910 - DNA, 120 bp, Artificial Sequence
  ENSG00000213626_17 (sequence is synthesized)
agctgtatttaatacctcaaggtcattgtggctctggggatgccggggcaggaggacgagggtgcgctgtggacacagcagtccgcggaattccgttctgggaagccaatggtcgccggc

SEQ ID NO: 755911 - DNA, 120 bp, Artificial Sequence
  ENSG00000213626_18 (sequence is synthesized)
accccttgcttcctccctctgttgtctgcctgtgtgacacacatcaatggcaataacttcttccaactcctcgcagaagtgggagaggccggcagcctgcaccgagaggggctttcctct

SEQ ID NO: 755912 - DNA, 120 bp, Artificial Sequence
  ENSG00000213626_19 (sequence is synthesized)
ctcttgctccccgcttcgttctgttttggctgcagagagtggttcatccatactctcattccctcgcctccccttgtggacgggggtcttgccttttcaattcctgtgttttggtgtctt

SEQ ID NO: 755913 - DNA, 120 bp, Artificial Sequence
  ENSG00000213626_20 (sequence is synthesized)
cccttatctgctaccctgaatcacctgtcctggtcttgctgtgtgatgggaacatgcttgtaaactgcgtaacaaatctactttgtgtatgtgtctgtttatgggggtggtttattattt

SEQ ID NO: 755914 - DNA, 120 bp, Artificial Sequence
  ENSG00000213626_21 (sequence is synthesized)
ttgctggtccctagaccactttgtatgaccgtttgcagtctgagcaggccaggggctgacagctaatgtcaggaccctcagcggtggagcctgctggggggacccagctgctcttggaca

SEQ ID NO: 755915 - DNA, 120 bp, Artificial Sequence
  ENSG00000213626_22 (sequence is synthesized)
agtggctgagctcctatctggcctcctctttttttttttttcaagtaatttgtgtgtatttctaactgattgtattgaaaaaattcctagtatttcagtaaaaatgcctgttgtgagatg

SEQ ID NO: 755916 - DNA, 120 bp, Artificial Sequence
  ENSG00000213626_23 (sequence is synthesized)
aacctcctgtaacttctatctgttcttttttgaggctcagggagaaactagcatttttttttttccaaactactttttgtcactgtgacagttgtaaataaagtttgaaaatgctttcca

SEQ ID NO: 755917 - DNA, 88 bp, Artificial Sequence
  ENSG00000213626_24 (sequence is synthesized)
ctcgctctgtcgcccagactggagtccagtggcgtgatctcggctcaccatgcctcagtctccggagtagctgggaatacaggcgccc

SEQ ID NO: 755918 - DNA, 77 bp, Artificial Sequence
  ENSG00000213626_25 (sequence is synthesized)
tgaacacccagcccatggaggagatcggcctcagcccccgcaaggatggcctttcctaccagtagtttaccatatga

SEQ ID NO: 755919 - DNA, 120 bp, Artificial Sequence
  ENSG00000213626_26 (sequence is synthesized)
acagatcttcccagacccgtcagattttgaccgctgctgcaaactgaaggaccgtctgccctccatagtggtggaacccacagaaggggaggtggagagcggggagctccggtggccccc

SEQ ID NO: 755920 - DNA, 120 bp, Artificial Sequence
  ENSG00000213626_27 (sequence is synthesized)
gttttgctgcaagttctgttttgaacacctctcttcctgtctccagacagtcccctgatcccacagcagtgaatgcatgaagagttaggaatgtgaaagcgcgtgtgtttgttgactttt

SEQ ID NO: 755921 - DNA, 120 bp, Artificial Sequence
  ENSG00000213626_28 (sequence is synthesized)
caattagcacctctcagccatgaagaaaacgttgagtcacagccttgtacatgaggttctcagagtgagatgggaccacatagggccaacctgcccagcccctgcctgcaggcggagaag

SEQ ID NO: 755922 - DNA, 120 bp, Artificial Sequence
  ENSG00000213626_29 (sequence is synthesized)
gtttgcatgcaagtctcaacgtcgaggccggcagcagcggggctgagctggtgcggccgcagggtttgcagagctccgggggggtggggggcgggaaacgctctccccacacgtaacccc

SEQ ID NO: 755923 - DNA, 120 bp, Artificial Sequence
  ENSG00000213626_30 (sequence is synthesized)
actaaagccacaagcagcagggcacgcgctgcagcctctcaacccctgccctctccaccgcccctaaaaaccgacgcacattggtgggggccgggactgggaggagccgccttcgccgtg

SEQ ID NO: 755924 - DNA, 120 bp, Artificial Sequence
  ENSG00000213626_31 (sequence is synthesized)
ctgaaggggaaggagcccgggccgggcgcggggcgtcggaggtttgccccggactggggatcggagccgggagggatgcagagagaggcaggcccctgactgctgggacttccttgctgg

SEQ ID NO: 755925 - DNA, 120 bp, Artificial Sequence
  ENSG00000213626_32 (sequence is synthesized)
cagtttcttccttcctgctctgggttagaggagaagcggccgggggcgagcgccggcagccccggagcgcgctctcaggtgcggacgtggggagctcggccccgagtctccggcaggcgc

SEQ ID NO: 755926 - DNA, 120 bp, Artificial Sequence
  ENSG00000213626_33 (sequence is synthesized)
tgagcgaagggaaaaccggcgcaagccgcggcggggtccggcctggcccaagaagcggaaagttcatgcttctcgcttcaacttttcgggccggcgccacagccccgagcgaggaagagc

SEQ ID NO: 755927 - DNA, 120 bp, Artificial Sequence
  ENSG00000213626_34 (sequence is synthesized)
cgcccctacgtcagactcttcaccctgcgtgcgctcttctggctcctttctttggaggtcgccagcagcctttccaagacccgggaggaaactgcctttgcagggcccagctcccgaacc

SEQ ID NO: 755928 - DNA, 120 bp, Artificial Sequence
  ENSG00000213626_35 (sequence is synthesized)
taaacttgccgcaaagccccgcatcttctgttagtctccctgcccccatccgtcccagcctggcagtgtttagagaggggactgaacttccctctctcaacagttcaagttcccccaccc

SEQ ID NO: 755929 - DNA, 120 bp, Artificial Sequence
  ENSG00000213626_36 (sequence is synthesized)
tgtacccttcttgtgggtgcccctcccttgcctctcccgtggtgtgtgagcagctaggtgccttattataggtgaagctttgaaggctgttggaggctttgtgcctttggctgctcaaaa

SEQ ID NO: 755930 - DNA, 120 bp, Artificial Sequence
  ENSG00000213638_0 (sequence is synthesized)
aagacttggcgaagcgctgcgctcgcgcccggatccctcaggggttagcaggacatgagggagtgtagctctgatgcggtgacctgggccggagccctcggactagcctcagctttggtg

SEQ ID NO: 755931 - DNA, 120 bp, Artificial Sequence
  ENSG00000213638_1 (sequence is synthesized)
gcagcacgccctgccttgtggagccacggcctcccgggacggactccccggctctcccccagccgcccgcagccgccggatgatcctctgctcccgtctctgtctcccacagtcggcctc

SEQ ID NO: 755932 - DNA, 120 bp, Artificial Sequence
  ENSG00000213638_2 (sequence is synthesized)
gctgaggatggagcccgccccgggcctcgtggagcagcccaagtgcttggaggccgggagcccggagcctgagccggcgccgtggcaggccctccctgtcctgtccgagaagcagtcagg

SEQ ID NO: 755933 - DNA, 120 bp, Artificial Sequence
  ENSG00000213638_3 (sequence is synthesized)
ggacgtggagctggtgctggcctacgccgcgcccgtcctggacaagcgccagacctcacgcctcctgaaggaggtgtcggccctgcacccgctccccgcccagcctcacctcaagcgggt

SEQ ID NO: 755934 - DNA, 120 bp, Artificial Sequence
  ENSG00000213638_4 (sequence is synthesized)
ctcacctcaagcgggtgcggcccagccgcgatgccggcagcccccacgccctggagatgctgctttgcctggctgggccggcctcgggcccgcgctcgctggctgagctcctgccacggc

SEQ ID NO: 755935 - DNA, 120 bp, Artificial Sequence
  ENSG00000213638_5 (sequence is synthesized)
cggcctggggcaacccttcctggtgcccgtgcccgcccggccgcctctgaccaggggccagttcgaggaggcccgggcccactggcccacgtccttccacgaggacaagcaggtgaccag

SEQ ID NO: 755936 - DNA, 80 bp, Artificial Sequence
  ENSG00000213638_6 (sequence is synthesized)
cggcgggcagcagcgcggggcttgcgggccgtgggggccgtggtagtggacccggcctcggaccgcgtgctggccaccgg

SEQ ID NO: 755937 - DNA, 120 bp, Artificial Sequence
  ENSG00000213638_7 (sequence is synthesized)
ccacgactgcagctgcgcggacaaccccctcctgcacgccgtcatggtgtgcgtggacctcgtggcgcgcggccagggccgcggcacctacgacttcagacccttccccgcctgctcctt

SEQ ID NO: 755938 - DNA, 120 bp, Artificial Sequence
  ENSG00000213638_8 (sequence is synthesized)
cgccccggccgctgccccccaggccgtccgcgcaggcgccgtgcgtaaactggacgcagacgaggacggcctcccctacctgtgcactggctacgacctgtacgtgacccgcgagccctg

SEQ ID NO: 755939 - DNA, 120 bp, Artificial Sequence
  ENSG00000213638_9 (sequence is synthesized)
cgccatgtgcgccatggccctggtgcacgcacgcatcctgcgcgtcttctacggtgcgccctcgcccgacggcgccctgggcacccgcttccgcatccacgcacggcccgacctcaacca

SEQ ID NO: 755940 - DNA, 120 bp, Artificial Sequence
  ENSG00000213638_10 (sequence is synthesized)
ccgcttccaggtgttccgcggggtgctggaggagcagtgccgctggctggaccccgacacgtaggcgccgccctcctgcctccggacccttcccgctcccggccgtggggcgcccctcct

SEQ ID NO: 755941 - DNA, 120 bp, Artificial Sequence
  ENSG00000213638_11 (sequence is synthesized)
ggacttccgggcctcgatttcttccgcacaagcctgaccgtggatttcagggacacataccgcctccagcggggagcacgggtgctgccttccgtgcggatcgagctttcctggactcgg

SEQ ID NO: 755942 - DNA, 120 bp, Artificial Sequence
  ENSG00000213638_12 (sequence is synthesized)
tcattggggccaccccgtgccagcggtgcccttctgcggccgcccttgctgcgtttgtgtcccctctgtctcgcgggccgggaaactgctctgatgggaaaataaacagcccaaaaccaa

SEQ ID NO: 755943 - DNA, 120 bp, Artificial Sequence
  ENSG00000213638_13 (sequence is synthesized)
tttgtttttcatcagacagaggttgtactcttggagggacaagcgaggctgtgtttgtcttttaccctggagacagtggagtgtttgtggcctagcagggccgtgcgggcctctcggtcc

SEQ ID NO: 755944 - DNA, 120 bp, Artificial Sequence
  ENSG00000213638_14 (sequence is synthesized)
tggtcgcgcgtggtgtgcgttttgggagggcccagcgagtcggctgctatgggccccacctggcacggggcctcgggcagcggcagcacctggcgctgcctccgcgcttcctgctcccgg

SEQ ID NO: 755945 - DNA, 120 bp, Artificial Sequence
  ENSG00000213638_15 (sequence is synthesized)
ctcccactgcatctccggttctgtgctttgttgaacgcgtgagcttcgggcagcgctggggccgcttcagcgtgacctccaaggccactggcctggagttccactggctgctggtccccc

SEQ ID NO: 755946 - DNA, 120 bp, Artificial Sequence
  ENSG00000213638_16 (sequence is synthesized)
atctgtggggcgccccggcggctgaggcgtggaccaggcagtgcatgtcgaggagtagcacccacagctgcgcggctgcgaaatgatccagagacacatccctgtctgcgggaggagccg

SEQ ID NO: 755947 - DNA, 120 bp, Artificial Sequence
  ENSG00000213638_17 (sequence is synthesized)
tccaggctggcagttcaggatcacccggctggagtcattttaagatcatctgcggcttagccccagcaccatctgaggcagtactgtctgctagaaataactgtgagcacacaggggtta

SEQ ID NO: 755948 - DNA, 120 bp, Artificial Sequence
  ENSG00000213639_0 (sequence is synthesized)
ggcgctggtgagctttgcggagctgggcggtgccgaggaggaggaggtggcggcctgggtctgacgcggccctgttcgagggggcctctcttgtttatttatttattttccgtgagagaa

SEQ ID NO: 755949 - DNA, 120 bp, Artificial Sequence
  ENSG00000213639_1 (sequence is synthesized)
cgccgagccgtcgccgcagcctccgccgccgagaagcccttgttcccgctgctgggaaggagagtctgtgccgacaagatggcggacggggagctgaacgtggacagcctcatcacccgg

SEQ ID NO: 755950 - DNA, 120 bp, Artificial Sequence
  ENSG00000213639_2 (sequence is synthesized)
ctgctggaggtacgaggatgtcgtccaggaaagattgtgcagatgactgaagcagaagttcgaggcttatgtatcaagtctcgggagatctttctcagccagcctattcttttggaattg

SEQ ID NO: 755951 - DNA, 120 bp, Artificial Sequence
  ENSG00000213639_3 (sequence is synthesized)
gaagcaccgctgaaaatttgtggagatattcatggacaatatacagatttactgagattatttgaatatggaggtttcccaccagaagccaactatcttttcttaggagattatgtggac

SEQ ID NO: 755952 - DNA, 120 bp, Artificial Sequence
  ENSG00000213639_4 (sequence is synthesized)
agaggaaagcagtctttggaaaccatttgtttgctattggcttataaaatcaaatatccagagaacttctttctcttaagaggaaaccatgagtgtgctagcatcaatcgcatttatgga

SEQ ID NO: 755953 - DNA, 120 bp, Artificial Sequence
  ENSG00000213639_5 (sequence is synthesized)
ttctatgatgaatgcaaacgaagatttaatattaaattgtggaagaccttcactgattgttttaactgtctgcctatagcagccattgtggatgagaagatcttctgttgtcatggagga

SEQ ID NO: 755954 - DNA, 120 bp, Artificial Sequence
  ENSG00000213639_6 (sequence is synthesized)
ttgtcaccagacctgcaatctatggagcagattcggagaattatgagacctactgatgtccctgatacaggtttgctctgtgatttgctatggtctgatccagataaggatgtgcaaggc

SEQ ID NO: 755955 - DNA, 120 bp, Artificial Sequence
  ENSG00000213639_7 (sequence is synthesized)
tggggagaaaatgatcgtggtgtttcctttacttttggagctgatgtagtcagtaaatttctgaatcgtcatgatttagatttgatttgtcgagctcatcaggtggtggaagatggatat

SEQ ID NO: 755956 - DNA, 120 bp, Artificial Sequence
  ENSG00000213639_8 (sequence is synthesized)
gaattttttgctaaacgacagttggtaaccttattttcagccccaaattactgtggcgagtttgataatgctggtggaatgatgagtgtggatgaaactttgatgtgttcatttcagata

SEQ ID NO: 755957 - DNA, 120 bp, Artificial Sequence
  ENSG00000213639_9 (sequence is synthesized)
ttgaaaccatctgaaaagaaagctaaataccagtatggtggactgaattctggacgtcctgtcactccacctcgaacagctaatccgccgaagaaaaggtgaagaaaggaattctgtaaa

SEQ ID NO: 755958 - DNA, 120 bp, Artificial Sequence
  ENSG00000213639_10 (sequence is synthesized)
gaaaccatcagatttgttaaggacatacttcataatatataagtgtgcactgtaaaaccatccagccatttgacaccctttatgatgtcacacctttaacttaaggagacgggtaaagga

SEQ ID NO: 755959 - DNA, 120 bp, Artificial Sequence
  ENSG00000213639_11 (sequence is synthesized)
tcttaaatttttttctaatagaaagatgtgctacactgtattgtaataagtatactctgttatagtcaacaaagttaaatccaaattcaaaattatccattaaagttacatcttcatgta

SEQ ID NO: 755960 - DNA, 120 bp, Artificial Sequence
  ENSG00000213639_12 (sequence is synthesized)
tcacaatttttaaagttgaaaagcatcccagttaaactagatgtgatagttaaaccagatgaaagcatgatgatccatctgtgtaatgtggttttagtgttgcttggttgtttaattatt

SEQ ID NO: 755961 - DNA, 120 bp, Artificial Sequence
  ENSG00000213639_13 (sequence is synthesized)
ttgagcttgttttgtttttgtttgttttcactagaataatggcaaatacttctaatttttttccctaaacatttttaaaagtgaaatatgggaagagctttacagacattcaccaactat

SEQ ID NO: 755962 - DNA, 120 bp, Artificial Sequence
  ENSG00000213639_14 (sequence is synthesized)
aaaactttcgcctcattacattaaaaaggaattttagagattgattgttttaaaaaaaaatacgcacattgtccaatccagtgattttaatcatacagtttgactgggcaaactttacag

SEQ ID NO: 755963 - DNA, 120 bp, Artificial Sequence
  ENSG00000213639_15 (sequence is synthesized)
ctgatagtgaatattttgctttatacaggaattgacactgatttggatttgtgcactctaatttttaacttattgatgctctattgtgcagtagcatttcatttaagataaggctcatat

SEQ ID NO: 755964 - DNA, 120 bp, Artificial Sequence
  ENSG00000213639_16 (sequence is synthesized)
agtattacccaactagttggtaatgtgattatgtggtaccttggctttaggttttcattcgcacggaacaccttttggcatgcttaacttcctggtaacaccttcacctgcattggtttt

SEQ ID NO: 755965 - DNA, 120 bp, Artificial Sequence
  ENSG00000213639_17 (sequence is synthesized)
tttttttttttttttttgagttgttgtttgtttttagatccacagtacatgagaatccttttttgacaagccttggaaagctgacactgtctctttttcctccctctatacgaaggatgt

SEQ ID NO: 755966 - DNA, 120 bp, Artificial Sequence
  ENSG00000213639_18 (sequence is synthesized)
ttcctccctctatacgaaggatgtatttaaatgaatgctggtcagtgggacattttgtcaactatgggtattgggtgcttaactgtctaatattgccatgtgaatgttgtatacgattgt

SEQ ID NO: 755967 - DNA, 120 bp, Artificial Sequence
  ENSG00000213639_19 (sequence is synthesized)
aaggcttatgtcactaaagatttttattctgattttttcataatcaaaggtcatatgatactgtatagacaagctttgtagtgaagtatagtagcaataatttctgtacctgatcaagtt

SEQ ID NO: 755968 - DNA, 120 bp, Artificial Sequence
  ENSG00000213639_20 (sequence is synthesized)
tattgcagcctttcttttcctatttcttttttttaagggttagtattaacaaatggcaatgagtagaaaagttaacatgaagattttagaaggagagaacttacaggacacagatttgtg

SEQ ID NO: 755969 - DNA, 120 bp, Artificial Sequence
  ENSG00000213639_21 (sequence is synthesized)
attctttgactgtgacactattggatgtgattctaaaagcttttattgagcattgtcaaatttgtaagcttcatagggatggacatcatatctataatgcccttctatatgtgctaccat

SEQ ID NO: 755970 - DNA, 120 bp, Artificial Sequence
  ENSG00000213639_22 (sequence is synthesized)
agatgtgacatttttgaccttaatatcgtctttgaaaatgttaaattgagaaacctgttaacttacattttatgaattggcacattgtattacttactgcaagagatatttcattttcag

SEQ ID NO: 755971 - DNA, 120 bp, Artificial Sequence
  ENSG00000213639_23 (sequence is synthesized)
cacagtgcaaaagttctttaaaatgcatatgtctttttttctaattccgttttgttttaaagcacattttaaatgtagttttctcatttagtaaaagttgtctaattgatatgaagcctg

SEQ ID NO: 755972 - DNA, 120 bp, Artificial Sequence
  ENSG00000213639_24 (sequence is synthesized)
actgattttttttttccttacagtgagacatttaagcacacattttattcacatagatactatgtccttgacatattgaaatgattcttttctgaaagtattcatgatctgcatatgatg

SEQ ID NO: 755973 - DNA, 120 bp, Artificial Sequence
  ENSG00000213639_25 (sequence is synthesized)
tattaggttaggtcacaaaggttttatctgaggtgatttaaataacttcctgattggagtgtgtaagctgagcgatttctaataaaattttagttgtacacttttagtagtcatagtgaa

SEQ ID NO: 755974 - DNA, 120 bp, Artificial Sequence
  ENSG00000213639_26 (sequence is synthesized)
gcaggtctagaaaataagcctttggcagggaaaaagggcaatgttgattaatctcagtattaaaccacattaatctgtatcccattgtctggcttttgtaaattcatccaggtcaagact

SEQ ID NO: 755975 - DNA, 120 bp, Artificial Sequence
  ENSG00000213639_27 (sequence is synthesized)
aagtatgttggttaataggaatccttttttttttttttaaagactaaatgtgaaaaaataatcactacttaagctaattaatattggtcattaaatttaaaggatggaaatttatcatgt

SEQ ID NO: 755976 - DNA, 120 bp, Artificial Sequence
  ENSG00000213639_28 (sequence is synthesized)
ttaaaaattattcaagcactcttaaaaccacttaaacagcctccagtcataaaaatgtgttctttacaaatatttgcttggcaacacgacttgaaataaataaaactttgtttcttagga

SEQ ID NO: 755977 - DNA, 120 bp, Artificial Sequence
  ENSG00000213639_29 (sequence is synthesized)
acaatttaatccaaatgttatgacattcagaaatcatgaaacacagtagatatctgttataatgtggtgtatcacatggattataaagcaaagttatggtcgatttctattcttgaaaga

SEQ ID NO: 755978 - DNA, 120 bp, Artificial Sequence
  ENSG00000213639_30 (sequence is synthesized)
atcaactacagtgaatcctttgcatttgaagccttaacatgcattgctttaattttgcccagggacaaattttaataatcagcaagactggtttgtgcaaagcgttgagtcatcaggtat

SEQ ID NO: 755979 - DNA, 120 bp, Artificial Sequence
  ENSG00000213639_31 (sequence is synthesized)
ttagagcctagccagctacccagtatccatgctgccatatcccttcattgtaaaaagtacctaaacattcgtgaaatgattttttttagctgaaaaatgctggcaagaagaattttaaag

SEQ ID NO: 755980 - DNA, 120 bp, Artificial Sequence
  ENSG00000213639_32 (sequence is synthesized)
cttaaaataggtggtaaatttgaagtatgagtgtgttcacgagaaacataggcttttcaaaaaaatttttattcaaggcaaagcaaggaacatcttgagatatgtctcaagaatataaag

SEQ ID NO: 755981 - DNA, 120 bp, Artificial Sequence
  ENSG00000213639_33 (sequence is synthesized)
atgtattattttaagccaaggagctgaaatatatctcagtttataaattcaggtatattctttttgtctccatggcaaccataacttttgaaccaaaaaaaattgtttttacatctttat

SEQ ID NO: 755982 - DNA, 120 bp, Artificial Sequence
  ENSG00000213639_34 (sequence is synthesized)
gctgaaaatgtgtttagattaggaatatggtcgggctgaatttgctgttgctccctaaccaaatccacctcttgttttccttgtgagtccatggctaaatcaaagctgcccctgagaaga

SEQ ID NO: 755983 - DNA, 120 bp, Artificial Sequence
  ENSG00000213639_35 (sequence is synthesized)
gacttaatccaagcctgattgtactagtggcatcacttagaagtaggctttccctcttcctagtagatctcaatgttttataattccttaaaacagctgaaaattgggacaacatacttt

SEQ ID NO: 755984 - DNA, 120 bp, Artificial Sequence
  ENSG00000213639_36 (sequence is synthesized)
acgcaatgaacagtagttaaataggaaataaactagttccatataagtatacacctagagttttaattacctttataatgtttcttaaaagtgaaacttagatacaattgtgattggata

SEQ ID NO: 755985 - DNA, 120 bp, Artificial Sequence
  ENSG00000213639_37 (sequence is synthesized)
cttagatactaagtgaaacttagtgtaacaattttgatctgttaaattggattttacatgtacatttgaatgccagaatttctaaataaatcccctggttaggaaattttaaaagtcaaa

SEQ ID NO: 755986 - DNA, 120 bp, Artificial Sequence
  ENSG00000213639_38 (sequence is synthesized)
gcttgttttcttcaaccactaccttctacattggttgacttagaccgtaagctttttaagtttctcattgtaatttaccttctcatgcagattgctgatgttttattaaaccttattttt

SEQ ID NO: 755987 - DNA, 120 bp, Artificial Sequence
  ENSG00000213639_39 (sequence is synthesized)
gcggagctgggcggtgccgaggaggaggaggtggcggcctgggtctgacgcggccctgttcgagggggcctctcttgtttatttatttattttccgtgggtgcctccgagtgtgcgcgcg

SEQ ID NO: 755988 - DNA, 120 bp, Artificial Sequence
  ENSG00000213639_40 (sequence is synthesized)
catgtttttcctcccatgtttaagatctagagaaaacattttttgaaatttttgtataaaacagatcagtaggctttactaaataaaagtgtataaaaattgaaacttataaaaatgaca

SEQ ID NO: 755989 - DNA, 120 bp, Artificial Sequence
  ENSG00000213639_41 (sequence is synthesized)
agttacagacaagatgaaaatacttgctatatatcaacagataaaaggagttctatttataatatataaagagttcttataaataagagaaaggcgatacagtataaaaataacatagga

SEQ ID NO: 755990 - DNA, 120 bp, Artificial Sequence
  ENSG00000213639_42 (sequence is synthesized)
gccttacagattttttttttcttctattattcggaaaatacctataataatcaagaggctgtgggaaaacaaagcagtgcttgtatgaaaactcaagtgattaaaactgttttaaacatg

SEQ ID NO: 755991 - DNA, 120 bp, Artificial Sequence
  ENSG00000213639_43 (sequence is synthesized)
cacctgcgcgaagacggcagcgggagaagccgctccagtgcggttgcgcggcggcccaggcgtcgaggggagcctcggcggggagcgcaccgcgcgcctgcgcggagagctgcgtgacgc

SEQ ID NO: 755992 - DNA, 120 bp, Artificial Sequence
  ENSG00000213639_44 (sequence is synthesized)
actgatggactaagagcctcagttccaaatgagctgttggtcagaggcctccctcagttctttgctacgtgggatgcttcattagacagctggtttcatcagcgagcatggaagaaggag

SEQ ID NO: 755993 - DNA, 120 bp, Artificial Sequence
  ENSG00000213648_0 (sequence is synthesized)
accctcagggcagagagcagccctacactccctacaccacacccatactcagcccctgcaggcaaggagagaacaggtcaggttcccgagagctcaggaacatggagctgatccaggaca

SEQ ID NO: 755994 - DNA, 120 bp, Artificial Sequence
  ENSG00000213648_1 (sequence is synthesized)
cctcccgcccgccactggagtacgtgaagggggtcccgctcatcaagtactttgcagaggcactggggcccctgcagagcttccaagcccgacctgatgacctgctcatcaacacctacc

SEQ ID NO: 755995 - DNA, 120 bp, Artificial Sequence
  ENSG00000213648_2 (sequence is synthesized)
ccaagtctggcaccacctgggtgagccagatactggacatgatctaccagggcggcgacctagagaagtgtaaccgggctcccatctacgtacgggtgcccttccttgaggtcaatgatc

SEQ ID NO: 755996 - DNA, 120 bp, Artificial Sequence
  ENSG00000213648_3 (sequence is synthesized)
caggggaaccctcagggctggagactctgaaagacacaccgcccccacggctcatcaagtcacacctgcccctggctctgctccctcagactctgttggatcagaaggtcaaggtggtct

SEQ ID NO: 755997 - DNA, 120 bp, Artificial Sequence
  ENSG00000213648_4 (sequence is synthesized)
atgttgcccgaaacccaaaggacgtggcggtctcctactaccatttccaccgtatggaaaaggcgcaccctgagcctgggacctgggacagcttcctggaaaagttcatggctggagaag

SEQ ID NO: 755998 - DNA, 120 bp, Artificial Sequence
  ENSG00000213648_5 (sequence is synthesized)
cctcttctatgaagacatgaaggagaaccccaaaagggagattcaaaagatcctggagtttgtggggcgctccctgccagaggagaccatggacttcatggttcagcacacgtcgttcaa

SEQ ID NO: 755999 - DNA, 120 bp, Artificial Sequence
  ENSG00000213648_6 (sequence is synthesized)
ggagatgaagaagaaccctatgaccaactacaccaccgtcccccaggagctcatggaccacagcatctcccccttcatgaggaaaggcatggctggggactggaagaccaccttcaccgt

SEQ ID NO: 756000 - DNA, 120 bp, Artificial Sequence
  ENSG00000213648_7 (sequence is synthesized)
ggcgcagaatgagcgcttcgatgcggactatgcggagaagatggcaggctgcagcctcagcttccgctctgagctgtgagaggggctcctggagtcactgcagagggagtgtgcgaatct

SEQ ID NO: 756001 - DNA, 120 bp, Artificial Sequence
  ENSG00000213648_8 (sequence is synthesized)
accctgaccaatgggctcaagaataaagtatgatttttgagtcaggcacagtggctcatgtctgcaatcccagcgatttgggaggttgagctggtaggatcacaataggccacgaatttg

SEQ ID NO: 756002 - DNA, 120 bp, Artificial Sequence
  ENSG00000213648_9 (sequence is synthesized)
agaccagcctggtaaaatagtgagacctcatctctacaaagatgtaaaaaaattagccacatgtgctggcacttacctgtagtcccagctacttgggaagcagaggctggaggatcattt

SEQ ID NO: 756003 - DNA, 120 bp, Artificial Sequence
  ENSG00000213648_10 (sequence is synthesized)
cagcccaggaggttgtggatacagtgagttatgacatgcccattcactacagcctggatgacaagcaagaccctccctccaaagaaaataaagctcaaaataaaatatgatttgtgttca

SEQ ID NO: 756004 - DNA, 120 bp, Artificial Sequence
  ENSG00000213648_11 (sequence is synthesized)
cttccttgaggtcaatgatccaggggaaccctcaggtgcatggctgggtcctgggggtaagggaagtggaggaagacagggctggggcttcagctcaccagaccttccctgacccactac

SEQ ID NO: 756005 - DNA, 120 bp, Artificial Sequence
  ENSG00000213648_12 (sequence is synthesized)
caggagtggtgggagctgagccgcacccaccctgttctctacctcttctatgaagacatgaaggaggtgagaccgactgtgatgcttccccccatgtgacacctgggggcaggcacctca

SEQ ID NO: 756006 - DNA, 120 bp, Artificial Sequence
  ENSG00000213648_13 (sequence is synthesized)
cagggacccaccaaggccacccagccccgtccctgggcggctcccacagcaagcccggattccccatcctacctccctggcccaggcccccccactgcagccccacctggcagcaggctc

SEQ ID NO: 756007 - DNA, 120 bp, Artificial Sequence
  ENSG00000213648_14 (sequence is synthesized)
ggcacagctttcatcttctgcacctgagtcagctgcatgggtggccacggatcagatacttagtcctattgcttatcctcaccaaagggtgtgccacccagggccacagtcatggaagaa

SEQ ID NO: 756008 - DNA, 120 bp, Artificial Sequence
  ENSG00000213654_0 (sequence is synthesized)
agtacccaggcatccagcccccagctcacccccaccccttccagcccccactcccctcaggaacccaaggttccagccctcctcccaaatcccagccacccctcccccaccagtttctcc

SEQ ID NO: 756009 - DNA, 120 bp, Artificial Sequence
  ENSG00000213654_1 (sequence is synthesized)
cctctaggggatggaggctgagagaccccaggaagaagaggatggtgagcagggcccccctcaggatgaggaaggctggccccctccaaactccaccactcggccttggcgatctgctcc

SEQ ID NO: 756010 - DNA, 120 bp, Artificial Sequence
  ENSG00000213654_2 (sequence is synthesized)
tccatcccctcctcctccagggacccgccacacagccctgggaccccgctcggcctccctgctctccctgcagactgaactccttctggacctggtggctgaagcccagtcccgccgcct

SEQ ID NO: 756011 - DNA, 120 bp, Artificial Sequence
  ENSG00000213654_3 (sequence is synthesized)
ggaggagcagagggccaccttctacaccccccaaaacccctcaagcctagcccctgccccactccgtcctctcgaggacagagaacagctttacagcactatcctcagtcaccagtgcca

SEQ ID NO: 756012 - DNA, 120 bp, Artificial Sequence
  ENSG00000213654_4 (sequence is synthesized)
gcggatggaagcccagcggtcagagcctcccctccctccaggggggcaagagctcctggagttgctgctgagagttcagggtgggggtcgaatggaggagcaaaggtcccggccccccac

SEQ ID NO: 756013 - DNA, 120 bp, Artificial Sequence
  ENSG00000213654_5 (sequence is synthesized)
gacttgagccccaaccagcccttccttgccactggtctcaaagctgggcagcccattgcatgccctcaactcttgcttggcaggggtaccagagactgaaagacacggcacaaatctcaa

SEQ ID NO: 756014 - DNA, 120 bp, Artificial Sequence
  ENSG00000213654_6 (sequence is synthesized)
tattcatctcccacatcaccttccctgggaactggacagggtgaaagtcctcaaactctgggaacaggcgagatggaacagggatttaactccccgcccacaggtccatgggagcttgag

SEQ ID NO: 756015 - DNA, 120 bp, Artificial Sequence
  ENSG00000213654_7 (sequence is synthesized)
gcagtaagggggatcccaggcacccatctcaaggagtggctgggagtcttttccctaacttgtggggacaccaccagttgtcaagctactaggcagtagggtctgagggctcaggcctcc

SEQ ID NO: 756016 - DNA, 120 bp, Artificial Sequence
  ENSG00000213654_8 (sequence is synthesized)
acctgagaggttataacctgagagacagctctacccttcctcccagtaagaagggaaggtgggtgggcacctgagagattaagactattctcccagtcccactaccagcacccccgatcc

SEQ ID NO: 756017 - DNA, 120 bp, Artificial Sequence
  ENSG00000213654_9 (sequence is synthesized)
ctgagactgaggggtttacgggctgtgaatggaccttcagccctgcccaccctccctccccactgctgctgagtctgtctgatgttttggttgtgtgaataaatataattcccctctgga

SEQ ID NO: 756018 - DNA, 120 bp, Artificial Sequence
  ENSG00000213654_10 (sequence is synthesized)
ccggagcggggatcacctcaacttgactgtggtcccccagccctccaagaaatgcccataaaccaaggaggagagggtaaaaaatagaagaatacatggaattggggagaagaatgggaa

SEQ ID NO: 756019 - DNA, 120 bp, Artificial Sequence
  ENSG00000213654_11 (sequence is synthesized)
aaaagatgggagtgactgcataatgtcagcattttgtgcttttggctcagcatttggattggatggaggattttcatcctgaaaccagccctccgtcgccaccgaccatggaataattgt

SEQ ID NO: 756020 - DNA, 120 bp, Artificial Sequence
  ENSG00000213654_12 (sequence is synthesized)
cttccacgaaactcttccctggtgccaaaaagggttttatgtatatatttgagagctccacatccctggatctgaatcctccacttcccactggaaccatgcccctcccagtcccgtttc

SEQ ID NO: 756021 - DNA, 120 bp, Artificial Sequence
  ENSG00000213654_13 (sequence is synthesized)
ccagggattaggggactactgaggctctggagatgagaccgccaggagtccttccccaccatgagccccctccactcctgcagctggaggagtttttcccagtctcagtgctgccctggg

SEQ ID NO: 756022 - DNA, 120 bp, Artificial Sequence
  ENSG00000213658_0 (sequence is synthesized)
accccatcttcatctggccttgactctgcccttgaggggcctaggggtgcagccagcctgctccgagctcccctgcagatggaggaggccatcctggtcccctgcgtgctggggctcctg

SEQ ID NO: 756023 - DNA, 120 bp, Artificial Sequence
  ENSG00000213658_1 (sequence is synthesized)
ctgctgcccatcctggccatgttgatggcactgtgtgtgcactgccacagactgccaggctcctacgacagcacatcctcagatagtttgtatccaaggggcatccagttcaaacggcct

SEQ ID NO: 756024 - DNA, 120 bp, Artificial Sequence
  ENSG00000213658_2 (sequence is synthesized)
cacacggttgccccctggccacctgcctacccacctgtcacctcctacccacccctgagccagccagacctgctccccatcccaagatccccgcagccccttgggggctcccaccggacg

SEQ ID NO: 756025 - DNA, 120 bp, Artificial Sequence
  ENSG00000213658_3 (sequence is synthesized)
ccatcttcccggcgggattctgatggtgccaacagtgtggcgagctacgagaacgagggtgcgtctgggatccgaggtgcccaggctgggtggggagtctggggtccgtcctggactagg

SEQ ID NO: 756026 - DNA, 120 bp, Artificial Sequence
  ENSG00000213658_4 (sequence is synthesized)
ctgacccctgtgtcgttacccccagaaccagcctgtgaggatgcggatgaggatgaggacgactatcacaacccaggctacctggtggtgcttcctgacagcaccccggccactagcact

SEQ ID NO: 756027 - DNA, 120 bp, Artificial Sequence
  ENSG00000213658_5 (sequence is synthesized)
gctgccccatcagctcctgcactcagcacccctggcatccgagacagtgccttctccatggagtccattgatgattacgtgaacgttccggagagcggggagagcgcagaagcgtctctg

SEQ ID NO: 756028 - DNA, 120 bp, Artificial Sequence
  ENSG00000213658_6 (sequence is synthesized)
tgaatgtgtcccaggaactgcatcctggagcggctaagactgagcctgccgccctgagttcccaggaggcagaggaagtggaggaagagggggctccagattacgagaatctgcaggagc

SEQ ID NO: 756029 - DNA, 120 bp, Artificial Sequence
  ENSG00000213658_7 (sequence is synthesized)
tgaactgagggcctgtggaggccgagtctgtcctggaaccaggcttgcctgggacggctgagctgggcagctggaagtggctctggggtcctcacatggcgtcctgcccttgctccagcc

SEQ ID NO: 756030 - DNA, 120 bp, Artificial Sequence
  ENSG00000213658_8 (sequence is synthesized)
tgacaacagcctgagaaatccccccgtaacttattatcactttggggttcggcctgtgtcccccgaacgctctgcaccttctgacgcagcctgagaatgacctgccctggccccagccct

SEQ ID NO: 756031 - DNA, 120 bp, Artificial Sequence
  ENSG00000213658_9 (sequence is synthesized)
actctgtgtaatagaataaaggcctgcgtgtgtctgtgttgagcgtgcgtctgtgtgtgcctgtgtgcgagtctgagtcagagatttggagatgtctctgtgtgtttgtgtgtatctgtg

SEQ ID NO: 756032 - DNA, 120 bp, Artificial Sequence
  ENSG00000213658_10 (sequence is synthesized)
ggtctccatcctccatgggggctcagccaggtgctgtgacaccccccttctgaatgaagccttctgacctgggctggcactgctgggggtgaggacacattgccccatgagacagtccca

SEQ ID NO: 756033 - DNA, 120 bp, Artificial Sequence
  ENSG00000213658_11 (sequence is synthesized)
gaacacggcagctgctggctgtgacaatggtttcaccatccttagaccaagggatgggacctgatgacctgggaggactctcttagttcttaccttttgtggttctcaataaaacagaac

SEQ ID NO: 756034 - DNA, 120 bp, Artificial Sequence
  ENSG00000213658_12 (sequence is synthesized)
caggcgggcgggagggcgggcacggagaggcgggcgccgaggaggggcaggtagggctgggacgcaggggtaactggatcccccgacttcagcccaggccctggtctgaccaccctggga

SEQ ID NO: 756035 - DNA, 120 bp, Artificial Sequence
  ENSG00000213658_13 (sequence is synthesized)
gcagggactttccacagtcagctggacgcacactcagcccagtaaaagaggggacccatcccgggagccccggggagggcacagctgcctcctcccgggctcccctgccacctggtgcct

SEQ ID NO: 756036 - DNA, 120 bp, Artificial Sequence
  ENSG00000213658_14 (sequence is synthesized)
gggcctccctgctcgctgcctccccgggtcctggatatggaggccacggctgccagctggcaggtggctgtccccgtcttggggggggccagcagacccttggggcctaggggtgcagcc

SEQ ID NO: 756037 - DNA, 120 bp, Artificial Sequence
  ENSG00000213658_15 (sequence is synthesized)
atcccatccccgcagccccttgggggctcccaccggacgccatcttcccggcgggattctgatggtgccaacagtgtggcgagctacgagaacgagggtgcgtctgggatccgaggtgcc

SEQ ID NO: 756038 - DNA, 120 bp, Artificial Sequence
  ENSG00000213658_16 (sequence is synthesized)
tgggagtgagcgtgaaccttcagacttcccctgccaccttggggctgcccacatggccttgacctgagctgggagaggggagatggctcccccaggcctgtccagggtgtggggctttca

SEQ ID NO: 756039 - DNA, 120 bp, Artificial Sequence
  ENSG00000213658_17 (sequence is synthesized)
ggggcttagtctgttctttgaggccttgacgatgtccggagtccttctttcaacttggttctgtgtcctcagacacggttgccccctggccacctgcctacccacctgtcacctcctacc

SEQ ID NO: 756040 - DNA, 120 bp, Artificial Sequence
  ENSG00000213658_18 (sequence is synthesized)
cacccctgagccagccagacctgctccccatcccgtgagtagctgctcagcccctgcccctccaaagctcagcccctccccctccaaactccactctctaccccttcacttttttggatt

SEQ ID NO: 756041 - DNA, 120 bp, Artificial Sequence
  ENSG00000213658_19 (sequence is synthesized)
gaagcgtctctgggtgagtgaccggtgcttgtcggtgcctgcccctgcaccccgctgccccaccatgctctcagtgtgaccagatcccaccctggggctacccacaccctctgccccctc

SEQ ID NO: 756042 - DNA, 120 bp, Artificial Sequence
  ENSG00000213658_20 (sequence is synthesized)
ctttagttttctgttgctttgctctctctgtatatacttgtcctgggctatcacttctataccctggctttgtttgccatccagattcccagtttgctctctcctgagctccagactgta

SEQ ID NO: 756043 - DNA, 120 bp, Artificial Sequence
  ENSG00000213658_21 (sequence is synthesized)
tccaagtacttcttttctttcattcattcattcattcattcattcagcatttactatgtgcctctgctgggctaatgctgtggatataacagttaaggaggcagactgtcctgataaaat

SEQ ID NO: 756044 - DNA, 64 bp, Artificial Sequence
  ENSG00000213658_22 (sequence is synthesized)
aaaaaaatgggcggatcatctgaaccccgcaggcggaagttgcagtgagacgagatcatgccac

SEQ ID NO: 756045 - DNA, 120 bp, Artificial Sequence
  ENSG00000213658_23 (sequence is synthesized)
agcctgggtgacagagtgagaccttgtgttaaaaaaaaaaaaaaaagataaaatagctaagattcaccgagggcctcctgcatgccttgctaagagtctgacatgtgttcactcactaat

SEQ ID NO: 756046 - DNA, 120 bp, Artificial Sequence
  ENSG00000213658_24 (sequence is synthesized)
gtgttcactcactaatctgactgccctggggctcccgggcctgcccgcgccctcctgtgctccagttgtcccttttgtgggatacagggtttatctgtttaacagcactgctgtgtgaca

SEQ ID NO: 756047 - DNA, 120 bp, Artificial Sequence
  ENSG00000213658_25 (sequence is synthesized)
ggccctattttacagaggagaaaactgaggcacagagaggtaaggtcccttggctgaggttatgtggttggttagtgctggagctgggattgaaccggggcggtcttcaaaaacaaacaa

SEQ ID NO: 756048 - DNA, 90 bp, Artificial Sequence
  ENSG00000213658_26 (sequence is synthesized)
ccctccagccctctaggtgacagaggcaaaataaaagaaccaaataaccaggcgtggtagctgatgcctgtgatcccagcactttgggag

SEQ ID NO: 756049 - DNA, 120 bp, Artificial Sequence
  ENSG00000213658_27 (sequence is synthesized)
gttcaagaccagcctgggcagcatagggagaccctatctctacaaaaattccaaaatttagcctggcctggtaggagctgaggtgggaagatcatctgagcccaggaggtcaaggttgcg

SEQ ID NO: 756050 - DNA, 84 bp, Artificial Sequence
  ENSG00000213658_28 (sequence is synthesized)
gaaaaacaaaaacaaacaaaaagctcccaaataacatggatggtgacaggcgccatgaagggctgacatgggagtgagacatag

SEQ ID NO: 756051 - DNA, 120 bp, Artificial Sequence
  ENSG00000213658_29 (sequence is synthesized)
gacaggcgccatgaagggctgacatgggagtgagacataggcagtggctggcagggggcaggtggggatgggggtcggggggaggaggtgcctgctgggcctagtgtgtcatgtcccctc

SEQ ID NO: 756052 - DNA, 120 bp, Artificial Sequence
  ENSG00000213658_30 (sequence is synthesized)
cacacacgccaccaaactcccactgctccgagccgcactacatccctgctccccagcctaggggctgtgctggggcctgaccctttgtgagctctcctcagtcccagtcaagtggacctc

SEQ ID NO: 756053 - DNA, 120 bp, Artificial Sequence
  ENSG00000213658_31 (sequence is synthesized)
ctccctccctctccacagcccttgcccttgtccaggccaccatcaccatcaccaacaccatccttgccagcctggagtcccctctcttcattctgtggggctaatgggggtggctgtgtg

SEQ ID NO: 756054 - DNA, 120 bp, Artificial Sequence
  ENSG00000213658_32 (sequence is synthesized)
ggaagcctctggggtctaccgttggggagctctgcatggctgaggttgggggttctctgggaacctgtggccaagggtctctggtcacagtgccgaggtgggcctggcttttccacagtg

SEQ ID NO: 756055 - DNA, 120 bp, Artificial Sequence
  ENSG00000213672_0 (sequence is synthesized)
gcggctcggcgctcccggcctggcgttgtggcgccgcagcccttgccaccttccctgcacctgccctgcccggcctcatgtaccgcgcgctgtacgcgttccgctcggcggagcccaacg

SEQ ID NO: 756056 - DNA, 120 bp, Artificial Sequence
  ENSG00000213672_1 (sequence is synthesized)
cgctggcgttcgccgcgggcgagaccttcctggtgctagagcgaagcagcgcgcactggtggctggccgcgcgggcgcgcagtggtgagacgggctacgtgccgccagcctacctgcgcc

SEQ ID NO: 756057 - DNA, 120 bp, Artificial Sequence
  ENSG00000213672_2 (sequence is synthesized)
gcctgcagggcctggagcaggatgtcctccaggccattgaccgggccatcgaggctgtacacaacacagccatgcgggatggtggcaagtacagcctggaacagcgtggagtcctccaga

SEQ ID NO: 756058 - DNA, 120 bp, Artificial Sequence
  ENSG00000213672_3 (sequence is synthesized)
agctgatccaccaccggaaagagaccctgtcacgcagaggcccttcagcctccagtgttgcagttatgacctcatcaaccagtgaccaccacttggatgctgctgcagccaggcagccca

SEQ ID NO: 756059 - DNA, 120 bp, Artificial Sequence
  ENSG00000213672_4 (sequence is synthesized)
atggggtgtgtcgagctgggttcgagcggcagcacagcctacccagttctgagcatcttggggcagatggaggcctctaccagatcccaccacagcctcgccgagcagcacccaccacac

SEQ ID NO: 756060 - DNA, 120 bp, Artificial Sequence
  ENSG00000213672_5 (sequence is synthesized)
cgcccccaccagtgaagcgccgagaccgcgaggccctgatggcctctgggagtggtggccacaacaccatgccctccgggggtaactctgtgtccagcggctcctcagtcagcagcacct

SEQ ID NO: 756061 - DNA, 120 bp, Artificial Sequence
  ENSG00000213672_6 (sequence is synthesized)
ccctggacacgctctataccagctccagcccatctgaaccaggctccagctgctcacccacacccccacctgtgccccgccgaggcacccacaccaccgtgtcccaagtccagccccctc

SEQ ID NO: 756062 - DNA, 120 bp, Artificial Sequence
  ENSG00000213672_7 (sequence is synthesized)
cctccaaggcatcagcacctgaaccccctgcagaagaagaagtggcaactggtacaacctcagcctctgatgacctggaagccctgggtacactgagcctggggaccacagaggagaagg

SEQ ID NO: 756063 - DNA, 120 bp, Artificial Sequence
  ENSG00000213672_8 (sequence is synthesized)
cagcagctgaggcggctgtgcccaggaccattggggccgagctgatggagctggtgcggagaaacactggcctgagccacgaattatgccgggtggccatcggcatcatagtgggtcaca

SEQ ID NO: 756064 - DNA, 120 bp, Artificial Sequence
  ENSG00000213672_9 (sequence is synthesized)
tccaggcctcggtgccggccagctcaccagtcatggagcaggtcctcctctcactcgtagagggcaaggacctcagcatggccctgccctcagggcaggtctgccacgaccagcagaggc

SEQ ID NO: 756065 - DNA, 120 bp, Artificial Sequence
  ENSG00000213672_10 (sequence is synthesized)
tggaggtgatctttgcagacctggctcgccggaaggacgacgcccagcagcgcagttgggcactatatgaggatgagggtgtcatccgctgctacctagaggagctgctgcatattctga

SEQ ID NO: 756066 - DNA, 120 bp, Artificial Sequence
  ENSG00000213672_11 (sequence is synthesized)
ctgatgcagaccctgaagtttgcaagaaaatgtgcaagagaaacgagttcgagtctgtcctggccttggtggcctattaccaaatggaacaccgagcatcactgcggctgctgctcctca

SEQ ID NO: 756067 - DNA, 120 bp, Artificial Sequence
  ENSG00000213672_12 (sequence is synthesized)
cgcttgtgtcatccgtgctgcctgtagagctggcgagggacatgcagacagacacgcaggaccaccagaaactctgttactctgccctcatcctggccatggtcttctccatgggagagg

SEQ ID NO: 756068 - DNA, 120 bp, Artificial Sequence
  ENSG00000213672_13 (sequence is synthesized)
cagtgccctatgcacactatgagcacctgggcacgcctttcgcccagttcctactgaacatcgtcgaggatgggctgcccttggacaccacagagcagctgccggacctctgcgtgaacc

SEQ ID NO: 756069 - DNA, 120 bp, Artificial Sequence
  ENSG00000213672_14 (sequence is synthesized)
tgcttctggctctcaacctgcacctgccagctgctgaccagaatgtcatcatggctgccctgagcaaacacgccaatgtcaagatcttctccgagaagctgttgttgctcctgaacagag

SEQ ID NO: 756070 - DNA, 120 bp, Artificial Sequence
  ENSG00000213672_15 (sequence is synthesized)
gggatgaccctgtgcgcatcttcaaacatgagccacagccaccacactctgtcctcaagttcctgcaggacgtgtttggcagcccggccacagctgccatcttctaccacacagacatga

SEQ ID NO: 756071 - DNA, 120 bp, Artificial Sequence
  ENSG00000213672_16 (sequence is synthesized)
tggctctcattgacatcactgtgcggcacatcgcagacctgtcaccaggagacaagctgcgcatggagtacctctccctgatgcatgctatagtccgcaccacaccctacctgcagcacc

SEQ ID NO: 756072 - DNA, 120 bp, Artificial Sequence
  ENSG00000213672_17 (sequence is synthesized)
gccaccggctacccgacctgcaggccatactgcgacgcatcctgaatgaggaggagacctcaccccagtgccagatggaccgcatgattgtccgagagatgtgcaaggaattcctggtgc

SEQ ID NO: 756073 - DNA, 120 bp, Artificial Sequence
  ENSG00000213672_18 (sequence is synthesized)
tgggggaggctcccagctagcaccttgctgtcctcccttccctgcagctccagtcagtgtgcaggggactcaggggcttggccctaagaatgttttgcactgacagtgggaggggataag

SEQ ID NO: 756074 - DNA, 120 bp, Artificial Sequence
  ENSG00000213672_19 (sequence is synthesized)
gtggcagaaggaacctgagcaggacccccacctgaagtagaacttaagagaggggccaagtgtaggattggggaccatggtctgggagctgttctggggcagggggaatatgcaagctaa

SEQ ID NO: 756075 - DNA, 120 bp, Artificial Sequence
  ENSG00000213672_20 (sequence is synthesized)
agcccctctataccctggtaggcttcctcttcagcatgcccccctcttcaccccacacccatgtgtacactcagagtcctgctgccgctccaggctggaccagacccccatccccacccc

SEQ ID NO: 756076 - DNA, 120 bp, Artificial Sequence
  ENSG00000213672_21 (sequence is synthesized)
tcctggtctgtatcctgggcctcagcaagccatgcccctggggtgaggggaggcatctcccaccagctctattctttgccttagctttgcagtgagtgctgctcatgtcctcccctccac

SEQ ID NO: 756077 - DNA, 120 bp, Artificial Sequence
  ENSG00000213672_22 (sequence is synthesized)
ccgcacatgggggtcgctgcccttcactcctacccccagaggccttggccaagctgctgctttgaaagcgggatcttggagacaggccatccatcctggagcctcatggaacaggatgat

SEQ ID NO: 756078 - DNA, 120 bp, Artificial Sequence
  ENSG00000213672_23 (sequence is synthesized)
ggcactgagaaagccaatgaccgaatctcttttctctgtaaaaatgtagactgaaaagccatgtgtattttcctatgtgctgtagctctcctttggaaataaatcacaggcatctggaaa

SEQ ID NO: 756079 - DNA, 120 bp, Artificial Sequence
  ENSG00000213672_24 (sequence is synthesized)
gcactcggtgaagacaggtggtgaggcctagacacaccgagagccgggccccgcgggggcttccaagtgtcggatcagcaagatcatcctttcgaggtcgccgtccttgcaattagtaga

SEQ ID NO: 756080 - DNA, 120 bp, Artificial Sequence
  ENSG00000213672_25 (sequence is synthesized)
cagacacgcaggagcacctgggcacgcctttcgcccagttcctactgaacatcgtcgaggatgggctgcccttggacaccacagagcagctgccggacctctgcgtgaacctgcttctgg

SEQ ID NO: 756081 - DNA, 120 bp, Artificial Sequence
  ENSG00000213672_26 (sequence is synthesized)
tcctcctctcactcgtagagggcaaggtgagggtgggcggcacagcagggccaccctgctacccaccctgttcccaccgtcacacacttgtccagcctgtacattacaggtatttctcaa

SEQ ID NO: 756082 - DNA, 120 bp, Artificial Sequence
  ENSG00000213676_0 (sequence is synthesized)
cttgggaaccgtctcctggttggggggtgggggggaaagatggcggagctgatgctgctcagcgagattgctgacccgacgcgtttcttcaccgacaacctgcttagcccggaggactgg

SEQ ID NO: 756083 - DNA, 120 bp, Artificial Sequence
  ENSG00000213676_1 (sequence is synthesized)
ggtctgcagaacagcaccttgtattctggcctagatgaagtggccgaggagcagacgcagctcttccgttgcccggagcaggatgtcccgtttgacggcagctccctggacgtggggatg

SEQ ID NO: 756084 - DNA, 120 bp, Artificial Sequence
  ENSG00000213676_2 (sequence is synthesized)
gatgtcagcccctctgagcccccatgggaactcctgccgatcttcccagatcttcaggtgaagtctgagccatcttccccctgctcttcctcctccctcagctccgagtcatcgcgtctc

SEQ ID NO: 756085 - DNA, 120 bp, Artificial Sequence
  ENSG00000213676_3 (sequence is synthesized)
tccacagagccatccagcgaggctcttggggtaggggaggtgctccatgtgaagacagagtccttggcacccccactgtgtctcctgggagatgacccaacatcctcatttgaaaccgtc

SEQ ID NO: 756086 - DNA, 120 bp, Artificial Sequence
  ENSG00000213676_4 (sequence is synthesized)
cagatcaacgttatccccacctctgatgattcctcagatgtccagaccaagatagaacctgtctctccatgttcttccgtcaactctgaggcctccctgctctcagccgactcctccagc

SEQ ID NO: 756087 - DNA, 120 bp, Artificial Sequence
  ENSG00000213676_5 (sequence is synthesized)
caggcttttataggagaggaggtcctggaagtgaagacagagtccctgtccccttcaggatgcctcctgtgggatgtcccagccccctcacttggagctgtccagatcagcatgggccca

SEQ ID NO: 756088 - DNA, 120 bp, Artificial Sequence
  ENSG00000213676_6 (sequence is synthesized)
tcccttgatggctcctcaggcaaagccctgcccacccggaagccgccactgcagcccaaacctgtagtgctaaccactgtcccaatgccatccagagctgtgcctcccagcaccacagtc

SEQ ID NO: 756089 - DNA, 120 bp, Artificial Sequence
  ENSG00000213676_7 (sequence is synthesized)
cttctgcagtccctcgtccagccacccccagtgtccccagttgtcctcatccagggtgctattcgagtccagcctgaagggccggctccctctctaccacggcctgagaggaagagcatc

SEQ ID NO: 756090 - DNA, 120 bp, Artificial Sequence
  ENSG00000213676_8 (sequence is synthesized)
gttcccgctcctatgcctggaaactcctgcccgcctgaagtggatgcaaagctgctgaagcggcagcagcgaatgatcaagaaccgggagtcagcctgccagtcccggagaaagaagaaa

SEQ ID NO: 756091 - DNA, 120 bp, Artificial Sequence
  ENSG00000213676_9 (sequence is synthesized)
gagtatctgcagggactggaggctcggctgcaagcagtactggctgacaaccagcagctccgccgagagaatgctgccctccggcggcggctggaggccctgctggctgaaaacagcgag

SEQ ID NO: 756092 - DNA, 120 bp, Artificial Sequence
  ENSG00000213676_10 (sequence is synthesized)
ccatctctcctcggatgaacaagggggagcctcaaccccggagacacttgctggggttctcagagcaagagccagttcagggagttgaacctctccaggggtcctcccagggccctaagg

SEQ ID NO: 756093 - DNA, 120 bp, Artificial Sequence
  ENSG00000213676_11 (sequence is synthesized)
agccccagcccagccccacagaccagcccagtttcagcaacctgacagccttccctgggggcgccaaggagctactactaagagacctagaccagctcttcctctcctctgattgccggc

SEQ ID NO: 756094 - DNA, 120 bp, Artificial Sequence
  ENSG00000213676_12 (sequence is synthesized)
acttcaaccgcactgagtccctgaggcttgctgacgagttgagtggctgggtccagcgccaccagagaggccggaggaagatccctcagagggcccaggagagacagaagtctcagccac

SEQ ID NO: 756095 - DNA, 120 bp, Artificial Sequence
  ENSG00000213676_13 (sequence is synthesized)
ggaagaagtcacctccagttaaggcagtccccatccaaccccctggacccccagaaagggattctgtgggccagctgcaactatatcgccacccagaccgttcgcagccagcattcttgg

SEQ ID NO: 756096 - DNA, 120 bp, Artificial Sequence
  ENSG00000213676_14 (sequence is synthesized)
atgcaattgaccgacgggaagacacattttatgttgtctctttccgaagggaccacctgctgctcccagccatcagccacaacaagacctcccggcccaagatgtccctggtgatgcctg

SEQ ID NO: 756097 - DNA, 120 bp, Artificial Sequence
  ENSG00000213676_15 (sequence is synthesized)
ccatggcccccaatgagaccctgtcaggccgtggggccccgggggactatgaggagatgatgcagatcgagtgtgaggtcatggacaccagggtgattcacatcaagacctccacagtgc

SEQ ID NO: 756098 - DNA, 120 bp, Artificial Sequence
  ENSG00000213676_16 (sequence is synthesized)
ccccctcgctccgaaaacagccatccccaaccccaggcaatgccacaggtggccccttgccagtctctgcagccagccaggcccaccaggcctcccaccagcccctctacctcaatcatc

SEQ ID NO: 756099 - DNA, 120 bp, Artificial Sequence
  ENSG00000213676_17 (sequence is synthesized)
cctgacctctgccattcacactgacttagaacggggggagggggtaccaggtggccaggtgggactgtttcaaatttccctgatccccaggcttggggcaattggtaaaggaaagagcag

SEQ ID NO: 756100 - DNA, 120 bp, Artificial Sequence
  ENSG00000213676_18 (sequence is synthesized)
gtgtgggggttaagcacttatttgaggtgggggtgttcacctctcttctcatcccttttcagaatatagggctcctctcattcctgtgaacccccagtcctggcttctttgtttgagggg

SEQ ID NO: 756101 - DNA, 120 bp, Artificial Sequence
  ENSG00000213676_19 (sequence is synthesized)
attgtgtgaggttcagttgtggggtgggtggtgagctgctgcatattttttattttgtttctctagtgttatggcagtggaggtgggaatttagtccccaggtgggacaagggaagtttt

SEQ ID NO: 756102 - DNA, 120 bp, Artificial Sequence
  ENSG00000213676_20 (sequence is synthesized)
ttcattttggagctagttactgggagtaagggagggtggggtgggggggagttcaggtttatgtgtgtgcatttcttttttattattattaaataaacaacttggagggagttgaaggaa

SEQ ID NO: 756103 - DNA, 120 bp, Artificial Sequence
  ENSG00000213676_21 (sequence is synthesized)
gatcgcaccactgcactccagcctggtcgacagagcaagactgcatctcaaaaaagaaaaaaaggagaaaaggaggcgggctgcattgaccctgtcagagagcttgcagccattgaggct

SEQ ID NO: 756104 - DNA, 120 bp, Artificial Sequence
  ENSG00000213676_22 (sequence is synthesized)
ctttttcttgtctccttctttgtaccttagaacagcgagctcaagttagggtctggaaacaggaaggtggtctgcatcatggtcttccttctcttcattgccttcaactttggacctgtc

SEQ ID NO: 756105 - DNA, 120 bp, Artificial Sequence
  ENSG00000213676_23 (sequence is synthesized)
atgccatccagagctgtgcctcccagcaccacagtccttctgcagtccctcgtccagccacccccaggtactgaagaaggagaaaagggccgggcatggtggctcacgccggtaatccca

SEQ ID NO: 756106 - DNA, 61 bp, Artificial Sequence
  ENSG00000213676_24 (sequence is synthesized)
gctgaggcgggcgaatcacctgaggtcagaagttgtggagtggtggcaggcgcctgtaatc

SEQ ID NO: 756107 - DNA, 120 bp, Artificial Sequence
  ENSG00000213689_0 (sequence is synthesized)
acttcccgccactgctgccagcgagagccgcgggagagtgtgcagccgagtcactactgcctgcctgcctgcctgctacggctcagcagcaggtacgtacccaaccatgggctcgcaggc

SEQ ID NO: 756108 - DNA, 120 bp, Artificial Sequence
  ENSG00000213689_1 (sequence is synthesized)
cctgcccccggggcccatgcagaccctcatctttttcgacatggaggccactggcttgcccttctcccagcccaaggtcacggagctgtgcctgctggctgtccacagatgtgccctgga

SEQ ID NO: 756109 - DNA, 120 bp, Artificial Sequence
  ENSG00000213689_2 (sequence is synthesized)
gagcccccccacctctcaggggccacctcccacagttcctccaccaccgcgtgtggtagacaagctctccctgtgtgtggctccggggaaggcctgcagccctgcagccagcgagatcac

SEQ ID NO: 756110 - DNA, 120 bp, Artificial Sequence
  ENSG00000213689_3 (sequence is synthesized)
aggtctgagcacagctgtgctggcagcgcatgggcgtcaatgttttgatgacaacctggccaacctgctcctagccttcctgcggcgccagccacagccctggtgcctggtggcacacaa

SEQ ID NO: 756111 - DNA, 120 bp, Artificial Sequence; identical to SEQ ID NO: 505804
  ENSG00000213689_4 (sequence is synthesized)

SEQ ID NO: 756112 - DNA, 120 bp, Artificial Sequence; identical to SEQ ID NO: 505805
  ENSG00000213689_5 (sequence is synthesized)

SEQ ID NO: 756113 - DNA, 120 bp, Artificial Sequence; identical to SEQ ID NO: 505806
  ENSG00000213689_6 (sequence is synthesized)

SEQ ID NO: 756114 - DNA, 120 bp, Artificial Sequence; identical to SEQ ID NO: 505807
  ENSG00000213689_7 (sequence is synthesized)

SEQ ID NO: 756115 - DNA, 120 bp, Artificial Sequence; identical to SEQ ID NO: 505808
  ENSG00000213689_8 (sequence is synthesized)

SEQ ID NO: 756116 - DNA, 120 bp, Artificial Sequence
  ENSG00000213689_9 (sequence is synthesized)
tgaaagggccgcagcaggggctcccagcagtgtgtaagaccgggagctggtctggcaccactgccctggtccttccagctgcctgtcactggtatgatggccccggtgcattgtgccacc

SEQ ID NO: 756117 - DNA, 120 bp, Artificial Sequence
  ENSG00000213689_10 (sequence is synthesized)
gcctgtggaattgtcctgagtcattgctttgggctggggccatgggaagaaaccattgtgtggcagggaaggaggtggctcttggcccaggcctaaaccaggaaagcctgggaaactggg

SEQ ID NO: 756118 - DNA, 120 bp, Artificial Sequence
  ENSG00000213689_11 (sequence is synthesized)
acccacagcgagagccgcgggagagtgtgcagccgagtcactactgcctgcctgcctgcctgctacggctcagcagcagcccaaggtcacggagctgtgcctgctggctgtccacagatg

SEQ ID NO: 756119 - DNA, 120 bp, Artificial Sequence
  ENSG00000213694_0 (sequence is synthesized)
agaggccgaggaagccggttccggggacgggcaacagggactcagggaccagaaggcggctgcaggacgcgaccgagcaggaccccaggcccgggaacgacgtcgcgagcgctgagactg

SEQ ID NO: 756120 - DNA, 120 bp, Artificial Sequence
  ENSG00000213694_1 (sequence is synthesized)
ccgggcctcccagcccatctggcattcgagcgcaggaccgggcgccccggcaccgccgcgcgccacccgctaggatgccggtggccccagcgccctcagccgacggaggagccctttttc

SEQ ID NO: 756121 - DNA, 120 bp, Artificial Sequence
  ENSG00000213694_2 (sequence is synthesized)
aacgccctcgctggagtctggcctgcacgccttgctgaatgaagccggaacctcagccccgcttccctttgaaatgaatgttcctggggcgccctctcgtggattttggagctaatcgtc

SEQ ID NO: 756122 - DNA, 120 bp, Artificial Sequence
  ENSG00000213694_3 (sequence is synthesized)
tgtgaatgccaagtgatggcaactgccctcccgccgcgtctccagccggtgcgggggaacgagaccctgcgggagcattaccagtacgtggggaagttggcgggcaggctgaaggaggcc

SEQ ID NO: 756123 - DNA, 120 bp, Artificial Sequence
  ENSG00000213694_4 (sequence is synthesized)
tccgagggcagcacgctcaccaccgtgctcttcttggtcatctgcagcttcatcgtcttggagaacctgatggttttgattgccatctggaaaaacaataaatttcacaaccgcatgtac

SEQ ID NO: 756124 - DNA, 120 bp, Artificial Sequence
  ENSG00000213694_5 (sequence is synthesized)
tttttcattggcaacctggctctctgcgacctgctggccggcatcgcttacaaggtcaacattctgatgtctggcaagaagacgttcagcctgtctcccacggtctggttcctcagggag

SEQ ID NO: 756125 - DNA, 120 bp, Artificial Sequence
  ENSG00000213694_6 (sequence is synthesized)
ggcagtatgttcgtggcccttggggcgtccacctgcagcttactggccatcgccatcgagcggcacttgacaatgatcaaaatgaggccttacgacgccaacaagaggcaccgcgtcttc

SEQ ID NO: 756126 - DNA, 120 bp, Artificial Sequence
  ENSG00000213694_7 (sequence is synthesized)
ctcctgatcgggatgtgctggctcattgccttcacgctgggcgccctgcccattctgggctggaactgcctgcacaatctccctgactgctctaccatcctgcccctctactccaagaag

SEQ ID NO: 756127 - DNA, 120 bp, Artificial Sequence
  ENSG00000213694_8 (sequence is synthesized)
tacattgccttctgcatcagcatcttcacggccatcctggtgaccatcgtgatcctctacgcacgcatctacttcctggtgaagtccagcagccgtaaggtggccaaccacaacaactcg

SEQ ID NO: 756128 - DNA, 120 bp, Artificial Sequence
  ENSG00000213694_9 (sequence is synthesized)
gagcggtccatggcactgctgcggaccgtggtgattgtggtgagcgtgttcatcgcctgctggtccccactcttcatcctcttcctcattgatgtggcctgcagggtgcaggcgtgcccc

SEQ ID NO: 756129 - DNA, 120 bp, Artificial Sequence
  ENSG00000213694_10 (sequence is synthesized)
atcctcttcaaggctcagtggttcatcgtgttggctgtgctcaactccgccatgaacccggtcatctacacgctggccagcaaggagatgcggcgggccttcttccgtctggtctgcaac

SEQ ID NO: 756130 - DNA, 120 bp, Artificial Sequence
  ENSG00000213694_11 (sequence is synthesized)
tgcctggtcaggggacggggggcccgcgcctcacccatccagcctgcgctcgacccaagcagaagtaaatcaagcagcagcaacaatagcagccactctccgaaggtcaaggaagacctg

SEQ ID NO: 756131 - DNA, 120 bp, Artificial Sequence
  ENSG00000213694_12 (sequence is synthesized)
ccccacacagccccctcatcctgcatcatggacaagaacgcagcacttcagaatgggatcttctgcaactgatcgtctccatgcgccctgctctgcggctgtgttcttatttattgcatg

SEQ ID NO: 756132 - DNA, 120 bp, Artificial Sequence
  ENSG00000213694_13 (sequence is synthesized)
cgtcgcttccacaggggcccctcaagagctgtgactcgggagagctaccttactttgaccaacagcctgcccagtgtggatgtctcttacagagggggcccaaggaatcaccaccccgct

SEQ ID NO: 756133 - DNA, 120 bp, Artificial Sequence
  ENSG00000213694_14 (sequence is synthesized)
tcagtgtaaacaacgtgccttgtccactttgggctccagagtctttcagatgtactaagctgctgacatcatccactgccttctgctgcatcctagacaccctccctgttgttcacagag

SEQ ID NO: 756134 - DNA, 120 bp, Artificial Sequence
  ENSG00000213694_15 (sequence is synthesized)
agggaaggtcgtgggccacacaatgctgtgtgaccctctccgtgtgcctctgaatggtgttttgatgattttacactacatttcctgtgcgtagaatggatgcttgtatattcgtacatc

SEQ ID NO: 756135 - DNA, 120 bp, Artificial Sequence
  ENSG00000213694_16 (sequence is synthesized)
tctatgttacacagaatttgtgttgcaggtgtttgccatgtggtacctacatagaatctccatacaacacacaggtaacaggttatacaagtggattcagactgaacccccagtacaagg

SEQ ID NO: 756136 - DNA, 120 bp, Artificial Sequence
  ENSG00000213694_17 (sequence is synthesized)
acattgttttgaactaggtggacatgccatccctggtctccttagactgacatgattctcatgttaaccaagttttaaaagttcaaattccccaaaaaggcttgtccaaggctggcccca

SEQ ID NO: 756137 - DNA, 120 bp, Artificial Sequence
  ENSG00000213694_18 (sequence is synthesized)
tctgacccacaccagccctgtgtcctgtcctttcagtcatttgtccctgcgtaattttaatcgtattccaaagcccaattatgtgatggttttcaggtttctgcaaattacagaagagcc

SEQ ID NO: 756138 - DNA, 120 bp, Artificial Sequence
  ENSG00000213694_19 (sequence is synthesized)
agccaagatcacccaggagcttgtgcccccagatgggccaaagaaagagcctatgaaggagaagcagaagcagacggctggcctggctcaccttcccacgccagtggggcaggggtctgc

SEQ ID NO: 756139 - DNA, 120 bp, Artificial Sequence
  ENSG00000213694_20 (sequence is synthesized)
ttcaggaaatggaagctgtccaggaaatgagcagagattcacaagacagcactttgattctatgttgagtttgtttctatattagaaaagcagcaagtcagtaatcccccgtggcatcac

SEQ ID NO: 756140 - DNA, 120 bp, Artificial Sequence
  ENSG00000213694_21 (sequence is synthesized)
agctaagtagctgtggccaccggcagtttcacagcatcctgaaagctggcactgatcgtgactatcagtgaaagaagtttaattttcaggttagaaaatgtgatctggcagtttatgcat

SEQ ID NO: 756141 - DNA, 120 bp, Artificial Sequence
  ENSG00000213694_22 (sequence is synthesized)
tcttcagagtaatgtaataatacctatgtgatgctgtaattttacttttcaacataagttgaacccgtagcagtctgtttaccttgtaaagggattacttagaagacatttttgtacatg

SEQ ID NO: 756142 - DNA, 120 bp, Artificial Sequence
  ENSG00000213694_23 (sequence is synthesized)
ctcttccccaaggattgtacgtattatacaaatagatggaaagaaaagtgaacacgtttgtagaactttcataagcacacagttgctgtgttgagttctctttaaaaacaaggacaaaac

SEQ ID NO: 756143 - DNA, 120 bp, Artificial Sequence
  ENSG00000213694_24 (sequence is synthesized)
caaccagcgttcaaaggaacctcccatcagagtcccctaaagtattttaggttcagtgagcatttgcctgaataaaacctaaaagagtagtcttaacacattactaactttttctaagag

SEQ ID NO: 756144 - DNA, 120 bp, Artificial Sequence
  ENSG00000213694_25 (sequence is synthesized)
aaattgattcctgttttgtcatctgatgcaatttgctcttataaagagacattttcataggttcagagtaactcacctccatgggctgaccaaaggcttttctaatttttgttactgatg

SEQ ID NO: 756145 - DNA, 120 bp, Artificial Sequence
  ENSG00000213694_26 (sequence is synthesized)
agatgaaacctatttgtaaggagatcttccccaggagcatttctgttgccttcttgacatcaatgaaaagtagcatattctcttatgaaatagcatgagaaaacacagggcatttctagg

SEQ ID NO: 756146 - DNA, 76 bp, Artificial Sequence
  ENSG00000213694_27 (sequence is synthesized)
tcttatgaaatagcatgagaaaacacagggcatttctaggacagtaaaacgttaaagtactggattaagaaaacaa

SEQ ID NO: 756147 - DNA, 120 bp, Artificial Sequence
  ENSG00000213694_28 (sequence is synthesized)
atgcatcagagagccaaaacattcagtattgcattttcacataggtgatgaaatgactttggaactttatctgtgttatagttatgagttgctttgggagacttggagctctctgtagct

SEQ ID NO: 756148 - DNA, 120 bp, Artificial Sequence
  ENSG00000213694_29 (sequence is synthesized)
attgttcataacactttgctccataaccctgatgtccgcagtatctaagtatctcagccttcatccattaactctactagggagcccacagccaccatttccactaggaggtatcaatat

SEQ ID NO: 756149 - DNA, 120 bp, Artificial Sequence
  ENSG00000213694_30 (sequence is synthesized)
ttgtggtatgacataaggctcccttgaaataacaagacttttgagcaatctgaattaaaaatacatcaaaaaagtaatagcgctcatttgctaaatgcaaaaaataatcacctttgatac

SEQ ID NO: 756150 - DNA, 120 bp, Artificial Sequence
  ENSG00000213694_31 (sequence is synthesized)
caatgtgcaccaatatgcctaactagctagccagctggagataatttaccagggaatgtttcaaagccctaaccttgaagtttggaaacaggtggtcttctatgctgcagagaaactatg

SEQ ID NO: 756151 - DNA, 120 bp, Artificial Sequence
  ENSG00000213694_32 (sequence is synthesized)
cattaggtctcttttcaattagaaacctttactatttccaatgtatgtttgttaaaaataataataataaaaccaaaagcctttgtggaaacccactcttcgtagtccatgtgatgggat

SEQ ID NO: 756152 - DNA, 120 bp, Artificial Sequence
  ENSG00000213694_33 (sequence is synthesized)
tgttttatcgttttcaccgggtgccctccccactgcaggggtgcgcactgttgttgcaggcttgctacccacctgtgtttcttagcatttcaggaattaaaccacattcagaaccccaaa

SEQ ID NO: 756153 - DNA, 120 bp, Artificial Sequence
  ENSG00000213694_34 (sequence is synthesized)
catggggagaggaaagcaatggacacaattgtatcctgtagggtttcattcacgtgaaggtcagaagcaggctaaactcacctaggggagagtcctatcccaggtagtggtcatgcttgg

SEQ ID NO: 756154 - DNA, 120 bp, Artificial Sequence
  ENSG00000213694_35 (sequence is synthesized)
ggacaggtggtgactaggaggggcacaaggaaggctgcagggtccggcccatcttgttgctggcctgggtgctggtctcactgatctctgtgtggtggggcaggtcagcctcccaggcct

SEQ ID NO: 756155 - DNA, 120 bp, Artificial Sequence
  ENSG00000213694_36 (sequence is synthesized)
gctggtgcctgcagtgcccagcactcctgccgtgcctggcagtgttagtaccaatccgccagagtgactgactcccctcttgccctgagtagggcttgctgactccaggagcctcagggc

SEQ ID NO: 756156 - DNA, 120 bp, Artificial Sequence
  ENSG00000213694_37 (sequence is synthesized)
ggggtgggctttgagctttcttctagcaaacttgaggtctgtggctggtacccctcaggagcggaggggaactcttgtccatgagatgcttttaaccgtgcgcaataatgtgtagacgca

SEQ ID NO: 756157 - DNA, 120 bp, Artificial Sequence
  ENSG00000213694_38 (sequence is synthesized)
tccaaaatcaatctggcctttagcccagcacttaactcttgggatgaggcctgctttgtaaatgttgataatccagagaaaatgagcttttagattccaaagacagccagatatcttcca

SEQ ID NO: 756158 - DNA, 120 bp, Artificial Sequence
  ENSG00000213694_39 (sequence is synthesized)
cttatgcaaaatgcagagaatcatatttaacaaaagatgttctggacaaatatgcttcttgagggatgaatatttaattataagggaaatgataaatcaaacattaatgggaaaatatgt

SEQ ID NO: 756159 - DNA, 120 bp, Artificial Sequence
  ENSG00000213694_40 (sequence is synthesized)
ttgccctcaagattcatgattttgatgggtctctggcaaatcttatactatgtttattggggttattttattgctggttattagtttttaattgtttgcttgttttctgctctgatcaat

SEQ ID NO: 756160 - DNA, 120 bp, Artificial Sequence
  ENSG00000213694_41 (sequence is synthesized)
ttttgtataagccgtgggtctattcaccctcttctctccattcccgggagcaagtccacatctggctgttggatgcatggcaaaagcaaaggtgtggagaaggttcagaggagacaggac

SEQ ID NO: 756161 - DNA, 120 bp, Artificial Sequence
  ENSG00000213694_42 (sequence is synthesized)
atgtataaaatggtagggtcaggttgtcatgggggaaactgaggcacaggaggcaagctgagttagtacaagaacagtctgaatcataacgacatgccagtattacctaaaaggatgagg

SEQ ID NO: 756162 - DNA, 120 bp, Artificial Sequence
  ENSG00000213694_43 (sequence is synthesized)
aacatggagctgtacttgaatccctacgtgagctggggaaaaggggcctcaggaatcactgacattggaaccaaggtttgtctgcagcttgtcggtttctgggacagaaacccaacatac

SEQ ID NO: 756163 - DNA, 120 bp, Artificial Sequence
  ENSG00000213694_44 (sequence is synthesized)
tggagtgggtatcccagcaatctgtaggataaaccaggacactgtggtgtcatggatagctggctgtctgccaggtgatggcccctctggttgcaatgtgagccgggcaggtcatccatt

SEQ ID NO: 756164 - DNA, 120 bp, Artificial Sequence
  ENSG00000213694_45 (sequence is synthesized)
tggcagcatggtgagggctctggccccagttgctatgggagggaggatgctggcacagggcactgttcacagactgcctttgctccatgccttttccatgagcatgagtggctgttcgtg

SEQ ID NO: 756165 - DNA, 120 bp, Artificial Sequence
  ENSG00000213694_46 (sequence is synthesized)
tgggaaacggcagagccctcgcggtccccatcagcactgtgcagtggtaccggaggtggcaggagacagcctgatggcccaggttgtcttcatacccggcttcatgccagggtgcatgcc

SEQ ID NO: 756166 - DNA, 120 bp, Artificial Sequence
  ENSG00000213694_47 (sequence is synthesized)
gggcatagcacatgtgtccctgagaggcccctgatcaggggtggaaacccagcaaagtgaaaatcagaaatagtgattctccagttcctgttcacagataaagaaagaaagaaataataa

SEQ ID NO: 756167 - DNA, 69 bp, Artificial Sequence
  ENSG00000213694_48 (sequence is synthesized)
ccagttcctgttcacagataaagaaagaaagaaataataagcaatactaggcctggttcacttgaggtc

SEQ ID NO: 756168 - DNA, 83 bp, Artificial Sequence
  ENSG00000213694_49 (sequence is synthesized)
actccatccccaactaaaaggacagtatctttttagcacccatcagtgtacaggatgctggggagggtactgtgaacttaccc

SEQ ID NO: 756169 - DNA, 120 bp, Artificial Sequence
  ENSG00000213694_50 (sequence is synthesized)
cagtgtacaggatgctggggagggtactgtgaacttacccatggtgaaagtccctgtgttaatggataagctcaatgctcagaaaatgctgctgactgtggtattgccccatttaaagag

SEQ ID NO: 756170 - DNA, 120 bp, Artificial Sequence
  ENSG00000213694_51 (sequence is synthesized)
acagtttgcagtacgttttcagaagtggcatgcagcctcagagaaaagtcaccaggggctggcatgattccagaaaatgttacagagcaagtggaatttgacttgaggcttgaaggatgg

SEQ ID NO: 756171 - DNA, 120 bp, Artificial Sequence
  ENSG00000213694_52 (sequence is synthesized)
gcaagatttaaataaaattcagaaacggtagagagggaggggctggggggaaggctgcccactggactgtcctgtttgcctccaggagaacctacaggcaagacatggtctcttctcagg

SEQ ID NO: 756172 - DNA, 120 bp, Artificial Sequence
  ENSG00000213694_53 (sequence is synthesized)
tgaatgggaagccaagtagggctggcatgggtgagccacagctcgaggaggcaggccccgggccctgcgctgcctgtcatggctcatgagtgatgggagagatctgggcaggcaacctcc

SEQ ID NO: 756173 - DNA, 120 bp, Artificial Sequence
  ENSG00000213694_54 (sequence is synthesized)
tctcatcctgcatcatcagcctggacttggaacttggctgctttttctttctgcagttagcagagggccttggccaacacataagcctttctgccagcacttggcattccagctgacctc

SEQ ID NO: 756174 - DNA, 120 bp, Artificial Sequence
  ENSG00000213694_55 (sequence is synthesized)
gacccaaggcctctgtgacttcaggaggcggcagctgggaagggtcagggcagttccaggcagagcacagacgtcagctcagacatcctaccccccgccaaccccccgcccccggggttt

SEQ ID NO: 756175 - DNA, 120 bp, Artificial Sequence
  ENSG00000213694_56 (sequence is synthesized)
ccagagcaaccaacaccaccaagctccaggacactggaaaaaaaatctttgcaaagaagcaaggggccatctcagaaaatccaggtcccccaaattgatgtagggagaggagggctttga

SEQ ID NO: 756176 - DNA, 120 bp, Artificial Sequence
  ENSG00000213694_57 (sequence is synthesized)
cagcattcagcactccagagggtcacgaggatacagaaaccatttggagccacctctgcttctcagccccacccaggcaagccctggatcttcaagggactgatttgtacctgggaataa

SEQ ID NO: 756177 - DNA, 120 bp, Artificial Sequence
  ENSG00000213694_58 (sequence is synthesized)
actcatgcatggatgagattcagagtcaatcacaccctaaaatgcagagcccatagtattggtgagttgttcatgtgtctctgaagcaaatttagggctgtggttcaaacatcgtaaaag

SEQ ID NO: 756178 - DNA, 120 bp, Artificial Sequence
  ENSG00000213694_59 (sequence is synthesized)
ttaaaaaaaattcactggatacacacagtaggctcttttaaattagcctcatttgaacttaattacatatttaaatactcaaataataaatgatggctgggtgcggtgtctcatgcctgt

SEQ ID NO: 756179 - DNA, 73 bp, Artificial Sequence
  ENSG00000213694_60 (sequence is synthesized)
cagctacttgggaggctgaggcagcagaagcacttgaacccaggaggcagtggttgcacactgtgtctcaaaa

SEQ ID NO: 756180 - DNA, 120 bp, Artificial Sequence
  ENSG00000213694_61 (sequence is synthesized)
agcaacactgtgtctcaaaagaaaattttttttaataaaaataaaaaataaaataaaataagtgagtccactgaaagcggtttctaccttgatagttgggtgtgtggcgtcatcaacatc

SEQ ID NO: 756181 - DNA, 120 bp, Artificial Sequence
  ENSG00000213694_62 (sequence is synthesized)
acagaaggctgatcgatattaccaggtgtggttgagtgcaagtgtttgaggtctcgtgggggaagagtttggaattcagaatccattgaggccttcactcaccactttccctctctcgct

SEQ ID NO: 756182 - DNA, 120 bp, Artificial Sequence
  ENSG00000213694_63 (sequence is synthesized)
gtgttcccaaatgtgccacttttctgttggctcacatgcacccatgctctatttgatattcagggctctgaatttcaagccagactcagtcagtgtgattgtcactgctttcctgtcctt

SEQ ID NO: 756183 - DNA, 120 bp, Artificial Sequence
  ENSG00000213694_64 (sequence is synthesized)
cctttatcatctgtagacttgggtcccgtttttgcaggttgatgttctgtcttcgctgggctctggactcactgctcacgagtgcggtgtctgcatgggcactgcccagacatgcactgt

SEQ ID NO: 756184 - DNA, 120 bp, Artificial Sequence
  ENSG00000213694_65 (sequence is synthesized)
tggtccctcgatggctgcatggtcaggcctcagggctctctgccaggccgacctacagcccatacagacctgatttctgggcctggatccaggggatgccatctgggaagtgcgggatct

SEQ ID NO: 756185 - DNA, 120 bp, Artificial Sequence
  ENSG00000213694_66 (sequence is synthesized)
tcccacgatgtcactgtaaaactcaccagggaggttttagaaattgaaccggcatcattcagattccatcctgctttttggtcctgagaaaatcctgcttttccctgagtaactgggata

SEQ ID NO: 756186 - DNA, 120 bp, Artificial Sequence
  ENSG00000213694_67 (sequence is synthesized)
ggattcaataattcatgcactgaatttcccttcccggcaactccagacaccaaatcgcttcccatggtgtcccccaatcacttaggaatttagcctgtgtctaaagaccctctctgcagc

SEQ ID NO: 756187 - DNA, 120 bp, Artificial Sequence
  ENSG00000213694_68 (sequence is synthesized)
ctgacgtggctagccatcccagtacttccacgtttttcatgcctttctccaacagcgttgccgtggccccttaggcggcgatcgttttatcaatggtcgctccctctttttatctgttgg

SEQ ID NO: 756188 - DNA, 120 bp, Artificial Sequence
  ENSG00000213694_69 (sequence is synthesized)
agagcgcggagagggaccaggcaggcgccggaggggacccgcgcggaaaaggaagaagcccaaacaaaaacgctgtccggcgccaggcgcccacctgcaagcccaagccggtgctcggcc

SEQ ID NO: 756189 - DNA, 120 bp, Artificial Sequence
  ENSG00000213694_70 (sequence is synthesized)
agttacaaaagaaatggtcaggatctggacaacgataatgatagtattaatcctcctattaagaatcggcccaaacaaaccctcgctgtcagggcgacaggcgcccgcccaagcccagac

SEQ ID NO: 756190 - DNA, 120 bp, Artificial Sequence
  ENSG00000213694_71 (sequence is synthesized)
caacgggctggagctgaatacctggatgaaagtggagaggctgttcgtggagaagttccatcagtcgttttccttggacaattaacaagttaggcttccacagtgccagggcctggggat

SEQ ID NO: 756191 - DNA, 120 bp, Artificial Sequence
  ENSG00000213694_72 (sequence is synthesized)
gctggacgtgggagagggttgtggtcgttagcctgggaaaatcattcttttaaacaatattcgccggaaaattagttttttcctaacatttctcaaacaaggcaattagggccgtcagaa

SEQ ID NO: 756192 - DNA, 120 bp, Artificial Sequence
  ENSG00000213694_73 (sequence is synthesized)
tcggtgctggaagacgaagtccccacagtgcaataatgaggttcccacggaaaatcagtacgttgtgttcgtaactgagataacagctagagaaggggctttgggctttttgagtctccc

SEQ ID NO: 756193 - DNA, 120 bp, Artificial Sequence
  ENSG00000213694_74 (sequence is synthesized)
ctctctctctctctctctctctcttcctctgactttctggctttggacactcccaatggtatatttctttgtggtgtttttatatttggatataagagaggaacttcttgttggattttt

SEQ ID NO: 756194 - DNA, 120 bp, Artificial Sequence
  ENSG00000213694_75 (sequence is synthesized)
tgttggatttttaagggaacacacttcgttttgacccttccaataaggaaaggggagctacaggaacagagagctctttagaaggttacttttaaatggaggcccccccattcatggtac

SEQ ID NO: 756195 - DNA, 120 bp, Artificial Sequence
  ENSG00000213694_76 (sequence is synthesized)
ccactcccacttggacctctgagacctccagaattaggcatcattctaaaatctggacattagaagtcacagactttgtatataaccacatattcataatttatcttttcaatgtttttt

SEQ ID NO: 756196 - DNA, 120 bp, Artificial Sequence
  ENSG00000213694_77 (sequence is synthesized)
attcatagatgaaaatcttgcaggcatagttaagaaaaatataattcctagaaagtacaagggaaggattatgctctgcagatacatgactaacaaggatagctggccatgcccagggct

SEQ ID NO: 756197 - DNA, 120 bp, Artificial Sequence
  ENSG00000213694_78 (sequence is synthesized)
ggtgttggttgaggaggtggtgatggtgcggggcatgtgtgtgtgtgtgtgtgtgtgcgcttgaggagttgtggaagtgttcatatctgtaaagtattatttcatggatgcagaccttaa

SEQ ID NO: 756198 - DNA, 120 bp, Artificial Sequence
  ENSG00000213694_79 (sequence is synthesized)
tgctaggttgaataactttgttgccatagaagaagaaccgcacgtcaggcttttttcattagcaaaccagtaagcactcactttgggcctctgaaatcacttccatcacctaacaccaga

SEQ ID NO: 756199 - DNA, 120 bp, Artificial Sequence
  ENSG00000213694_80 (sequence is synthesized)
gatacaaactgaagctagcccttaagagcctccccctaagatttagagagaatgatttctcaaccagttttcatctttgaaagtgccatttctccctttatcattgtgatttttattcaa

SEQ ID NO: 756200 - DNA, 120 bp, Artificial Sequence
  ENSG00000213694_81 (sequence is synthesized)
atgcatgagtctctgattttctaccatatacaaagggtagagactacagtttcctatagaagaaacttcacatagtggccgaaggatcttatttctcaaaattcaggaactggtttcctc

SEQ ID NO: 756201 - DNA, 120 bp, Artificial Sequence
  ENSG00000213694_82 (sequence is synthesized)
tttctggaaattatgacattaacttgatttcatggtatctctttcatcttcctcaatgcctgtgctgtatgtatatttttattatatactgtaggtatatttttattaccaaaaaaagga

SEQ ID NO: 756202 - DNA, 120 bp, Artificial Sequence
  ENSG00000213694_83 (sequence is synthesized)
gaatttgagcatgccacaatcttgaaaaatctgaggttgccctgctgtagaaccctttaactgccaggactttgtactgtttcccaagtgttaccagagccaggccgccagccttatgca

SEQ ID NO: 756203 - DNA, 120 bp, Artificial Sequence
  ENSG00000213694_84 (sequence is synthesized)
gtctgtttaccttagctggaaccagggtgctgtgctgtgggttctatgaaactttctgtttcttcatatttggctttgtaattcctttcttatcagttttggaggcatttcctattattc

SEQ ID NO: 756204 - DNA, 120 bp, Artificial Sequence
  ENSG00000213694_85 (sequence is synthesized)
ctctgccatatgttttctgccaaattaattgccttaagattttccttaagcttttggaaatgtataatgtttgagaaaaaagaaaaagaatagactgagtggaatcgtatctagtttcag

SEQ ID NO: 756205 - DNA, 120 bp, Artificial Sequence
  ENSG00000213694_86 (sequence is synthesized)
actgggcataaagtctccttcccttttttgaatcctatttttgaggcattgaagctgtgtctgtaagagacaataggccagttgggttaaatcagtgacgagattgtccagtgcagattg

SEQ ID NO: 756206 - DNA, 120 bp, Artificial Sequence
  ENSG00000213694_87 (sequence is synthesized)
gtgcccagtgagtggatcttcactgctcacaggccggactggggtcagctcacacagcgaggtgacggtccgctcctcaagcagtggatggtgctcttcggccttgcagatgccgctcca

SEQ ID NO: 756207 - DNA, 120 bp, Artificial Sequence
  ENSG00000213694_88 (sequence is synthesized)
ttttcctggcttcaaaattttccagatatttcagtgcccccagaatgacatgctaacattctgctggcatgggagcatgaggcagtttgtctctaaaacatgccagagaatctcttgtca

SEQ ID NO: 756208 - DNA, 120 bp, Artificial Sequence
  ENSG00000213694_89 (sequence is synthesized)
ctacctaggcaaagaaccagtggcaaggtggcagcctcccaaagagctcatccctaatgtgacatcctggaatcagatggcacggacaccggcccagccccttcccagctctgtgactaa

SEQ ID NO: 756209 - DNA, 120 bp, Artificial Sequence
  ENSG00000213694_90 (sequence is synthesized)
ggacaagtgacaccccccctcccccagcctcggtctcctcctgtgtacattcagaaggcagatgctgccatgaggccatgtgtgctatgtccatggtgcaaggtggcacgcatgccgagt

SEQ ID NO: 756210 - DNA, 120 bp, Artificial Sequence
  ENSG00000213694_91 (sequence is synthesized)
caccaggtgagactgccgctttgggaagggataggaaggatctccggtagccttcgtgggcaggatgcctcttatttgaatgtgcctttagccacctcacagagcctatttccacatccc

SEQ ID NO: 756211 - DNA, 120 bp, Artificial Sequence
  ENSG00000213694_92 (sequence is synthesized)
tgtggattcatccctgtggaaatcttgagaatcatttatcctatgctgtcatgaagcagcagcagaatggagaaggtttaaaaagactcatggacaggcaaagcggtcaaacacctcctg

SEQ ID NO: 756212 - DNA, 120 bp, Artificial Sequence
  ENSG00000213694_93 (sequence is synthesized)
gctcagacgcacttgccttcccacacacaagtctggaagctcaggatggtgttcacggaggcagatgctcggggccggggcctgagtttcctggggcacagcctccatatctggggttcc

SEQ ID NO: 756213 - DNA, 120 bp, Artificial Sequence
  ENSG00000213694_94 (sequence is synthesized)
ctggactatgcccagatagctcataatgtcccagccttatttgtgatggagaaggacttggggaaaagccaccgggaagcagtaagtctaaccagggaagtgcactgacttgcatgcttt

SEQ ID NO: 756214 - DNA, 120 bp, Artificial Sequence
  ENSG00000213694_95 (sequence is synthesized)
gaagaagagaagggagaaaagatacaaaaccctcacctggtttgtctgtaacagttgttatttctcaggggagctgcattaatgggccaagcctgtgcagctgggtgtgtgaagcatgca

SEQ ID NO: 756215 - DNA, 120 bp, Artificial Sequence
  ENSG00000213694_96 (sequence is synthesized)
ttttgcaatggactgtctccaaaagcagagcgaggtcacccaagaaatctagagcaagggaaaatactcattagcaaaggaattttgctggagccttgtaacggccgactcattatttcc

SEQ ID NO: 756216 - DNA, 120 bp, Artificial Sequence
  ENSG00000213694_97 (sequence is synthesized)
tttccaagttattttaaatgaaattttaaaaaacatcttgctttccaagaaattttgcttgttggcatatgtttggtgttttgattcagtttggaggatgaactagttaatttccctggg

SEQ ID NO: 756217 - DNA, 120 bp, Artificial Sequence
  ENSG00000213694_98 (sequence is synthesized)
agtacatgcctattaaaaatatagcatcctgcatctgaccaagatgctatcttactatcttattgtgcctatcttttatgcggagagagaaaggggggtgttgggaaggagaccagactg

SEQ ID NO: 756218 - DNA, 120 bp, Artificial Sequence
  ENSG00000213694_99 (sequence is synthesized)
tggaaacattttctttattttttctctttttcttccttttatagtttgtttatttttcaacttgacatgggtagagaaagcgaatcgctagtatagaaagcacatctggaatccatccgg

SEQ ID NO: 756219 - DNA, 120 bp, Artificial Sequence
  ENSG00000213694_100 (sequence is synthesized)
cctcctctctctggctcaccctcctcccagcaatgtttctccttggaagttgggggaaggtaggcacctctgaccttggcagggtctaacttggggtcatccactgcatactcatcttcc

SEQ ID NO: 756220 - DNA, 120 bp, Artificial Sequence
  ENSG00000213694_101 (sequence is synthesized)
agaaggcgtcttattcctcctcgacaaaaaaaaaatgtgttggtattaaaatgctttgaggtaggctggatgaacccagcttagtgaggatgacatgaaaacccttagctaatggggtct

SEQ ID NO: 756221 - DNA, 120 bp, Artificial Sequence
  ENSG00000213694_102 (sequence is synthesized)
ttattgagtagaactcaggtaagttcagatgtaagcagtgtctctcagtaaacatgaaaagactgaagatgcagacaatcaaatacttaagtctcttgaagagctgggtggtgggcgggg

SEQ ID NO: 756222 - DNA, 120 bp, Artificial Sequence
  ENSG00000213694_103 (sequence is synthesized)
gtcttcccaggtggtcagggagatgtgttagtgtagcacttggaagagagtggaacgaccaggcaaggatgtgccgtggaggtgggcagtgggagcagcccagtgtcagcatctgtattg

SEQ ID NO: 756223 - DNA, 120 bp, Artificial Sequence
  ENSG00000213694_104 (sequence is synthesized)
gttagaagaccaccgctaatgaggaggagcgtctctaccctgcagctgtctgtactcctgtgtcttccgtaatgtgccaagctctctgaatatatgcaaaactagtctgcaaaaagccat

SEQ ID NO: 756224 - DNA, 120 bp, Artificial Sequence
  ENSG00000213694_105 (sequence is synthesized)
atgtctcagcatctggctttatttctaagtgttcaggtggaatttaagccgcgatcaaatttacaatgtcactgccagctctggacacttacttttggaataaagcaaagagtgaacact

SEQ ID NO: 756225 - DNA, 120 bp, Artificial Sequence
  ENSG00000213694_106 (sequence is synthesized)
ctcggacctggttccaagcctgttcccgctgggtctctgggcgcccggtttctgcacctggagctcgcccgatgaggacaaggtctggaggccggcctgggaacaggggccgaagggcga

SEQ ID NO: 756226 - DNA, 120 bp, Artificial Sequence
  ENSG00000213694_107 (sequence is synthesized)
gggcccgggcggggcgcggaaccagggtggggggctgggggccgaaggacccacctttccaacaaaatccccaccgatcccgggcgcgacggggacttgggcgcgccacggcggccggag

SEQ ID NO: 756227 - DNA, 120 bp, Artificial Sequence
  ENSG00000213699_0 (sequence is synthesized)
gcgcaggagaccccgggtgacggggcccggcgccgctaactggagcgaaccccagcgtccgccgacatggcctggaccaagtaccagctgttcctggccgggctcatgcttgttaccggc

SEQ ID NO: 756228 - DNA, 120 bp, Artificial Sequence
  ENSG00000213699_1 (sequence is synthesized)
tccatcaacacgctctcggcaaaatgggcggacaatttcatggccgagggctgtggagggagcaaggagcacagcttccagcatcccttcctccaggcagtgggcatgttcctgggagaa

SEQ ID NO: 756229 - DNA, 120 bp, Artificial Sequence
  ENSG00000213699_2 (sequence is synthesized)
ttctcctgcctggctgccttctacctcctccgatgcagagctgcagggcaatcagactccagcgtagacccccagcagcccttcaaccctcttcttttcctgcccccagcgctctgtgac

SEQ ID NO: 756230 - DNA, 120 bp, Artificial Sequence
  ENSG00000213699_3 (sequence is synthesized)
atgacagggaccagcctcatgtatgtggctctgaacatgaccagtgcctccagcttccagatgctgcggggtgcagtgatcatattcactggcctgttctcggtggccttcctgggccgg

SEQ ID NO: 756231 - DNA, 120 bp, Artificial Sequence
  ENSG00000213699_4 (sequence is synthesized)
aggctggtgctgagccagtggctgggcatcctagccaccatcgcggggctggtggtcgtgggcctggctgacctcctgagcaagcacgacagtcagcacaagctcagcgaagtgatcaca

SEQ ID NO: 756232 - DNA, 120 bp, Artificial Sequence
  ENSG00000213699_5 (sequence is synthesized)
ggggacctgttgatcatcatggcccagatcatcgttgccatccagatggtgctagaggagaagttcgtctacaaacacaatgtgcacccactgcgggcagttggcactgagggcctcttt

SEQ ID NO: 756233 - DNA, 120 bp, Artificial Sequence
  ENSG00000213699_6 (sequence is synthesized)
ggctttgtgatcctctccctgctgctggtgcccatgtactacatccccgccggctccttcagcggaaaccctcgtgggacactggaggatgcattggacgccttctgccaggtgggccag

SEQ ID NO: 756234 - DNA, 120 bp, Artificial Sequence
  ENSG00000213699_7 (sequence is synthesized)
cagccgctcattgccgtggcactgctgggcaacatcagcagcattgccttcttcaacttcgcaggcatcagcgtcaccaaggaactgagcgccaccacccgcatggtgttggacagcttg

SEQ ID NO: 756235 - DNA, 120 bp, Artificial Sequence
  ENSG00000213699_8 (sequence is synthesized)
cgcaccgttgtcatctgggcactgagcctggcactgggctgggaggccttccatgcactgcagatccttggcttcctcatactccttataggcactgccctctacaatgggctacaccgt

SEQ ID NO: 756236 - DNA, 120 bp, Artificial Sequence
  ENSG00000213699_9 (sequence is synthesized)
ccgctgctgggccgcctgtccaggggccggcccctggcagaggagagcgagcaggagagactgctgggtggcacccgcactcccatcaatgatgccagctgaggttccctggaggcttct

SEQ ID NO: 756237 - DNA, 120 bp, Artificial Sequence
  ENSG00000213699_10 (sequence is synthesized)
actgccacccgggtgctccttctccctgagactgaggccacacaggctggtgggccccgaatgccctatccccaaggcctcaccctgtcccctccctgcagaacccccagggcagctgct

SEQ ID NO: 756238 - DNA, 120 bp, Artificial Sequence
  ENSG00000213699_11 (sequence is synthesized)
gccacagaagataacaacacccaagtcctctttttctcactaccacctgcagggtggtgttacccagcccccacaagcctgagtgcagtggcagacctcagctctctggacccctcctac

SEQ ID NO: 756239 - DNA, 120 bp, Artificial Sequence
  ENSG00000213699_12 (sequence is synthesized)
agcactagagctaaatcatgaagttgaattgtaggaatttaccaccgtagtgtatctgaatcataaactagattatcatagttatctagtttatgagtcataagctagatttgattcttc

SEQ ID NO: 756240 - DNA, 87 bp, Artificial Sequence
  ENSG00000213699_13 (sequence is synthesized)
gttatctagtttatgagtcataagctagatttgattcttcaaagaagaaaagtcagtgagcaaatttaaaccagaactaagcattat

SEQ ID NO: 756241 - DNA, 61 bp, Artificial Sequence
  ENSG00000213699_14 (sequence is synthesized)
ataactaagcattatgttttctaaaacttctaagatcctccctaaacccgtctggagacat

SEQ ID NO: 756242 - DNA, 120 bp, Artificial Sequence
  ENSG00000213699_15 (sequence is synthesized)
tcaaactcattgtagctcccagcacattacccagttgctctgggccttggtgttatgctctgggaagtagatgttgatgctgtggccttagtgccttctggccccagcattccatgggcc

SEQ ID NO: 756243 - DNA, 120 bp, Artificial Sequence
  ENSG00000213699_16 (sequence is synthesized)
tgtgatcttgaccaacctgagaaaacagtaacagcccatccactggaaatacccctctgcccacagcaccacccttctgtgctgttttttttgttgtttgtttgtttcttctttttgaga

SEQ ID NO: 756244 - DNA, 82 bp, Artificial Sequence
  ENSG00000213699_17 (sequence is synthesized)
gtgtgatctcggctcactgcaacctcccgctcccaggttcaagcaagtcccggctaattttttgcattctttaatagagacg

SEQ ID NO: 756245 - DNA, 90 bp, Artificial Sequence
  ENSG00000213699_18 (sequence is synthesized)
ttttttttttttttttttcttgacagcttactgcagccttgaactcctgggatcaatcagtcctcctgcctcagcctcccgagtagctaa

SEQ ID NO: 756246 - DNA, 87 bp, Artificial Sequence
  ENSG00000213699_19 (sequence is synthesized)
aatcagtcacaggtatgtaccaccatgcctggtttattgttttatttttttggcagagatgggtctcactgtgttgcccaggctgat

SEQ ID NO: 756247 - DNA, 120 bp, Artificial Sequence
  ENSG00000213699_20 (sequence is synthesized)
gctgggattacagacctgagccaccacacctgggcaacagagtgaaacctgtccctgttttcctgctcttactctcacctctgaggcctcctctgcctggaagagattacagggaaattc

SEQ ID NO: 756248 - DNA, 120 bp, Artificial Sequence
  ENSG00000213699_21 (sequence is synthesized)
ctgaggcctcctctgcctggaagagattacagggaaattccaggcagcccttgtcaattgtttttatgaattctttacctgttccttttaaagacaaggaaactgaggcccaaagttcta

SEQ ID NO: 756249 - DNA, 120 bp, Artificial Sequence
  ENSG00000213699_22 (sequence is synthesized)
agttgtttggcaaatggagtctcctaccctcagctcctgcaaggacctgggggacccccaggtccagcagccacatgattctgcagcagacagggacctagagcacatctggatctcagc

SEQ ID NO: 756250 - DNA, 120 bp, Artificial Sequence
  ENSG00000213699_23 (sequence is synthesized)
cccacccctggcaacctgcctgcctagagaactcccaagatgacagactaagtaggattctgccatttagaataattctggtatcctgggcgttgcgttaagttgcttaactttcattct

SEQ ID NO: 756251 - DNA, 120 bp, Artificial Sequence
  ENSG00000213699_24 (sequence is synthesized)
gtcttacgatagtcttcagaggtgggaacagatgaagaaaccatgccccagagaaggttaagtgacttcctctttatggagccagtgttccaacctaggtttgcctgataccagacctgt

SEQ ID NO: 756252 - DNA, 120 bp, Artificial Sequence
  ENSG00000213699_25 (sequence is synthesized)
ggccccacctcccatgcaggtctctgtggggtctttgggatggatctcctagggctgggctggaagcctcatgtactgttgtcttctaggtaaccaccctgaagagaaggggtggcatca

SEQ ID NO: 756253 - DNA, 120 bp, Artificial Sequence
  ENSG00000213699_26 (sequence is synthesized)
ggaaccgcagggaaccaagcagcctttggtccagtgctgctccttggaacagttgagtgtggcctcaaaccattctcctgggtagctcagtcataaaacaccgaatgcctgcctcaaaat

SEQ ID NO: 756254 - DNA, 120 bp, Artificial Sequence
  ENSG00000213699_27 (sequence is synthesized)
agcctctgagggaagggagctgttgacaagtgaagccctcaggttgtgtgggattccagcaggttattacagcttgtggggggagggagggtccattccaccagctttgaatcccagggt

SEQ ID NO: 756255 - DNA, 120 bp, Artificial Sequence
  ENSG00000213699_28 (sequence is synthesized)
cccctcagcttcactgggccacagtgtctgtcccaggaagaagcaaatggacagtgaggatgatggagagactacagctgccttgtctaaaacctgggatcttaaaagtgttattttggc

SEQ ID NO: 756256 - DNA, 120 bp, Artificial Sequence
  ENSG00000213699_29 (sequence is synthesized)
tggcttttattttttaaaaaaagaaaaggaaaattggcaattgtattaatccattctcgaattgctgtaaagaaatacctgagactgggtaatttaatttataaagaaaagaggtttaat

SEQ ID NO: 756257 - DNA, 120 bp, Artificial Sequence
  ENSG00000213714_0 (sequence is synthesized)
gacatcaccaagggcctggcaccaggtgcccagtcttccagttgcgagggcaagcaaacccgtcatgagcaactcccttccccatctctgctcaccatgtggacgctgaaatcgtccctg

SEQ ID NO: 756258 - DNA, 120 bp, Artificial Sequence
  ENSG00000213714_1 (sequence is synthesized)
gtcctgcttctgtgcctcacctgcagctatgcctttatgttctcttctctgagacagaaaactagcgaaccccaggggaaggtgccgtgtggagagcactttcggattcggcagaaccta

SEQ ID NO: 756259 - DNA, 120 bp, Artificial Sequence
  ENSG00000213714_2 (sequence is synthesized)
agaagaataaggagcagagtcctcctggccttcgaggcttcccatttcgcactccactaaagaaaaatcaaaatgcttctctttacaaagactgtgtattcaataccttaaacgaacttg

SEQ ID NO: 756260 - DNA, 120 bp, Artificial Sequence
  ENSG00000213714_3 (sequence is synthesized)
aagtggagcttttgaaatttgtgtccgaagtgcagaatcttaaaggtgccatggcaacaggcagtggcagtaacctcaagcttcgaaggtcagagatgcctgcagatccataccatgtca

SEQ ID NO: 756261 - DNA, 120 bp, Artificial Sequence
  ENSG00000213714_4 (sequence is synthesized)
caatctgtaaaatatggggagaagaaagctctagctgaatggatttgtgtgtcaggagagaaaaaagttgagtgttgacaaactgtatgcaaactaataaaactattctgaagaaaagaa

SEQ ID NO: 756262 - DNA, 120 bp, Artificial Sequence
  ENSG00000213719_0 (sequence is synthesized)
ctccccaggttcagggcggggccggtcgggacagccctgggtctaggggagagagtccctgagtgtgagacccgccttccccggtcccagcccctcccagttcccccagggacggccact

SEQ ID NO: 756263 - DNA, 120 bp, Artificial Sequence
  ENSG00000213719_1 (sequence is synthesized)
tcctggtccccgacgcaaccatggctgaagaacaaccgcaggtcgaattgttcgtgaaggctggcagtgatggggccaagattgggaactgcccattctcccagagactgttcatggtac

SEQ ID NO: 756264 - DNA, 120 bp, Artificial Sequence
  ENSG00000213719_2 (sequence is synthesized)
tgtggctcaagggagtcaccttcaatgttaccaccgttgacaccaaaaggcggaccgagacagtgcagaagctgtgcccaggggggcagctcccattcctgctgtatggcactgaagtgc

SEQ ID NO: 756265 - DNA, 120 bp, Artificial Sequence
  ENSG00000213719_3 (sequence is synthesized)
acacagacaccaacaagattgaggaatttctggaggcagtgctgtgccctcccaggtaccccaagctggcagctctgaaccctgagtccaacacagctgggctggacatatttgccaaat

SEQ ID NO: 756266 - DNA, 120 bp, Artificial Sequence
  ENSG00000213719_4 (sequence is synthesized)
gagaagggactcctgaaagccctgaaggttttagacaattacttaacatcccccctcccagaagaagtggatgaaaccagtgctgaagatgaaggtgtctctcagaggaagtttttggat

SEQ ID NO: 756267 - DNA, 120 bp, Artificial Sequence
  ENSG00000213719_5 (sequence is synthesized)
ggcaacgagctcaccctggctgactgcaacctgttgccaaagttacacatagtacaggtggtgtgtaagaagtaccggggattcaccatccccgaggccttccggggagtgcatcggtac

SEQ ID NO: 756268 - DNA, 120 bp, Artificial Sequence
  ENSG00000213719_6 (sequence is synthesized)
ttgagcaatgcctacgcccgggaagaattcgcttccacctgtccagatgatgaggagatcgagctcgcctatgagcaagtggcaaaggccctcaaataagcccctcctgggactccctca

SEQ ID NO: 756269 - DNA, 120 bp, Artificial Sequence
  ENSG00000213719_7 (sequence is synthesized)
accccctccattttctccacaaaggccctggtggtttccacattgctacccaatggacacactccaaaatggccagtgggcagggaatcctggagcacttgttccgggatggtgtggtgg

SEQ ID NO: 756270 - DNA, 120 bp, Artificial Sequence
  ENSG00000213719_8 (sequence is synthesized)
aagaggggatgagggaaagaaatggggggcctgggtcagatttttattgtggggtgggatgagtaggacaacatatttcagtaataaaatacagaataaaaatcaagtgtttttacgcaa

SEQ ID NO: 756271 - DNA, 120 bp, Artificial Sequence
  ENSG00000213719_9 (sequence is synthesized)
attacaggcgtgagccacctcacccggcccctaactctatttcctatgcccaatcccaagtgtaggccacaaggactgcaagtcctagtgctgagctgggcccggagacagtagactgcg

SEQ ID NO: 756272 - DNA, 120 bp, Artificial Sequence
  ENSG00000213719_10 (sequence is synthesized)
gagctgggcccggagacagtagactgcggggggcacaggacctactgagacaccagtctgggcagctcagggagtgctggcgtcaccccttccctaatcccaggctgcatggctaacggt

SEQ ID NO: 756273 - DNA, 120 bp, Artificial Sequence
  ENSG00000213719_11 (sequence is synthesized)
tcctatctgcagtcccagccttccacttccgagttcttctctcagaccacagtcccagcaacccagaatttggattggagtctggaagaaatgcagaatgattaaacgaccacctttcca

SEQ ID NO: 756274 - DNA, 120 bp, Artificial Sequence
  ENSG00000213719_12 (sequence is synthesized)
caggttcagggcggggccggtcggtgagtcagcggctctctgatccagcccgggagaggaccgagctggaggagctgggtgtggggtgcgttgggctggtggggaggcctagtttgggtg

SEQ ID NO: 756275 - DNA, 120 bp, Artificial Sequence
  ENSG00000213719_13 (sequence is synthesized)
ggatttgattggcgcagtgggaagcccgcgagaagaggtggaagcattcgaattacatcaaattctggcagagagaagtagttctgatcagaacactcacacccctactgggacatgccc

SEQ ID NO: 756276 - DNA, 120 bp, Artificial Sequence
  ENSG00000213722_0 (sequence is synthesized)
cccgcttagacaatgccccggagccgccagaccgtcgcgcccctgccccatcgtagtatatgagctcgcctacacaaggacccgcgctaaaagccagagctcccagtccccgaggcttga

SEQ ID NO: 756277 - DNA, 120 bp, Artificial Sequence
  ENSG00000213722_1 (sequence is synthesized)
agacggggactcccttctccaccaactctgtcctcggggggtggggccccagccgagatcacagcgcgacaggagtgggggtggccgctggaggtgaagaaacaagaaaactaagaaatc

SEQ ID NO: 756278 - DNA, 120 bp, Artificial Sequence
  ENSG00000213722_2 (sequence is synthesized)
cgagcggttggagggggagtctgtgtggatgggatggggacgccgggggaggggctgggccgctgctcccatgccctgatccggggagtcccagagagcctggcgtcgggggaaggtgcg

SEQ ID NO: 756279 - DNA, 120 bp, Artificial Sequence
  ENSG00000213722_3 (sequence is synthesized)
ggggctggccttcccgctctggatctggccaaagctcaaagggagcacggggtgctgggaggtaaactgaggcaacgactggggctacagctgctagaactgccacctgaggagtcattg

SEQ ID NO: 756280 - DNA, 120 bp, Artificial Sequence
  ENSG00000213722_4 (sequence is synthesized)
ccgctgggaccgctgcttggcgacacggccgtgatccaaggggacacggccctaatcacgcggccctggagccccgctcgtaggccagaggtcgatggagtccgcaaagccctgcaagac

SEQ ID NO: 756281 - DNA, 120 bp, Artificial Sequence
  ENSG00000213722_5 (sequence is synthesized)
gaattgtggaaataggagacgagaacgcgacgctggatggcactgacgttctcttcaccggccgggagtttttcgtaggcctctccaaatggaccaatcaccgaggagctgagatcgtgg

SEQ ID NO: 756282 - DNA, 120 bp, Artificial Sequence
  ENSG00000213722_6 (sequence is synthesized)
cggacacgttccgggacttcgccgtctccactgtgccagtctcgggtccctcccacctgcgcggtctctgcggcatggggggacctcgcactgttgtggcaggcagcagcgacgctgccc

SEQ ID NO: 756283 - DNA, 120 bp, Artificial Sequence
  ENSG00000213722_7 (sequence is synthesized)
aaaaggctgtccgggcaatggcagtgctgacagatcacccatatgcctccctgaccctcccagatgacgcagctgctgactgtctctttcttcgtcctgggttgcctggtgtgccccctt

SEQ ID NO: 756284 - DNA, 120 bp, Artificial Sequence
  ENSG00000213722_8 (sequence is synthesized)
tcctcctgcaccgtggaggtggggatctgcccaacagccaggaggcactgcagaagctctctgatgtcaccctggtacctgtgtcctgctcagaactggagaaggctggcgccgggctca

SEQ ID NO: 756285 - DNA, 120 bp, Artificial Sequence
  ENSG00000213722_9 (sequence is synthesized)
gctccctctgcttggtgctcagcacacgcccccacagctgagggcctggccttggggtactgctggccaggggtaggatagtataggaagtagaaggggaaggagggttagatagagaat

SEQ ID NO: 756286 - DNA, 120 bp, Artificial Sequence
  ENSG00000213722_10 (sequence is synthesized)
gctgaataggcagtagttgggagagagcctcaatattgggggaggggagagtgtagggaaaaggatccactgggtgaatcctccctctcagaaccaataaaatagaattgaccttttaga

SEQ ID NO: 756287 - DNA, 120 bp, Artificial Sequence
  ENSG00000213722_11 (sequence is synthesized)
ataaaatacagaataaaaatcaagtgtttttacgcaatggggatttaaagtgtgggcgacatggaatgaggggtgggtcagtgatcttgagctcagggcagaagccaggaattaagaagg

SEQ ID NO: 756288 - DNA, 120 bp, Artificial Sequence
  ENSG00000213722_12 (sequence is synthesized)
gaaatgtttgtggtggggctgctatgtttcgtgccggtccgccggtccgccgttgcgctgttctgaggtctacgaagcgtttgcagccccgtcgccagggccggccagatctgggtgggc

SEQ ID NO: 756289 - DNA, 120 bp, Artificial Sequence
  ENSG00000213722_13 (sequence is synthesized)
acgttctcttcaccggtgaggctggggggaggcataggtcttggcacagggaagtagagtttgggagactcggccgtctggagccttgtttctaactcactcccgccctcaaacctccgc

SEQ ID NO: 756290 - DNA, 120 bp, Artificial Sequence
  ENSG00000213722_14 (sequence is synthesized)
ggcctcccggactcaggccgggagtttttcgtaggcctctccaaatggaccaatcaccgaggagctgagatcgtggcggacacgttccgggtgcggagcgggaccagcctagggagggag

SEQ ID NO: 756291 - DNA, 120 bp, Artificial Sequence
  ENSG00000213722_15 (sequence is synthesized)
ggggtgcaggtgggggtcggaagggcctgggcgcccgctgaggaaatgagaggcagagagcagcctatgtttgaagataccccatcacccctcccgcgcccctgaatacctcccttcgct

SEQ ID NO: 756292 - DNA, 120 bp, Artificial Sequence
  ENSG00000213722_16 (sequence is synthesized)
ccgacagggacctcacaagcccccaagcaggggcaacaggtgttttggagattagagaccctagccttgttcctcaggctcctcttaaagaatctgacccctgagggtgctgggtagagt

SEQ ID NO: 756293 - DNA, 120 bp, Artificial Sequence
  ENSG00000213722_17 (sequence is synthesized)
gtttatactaggtcgcgctaggggcagcgtgaccagccagggcggagagaggatgcttaactccttaggctcgaactcctcccttcctacccacctctctcccttctcgttcggacaggt

SEQ ID NO: 756294 - DNA, 120 bp, Artificial Sequence
  ENSG00000213741_0 (sequence is synthesized)
cttttacctcgttgcactgctgagagcaagatgggtcaccagcagctgtactggagccacccgcgaaaattcggccagggttctcgctcttgtcgtgtctgttcaaaccggcacggtctg

SEQ ID NO: 756295 - DNA, 120 bp, Artificial Sequence
  ENSG00000213741_1 (sequence is synthesized)
tatcggtttcattaagttggactaaatgctcttccttcagaggattatccggggcatctactcaatgaaaaaccatgataattctttgtatataaaataaacatttgaaaaaacccttca

SEQ ID NO: 756296 - DNA, 120 bp, Artificial Sequence
  ENSG00000213741_2 (sequence is synthesized)
gaggattccgagggtttcagctgttgacgctttacgcgttgcgggcgcacgtcgggccgctgtttcccgagggaaggcaggtgtgcctctgcgttacagggaaaggcacttagaactgtc

SEQ ID NO: 756297 - DNA, 120 bp, Artificial Sequence
  ENSG00000213741_3 (sequence is synthesized)
tgagtggccccgtaagccagcgagggcgcatttcccggcgcggacgggctgctggtggttttggtggctgctctccggaggcacacctggcacgtcgaaggggggctttatatggctgta

SEQ ID NO: 756298 - DNA, 120 bp, Artificial Sequence
  ENSG00000213741_4 (sequence is synthesized)
gagcaggaaggctcggaccggcggctgactcctggaagtctgctgacagaggctcaacacggctcggacgcccttgccccggttcctaagccccaaggcgggcaagtgccggctgatcac

SEQ ID NO: 756299 - DNA, 120 bp, Artificial Sequence
  ENSG00000213741_5 (sequence is synthesized)
ctccacctcacagtgtagcttcatctcgcccaacggccacaaccacgtcaagctggctttgaaacttcctccttcccgccacccggcgccgccatcggggtcctcgcgcacgcgggctgc

SEQ ID NO: 756300 - DNA, 120 bp, Artificial Sequence
  ENSG00000213741_6 (sequence is synthesized)
ccactgatctgcctgcctgttggactggtccgcgactcgggctgtcttagcaccgtgtctgtatgaagcccgcgggaaacggcttcccttctcccttagcagggccgggttctcgccgtg

SEQ ID NO: 756301 - DNA, 120 bp, Artificial Sequence
  ENSG00000213741_7 (sequence is synthesized)
gttgcgtaccgggactgaccacctggatccgggctcgcgcccgggaaaccggcagtcggcgggggcgcaacgtcttttcccccgagcgcgcagctggcagcggtggttgtttctgttcgg

SEQ ID NO: 756302 - DNA, 120 bp, Artificial Sequence
  ENSG00000213741_8 (sequence is synthesized)
tttcttgattgattgaactaggacggggcccggctggggagtgggaagcgcctggggagcaaatgttaagcaggcgctcacggtcggggtcgtggtcttgcctccttaaaatttgtgctc

SEQ ID NO: 756303 - DNA, 120 bp, Artificial Sequence
  ENSG00000213741_9 (sequence is synthesized)
taggcgcctctctcaccttaacctaatcctagccgtatattaaacattttattgtgtctgagttatacttccgtaatggtaaaatgacgttcagaaataccgatttttcaatacaactgt

SEQ ID NO: 756304 - DNA, 120 bp, Artificial Sequence
  ENSG00000213741_10 (sequence is synthesized)
gacaaaatgtgatttattctcaaatgagcgtccctatttacatgttgaacctgaagtgttgtcagttaattcctcattctttgaaacgtaatagttcctggaaaaaagtgattaagataa

SEQ ID NO: 756305 - DNA, 120 bp, Artificial Sequence
  ENSG00000213741_11 (sequence is synthesized)
aatcccagcactttgcggggctgaggcaggcaggtcgcttgagcccaggagttcaagaccagtttgggcaacatggcaaaacccagtctctaagaaaaatacaaaaaaattagccgggcg

SEQ ID NO: 756306 - DNA, 120 bp, Artificial Sequence
  ENSG00000213741_12 (sequence is synthesized)
acaaaaaaattagccgggcgtggtggcgcgtgtctgtagtcccagctattggggaggctgaggtggcaggatcacttgagcctggggaggtcgagaggctccggtgagctgtaatcgcgc

SEQ ID NO: 756307 - DNA, 120 bp, Artificial Sequence
  ENSG00000213741_13 (sequence is synthesized)
ctgtaatcgcgcactggcactccagcctgagtgaccccgtctcaaaaaaaaaaaagaaattactttccctccatttagtattcttatatgtacatctagtagagcattaaaacgcgactc

SEQ ID NO: 756308 - DNA, 120 bp, Artificial Sequence
  ENSG00000213741_14 (sequence is synthesized)
agcatttaagcaaaactttatggctaaagagaaaacggacactacaattttcagactattagactttataggagttacctgcttttgttctttgagagggtaataatgtagaaaagataa

SEQ ID NO: 756309 - DNA, 120 bp, Artificial Sequence
  ENSG00000213741_15 (sequence is synthesized)
gcaagatgggtcaccagcagctgtactggagccacccgcgaaaattcggccagggttctcgctcttggtgagaaatagtttgtgattttggggaagcgttgccgtggagcgctaggctgc

SEQ ID NO: 756310 - DNA, 120 bp, Artificial Sequence
  ENSG00000213741_16 (sequence is synthesized)
ttaaaatctcaagtagaggaggccacgggcggcacgagggagcacgccgactgggagtcgctggtgccgccattacaggcctgtactgtggcttgggagtcccgggatgcgggtagtagc

SEQ ID NO: 756311 - DNA, 120 bp, Artificial Sequence
  ENSG00000213741_17 (sequence is synthesized)
gtaatttctatgacctgcaaaaccgctgtctcttttcttacagtcgtgtctgttcaaaccggcacggtctgatccggaaatatggcctcaatatgtgccgccagtgtttccgtcagtacg

SEQ ID NO: 756312 - DNA, 120 bp, Artificial Sequence
  ENSG00000213741_18 (sequence is synthesized)
gggggttattttttccgcgaaagacaaacggacagatcttccctggagtggtaattctgagcattcgaccaagagcttttcctctttttttagttggtagctggtgacagtgttgatggt

SEQ ID NO: 756313 - DNA, 120 bp, Artificial Sequence
  ENSG00000213741_19 (sequence is synthesized)
gcaatcaaattaatagaatggagaaggtgaaggacttagtctttcctactcccttttttacctagatagcttagccagttttaggtgccgtgtattgtgtttggtgaaattcactttaga

SEQ ID NO: 756314 - DNA, 120 bp, Artificial Sequence
  ENSG00000213741_20 (sequence is synthesized)
gaagccactaaaattgttttacatttgtttcatttatcaatcttgtaagtacctattctcttttttttttttttagagatagggtctccctctgtcgcccaggttgaagtgcagtggcgt

SEQ ID NO: 756315 - DNA, 120 bp, Artificial Sequence
  ENSG00000213741_21 (sequence is synthesized)
tgttacggctcactgcagcctcgaactcctcctggtctcaggcgatcctcttgccttggcgtcccgagtagctgggactaaaggctcttgccaccacgcgcggctgtacctagatatttt

SEQ ID NO: 756316 - DNA, 120 bp, Artificial Sequence
  ENSG00000213741_22 (sequence is synthesized)
ctaaccaaatatatgtattaaccgctgaccccaagtttttttttttttttttttgagtcggagtcgcactcacccaacctggagtgcgatggcgtgatctccgctcagtgcaacctccgc

SEQ ID NO: 756317 - DNA, 120 bp, Artificial Sequence
  ENSG00000213741_23 (sequence is synthesized)
tctcctccatcatggccatcctgagaccgctcgcgaagcccaagatcatcaaaaagagcaccaagttcactgggaaccagtcagactgatatgtcaaaattaagggtaactggtggaaac

SEQ ID NO: 756318 - DNA, 120 bp, Artificial Sequence
  ENSG00000213741_24 (sequence is synthesized)
acagaggtattaacaacagggttcatagaaggtttgagggccagatctatgcccaacattggttatgggagaaacaaaaagacaaagcacatactgcccagtggcttctggaagttcctg

SEQ ID NO: 756319 - DNA, 120 bp, Artificial Sequence
  ENSG00000213741_25 (sequence is synthesized)
gtccacaacgttaaggagctggaagtactgctggtgagcaacaaatcttactgtgttgagatcactcatgatgtttcttccaagaactgcaaagccatcttggaaagagcagcccaggtg

SEQ ID NO: 756320 - DNA, 120 bp, Artificial Sequence
  ENSG00000213741_26 (sequence is synthesized)
gtcatcagagtcaccaatgccaatgccagcctgcacagtgcagaaagtgaatagacagtgaatgtgtttgttttattggggtttaaataaaaccaataaaactgtaaaaacaaaaacaac

SEQ ID NO: 756321 - DNA, 120 bp, Artificial Sequence
  ENSG00000213741_27 (sequence is synthesized)
aaaaaccagagaccctggcttttggacagttgttcgtgtggctaatgcccccaacagttttattttttaaaattttatttatgtattgtttttgagatgaagtcttcctctgactggagt

SEQ ID NO: 756322 - DNA, 66 bp, Artificial Sequence
  ENSG00000213741_28 (sequence is synthesized)
atgtattgtttttgagatgaagtcttcctctgactggagtgcagtgatgcaagctcagctctggct

SEQ ID NO: 756323 - DNA, 120 bp, Artificial Sequence
  ENSG00000213741_29 (sequence is synthesized)
tgctgataaagacatacctaagactgggaagaaaaataggtttattggactcacagttccatgtggctggggatgcctcacaattatggtagaaggcaaaaggcacttcttagatggcag

SEQ ID NO: 756324 - DNA, 120 bp, Artificial Sequence
  ENSG00000213741_30 (sequence is synthesized)
gatggcagcggcaagcaggaaatgaggaagacatgaaagcagatatcccttataaaaccatcagttctcgtgatacttactcactaccatgagaaagtatgggggaaaccgctcccatga

SEQ ID NO: 756325 - DNA, 87 bp, Artificial Sequence
  ENSG00000213741_31 (sequence is synthesized)
tcactaccatgagaaagtatgggggaaaccgctcccatgattcagttatctcccaccgggtccctctcacaacatgtggggattatg

SEQ ID NO: 756326 - DNA, 120 bp, Artificial Sequence
  ENSG00000213741_32 (sequence is synthesized)
ctggccttcaacagttttaaagcagcctgcttgcataacctctgctaggacatcgttcttaaaaactatctttaatggtaattggtgtattagggatttgggtttttaggtaggcagaga

SEQ ID NO: 756327 - DNA, 120 bp, Artificial Sequence
  ENSG00000213741_33 (sequence is synthesized)
aaaaacacttctagtggtatgattaagaagggtataataaagtgttttaatttcctcaatattgacaaaaattgaaaaaaagaggccaggcaaagtggctcatgcctgtaatcctagcct

SEQ ID NO: 756328 - DNA, 89 bp, Artificial Sequence
  ENSG00000213741_34 (sequence is synthesized)
ggatggtttgatcaggagatcccctatctaccaaaattaaacaaacaaaaaaacccaaaaacaattagccaggcgtggtggtgcatgtc

SEQ ID NO: 756329 - DNA, 120 bp, Artificial Sequence
  ENSG00000213741_35 (sequence is synthesized)
caggcgtggtggtgcatgtctgtagtcccagtttctcaggaggctgagatgagaggataacttgagcccaagaggtccaggtttcaatgagtcatgtttgtatcacttaaaaaaaaaaaa

SEQ ID NO: 756330 - DNA, 120 bp, Artificial Sequence
  ENSG00000213741_36 (sequence is synthesized)
aaggctgcactattagctgtttctcaggaaggttaatgtagaacataaaaggctcagtttgtagatagactgagtatatgtgtgtgtaggaatcaaggctatacagggtccaaaaattag

SEQ ID NO: 756331 - DNA, 120 bp, Artificial Sequence
  ENSG00000213741_37 (sequence is synthesized)
cctagattatgtgtgctagttccaggtatcttctatcttttagaattttaaaagaatagaggcagaaagtcacaagcttaatctagatgaggtaattatcatttaatgtcttgaacataa

SEQ ID NO: 756332 - DNA, 120 bp, Artificial Sequence
  ENSG00000213741_38 (sequence is synthesized)
agtaatttgctaaattagaatttattttaatttttttggacatggccttgctctatcacccagactggcattcagtggcacaaacatggcttattgcaacctcaacctcctgggctcaag

SEQ ID NO: 756333 - DNA, 120 bp, Artificial Sequence
  ENSG00000213741_39 (sequence is synthesized)
taatcctcctacctcagactccaagtagctaggaccataagtgtgcaccacaatgcccagctaatttttataaaatttttcgtagagatggaagtctcaccatgttgctcaggctggtct

SEQ ID NO: 756334 - DNA, 120 bp, Artificial Sequence
  ENSG00000213741_40 (sequence is synthesized)
ggaactcctgggctcatgcaatcctcccttcctagtctcccaaagtgttgggatcacaggggtgagccactgtgttcagccagaaaataatttagagaagccagaactggcttcctttgg

SEQ ID NO: 756335 - DNA, 120 bp, Artificial Sequence
  ENSG00000213741_41 (sequence is synthesized)
tgaaaattctttgagcagattccagactggaccttctgactgttataaataaatggtggattcccattatttgtttgtgggacagaaatattgaaggcctgtagaaccataatgccttcc

SEQ ID NO: 756336 - DNA, 120 bp, Artificial Sequence
  ENSG00000213741_42 (sequence is synthesized)
gaaggcctgtagaaccataatgccttccccttccttctgtcactcacccacttcatttctcctattaggccccttagaaagagatccctgatgccaggcacagtggcttacgcctgtaat

SEQ ID NO: 756337 - DNA, 65 bp, Artificial Sequence
  ENSG00000213741_43 (sequence is synthesized)
gagcttgcagtgagcggagatcataaagaaagagatccctgactgcctgtatagtttgagaacca

SEQ ID NO: 756338 - DNA, 120 bp, Artificial Sequence
  ENSG00000213741_44 (sequence is synthesized)
aagaaagagatccctgactgcctgtatagtttgagaaccactgatcctggggcaaggactcaaagtctctggctctagaagtggctggtgtggacctcaaatggaccctgttctaagagt

SEQ ID NO: 756339 - DNA, 120 bp, Artificial Sequence
  ENSG00000213741_45 (sequence is synthesized)
ccaaaggacacatttcaggaagctgtgctctaagcctaaatgaccaaccttgccttcactttggacatataccatctgatcatcttcctcgatttctgttctttgctcaggccttccaat

SEQ ID NO: 756340 - DNA, 120 bp, Artificial Sequence
  ENSG00000213741_46 (sequence is synthesized)
ttcttcgtgggtgacccctccttaccagtgctttgctctgagtcagctcaccagacccagcaggctgccactaaaggtttattgtaaaaccttgattaattcagataaccttgaaatact

SEQ ID NO: 756341 - DNA, 120 bp, Artificial Sequence
  ENSG00000213741_47 (sequence is synthesized)
tacataacatcactgacaaataggaaagggagtgcatttccattgatagagactatggctagagttactaaggtctggaaaaaaggcaggagagtgaagtatctggagacgtagggagag

SEQ ID NO: 756342 - DNA, 120 bp, Artificial Sequence
  ENSG00000213741_48 (sequence is synthesized)
attttaggacaggtccatattcgggagctgactttgtaacttcttactgtatatagtttaggttcgaatgggatcaccataggtgtgcttatgaccttaactgtaacagcgatgaaataa

SEQ ID NO: 756343 - DNA, 120 bp, Artificial Sequence
  ENSG00000213741_49 (sequence is synthesized)
aaaaaatggtttagtttaataataatgttgtaagagtgtaagtaccagtagcttcatgtacattctacaacccaataataattatgctgaccgtgtaaacagctccctcgtgtagactga

SEQ ID NO: 756344 - DNA, 120 bp, Artificial Sequence
  ENSG00000213741_50 (sequence is synthesized)
gactccattgccaaacatcaagcattaacagcaagtgctagaaaaatcaataagcctttacccagggaaccaaagatatgtgggttactaaaacccctaacagttgcccataaagagtaa

SEQ ID NO: 756345 - DNA, 120 bp, Artificial Sequence
  ENSG00000213741_51 (sequence is synthesized)
tatctcattattttaatgccaaaggaggtttttgtttcatttcctaaataataacaagatcgcatattaaaggacgagttgatggagtgataaacattcctggcagcacagacaaatcaa

SEQ ID NO: 756346 - DNA, 120 bp, Artificial Sequence
  ENSG00000213741_52 (sequence is synthesized)
caagagactaaaataaaaagaaatgaaacttgcctcttggcaatctgtttagttgaatttcatagactgagtctggttcaccctggattttcttttcacacacccacacgtcccatttca

SEQ ID NO: 756347 - DNA, 120 bp, Artificial Sequence
  ENSG00000213741_53 (sequence is synthesized)
tgatgacacttgtgcatctattcttcctttgatggtaattaactcttattaacattcatgaagactaagtgtgagcctctagcacagatgacatattcagacaaccacaaaaagataggg

SEQ ID NO: 756348 - DNA, 120 bp, Artificial Sequence
  ENSG00000213741_54 (sequence is synthesized)
tttataaaaactaatgcatatttggaactgaggccaaaagataaagatggtccactccaacagtgctgacatgcttgagaaatccaaggggtgttgacctaatgtaaaaaggatatagga

SEQ ID NO: 756349 - DNA, 120 bp, Artificial Sequence
  ENSG00000213741_55 (sequence is synthesized)
gacaaattttaccattgtgtaattttgtcttaggccagttctgtcaaatatagcttctgaaattctgaatagtcctctgcccagtgtggtttaattgttggtgttgtcaggactcttggg

SEQ ID NO: 756350 - DNA, 90 bp, Artificial Sequence
  ENSG00000213741_56 (sequence is synthesized)
tgccttaacttgcaccattacatccagctaatttttatatttttagtggagatggggttttgtcatgttggccagtctggtctcaaactc

SEQ ID NO: 756351 - DNA, 68 bp, Artificial Sequence
  ENSG00000213741_57 (sequence is synthesized)
tggtttattttttgtattttcttttggtaatctctttctcttgctttttctttctttctctttctttc

SEQ ID NO: 756352 - DNA, 90 bp, Artificial Sequence
  ENSG00000213741_58 (sequence is synthesized)
cctttggagacagggtctcactgtgtcatgcaggctggagtgaagtcgtgtgatcttggcttactgcagcctcaacctgctgggctcaat

SEQ ID NO: 756353 - DNA, 90 bp, Artificial Sequence
  ENSG00000213741_59 (sequence is synthesized)
cagggtctcactgtgtcatgcaggctggagtgaagtcgtgtgatcttggcttactgcagcctcaacctgctgggctcaatgcaatctcac

SEQ ID NO: 756354 - DNA, 120 bp, Artificial Sequence
  ENSG00000213741_60 (sequence is synthesized)
gtgcatcaccagcatggctaatttttgtatttttggtgagacaaacttttgccatgttgcccaggttggccttaaattcctgggctcaagagatccacctgccttggcctcccaaaatgc

SEQ ID NO: 756355 - DNA, 120 bp, Artificial Sequence
  ENSG00000213741_61 (sequence is synthesized)
gaaatctctttaaacacaattttctttaaagttttctacatggtcaggagacttcattatctgatttctgagtactatagcttctttattgccaagggagcaaagcatgatgacaatgac

SEQ ID NO: 756356 - DNA, 120 bp, Artificial Sequence
  ENSG00000213741_62 (sequence is synthesized)
cacttctcatttgtgtccttcattatagattttctaaatacacttgttccttgttaatgactttaatttgttccagaaaactccaccactgagttaaaagctattaagtgaaaaaattcc

SEQ ID NO: 756357 - DNA, 120 bp, Artificial Sequence
  ENSG00000213741_63 (sequence is synthesized)
attaagttttcggaaaaaattatttattctatgacactacagggtacttgagtaattttcacaaaaagaagaatatactagttaaactttgaaaaaaagctcataaaagtaatgtacaat

SEQ ID NO: 756358 - DNA, 120 bp, Artificial Sequence
  ENSG00000213741_64 (sequence is synthesized)
aatttgaaagtattctgacctcaaccggtatattgaaattcaattcttgcactaattagggttagagaagaccccacaagttaaagggcatgatcccaaacgaggttgtcctcacttttg

SEQ ID NO: 756359 - DNA, 120 bp, Artificial Sequence
  ENSG00000213741_65 (sequence is synthesized)
ttaaagggcatgatcccaaacgaggttgtcctcacttttgatgccagtcacactttgggagtccccagtcaattggctacaaatctaggggtttggctgggtgccgtggctcacacctgt

SEQ ID NO: 756360 - DNA, 120 bp, Artificial Sequence
  ENSG00000213741_66 (sequence is synthesized)
caataaaacgtaggggtttctgaagatttccttcaggtttgccgatttgctagaatgactcacattactcaggaagatgctgtatttacaattgttttattatgaaggatataagttagg

SEQ ID NO: 756361 - DNA, 120 bp, Artificial Sequence
  ENSG00000213741_67 (sequence is synthesized)
accagccaatggagagacacataaagtaaggtctaggagggcgctggatgcgaagctttcatgtcctgcattgtggaatcgggtgtgtcaccctctcaacacattgatatgttcaccaac

SEQ ID NO: 756362 - DNA, 120 bp, Artificial Sequence
  ENSG00000213741_68 (sequence is synthesized)
caggatgcttcaccatgcttcggtatctaaagtttttattggggtttcattatatatgtataattgattgaatcactggccaagtgattgaactaaatctccaccctaccccttactctg

SEQ ID NO: 756363 - DNA, 120 bp, Artificial Sequence
  ENSG00000213741_69 (sequence is synthesized)
ggtgtcaggctgactcaaagcaccagctatgtaatcacatggttgttctcgctggtaactggcctccatcttgggtcatctcatcttccagcccaaattcaggtgtgatccaagaggctc

SEQ ID NO: 756364 - DNA, 120 bp, Artificial Sequence
  ENSG00000213741_70 (sequence is synthesized)
atgaaaaacaaagatatccctgttacttagggaattctaattattttgagtctgcctcctaggaaccagagacaaaagccagtcaaattctttactataaaacagaaagcatgtgaaaac

SEQ ID NO: 756365 - DNA, 120 bp, Artificial Sequence
  ENSG00000213741_71 (sequence is synthesized)
atactgtgcacgctatgtcacacaacaaacacaagtctattgaacttgccaatggtggagtgttggttggtaggagaggtctgagggcatcattctttgcaaagtgtattctttctgtac

SEQ ID NO: 756366 - DNA, 120 bp, Artificial Sequence
  ENSG00000213741_72 (sequence is synthesized)
cattttcttgaccaattttcaccttttctggggattattcctgttttgcactcaaactactcttaaaaataaagttacagtgcaggaaaacttctttagggcacaataaaggctaaactc

SEQ ID NO: 756367 - DNA, 120 bp, Artificial Sequence
  ENSG00000213741_73 (sequence is synthesized)
gtggaaatggtactcattcatctgcacagaatgaagtctctcaagatgtttccttttattcctactcagttggtgcatgtacccaaaataaacattttgagttcatccaaacacaattca

SEQ ID NO: 756368 - DNA, 120 bp, Artificial Sequence
  ENSG00000213759_0 (sequence is synthesized)
gaaaagaatgatcgcattgcaccaggatgactctgaaatggacttcagttcttctgctgatacatctcagttgttactttagctctgggagttgtggaaaagtgctggtgtgggccgcag

SEQ ID NO: 756369 - DNA, 120 bp, Artificial Sequence
  ENSG00000213759_1 (sequence is synthesized)
aatacagccattggatgaatatgaagacaatcctgaaagagcttgttcagagaggtcatgaggtgactgtactggcatcttcagcttccattctttttgatcccaatgatgcatccactc

SEQ ID NO: 756370 - DNA, 120 bp, Artificial Sequence
  ENSG00000213759_2 (sequence is synthesized)
ttaaatttgaagtttatcctacatctttaactaaaactgaatttgagaatatcatcatgcaacaggttaagagatggtcagacattcgaaaagatagcttttggttatatttttcacaag

SEQ ID NO: 756371 - DNA, 120 bp, Artificial Sequence
  ENSG00000213759_3 (sequence is synthesized)
aacaagaaatcctgtgggaattatatgacatatttagaaacttctgtaaagatgtagtttcaaataagaaagttatgaaaaaactacaagagtcaagatttgacatcgtttttgcagatg

SEQ ID NO: 756372 - DNA, 120 bp, Artificial Sequence
  ENSG00000213759_4 (sequence is synthesized)
ctgtttttccctgtggtgagctgctggctgcgctacttaacatacggtttgtgtacagtctccgctttactcctggctacacaattgaaaggcacagtggaggactgattttccctcctt

SEQ ID NO: 756373 - DNA, 120 bp, Artificial Sequence
  ENSG00000213759_5 (sequence is synthesized)
cctacatacctattgttatgtcaaaattaagtgatcaaatgactttcatggagagggtaaaaaatatgatctatgtgctttattttgacttttggttccaaatgtctgatatgaagaagt

SEQ ID NO: 756374 - DNA, 120 bp, Artificial Sequence
  ENSG00000213759_6 (sequence is synthesized)
gggatcagttttacagtgaagttttaggaagacccactaccttatttgagacaatgggaaaagctgacatatggcttatgcgaaactcctggagttttcaatttcctcatccattcttac

SEQ ID NO: 756375 - DNA, 120 bp, Artificial Sequence
  ENSG00000213759_7 (sequence is synthesized)
caaacgttgattttgttggaggattccactgcaaacctgccaaacccctacctaaggaaatggaggagtttgtacagagctctggagaaaatggtgttgtggtgttttctctggggtcag

SEQ ID NO: 756376 - DNA, 120 bp, Artificial Sequence
  ENSG00000213759_8 (sequence is synthesized)
aaggttctgtggagatttgacgggaataaaccagatgccttaggtctcaatactcggctgtacaagtggataccccagaatgaccttctaggtcatccaaaaaccagagcttttataact

SEQ ID NO: 756377 - DNA, 120 bp, Artificial Sequence
  ENSG00000213759_9 (sequence is synthesized)
catggtggagccaatggcatctatgaggcaatctaccatgggatccctatggtgggcattccattgttttttgatcaacctgataacattgctcacatgaaggccaagggagcagctgtt

SEQ ID NO: 756378 - DNA, 120 bp, Artificial Sequence
  ENSG00000213759_10 (sequence is synthesized)
agattggacttcaacacaatgtcgagtacagacctgctgaatgcactgaagacagtaattaatgatcctttatataaagagaatattatgaaattatcaagaattcaacatgatcaacca

SEQ ID NO: 756379 - DNA, 120 bp, Artificial Sequence
  ENSG00000213759_11 (sequence is synthesized)
gtaaagcccctggatcgagcagtcttctggattgaatttgtcatgccccacaaaggagccaaacaccttcgagttgcagcccatgacctcacctggttccagtaccactctttggatgtg

SEQ ID NO: 756380 - DNA, 120 bp, Artificial Sequence
  ENSG00000213759_12 (sequence is synthesized)
attgggtttctgctggcctgtgtggcaactgtgatatttatcatcacaaagttttgtctgttttgtttctggaagtttgctagaaaagggaagaagggaaaaagagattagttatgtctg

SEQ ID NO: 756381 - DNA, 120 bp, Artificial Sequence
  ENSG00000213759_13 (sequence is synthesized)
acatttgaagctggaaaaccagatagataggacaacttcagtttattccagcaagaaagaaaagattgttatgcaagatttctttcttcctgtgacaaaaaaaaaaaaaaaaaaaaaatt

SEQ ID NO: 756382 - DNA, 120 bp, Artificial Sequence
  ENSG00000213759_14 (sequence is synthesized)
ttcaaatctaccttgtcaagtaaaaatttgtttttcagagatttaccacccaggtaatggttagaaatattttgtggcaatgaagaaaatactaggaaaattaaaaaataatataaagcc

SEQ ID NO: 756383 - DNA, 120 bp, Artificial Sequence
  ENSG00000213759_15 (sequence is synthesized)
atttgagctcatattgaaatttgttgcacttatattgagatttgttgtttgaattcacaagttacatgaaaaaatttactcagcttaactatatttcacacattttacataaacacaaga

SEQ ID NO: 756384 - DNA, 120 bp, Artificial Sequence
  ENSG00000213759_16 (sequence is synthesized)
acattaagaagtctactgacagtatcagtagtcacatcctcagaataatttggcttcattttgaacaggattctgttgttttaactgttgctaaagaaactattacatagttaaattgta

SEQ ID NO: 756385 - DNA, 120 bp, Artificial Sequence
  ENSG00000213759_17 (sequence is synthesized)
catcaatctttgagtagatttatttactaacatcccttgatctcattcctatgctttctacagttctaacattctataatttttgagttccactcatggaataagatattctctttactg

SEQ ID NO: 756386 - DNA, 120 bp, Artificial Sequence
  ENSG00000213759_18 (sequence is synthesized)
agaacaatgtttttcactaggtggtatttgtggacagcttctcttgtcaatagtgagcatgagtttcatcctttttataagagagtaatcttgaaagaatttaaatgatataaccaatct

SEQ ID NO: 756387 - DNA, 120 bp, Artificial Sequence
  ENSG00000213760_0 (sequence is synthesized)
cctgttgtaagcccgcagctttgggcctggtctctgctgctcccaggcggcccctttgggtactgcctgagcaagaagtgctggagaggaggaccagtcatcaataggaggatgagattg

SEQ ID NO: 756388 - DNA, 120 bp, Artificial Sequence
  ENSG00000213760_1 (sequence is synthesized)
ggagagacactcggtgcaggaggctgagtgagcaggggagcactaagacccaggggtagtggaggactgcagcaacgagctggaggaggagaagtaagcggtggggggtgggagccatct

SEQ ID NO: 756389 - DNA, 120 bp, Artificial Sequence
  ENSG00000213760_2 (sequence is synthesized)
ggtactttgacagcattcaaaacagcatcggccataacaacagaaatggccagtcagtcccaaggtatccagcagcttctgcaagctgagaagcgggcagctgagaaggtggcagatgcc

SEQ ID NO: 756390 - DNA, 120 bp, Artificial Sequence
  ENSG00000213760_3 (sequence is synthesized)
agaaagaggaaggcccggcgactgaagcaggcaaaggaggaggcacagatggaggtggagcaataccgcagagagcgagagcacgaattccagagcaagcagcaggcggccatgggctcc

SEQ ID NO: 756391 - DNA, 120 bp, Artificial Sequence
  ENSG00000213760_4 (sequence is synthesized)
caggggaacctgtctgctgaggtggagcaggctacaaggcgccaggtgcagggcatgcagagctcccagcagagaaaccgagagcgtgtcctggcccagcttcttggcatggtctgcgac

SEQ ID NO: 756392 - DNA, 120 bp, Artificial Sequence
  ENSG00000213760_5 (sequence is synthesized)
gtcaggccccaggtccaccccaactaccggatttctgcctagggccaccgtagggcctgactccttctgccagttccctccctcaaagaaatcctccaatcaaaatcacctcccaccata

SEQ ID NO: 756393 - DNA, 120 bp, Artificial Sequence
  ENSG00000213760_6 (sequence is synthesized)
atcctgggaggcaggatccaataattttcctgtgacacttataaatatcctgctcacatctgaatctccttgttgttctttaaccctcactgggactttgtaaacttccaagtcattctc

SEQ ID NO: 756394 - DNA, 120 bp, Artificial Sequence
  ENSG00000213760_7 (sequence is synthesized)
acctaaaccctctgtgaaatttgtaatatggggaagtaggaatgtggaaaacatcctgacttcagtgtctggccgatgtgggtccctctcttgaccctgtcacttgctggctgtgaaacc

SEQ ID NO: 756395 - DNA, 120 bp, Artificial Sequence
  ENSG00000213760_8 (sequence is synthesized)
aggacaagctacttaacttggtagcctcgatgtcctcctctgtgaaactgggatgataataatgcctaccttgtgagggttgcttcaatgattaggaatcattctgtaaagtctagcaca

SEQ ID NO: 756396 - DNA, 120 bp, Artificial Sequence
  ENSG00000213760_9 (sequence is synthesized)
gttccttgcatgttgtagcagtgattcagtaagtagcaaccctgtgatactattaccaccacctgctcactggtcaaaacctacacagctgtttcctcacgtccatcactggctctctaa

SEQ ID NO: 756397 - DNA, 120 bp, Artificial Sequence
  ENSG00000213760_10 (sequence is synthesized)
ttccacttgttcattctgtgaccctagttattttctgaaaaattggttcttctcttttcccagagaccttctgatctccaaaaagaggagatgactacatttagcccctctcttataatt

SEQ ID NO: 756398 - DNA, 120 bp, Artificial Sequence
  ENSG00000213760_11 (sequence is synthesized)
ccaggtagataactgcattttgtagcctctctttgtttttcttttgctgatctttgtctttattagattttcctcctttcctatttccccaaagacttatcagatgctcattgctttcta

SEQ ID NO: 756399 - DNA, 120 bp, Artificial Sequence
  ENSG00000213760_12 (sequence is synthesized)
agatctaaaatgatactgtgttccctcatatgcatgcccttcctttctatatccttgacaccttactttcccattgtaacaataaaaaaagtatcaataaaataattattggcaaataaa

SEQ ID NO: 756400 - DNA, 120 bp, Artificial Sequence
  ENSG00000213760_13 (sequence is synthesized)
ggcgggcagcagcatgcagtgccgtgtccccatggcggtcctggtgggcagggtcagccccgagccgaagcagcaggcacagggcaggggcatcgtggcgggcacaggcccggtgcagtg

SEQ ID NO: 756401 - DNA, 120 bp, Artificial Sequence
  ENSG00000213760_14 (sequence is synthesized)
gggaccctggcagggaccacaacattggtgaaactttgtgatgatatgtaggagagtctgggagttttgaaggccacatagagcttgtgggcggaatgccacagtctgtgtaaagtataa

SEQ ID NO: 756402 - DNA, 120 bp, Artificial Sequence
  ENSG00000213760_15 (sequence is synthesized)
catctatgtggagtatgattaacatttgtggtggagggtagagttttatggtcatggatggtgaggtggtggggatattacggtctgttttaggatgaagttgcatgttaggtctaaggg

SEQ ID NO: 756403 - DNA, 120 bp, Artificial Sequence
  ENSG00000213762_0 (sequence is synthesized)
gcggtggacatcttgtcggctcttaggtggaaccatcggagcagaagctcggggttgctgggcggttccgaggtgacggaagcgggagggtgcgggagaagtcgctgttcgctctgcgga

SEQ ID NO: 756404 - DNA, 120 bp, Artificial Sequence
  ENSG00000213762_1 (sequence is synthesized)
gtggctcgccagcgaagaccccgcctgcgcccccggggacggacgaccgcggtgccagggtcccgcgacctgggaccccctcgcggctccgggtggtctacgaactgtgatggcggcggc

SEQ ID NO: 756405 - DNA, 120 bp, Artificial Sequence
  ENSG00000213762_2 (sequence is synthesized)
cgcggtgatgggcccggcgcagatcctctgtggttgttgaattgtaacaagagagagaactctggctgcctgagagggcatgactctagtcacagcaggaggggcttggacaggccctgg

SEQ ID NO: 756406 - DNA, 120 bp, Artificial Sequence
  ENSG00000213762_3 (sequence is synthesized)
ttgttggcatgaagtgaaggatgaagagtcatcttctgaacagagcatttctatagcagtgtcacatgttaatacttccaaggcaggtttgcccgcacagacggctctcccttgtgacat

SEQ ID NO: 756407 - DNA, 120 bp, Artificial Sequence
  ENSG00000213762_4 (sequence is synthesized)
atgtggccccatcttgaaagatattttgcacctggatgaacaccagggtacacaccatggactgaaacttcacacatgtggggcatgtgggagacaattctggttcagtgcaaaccttca

SEQ ID NO: 756408 - DNA, 120 bp, Artificial Sequence
  ENSG00000213762_5 (sequence is synthesized)
tcagtaccagaagtgttacagtatagagcaacccttaagaagggataaaagtgaggcctcaattgtgaagaactgcacagttagcaaagaacctcatccgtcagagaagccctttacgtg

SEQ ID NO: 756409 - DNA, 120 bp, Artificial Sequence
  ENSG00000213762_6 (sequence is synthesized)
taaggaggagcagaaaaacttccaggctactttgggtggctgccaacaaaaggccatccacagtaagaggaagacacacaggagcactgagagtggggatgcatttcatggtgaacaaat

SEQ ID NO: 756410 - DNA, 120 bp, Artificial Sequence
  ENSG00000213762_7 (sequence is synthesized)
gcattacaagtgcagtgaatgtgggaaagctttcagccgcaaagacacacttgtccagcaccagagaattcatagtggagagaagccttatgagtgcagcgaatgtgggaaagccttcag

SEQ ID NO: 756411 - DNA, 120 bp, Artificial Sequence
  ENSG00000213762_8 (sequence is synthesized)
ccgcaaagctacacttgtccagcatcagagaatccatactggagaaaggccttatgaatgcagcgaatgtggaaaaaccttcagtcgaaaagacaaccttactcagcacaagagaatcca

SEQ ID NO: 756412 - DNA, 120 bp, Artificial Sequence
  ENSG00000213762_9 (sequence is synthesized)
cactggagaaatgccttataagtgcaatgaatgtgggaaatattttagccatcactccaatctaattgtacaccagagagttcacaatggagcaaggccttataagtgcagtgattgtgg

SEQ ID NO: 756413 - DNA, 120 bp, Artificial Sequence
  ENSG00000213762_10 (sequence is synthesized)
gaaagtcttcagacacaaatctacacttgttcagcatgagagtattcacactggagaaaatccttatgattgcagtgattgtgggaaatcctttggccacaaatacaccctcattaaaca

SEQ ID NO: 756414 - DNA, 120 bp, Artificial Sequence
  ENSG00000213762_11 (sequence is synthesized)
tcagcgaattcacactgagtcaaagccgtttgagtgcattgaatgcgggaaattctttagtcgaagttctgactatattgcacaccagagggttcacactggtgaaaggccttttgtgtg

SEQ ID NO: 756415 - DNA, 120 bp, Artificial Sequence
  ENSG00000213762_12 (sequence is synthesized)
cagtaaatgtgggaaagactttatcagaacctcccaccttgttcgacaccaaagagttcacactggagaaaggccatatgagtgcagtgaatgtgggaaggcctacagcttaagctccca

SEQ ID NO: 756416 - DNA, 120 bp, Artificial Sequence
  ENSG00000213762_13 (sequence is synthesized)
cctcaatcggcaccagaaagttcacactgcaggcaggctttaggagtgctttgaatacaacaggactcatcaatcagatgttgaatttcatgtatctgaacattgacacaaaggagatac

SEQ ID NO: 756417 - DNA, 120 bp, Artificial Sequence
  ENSG00000213762_14 (sequence is synthesized)
cttatggtgccaggtacgtgggaaccttctagggatatgttgcactttctgacttgctcaggttttttgccagagttatgtcactgtcaatccatgtggccgaaaccatcttaactctac

SEQ ID NO: 756418 - DNA, 120 bp, Artificial Sequence
  ENSG00000213762_15 (sequence is synthesized)
cagctaagataccccagcattggggaaggcagggttttgtattgtccagtccctggagaaaatcatgaaatgcctgagttcattgggggtcctcattcccttctgtatgacaggtatagg

SEQ ID NO: 756419 - DNA, 120 bp, Artificial Sequence
  ENSG00000213762_16 (sequence is synthesized)
tatggatatgacccatttttagccaagagggtctgagctgtatctgctggtggcttatacaaaaagtttactttcttcatggatattcttggtctcacatacttgtaatcaagtttttcc

SEQ ID NO: 756420 - DNA, 120 bp, Artificial Sequence
  ENSG00000213762_17 (sequence is synthesized)
agcctccaagtcacctggcctgggaaagtacttgcctcatgttgctctggtttgtgataataaaggctttacagtttaagccacatttaatcttggggcttcttcttatggtctggggtg

SEQ ID NO: 756421 - DNA, 120 bp, Artificial Sequence
  ENSG00000213762_18 (sequence is synthesized)
gattgaaaacaggctctgccaaactgaagacagcctttgtgcggtgcctccaactttgcctcaaatgggacagtgggttgagggagaacagttcttagtccagttttgatgttaacttcc

SEQ ID NO: 756422 - DNA, 120 bp, Artificial Sequence
  ENSG00000213762_19 (sequence is synthesized)
atagctgacaaagcttgttaagtaagaattaagatcttgtgtagacctgatttgtctggattttagagttatttgagagcccatatttcaccttgaggagggtgctgctgctgtgacagc

SEQ ID NO: 756423 - DNA, 120 bp, Artificial Sequence
  ENSG00000213762_20 (sequence is synthesized)
agtgttttgaaacagcatggattgggtgtcttgtttgcagcatgtgtcccatgttccccaacactgttgagggaaagctgttcctcaggacctgctgagtggccatattccctgaaggcc

SEQ ID NO: 756424 - DNA, 120 bp, Artificial Sequence
  ENSG00000213762_21 (sequence is synthesized)
tgaatctgtttcacaggccactgttggtaagatctaaagcatccagtagggaaacaaaattgataaatattgagtgtgagtaattgggattggggagattgtggcaaactagaggggaag

SEQ ID NO: 756425 - DNA, 120 bp, Artificial Sequence
  ENSG00000213762_22 (sequence is synthesized)
tgcccattgtaaaaacacatccacagacagtccaggcactaaggctgaatgggatcagggtatccagaaatctcaggatctccagggccatgttactgttaggtcaaggtcactggtgca

SEQ ID NO: 756426 - DNA, 120 bp, Artificial Sequence
  ENSG00000213762_23 (sequence is synthesized)
gcaacgaatgtagtttttctagattcctctccctccctgggctctttacctaatgtctttgcggcacaggcggtaaccctgggagtaaagaggtgtggtccaaggaagtagcttttgtga

SEQ ID NO: 756427 - DNA, 120 bp, Artificial Sequence
  ENSG00000213762_24 (sequence is synthesized)
ccagctggagtttctggtgactcttttggcaatggtcctcattgtttgccagtttttcttactactgaggaagagattgtcttcccaagatatttggagtgataagagtcaccatagtga

SEQ ID NO: 756428 - DNA, 120 bp, Artificial Sequence
  ENSG00000213762_25 (sequence is synthesized)
ggtagagtcactcttagtgatgtccagttgtccagtttccaatagaagtgggagatccagatttttaaatgggataactttttataggttcactgaggtgtaatcaacatgcaatatatt

SEQ ID NO: 756429 - DNA, 83 bp, Artificial Sequence
  ENSG00000213762_26 (sequence is synthesized)
actatcaccctatcagtggtattggacatatctgttacccccaaagttaacctgaggcccttaacctttctctcagtgctcgc

SEQ ID NO: 756430 - DNA, 120 bp, Artificial Sequence
  ENSG00000213762_27 (sequence is synthesized)
aagttaacctgaggcccttaacctttctctcagtgctcgccttcccccagaatccctaggcaaccactgagtagttttcactgtaggtaaatttgtcttttctagaattttatgtaagtc

SEQ ID NO: 756431 - DNA, 120 bp, Artificial Sequence
  ENSG00000213762_28 (sequence is synthesized)
tgcctataaagtgttaattttgcatgctgtctttcatgcaacataatttgaaatttgtccatggtatgtatgaacagtccattttaaaattactgagtcatattctgtatggatatacca

SEQ ID NO: 756432 - DNA, 120 bp, Artificial Sequence
  ENSG00000213762_29 (sequence is synthesized)
cagtttatccatttatcttaattgatgtctgtactccacccccatttttaaatattaaaaagctgctgcaaatattgatgcatgagtctttatgtggacacttagctgagaacattttta

SEQ ID NO: 756433 - DNA, 120 bp, Artificial Sequence
  ENSG00000213762_30 (sequence is synthesized)
agcagaggttttgaaggtgtgaccatatatcttactaattatagtaaaatatattggaaaagagatacatacagggaagaactgtgaaacagaaaagacctaagatttgatgatttggga

SEQ ID NO: 756434 - DNA, 120 bp, Artificial Sequence
  ENSG00000213762_31 (sequence is synthesized)
aattctcagcccatcttaattggaaaaaaaaaacaaaccattgaaattaagagattcattgttaggaaagatagatgttttagagagagagatgttttagagagatagccaaggatgttt

SEQ ID NO: 756435 - DNA, 120 bp, Artificial Sequence
  ENSG00000213762_32 (sequence is synthesized)
gctgataccgggatcaaaacatacatcagaacactgtcacacaaaaagctctttgaagagattaaatgtgacttgtagatcccctcaatacaaacaatttataagaagtttaaactatca

SEQ ID NO: 756436 - DNA, 120 bp, Artificial Sequence
  ENSG00000213762_33 (sequence is synthesized)
ctcatctcagcaaaagccaaaaatatagataggggattccctaggaggaataatctgcataaacctcttttctaatgttgtgaatttcagtgatgtacaggagactcacaaaattcttga

SEQ ID NO: 756437 - DNA, 120 bp, Artificial Sequence
  ENSG00000213762_34 (sequence is synthesized)
aaattttataccagtggaaatgctcaccttgggtctaaagggaccttgaaagtatgaagttaaagggtgtaggcatgtaaagtgtgaagttaaaggttgtaatattctatacatgggact

SEQ ID NO: 756438 - DNA, 120 bp, Artificial Sequence
  ENSG00000213762_35 (sequence is synthesized)
ggctgcggaaacaggtgcaagcccttgctacctttcatgagaaaggaaggatgactcagagcagaggagagtccagtgggcagagtcctgaaccatgtgatattcccatgtcttgactcc

SEQ ID NO: 756439 - DNA, 120 bp, Artificial Sequence
  ENSG00000213762_36 (sequence is synthesized)
cagtggcatttgccaaactagatttcagattttcttgggattggtggttccattttttttgttttccccccttccatttcctccccttttgaaacaatgcatatacatataactattatc

SEQ ID NO: 756440 - DNA, 120 bp, Artificial Sequence
  ENSG00000213762_37 (sequence is synthesized)
ctaggtctttcccaaccttttgtttgggagcagataactagttttctagttttacagatccaaatgagacaggaatagcactgggtggtcacaggaggatggaaaatctcaacaccctgg

SEQ ID NO: 756441 - DNA, 120 bp, Artificial Sequence
  ENSG00000213762_38 (sequence is synthesized)
ttttggtgcagctgaaaaaaaaaaagaaaaacccaaacaacagctaaaacgggaactaggcaaagaaaccgtgggataacagaaaacccaaaacaaaagagaaaactgccagaaccccag

SEQ ID NO: 756442 - DNA, 120 bp, Artificial Sequence
  ENSG00000213762_39 (sequence is synthesized)
tcagggtgacatgtctgtaactcttccaggcaaacccaaataagggaggaggggtggtaatcaggggtccctgaaatcccctcttttcccagaatacctaatgattacccctattaaagg

SEQ ID NO: 756443 - DNA, 120 bp, Artificial Sequence
  ENSG00000213762_40 (sequence is synthesized)
aacacccatacaattagaaacccaaactttgttttgcatgacttgctctcaggggcactcccacacttctctcttgtgtgtacttttgcttcacaataaaagctgcttgcctttgcttca

SEQ ID NO: 756444 - DNA, 120 bp, Artificial Sequence
  ENSG00000213780_0 (sequence is synthesized)
actcctccccttacctcccttctcttctgaattctccattctgggctcttgcctgtgaaatctttctttgctttccccatcttttcctcgcattttttcaccatctttccctcaatctcc

SEQ ID NO: 756445 - DNA, 120 bp, Artificial Sequence
  ENSG00000213780_1 (sequence is synthesized)
aggagccaatgcgagactttggctccgattaagcgacggcccgagactcggggtgcgcgaggaggatcgacagagtggtgatggagagcaccccttcaaggggactgaaccgagtacacc

SEQ ID NO: 756446 - DNA, 120 bp, Artificial Sequence
  ENSG00000213780_2 (sequence is synthesized)
tacaatgcaggaatctgcaggaattcttagggggcctgagccctggggtattggaccgattgtatgggcaccctgccacatgtctggctgtcttcagggagctcccatccttggctaaga

SEQ ID NO: 756447 - DNA, 120 bp, Artificial Sequence
  ENSG00000213780_3 (sequence is synthesized)
actgggtgatgcggatgctctttctggagcagcctttgccacaggctgctgtagctctgtgggtaaagaaggaattcagcaaggctcaggaggaaagtacagggctgctgagcggcctcc

SEQ ID NO: 756448 - DNA, 120 bp, Artificial Sequence
  ENSG00000213780_4 (sequence is synthesized)
ggatctggcacacacagctgctcccaggcgggctccagggcctcatcctcaaccccattttccgccagaacctccgcattgcccttctgggtggggggaaggcctggtctgatgacacaa

SEQ ID NO: 756449 - DNA, 120 bp, Artificial Sequence
  ENSG00000213780_5 (sequence is synthesized)
gtcagctgggaccagacaagcatgcccgggacgttccctcccttgacaagtacgccgaggagcgatgggaggtggtcttgcacttcatggtgggctcccccagtgcagctgtcagccagg

SEQ ID NO: 756450 - DNA, 120 bp, Artificial Sequence
  ENSG00000213780_6 (sequence is synthesized)
acttggctcagctcctcagccaggctgggctcatgaagagtactgaacctggagagccgccctgcattacttccgctggcttccagttcctgttgctggacaccccggctcagctctggt

SEQ ID NO: 756451 - DNA, 120 bp, Artificial Sequence
  ENSG00000213780_7 (sequence is synthesized)
agccggggcatggacctggtagagattctctccttcctcttccagctcagcttctctactctgggcaaggattactctgtggaaggtatgagtgattctctgttgaacttcctgcaacat

SEQ ID NO: 756452 - DNA, 120 bp, Artificial Sequence
  ENSG00000213780_8 (sequence is synthesized)
ctgcgtgagtttgggcttgttttccagaggaagaggaaatctcggcgttactaccccacacgcctggccatcaatctctcatcaggtgtctctggagctgggggcactgtgcatcagcca

SEQ ID NO: 756453 - DNA, 120 bp, Artificial Sequence
  ENSG00000213780_9 (sequence is synthesized)
ggtttcattgtcgtggaaaccaattaccgactgtatgcctacacggagtcggagctgcagattgccctcattgccctcttctctgagatgctctatcggttccccaacatggtggtggcg

SEQ ID NO: 756454 - DNA, 120 bp, Artificial Sequence
  ENSG00000213780_10 (sequence is synthesized)
caggtgacccgggagagtgtgcagcaggcaatcgccagtggcatcacagcccagcagataatccatttcctaaggacaagagcccacccagtgatgctcaaacagacacctgtgctgccc

SEQ ID NO: 756455 - DNA, 120 bp, Artificial Sequence
  ENSG00000213780_11 (sequence is synthesized)
cccaccatcaccgaccagatccggctctgggagctggaaagggacagactccggttcactgagggtgtcctgtataaccagttcctgtcgcaagtggactttgagctgctgctggcccac

SEQ ID NO: 756456 - DNA, 120 bp, Artificial Sequence
  ENSG00000213780_12 (sequence is synthesized)
gcgcgggagctgggcgtgctcgtgttcgagaactcggccaagcggctcatggtggtgaccccggccgggcacagcgacgtcaagcgcttttggaagcggcagaaacatagctcctgagag

SEQ ID NO: 756457 - DNA, 120 bp, Artificial Sequence
  ENSG00000213780_13 (sequence is synthesized)
cgcgggacttggacacggacctcggcgggcgggactgggcggggcggggcatcagaactcaggtgttttttatttacgcgtcagggcttttcttgtttaataaagttatgatagctagca

SEQ ID NO: 756458 - DNA, 120 bp, Artificial Sequence
  ENSG00000213780_14 (sequence is synthesized)
cagtagcaggaagcagttgccagaactgaatacttgggtctctcgggggagagaagttgggggttgaggttctgcatcttgggagggatctgatatttcaggcaggaagatgtaaggcag

SEQ ID NO: 756459 - DNA, 120 bp, Artificial Sequence
  ENSG00000213780_15 (sequence is synthesized)
gggaatgccagtttatgttcgtgtttacctggcagtctacagagctctctgacatttctcatgacacttgaaagaagggcttgagggagtctgggtgtgggggtggcctcctcatcctct

SEQ ID NO: 756460 - DNA, 120 bp, Artificial Sequence
  ENSG00000213780_16 (sequence is synthesized)
atgatggaaaagaaaaaggggcatccaaatctggggaagaaacagagggccgggttgtctggggcagtattctgagtccctacagtcaacccttgctccttgcagacacctgtgctgccc

SEQ ID NO: 756461 - DNA, 120 bp, Artificial Sequence
  ENSG00000213782_0 (sequence is synthesized)
acttccggagacctcacacaagatggcggcacccgaggaacacgattctccgaccgaagcgtcccagccgattgtggaagaggaggaaactaaaacatttaaagacctgggtgtgacaga

SEQ ID NO: 756462 - DNA, 120 bp, Artificial Sequence
  ENSG00000213782_1 (sequence is synthesized)
tgtgttgtgtgaagcttgtgaccagttgggatggacaaaacccaccaagatccagattgaagctattcctttggccttacaaggtcgtgatatcattgggcttgcagaaactggctctgg

SEQ ID NO: 756463 - DNA, 120 bp, Artificial Sequence
  ENSG00000213782_2 (sequence is synthesized)
aaagacaggcgcctttgctttgcccattctaaacgcactgctggagaccccgcagcgtttgtttgccctagttcttaccccgactcgggagctggcctttcagatctcagagcagtttga

SEQ ID NO: 756464 - DNA, 120 bp, Artificial Sequence
  ENSG00000213782_3 (sequence is synthesized)
agccctggggtcctctattggagtgcagagtgctgtgattgtaggtggaattgattcaatgtctcaatctttggcccttgcaaaaaaaccacatataataatagcaactcctggtcgact

SEQ ID NO: 756465 - DNA, 120 bp, Artificial Sequence
  ENSG00000213782_4 (sequence is synthesized)
gattgaccacttggaaaatacgaaaggtttcaacttgagagctctcaaatacttggtcatggatgaagccgaccgaatactgaatatggattttgagacagaggttgacaagatcctcaa

SEQ ID NO: 756466 - DNA, 120 bp, Artificial Sequence
  ENSG00000213782_5 (sequence is synthesized)
agtgattcctcgagatcggaaaacattcctcttctctgccaccatgaccaagaaggttcaaaaacttcagcgagcagctctgaagaatcctgtgaaatgtgccgtttcctctaaatacca

SEQ ID NO: 756467 - DNA, 120 bp, Artificial Sequence
  ENSG00000213782_6 (sequence is synthesized)
gacagttgaaaaattacagcaatattatatttttattccctctaaattcaaggatacctacctggtttatattctaaatgaattggctggaaactcctttatgatattctgcagcacctg

SEQ ID NO: 756468 - DNA, 120 bp, Artificial Sequence
  ENSG00000213782_7 (sequence is synthesized)
cagctttgctactgcgaaatcttggcttcactgccatccccctccatggacaaatgagtcagagtaagcgcctaggatcccttaataagtttaaggccaaggcccgttccattcttctag

SEQ ID NO: 756469 - DNA, 120 bp, Artificial Sequence
  ENSG00000213782_8 (sequence is synthesized)
caactgacgttgccagccgaggtttggacatacctcatgtagatgtggttgtcaactttgacattcctacccattccaaggattacatccatcgagtaggtcgaacagctagagctgggc

SEQ ID NO: 756470 - DNA, 120 bp, Artificial Sequence
  ENSG00000213782_9 (sequence is synthesized)
gctccggaaaggctattacttttgtcacacagtatgatgtggaactcttccagcgcatagaacacttaattgggaagaaactaccaggttttccaacacaggatgatgaggttatgatgc

SEQ ID NO: 756471 - DNA, 120 bp, Artificial Sequence
  ENSG00000213782_10 (sequence is synthesized)
tgacagaacgcgtcgctgaagcccaaaggtttgcccgaatggagttaagggagcatggagaaaagaagaaacgctcgcgagaggatgctggagataatgatgacacagagggtgctattg

SEQ ID NO: 756472 - DNA, 120 bp, Artificial Sequence
  ENSG00000213782_11 (sequence is synthesized)
gtgtcaggaacaaggtggctggaggaaaaatgaagaagcggaaaggccgttaatcacttttatgaaggctcgagttctgctgttctgtaaaagagaattggagaatgaaacctgctccaa

SEQ ID NO: 756473 - DNA, 120 bp, Artificial Sequence
  ENSG00000213782_12 (sequence is synthesized)
cagagatcatgagactgaaattggtcagaattgtgtccagaatgtgctcagctaattcagtattcttccccattctgggttggagtttactgcagagtaattcttacagtgctgatgtca

SEQ ID NO: 756474 - DNA, 120 bp, Artificial Sequence
  ENSG00000213782_13 (sequence is synthesized)
agactgttactgttcttcgactttgattccttgctcatgacatgagtagggtgtgctcttctgtcacttcacacagaccttttgccttttttagctgcaagtcaaggactaggttgatga

SEQ ID NO: 756475 - DNA, 120 bp, Artificial Sequence
  ENSG00000213782_14 (sequence is synthesized)
tgcccatgacctgtaattgtaaagaagcttggacatctgcaaatgatatttaaaccatcttggcttgtgctttattcaaactaatgtgaaacaataaatttaaatattatttttaaaaga

SEQ ID NO: 756476 - DNA, 120 bp, Artificial Sequence
  ENSG00000213782_15 (sequence is synthesized)
cttagttacagcagttattttgttcctggttaattaagtatcaaaaaacaagaaagcccttggttagttcattcacatcatcttgcacaggcctgtgtatgtaacattagtacatatgaa

SEQ ID NO: 756477 - DNA, 120 bp, Artificial Sequence
  ENSG00000213782_16 (sequence is synthesized)
agaggtagccaaggagagttattagatgctcatagaaggggctggtgcgccacatactgatcttgtcactgtcatttcttgagaatgacagcttgtagtttttttgaggcggagtctcgc

SEQ ID NO: 756478 - DNA, 78 bp, Artificial Sequence
  ENSG00000213782_17 (sequence is synthesized)
gagaatgacagcttgtagtttttttgaggcggagtctcgctctgagttttctgaggtggagtctgcgctctgcctcct

SEQ ID NO: 756479 - DNA, 120 bp, Artificial Sequence
  ENSG00000213782_18 (sequence is synthesized)
catatttctgttttgacctgtgaagccccattcaaaacttagggggaaaaacctttaaaaaatttatgtctgtttgttctcgtgtttgtctattttgtgttttgtattccaaaacatagg

SEQ ID NO: 756480 - DNA, 120 bp, Artificial Sequence
  ENSG00000213782_19 (sequence is synthesized)
tattacttttgtcacacagtaagtaaatcagctttagggccgagcaatgtagagaaaagagcagaactttcaagccactggctgagaacctgacactaccatttactacactaatcactt

SEQ ID NO: 756481 - DNA, 120 bp, Artificial Sequence
  ENSG00000213782_20 (sequence is synthesized)
tcatactgaaaaccaggatgaaggagttgaaagatgggaataataatacctatctagcagggttttggtgaaaattggagattatatatgtaaaagatctagtatagtatttggcatgta

SEQ ID NO: 756482 - DNA, 120 bp, Artificial Sequence
  ENSG00000213782_21 (sequence is synthesized)
aaaaattacagcaatattatatttttattccctctaaattcaaggtaaaatgtttactttgatcattcctgcctctccctcttcttttcaccaaagcatctgaaaatgtgtcaactcttg

SEQ ID NO: 756483 - DNA, 120 bp, Artificial Sequence
  ENSG00000213782_22 (sequence is synthesized)
attaggtaagagctgtaatgcagattggcatcctgtctgtttgctttagagtgcatatcgtgcttatattatcaccgataagccagacatgccaggaattcacaacacattaaatcacaa

SEQ ID NO: 756484 - DNA, 120 bp, Artificial Sequence
  ENSG00000213782_23 (sequence is synthesized)
tactgaggtcatgatgtaatcatataattccttcccatccccatccttgaggtaatttttcctttgtctgcttattatgtggcttttatttaggatgaagcccctggttttgtgctttga

SEQ ID NO: 756485 - DNA, 120 bp, Artificial Sequence
  ENSG00000213782_24 (sequence is synthesized)
agatgataatgctggttaaggaatgcaaagctggcagctggaggtctggataattgaaaagcgactataggcttagtctttaccttatgtatatgccaggtctccaatcctgtctcccag

SEQ ID NO: 756486 - DNA, 120 bp, Artificial Sequence
  ENSG00000213782_25 (sequence is synthesized)
acttccggagacctcacacaagatggcggcacccgaggaacacgattctccgaccgaagcgtcccagccgattgtggaagaggaggaaactaaaacatttaaagacctggtgagaatgga

SEQ ID NO: 756487 - DNA, 120 bp, Artificial Sequence
  ENSG00000213782_26 (sequence is synthesized)
agccctggggtcctctattggagtgcagagtggtaagtgtctgagagggaagggatcctaggttgccatcacaagtgaagaatgagtgtggaggaaggagaatggaggaaagtattgcta

SEQ ID NO: 756488 - DNA, 120 bp, Artificial Sequence
  ENSG00000213782_27 (sequence is synthesized)
gaaatctggcattggctttaaaagatgttcagtggactgtggaaaaaattaaggatctcgtctctatgttctttttttctctgtagctgtgattgtaggtggaattgattcaatgtctca

SEQ ID NO: 756489 - DNA, 120 bp, Artificial Sequence
  ENSG00000213782_28 (sequence is synthesized)
atctttggcccttgcaaaaaaaccacatataataataggtgagtaactgacaaaggtaaaagacactggcagtgatgaattggagaaaatctaccagtgttggatagaaagactttgaga

SEQ ID NO: 756490 - DNA, 120 bp, Artificial Sequence
  ENSG00000213782_29 (sequence is synthesized)
aagactttgagaaacagattttgtaaccctgttaaattttttaatttcttaagttaaatttggtggagagctgtggggtggggcagataactttatttgtttatttgttttgtttttttt

SEQ ID NO: 756491 - DNA, 120 bp, Artificial Sequence
  ENSG00000213782_30 (sequence is synthesized)
gaaatgtcactgtttctcctcaacctttcttggtagcaactcctggtcgactgattgaccacttggaaaatacgaaaggtttcaacttgagagctctcaaatacttggtcatggatgaag

SEQ ID NO: 756492 - DNA, 120 bp, Artificial Sequence
  ENSG00000213782_31 (sequence is synthesized)
gtttccataattgttgtaattttatgggctttgaagtgttgctctagatacttactttctcctttcagggtagcgagaggctcccattagaatatttcatatgtacctgtctggtttgca

SEQ ID NO: 756493 - DNA, 120 bp, Artificial Sequence
  ENSG00000213782_32 (sequence is synthesized)
agctgttgagttgatttattcagccctagtggtaataatgactctggcctctaaaaacattaataaattatttcccagttacctttctatcgtgtcaaactacccttattttgtatcata

SEQ ID NO: 756494 - DNA, 120 bp, Artificial Sequence
  ENSG00000213782_33 (sequence is synthesized)
gcatacttcaagtgaaataaggatatggtcactaaaggtacaaagtttgggtaatggtatttgaaaatgtcattctccaattttactgagcttactttctgtcttaatagctgaaagggt

SEQ ID NO: 756495 - DNA, 120 bp, Artificial Sequence
  ENSG00000213782_34 (sequence is synthesized)
ttgttctctgccacagatgctgactttaaggaagccctaggttaaagttaaagtatattaacgacaatcttggtagactttatgcatcagtgggcgcacacttagggaaggatgcctgga

SEQ ID NO: 756496 - DNA, 120 bp, Artificial Sequence
  ENSG00000213782_35 (sequence is synthesized)
acacatatgtgtgtcttgaggagttgagaattcttgctgtgagccatgtttatcagatttgtaaaacagtggttaaagcagattgatggctactggaactgaaactaatgggatgaactt

SEQ ID NO: 756497 - DNA, 120 bp, Artificial Sequence
  ENSG00000213782_36 (sequence is synthesized)
aatattgatcatgatattccctgtttaaaatcctttaattctttcttataggaaaacatcaaaactctagcctcattcttccctctttctcccttaacacttctgtgttccagccacatt

SEQ ID NO: 756498 - DNA, 72 bp, Artificial Sequence
  ENSG00000213782_37 (sequence is synthesized)
ccctctttctcccttaacacttctgtgttccagccacattgtacttctcagcctaactatgcatgctatgtt

SEQ ID NO: 756499 - DNA, 80 bp, Artificial Sequence
  ENSG00000213782_38 (sequence is synthesized)
gctcggcctcccaaactgctggggttacaggtcgtgatatcattgggcttgcagaaactggctctggaaagacaggcgcc

SEQ ID NO: 756500 - DNA, 120 bp, Artificial Sequence
  ENSG00000213793_0 (sequence is synthesized)
gcccaggccccgcccacctcgttggctccacggaggcctggcttctgtcctgtgcttgtagattcgcccggaccaggaagcggatcgcgtggactggaagtcacactgcggcgagtctca

SEQ ID NO: 756501 - DNA, 68 bp, Artificial Sequence
  ENSG00000213793_1 (sequence is synthesized)
cggatcgcgtggactggaagtcacactgcggcgagtctcactctgtcctccaggctgtgagtgcactg

SEQ ID NO: 756502 - DNA, 120 bp, Artificial Sequence
  ENSG00000213793_2 (sequence is synthesized)
cctcccaagtagctgagattacagactctgggtatgtgaagaagaaactcagaagaggaagaggaaagcaaaggagtcagggatggctcttcctcagggtctattgacattcagggatgt

SEQ ID NO: 756503 - DNA, 89 bp, Artificial Sequence
  ENSG00000213793_3 (sequence is synthesized)
gatatctcttccaaatgcatgatggagttctcatcaatagggaaaggcaatacagaagtgatccacacagggacattgcaaagactggc

SEQ ID NO: 756504 - DNA, 120 bp, Artificial Sequence
  ENSG00000213793_4 (sequence is synthesized)
atacagaagtgatccacacagggacattgcaaagactggcaagtcatcacattggagaatgttgcttccaggaaattgagaaagacattcatgactttgtgtttcagtggcaagaagatg

SEQ ID NO: 756505 - DNA, 120 bp, Artificial Sequence
  ENSG00000213793_5 (sequence is synthesized)
aaacaaatggccatgaagcacccatgacagaaatcaaagagttgacgggtagtacagaccaatatgatcaaaggcatgctggaaacaagcctattaaatatcagcttggatcaagctttc

SEQ ID NO: 756506 - DNA, 120 bp, Artificial Sequence
  ENSG00000213793_6 (sequence is synthesized)
attcacatctgcctgaactgcacatatttcagcccgaagggaaaattggtaatcaacttgagaagtctatcaacaatgcttcctcagtttcaacatcccaaagaatttcttgtaggccca

SEQ ID NO: 756507 - DNA, 120 bp, Artificial Sequence
  ENSG00000213793_7 (sequence is synthesized)
aaacccatatttctaataactatgggaataatttcttccattcttcattactcacacagaaacaggatgtacacaggaaagaaaaatctttccaatttaatgagagtggcaaatccttta

SEQ ID NO: 756508 - DNA, 120 bp, Artificial Sequence
  ENSG00000213793_8 (sequence is synthesized)
attgtagctcactctttaaaaaacatcagataattcatctaggagagaaacaatataaatgtgatgtatgtggcaaagactttaatcagaagcgataccttgcacaccatcgtagatgtc

SEQ ID NO: 756509 - DNA, 120 bp, Artificial Sequence
  ENSG00000213793_9 (sequence is synthesized)
acactggtgagaaaccttacatgtgtaataaatgtggcaaggtttttaataaaaaagcataccttgcacgtcattatagacgtcatactggagaaaaaccttacaagtgtaatgagtgtg

SEQ ID NO: 756510 - DNA, 62 bp, Artificial Sequence
  ENSG00000213793_10 (sequence is synthesized)
ttacaagtgtaatgagtgtggcaagacgttcagtgacaagtcagccctcttagttcacaaga

SEQ ID NO: 756511 - DNA, 120 bp, Artificial Sequence
  ENSG00000213793_11 (sequence is synthesized)
tagagttcatactggagagaaaccttaccaatgtaaagaatgtgacaaagttttcagtcgcaaatcataccttgaaagacataggagaattcacactggtgagaaaccatacaaatgtaa

SEQ ID NO: 756512 - DNA, 85 bp, Artificial Sequence
  ENSG00000213793_12 (sequence is synthesized)
aaatgtaaggtttgtgacaaggctttcagacatgattcacacctggcacagcatattgtaattcacactaacgtttggtgaaaat

SEQ ID NO: 756513 - DNA, 67 bp, Artificial Sequence
  ENSG00000213793_13 (sequence is synthesized)
aagtgtaatgagtgtggcaaaacgtttggtgaaaattcagccctcttagttcacaagaaatcaacaa

SEQ ID NO: 756514 - DNA, 120 bp, Artificial Sequence
  ENSG00000213793_14 (sequence is synthesized)
atactggagagaaaccttacaaatgtaaagaatgtgacaaagttttcagtcgcaaatcacaccttgaaagacataggagaattcacactggtgagaaaccatacaaatgtaaggtttgtg

SEQ ID NO: 756515 - DNA, 76 bp, Artificial Sequence
  ENSG00000213793_15 (sequence is synthesized)
ttcaaaattcatctcttgtaatgcataaggtcattcatactggagagaaacgttacaagtgtaatgaatgtggcaa

SEQ ID NO: 756516 - DNA, 120 bp, Artificial Sequence
  ENSG00000213793_16 (sequence is synthesized)
tgtaatgcataaggtcattcatactggagagaaacgttacaagtgtaatgaatgtggcaaaagttttaatcacaaatcaagccttgcatatcatcatagacttcatactggagagaaacc

SEQ ID NO: 756517 - DNA, 89 bp, Artificial Sequence
  ENSG00000213793_17 (sequence is synthesized)
agggtttgcgacaaggcttttgggcgtgattcataccttgcacaacatcagagagttcacactggagagaaaccatacaaatgtaaggt

SEQ ID NO: 756518 - DNA, 120 bp, Artificial Sequence
  ENSG00000213793_18 (sequence is synthesized)
caaatgtaaggtttgtgacaaggctttcaagtgttactcacacctggcacaacatactagaattcatactggagagaaacctttcaagtgtagtgagtgtggcaaagcctttcgtgcaca

SEQ ID NO: 756519 - DNA, 120 bp, Artificial Sequence
  ENSG00000213793_19 (sequence is synthesized)
gtcaacacttattcaccatcaggcaatccatggtgtagggaaacttgactaatgtaatgattgtcaccaagtcttcagtaacgctacaaccattgcaaatcattgaagaatccataatga

SEQ ID NO: 756520 - DNA, 120 bp, Artificial Sequence
  ENSG00000213793_20 (sequence is synthesized)
atagagatcttacaagtgtagtaaatgtggcaaatttttcagacatcgttcatacgctgtagttcatgggtgaactcatactggagagaaaccttacaaatgtcatgattgaggcaaggt

SEQ ID NO: 756521 - DNA, 120 bp, Artificial Sequence
  ENSG00000213793_21 (sequence is synthesized)
cttcagtcaagcttcatcctatgcaaaacaggagaattcatacaggagagaaacctcacaagtgtgatgattgtgagcaaagcctttacttcacgttcacacctcattagacatcaaaga

SEQ ID NO: 756522 - DNA, 120 bp, Artificial Sequence
  ENSG00000213793_22 (sequence is synthesized)
atccatactggacagaaatcttacaaatgtcatcagtgtggcaaggtcttcagtctgagatcactccttgcagaatatcagaaaatttatttttgagataatagttccgaatgcaatgag

SEQ ID NO: 756523 - DNA, 120 bp, Artificial Sequence
  ENSG00000213793_23 (sequence is synthesized)
tatagcaaaccatcaagcattaattgacactagagtcagttcagcattgacttgagtttgagttgacttaacgttgagttcaagcattaattgacattaaagtgtttatgttaagaggat

SEQ ID NO: 756524 - DNA, 81 bp, Artificial Sequence
  ENSG00000213793_24 (sequence is synthesized)
caagcattaattgacattaaagtgtttatgttaagaggattaggctgagtgcggtggctcacacctgtaatgctagcactg

SEQ ID NO: 756525 - DNA, 120 bp, Artificial Sequence
  ENSG00000213793_25 (sequence is synthesized)
agcctgttttttgtttctttaacaaaaacagatacagattttttttttttttaatcacctgggtgcaggcaagctgagtccgaaaagagagtcagggaagggagatggggtggggccgtt

SEQ ID NO: 756526 - DNA, 67 bp, Artificial Sequence
  ENSG00000213793_26 (sequence is synthesized)
cagttacaatcaaagggggttgttctctggctggcagaggtgggggtcacaaggtgctcagtggggg

SEQ ID NO: 756527 - DNA, 120 bp, Artificial Sequence
  ENSG00000213793_27 (sequence is synthesized)
aatgtcatcagttaaggcagggaccagccaatttcacttcttttgtggtggaatgtcaactgataggcatttttatgggtaccgtgttgaatctaaatcacattgggttatataattact

SEQ ID NO: 756528 - DNA, 120 bp, Artificial Sequence
  ENSG00000213793_28 (sequence is synthesized)
gggttatataattacttaacaatattaatttttccaaactatcaatatgggttgtatctctatgtatgtttttaatcattttgatcaacatttatagatttcaaggtacaaacttctcag

SEQ ID NO: 756529 - DNA, 120 bp, Artificial Sequence
  ENSG00000213793_29 (sequence is synthesized)
ctttgtacgtttattcctaagtatttcttactttaagttctctagcaaatggaagtgtttttaaattttcttttaaaattgtttattgttaatgtgtggaaattcaagtaatttttggtg

SEQ ID NO: 756530 - DNA, 83 bp, Artificial Sequence
  ENSG00000213793_30 (sequence is synthesized)
gtttattgttaatgtgtggaaattcaagtaatttttggtgccgatattgtattgtgcaaatccactgaatttatttagtagtt

SEQ ID NO: 756531 - DNA, 120 bp, Artificial Sequence
  ENSG00000213793_31 (sequence is synthesized)
tagaagaacattgtgaaactccctgctctgttcttttccactctgaacaccggtgcatgcagcccctgtcacatacccactgcttgctcaaatcaatcacgaccgtttcatgtgaaatcc

SEQ ID NO: 756532 - DNA, 80 bp, Artificial Sequence
  ENSG00000213793_32 (sequence is synthesized)
tcacatacccactgcttgctcaaatcaatcacgaccgtttcatgtgaaatcttaggggagctcagattttaaggcagtag

SEQ ID NO: 756533 - DNA, 120 bp, Artificial Sequence
  ENSG00000213793_33 (sequence is synthesized)
gcccacctcgttggctccacggaggcctggcttctgtcctgtgcttgtagattcgcccggaccaggaagcggatcgcgtggactggaagtcacactgcggcgggagggggtatgttgact

SEQ ID NO: 756534 - DNA, 120 bp, Artificial Sequence
  ENSG00000213793_34 (sequence is synthesized)
ctgagcaataaacaacatatttctaacattcatgattgacttctaaagactctgggtatgtgaagaagaaactcagaagaggaagaggaaagcaaaggagtcagggatggctcttcctca

SEQ ID NO: 756535 - DNA, 89 bp, Artificial Sequence
  ENSG00000213793_35 (sequence is synthesized)
ttagctgggcatggtggtgtgtgcctgcaatccctgctactcaggagactgaggcagaagaatgacttgaaatccaccattgcactcca

SEQ ID NO: 756536 - DNA, 120 bp, Artificial Sequence
  ENSG00000213799_0 (sequence is synthesized)
aaacccggaagcggatcgcatggagtgatggtcccaccgcagcggattgacttctaaagactcttggtacgtgaggaagaaacccggaagaggaagaggaaagcaaaggagtcagggatg

SEQ ID NO: 756537 - DNA, 89 bp, Artificial Sequence
  ENSG00000213799_1 (sequence is synthesized)
gacattcagggatgtggccatagaattctctcaggaagagtggaagtgcctggaccctgctcagaggactctatacagggacgtgatga

SEQ ID NO: 756538 - DNA, 120 bp, Artificial Sequence
  ENSG00000213799_2 (sequence is synthesized)
aggaacctggtctccctggatatctcttccaaatgcatgatgaaggagttctcatcaacagcacaaggcaatacagaagtgatccacacagggacattgcaaagacatgaacgtcatcac

SEQ ID NO: 756539 - DNA, 120 bp, Artificial Sequence
  ENSG00000213799_3 (sequence is synthesized)
attggagatttttgcttccaggaaatggagaaagatattcatgattttgagtttcagtggaaagaagatgaaagaaatagccatgaagcacccatgacagaaatcaaacagttgacgggt

SEQ ID NO: 756540 - DNA, 120 bp, Artificial Sequence
  ENSG00000213799_4 (sequence is synthesized)
agtacaaaccgacatgatcaaaggcatgctggaaacaagcctattaaagatcagcttggatcaagctttcattcgcatctgcctgaactccacatgtttcagaccgaagggaaaattggt

SEQ ID NO: 756541 - DNA, 120 bp, Artificial Sequence
  ENSG00000213799_5 (sequence is synthesized)
aatcaagttgagaagtctatcaacagtgcttcgttggtttcaacatcccaaagaatttcttgtaggcctaaaacccacatttctaagaactatgggaataatttcctgaattcttcatta

SEQ ID NO: 756542 - DNA, 120 bp, Artificial Sequence
  ENSG00000213799_6 (sequence is synthesized)
ctcacacaaaagcaggaagtacacatgagagaaaaatctttccaatgtaatgagagtggcaaagcctttaattatagctcagtcttaaggaaacatcagataatccatttaggagcgaaa

SEQ ID NO: 756543 - DNA, 120 bp, Artificial Sequence
  ENSG00000213799_7 (sequence is synthesized)
caatataaatgtgatgtgtgtggcaaggtctttaatcaaaagcgatatcttgcatgtcatcgtagatgtcacactggcaagaaaccttacaagtgtaatgattgtggcaagaccttcagt

SEQ ID NO: 756544 - DNA, 120 bp, Artificial Sequence
  ENSG00000213799_8 (sequence is synthesized)
caggagttaacccttacatgccatcatagacttcatactggagagaaacattacaagtgcagtgagtgtggcaagaccttcagtcgaaattcagcccttgtaattcataaggcaattcat

SEQ ID NO: 756545 - DNA, 120 bp, Artificial Sequence
  ENSG00000213799_9 (sequence is synthesized)
cttgtaattcataaggcaattcatactggagagaaatcttacaagtgtaatgaatgtggcaagaccttcagtcaaacgtcataccttgtgtaccatcgtagacttcatactggagagaaa

SEQ ID NO: 756546 - DNA, 80 bp, Artificial Sequence
  ENSG00000213799_10 (sequence is synthesized)
ccttacaaatgtgaagaatgtgacaaagctttcagtttcaaatcaaaccttgaaagacataggacagcaggacctttagt

SEQ ID NO: 756547 - DNA, 86 bp, Artificial Sequence
  ENSG00000213799_11 (sequence is synthesized)
cttacactaagtgtaatgattgtggcaagaccttcagtcagatgtcatcccttgtataccatcgtagacttcatactggagagaaa

SEQ ID NO: 756548 - DNA, 79 bp, Artificial Sequence
  ENSG00000213799_12 (sequence is synthesized)
cttgaaagacatttgtggcaagaccttcagtcagacatcatcccttgtataccatcgtagacttcatactggagagaaa

SEQ ID NO: 756549 - DNA, 120 bp, Artificial Sequence
  ENSG00000213799_13 (sequence is synthesized)
gaaaccttacaaatgtgaagaatgtgatgaagctttcagtttcaaatcaaaccttgaaagacataggataattcatactggagagaaactttacaagtgtaatgaatgtggcaagacctt

SEQ ID NO: 756550 - DNA, 120 bp, Artificial Sequence
  ENSG00000213799_14 (sequence is synthesized)
taattcatactggagagaaactttacaagtgtaatgaatgtggcaagacctttagtcggaagtcatcccttacacgccattgtagacttcatactggagagaaaccttaccagtgtaatg

SEQ ID NO: 756551 - DNA, 120 bp, Artificial Sequence
  ENSG00000213799_15 (sequence is synthesized)
gggcagtcagcacttatttaccatcaagcaatccatggtatagggaaactttacaaatgtaatgattgtcaccaagtctttagtaatgctacaaccattgcaaatcattggagaatccat

SEQ ID NO: 756552 - DNA, 120 bp, Artificial Sequence
  ENSG00000213799_16 (sequence is synthesized)
gaatccataatgaagagagatcgtacaagtgtaatagatgtggcaaatttttcagacatcgttcataccttgcagttcattggcgaactcatagtggagagaaaccttacaaatgtgaag

SEQ ID NO: 756553 - DNA, 89 bp, Artificial Sequence
  ENSG00000213799_17 (sequence is synthesized)
aaaccttcaaagacatggtgtaatgaatgtggcaagacctttagtcggaagtcataccttacatgccatcgtagacttcatactggaga

SEQ ID NO: 756554 - DNA, 68 bp, Artificial Sequence
  ENSG00000213799_18 (sequence is synthesized)
gtgtaatgagtgtggcaagaccttcggtcgaaattcagcccttataattcacccttcagtcagaagtc

SEQ ID NO: 756555 - DNA, 67 bp, Artificial Sequence
  ENSG00000213799_19 (sequence is synthesized)
ccttacaagtgtaatgagtgtggcaaggccttcagtcagaagtcatcccttacatgccatcttcagt

SEQ ID NO: 756556 - DNA, 75 bp, Artificial Sequence
  ENSG00000213799_20 (sequence is synthesized)
aaaaacacaggagagcttttgggcgtgattcacacctggcacaacatactagaattcacactggagagaaacctt

SEQ ID NO: 756557 - DNA, 69 bp, Artificial Sequence
  ENSG00000213799_21 (sequence is synthesized)
aacttccgtcacaattcagcccttgtaattcataaggcaattcatagtggagagaaaccttacaagtgt

SEQ ID NO: 756558 - DNA, 120 bp, Artificial Sequence
  ENSG00000213799_22 (sequence is synthesized)
cacaattcagcccttgaaattcataaggcaattcatactggagaaaaaccttacaagtgtagtgaatgtggcaaggtttttaatagaaaagcaaacctttcacgtcatcatagacttcat

SEQ ID NO: 756559 - DNA, 78 bp, Artificial Sequence
  ENSG00000213799_23 (sequence is synthesized)
ctttcacgtaaatgtggtaaggtttttaatcaacaagcacaccttgcatgtcatcatagaattcatactggagagaaa

SEQ ID NO: 756560 - DNA, 64 bp, Artificial Sequence
  ENSG00000213799_24 (sequence is synthesized)
ccttacaagtgtaatgagtgtggcaaaaccttccgtcacaattcagtccttgtaattcataaga

SEQ ID NO: 756561 - DNA, 120 bp, Artificial Sequence
  ENSG00000213799_25 (sequence is synthesized)
catagaattcatactggaaagaaacattagaaatatgaagaatgtgacaaagtttacagttgtaaatcaagtcttgaaagacaggagaattcatactggagagaaagcttacaaatgtaa

SEQ ID NO: 756562 - DNA, 120 bp, Artificial Sequence
  ENSG00000213799_26 (sequence is synthesized)
ggcagtcaacacttattcaccatcaggcaatccatggtatagggaaactttactaatgtaatgattatcacaaagtcttcagtaacactacaaccgtttcaaatcattggagaatccata

SEQ ID NO: 756563 - DNA, 120 bp, Artificial Sequence
  ENSG00000213799_27 (sequence is synthesized)
atgagagattttgaaagtgtaataaatgtggcaaatttttcagacattgttcataccttgcagttcatcggtgaactcatgctggagagaaaccttacaaatgtcatgattgtggcaagg

SEQ ID NO: 756564 - DNA, 120 bp, Artificial Sequence
  ENSG00000213799_28 (sequence is synthesized)
tcttcagtctagcttcatcttatgcaaaacaggagacttcatacaggagacaaacttcacaagtatgatgattgcagcaaagcctttacttcacgttcacacctaattagacatcagaga

SEQ ID NO: 756565 - DNA, 120 bp, Artificial Sequence
  ENSG00000213799_29 (sequence is synthesized)
atccatactggacagaaatcttacaaatgtcatcagtgtggcaaggtcttcagtctgagatcaccccttaaggaacatcagaaaattcatttttgagatgattgttccaaatgcaatgag

SEQ ID NO: 756566 - DNA, 120 bp, Artificial Sequence
  ENSG00000213799_30 (sequence is synthesized)
tatagcaaaccatcaagcattaattggcattagagtcaattcagcattgacttgagtttgaattgacttaacattgagttcaagcattaattgacattaaagtgtttatgttaagaagat

SEQ ID NO: 756567 - DNA, 77 bp, Artificial Sequence
  ENSG00000213799_31 (sequence is synthesized)
ttgggaggccaagaccaagacatgagtcacttttcccaccctgtattttgtttctttaataaaaactgttacgggtt

SEQ ID NO: 756568 - DNA, 120 bp, Artificial Sequence
  ENSG00000213799_32 (sequence is synthesized)
accctgtattttgtttctttaataaaaactgttacgggtttttatgggtatctgttgaatctaaatcacatttgtttgtataatcattcaacaatattaagacttccaatccatcaatat

SEQ ID NO: 756569 - DNA, 120 bp, Artificial Sequence
  ENSG00000213799_33 (sequence is synthesized)
gggttgtatgtctatttagtttttttgatcaatgtagatttcaaggtacaagcttctcacctccttaattcagtttatttgtaagtattaagtttcatagcaaattgaagtgtgttcata

SEQ ID NO: 756570 - DNA, 120 bp, Artificial Sequence
  ENSG00000213799_34 (sequence is synthesized)
agtttctttaaacattatttattgttaatgtaaggaaattcaactaattttgggtgctgattttgtattctgcaaatacattgagtgggtttattagtatcagtaaaatcttggttgatt

SEQ ID NO: 756571 - DNA, 82 bp, Artificial Sequence
  ENSG00000213799_35 (sequence is synthesized)
ttttctttccttttctttttttttgagaaggagtctcactcttgtcacttggactggagtacaatggcacgatcttggctca

SEQ ID NO: 756572 - DNA, 89 bp, Artificial Sequence
  ENSG00000213799_36 (sequence is synthesized)
gatcttggctcactgcagcctctgcctttcgggtttaagtgattctcctgcctactaactgagattacaggtgcctgccaccatgtccg

SEQ ID NO: 756573 - DNA, 71 bp, Artificial Sequence
  ENSG00000213799_37 (sequence is synthesized)
ggtgatccgcccccatcagcattttctatatagaatgtcgtatcatctacaaggaaataattttttttttt

SEQ ID NO: 756574 - DNA, 120 bp, Artificial Sequence
  ENSG00000213799_38 (sequence is synthesized)
agaatgtcgtatcatctacaaggaaataatttttttttttgagacaatgtctctctctgtcgccaggctagagtgccgtggaatgatctttgctcactgcaacctctgtctcccacgtcc

SEQ ID NO: 756575 - DNA, 87 bp, Artificial Sequence
  ENSG00000213799_39 (sequence is synthesized)
gctgggactacaggcgcatgtcaccacacctagctaatttatttattttttttacagatggtgggccaacatggtgagtaccttgaa

SEQ ID NO: 756576 - DNA, 120 bp, Artificial Sequence
  ENSG00000213799_40 (sequence is synthesized)
ggtgggccaacatggtgagtaccttgaagagaacttgaaagaatatgttagatcgcctaacctcattatccgcccacttcggacttgcaaattgctgggattatgggtgtgagccatgag

SEQ ID NO: 756577 - DNA, 120 bp, Artificial Sequence
  ENSG00000213799_41 (sequence is synthesized)
cccggccccaacaaatgtaattttacttctgtctttctgatttggatgagttttatttcttttgctatttaattgctctgcctaggacagccagtatttattgaatatcaggggtgagag

SEQ ID NO: 756578 - DNA, 120 bp, Artificial Sequence
  ENSG00000213799_42 (sequence is synthesized)
cattcttgcatcatgtgatatcctacaggaaaaccattccattttccttcattggttatttcagctgtggtcatttcatggatgatttttatatttttgaggtaaaactctacctatatt

SEQ ID NO: 756579 - DNA, 120 bp, Artificial Sequence
  ENSG00000213799_43 (sequence is synthesized)
gtttaggatttttacgaagaatgaatattgagttctgtgaaatgctttttctctatctattgagataatgtgttttttatctgtcattctgtgcaagtgtgtatcccattgatttgagta

SEQ ID NO: 756580 - DNA, 120 bp, Artificial Sequence
  ENSG00000213799_44 (sequence is synthesized)
tgttgaaccatccttgcatcccatgaataggtagcacttggatgtttacaatccctttttatatcctcttgaatacagtttgctagtataagggtcttcaagaagttcatggaaaaatac

SEQ ID NO: 756581 - DNA, 120 bp, Artificial Sequence
  ENSG00000213799_45 (sequence is synthesized)
atattatgaaaaatttgtgcataaatttcacactttttgtaccaaaataaaccagtataaacttgttataacgtctgaacaggctctagtttgaggcactcagaaggataagacatcagt

SEQ ID NO: 756582 - DNA, 120 bp, Artificial Sequence
  ENSG00000213799_46 (sequence is synthesized)
ttgaaaagaacctctatcacagcaatacaaattctgttaaaacaagaagaaacatcaaatttacgatgagaccagacgcagtggctcaggcctgtaatcccagcggttttagaggcccag

SEQ ID NO: 756583 - DNA, 120 bp, Artificial Sequence
  ENSG00000213799_47 (sequence is synthesized)
gcaggtgggtgacgtgagcctagggattcaagaccagcctgggcgacataggggacctcttctctgctaaaagtaaaaaaagtcagccaggtgtggtggtgcactgctgtggtcccagct

SEQ ID NO: 756584 - DNA, 120 bp, Artificial Sequence
  ENSG00000213799_48 (sequence is synthesized)
aggtgtggtggtgcactgctgtggtcccagctactctgggcactgaagtgggaggatcagttgaagcagggattttgaggctgaagtgagccctgatctcaccactgcactccagcctgg

SEQ ID NO: 756585 - DNA, 120 bp, Artificial Sequence
  ENSG00000213799_49 (sequence is synthesized)
aataaatgagaggcataattcctcctttgagaataaaggaaaagatttcccttccttttgtctcttttctcaggacgtttatttagaaaatttgtaaatgaggccgggcgtggtggctca

SEQ ID NO: 756586 - DNA, 120 bp, Artificial Sequence
  ENSG00000213799_50 (sequence is synthesized)
aaacccggaagcggatcgcatggagtgatggtcccaccgcagcgccatgcaggcgtctttcctgttcctgggccgaggttgctcctgcctcaaggcgttcatgtgggctgtccctctgct

SEQ ID NO: 756587 - DNA, 120 bp, Artificial Sequence
  ENSG00000213809_0 (sequence is synthesized)
actttcaattctagatcaggaactgaggacatatctaaattttctagttttatagaaggcttttatccacaagaatcaagatcttccctctctgagcaggaatcctttgtgcattgaaga

SEQ ID NO: 756588 - DNA, 120 bp, Artificial Sequence
  ENSG00000213809_1 (sequence is synthesized)
ctttagattcctctctgcggtagacgtgcacttataagtatttgatggggtggattcgtggtcggaggtctcgacacagctgggagatgagtgaatttcataattataacttggatctga

SEQ ID NO: 756589 - DNA, 120 bp, Artificial Sequence
  ENSG00000213809_2 (sequence is synthesized)
agaagagtgatttttcaacacgatggcaaaagcaaagatgtccagtagtcaaaagcaaatgtagagaaaatgcatctccattttttttctgctgcttcatcgctgtagccatgggaatcc

SEQ ID NO: 756590 - DNA, 120 bp, Artificial Sequence
  ENSG00000213809_3 (sequence is synthesized)
gtttcattattatggtaacaatatggagtgctgtattcctaaactcattattcaaccaagaagttcaaattcccttgaccgaaagttactgtggcccatgtcctaaaaactggatatgtt

SEQ ID NO: 756591 - DNA, 120 bp, Artificial Sequence
  ENSG00000213809_4 (sequence is synthesized)
acaaaaataactgctaccaattttttgatgagagtaaaaactggtatgagagccaggcttcttgtatgtctcaaaatgccagccttctgaaagtatacagcaaagaggaccaggatttac

SEQ ID NO: 756592 - DNA, 120 bp, Artificial Sequence
  ENSG00000213809_5 (sequence is synthesized)
ttaaactggtgaagtcatatcattggatgggactagtacacattccaacaaatggatcttggcagtgggaagatggctccattctctcacccaacctactaacaataattgaaatgcaga

SEQ ID NO: 756593 - DNA, 120 bp, Artificial Sequence
  ENSG00000213809_6 (sequence is synthesized)
ctatgcctcgagctttaaaggctatatagaaaactgttcaactccaaatacgtacatctgcatgcaaaggactgtgtaaagatgatcaaccatctcaataaaagccaggaacagagaaga

SEQ ID NO: 756594 - DNA, 120 bp, Artificial Sequence
  ENSG00000213809_7 (sequence is synthesized)
gattacaccagcggtaacactgccaactgagactaaaggaaacaaacaaaaacaggacaaaatgaccaaagactgtcagatttcttagactccacaggaccaaaccatagaacaatttca

SEQ ID NO: 756595 - DNA, 120 bp, Artificial Sequence
  ENSG00000213809_8 (sequence is synthesized)
ctgcaaacatgcatgattctccaagacaaaagaagagagatcctaaaggcaattcagatatccccaaggctgcctctcccaccacaagcccagagtggatgggctgggggaggggtgctg

SEQ ID NO: 756596 - DNA, 120 bp, Artificial Sequence
  ENSG00000213809_9 (sequence is synthesized)
ttttaatttctaaaggtaggaccaacacccaggggatcagtgaaggaagagaaggccagcagatcactgagagtgcaaccccaccctccacaggaaattgcctcatgggcagggccacag

SEQ ID NO: 756597 - DNA, 120 bp, Artificial Sequence
  ENSG00000213809_10 (sequence is synthesized)
cagagagacacagcatgggcagtgccttccctgcctgtgggggtcatgctgccacttttaatgggtcctccacccaacggggtcagggaggtggtgctgccccagtgggccatgattatc

SEQ ID NO: 756598 - DNA, 120 bp, Artificial Sequence
  ENSG00000213809_11 (sequence is synthesized)
ttaaaggcattattctccagccttaagtaagatcttaggacgtttcctttgctatgatttgtacttgcttgagtcccatgactgtttctcttcctctctttcttccttttggaatagtaa

SEQ ID NO: 756599 - DNA, 120 bp, Artificial Sequence
  ENSG00000213809_12 (sequence is synthesized)
tatccatcctatgtttgtcccactattgtattttggaagcacataacttgtttggtttcacaggttcacagttaagaaggaattttgcctctgaataaatagaatcttgagtctcatgca

SEQ ID NO: 756600 - DNA, 120 bp, Artificial Sequence
  ENSG00000213809_13 (sequence is synthesized)
cacaggggaaaagtttctgcattttacttttctattcaaaatattttatctcaccacgggaaagagaacaaaaaacaaatgcccagttttattttattcaggaatcctttgtgcattgaa

SEQ ID NO: 756601 - DNA, 120 bp, Artificial Sequence
  ENSG00000213809_14 (sequence is synthesized)
aacaatatggagtgctgtattcctaaactgtaagtgacaacagagaagtagattgcaacattgtcaatttaacaatgctaatgtattatttttgttagtattcataaacacagacacata

SEQ ID NO: 756602 - DNA, 120 bp, Artificial Sequence
  ENSG00000213809_15 (sequence is synthesized)
cacagacacataaactagaaatattaaatgtatctttgtcacatttttgctattagtccagaaatttgtaaactatatttgcttatactataagttactaacaatacaaacttttaatac

SEQ ID NO: 756603 - DNA, 120 bp, Artificial Sequence
  ENSG00000213809_16 (sequence is synthesized)
taatagcattattcaaccaagaagttcaaattcccttgaccggtaagtgaatttttaaaatattttagatcatatattatatgtatctacctacattattgtgtagacatgtattccatg

SEQ ID NO: 756604 - DNA, 120 bp, Artificial Sequence
  ENSG00000213809_17 (sequence is synthesized)
attaaaaaaggaaaaagtaattaattctagtctgtaatacactatggcttctgttttccttttaacaatgagggaatacttgtaaaaagtagaggctacttaggtttgacatcatctttc

SEQ ID NO: 756605 - DNA, 70 bp, Artificial Sequence
  ENSG00000213809_18 (sequence is synthesized)
tcatgcctcagcctcccaagtacctgggaagtagctgggactgcaggcgtgagccaccacacccggctaa

SEQ ID NO: 756606 - DNA, 70 bp, Artificial Sequence
  ENSG00000213809_19 (sequence is synthesized)
taacctcaagtgagcacccagcctggcttctctctatgaatatgtagagatatgcctttggttatgactg

SEQ ID NO: 756607 - DNA, 120 bp, Artificial Sequence
  ENSG00000213809_20 (sequence is synthesized)
tctctatgaatatgtagagatatgcctttggttatgactgtaataatttaataatctgaaattttagagttggagtgaaaaaggcatttaatttgtctagacaaaatctgctataatggt

SEQ ID NO: 756608 - DNA, 120 bp, Artificial Sequence
  ENSG00000213809_21 (sequence is synthesized)
cagcctcccagaccagtgctgtgccagggcttgcccaagggccatggttgctatggcctgcaaccactgaaattttcttgggaccaaggccactttagtcagctggtgataaagtgggct

SEQ ID NO: 756609 - DNA, 120 bp, Artificial Sequence
  ENSG00000213809_22 (sequence is synthesized)
gagactaaggttcttcctgcctaagcagtggattcacctctggcccacggtgggtcaaaatgctccccatatgagcactggtttggaatcaagggccatggggtctctgtcttttgctgt

SEQ ID NO: 756610 - DNA, 120 bp, Artificial Sequence
  ENSG00000213809_23 (sequence is synthesized)
gttccaatgtggtggggccaggtctaagttccgacacaaagtcccacactcttatttccatttcccaagcaggcagtttttctctaagcactgcactatctgggtttggaagagaggcgt

SEQ ID NO: 756611 - DNA, 120 bp, Artificial Sequence
  ENSG00000213822_0 (sequence is synthesized)
ctggaggaccccaggcagctcatggacctttccagacccagatggagcctgtggaggagggtcttcctcatggccagtctgctggcctgtgggatctgccaggcctctggccaaatcttc

SEQ ID NO: 756612 - DNA, 120 bp, Artificial Sequence
  ENSG00000213822_1 (sequence is synthesized)
atcacccaaaccctggggatcaagggatatcggactgtcgtggccctggataaggtccctgaggatgttcaggaatacagctggtactggggtgcaaacgacagcgcaggaaacatgatt

SEQ ID NO: 756613 - DNA, 120 bp, Artificial Sequence
  ENSG00000213822_2 (sequence is synthesized)
atcagccacaaaccgcccagtgcccagcagcctgggcccatgtacactggcagggagagagtgaacagagaaggcagcctgttgatcaggccgactgcattaaatgacacgggaaactac

SEQ ID NO: 756614 - DNA, 120 bp, Artificial Sequence
  ENSG00000213822_3 (sequence is synthesized)
actgttcgggtggttgcaggcaatgagacccaaagagcaaccggctggctggaggttctagagttgggaagcaatctgggcatctccgtcaatgccagctccctggtggagaacatggat

SEQ ID NO: 756615 - DNA, 120 bp, Artificial Sequence
  ENSG00000213822_4 (sequence is synthesized)
tctgtggctgctgactgcctcacaaatgtcaccaacatcacgtggtatgtgaatgatgtgcctacctctagtagtgaccggatgacaatttccccagacggcaagaccctcgtcatcctc

SEQ ID NO: 756616 - DNA, 120 bp, Artificial Sequence
  ENSG00000213822_5 (sequence is synthesized)
agggtcagccgctatgacagaacaattcagtgcatgatagagagtttcccagagatctttcagagaagtgaacgcatctctctgactgtggcctatgggcccgactatgtgctgctgagg

SEQ ID NO: 756617 - DNA, 120 bp, Artificial Sequence
  ENSG00000213822_6 (sequence is synthesized)
gagatcggctcccaagtggaaatggagtgtatctgctattccttcctggatctcaagtaccactggatccacaatggctccctcctgaacttctcagatgcaaagatgaacctctcgagt

SEQ ID NO: 756618 - DNA, 120 bp, Artificial Sequence
  ENSG00000213822_7 (sequence is synthesized)
cttgcctgggagcagatgggccgttaccgatgcactgtggagaaccccgtgacacagctgatcatgtacatggacgtcaggatccaggccccccatgaggatcttacctgttgtccacag

SEQ ID NO: 756619 - DNA, 120 bp, Artificial Sequence
  ENSG00000213822_8 (sequence is synthesized)
agatttctccatctcaggatccatggtgatgttcctcatcatgctgacagtgctgggtggcgtttacatctgtggagtcctgatccatgctctgatcaaccactactcaatcaggacaaa

SEQ ID NO: 756620 - DNA, 120 bp, Artificial Sequence
  ENSG00000213822_9 (sequence is synthesized)
tcgggctccatgagtgtccaccccagacctgaggacaagaccagaagggcaagcaggtgaggagagggtgatggagaagggctgggggtccccatagggccagcgaggctgaaaagggtc

SEQ ID NO: 756621 - DNA, 120 bp, Artificial Sequence
  ENSG00000213822_10 (sequence is synthesized)
cagggtctctttggagggtactggcaagagagggacccagcccagtcacacggaagcctggagatggaggctccagtaggaggtctgcagaccccacccgggacctgaagatgatgtcgt

SEQ ID NO: 756622 - DNA, 120 bp, Artificial Sequence
  ENSG00000213822_11 (sequence is synthesized)
gggtagcgtggccattgggcgcttcatctgccaatcagagctggtcaatgggttgcaggtcggggcgggccatgcgcaaagctgggctctaattccaagcgcctcctccctcagctccgg

SEQ ID NO: 756623 - DNA, 120 bp, Artificial Sequence
  ENSG00000213853_0 (sequence is synthesized)
acccccagccagtccgtcgatccagctgccagcgcagccgccagcgccggcacatcccgctctgggctttaaacgtgacccctcgcctcgactcgccctgccctgtgaaaatgttggtgc

SEQ ID NO: 756624 - DNA, 120 bp, Artificial Sequence
  ENSG00000213853_1 (sequence is synthesized)
ttcttgctttcatcatcgccttccacatcacctctgcagccttgctgttcattgccaccgtcgacaatgcctggtgggtaggagatgagttttttgcagatgtctggagaatatgtacca

SEQ ID NO: 756625 - DNA, 120 bp, Artificial Sequence
  ENSG00000213853_2 (sequence is synthesized)
acaacacgaattgcacagtcatcaatgacagctttcaagagtactccacgctgcaggcggtccaggccaccatgatcctctccaccattctctgctgcatcgccttcttcatcttcgtgc

SEQ ID NO: 756626 - DNA, 120 bp, Artificial Sequence
  ENSG00000213853_3 (sequence is synthesized)
tccagctcttccgcctgaagcagggagagaggtttgtcctaacctccatcatccagctaatgtcatgtctgtgtgtcatgattgcggcctccatttatacagacaggcgtgaagacattc

SEQ ID NO: 756627 - DNA, 120 bp, Artificial Sequence
  ENSG00000213853_4 (sequence is synthesized)
acgacaaaaacgcgaaattctatcccgtgaccagagaaggcagctacggctactcctacatcctggcgtgggtggccttcgcctgcaccttcatcagcggcatgatgtacctgatactga

SEQ ID NO: 756628 - DNA, 120 bp, Artificial Sequence
  ENSG00000213853_5 (sequence is synthesized)
ggaagcgcaaatagagttccggagctgggttgcttctgctgcagtacagaatccacattcagataaccattttgtatataatcattattttttgaggtttttctagcaaacgtattgttt

SEQ ID NO: 756629 - DNA, 120 bp, Artificial Sequence
  ENSG00000213853_6 (sequence is synthesized)
aaaagaaaaaagaaaaaaaaaatccaaaagagagaagagtttttgcattcttgagatcagagaatagactatgaaggctggtattcagaactgctgcccactcaaaagtctcaacaagac

SEQ ID NO: 756630 - DNA, 120 bp, Artificial Sequence
  ENSG00000213853_7 (sequence is synthesized)
tcagaactgctgcccactcaaaagtctcaacaagacacaagcaaaaatccagcaatgctcaaatccaaaagcactcggcaggacatttcttaaccatggggctgtgatgggaggagagga

SEQ ID NO: 756631 - DNA, 120 bp, Artificial Sequence
  ENSG00000213853_8 (sequence is synthesized)
gaggctgggaaagccgggtctctggggacgtgcttcctatgggtttcagctggcccaagcccctcccgaatctctctgctagtggtgggtggaagagggtgaggtggggtataggagaag

SEQ ID NO: 756632 - DNA, 120 bp, Artificial Sequence
  ENSG00000213853_9 (sequence is synthesized)
aatgacagcttcctgagaggtttcacccaagttccaagtgagaagcaggtgtagtccctggcattctgtctgtatccaaaccagagcccagccatccctccggtatcggggtgggtcaga

SEQ ID NO: 756633 - DNA, 120 bp, Artificial Sequence
  ENSG00000213853_10 (sequence is synthesized)
aaaagtctcacctcaatttgccgacagtgtcacctgcttgccttaggaatggtcatccttaacctgcgtgccagatttagactcgtctttaggcaaaacctacagcgccccccccctcac

SEQ ID NO: 756634 - DNA, 120 bp, Artificial Sequence
  ENSG00000213853_11 (sequence is synthesized)
cccagacctacagaatcagagtcttcaagggatggggccagggaatctgcatttctaacgcgctccctgggcaacgcttcagatgcgttgaagttggggaccacggtgcctgggccaggt

SEQ ID NO: 756635 - DNA, 120 bp, Artificial Sequence
  ENSG00000213853_12 (sequence is synthesized)
cagcagagctgcctcgtaaatgctggggtatcgtcatgtggagatggggaggtgaatgcaacccccacagcaggccaaaaccttggcctccatcgccacagctgtctacatctagggccc

SEQ ID NO: 756636 - DNA, 120 bp, Artificial Sequence
  ENSG00000213853_13 (sequence is synthesized)
caaaactccattcctgagccatgtgaactcatagacaccttcagggtgtggggtacagcctccttcccatcttatcccagaaggcctctcccttcttgtccagcccttcatgctacacct

SEQ ID NO: 756637 - DNA, 86 bp, Artificial Sequence
  ENSG00000213853_14 (sequence is synthesized)
aaggcctctcccttcttgtccagcccttcatgctacacctggctggcctctcacccctatttctagagcctcagaggacccatcca

SEQ ID NO: 756638 - DNA, 120 bp, Artificial Sequence
  ENSG00000213853_15 (sequence is synthesized)
caggcacaggggataccctctagagacaatctcctcctagggctcatggcctagtggaggagacagattaaaacttaattagaaaaactggctgggtacagtggctcatgcttgtaatcc

SEQ ID NO: 756639 - DNA, 88 bp, Artificial Sequence
  ENSG00000213853_16 (sequence is synthesized)
agactccatctcaaaaaaagaaaaaaaagaaaagaaactaattacacactgtgatggaggctgcaaagaacaccactaagaattcaaa

SEQ ID NO: 756640 - DNA, 120 bp, Artificial Sequence
  ENSG00000213853_17 (sequence is synthesized)
aatcgcttgaaactgggaggcggaggtcgcagtgagccgagattcaccactgcactccagcccaggcgacagtctgagactccgtctcaaaaataaaacgattcaaaatcgaggcctgtg

SEQ ID NO: 756641 - DNA, 120 bp, Artificial Sequence
  ENSG00000213853_18 (sequence is synthesized)
ctttacgcgtgcctattattaaatgctcctggaggcatttaggtatttagatcagtctaaatatagctccattcagttcgtgcagatgacagttattgggcagtacctgtctgtgtaaca

SEQ ID NO: 756642 - DNA, 120 bp, Artificial Sequence
  ENSG00000213853_19 (sequence is synthesized)
cccagaaaacatgtctgtggaggggcccatggtcccgacagtaaatgcggtgagagggtcccatagagctggagttttcaagctttaggggttcccgtgctgcttgggacaggctgattc

SEQ ID NO: 756643 - DNA, 120 bp, Artificial Sequence
  ENSG00000213853_20 (sequence is synthesized)
agagggtctgggtgaatgatttccaggtgattttaagactgtgctgagaaatagggcttttggggccttgtccttcaggatcaaagcatgatgctgtgtggcaatgcagaccacccagga

SEQ ID NO: 756644 - DNA, 120 bp, Artificial Sequence
  ENSG00000213853_21 (sequence is synthesized)
accatcccaggagataagctctttgcacctcattgtctttttctgcttatgttggagcaggatgctgggggctgtcctgggatggggtgtgggacctcgtgctatttaaatacttttgca

SEQ ID NO: 756645 - DNA, 120 bp, Artificial Sequence
  ENSG00000213853_22 (sequence is synthesized)
cttgaccttctgctgagtggagtggtggtttgccatcagctcagttccagtggagctgaagagacatctggtttgagtagttttagggccaccatggatatctcttcaatgcaggattgg

SEQ ID NO: 756646 - DNA, 120 bp, Artificial Sequence
  ENSG00000213853_23 (sequence is synthesized)
ctctttccatctgctctttcattcatttgtttttgacagatagtattaaatgtttaccatgttccaggcactgtgtgaggctctgaaaatacaggggtgagcaaatccagatatcctccc

SEQ ID NO: 756647 - DNA, 120 bp, Artificial Sequence
  ENSG00000213853_24 (sequence is synthesized)
tgccatcatgaagtttggagtctatgagataggaccccctccctatggagaagccaccaatgcagtacagggtgacctggggccagagacaggacaaatgtcacctcctgcctccatgag

SEQ ID NO: 756648 - DNA, 120 bp, Artificial Sequence
  ENSG00000213853_25 (sequence is synthesized)
atactctcactagtcatattgtgggcaagaatgtggcttacacccctagggttaacaggatgctacccaagctcatggaggaagttgaatcttaagttcccttgaaactttctaccttgg

SEQ ID NO: 756649 - DNA, 65 bp, Artificial Sequence
  ENSG00000213853_26 (sequence is synthesized)
ctataattttctggtagtcacgatggaaacaaacaaaacaccttagaaccagagatcgaccccct

SEQ ID NO: 756650 - DNA, 120 bp, Artificial Sequence
  ENSG00000213853_27 (sequence is synthesized)
gaaacaaacaaaacaccttagaaccagagatcgaccccctcaagcaatacatcaattcccttcacaagaaacgtcggggctacatgagtatctgtgttgaatgcggtctgaaatgatcct

SEQ ID NO: 756651 - DNA, 120 bp, Artificial Sequence
  ENSG00000213853_28 (sequence is synthesized)
atggattttcccggctggttgccactgctgtacaacattcagtgcccacatccacctgtgccattaagcttttttgagacatgagagatgcctcttccctgctgtatgacatgcatttgg

SEQ ID NO: 756652 - DNA, 120 bp, Artificial Sequence
  ENSG00000213853_29 (sequence is synthesized)
gaagttggaaagaaatgacaaaatcagggagaaaacatccaagcttcttacctgtagatagaatcagccctcacttggtgcttattaccagttattcaagaacaataacaacaacaaaat

SEQ ID NO: 756653 - DNA, 120 bp, Artificial Sequence
  ENSG00000213853_30 (sequence is synthesized)
tagtagacatccaagaagcacatattaggaccaaagatagcatcaactgtatttgaaggaactgtagtttgcgcattttatgacatttttataaagtactgtaattctttcattgagggg

SEQ ID NO: 756654 - DNA, 120 bp, Artificial Sequence
  ENSG00000213853_31 (sequence is synthesized)
ctatgtgatggagacagactaactcattttgttatttgcattaaaattattttgggtctctgttcaaatgagtttggagaatgcttgacttgttggtctgtgtgaatgtgtatatatata

SEQ ID NO: 756655 - DNA, 120 bp, Artificial Sequence
  ENSG00000213853_32 (sequence is synthesized)
tacctgaatacaggaacatcggagacctattcactcccacacactctgctatagtttgcgtgcttttgtggacacccctcatgaacaggctggcgctctaggacgctctgtgttcactga

SEQ ID NO: 756656 - DNA, 120 bp, Artificial Sequence
  ENSG00000213853_33 (sequence is synthesized)
tgatgaagaaacctagaactccaagcctgtttgtaaacacactaaacacagtggcctagatagaaactgtatcgtagtttaaaatctgcctcgcgggatgttactaaactcgctaatagt

SEQ ID NO: 756657 - DNA, 120 bp, Artificial Sequence
  ENSG00000213853_34 (sequence is synthesized)
ttaaaggttacttacaatagagcaagttggacaattttgtggtgttggggaaatgttagggcaaggcctagaggttcattttgaatcttggtttgtgactttagggtagttagaaacttt

SEQ ID NO: 756658 - DNA, 120 bp, Artificial Sequence
  ENSG00000213853_35 (sequence is synthesized)
ctacttaatgtacctttaaaatagtccattttctatgttttgtataatctgaaactgtacatggaaaataaagtttaaaaccagattgcccagagcaagactctaatgttcccaacggtg

SEQ ID NO: 756659 - DNA, 120 bp, Artificial Sequence
  ENSG00000213853_36 (sequence is synthesized)
atgacatctagggcagaatgctgccattttgaggggcagggggtcagctgatttctcatcaagataataatgtatggtttttacactaagcaactgataaatggacaatttatcactgga

SEQ ID NO: 756660 - DNA, 120 bp, Artificial Sequence
  ENSG00000213853_37 (sequence is synthesized)
ggcctgggagtccttgcagggtggcctgggtgactgctcaccagcccggccctccccagggttctgggccagagcctccctggccgttggagcgggagctgtgggtggaacacttctgaa

SEQ ID NO: 756661 - DNA, 120 bp, Artificial Sequence
  ENSG00000213853_38 (sequence is synthesized)
cactcacgcagaaacctgggtcctgcagtcaatagaagtgggttgtattggtctgttctcatgctgctgataaaggcataccagagactaggtaatttataaggaaaatgaggtctaatg

SEQ ID NO: 756662 - DNA, 120 bp, Artificial Sequence
  ENSG00000213853_39 (sequence is synthesized)
agactaggtaatttataaggaaaatgaggtctaatggactcacaattccacatgtctgggaggcctctgcagaaggcaaaggaggagcaaagccacatcttacatggtggcaggcaagag

SEQ ID NO: 756663 - DNA, 120 bp, Artificial Sequence
  ENSG00000213853_40 (sequence is synthesized)
attcactaccacaagaacagtatgggataaacttgctcccatgattcagttacctcccaccgggtccctcccacgacatgtgggaattatgggaatacaatacgagatttgggtggggac

SEQ ID NO: 756664 - DNA, 120 bp, Artificial Sequence
  ENSG00000213853_41 (sequence is synthesized)
agatttgggtggggacacagccgaaccatatcacaggttgagaaccctgccaaagttctcaatgttgaacctgccaaggttcaaccacgattcggggttgtcctccctgcgaaggcacac

SEQ ID NO: 756665 - DNA, 120 bp, Artificial Sequence
  ENSG00000213853_42 (sequence is synthesized)
acatcttctgacccaagggctgaggactcttggcctaaatgtgaaggttcaggccgtcccatgttcaggttttggtggcaggtcctggcaggcagggacgtttgtcctcccatctgtgat

SEQ ID NO: 756666 - DNA, 120 bp, Artificial Sequence
  ENSG00000213853_43 (sequence is synthesized)
tctttcatagagcctggctctaggaagccctttgaggatgttgtgtgacttcagctttcctctagatcagagttctcaaccttgccactattgtcattttgggctggataatcctttgtt

SEQ ID NO: 756667 - DNA, 120 bp, Artificial Sequence
  ENSG00000213853_44 (sequence is synthesized)
gtaggggcctccctgtgcattgtaggaagttcagcaacgtgtctggccttatctgctagatgcagtagctcccccacccctggttatgacaatccaaaatatcttcagacattgttaaat

SEQ ID NO: 756668 - DNA, 120 bp, Artificial Sequence
  ENSG00000213853_45 (sequence is synthesized)
gtcccatggagaacaaaatcaccctctgttgaggaccgctgccctagatcttccaggtgacccatcccaggtgacctctgcccccaacccctgacacctccttatcaaccagggtccctt

SEQ ID NO: 756669 - DNA, 120 bp, Artificial Sequence
  ENSG00000213853_46 (sequence is synthesized)
gttgctagcccacccggccatgtcctccccagcagagctcatgcatggaactttccagactctacctatgcccctatgaaaaatttaatgtttccctttagtatccagcttgcagccata

SEQ ID NO: 756670 - DNA, 120 bp, Artificial Sequence
  ENSG00000213853_47 (sequence is synthesized)
tggcaggaatgtattggataaataacctcttggcatagattaatatccctccaaacagggagtgacatcagggaagcttcttaacagcctatacactgttccaaagacctggcttccatc

SEQ ID NO: 756671 - DNA, 120 bp, Artificial Sequence
  ENSG00000213853_48 (sequence is synthesized)
ctgctcattttagactgcagagataattaaagggcagaaacattgctcagaaagccaaaaagtacaccatacgagtggccaccaactctgcctacatatacggctcccgttgatggatca

SEQ ID NO: 756672 - DNA, 120 bp, Artificial Sequence
  ENSG00000213853_49 (sequence is synthesized)
tcatgacaatagtaacataaactataatgcctgtcacttagcgatcactgtggcccttttatgcatgtcatctcatgtgatccccaccccagctgtaccaggtagggcaccgacatctcc

SEQ ID NO: 756673 - DNA, 120 bp, Artificial Sequence
  ENSG00000213853_50 (sequence is synthesized)
agaggctcctggtcctagagcctgtcaggggagatgagcacaataatcgcatttgggttctggagcttcttgctgagctgctgtgagtggcctgggcagggaccacattgctgctatgga

SEQ ID NO: 756674 - DNA, 120 bp, Artificial Sequence
  ENSG00000213853_51 (sequence is synthesized)
ttatagcagtggtccccaacgtttttggcaccaggaaccggtttcatggaagacaatttttctacagactggggagggggcattgcagggggatggtttcagaatgattcaagtgcatta

SEQ ID NO: 756675 - DNA, 120 bp, Artificial Sequence
  ENSG00000213853_52 (sequence is synthesized)
catttattgtgcactttattattattacattttaatatataatgaaataattatataactcgtcataatgtggaatcagtgggagccctgagcttgttgttctggactagacggtcccat

SEQ ID NO: 756676 - DNA, 120 bp, Artificial Sequence
  ENSG00000213853_53 (sequence is synthesized)
catcaggcattagagtctcataaggagcgtgcagcctagatccctggcatgcacagttcacaaggttgacactcctataagaatctaatgcccctggtgacctgacaggaggcagagctc

SEQ ID NO: 756677 - DNA, 83 bp, Artificial Sequence
  ENSG00000213853_54 (sequence is synthesized)
ccttcactggctgctcacctcctgctgcgtggcctggttcctaacaggctacagacaggtaccagtccatggcccatgggttg

SEQ ID NO: 756678 - DNA, 120 bp, Artificial Sequence
  ENSG00000213853_55 (sequence is synthesized)
acaggctacagacaggtaccagtccatggcccatgggttggggagtcctagattatagtatttggacccaccattccaggagctcactgtgaaataaatgggaccgaatgttcttttaga

SEQ ID NO: 756679 - DNA, 120 bp, Artificial Sequence
  ENSG00000213853_56 (sequence is synthesized)
atctcctttttctatttcttcccatctagtcctttgggatcctgaaaaggtcccagacttagtgaaaaggatagacagacattaggggcaggaaaaccatcagccttagtgaatcgtatc

SEQ ID NO: 756680 - DNA, 120 bp, Artificial Sequence
  ENSG00000213853_57 (sequence is synthesized)
cagcacccccagggtatattatcatggcacatactaagaagatgcagatggactttttgtccatcggtgagtctgagggtattcattatgtatttggaattgtgcttggcaactggaaag

SEQ ID NO: 756681 - DNA, 120 bp, Artificial Sequence
  ENSG00000213853_58 (sequence is synthesized)
tagaaggaaggccatcttgggcagtgggggaagggcagcagccaccaaagcacacagggaaatgaatgcttttggctgaagacaggagaatcttgtctggtcatcccatccattgcaatg

SEQ ID NO: 756682 - DNA, 86 bp, Artificial Sequence
  ENSG00000213853_59 (sequence is synthesized)
tttgtttgttagtgttgcgatcatggctcactgcagcctctactgcccaggctcaagcgatcctcccacctcagactcctgagtag

SEQ ID NO: 756683 - DNA, 120 bp, Artificial Sequence
  ENSG00000213853_60 (sequence is synthesized)
ggcctcccaaagtgctgaaattataggcatgagccactgtgcccacccctgactgctattacttccagcaactcagcctcatcttttctcccatactctctgagggcctggaccacctct

SEQ ID NO: 756684 - DNA, 120 bp, Artificial Sequence
  ENSG00000213853_61 (sequence is synthesized)
atcttttctcccatactctctgagggcctggaccacctcttatcctttgggagaaagtagcagggcatcacctggagccggttagaaatgcagaatcctggccaggcgtggtggctcacg

SEQ ID NO: 756685 - DNA, 62 bp, Artificial Sequence
  ENSG00000213853_62 (sequence is synthesized)
tagctggtgcatgcctctaaatcccagctactcgtgagactgaggcaggagaattgcttgaa

SEQ ID NO: 756686 - DNA, 86 bp, Artificial Sequence
  ENSG00000213853_63 (sequence is synthesized)
gtgcatgcctctaaatcccagctactcgttgggagggttgcagtgagccaagatcatgcatcgcactccagcctgggcaacaagag

SEQ ID NO: 756687 - DNA, 120 bp, Artificial Sequence
  ENSG00000213859_0 (sequence is synthesized)
attagaggctccagccccgccgacttgcagacgtgagatcgggcacacctgagcggcggcggggcggtcgtggccacatccggggcgacgtgcctgagtcaccccgtcccgccagcgtct

SEQ ID NO: 756688 - DNA, 120 bp, Artificial Sequence
  ENSG00000213859_1 (sequence is synthesized)
agccagtccgcccagtctctcgcgtccgagactcgcctccagcctcccacctccgcccgggccgcgcgagcctcgcgggggcgggggcggggcgccaaggggcggggctgtctcttaaag

SEQ ID NO: 756689 - DNA, 120 bp, Artificial Sequence
  ENSG00000213859_2 (sequence is synthesized)
tcttaaagggccccgggccgctgcccttaggccacttcctgggggcggagaggacctcagcggctgcggcgacacccagggaaggcggcgcggccgggtcccgaaactcctggctgtttc

SEQ ID NO: 756690 - DNA, 120 bp, Artificial Sequence
  ENSG00000213859_3 (sequence is synthesized)
catcagagccctcggacactcccagcccgggctgagcacgcatcgtcgctccccggcggatacaagggggctccgccatccgctcccgtcagttcggcctccatctcctgggacccgcgc

SEQ ID NO: 756691 - DNA, 120 bp, Artificial Sequence
  ENSG00000213859_4 (sequence is synthesized)
cggcagccaggccaggcctctgagtggccccagagccctggctggactcgtccacggcggcagcgatctgcccggggtctcggaggccatcccttcagagtcggccctgtgctcgccacc

SEQ ID NO: 756692 - DNA, 120 bp, Artificial Sequence
  ENSG00000213859_5 (sequence is synthesized)
gtcacctgctggttggattccggaaacccactgtctgaagaccacagaggggtgtcgctgaccaccccaaatcggatacgtccagacctcaagctcccttcccctctctggctgccctct

SEQ ID NO: 756693 - DNA, 120 bp, Artificial Sequence
  ENSG00000213859_6 (sequence is synthesized)
gctcttttcatctcttctctcaaccttttggggatttctgtgtcctgacaccacctccccatccaccaccaaagtagccggggtgagccccaaaccttactgggtgtgctccacctgtgc

SEQ ID NO: 756694 - DNA, 120 bp, Artificial Sequence
  ENSG00000213859_7 (sequence is synthesized)
ctccaacccagcgaatctgacagcttcgacccaattctgcacacacccaggaagttctgccttttcttttctttcggtgtctcctgtacttcccaaaatttctcctcctcctgtgccctc

SEQ ID NO: 756695 - DNA, 120 bp, Artificial Sequence
  ENSG00000213859_8 (sequence is synthesized)
ttcgcccccctcctttgggggccccgtgaccctgaatgtggggggcacactatattccaccactttggagaccctgacccgcttcccagactctatgctgggggccatgtttagggccgg

SEQ ID NO: 756696 - DNA, 120 bp, Artificial Sequence
  ENSG00000213859_9 (sequence is synthesized)
cacccccatgccccccaacctcaattcccaaggaggcggccactacttcatcgaccgggatggcaaggccttccggcacatcctcaatttcctgaggctgggccgcctggacctgccccg

SEQ ID NO: 756697 - DNA, 120 bp, Artificial Sequence
  ENSG00000213859_10 (sequence is synthesized)
tgggtacggagagacagcgctgctcagggcagaggctgacttctaccagatccggcccctcctggacgcgctgcgggaactggaggcctctcaggggacccctgcacccacagctgccct

SEQ ID NO: 756698 - DNA, 120 bp, Artificial Sequence
  ENSG00000213859_11 (sequence is synthesized)
gctccacgcagatgtagatgtcagcccccgcctggtgcacttctctgctcgccggggaccccatcactatgagctgagctccgtccaggtggacaccttccgagccaaccttttctgcac

SEQ ID NO: 756699 - DNA, 120 bp, Artificial Sequence
  ENSG00000213859_12 (sequence is synthesized)
ggatagggcagaggggagcccacattttcatctggagtgggccccccgccccgtggaactccccgaggtggagtatgggagactggggctgcagccgctgtggactggggggccaggaga

SEQ ID NO: 756700 - DNA, 120 bp, Artificial Sequence
  ENSG00000213859_13 (sequence is synthesized)
gcggcgggaggtggtgggcaccccaagcttcctggaggaggtgctgcgggtggctctcgagcacggcttccgactagactctgtcttccccgaccccgaagacctgctcaactccaggtc

SEQ ID NO: 756701 - DNA, 120 bp, Artificial Sequence
  ENSG00000213859_14 (sequence is synthesized)
tctgcgctttgtccggcactgaggatgctgttctcagtttgactgtggggaggagagagaatggggtactagcacccctgaagcctctttccagctctgcttcaggagctatgagagtcg

SEQ ID NO: 756702 - DNA, 120 bp, Artificial Sequence
  ENSG00000213859_15 (sequence is synthesized)
ggactctcctgcacctgactggagctcagatgtgggcaggaattcccaaacctgagcccaccaaggactcacaagtggtccagaaggtctcaacctgtgctgaccctgggaggggtaggg

SEQ ID NO: 756703 - DNA, 120 bp, Artificial Sequence
  ENSG00000213859_16 (sequence is synthesized)
aaggttctctcagcttgttcttgcctaaggctgagcacctccagtctctccttgatttggagctcagtgtttaagggcttggaaaaggggggaacatctctttacccagactagacctag

SEQ ID NO: 756704 - DNA, 120 bp, Artificial Sequence
  ENSG00000213859_17 (sequence is synthesized)
caaaaccctggaaggatattgaggtctggggaaaagggaggactttgcattttcccaatgcggtctcttggaccatggcttctactcctgaagctgggtggcctggcctggcctgaccaa

SEQ ID NO: 756705 - DNA, 120 bp, Artificial Sequence
  ENSG00000213859_18 (sequence is synthesized)
tgagaggccagaacactctggaacatcggaagaggagttctttgctatgttccaagccatctactgagggaggcagaaaggccacaacccaccctaggttgatgtatgggagctaggaca

SEQ ID NO: 756706 - DNA, 120 bp, Artificial Sequence
  ENSG00000213859_19 (sequence is synthesized)
gtccccatggcaatggggctggagcatccctcatctggaagaatcccatactgatggcagggctggccagggggaagagggtagtatctgtgggtcctggcctttcttcatgtgtgcgtg

SEQ ID NO: 756707 - DNA, 120 bp, Artificial Sequence
  ENSG00000213859_20 (sequence is synthesized)
catatcagcccgtgtggctgactgatgtataggtccctggcatcctggttcatatctgtgttgctgactacagtgtctgtgatgtccgcatgtccaggcctgtttggggttgcctagcga

SEQ ID NO: 756708 - DNA, 120 bp, Artificial Sequence
  ENSG00000213859_21 (sequence is synthesized)
tccaggcctgtttggggttgcctagcgactcttctggcacagggtgtgtctgtggtatacctgtgaggtggttgacaattagtagtttaatcacagggtgtgtgtgtgtgtgtgtgtgtg

SEQ ID NO: 756709 - DNA, 120 bp, Artificial Sequence
  ENSG00000213859_22 (sequence is synthesized)
tcaccacgtagccaggaggggcctgttggggtttgagtcactgggatcttcctggtgagaggtaagagaagtcactgggcttagctgggcctctgaggcctgtatggaactcttggttgc

SEQ ID NO: 756710 - DNA, 120 bp, Artificial Sequence
  ENSG00000213859_23 (sequence is synthesized)
tgaggcaaccatggacctgttgctaggagatagctggggaaggcccaaggccgcccagggcagagagaggagacgaagagtttgggacagtgggggaggagatgggaagggatgggattt

SEQ ID NO: 756711 - DNA, 120 bp, Artificial Sequence
  ENSG00000213859_24 (sequence is synthesized)
ctgggtcccagagcgggtgggatactcacgcacagcttcttcactggtggggggtggggcacacattatttctcactggtcatgatttacaagaagaaaaataaaactgcttttggaacc

SEQ ID NO: 756712 - DNA, 120 bp, Artificial Sequence
  ENSG00000213886_0 (sequence is synthesized)
gtctctggtttctggccccttgtctgcagagatggctcccaatgcttcctgcctctgtgtgcatgtccgttccgaggaatgggatttaatgacctttgatgccaacccatatgacagcgt

SEQ ID NO: 756713 - DNA, 120 bp, Artificial Sequence
  ENSG00000213886_1 (sequence is synthesized)
gaaaaaaatcaaagaacatgtccggtctaagaccaaggttcctgtgcaggaccaggttcttttgctgggctccaagatcttaaagccacggagaagcctctcatcttatggcattgacaa

SEQ ID NO: 756714 - DNA, 120 bp, Artificial Sequence
  ENSG00000213886_2 (sequence is synthesized)
agagaagaccatccaccttaccctgaaagtggtgaagcccagtgatgaggagctgcccttgtttcttgtggagtcaggtgatgaggcaaagaggcacctcctccaggtgcgaaggtccag

SEQ ID NO: 756715 - DNA, 120 bp, Artificial Sequence
  ENSG00000213886_3 (sequence is synthesized)
gacccagattgtgacttgcaatggaaagagactggaagatgggaagatgatggcagattacggcatcagaaagggcaacttactcttcctggcatgttattgtattggagggtgaccacc

SEQ ID NO: 756716 - DNA, 120 bp, Artificial Sequence
  ENSG00000213886_4 (sequence is synthesized)
ctgggcatggggtgttggcaggggtcaaaaagcttatttcttttaatctcttactcaacgaacacatcttctgatgatttcccaaaattaatgagaatgagatgagtagagtaagatttg

SEQ ID NO: 756717 - DNA, 120 bp, Artificial Sequence
  ENSG00000213886_5 (sequence is synthesized)
ggtgggatgggtaggatgaagtatattgcccaactctatgtttctttgattctaacacaattaattaagtgacatgatttttactaatgtattactgagactagtaaataaatttttaag

SEQ ID NO: 756718 - DNA, 120 bp, Artificial Sequence
  ENSG00000213886_6 (sequence is synthesized)
gcaaaatagagcattcaaagccagcttggaatttaattctgtcttgataccttgttatttatgcaaaaactcctatctcctttcctttatgacaagagagtaagttttaggttgggatcc

SEQ ID NO: 756719 - DNA, 120 bp, Artificial Sequence
  ENSG00000213889_0 (sequence is synthesized)
atggcggtcctggcccgccagctgcagcgtctcctctggaccgcttgcaagaaaaaggagagggagaaggaggggagggaggaagaggaggaggaggaggcggggcgcagggcccccgaa

SEQ ID NO: 756720 - DNA, 120 bp, Artificial Sequence
  ENSG00000213889_1 (sequence is synthesized)
ctcggtctctgttgacagcgccgcgccgcgcccagcggccgcacgggggtgccgaggcgtctgggggcctgcgcttcggggcgagcgcagcgcaaggctggcgcgcgcgcatggaggatg

SEQ ID NO: 756721 - DNA, 120 bp, Artificial Sequence
  ENSG00000213889_2 (sequence is synthesized)
gatgctcactgcacttggctttcgttacctggtctgcccccgggctgggccttgtttgccgtcctcgacggccacggtggggctcgagctgcccgcttcggtgcacgccatttgccaggc

SEQ ID NO: 756722 - DNA, 120 bp, Artificial Sequence
  ENSG00000213889_3 (sequence is synthesized)
catgtgctccaggagctgggcccggagcctagcgagcccgagggcgtgcgcgaggcgctgcgccgagccttcttgagcgccgacgagcgcctgcgctccctctggccccgcgtggaaacg

SEQ ID NO: 756723 - DNA, 120 bp, Artificial Sequence
  ENSG00000213889_4 (sequence is synthesized)
ggcggctgcacggccgtggtgttgctggtctccccgcggtttctgtacctggcgcactgcggtgactcccgcgcggtgctgagccgcgctggcgccgtggccttcagcacagaggaccac

SEQ ID NO: 756724 - DNA, 120 bp, Artificial Sequence
  ENSG00000213889_5 (sequence is synthesized)
gcgttgggcgactttacctacaaggaggctccggggaggccccccgagctacagctcgtttctgcggagccagaggtggccgcactggcacgccaggctgaggacgagttcatgctcctg

SEQ ID NO: 756725 - DNA, 120 bp, Artificial Sequence
  ENSG00000213889_6 (sequence is synthesized)
gcctctgatggcgtctgggacactgtgtctggtgctgccctggcgggactggtggcttcacgcctccgcttgggcctggccccagagcttctctgcgcgcagctgttggacacgtgtctg

SEQ ID NO: 756726 - DNA, 120 bp, Artificial Sequence
  ENSG00000213889_7 (sequence is synthesized)
tgcaagggcagcctggacaacatgacctgcatcctggtctgcttccctggggcccctaggccttctgaggaggcgatcaggagggagctagcactggacgcagccctgggctgcagaatc

SEQ ID NO: 756727 - DNA, 120 bp, Artificial Sequence
  ENSG00000213889_8 (sequence is synthesized)
gctgaactgtgtgcctctgctcagaagccccccagcctgaacacagttttcaggactctggcctcagaggacatcccagatttacctcctgggggagggctggactgcaaggccactgtc

SEQ ID NO: 756728 - DNA, 120 bp, Artificial Sequence
  ENSG00000213889_9 (sequence is synthesized)
attgctgaagtttattctcagatctgccaggtctcagaagagtgcggagagaaggggcaggatggggctgggaagtccaaccccacgcatttgggctcagccttggacatggaggcctga

SEQ ID NO: 756729 - DNA, 120 bp, Artificial Sequence
  ENSG00000213889_10 (sequence is synthesized)
accctttccccaactacatgtaccagcggaaggaaggaaggccaatgtaggaacccaaaatgcttatttcttcttctcttacttccctctcacagaaaagtcttacgaatggggaaattc

SEQ ID NO: 756730 - DNA, 82 bp, Artificial Sequence
  ENSG00000213889_11 (sequence is synthesized)
caaatgtttttgaaatattcagagccgaacagattctgagagataacccagtccaataacctctttccttcttattactcat

SEQ ID NO: 756731 - DNA, 120 bp, Artificial Sequence
  ENSG00000213889_12 (sequence is synthesized)
ataacccagtccaataacctctttccttcttattactcatctgtttttgaggggaagtagagttttgattattaaactttatttacataagtgattccaaatacattttcttgtaaaaaa

SEQ ID NO: 756732 - DNA, 120 bp, Artificial Sequence
  ENSG00000213889_13 (sequence is synthesized)
gtgcagcagagggagagagcctcggggttttggggaggagggctttgatagagaggcaagagtaaagctagcaaaggaggggataggactcaagcgaagggcgtggcctgaagtgggcag

SEQ ID NO: 756733 - DNA, 120 bp, Artificial Sequence
  ENSG00000213889_14 (sequence is synthesized)
tttgaggcacgggagagttagtggaagggacttaagagaaagggcgtggtcttttggaaaggggcgattctgggtcgtaggagccgggccggaagtattgattagtgctggaaggtggaa

SEQ ID NO: 756734 - DNA, 120 bp, Artificial Sequence
  ENSG00000213889_15 (sequence is synthesized)
gagcaggtaaacatcagagcgggcggagctttagggaaaaggcattgttctctcaattgggagcgcctaggaccgggtttggtcccagtaagagaggattggcaggtgggtgggacgcga

SEQ ID NO: 756735 - DNA, 120 bp, Artificial Sequence
  ENSG00000213889_16 (sequence is synthesized)
gcagagggcgcagcctttaggggaagagggaaggaggcctggagtctggcgagggacttgggagaggatggtgaacgagccacggcagagaggatgagagcgtggatccctggcctggac

SEQ ID NO: 756736 - DNA, 120 bp, Artificial Sequence
  ENSG00000213889_17 (sequence is synthesized)
tcgccctcccaccccctagccatgcagaggtgaatgggggaacccaggaggggctgagagctccaggccaccttgagggaatccacgaggtcttctaccaggaagaagtgccgcagctgc

SEQ ID NO: 756737 - DNA, 120 bp, Artificial Sequence
  ENSG00000213892_0 (sequence is synthesized)
ggtcctgcggcagacggagccgagccccaaccaggaagggagtccgagcactgggacttcaacgccaccatctccaagactcggtttggggtgaaagatggcgctgactgggtacagctg

SEQ ID NO: 756738 - DNA, 120 bp, Artificial Sequence
  ENSG00000213892_1 (sequence is synthesized)
gctgctcctcagtgccacattcctgaatgtgggggccgagatctctatcaccctggagcctgcccagccgagcgaaggggacaacgtcacgctggtcgtccatgggctttcgggggaact

SEQ ID NO: 756739 - DNA, 120 bp, Artificial Sequence
  ENSG00000213892_2 (sequence is synthesized)
gctcgcctacagctggtatgcggggcccacactcagcgtgtcatacctggtggccagctacatcgtgagcacaggcgatgagactcctggcccggcccacacggggcgggaggctgtgcg

SEQ ID NO: 756740 - DNA, 120 bp, Artificial Sequence
  ENSG00000213892_3 (sequence is synthesized)
ccccgatggcagcctggacatccagggcatcctgccccggcactcaggcacctacatcctgcagaccttcaacaggcagttgcagaccgaggtgggctacggacacgtgcaggtccatga

SEQ ID NO: 756741 - DNA, 120 bp, Artificial Sequence
  ENSG00000213892_4 (sequence is synthesized)
gatcctggcccagcccacagtcttggccaacagcacagcgctggtggaacgtcgagacaccctgcgccttatgtgcagcagccccagccccaccgccgaggtccgctggttcttcaacgg

SEQ ID NO: 756742 - DNA, 120 bp, Artificial Sequence
  ENSG00000213892_5 (sequence is synthesized)
tggggccctgcccgtcgctctccgcctgggcctgtcccctgacggccgggtgctggccaggcatggcatccgccgggaggaggccggcgcctatcagtgtgaggtgtggaacccggtcag

SEQ ID NO: 756743 - DNA, 120 bp, Artificial Sequence
  ENSG00000213892_6 (sequence is synthesized)
acctgaccgtgtactttggcccagagcgtgtggccatcctccaggattccaccacccgcacaggctgcaccatcaaagttgacttcaacacgtccctcaccctgtggtgcgtgtccaggt

SEQ ID NO: 756744 - DNA, 120 bp, Artificial Sequence
  ENSG00000213892_7 (sequence is synthesized)
cctgcccagagcccgagtatgtgtggaccttcaacgggcaggccctaaagaacggccaagaccacctcaacatcagcagcatgacagccgcccaggaggggacgtacacatgtattgcga

SEQ ID NO: 756745 - DNA, 120 bp, Artificial Sequence
  ENSG00000213892_8 (sequence is synthesized)
agaacaccaagaccctgctatctggatctgcctcagtcgtggtcaagctctctgctgcagcagttgccacgatgatcgtgcccgtgcccaccaagccaacggagggccaggacgtaacac

SEQ ID NO: 756746 - DNA, 120 bp, Artificial Sequence
  ENSG00000213892_9 (sequence is synthesized)
tgaccgtgcagggctaccccaaggacctgctggtctacgcctggtaccgcgggcctgcctccgagcccaaccggctgctcagccagctgccgtcaggaacctggattgcaggccccgcgc

SEQ ID NO: 756747 - DNA, 120 bp, Artificial Sequence
  ENSG00000213892_10 (sequence is synthesized)
acacaggccgggaggtgggcttccccaactgctcgctgttggtgcagaagctgaacctcacagacactggccgctacacactcaagactgtcacagtgcagggcaagactgagacactgg

SEQ ID NO: 756748 - DNA, 120 bp, Artificial Sequence
  ENSG00000213892_11 (sequence is synthesized)
aagtggagctgcaggtggcccccctggggtaacagcgtgaccctggagacgtccagagagaagagctcttcgcaccatcctctggtcctcgccctctgagtgggaaccactcccccacag

SEQ ID NO: 756749 - DNA, 120 bp, Artificial Sequence
  ENSG00000213892_12 (sequence is synthesized)
cgaggatgccaggctgtggtcctgctgttctcctgcctccaccctagagctagagccacagggccccactccctcgctgagctgttggggagccaccgaggccataaacgtcctggttaa

SEQ ID NO: 756750 - DNA, 120 bp, Artificial Sequence
  ENSG00000213901_0 (sequence is synthesized)
cttaactctggtcccgggcagccaagacaaagcgaaaggcaaggcagcatgagccgatcacccctcaatcccagccaactccgatcagtgggctcccaggatgccctggcccccttgcct

SEQ ID NO: 756751 - DNA, 120 bp, Artificial Sequence
  ENSG00000213901_1 (sequence is synthesized)
ccacctgctccccagaatccctccacccactcttgggaccctttgtgtggatctctgccttggggcctcagctgtcttctggctctgcagcatgtcttggtcatggcttctctgctctgt

SEQ ID NO: 756752 - DNA, 120 bp, Artificial Sequence
  ENSG00000213901_2 (sequence is synthesized)
gtctcccacctgctcctgctttgcagtctctccccaggaggactctcttactccccttctcagctcctggcctccagcttcttttcatgtggtatgtctaccatcctgcaaacttggatg

SEQ ID NO: 756753 - DNA, 120 bp, Artificial Sequence
  ENSG00000213901_3 (sequence is synthesized)
ggcagcaggctgcctcttgtccaggctccatccttagagttccttatccctgctctggtgctgaccagccagaagctaccccgggccatccagacacctggaaactgtgagcacagagca

SEQ ID NO: 756754 - DNA, 120 bp, Artificial Sequence
  ENSG00000213901_4 (sequence is synthesized)
agggcaagggcctccctcatgctgcacctttgtaggggacctagctgccatggcctggggcactggaacacttctctccaggaggtgtccggggcagtggtagtatctgggctgctgcag

SEQ ID NO: 756755 - DNA, 120 bp, Artificial Sequence
  ENSG00000213901_5 (sequence is synthesized)
ggcatgatggggctgctggggagtcccggccacgtgttcccccactgtgggcccctggtgctggctcccagcctggttgtggcagggctctctgcccacagggaggtagcccagttctgc

SEQ ID NO: 756756 - DNA, 120 bp, Artificial Sequence
  ENSG00000213901_6 (sequence is synthesized)
ttcacacactgggggttggccttgctggttatcctgctcatggtggtctgttctcagcacctgggctcctgccagtttcatgtgtgcccctggaggcgagcttcaacgtcatcaactcac

SEQ ID NO: 756757 - DNA, 120 bp, Artificial Sequence
  ENSG00000213901_7 (sequence is synthesized)
actcctctccctgtcttccggctcctttcggtgctgatcccagtggcctgtgtgtggattgtttctgcctttgtgggattcagtgttatcccccaggaactgtctgcccccaccaaggca

SEQ ID NO: 756758 - DNA, 120 bp, Artificial Sequence
  ENSG00000213901_8 (sequence is synthesized)
ttggctgcctcacccaggtgagtggaattggcctttgctgacgcccagagctctggctgcaggcatctccatggccttggcagcctccaccagttccctgggctgctatgccctgtgtgg

SEQ ID NO: 756759 - DNA, 120 bp, Artificial Sequence
  ENSG00000213901_9 (sequence is synthesized)
ccggctgctgcatttgcctcccccacctccacatgcctgcagtcgagggctgagcctggaggggctgggcagtgtgctggccgggctgctgggaagccccatgggcactgcatccagctt

SEQ ID NO: 756760 - DNA, 120 bp, Artificial Sequence
  ENSG00000213901_10 (sequence is synthesized)
ccccaacgtgggcaaagtgggtcttatccaggctggatctcagcaagtggctcacttagtggggctactctgcgtggggcttggactctcccccaggttggctcagctcctcaccaccat

SEQ ID NO: 756761 - DNA, 120 bp, Artificial Sequence
  ENSG00000213901_11 (sequence is synthesized)
cccactgcctgttgttggtggggtgctgggggtgacccaggctgtggttttgtctgctggattctccagcttctacctggctgacatagactctgggcgaaatatcttcattgtgggctt

SEQ ID NO: 756762 - DNA, 120 bp, Artificial Sequence
  ENSG00000213901_12 (sequence is synthesized)
ctccatcttcatggccttgctgctgccaagatggtttcgggaagccccagtcctgttcagcacaggctggagccccttggatgtattactgcactcactgctgacacagcccatcttcct

SEQ ID NO: 756763 - DNA, 120 bp, Artificial Sequence
  ENSG00000213901_13 (sequence is synthesized)
ggctggactctcaggcttcctactagagaacacgattcctggcacacagcttgagcgaggcctaggtcaagggctaccatctcctttcactgcccaagaggctcgaatgcctcagaagcc

SEQ ID NO: 756764 - DNA, 120 bp, Artificial Sequence
  ENSG00000213901_14 (sequence is synthesized)
cagggagaaggctgctcaagtgtacagacttcctttccccatccaaaacctctgtccctgcatcccccagcctctccactgcctctgcccactgcctgaagaccctggggatgaggaagg

SEQ ID NO: 756765 - DNA, 120 bp, Artificial Sequence
  ENSG00000213901_15 (sequence is synthesized)
aggctcctctgagccagaagagatggcagacttgctgcctggctcaggggagccatgccctgaatctagcagagaagggtttaggtcccagaaatgaccagaacgcctacttctgccctg

SEQ ID NO: 756766 - DNA, 120 bp, Artificial Sequence
  ENSG00000213901_16 (sequence is synthesized)
gttaatttagccctaactctcatctgctggagagtcagctcccaaactgttctttcttgtaggcagaggatatgtgtgtgtgtattacatgggactgtctagaggttccatttcccaata

SEQ ID NO: 756767 - DNA, 120 bp, Artificial Sequence
  ENSG00000213901_17 (sequence is synthesized)
tagtggaccatgaatgattgagattttgcctgtgtactatcaatgccacttgaaccccagcattcactttaatacttactgagcatctcccatgtgcaaggtcctggaactacagggata

SEQ ID NO: 756768 - DNA, 120 bp, Artificial Sequence
  ENSG00000213901_18 (sequence is synthesized)
agacagggtccatgccgtctcaaggcatttacggtttaaaaagacctttgtaattactaacgaaaatgcaaagcagaaagcagtctgtaataaagattaaaataatgccgtgggagcaaa

SEQ ID NO: 756769 - DNA, 120 bp, Artificial Sequence
  ENSG00000213901_19 (sequence is synthesized)
gagaggtttgggggagccttgctggctgccacatagtcccagacctgctggggctgctgttcctacaggctgcctcttgtccaggctccatccttagagttccttatccctgctctggtg

SEQ ID NO: 756770 - DNA, 120 bp, Artificial Sequence
  ENSG00000213901_20 (sequence is synthesized)
agaactgctggtcctatcagattcagcagcgactggaatagggacatattttatatttggaatccaagacttttccttgattcatctggtctccttgaatttcacactgttttctgctgt

SEQ ID NO: 756771 - DNA, 120 bp, Artificial Sequence
  ENSG00000213901_21 (sequence is synthesized)
cccccaaggtcacttcctattccttccatgggagtttccttctctggtatcaccccccgctcttatgatattctgcccactcccacctcctttcccatccctcaggatacccactgcctc

SEQ ID NO: 756772 - DNA, 120 bp, Artificial Sequence
  ENSG00000213901_22 (sequence is synthesized)
gtcagaagggctggcctggagtgctcactccatcccctaccttttggcttctgtctacccctgcaaggctggctcagaaggttctgggggaggagttcttttctcagtctcgcccctcag

SEQ ID NO: 756773 - DNA, 120 bp, Artificial Sequence
  ENSG00000213901_23 (sequence is synthesized)
cttatccaggtacgtggacctgggatgggagtggggtaggatggagctagaggggaagaagaaggacaggaacttacaccgattgattgccaggtgtgcctagcacctcacatcaactat

SEQ ID NO: 756774 - DNA, 120 bp, Artificial Sequence
  ENSG00000213901_24 (sequence is synthesized)
cttacttggggaggtgcctaagattagactttgggctaagagagtggggaagtgaacaaatcaccacggaactcctgtgcatgaggcactgtatcaaggctagggcaaagaaccagtcac

SEQ ID NO: 756775 - DNA, 120 bp, Artificial Sequence
  ENSG00000213901_25 (sequence is synthesized)
gcaaagaaccagtcacataaagttctgctctcttggggacttcatagagggagaggcagacagttgaaggaaaaaagtatctttttaaaaaagtgggccaggcatggtggctcacacctg

SEQ ID NO: 756776 - DNA, 61 bp, Artificial Sequence
  ENSG00000213901_26 (sequence is synthesized)
tggtggctcacacctgtaatcctagcacgtggggaggctgaggcaggcagatcacttaggc

SEQ ID NO: 756777 - DNA, 120 bp, Artificial Sequence
  ENSG00000213903_0 (sequence is synthesized)
agttctagcgtcaacccggtgctctacgtcttcaccgctggagatctgctgccccgggcaggtccccgtttcctcacgcggctcttcgaaggctctggggaggcccgagggggcggccgc

SEQ ID NO: 756778 - DNA, 120 bp, Artificial Sequence
  ENSG00000213903_1 (sequence is synthesized)
tctagggaagggaccatggagctccgaactacccctcagctgaaagtggtggggcagggccgcggcaatggagacccggggggtgggatggagaaggacggtccggaatgggacctttga

SEQ ID NO: 756779 - DNA, 120 bp, Artificial Sequence
  ENSG00000213903_2 (sequence is synthesized)
cagcagaccctacaacctgctgcccttccctgtccctttccaccccccacccaccctccagaggtcctcccgacggccatgaacactacatcttctgcagcacccccctcactaggtgta

SEQ ID NO: 756780 - DNA, 120 bp, Artificial Sequence
  ENSG00000213903_3 (sequence is synthesized)
gagttcatctctctgctggctatcatcctgctgtcagtggcgctggctgtggggcttcccggcaacagctttgtggtgtggagtatcctgaaaaggatgcagaagcgctctgtcactgcc

SEQ ID NO: 756781 - DNA, 120 bp, Artificial Sequence
  ENSG00000213903_4 (sequence is synthesized)
ctgatggtgctgaacctggccctggccgacctggccgtattgctcactgctccctttttccttcacttcctggcccaaggcacctggagttttggactggctggttgccgcctgtgtcac

SEQ ID NO: 756782 - DNA, 120 bp, Artificial Sequence
  ENSG00000213903_5 (sequence is synthesized)
tatgtctgcggagtcagcatgtacgccagcgtcctgcttatcacggccatgagtctagaccgctcactggcggtggcccgcccctttgtgtcccagaagctacgcaccaaggcgatggcc

SEQ ID NO: 756783 - DNA, 120 bp, Artificial Sequence
  ENSG00000213903_6 (sequence is synthesized)
cggcgggtgctggcaggcatctgggtgttgtcctttctgctggccacacccgtcctcgcgtaccgcacagtagtgccctggaaaacgaacatgagcctgtgcttcccgcggtaccccagc

SEQ ID NO: 756784 - DNA, 120 bp, Artificial Sequence
  ENSG00000213903_7 (sequence is synthesized)
gaagggcaccgggccttccatctaatcttcgaggctgtcacgggcttcctgctgcccttcctggctgtggtggccagctactcggacatagggcgtcggctacaggcccggcgcttccgc

SEQ ID NO: 756785 - DNA, 120 bp, Artificial Sequence
  ENSG00000213903_8 (sequence is synthesized)
cgcagccgccgcaccggccgcctggtggtgctcatcatcctgaccttcgccgccttctggctgccctaccacgtggtgaacctggctgaggcgggccgcgcgctggccggccaggccgcc

SEQ ID NO: 756786 - DNA, 120 bp, Artificial Sequence
  ENSG00000213903_9 (sequence is synthesized)
gggttagggctcgtggggaagcggctgagcctggcccgcaacgtgctcatcgcactcgccttcctgagcagcagcgtgaaccccgtgctgtacgcgtgcgccggcggcggcctgctgcgc

SEQ ID NO: 756787 - DNA, 120 bp, Artificial Sequence
  ENSG00000213903_10 (sequence is synthesized)
cgtgggcttcgtcgccaagctgctggagggcacgggctccgaggcgtccagcacgcgccgcgggggcagcctgggccagaccgctaggagcggccccgccgctctggagcccggcccttc

SEQ ID NO: 756788 - DNA, 120 bp, Artificial Sequence
  ENSG00000213903_11 (sequence is synthesized)
tggaaggaggcgcactttcctcctggcagaatgctagctctgagccagttcagtacctggaggaggagcaggggcgtggagggcgtggagggcgtgggagcgtgggaggcgggagtggag

SEQ ID NO: 756789 - DNA, 120 bp, Artificial Sequence
  ENSG00000213903_12 (sequence is synthesized)
tggaagaagagggagaggtggagcaaagtgagggccgagtgagagcgtgctccagcctggctcccacaggcagctttaaccattaaaactgaagtctgaaatttggtcaaccttgtgagt

SEQ ID NO: 756790 - DNA, 120 bp, Artificial Sequence
  ENSG00000213903_13 (sequence is synthesized)
ggggtacatgtgctgtgggtatcggggtgctcgtgggcgccctggtggggcccctctcggtagttgagagtcacgtcctttagttccccatgatttacaattttggaagggacacaaaga

SEQ ID NO: 756791 - DNA, 120 bp, Artificial Sequence
  ENSG00000213903_14 (sequence is synthesized)
aacatagacttcccccatcccagatgattccgagtacatagtctgcagataatacttagcaaaacgcagtctacagactcctaaagcagcttgtctaggaagaccacccatgtgggctta

SEQ ID NO: 756792 - DNA, 120 bp, Artificial Sequence
  ENSG00000213903_15 (sequence is synthesized)
tcactccaggttctgtgacccgggaccttctgagaaaacagcactgctgtgaaatatcttccttgaagcctgtgataagtctccttgttagaatgactccaacttcctgccaataatctt

SEQ ID NO: 756793 - DNA, 120 bp, Artificial Sequence
  ENSG00000213903_16 (sequence is synthesized)
tgtcctctccataggagatgttctaggggatgccttccttccctccatttcacaaagaggccagacttgaggactaagtcattagatcttatcccttagaattttgcatatcagcatctg

SEQ ID NO: 756794 - DNA, 120 bp, Artificial Sequence
  ENSG00000213903_17 (sequence is synthesized)
ctaacctccacaacacaccctggcacagggtggggctgagggccccaggaaacaaagattcccaaaagtgagagggatgagtcattatttcctagagatgactgttgttttagagaacct

SEQ ID NO: 756795 - DNA, 120 bp, Artificial Sequence
  ENSG00000213903_18 (sequence is synthesized)
tggtccaactctgttctgacaaggttttaggaagatggcaacaacagtggcagcagtgtactttttggatctttctcataaaaaaacaaaagagcaagtaagagagggaaaccaaatatc

SEQ ID NO: 756796 - DNA, 120 bp, Artificial Sequence
  ENSG00000213903_19 (sequence is synthesized)
cacatgcaacatccgcaacaaatctagtatgtcaaggtttgacatactcccatggaccccaaagtatgagccagtgagaatgagtcatcaatatctcaagacccatataccagcatctgt

SEQ ID NO: 756797 - DNA, 120 bp, Artificial Sequence
  ENSG00000213903_20 (sequence is synthesized)
gcagaaggatgcagaaggaagcaaagggatgttggatggacctaagaagaggagatccccaagctgtctacagatccttactggaaggtatggtgcaccaatttgagaacagcagctgaa

SEQ ID NO: 756798 - DNA, 120 bp, Artificial Sequence
  ENSG00000213903_21 (sequence is synthesized)
actgggagggacctaacggagtatttcccagtcctctcgcccattctgtatggtgagcacataataggtacttatttagtgtttgtcgaattaataaagttcaaatgacatttccctgga

SEQ ID NO: 756799 - DNA, 120 bp, Artificial Sequence
  ENSG00000213903_22 (sequence is synthesized)
ctctctcactgctccttcctggtctcttctcatctggccccacctctaaggagtcctcctgccttctgggttgccctggaaaacagactatcccccctcctagtgaagggagtgggtagg

SEQ ID NO: 756800 - DNA, 120 bp, Artificial Sequence
  ENSG00000213903_23 (sequence is synthesized)
ggtttcagccccaccctcaggaagatgcgtcttccctgtcctctgctctgtggtacttcctctctggctgatttagcaaacagcacctagacctggggccaggcctttggcagtgggaca

SEQ ID NO: 756801 - DNA, 120 bp, Artificial Sequence
  ENSG00000213903_24 (sequence is synthesized)
gatccagggataggctacaccaccctgccctgaccctgggattggcatcagcttccaaccagttcctgccaaagcttgtcctcccgacggccatgaacactacatcttctgcagcacccc

SEQ ID NO: 756802 - DNA, 120 bp, Artificial Sequence
  ENSG00000213903_25 (sequence is synthesized)
gccattctctcacatcccgtgcggtcaggaagcccttcctgaactctgacttcagttcttgctgcggtttctgcccatttttttcatatcctctgacagctgcgaggtcatctctgctct

SEQ ID NO: 756803 - DNA, 120 bp, Artificial Sequence
  ENSG00000213903_26 (sequence is synthesized)
ggcttttctccaagcagaacaagtgggggctctggaaaggttaagggacctcagtggccaccattatactttgcatctttcctgagaagtgagagttgaaagggaagcaggaaggcccat

SEQ ID NO: 756804 - DNA, 62 bp, Artificial Sequence
  ENSG00000213903_27 (sequence is synthesized)
cctgagaagtgagagttgaaagggaagcaggaaggcccatggtcagattgaaggaaggtcag

SEQ ID NO: 756805 - DNA, 86 bp, Artificial Sequence
  ENSG00000213903_28 (sequence is synthesized)
tatgaaccaccacaacctgccaggaatttttagtttttagcttttgcaggagacttcaaggaaaggagacattcctctgtccagga

SEQ ID NO: 756806 - DNA, 120 bp, Artificial Sequence
  ENSG00000213903_29 (sequence is synthesized)
caggagacttcaaggaaaggagacattcctctgtccaggaaacgggtaaggggaccatttctgcattgctggtttcccctcttggcagggtgggcatgaggcatcactgttcctgctccc

SEQ ID NO: 756807 - DNA, 120 bp, Artificial Sequence
  ENSG00000213903_30 (sequence is synthesized)
tcactcctgctcctcatgctcagcctgccagctcggcctcaactttgtgtgtctaaagtggaactgaatagtaggctgtgagaagataggaaagaggtagtgccaatctccttgcccaga

SEQ ID NO: 756808 - DNA, 120 bp, Artificial Sequence
  ENSG00000213903_31 (sequence is synthesized)
tcataaatccagactcagcagggtaaccacatgggcaagcacaaggtaggtgcttggggaaaggggaagtaattggcattctgtgtgataccaaggagaccatttggattttggcttcta

SEQ ID NO: 756809 - DNA, 120 bp, Artificial Sequence
  ENSG00000213903_32 (sequence is synthesized)
ccaaagagaatggagaattggttgacctaaatggaaccagtccctttaagtaaggggaggaaagggggtgctggaagatggccctcttcccaccacctagatcatagcttgaactgaagc

SEQ ID NO: 756810 - DNA, 120 bp, Artificial Sequence
  ENSG00000213903_33 (sequence is synthesized)
caaggacagagtgctgcccccttcggcatttactgatgtgccctctttaaatcatgatgttatctaacccaaacccagacccaggacctagtcacagctccaacctacacttcctattaa

SEQ ID NO: 756811 - DNA, 120 bp, Artificial Sequence
  ENSG00000213903_34 (sequence is synthesized)
tcttaaaacaaagcaaaacaaaacaaaaagatatcagcattgtagcctccaatctgagcccatttcccttctctggctaccatacctccttctcctatatgataccattcactactttgt

SEQ ID NO: 756812 - DNA, 120 bp, Artificial Sequence
  ENSG00000213903_35 (sequence is synthesized)
gggcggagccggccaggcggcgcgagcgggaactacggccttggccttcttcagttctagcgtcaacccggtgctctacgtcttcaccgctggagatctgctgccccgggtcctcccgac

SEQ ID NO: 756813 - DNA, 120 bp, Artificial Sequence
  ENSG00000213906_0 (sequence is synthesized)
attcttgtcttaccctctgcaaatgtgataggcacaggacaggagtaggcacctcgcctactgctgcttaacctttcagcttctccaggcccccaatcctgcttgctcccagcttggccc

SEQ ID NO: 756814 - DNA, 120 bp, Artificial Sequence
  ENSG00000213906_1 (sequence is synthesized)
agaaggatgtcggtctgctaccgtcccccagggaacgagacactgctgagctggaagacttcgcgggccacaggcacagccttcctgctgctggcggcgctgctggggctgcctggcaac

SEQ ID NO: 756815 - DNA, 120 bp, Artificial Sequence
  ENSG00000213906_2 (sequence is synthesized)
ggcttcgtggtgtggagcttggcgggctggcggcctgcacgggggcgaccgctggcggccacgcttgtgctgcacctggcgctggccgacggcgcggtgctgctgctcacgccgctcttt

SEQ ID NO: 756816 - DNA, 120 bp, Artificial Sequence
  ENSG00000213906_3 (sequence is synthesized)
gtggccttcctgacccggcaggcctggccgctgggccaggcgggctgcaaggcggtgtactacgtgtgcgcgctcagcatgtacgccagcgtgctgctcaccggcctgctcagcctgcag

SEQ ID NO: 756817 - DNA, 120 bp, Artificial Sequence
  ENSG00000213906_4 (sequence is synthesized)
cggctgcgcagcccggccctggcccgccgcctgctgctggcggtctggctggccgccctgttgctcgccgtcccggccgccgtctaccgccacctgtggagggaccgcgtatgccagctg

SEQ ID NO: 756818 - DNA, 120 bp, Artificial Sequence
  ENSG00000213906_5 (sequence is synthesized)
taccgccacctgtggagggaccgcgtatgccagctgtgccacccgtcgccggtccacgccgccgcccacctgagcctggagactctgaccgctttcgtgcttcctttcgggctgatgctc

SEQ ID NO: 756819 - DNA, 120 bp, Artificial Sequence
  ENSG00000213906_6 (sequence is synthesized)
ggggcgcgggtgggccggctggtgagcgccatcgtgcttgccttcggcttgctctgggccccctaccacgcagtcaaccttctgcaggcggtcgcagcgctggctccaccggaaggggcc

SEQ ID NO: 756820 - DNA, 120 bp, Artificial Sequence
  ENSG00000213906_7 (sequence is synthesized)
ttggcgaagctgggcggagccggccaggcggcgcgagcgggaactacggccttggccttcttcagttctagcgtcaacccggtgctctacgtcttcaccgctggagatctgctgccccgg

SEQ ID NO: 756821 - DNA, 120 bp, Artificial Sequence
  ENSG00000213906_8 (sequence is synthesized)
gcaggtccccgtttcctcacgcggctcttcgaaggctctggggaggcccgagggggcggccgctctagggaagggaccatggagctccgaactacccctcagctgaaagtggtggggcag

SEQ ID NO: 756822 - DNA, 120 bp, Artificial Sequence
  ENSG00000213906_9 (sequence is synthesized)
ggccgcggcaatggagacccggggggtgggatggagaaggacggtccggaatgggacctttgacagcagaccctacaacctgctgcccttccctgtccctttccaccccccacccaccct

SEQ ID NO: 756823 - DNA, 120 bp, Artificial Sequence
  ENSG00000213906_10 (sequence is synthesized)
ccagaggtcagtgttctgggacatttggggacccttctttgactagagtttggatctggctgggtaggattactatacacttggggcaggcccaggctcctccaaactgagggattatga

SEQ ID NO: 756824 - DNA, 120 bp, Artificial Sequence
  ENSG00000213906_11 (sequence is synthesized)
gggtggtgatggtccctgttaaggactattgtgtgcttgcaagttggcatgtacccatgtgccagcattgcttacttgttgccaatagctgttattgtgaaatacactgggaagccatta

SEQ ID NO: 756825 - DNA, 120 bp, Artificial Sequence
  ENSG00000213906_12 (sequence is synthesized)
accctctgcaaatgtgataggcacaggacaggagtaggcacctcgcctactgctgcttaacctttcagcttctccaggcccccaatcctgcttgctcccagcttggtggggttttgcccc

SEQ ID NO: 756826 - DNA, 120 bp, Artificial Sequence
  ENSG00000213906_13 (sequence is synthesized)
gcagcagtgtggaggtccaacgaaggagctccctgaatggcagagacaagaggaaatcagatgatttggaaaacttgggaggaagccatcaagctgggagatgaggactttccacaagca

SEQ ID NO: 756827 - DNA, 120 bp, Artificial Sequence
  ENSG00000213906_14 (sequence is synthesized)
aaactggccctggccctgaaccaaataccttgaaccctcgtaaactccataccctgacccccttgttttggatatacccaggtagaacaactctctctcactgtctgttgtgaggatacg

SEQ ID NO: 756828 - DNA, 120 bp, Artificial Sequence
  ENSG00000213906_15 (sequence is synthesized)
ctgtagcccactcattaagtacattctcctaataaatgctttggactgatcaccctgccagtcttttgtcttgggcaatctatacttttctcagaggttcccaaggcctactgaagggac

SEQ ID NO: 756829 - DNA, 120 bp, Artificial Sequence
  ENSG00000213906_16 (sequence is synthesized)
ttaacatactcttaatggctttcctctctcttgttttaccttatgccctcacttcctgagttaacctcccaaatacaggatcacctgtacccaagcccttagctcaagaatacaggatca

SEQ ID NO: 756830 - DNA, 120 bp, Artificial Sequence
  ENSG00000213906_17 (sequence is synthesized)
cctgtacccaagcccttagctcaagctctgctttggaagaacccaaactaagacagtgctcctggtgccctccccaagcaacctcaagttctggctgttacttgagcagaggcctttctt

SEQ ID NO: 756831 - DNA, 120 bp, Artificial Sequence
  ENSG00000213906_18 (sequence is synthesized)
ttcccttcccccagctctatccatctgccaggcccccctcaaatctcttcatttccaagttttgcttgacttttccaagaggagagggctgcttcttagtatgtccctactcatcctttc

SEQ ID NO: 756832 - DNA, 120 bp, Artificial Sequence
  ENSG00000213906_19 (sequence is synthesized)
ctttcttgtcttgtatcctggtgcagcctggtaatggggcctcttcatggttgtgtgtcatgactccctaaccattatgcctccatgcatcccctgttcctcctggaacctagcaccatg

SEQ ID NO: 756833 - DNA, 120 bp, Artificial Sequence
  ENSG00000213906_20 (sequence is synthesized)
ccttacatggaaaagctgtcattgacagcccggtgagagccctgagggtggagtgactggggcagggcctgaggcaagaggtgggaggaggtaggaggccaggggctcagccggaccagg

SEQ ID NO: 756834 - DNA, 120 bp, Artificial Sequence
  ENSG00000213906_21 (sequence is synthesized)
agactggaaacaggcaaggataaggcaggtgggggactgagttgtttgggtcacctctgcaggccagagagaccaggcaacatacacactgcagaaggtgggctgggaggattggggcca

SEQ ID NO: 756835 - DNA, 120 bp, Artificial Sequence
  ENSG00000213906_22 (sequence is synthesized)
gagctgggggagggatgagaacagaagcaggaccaggattcagcagagtcctcctatttccttccaccaccagggaatcttactgccccacttcagcttgtgctgtttcctggcaaggca

SEQ ID NO: 756836 - DNA, 120 bp, Artificial Sequence
  ENSG00000213906_23 (sequence is synthesized)
ggctctcacatgcctggacgcctgggtgcgttggtgatgggaaggagcagggtgagggaggggccccaggagaggcccaggatgagcctcatcttgtccctccccattcttgtcttaccc

SEQ ID NO: 756837 - DNA, 120 bp, Artificial Sequence
  ENSG00000213906_24 (sequence is synthesized)
tctgcaaatgtgataggcacaggacaggagtaggcacctcgcctactgctgcttaacctttcagcttctccaggcccccaatcctgcttgctcccagcttggtaagtagatctgtgcacg

SEQ ID NO: 756838 - DNA, 120 bp, Artificial Sequence
  ENSG00000213906_25 (sequence is synthesized)
tccctttacaccccaccatccagttttgcccagatgtgctagaatggggctggacaaagaaggaggggccagactagaggagtggtggtagagatagtgacagcctggggtgatgacttt

SEQ ID NO: 756839 - DNA, 120 bp, Artificial Sequence
  ENSG00000213906_26 (sequence is synthesized)
gtgtttgaggtggggtctgggtcctcgtggaagtcaggactcccaggcagaaaagaggcaggctgcagggaagtaaggaggaggcatggcaccttctcatcgggcatcacaggtggggtt

SEQ ID NO: 756840 - DNA, 120 bp, Artificial Sequence
  ENSG00000213918_0 (sequence is synthesized)
cagaaaagagatccacgagggagaagtgagagtgctggagactccacaagccacaggctgcaggggcaggatggcttcttagaaggtgaaatgattgttctgggaatctatcagaggaag

SEQ ID NO: 756841 - DNA, 120 bp, Artificial Sequence
  ENSG00000213918_1 (sequence is synthesized)
acatagaggctccagacggttgaaggcccaacagtgatcccagacgggccccatgtcagaccaggctcctccagggctgtgctgccctcaccaaagcccgtcctgagggcagccacacag

SEQ ID NO: 756842 - DNA, 120 bp, Artificial Sequence
  ENSG00000213918_2 (sequence is synthesized)
caggcagcactcgccatttgtacaagcgaggcccaagttccagccttccttctggcaggtagaggaagcaggggcactatgcctgggagttcctgaaagcagatggggcagcatttggtc

SEQ ID NO: 756843 - DNA, 120 bp, Artificial Sequence
  ENSG00000213918_3 (sequence is synthesized)
aagagccaggaggggatgacagaccagaggggaaccctcgtcccacgtgctgagcacacgtagggggttgggcacttgctctgtgagctataattggtgtccctgtgccccgccggaagc

SEQ ID NO: 756844 - DNA, 120 bp, Artificial Sequence
  ENSG00000213918_4 (sequence is synthesized)
tgcaccaggcagtttcttggtggaggacagtggccgccctctagctttactcccttccccgtgatgggtcgctgtcagatgtgtgtccaggaaaggcaaacaccaaaggcagaggactag

SEQ ID NO: 756845 - DNA, 120 bp, Artificial Sequence
  ENSG00000213918_5 (sequence is synthesized)
tccctacaccgaatactccggtggccttgcttgggggctgggttttgacgtgctggaggctgtcctagacttagagattaaaaacagggaagaaccattgctgaaacctttggaaaagcc

SEQ ID NO: 756846 - DNA, 120 bp, Artificial Sequence
  ENSG00000213918_6 (sequence is synthesized)
tgcaatggggcctctggcagcctgaggagtggtggtgtttccatctggtagacgccgtctcaataggagggacagatgagtgcaccagtgctgccagccagaggcgtctgttggcgtgtc

SEQ ID NO: 756847 - DNA, 120 bp, Artificial Sequence
  ENSG00000213918_7 (sequence is synthesized)
tttatggaatggggtgccagtcttgtggagggtggtttaccttcctgtttctagtccccactgggcctgccttctgcttcatggccagctggccagaccgagcactttcctgactttcga

SEQ ID NO: 756848 - DNA, 120 bp, Artificial Sequence
  ENSG00000213918_8 (sequence is synthesized)
ccttggcccctgctgactcttgccgttgaggcctcctgcagaccccatttgtattcatttcctgcagttctcatacctgaatcccgcctggacttctgccaagccttccaggccctcctc

SEQ ID NO: 756849 - DNA, 120 bp, Artificial Sequence
  ENSG00000213918_9 (sequence is synthesized)
ccccagggggaccacagatgctacgtgcagggctgtccttggagggccagcacagccccttccaagtgggcaagacccaggggtggctcaaaagatagctgtgccctagccctggaacct

SEQ ID NO: 756850 - DNA, 120 bp, Artificial Sequence
  ENSG00000213918_10 (sequence is synthesized)
ctgaatgttgatttttgtagcaaaaaaggacttgcagatgtgagtaaaggctgttgagataaggacatcctccctgctctctgggaggaccccaaatgcaggtgcacagatcttaagaag

SEQ ID NO: 756851 - DNA, 120 bp, Artificial Sequence
  ENSG00000213918_11 (sequence is synthesized)
aagaggcagagactggggtgatgcagccacaactaaggaaagccaaggattgctggcagcctgcagaaactggagggcaaggagcatcccccaaccgcccggagcctccaggaggcgcaa

SEQ ID NO: 756852 - DNA, 120 bp, Artificial Sequence
  ENSG00000213918_12 (sequence is synthesized)
ggtcctactgactccctgacttcagacgtccagtctccggaattttgagaggatccatttctgttattttaagcaaccaaacttgtggtagtttcaccagtctcaggaaatgaatacgaa

SEQ ID NO: 756853 - DNA, 120 bp, Artificial Sequence
  ENSG00000213918_13 (sequence is synthesized)
tgcggtggctcacacttgtaatcccagcatttgcgggaagattgcttgggctcaggacttggagaccttgtgtctgtgagaaacttaaaaaataggctgggtgcgatggctcacgcctgt

SEQ ID NO: 756854 - DNA, 69 bp, Artificial Sequence
  ENSG00000213918_14 (sequence is synthesized)
atggtagcatgcacctgtggtcctggctacgccggaggattgcctgaagccaggagttcaagaccagtc

SEQ ID NO: 756855 - DNA, 120 bp, Artificial Sequence
  ENSG00000213918_15 (sequence is synthesized)
tgcacctgtggtcctggctacgccggaggattgcctgaagccaggagttcaagaccagtctggacaaaagagcaagaccccatctctaccaaaaaaatttaaaaattagccaggcatggt

SEQ ID NO: 756856 - DNA, 80 bp, Artificial Sequence
  ENSG00000213918_16 (sequence is synthesized)
cggttgaggctataacagtgtgagaccctgtctcaaaaacaataaaaacccaaaacaaaagaaccaagaaattactggac

SEQ ID NO: 756857 - DNA, 120 bp, Artificial Sequence
  ENSG00000213918_17 (sequence is synthesized)
aataaaaacccaaaacaaaagaaccaagaaattactggacctgaggcctggcctttagctgctgccctgcccttgtgacctggtcactcgggatcccctgggcctaaacacacagcctat

SEQ ID NO: 756858 - DNA, 120 bp, Artificial Sequence
  ENSG00000213918_18 (sequence is synthesized)
tgtctacctcaagaaggctccccactgcttggctggcaattggggtgggctttgcaggccccacctgtcctggccccacggcgctggtgctgcaggcccccaccactgcttgttccgagc

SEQ ID NO: 756859 - DNA, 120 bp, Artificial Sequence
  ENSG00000213918_19 (sequence is synthesized)
tccccagcctcctgcagagttgcctgcacctgatggcgatgaatcaggaaggcaggcgtgtcctgggccacagagcagtcatggctgtcagccaccagggggctccatttgcaactttgg

SEQ ID NO: 756860 - DNA, 120 bp, Artificial Sequence
  ENSG00000213918_20 (sequence is synthesized)
atgtggctttggcctctttgtccaaagtgaccttggggcccccagacaagagacagggagactggagcccagccccaccctcccgcacatacctggcccatccctgccctatcctggaag

SEQ ID NO: 756861 - DNA, 120 bp, Artificial Sequence
  ENSG00000213918_21 (sequence is synthesized)
atgggggccaccacacgtgcaagggacacgggataggaacctttggccttgttatcagacattttaaaactaagtgcaaacgtgattatcaggtgcagtttttacagcagcaagaaacct

SEQ ID NO: 756862 - DNA, 120 bp, Artificial Sequence
  ENSG00000213918_22 (sequence is synthesized)
gtgcttacagaaagaaacacgtgctagcaacccacctatgcggaaagccacacagagccattgttttctgcactctcaggtgacggctcacatttgccccagggaaggtcacagctgcct

SEQ ID NO: 756863 - DNA, 120 bp, Artificial Sequence
  ENSG00000213918_23 (sequence is synthesized)
gaacttttaaaactcccagacacgcactgcctgtgcaggatccggagcccagcagcactgccagggccttgaagtgcttcttcagagacctttcttcatagactacttttttttctttaa

SEQ ID NO: 756864 - DNA, 120 bp, Artificial Sequence
  ENSG00000213918_24 (sequence is synthesized)
gcagcaaaaggagaaaattgtcatcaaaggatattccagattcttgacagcattctcgtcatctctgaggacatcaccatcatctcaggatgaggggcatgaagctgctgggggcgctgc

SEQ ID NO: 756865 - DNA, 120 bp, Artificial Sequence
  ENSG00000213918_25 (sequence is synthesized)
tggcactggcggccctactgcagggggccgtgtccctgaagatcgcagccttcaacatccagacatttggggagaccaagatgtccaatgccaccctcgtcagctacattgtgcagatcc

SEQ ID NO: 756866 - DNA, 120 bp, Artificial Sequence
  ENSG00000213918_26 (sequence is synthesized)
tgagccgctatgacatcgccctggtccaggaggtcagagacagccacctgactgccgtggggaagctgctggacaacctcaatcaggatgcaccagacacctatcactacgtggtcagtg

SEQ ID NO: 756867 - DNA, 120 bp, Artificial Sequence
  ENSG00000213918_27 (sequence is synthesized)
agccactgggacggaacagctataaggagcgctacctgttcgtgtacaggcctgaccaggtgtctgcggtggacagctactactacgatgatggctgcgagccctgcgggaacgacacct

SEQ ID NO: 756868 - DNA, 120 bp, Artificial Sequence
  ENSG00000213918_28 (sequence is synthesized)
tcaaccgagagccagccattgtcaggttcttctcccggttcacagaggtcagggagtttgccattgttcccctgcatgcggccccgggggacgcagtagccgagatcgacgctctctatg

SEQ ID NO: 756869 - DNA, 120 bp, Artificial Sequence
  ENSG00000213918_29 (sequence is synthesized)
acgtctacctggatgtccaagagaaatggggcttggaggacgtcatgttgatgggcgacttcaatgcgggctgcagctatgtgagaccctcccagtggtcatccatccgcctgtggacaa

SEQ ID NO: 756870 - DNA, 120 bp, Artificial Sequence
  ENSG00000213918_30 (sequence is synthesized)
gccccaccttccagtggctgatccccgacagcgctgacaccacagctacacccacgcactgtgcctatgacaggatcgtggttgcagggatgctgctccgaggcgccgttgttcccgact

SEQ ID NO: 756871 - DNA, 120 bp, Artificial Sequence
  ENSG00000213918_31 (sequence is synthesized)
cggctcttccctttaacttccaggctgcctatggcctgagtgaccaactggcccaagccatcagtgaccactatccagtggaggtgatgctgaagtgagcagcccctccccacaccagtt

SEQ ID NO: 756872 - DNA, 120 bp, Artificial Sequence
  ENSG00000213918_32 (sequence is synthesized)
gaactgcaggaagagaggacccatcctgccacaggacccagaaaaaaagcccaacacacactcgggttaagaaatacctttaaatttaggtaaataaagctcaaggaggtggggctgtca

SEQ ID NO: 756873 - DNA, 120 bp, Artificial Sequence
  ENSG00000213918_33 (sequence is synthesized)
cctggctgtcagtgtcgctccagggccttgacaagcagctcattcaagcggcccaccatggccctagggtcgtcaacaagtccagcagcaatcatggcgttctcgtatatctgaaaggca

SEQ ID NO: 756874 - DNA, 84 bp, Artificial Sequence
  ENSG00000213918_34 (sequence is synthesized)
tccagcagcaatcatggcgttctcgtatatctgaaaggcaagaggagaaacccattatgaggggcatggggcaccttttcgagg

SEQ ID NO: 756875 - DNA, 85 bp, Artificial Sequence
  ENSG00000213918_35 (sequence is synthesized)
ggcgtgagccaccacgcctggccatttttccgtttttaaaacagaatttggctgggcacggtggcgatggtgaaaaccccatctc

SEQ ID NO: 756876 - DNA, 86 bp, Artificial Sequence
  ENSG00000213918_36 (sequence is synthesized)
ccagcctggcaacagagcaacgacaggattttagaggaaaccgctgttccaccctgaaggcaggctggcagggctggtagcctggg

SEQ ID NO: 756877 - DNA, 120 bp, Artificial Sequence
  ENSG00000213918_37 (sequence is synthesized)
ttccaccctgaaggcaggctggcagggctggtagcctgggtccctgcagtcatcctaagctgctgcactcacctgatccaccagcagctgagccaggccaggctcgcttgcgcgcagctg

SEQ ID NO: 756878 - DNA, 120 bp, Artificial Sequence
  ENSG00000213918_38 (sequence is synthesized)
attcagcttcttgatgagcgcgtgcctgcaacacagaacccaccagaaaaagcagctcagtaccacgtgctgtgaccctcccttcatgttttgggattatcaggatatttaaagaagcac

SEQ ID NO: 756879 - DNA, 120 bp, Artificial Sequence
  ENSG00000213918_39 (sequence is synthesized)
agtaagactgtctgtagttttttaaataaggtatgttaatgatcatttatagataatatcattatatacccagaaaacccaagagaatcaggagtgtcagtattagaaaatgctgtaagg

SEQ ID NO: 756880 - DNA, 120 bp, Artificial Sequence
  ENSG00000213918_40 (sequence is synthesized)
tagccaaactccaagattaatatacactaaagggacaaaaggagcttagtacgtgaagacatgccttggttcctagataaataataaaagagaagggagtaagacccacatgttgaaaca

SEQ ID NO: 756881 - DNA, 120 bp, Artificial Sequence
  ENSG00000213918_41 (sequence is synthesized)
tattatagggctctagtaaataaaacagtttaggtctggaaagggggaaggcaaacaactccatgtaacgagggtggacactgagtgtctgatgaggacagtatttcacagaagagggag

SEQ ID NO: 756882 - DNA, 120 bp, Artificial Sequence
  ENSG00000213918_42 (sequence is synthesized)
gagacagatcactccatccagcagcactgggatgactgggagccatgcagaaaaccatttagaccagagtaaattccagagggatcaaagatgacaagcacaattctagggaagaaatgt

SEQ ID NO: 756883 - DNA, 120 bp, Artificial Sequence
  ENSG00000213918_43 (sequence is synthesized)
ttcatcatctcagaaggggaaagcctttccaagcaaaaccacaaaccaaaaagtaaagaatgattgacatatttgacgtcagaacaatatttttttctgcataggaaaaagcatcatgta

SEQ ID NO: 756884 - DNA, 120 bp, Artificial Sequence
  ENSG00000213918_44 (sequence is synthesized)
gtatttaaccttaacatgaatattataatttttcacttagaagtctgataaaaccgagggctctggggaactgtaaatttgtacaacctctccagaggacaactggagtcgggaaaacca

SEQ ID NO: 756885 - DNA, 120 bp, Artificial Sequence
  ENSG00000213918_45 (sequence is synthesized)
ggacaactggagtcgggaaaaccacatgtggatgatatgctgagactcagccattccatttcctaactgcatccctttaaacacttttttttttagatagatagatagatagatagatag

SEQ ID NO: 756886 - DNA, 120 bp, Artificial Sequence
  ENSG00000213918_46 (sequence is synthesized)
atagatagatagatagatagactctcactccttcacccaagctagagtgaaatggcatgatcttggctcaccgcagcctcctggtttcaagaggttctcttgcctcagcctcccaagtaa

SEQ ID NO: 756887 - DNA, 87 bp, Artificial Sequence
  ENSG00000213918_47 (sequence is synthesized)
aagtgatccacccgcctagcaccgcacccaacctaacagaggaaacacttcaaatgcacatcctcacatttctagtctacgtagctg

SEQ ID NO: 756888 - DNA, 120 bp, Artificial Sequence
  ENSG00000213918_48 (sequence is synthesized)
cttcaaatgcacatcctcacatttctagtctacgtagctggaaaaaaaggacattcttaatatgctaatgtggaggtcacctagttaccctaagggagaaaagcaaggcaaggacccact

SEQ ID NO: 756889 - DNA, 120 bp, Artificial Sequence
  ENSG00000213918_49 (sequence is synthesized)
gcacagcaagttcccccttggaagcccacgggcgcagctgcccacaaatgcacataatctctgcagaaatacaaaagccctaatgctggctgcactggggacacaggtaggaggaaattt

SEQ ID NO: 756890 - DNA, 120 bp, Artificial Sequence
  ENSG00000213918_50 (sequence is synthesized)
tcccctgtaagcagttttgaattctgaactatgtggacagaacaccaaattttaaaacaaatgaaagtgaagctggctgggcacagtggctctcgcctgtaatcccaccactttgggagg

SEQ ID NO: 756891 - DNA, 89 bp, Artificial Sequence
  ENSG00000213918_51 (sequence is synthesized)
ccaaaagtgaagtggcaacagacagaaacgagcacttctgcagctatctcacaaaactagtttgccaccaaaactagttaaagtgacct

SEQ ID NO: 756892 - DNA, 120 bp, Artificial Sequence
  ENSG00000213918_52 (sequence is synthesized)
cacaaaactagtttgccaccaaaactagttaaagtgacctggtgtccgcctcactgagctgctccagcagaggcacaggcattctgcatactggcgctgctgtgcactgacagccataag

SEQ ID NO: 756893 - DNA, 120 bp, Artificial Sequence
  ENSG00000213918_53 (sequence is synthesized)
ccaagtcagcctttccccaggagtgccatggctaggaagatgcatctccctcgcctccagtataattttaaaagttatggttgtaaaatgacaaaagaaaaaaactagacatgtactaaa

SEQ ID NO: 756894 - DNA, 120 bp, Artificial Sequence
  ENSG00000213918_54 (sequence is synthesized)
gaacaaaacaaaaactggctgggggtggtagcccacacttgtaatcccagcacttcgggaggctaaggcaggtggattgtttgaggccaggaggtagaagttgcagtgagctgagattgc

SEQ ID NO: 756895 - DNA, 120 bp, Artificial Sequence
  ENSG00000213918_55 (sequence is synthesized)
gggacagagtgagaccctgtctcaaaaattaaaatactacttaggctacattgtggggggggtggtaagtctatggattttgatttcctttttgctgttttctatttttggtaacatgtt

SEQ ID NO: 756896 - DNA, 120 bp, Artificial Sequence
  ENSG00000213918_56 (sequence is synthesized)
tctatttttggtaacatgtttatgtaacttcattttttaaaaaattgctacattcaaaatttcccccaaaaaagaaacttcatatacaagttagttcatatacaagttagaaaatgaaat

SEQ ID NO: 756897 - DNA, 120 bp, Artificial Sequence
  ENSG00000213918_57 (sequence is synthesized)
aattctttaaaaatggtaccagaaccctacagagaatgtaaggtaccaaaggatgttaaagacctaaatagatcacattcatgggtgcaaagaagtgatactgtaaaaagaaagaaactc

SEQ ID NO: 756898 - DNA, 120 bp, Artificial Sequence
  ENSG00000213918_58 (sequence is synthesized)
aaaagatacctaaaggcaggtgaaaagacatttacaacagataaagggcatataaagaacaacaggaagaaacgagggaaatcttacggctcagccactgtcagggctggggggttctcg

SEQ ID NO: 756899 - DNA, 120 bp, Artificial Sequence
  ENSG00000213918_59 (sequence is synthesized)
gtgcaccctggaagcagctcccaccaccggggccacagagaaacccacacaagccccagacacgtggacaagaatactcagagcagcctggctctccacaacttctgaccaagaaccacc

SEQ ID NO: 756900 - DNA, 120 bp, Artificial Sequence
  ENSG00000213918_60 (sequence is synthesized)
ggaggcccagcagagcagaacggagcagtctgctgtgccgaggtgggtttctgcagcggacattattcggctatgaaaatgaacttgtggcagcccctctgcatgggcaaccctcatgcc

SEQ ID NO: 756901 - DNA, 120 bp, Artificial Sequence
  ENSG00000213918_61 (sequence is synthesized)
aagtgagcaacgtgagacttcagcaaacaccaagatccacgtacaaagctcaaaacaggcaaaactgagcatgtccaggacacgcacaggtggcaaagccataaagcaaaacgaggacat

SEQ ID NO: 756902 - DNA, 120 bp, Artificial Sequence
  ENSG00000213918_62 (sequence is synthesized)
ggtcacaggctgggatgtggctaacctcccaggtgacacctggggatggtaaggggctggccaggttccatttcacatgggtgcagcctaaactgcatacagctccttatagttacccac

SEQ ID NO: 756903 - DNA, 120 bp, Artificial Sequence
  ENSG00000213918_63 (sequence is synthesized)
atgtccacaggcctcacgcacttttcttctgtgtcacattccacaacaaaagaacaccacacacaggattctggggaatcccacaggctggaagagccaggagcgtggcctcacctgggg

SEQ ID NO: 756904 - DNA, 120 bp, Artificial Sequence
  ENSG00000213918_64 (sequence is synthesized)
ttgatctccagcgtgggctgcaggagctgtgcgcgctcctcctgggtcttggccagctgctgcatgcgcaggaagtggcgggcagcccccatctccagcacggtgaccatggcagggtgg

SEQ ID NO: 756905 - DNA, 120 bp, Artificial Sequence
  ENSG00000213918_65 (sequence is synthesized)
gtgtccagtcggagggtcacctgtgagcaaagcccggggttgagggtgatagaggttcccaatgtgagagggctggcaggatcttaccaggggtgaaggtcacccagaccacgaggtagc

SEQ ID NO: 756906 - DNA, 120 bp, Artificial Sequence
  ENSG00000213918_66 (sequence is synthesized)
aggcggggtctcaaggactcccctggaccagcgctgctccctccccattacccactaacttgtgggccctgagctgatgccccacgcaaagatactgtgcccgaggggctccaccaccct

SEQ ID NO: 756907 - DNA, 120 bp, Artificial Sequence
  ENSG00000213918_67 (sequence is synthesized)
ggtgccccgctgctgcctccaggagctgcccgaatccatcgtcctctgctccatgccagcccaccctgcatgaggccccttcctccaagtgaccatgcatgggacgctcatttctcactc

SEQ ID NO: 756908 - DNA, 120 bp, Artificial Sequence
  ENSG00000213918_68 (sequence is synthesized)
tgagctagacaggttggtggggggagtcttagctctctgaagcccacccaaaacccccgactaagcacccaagtgagcatgtgagctcctgagggctggggtagcatgtcccttgtttgg

SEQ ID NO: 756909 - DNA, 120 bp, Artificial Sequence
  ENSG00000213918_69 (sequence is synthesized)
aacccccacgtcctcagccattgcagctcccactcaggatgctggtttttcagttctcagttcacacctgctctggagcagggctgggagaaagacacggccttcctgcctcagcggcac

SEQ ID NO: 756910 - DNA, 120 bp, Artificial Sequence
  ENSG00000213918_70 (sequence is synthesized)
tcccgagcaacacgtgccgagcagggacccacagggtctccacctgacaccaagggcttctgctgctgctggaaggacacccaacgggccaggtactgggagccaccagctggccagcct

SEQ ID NO: 756911 - DNA, 120 bp, Artificial Sequence
  ENSG00000213918_71 (sequence is synthesized)
gttagggacactgcggccaagtggtggtccatccccgggaaagcctcaccttcacgttggtgacacgcgaccccagcacatttctcatccaggccatgagctcctccgtctccttctctg

SEQ ID NO: 756912 - DNA, 120 bp, Artificial Sequence
  ENSG00000213918_72 (sequence is synthesized)
ataggcactcggcggctgcggaagagcaggcgacagggagctcaggcctgcatcccaactccccggcttccatgggggccacgcagcatgcttccagctcccacctcctctcccaccagg

SEQ ID NO: 756913 - DNA, 120 bp, Artificial Sequence
  ENSG00000213918_73 (sequence is synthesized)
atggagacacaagctagcaagatgcttttcatctaaaagtaaaacctcaaaggatgcttcaggttgcctgaggcccatacaacttggttagggctttaaaaaaatacacagcctctcaag

SEQ ID NO: 756914 - DNA, 120 bp, Artificial Sequence
  ENSG00000213918_74 (sequence is synthesized)
aagctgggccagctccagaagccaccgtggcaggagcactggacagacccctgatatctaaaccaggaggcaccttcctccagtcaccagggtgctcccacaaggctcttctcgggggtg

SEQ ID NO: 756915 - DNA, 120 bp, Artificial Sequence
  ENSG00000213918_75 (sequence is synthesized)
gctgagcccaggtcaactgacgaaaacccaaaggaagccctcgctgcggggcaggagaggcgtgcggggagtggaaaccagccccacgcctagagagcaggggatgccgacctggggacc

SEQ ID NO: 756916 - DNA, 120 bp, Artificial Sequence
  ENSG00000213918_76 (sequence is synthesized)
tgtcctcaaacttctcctccttgtagtgatccacgactatgtccgtctccacagagatcagcttcttcttgtcaaactcacgaaggtgcagcagggtgagctcatcaaactgctcaaagc

SEQ ID NO: 756917 - DNA, 120 bp, Artificial Sequence
  ENSG00000213918_77 (sequence is synthesized)
agaagagaacctgcaggtggccaagagcagctccatcagaccccgggggcctccagccaccacagaagaaaggatgagggcggcaggagggctgggggagccaagcgggccacactgggg

SEQ ID NO: 756918 - DNA, 120 bp, Artificial Sequence
  ENSG00000213918_78 (sequence is synthesized)
aacaccggggcagttggggttcctaggcctgcatgacagttactacgacacctgggtctaaggaaggctctgactgccttcaaggcagaagcactccacgcataaagaaatccacatgtg

SEQ ID NO: 756919 - DNA, 120 bp, Artificial Sequence
  ENSG00000213918_79 (sequence is synthesized)
aaaaacaaaaaacaaacaaaaaaaaccacatgtgacctccaagtgggaaacagccgtcacagtcggtccggcctctgtgcccgtgaccctgacccactgtgcagccctgcccggagtctt

SEQ ID NO: 756920 - DNA, 120 bp, Artificial Sequence
  ENSG00000213918_80 (sequence is synthesized)
ctgacccactgtgcagccctgcccggagtcttgggcaggttcacccagcacagagctgagaaggtcaagaccctccccaggttgcagcccccggagcccgccccacccaccgctcaccca

SEQ ID NO: 756921 - DNA, 120 bp, Artificial Sequence
  ENSG00000213918_81 (sequence is synthesized)
cctctgtgtctttcttcttcatggcctcatagtagggtgagtgctctgccaggtgacggttgggggcgcacaggtagtagatgttgcgggtgccggcccgcatgcggctggcgtattctg

SEQ ID NO: 756922 - DNA, 120 bp, Artificial Sequence
  ENSG00000213918_82 (sequence is synthesized)
agaggctggttagctgcccggagggcagcgccgaggactcgtagcgcagcagctttgctatgtcctcctagaagggacggggcaggtcaccacttattccaggcccatgggctcaatgtt

SEQ ID NO: 756923 - DNA, 120 bp, Artificial Sequence
  ENSG00000213918_83 (sequence is synthesized)
gcccaactaactgggcgcaaaccctccgatgcccatggcctcctggcactccaggctggccctgacccgagggacggtagtggactcgggggttgtccgagagcaggccttgctctgccc

SEQ ID NO: 756924 - DNA, 120 bp, Artificial Sequence
  ENSG00000213918_84 (sequence is synthesized)
atcaggccccttttgggagctctgggggcttaggaagcacctcctgccccaggtggcccaggggctctccagggagctacgcgcaccacgccctgggaggggaccccacccaacagcaga

SEQ ID NO: 756925 - DNA, 120 bp, Artificial Sequence
  ENSG00000213918_85 (sequence is synthesized)
gcccggcctggacccagcgtcttccctctgccctcagtgacagagtcagtctctggtgggcacacggacacgggtgaagtccacggttcccggccctcctcacagctggctatggcagag

SEQ ID NO: 756926 - DNA, 120 bp, Artificial Sequence
  ENSG00000213918_86 (sequence is synthesized)
actggctttgcccagtgggtttcagtgggatttggagaagggcccttaggggaggggtttgccctcctccccatcagctgaacgcagctgtgacctctagagctcatgggagctgcagct

SEQ ID NO: 756927 - DNA, 120 bp, Artificial Sequence
  ENSG00000213918_87 (sequence is synthesized)
ggaaggacgcagggggaaaacagaaagagggaaaagcaaggagctggacacccaaccagcagggcccaggccacccctgcacacatggtgggtctgcattgataagacatgtcacacgtg

SEQ ID NO: 756928 - DNA, 120 bp, Artificial Sequence
  ENSG00000213918_88 (sequence is synthesized)
cacacctacaaagacctagaaatgtctctgactcttacctgtgtgctgttaactcaaatgaagataaaggagaatgaagaggcctgtgtcagaagctgccgaagtcggcaaacaaccaga

SEQ ID NO: 756929 - DNA, 120 bp, Artificial Sequence
  ENSG00000213918_89 (sequence is synthesized)
acacggcctccttgggaccccacacacgtggtcaccctcctcctgctgctggggagaagggacaccagcacgggatgggctcctgggatgaaatgttctggggttacagtggaggcagcc

SEQ ID NO: 756930 - DNA, 120 bp, Artificial Sequence
  ENSG00000213918_90 (sequence is synthesized)
acaccacactgtgaatgcactaaatgccactgaattttacgtgttaaaaggtgaattctgtgaatctgatgctatgtaagttgtatctcaataaaaaatggacaaaaaatgtttatggaa

SEQ ID NO: 756931 - DNA, 120 bp, Artificial Sequence
  ENSG00000213918_91 (sequence is synthesized)
gactcattccaggttccgcaggctctgcgtctggtgtggaagagctcacggggaagcactcctgcccaggacccgaggagccggccaccgttcagaaggccccagcttgaaggcctggag

SEQ ID NO: 756932 - DNA, 120 bp, Artificial Sequence
  ENSG00000213918_92 (sequence is synthesized)
ggccagcgcttccggtcggcaggaggcggggcgaggcggaagcggcgcttgcttcaggtggagtctgttagtttttgagaaagagttagggcgagtttaaggcactgtggcagctgtgag

SEQ ID NO: 756933 - DNA, 120 bp, Artificial Sequence
  ENSG00000213918_93 (sequence is synthesized)
ataaagtctggttcctccccagctggctcaggaaatgttcgcggatacaacggcggccccctctgggcatacctgcctgtggagcggagagtggacggtgtgagggggaccgggagaggc

SEQ ID NO: 756934 - DNA, 120 bp, Artificial Sequence
  ENSG00000213918_94 (sequence is synthesized)
accaaatctggcctgggggcccgagaagcttcctctcagtgaccacaatatgaatgggaacagcaagatggcaaaagcttgctgagtggtacagcgccagcctgggtagtggcctcccca

SEQ ID NO: 756935 - DNA, 120 bp, Artificial Sequence
  ENSG00000213918_95 (sequence is synthesized)
gcaagttgcatgtcactagcttcctgtggctgtcactcctgggcccaggcacctccgaagatcagcacctcctcatgggctcaagcgaggacaggagcccgtcacccatgagctctcaag

SEQ ID NO: 756936 - DNA, 120 bp, Artificial Sequence
  ENSG00000213918_96 (sequence is synthesized)
ggcagagccactgtcctgtctcgatggctccaccgtgactccagtggactttggacagtggggagcaggcccaacagggccactcggatgtggtcactctggatttgggtggatcagcac

SEQ ID NO: 756937 - DNA, 120 bp, Artificial Sequence
  ENSG00000213918_97 (sequence is synthesized)
caagctagactcatccccagcccccaggtgctgttgctgctcctgcgtgaggccccatccacagctgcagctgtggcagggtggctagtggtggccagcatggccctgctgcagctccac

SEQ ID NO: 756938 - DNA, 120 bp, Artificial Sequence
  ENSG00000213918_98 (sequence is synthesized)
tgagaaggctgcagatcctcggggttggtgtaaaaacacctcatcctgatctgagaaggcggtcagcttttctcctcgttgccgttggctgccagcacccattctctgtggatgtgaaaa

SEQ ID NO: 756939 - DNA, 120 bp, Artificial Sequence
  ENSG00000213918_99 (sequence is synthesized)
tcccagaagggctgggcttccttcttgggcattccccaggcctatctccagagtggggcccagcatgggaggattgtaccccactcactcccctgatgtggggcttggacctacagctcg

SEQ ID NO: 756940 - DNA, 120 bp, Artificial Sequence
  ENSG00000213918_100 (sequence is synthesized)
acagcacccatggaatgtgggcagaagcgacagcagccagctccgccttggccttagggcggcacgtgttctgcttgtgccctgggagcctccaccttccacactgtgggaagagggtgc

SEQ ID NO: 756941 - DNA, 120 bp, Artificial Sequence
  ENSG00000213918_101 (sequence is synthesized)
ctcttccctttaacttccaggctgcctatggcctgagtgaccaactggtatgtgtcctcccttgcacagccacatgaggatgggacacaggagctcaggttggacaccagctcttcctgt

SEQ ID NO: 756942 - DNA, 120 bp, Artificial Sequence
  ENSG00000213918_102 (sequence is synthesized)
cagtatcctgaggagagagacgcactaagtgccaagcccccagcacctggggagccgggtgagtgcaccagcagtcccagggactcaagtggtgtcaatgacattggccagacagggccc

SEQ ID NO: 756943 - DNA, 120 bp, Artificial Sequence
  ENSG00000213918_103 (sequence is synthesized)
ggactcaagtggtgtcaatgacattggccagacagggcccagccaggtagcaccagatgctcatcagaaaagactaattctaggggccgggagtgatggttcatgcctgtaatcccagca

SEQ ID NO: 756944 - DNA, 70 bp, Artificial Sequence
  ENSG00000213918_104 (sequence is synthesized)
gaaattagccaggcatgatggcgagcacctgtggttccagctactcggaggctgaggcaggaaaattgct

SEQ ID NO: 756945 - DNA, 120 bp, Artificial Sequence
  ENSG00000213918_105 (sequence is synthesized)
agtgggtgacagtggcagggtcataggaaggtgacatctcgtccacggcacagcctcacttcacttgggccccaagggtggggacctgggcacagcctcgctatcggcagccagaggggt

SEQ ID NO: 756946 - DNA, 120 bp, Artificial Sequence
  ENSG00000213920_0 (sequence is synthesized)
gccatttgtctatggcaggcagggtggctgccttagctgccggaggttccgcactctctaaggccccgggtgaagccccacctctgctgcgcgcagcctgcggtgcgggtcatggcgcgg

SEQ ID NO: 756947 - DNA, 120 bp, Artificial Sequence
  ENSG00000213920_1 (sequence is synthesized)
ctaccgaagctggcagtctttgatttggattacactctctggcctttctgggtcgacacgcacgtagaccctccgttccataagagcagtgatggaactgtacgagataggcggggccaa

SEQ ID NO: 756948 - DNA, 120 bp, Artificial Sequence
  ENSG00000213920_2 (sequence is synthesized)
gacgtccgactgtacccagaggtgcctgaggtcctaaaacgattgcagagccttggggtgcccggtgcggctgcttcaaggacaagtgagatagaaggggccaaccagctactggagctc

SEQ ID NO: 756949 - DNA, 120 bp, Artificial Sequence
  ENSG00000213920_3 (sequence is synthesized)
gacctcttcaggtactttgttcatcgggaaatctatccaggcagcaagatcacacactttgagaggttgcagcagaagactggaattcctttctcccagatgatcttctttgatgatgag

SEQ ID NO: 756950 - DNA, 120 bp, Artificial Sequence
  ENSG00000213920_4 (sequence is synthesized)
aggcggaatattgtagacgtcagcaaactgggtgttacctgcattcacatccagaatggaatgaatcttcaaactctaagtcaagggttagagacatttgcgaaggcccaaactgggcct

SEQ ID NO: 756951 - DNA, 120 bp, Artificial Sequence
  ENSG00000213920_5 (sequence is synthesized)
ttgaggtccagccttgaggagagcccatttgaggcctaaactgaaaggaaatcaagaaggcattttcaggtgcatttgtaatttattaaagttcatctgtgtgtgacagaagagatttta

SEQ ID NO: 756952 - DNA, 120 bp, Artificial Sequence
  ENSG00000213920_6 (sequence is synthesized)
agctggcagtctttgatttgggtgagggacgggaaggggagaatttcgtaaggtgctctccttttccacatccctaacagcagctcccgaatccctgcatctcccgccccaggctgaacc

SEQ ID NO: 756953 - DNA, 120 bp, Artificial Sequence
  ENSG00000213920_7 (sequence is synthesized)
gatcacacactttgagaggtatgcggagataagggaggagcagggtgagaaagtatcagagaggcctgggaaaccaagatactagcttggttactcctgccctgtcttgaataggttgca

SEQ ID NO: 756954 - DNA, 120 bp, Artificial Sequence
  ENSG00000213920_8 (sequence is synthesized)
gtgaagccccacctctgctgcgcgcagcctgcggtgcgggtcatggcgcggctaccgaagctggcagtctttgatttgggtgagggacgggaaggggagaatttcgtaagattacactct

SEQ ID NO: 756955 - DNA, 120 bp, Artificial Sequence
  ENSG00000213921_0 (sequence is synthesized)
acacagctgatcgaacccactcatttctagaggacaccatgtttgaagggccaaggcgttatcgtcggccacgcacaagatttctctccaaacaactcacagcattgagagaattgcttg

SEQ ID NO: 756956 - DNA, 120 bp, Artificial Sequence
  ENSG00000213921_1 (sequence is synthesized)
aaaagaccatgcacccaagtttggctacaatggggaaactggcttcaaagctacaacttgatctatccgtagtaaagatctggttcaagaaccagcgtgccaaatggaagaggcagcagc

SEQ ID NO: 756957 - DNA, 120 bp, Artificial Sequence
  ENSG00000213921_2 (sequence is synthesized)
gactccctcagccataactactgcaaacattcgtccagtaagtcctggaatctctgatgcaaatgaccatgatctacgtgagccttctggtatcaagaatcctggaggagccagcgcctc

SEQ ID NO: 756958 - DNA, 120 bp, Artificial Sequence
  ENSG00000213921_3 (sequence is synthesized)
tgcgagggtttcatcctgggattctcagtcatatgacattgaacagatatgtctgggggcttcaaatcctccttgggcctccactctctttgaaatagatgaatttgtaaagatctatga

SEQ ID NO: 756959 - DNA, 120 bp, Artificial Sequence
  ENSG00000213921_4 (sequence is synthesized)
cttgccaggggaagatgacaccagcagcctaaatcaatatctttttccagtatgccttgagtatgaccagctccaatcttcagtgtaacttcttacacatcacttctaggggaggtctgg

SEQ ID NO: 756960 - DNA, 120 bp, Artificial Sequence
  ENSG00000213921_5 (sequence is synthesized)
ctgcacacggttttcagcctcatgcctccgtggaacctgcctgtcaggcgggcacctggaatctcaagcaactttctcaagaagggccaaggcgttatcgtcggccacgcacaagatttc

SEQ ID NO: 756961 - DNA, 120 bp, Artificial Sequence
  ENSG00000213923_0 (sequence is synthesized)
ggttgggatctgaggggtcctctctgtgcccatcacagtttgagcttcagggaaaagaagaagaggtctttgcccttcgtttttccacgggaggagaatcaagagtgagccatggagcta

SEQ ID NO: 756962 - DNA, 120 bp, Artificial Sequence
  ENSG00000213923_1 (sequence is synthesized)
cgtgtggggaacaagtaccgcctgggacggaagatcgggagcgggtccttcggagatatctacctgggtgccaacatcgcctctggtgaggaagtcgccatcaagctggagtgtgtgaag

SEQ ID NO: 756963 - DNA, 120 bp, Artificial Sequence
  ENSG00000213923_2 (sequence is synthesized)
acaaagcacccccagctgcacatcgagagcaagttctacaagatgatgcagggtggcgtggggatcccgtccatcaagtggtgcggagctgagggcgactacaacgtgatggtcatggag

SEQ ID NO: 756964 - DNA, 120 bp, Artificial Sequence
  ENSG00000213923_3 (sequence is synthesized)
ctgctggggcctagcctcgaggacctgttcaacttctgttcccgcaaattcagcctcaagacggtgctgctcttggccgaccagatgatcagccgcatcgagtatatccactccaagaac

SEQ ID NO: 756965 - DNA, 120 bp, Artificial Sequence
  ENSG00000213923_4 (sequence is synthesized)
ttcatccaccgggacgtcaagcccgacaacttcctcatggggctggggaagaagggcaacctggtctacatcatcgacttcggcctggccaagaagtaccgggacgcccgcacccaccag

SEQ ID NO: 756966 - DNA, 120 bp, Artificial Sequence
  ENSG00000213923_5 (sequence is synthesized)
cacattccctaccgggaaaacaagaacctgaccggcacggcccgctacgcttccatcaacacgcacctgggcattgagcaaagccgtcgagatgacctggagagcctgggctacgtgctc

SEQ ID NO: 756967 - DNA, 120 bp, Artificial Sequence
  ENSG00000213923_6 (sequence is synthesized)
atgtacttcaacctgggctccctgccctggcaggggctcaaagcagccaccaagcgccagaagtatgaacggatcagcgagaagaagatgtcaacgcccatcgaggtcctctgcaaaggc

SEQ ID NO: 756968 - DNA, 120 bp, Artificial Sequence
  ENSG00000213923_7 (sequence is synthesized)
tatccctccgaattctcaacatacctcaacttctgccgctccctgcggtttgacgacaagcccgactactcttacctacgtcagctcttccgcaacctcttccaccggcagggcttctcc

SEQ ID NO: 756969 - DNA, 120 bp, Artificial Sequence
  ENSG00000213923_8 (sequence is synthesized)
tatgactacgtctttgactggaacatgctgaaattcggtgcagcccggaatcccgaggatgtggaccgggagcggcgagaacacgaacgcgaggagaggatggggcagctacgggggtcc

SEQ ID NO: 756970 - DNA, 120 bp, Artificial Sequence
  ENSG00000213923_9 (sequence is synthesized)
gcgacccgagccctgccccctggcccacccacgggggccactgccaaccggctccgcagtgccgccgagcccgtggcttccacgccagcctcccgcatccagccggctggcaatacttct

SEQ ID NO: 756971 - DNA, 120 bp, Artificial Sequence
  ENSG00000213923_10 (sequence is synthesized)
cccagagcgatctcgcgggtcgaccgggagaggaaggtgagtatgaggctgcacaggggtgcgcccgccaacgtctcctcctcagacctcactgggcggcaagaggtctcccggatccca

SEQ ID NO: 756972 - DNA, 120 bp, Artificial Sequence
  ENSG00000213923_11 (sequence is synthesized)
ctcacagacaagtgtgccatttgaccatctcgggaagtgaggagagcccccattggaccagtgtttgcttagtgtcttcactgtattttctttaaaaaaaaaaaaaaaaaaaaaaaggca

SEQ ID NO: 756973 - DNA, 120 bp, Artificial Sequence
  ENSG00000213923_12 (sequence is synthesized)
aaaataaaccactcaaaagaacaacaaaaaaacccagcacaaaaccgacgatggagtttgtttctttgatttctttgccaatggcaagaagatgagatgccctcagcactgaggattctt

SEQ ID NO: 756974 - DNA, 120 bp, Artificial Sequence
  ENSG00000213923_13 (sequence is synthesized)
gcccccttgtggtgcccgctgcccccaaccttcaggctgccagatgctcccctgacaacaccaggctacaggagccagacgccagggcctgcccggcctcctgttcctgcccccacccac

SEQ ID NO: 756975 - DNA, 120 bp, Artificial Sequence
  ENSG00000213923_14 (sequence is synthesized)
cacctgcctggagaggaacgggtcgggtccgtgtcggagaagtgacaggtcccagagccaaagccggccctcaagcatcatcagggagtggtgtagtcagttgaaggcagttcccaccga

SEQ ID NO: 756976 - DNA, 120 bp, Artificial Sequence
  ENSG00000213923_15 (sequence is synthesized)
gttttccgagcctcagaatccaggagatacgcacagccccacccactctgagatgacagtggctgacttcccgtgctgggcttttccattgtccccctggcctccaggctcctcctctgc

SEQ ID NO: 756977 - DNA, 120 bp, Artificial Sequence
  ENSG00000213923_16 (sequence is synthesized)
ctctccatggagtgggtggggaggtggtgggggccggcgtcccctgcgtgtgtgtgtgtgtgtgtgtgtgtggatgtattgacctgtgtttcccaagacagcaggtgccacggcccgccc

SEQ ID NO: 756978 - DNA, 120 bp, Artificial Sequence
  ENSG00000213923_17 (sequence is synthesized)
cgcctgccagcccgaattcccgttctcctgtgtctactaacaaggacatgggggtgggcggtgacctccgcatccctcagagctcagagggtcctcgctgccaccggtccccccctagcc

SEQ ID NO: 756979 - DNA, 120 bp, Artificial Sequence
  ENSG00000213923_18 (sequence is synthesized)
cgtcatcagccggtggcagctccatcttccattcctggttttagggcagaatccatggagactgcttccagaaggcatctggctctgagttataaattacttccctggtcctgacagtca

SEQ ID NO: 756980 - DNA, 120 bp, Artificial Sequence
  ENSG00000213923_19 (sequence is synthesized)
cctggggtcccccctctccctggttccacctttctgaggaggagcctggagtcagggctgggttttggattaacccatccttcctagttaacacctttttgtttttattttattttattt

SEQ ID NO: 756981 - DNA, 120 bp, Artificial Sequence
  ENSG00000213923_20 (sequence is synthesized)
ttgtttgttttctccgtgtgtgtgttttcctaatttatttacctctgtttcccctttttcctttttttttttaattaaagagcaaagctttttattactttgtaatttaaaaaactgaaa

SEQ ID NO: 756982 - DNA, 120 bp, Artificial Sequence
  ENSG00000213923_21 (sequence is synthesized)
aaaaaaaaactgaagaactttggggggaattttgtacttttttcctgtgtaaatattggacttttttgagctttatcgtggttgttaatttgaagtaataaagtagaaaagataaagtga

SEQ ID NO: 756983 - DNA, 80 bp, Artificial Sequence
  ENSG00000213923_22 (sequence is synthesized)
ccgcccccgcccgcggcagccccccgagcagtggcccggcatcggcgccttcccggcgggcaagagtgagccatggagct

SEQ ID NO: 756984 - DNA, 120 bp, Artificial Sequence
  ENSG00000213923_23 (sequence is synthesized)
caggagcacctctccacccactgctgctggtctgaccgccttcctggaagtccctcttgaggcaggccctggagttagaagctgggcagaggcacccacagccttatcctttgccaatct

SEQ ID NO: 756985 - DNA, 120 bp, Artificial Sequence
  ENSG00000213923_24 (sequence is synthesized)
ctgactcaatgccacggccactgtagtgagctgaaccacctccagcagtcccctggcagaagcacctggaaaacatgcaatgggaaccttcaccctgaggccaggcccttcccatgctac

SEQ ID NO: 756986 - DNA, 120 bp, Artificial Sequence
  ENSG00000213923_25 (sequence is synthesized)
ccaacagtagacaggacaccctgtgttgttggctgcaccggggtgctgggatctgtggatccctggggcctggaagccactctcagcacatacagccactgtgttccgaggtccagtcag

SEQ ID NO: 756987 - DNA, 120 bp, Artificial Sequence
  ENSG00000213923_26 (sequence is synthesized)
ctggccgggaaggaattcaacacagccaaggacagaggtccatatgatgacgggtggatgctcgtgtgactttgctgaccttttatgttttctatgggcaataaaggccaagagagctcc

SEQ ID NO: 756988 - DNA, 120 bp, Artificial Sequence
  ENSG00000213923_27 (sequence is synthesized)
tgttttgtagaaattcatccacacaagagagtggaggcatgaacagggctggccttcctcggatctcaggcccaggaaccaagctgtccatggcgggctgggcagatatttgggggtggg

SEQ ID NO: 756989 - DNA, 120 bp, Artificial Sequence
  ENSG00000213923_28 (sequence is synthesized)
gtggggagatgctcaccaggagggcagagaagggagagaatccgtttctgtcacatgaagatggatctcctagcgtgctgggccttgagccaggctctggggcccagagggagatagacc

SEQ ID NO: 756990 - DNA, 80 bp, Artificial Sequence
  ENSG00000213923_29 (sequence is synthesized)
ggggacgaggaggagggggcctgttattttgcaggctcgcgggggaggccccccggccggcctgcctccgcttccccccg

SEQ ID NO: 756991 - DNA, 120 bp, Artificial Sequence
  ENSG00000213923_30 (sequence is synthesized)
ggctgtgatttggggacgctgagggagggggcttggggtgctgggcgccggatactgttgattcgggcccgcgtagcgtttcatcggacaatcaccggcgccccctgctctcccggcccc

SEQ ID NO: 756992 - DNA, 120 bp, Artificial Sequence
  ENSG00000213923_31 (sequence is synthesized)
tgactacgtctttgactggaacatgctgaaattcgtgagtcacctggaggccaaggcgggcttgggggactggatggggaaggccctgactcagagggccagagtgagctggtggcggga

SEQ ID NO: 756993 - DNA, 120 bp, Artificial Sequence
  ENSG00000213923_32 (sequence is synthesized)
ggggctcccgacagacgggaggtacgagctggacagtgtggttgacctcactggggtcccagagccctccagcctcatccgtgctgacagcttgtgccaccatgggcagcagggcccagg

SEQ ID NO: 756994 - DNA, 87 bp, Artificial Sequence
  ENSG00000213923_33 (sequence is synthesized)
cagagggagatagaccaagggacgagaagacaggagtttggggggccaacgggaggcccagacaggtgggtcacttgaggtcaggag

SEQ ID NO: 756995 - DNA, 120 bp, Artificial Sequence
  ENSG00000213923_34 (sequence is synthesized)
ccctttccatcgacgctgcttgccttggagtgaaccccttctgtagagccaggacttggcctcatttaatcctctgaggtctgatgagccctcttgagcaaagtcattcaccaaggctca

SEQ ID NO: 756996 - DNA, 120 bp, Artificial Sequence
  ENSG00000213923_35 (sequence is synthesized)
aggccggtggaggaggtggaggagctgtccccccaaaactactggcctgtggtctggactccagggccccatttctgatgtcgccaggtgtgcctgagcccatcggggccaggcctgagg

SEQ ID NO: 756997 - DNA, 120 bp, Artificial Sequence
  ENSG00000213923_36 (sequence is synthesized)
aagtgtttcttgggaggatgggatgaccccctgttcccaagagatggcagcacagtggaggccatggtggaaaaggccctgccatggggtccttgagggccaggacagcctgagggaggg

SEQ ID NO: 756998 - DNA, 120 bp, Artificial Sequence
  ENSG00000213923_37 (sequence is synthesized)
atggtggccactgcccacaaggggcctggtgggaacgggtcccaggacagactcatagctagaccccgttggcggcctctgtgttgaaccagaactcattaaacacctcctcttgcttca

SEQ ID NO: 756999 - DNA, 120 bp, Artificial Sequence
  ENSG00000213923_38 (sequence is synthesized)
ctttctgtccccgcccctgtccctgtgctgggcccacgtactcacccacgtactggtaaggatcctctgaggtctggcttttccaaaatttgccacttgaccagtgagcgcaagaggctg

SEQ ID NO: 757000 - DNA, 120 bp, Artificial Sequence
  ENSG00000213923_39 (sequence is synthesized)
gctgaaattcacggacactgtccaagatggtagccattggccacatgcgacacatttttaatgaattaaaattaatcaagactggaaatgtcggccaggcctggtggctcatgcctgtaa

SEQ ID NO: 757001 - DNA, 120 bp, Artificial Sequence
  ENSG00000213923_40 (sequence is synthesized)
gcaaggcagatgggaccatttccttcatccagaacgttctgtggacatcactgctctaggttcctcccttatggagtctcacaagactgtctagccagcaagatctcttttccaaccagg

SEQ ID NO: 757002 - DNA, 120 bp, Artificial Sequence
  ENSG00000213923_41 (sequence is synthesized)
cagtgtttgcttaggtgagtccatgactgctgcagatgcagccagcccagccgacctagaagctcccagggccccagaaagagaccaatgtgttgtggaggggtgggtggcagtggcagt

SEQ ID NO: 757003 - DNA, 120 bp, Artificial Sequence
  ENSG00000213923_42 (sequence is synthesized)
ggcagatggtaccaggcgccccagaactctaaggggcctcaagtagtttaaaacctcggaggctgcctgacttggggccaagggtttctatgctcaggcctgacccctcatggattagtt

SEQ ID NO: 757004 - DNA, 120 bp, Artificial Sequence
  ENSG00000213923_43 (sequence is synthesized)
tctgctggaaaaactttttctgccctcggccaggtctctatctccttctgccttaacatattttggaaggttggttcccagcagagacggggccatgggctcacactctgacctctccca

SEQ ID NO: 757005 - DNA, 120 bp, Artificial Sequence
  ENSG00000213927_0 (sequence is synthesized)
aaggaagagtctaggctgagcaacatgaaggggcccccaaccttctgcagcctcctgctgctgtcattgctcctgagcccagaccctacagcagcattcctactgccacccagcactgcc

SEQ ID NO: 757006 - DNA, 120 bp, Artificial Sequence
  ENSG00000213927_1 (sequence is synthesized)
caggtggaactgcaggaggctgacggggactgtcacctccaggctttcgtgcttcacctggctcaacgcagcatctgcatccacccccagaaccccagcctgtcacagtggtttgagcac

SEQ ID NO: 757007 - DNA, 120 bp, Artificial Sequence
  ENSG00000213927_2 (sequence is synthesized)
caagagagaaagctccatgggactctgcccaagctgaattttgggatgctaaggaaaatgggctgaagcccccaatagccaaataataaagcagcattggataataatttctgagtataa

SEQ ID NO: 757008 - DNA, 120 bp, Artificial Sequence
  ENSG00000213927_3 (sequence is synthesized)
cctactccatagagagtggctgaccctacagcagacgactgcaacaagataagggctggattactgtgttatgacttggtttatgtttcaaatatagagcaggacttgcagattgagatc

SEQ ID NO: 757009 - DNA, 120 bp, Artificial Sequence
  ENSG00000213927_4 (sequence is synthesized)
cctggaccaggagtgggaaattcttaaaggagccaggggcactgaacttggcagcatacccccaccctaggcagctcccagcttcctggaaaggactggataaagatgaataggagcttt

SEQ ID NO: 757010 - DNA, 120 bp, Artificial Sequence
  ENSG00000213927_5 (sequence is synthesized)
gcattgcagggagggggtaaagaacggagtgacagctgggtatgggattaggagagaagcggctatagctggagggtgggatgcagggggtatagcagttggacatgagggtgtgactga

SEQ ID NO: 757011 - DNA, 120 bp, Artificial Sequence
  ENSG00000213927_6 (sequence is synthesized)
aggaggctggaatttgagtaaaacaaagatgtaattgagtgcttgagtccaatgtcttcaacaagtcagggactggatctggagaccctaggcccctgctggcaagaggttggcattcct

SEQ ID NO: 757012 - DNA, 120 bp, Artificial Sequence
  ENSG00000213928_0 (sequence is synthesized)
ggagagatcagccgcccagccaggagttaagctgaggtcgtctgagccctgcgacagcctggacagcaactcaggatggcatcaggcagggcacgctgcacccgaaaactccggaactgg

SEQ ID NO: 757013 - DNA, 120 bp, Artificial Sequence
  ENSG00000213928_1 (sequence is synthesized)
gtggtggagcaagtggagagtgggcagtttcccggagtgtgctgggatgatacagctaagaccatgttccggattccctggaaacatgcaggcaagcaggacttccgggaggaccaggat

SEQ ID NO: 757014 - DNA, 120 bp, Artificial Sequence
  ENSG00000213928_2 (sequence is synthesized)
gctgccttcttcaaggcctgggcaatatttaagggaaagtataaggagggggacacaggaggtccagctgtctggaagactcgcctgcgctgtgcactcaacaagagttctgaatttaag

SEQ ID NO: 757015 - DNA, 120 bp, Artificial Sequence
  ENSG00000213928_3 (sequence is synthesized)
gaggttcctgagaggggccgcatggatgttgctgagccctacaaggtgtatcagttgctgccaccaggaatcgtctctggccagccagggactcagaaagtaccatcaaagcgacagcac

SEQ ID NO: 757016 - DNA, 120 bp, Artificial Sequence
  ENSG00000213928_4 (sequence is synthesized)
agttctgtgtcctctgagaggaaggaggaagaggatgccatgcagaactgcacactcagtccctctgtgctccaggactccctcaataatgaggaggagggggccagtgggggagcagtc

SEQ ID NO: 757017 - DNA, 120 bp, Artificial Sequence
  ENSG00000213928_5 (sequence is synthesized)
cattcagacattgggagcagcagcagcagcagcagccctgagccacaggaagttacagacacaactgaggccccctttcaaggggatcagaggtccctggagtttctgcttcctccagag

SEQ ID NO: 757018 - DNA, 120 bp, Artificial Sequence
  ENSG00000213928_6 (sequence is synthesized)
agcctggattgccgccttgtggctgagccctcaggctctgagagcagcatggagcaggtgctgttccccaagcctggcccactggagcccacgcagcgcctgctgagccagcttgagagg

SEQ ID NO: 757019 - DNA, 120 bp, Artificial Sequence
  ENSG00000213928_7 (sequence is synthesized)
ggcatcctagtggccagcaacccccgaggcctcttcgtgcagcgcctttgccccatccccatctcctggaatgcaccccaggctccacctgggccaggcccgcatctgctgcccagcaac

SEQ ID NO: 757020 - DNA, 120 bp, Artificial Sequence
  ENSG00000213928_8 (sequence is synthesized)
gagtgcgtggagctcttcagaaccgcctacttctgcagagacttggtcaggtactttcagggcctgggccccccaccgaagttccaggtaacactgaatttctgggaagagagccatggc

SEQ ID NO: 757021 - DNA, 120 bp, Artificial Sequence
  ENSG00000213928_9 (sequence is synthesized)
tccagccatactccacagaatcttatcacagtgaagatggagcaggcctttgcccgatacttgctggagcagactccagagcagcaggcagccattctgtccctggtgtagagcctgggg

SEQ ID NO: 757022 - DNA, 120 bp, Artificial Sequence
  ENSG00000213928_10 (sequence is synthesized)
gacccatcttccacctcacctctttgttcttcctgtctcctttgaagtagactcattcttcacacgattgacctgtcctctttgtgataattctcagtagttgtccgtgataatcgtgtc

SEQ ID NO: 757023 - DNA, 120 bp, Artificial Sequence
  ENSG00000213928_11 (sequence is synthesized)
ctgaaaatcctcgcacacactggctggtggagaactcaaggctaattttttatccttttttttttttaattttgagatatacgccctctttcatctgtaagggactaggaaattccaaat

SEQ ID NO: 757024 - DNA, 120 bp, Artificial Sequence
  ENSG00000213928_12 (sequence is synthesized)
ggtgtgaacccagggggcctttccctcttccctgacctcccaactctaaagccaagcactttatattttcctcttagatattcactaaggacttaaaataaaattttattgaaagaggaa

SEQ ID NO: 757025 - DNA, 120 bp, Artificial Sequence
  ENSG00000213928_13 (sequence is synthesized)
aactgggtgggcctaagggcaggacagtaaccagagggagaggtgggccaatgaaagacactgtgtcttgggaggccgaggctggcagatcacgtgaggtcagaagttcgaaaccagcct

SEQ ID NO: 757026 - DNA, 80 bp, Artificial Sequence
  ENSG00000213928_14 (sequence is synthesized)
gctggcagatcacgtgaggtcagaagttcgaaaccagcctcgaccaacatggtgatgtggcatctgcctgtaatcccagc

SEQ ID NO: 757027 - DNA, 120 bp, Artificial Sequence
  ENSG00000213928_15 (sequence is synthesized)
gtgcccctgaggtcttccacctttgactatgcatgcattatctagtcagtcagggcttacagcaaactgtacccacattaccatagccctaggcagtggtttctaggtggcgagaattcc

SEQ ID NO: 757028 - DNA, 120 bp, Artificial Sequence
  ENSG00000213928_16 (sequence is synthesized)
caggaggaggagggggccagtgggggagcagtccattcagacattgggagcagcagcagcagcagcagccctgagccacaggaaggtaccacctgccctgcctcttgtgtcgtcccccat

SEQ ID NO: 757029 - DNA, 120 bp, Artificial Sequence
  ENSG00000213928_17 (sequence is synthesized)
gggaggtggagttgttcccctggggaggggctgctgccagcctgcatgctcctccagcaccaggtagggctgttctatccccagactactcactgctgctcaccttcatctacaacgggc

SEQ ID NO: 757030 - DNA, 120 bp, Artificial Sequence
  ENSG00000213928_18 (sequence is synthesized)
gcttgtgtgttgcatatcctgtgtggccatatgcccagcctggcagctacctggcagctctcctccagccaagacaatggaagaggtggttcaggtagagcccagcacaagagtgtcata

SEQ ID NO: 757031 - DNA, 120 bp, Artificial Sequence
  ENSG00000213928_19 (sequence is synthesized)
tcttggagaacaccatcacactgaagcatgcagtcactatgtgaaggtgcacagaagaattggcacagagattttgagcctcatggccttctcctacgtacacacatttgggagagctgg

SEQ ID NO: 757032 - DNA, 120 bp, Artificial Sequence
  ENSG00000213928_20 (sequence is synthesized)
cacacatcacacacactggccctggctgcaccgtctttaccacactccaggcatgccttagggttgcgcttctctcccatccaattccagctcctactcaattctaaacctgaccttaag

SEQ ID NO: 757033 - DNA, 120 bp, Artificial Sequence
  ENSG00000213928_21 (sequence is synthesized)
ttgtccaaccactgctagactcagcagactggggaggaaggatagatgtgcaggcttcccccaggcttatagctctgccctgtccatgcccttggggggctgcaacccaggtttcccttc

SEQ ID NO: 757034 - DNA, 120 bp, Artificial Sequence
  ENSG00000213928_22 (sequence is synthesized)
tccatcatgggttcctcactattgcctccctgcctgtggccctctctcttctttttgttcttcgaacccttgaccctttctctttcagacttggtcaggtactttcagggcctgggcccc

SEQ ID NO: 757035 - DNA, 120 bp, Artificial Sequence
  ENSG00000213928_23 (sequence is synthesized)
acattgatttcattgggccaaacagaggcccaatctcaagggaccttctagtaaactacaagcccctgggcattgagccctgaggcctcatggtgaatcacatactagctacttgcctca

SEQ ID NO: 757036 - DNA, 120 bp, Artificial Sequence
  ENSG00000213928_24 (sequence is synthesized)
gtgtgggatggtgtatacacactggtacactcatcctcgagcacttgcgtctgcctgggtttcagataagggacagattggagaggaaaactagctgcatcatttgcagagtccagtaca

SEQ ID NO: 757037 - DNA, 78 bp, Artificial Sequence
  ENSG00000213928_25 (sequence is synthesized)
gagaggaaaactagctgcatcatttgcagagtccagtacaaaatgaaaatgtggaggccttgttcaaaaattttaggg

SEQ ID NO: 757038 - DNA, 120 bp, Artificial Sequence
  ENSG00000213930_0 (sequence is synthesized)
gcacggccctgcagattttccagcggatcccccggtggcctcatgtcgcgcagtggaaccgatcctcagcaacgccagcaggcgtcagaggcggacgccgcagcagcaaccttccgggca

SEQ ID NO: 757039 - DNA, 120 bp, Artificial Sequence
  ENSG00000213930_1 (sequence is synthesized)
aacgaccatcagcatatccgctacaacccgctgcaggatgagtgggtgctggtgtcagctcaccgcatgaagcggccctggcagggtcaagtggagccccagcttctgaagacagtgccc

SEQ ID NO: 757040 - DNA, 120 bp, Artificial Sequence
  ENSG00000213930_2 (sequence is synthesized)
cgccatgaccctctcaaccctctgtgtcctggggccatccgagccaacggagaggtgaatccccagtacgatagcaccttcctgtttgacaacgacttcccagctctgcagcctgatgcc

SEQ ID NO: 757041 - DNA, 120 bp, Artificial Sequence
  ENSG00000213930_3 (sequence is synthesized)
cccagtccaggacccagtgatcatccccttttccaagcaaagtctgctcgaggagtctgtaaggtcatgtgcttccacccctggtcggatgtaacgctgccactcatgtcggtccctgag

SEQ ID NO: 757042 - DNA, 120 bp, Artificial Sequence
  ENSG00000213930_4 (sequence is synthesized)
atccgggctgttgttgatgcatgggcctcagtcacagaggagctgggtgcccagtacccttgggtgcagatctttgaaaacaaaggtgccatgatgggctgttctaacccccacccccac

SEQ ID NO: 757043 - DNA, 120 bp, Artificial Sequence
  ENSG00000213930_5 (sequence is synthesized)
tgccaggtatgggccagcagtttcctgccagatattgcccagcgtgaggagcgatctcagcaggcctataagagtcagcatggagagcccctgctaatggagtacagccgccaggagcta

SEQ ID NO: 757044 - DNA, 120 bp, Artificial Sequence
  ENSG00000213930_6 (sequence is synthesized)
ctcaggaaggaacgtctggtcctaaccagtgagcactggttagtactggtccccttctgggcaacatggccctaccagacactgctgctgccccgtcggcatgtgcggcggctacctgag

SEQ ID NO: 757045 - DNA, 120 bp, Artificial Sequence
  ENSG00000213930_7 (sequence is synthesized)
actccatgggctggcatggggctcccacaggatcagaggctggggccaactggaaccattggcagctgcacgctcattactaccctccgctcctgcgctctgccactgtccggaaattca

SEQ ID NO: 757046 - DNA, 120 bp, Artificial Sequence
  ENSG00000213930_8 (sequence is synthesized)
tggttggctacgaaatgcttgctcaggctcagagggacctcacccctgagcaggctgcagagagactaagggcacttcctgaggttcattaccacctggggcagaaggacagggagacag

SEQ ID NO: 757047 - DNA, 120 bp, Artificial Sequence
  ENSG00000213930_9 (sequence is synthesized)
caaccatcgcctgaccacgccgaccacagggccttgaatccttttttgttttcaacagtcttgctgaattaagcagaaagggccttgaatcctggcctggaatttgggcagatatagcat

SEQ ID NO: 757048 - DNA, 120 bp, Artificial Sequence
  ENSG00000213930_10 (sequence is synthesized)
taataaaactgtgcatctcaaacttttatcacatactctaatatcagaggagtgtgaaccttcagagatctagggttaaaagctaaaggcatagctccagctacaacttttctttgtcta

SEQ ID NO: 757049 - DNA, 120 bp, Artificial Sequence
  ENSG00000213930_11 (sequence is synthesized)
cagatgtgtaaaatcttgatgcaaaaatctaccccaaatttctgaacaaaattaatattcagtattatatctagcctatagattctcttactcttggtgtaatgacagcattcccagttt

SEQ ID NO: 757050 - DNA, 120 bp, Artificial Sequence
  ENSG00000213930_12 (sequence is synthesized)
aggaaactgttttaaaatcttgtgtcttggttgtggctgaggctttgggaaggccagagccccctttgccaccacccctagggtgtcagctccaagcctgggcctgagggtttgatgggg

SEQ ID NO: 757051 - DNA, 120 bp, Artificial Sequence
  ENSG00000213930_13 (sequence is synthesized)
agcgggtgagctggatcctgatcccagtggtcagtggccagatcctgggctgctggccagaaccctggctttgtgagtggctgcagcttggctctgctccagcccacaggggctaaaggg

SEQ ID NO: 757052 - DNA, 120 bp, Artificial Sequence
  ENSG00000213930_14 (sequence is synthesized)
cccagtgatcatccccttttccaagcaaagtctgctcgaggagtctggtaactatggatttcccctcttacaactttcaaaccagagttggagactcagcattggggttcggccctgccc

SEQ ID NO: 757053 - DNA, 120 bp, Artificial Sequence
  ENSG00000213930_15 (sequence is synthesized)
aaggtgggagagagccaagccctgtgtccccaaggagtccctaactttcttatcccatgagagaggtgtgtaaaggagaaagctagaggtgaactagtagagagagacttgctaggaggc

SEQ ID NO: 757054 - DNA, 120 bp, Artificial Sequence
  ENSG00000213930_16 (sequence is synthesized)
cttagcaataatccagtaatctaaaggaaagatgatggtgacttagactcgggtggttagtggtagaggtggtgagaagacatcagatcctgggcacattcttttcttctgcttcccttg

SEQ ID NO: 757055 - DNA, 120 bp, Artificial Sequence
  ENSG00000213930_17 (sequence is synthesized)
tgaggcttttcaagtacctatatttagccccaacaccatttctgggctcctggggctcagcctagtgaactgcaacctcaaaggagcaagccttgaaacagttgctgggggaagtggcca

SEQ ID NO: 757056 - DNA, 120 bp, Artificial Sequence
  ENSG00000213930_18 (sequence is synthesized)
gagtagagatgctgggactgagggtggagcagcaaacttggtgaaactacatctccaatgtgctttctaatctcctgccagctcttctcaagcaggggatcctgggagatgtagttttca

SEQ ID NO: 757057 - DNA, 120 bp, Artificial Sequence
  ENSG00000213930_19 (sequence is synthesized)
aggtcaggactcagaacagtctggcgtctccagactctcacatgcagtatgtgcaggcacctgatacttctgttgcccttgtgctccagtcattgcacaaggcagaaaacagctctggca

SEQ ID NO: 757058 - DNA, 120 bp, Artificial Sequence
  ENSG00000213930_20 (sequence is synthesized)
ggaagggactgccaaagttaggagccctagggcctggaaggagagtatggtcctcagatcccccttctctcctgcttcctccagggaacccaacagtcatgaccctgatagtttcccata

SEQ ID NO: 757059 - DNA, 120 bp, Artificial Sequence
  ENSG00000213930_21 (sequence is synthesized)
acaacctgggcattccttgggactcaggagctgctaaactctttcatcccctggtggcttcagcagtccttatcaccagcctcacaatcccacaggcccacccccagtgggcctgtggca

SEQ ID NO: 757060 - DNA, 120 bp, Artificial Sequence
  ENSG00000213930_22 (sequence is synthesized)
ttcatatttcatattcatatttcaaaccacaatatccagcaaaatgtctcctgagcacccagaactccataccatcggccgggtgtggtggctcatgccttaatcccagcactttgggag

SEQ ID NO: 757061 - DNA, 120 bp, Artificial Sequence
  ENSG00000213930_23 (sequence is synthesized)
gtcaagatgggaggattgcttgagcccagaagttcgagactagcctgggaaacataggaagccctcgtctctacaaaaaaaatttaaaaagttagccaggtatggtggcatatacttgtg

SEQ ID NO: 757062 - DNA, 77 bp, Artificial Sequence
  ENSG00000213930_24 (sequence is synthesized)
aatttaaaaagttagccaggtatggtggcatatacttgtggtcccagatacttgggaggctgagacatcatggcatc

SEQ ID NO: 757063 - DNA, 120 bp, Artificial Sequence
  ENSG00000213930_25 (sequence is synthesized)
cctctgtgtcctggggccatccgagccaacggagaggtaagcctgtagagccctgcatctgcaggctgggccacggggagtagttccctcttagaactgtcctccacccacagggatagt

SEQ ID NO: 757064 - DNA, 120 bp, Artificial Sequence
  ENSG00000213930_26 (sequence is synthesized)
gaacctccttctgggtcatatcccaccaagctttttggtcccctagggtgggccttccctactcccttgtagcctgtccagtctttgaagcccaccaggtaactggtggtatggggcagt

SEQ ID NO: 757065 - DNA, 120 bp, Artificial Sequence
  ENSG00000213930_27 (sequence is synthesized)
taactgcaccgcggcagggactcgctggggcgcggagccgagccctccccttccttaggaagctttcgtcccctccgaaggttggaacgctcatcccgagccagaccgacaaggcgtaca

SEQ ID NO: 757066 - DNA, 120 bp, Artificial Sequence
  ENSG00000213930_28 (sequence is synthesized)
gtctgcaggcctgtacgagcagcaggccaattggcgctgggaaagtccaatcctgggcctctagctcctgagcgggacagggccgagagggcgctcccgagcttgggcctgctggtgggt

SEQ ID NO: 757067 - DNA, 120 bp, Artificial Sequence
  ENSG00000213930_29 (sequence is synthesized)
gatggtcagtctcccaagtaggatcctggggctaggcactggatggaggttgctcccagtagggtcagcatctggaccccaggctgagagtcaggctctgattccagatctagcctccat

SEQ ID NO: 757068 - DNA, 120 bp, Artificial Sequence
  ENSG00000213930_30 (sequence is synthesized)
ccccttcccctggatgggcagggagggggtgatgaagctttggttctggggagtaacatttctgtttccacagggtgtggtcaggagggagttgacttggtgtcttttggctaacagagc

SEQ ID NO: 757069 - DNA, 120 bp, Artificial Sequence
  ENSG00000213930_31 (sequence is synthesized)
ctcaaccctctgtgtcctggggccatccgagccaacggagagctctgcagcctgatgcccccagtccaggtaacctggctccaactgctgctggggaggagggtggctagacctcttgag

SEQ ID NO: 757070 - DNA, 120 bp, Artificial Sequence
  ENSG00000213930_32 (sequence is synthesized)
caggactgaagcggagaggaggcagttcaagctgggagccccagggtgggcattccagaggcggtgacacctgagcagtgtctttaagagctcgcagaaggggcatgccagcccacaggg

SEQ ID NO: 757071 - DNA, 120 bp, Artificial Sequence
  ENSG00000213931_0 (sequence is synthesized)
ctctttttgcctgctgccattccagtaggatgtgacttgcttctcctggccatggttgtgaggcctccccagctatgtggaactatagatgaggagccaacaaaaaagagcctcaggatc

SEQ ID NO: 757072 - DNA, 120 bp, Artificial Sequence
  ENSG00000213931_1 (sequence is synthesized)
cagcacacattatcacaaacttagtgtccatccatcactgctgaccctctccggacctgactccacccctgagggacacaggtcagccttgaccaatgacttttaagtaccatggagaac

SEQ ID NO: 757073 - DNA, 120 bp, Artificial Sequence
  ENSG00000213931_2 (sequence is synthesized)
agggggccagaacttcggcagtaaagaataaaaggccagacagagaggcagcagcacatatctgcttccgacacagctgcaatcactagcaagctctcaggcctggcatcatggtgcatt

SEQ ID NO: 757074 - DNA, 120 bp, Artificial Sequence
  ENSG00000213931_3 (sequence is synthesized)
gcagactcctcgttgtttacccctggacccagagattttttgacagctttggaaacctgtcgtctccctctgccatcctgggcaaccccaaggtcaaggcccatggcaagaaggtgctga

SEQ ID NO: 757075 - DNA, 120 bp, Artificial Sequence
  ENSG00000213931_4 (sequence is synthesized)
cttcctttggagatgctattaaaaacatggacaacctcaagcccgcctttgctaagctgagtgagctgcactgtgacaagctgcatgtggatcctgagaacttcaagctcctgggtaacg

SEQ ID NO: 757076 - DNA, 120 bp, Artificial Sequence
  ENSG00000213931_5 (sequence is synthesized)
tgatggtgattattctggctactcactttggcaaggagttcacccctgaagtgcaggctgcctggcagaagctggtgtctgctgtcgccattgccctggcccataagtaccactgagttc

SEQ ID NO: 757077 - DNA, 120 bp, Artificial Sequence
  ENSG00000213931_6 (sequence is synthesized)
tcttccagtttgcaggtgttcctgtgaccctgacaccctccttctgcacatggggactgggcttggccttgagagaaagccttctgtttaataaagtacattttcttcagtaatcaaaaa

SEQ ID NO: 757078 - DNA, 120 bp, Artificial Sequence
  ENSG00000213934_0 (sequence is synthesized)
acacactcgcttctggaacgtctgaggttatcaataagctcctagtccagacgccatgggtcatttcacagaggaggacaaggctactatcacaagcctgtggggcaaggtgaatgtgga

SEQ ID NO: 757079 - DNA, 120 bp, Artificial Sequence
  ENSG00000213934_1 (sequence is synthesized)
agatgctggaggagaaaccctgggaaggctcctggttgtctacccatggacccagaggttctttgacagctttggcaacctgtcctctgcctctgccatcatgggcaaccccaaagtcaa

SEQ ID NO: 757080 - DNA, 120 bp, Artificial Sequence
  ENSG00000213934_2 (sequence is synthesized)
ggcacatggcaagaaggtgctgacttccttgggagatgccacaaagcacctggatgatctcaagggcacctttgcccagctgagtgaactgcactgtgacaagctgcatgtggatcctga

SEQ ID NO: 757081 - DNA, 120 bp, Artificial Sequence
  ENSG00000213934_3 (sequence is synthesized)
aattcacccctgaggtgcaggcttcctggcagaagatggtgactgcagtggccagtgccctgtcctccagataccactgagctcactgcccatgattcagagctttcaaggataggcttt

SEQ ID NO: 757082 - DNA, 120 bp, Artificial Sequence
  ENSG00000213934_4 (sequence is synthesized)
attctgcaagcaatacaaataataaatctattctgctgagagatcacacatgattttcttcagctcttttttttacatctttttaaatatatgagccacaaagggtttatattgagggaa

SEQ ID NO: 757083 - DNA, 120 bp, Artificial Sequence
  ENSG00000213934_5 (sequence is synthesized)
gtgtgtatgtgtatttctgcatgcctgtttgtgtttgtggtgtgtgcatgctcctcatttatttttatatgagatgtgcattttgatgagcaaataaaagcagtaaagacacttgtacac

SEQ ID NO: 757084 - DNA, 120 bp, Artificial Sequence
  ENSG00000213934_6 (sequence is synthesized)
ttcaaggtgagtccaggagatgtttcagccctgttgcctttagtctcgaggcaacttagacaacggagtattgatctgagcacagcagggtgtgagctgtttgaagatactggggttggg

SEQ ID NO: 757085 - DNA, 120 bp, Artificial Sequence
  ENSG00000213934_7 (sequence is synthesized)
ggtgaagaaactgcagaggactaactgggctgagacccagtggtaatgttttagggcctaaggagtgcctctaaaaatctagatggacaattttgactttgagaaaagagaggtggaaat

SEQ ID NO: 757086 - DNA, 120 bp, Artificial Sequence
  ENSG00000213934_8 (sequence is synthesized)
gaggaaaatgacttttctttattagattccagtagaaagaactttcatctttccctcatttttgttgttttaaaacatctatctggaggcaggacaagtatggtcgttaaaaagatgcag

SEQ ID NO: 757087 - DNA, 120 bp, Artificial Sequence
  ENSG00000213934_9 (sequence is synthesized)
caaagtggggaactttggtggccaaacatacattgctaaggctattcctatatcagctggacacatataaaatgctgctaatgcttcattacaaacttatatcctttaattccagatggg

SEQ ID NO: 757088 - DNA, 120 bp, Artificial Sequence
  ENSG00000213934_10 (sequence is synthesized)
ttatatcctttaattccagatgggggcaaagtatgtccaggggtgaggaacaattgaaacatttgggctggagtagattttgaaagtcagctctgtgtgtgtgtgtgtgtgtgcgcgcgc

SEQ ID NO: 757089 - DNA, 120 bp, Artificial Sequence
  ENSG00000213934_11 (sequence is synthesized)
gtgtttcttttaacgtcttcagcctacaacatacagggttcatggtggcaagaagatagcaagatttaaattatggccagtgactagtgcttgaaggggaacaactacctgcatttaatg

SEQ ID NO: 757090 - DNA, 120 bp, Artificial Sequence
  ENSG00000213934_12 (sequence is synthesized)
ggaaggcaaaatctcaggctttgagggaagttaacataggcttgattctgggtggaagcttggtgtgtagttatctggaggccaggctggagctctcagctcactatgggttcatcttta

SEQ ID NO: 757091 - DNA, 120 bp, Artificial Sequence
  ENSG00000213937_0 (sequence is synthesized)
agagtccccaggtggcactgtcagagtcgctcagtgggaacctgcgccagccggcaggagacgtggctgtcctcagcctggcagtgcgtctggagggcctgtgcgagctcagcccaggtg

SEQ ID NO: 757092 - DNA, 120 bp, Artificial Sequence
  ENSG00000213937_1 (sequence is synthesized)
tgacagcggggtggtaagagcagcagcaccctcagggcatccgatgggcggaggcccctcgaggtgacacccaccactcagccgagcgggactacgagtctgctttgtgctccgcgagga

SEQ ID NO: 757093 - DNA, 120 bp, Artificial Sequence
  ENSG00000213937_2 (sequence is synthesized)
ccagaaacacctgcaagaggcacggagaggaggcgcctttcaagaggcgcctttcatggaactgaggactggcctggcttggggacaccaacaagccttccccctcctgctggacacaga

SEQ ID NO: 757094 - DNA, 120 bp, Artificial Sequence
  ENSG00000213937_3 (sequence is synthesized)
gacacccacccagcacaccagacacaccctctgagtcacctaggccgcctggggctgagaagacctaaccgaggggccagatggcttcgaccggcttagaactgctgggcatgaccctgg

SEQ ID NO: 757095 - DNA, 120 bp, Artificial Sequence
  ENSG00000213937_4 (sequence is synthesized)
ctgtgctgggctggctggggaccctggtgtcctgcgccctgcccctgtggaaggtgaccgccttcatcggcaacagcatcgtggtggcccaggtggtgtgggagggcctgtggatgtcct

SEQ ID NO: 757096 - DNA, 120 bp, Artificial Sequence
  ENSG00000213937_5 (sequence is synthesized)
gcgtggtgcagagcacgggccagatgcagtgcaaggtgtacgactcactgctggctctgccgcaggacctgcaggccgcacgtgccctctgtgtcattgccctcctgctggccctgcttg

SEQ ID NO: 757097 - DNA, 120 bp, Artificial Sequence
  ENSG00000213937_6 (sequence is synthesized)
gcccagtgtaccacgtgtgtggaggacgaaggtgccaaggcccgtatcgtgctcaccgcgggggtcatcctcctcctcgccggcatcctggtgctcatccctgtgtgctggacggcgcac

SEQ ID NO: 757098 - DNA, 120 bp, Artificial Sequence
  ENSG00000213937_7 (sequence is synthesized)
gccatcatccaggacttctacaaccccctggtggctgaggccctcaagcgggagctgggggcctccctctacctgggctgggcggcggctgcactgcttatgctgggcggggggctcctc

SEQ ID NO: 757099 - DNA, 120 bp, Artificial Sequence
  ENSG00000213937_8 (sequence is synthesized)
tgctgcacgtgccccccgccccaggtcgagcggccccgcggacctcggctgggctactccatcccctcccgctcgggtgcatctggactggacaagagggactacgtgtgaggcggaggt

SEQ ID NO: 757100 - DNA, 120 bp, Artificial Sequence
  ENSG00000213937_9 (sequence is synthesized)
ttcccctgggagcccactgctccccactgccccgccctttcgaccttggcctgatgaccagatgccctgctccatcacaacctccttccccaggaaaacccactttccaaaagcccaagc

SEQ ID NO: 757101 - DNA, 120 bp, Artificial Sequence
  ENSG00000213937_10 (sequence is synthesized)
tacacctggctgcagggctgggtcagctggcctggctgagctcttctcagtggggtcccctttgatgttctcccccaagttgggcagcctagaggtgttgggaaccctggcctgccccca

SEQ ID NO: 757102 - DNA, 120 bp, Artificial Sequence
  ENSG00000213937_11 (sequence is synthesized)
cctccccagtaattgtttccttccgttgcccaggacactggctggccttccttctcttctgagccctcccctgccccaggaaccctggcctcaccaaaacagcagcagctcgttggctcc

SEQ ID NO: 757103 - DNA, 120 bp, Artificial Sequence
  ENSG00000213937_12 (sequence is synthesized)
aaaaccagggagcagaccatgccctcccaaccctggagttgtcagggagggcctgcccatcacctccctctccccaacatccccaccctcgagttggaaataaagagcatttgtaactgg

SEQ ID NO: 757104 - DNA, 120 bp, Artificial Sequence; identical to SEQ ID NO: 434098
  ENSG00000213949_0 (sequence is synthesized)

SEQ ID NO: 757105 - DNA, 120 bp, Artificial Sequence; identical to SEQ ID NO: 434099
  ENSG00000213949_1 (sequence is synthesized)

SEQ ID NO: 757106 - DNA, 120 bp, Artificial Sequence; identical to SEQ ID NO: 434100
  ENSG00000213949_2 (sequence is synthesized)

SEQ ID NO: 757107 - DNA, 120 bp, Artificial Sequence
  ENSG00000213949_3 (sequence is synthesized)
ccggtcctgccctgcgaaccagcgcggccccctggcgctgaggctgctccggccatggcccctcggccccgcgcccgcccaggggtcgctgtcgcctgctgctggctcctcactgttgtt

SEQ ID NO: 757108 - DNA, 120 bp, Artificial Sequence
  ENSG00000213949_4 (sequence is synthesized)
tgctgctggctcctcactgttgttctacgctgctgcgtatcattcaatgttgatgtgaaaaattcaatgactttcagcggcccggtggaagacatgtttggatatactgttcaacaatat

SEQ ID NO: 757109 - DNA, 120 bp, Artificial Sequence
  ENSG00000213949_5 (sequence is synthesized)
gaaaatgaagaaggaaaatgggtgcttattggttctccgttagttggccaacccaaaaacagaactggagatgtctataagtgtccagttgggagaggtgaatcattaccttgtgtaaag

SEQ ID NO: 757110 - DNA, 120 bp, Artificial Sequence
  ENSG00000213949_6 (sequence is synthesized)
ttggatctaccagttaatacatcaattcccaatgtcacagaagtaaaggagaacatgacatttggatcaactttagtcaccaacccaaatggaggatttctggcttgtgggcccttatat

SEQ ID NO: 757111 - DNA, 120 bp, Artificial Sequence
  ENSG00000213949_7 (sequence is synthesized)
gcctatagatgtggacatttgcattacacaactggaatctgttctgacgtcagccccacatttcaagtcgtgaattccattgcccctgtacaagaatgcagcactcaactggacatagtc

SEQ ID NO: 757112 - DNA, 120 bp, Artificial Sequence
  ENSG00000213949_8 (sequence is synthesized)
atagtgctggatggttccaacagtatttacccatgggacagtgttacagcttttttaaatgaccttcttgaaagaatggatattggtcctaaacagacacaggttggaattgtacagtat

SEQ ID NO: 757113 - DNA, 120 bp, Artificial Sequence
  ENSG00000213949_9 (sequence is synthesized)
ggagaaaacgtgacccatgagttcaacctcaataagtattcttccaccgaagaggtacttgttgcagcaaagaaaatagtccagagaggtggccgccagactatgacagctcttggaata

SEQ ID NO: 757114 - DNA, 120 bp, Artificial Sequence
  ENSG00000213949_10 (sequence is synthesized)
gacacagcaagaaaggaggcattcacggaagcccggggtgcccgaagaggagttaaaaaagtcatggttattgtgacagatggagagtctcatgacaatcatcgactgaagaaggtcatc

SEQ ID NO: 757115 - DNA, 120 bp, Artificial Sequence
  ENSG00000213949_11 (sequence is synthesized)
caagactgtgaagatgaaaacattcaacggttttccatagctattcttggcagctataaccgaggaaatttaagcactgaaaaatttgtggaggaaataaaatcaattgcaagtgaaccc

SEQ ID NO: 757116 - DNA, 120 bp, Artificial Sequence
  ENSG00000213949_12 (sequence is synthesized)
actgaaaagcatttcttcaatgtctctgatgaattggctctagtcaccattgttaaaactctgggagaaagaatatttgccctggaagccacagctgaccagtcagcagcttcatttgaa

SEQ ID NO: 757117 - DNA, 120 bp, Artificial Sequence
  ENSG00000213949_13 (sequence is synthesized)
atggaaatgtctcagactggcttcagtgctcattattcacaggactgggtcatgcttggagcagtaggagcctatgattggaatggaacagttgtcatgcagaaggctagtcaaatcata

SEQ ID NO: 757118 - DNA, 120 bp, Artificial Sequence
  ENSG00000213949_14 (sequence is synthesized)
atccctcgaaacacaacctttaatgttgagtctaccaaaaagaatgaaccgcttgcttcttatttaggttacactgtaaactctgctactgcttcttctggagatgtgctctatattgct

SEQ ID NO: 757119 - DNA, 120 bp, Artificial Sequence
  ENSG00000213949_15 (sequence is synthesized)
ggacagcctcggtacaatcatacaggccaggtcattatctacaggatggaagatggaaacatcaaaattctccagacgctcagtggagaacagattggttcctactttggcagtatttta

SEQ ID NO: 757120 - DNA, 120 bp, Artificial Sequence
  ENSG00000213949_16 (sequence is synthesized)
acaacaactgacattgacaaggattctaatactgacattcttctagtcggagcccctatgtacatgggaacagagaaggaggagcaaggaaaagtgtatgtgtatgctctcaatcagaca

SEQ ID NO: 757121 - DNA, 120 bp, Artificial Sequence
  ENSG00000213949_17 (sequence is synthesized)
aggtttgaatatcaaatgagcctggaacctattaagcagacgtgctgttcatctcggcagcacaattcatgcacaacagaaaacaaaaatgagccatgcggggctcgttttggaactgca

SEQ ID NO: 757122 - DNA, 120 bp, Artificial Sequence
  ENSG00000213949_18 (sequence is synthesized)
attgctgctgtaaaagacctcaatcttgatggatttaatgacatcgtgataggagctccgctggaagatgatcacgggggagctgtgtacatttatcatggaagtggcaagactataagg

SEQ ID NO: 757123 - DNA, 120 bp, Artificial Sequence
  ENSG00000213949_19 (sequence is synthesized)
aaagagtatgcacaacgtattccatcaggtggggatggtaagacactgaaattttttggccagtctatccacggagaaatggatttaaatggtgacggtctgacagatgtgactattggg

SEQ ID NO: 757124 - DNA, 120 bp, Artificial Sequence
  ENSG00000213949_20 (sequence is synthesized)
ggccttggtggtgctgccctcttctggtcccgagatgtggccgtagttaaagtgaccatgaattttgagccaaataaagtgaatattcaaaagaaaaactgccatatggagggaaaggaa

SEQ ID NO: 757125 - DNA, 120 bp, Artificial Sequence
  ENSG00000213949_21 (sequence is synthesized)
acagtatgcataaatgctacagtgtgttttgatgtgaaattaaagtctaaagaagacacgatttatgaagctgatttgcagtaccgtgtcaccctagattcactaagacaaatatcacga

SEQ ID NO: 757126 - DNA, 120 bp, Artificial Sequence
  ENSG00000213949_22 (sequence is synthesized)
agttttttctctggaactcaagagagaaaggttcaaaggaacatcacagttcgaaaatcagaatgcactaagcactccttctacatgttggacaagcatgactttcaggactctgtgaga

SEQ ID NO: 757127 - DNA, 120 bp, Artificial Sequence
  ENSG00000213949_23 (sequence is synthesized)
ataacgttggactttaatcttaccgatccagaaaatgggcctgttcttgatgattctctaccaaactcagtacatgaatatattccctttgccaaagattgtggaaataaggaaaaatgt

SEQ ID NO: 757128 - DNA, 120 bp, Artificial Sequence
  ENSG00000213949_24 (sequence is synthesized)
atctcagacctcagcctgcatgtcgccaccactgaaaaggacctgctgattgtccgatcccagaatgataagttcaacgttagcctcacagtcaaaaatacaaaggacagtgcctataac

SEQ ID NO: 757129 - DNA, 120 bp, Artificial Sequence
  ENSG00000213949_25 (sequence is synthesized)
accaggacaatagtgcattattctccaaatctagttttttcaggaattgaggctatccaaaaagacagttgtgaatctaatcataatatcacatgtaaagttggatatcccttcctgaga

SEQ ID NO: 757130 - DNA, 120 bp, Artificial Sequence
  ENSG00000213949_26 (sequence is synthesized)
agaggagagatggtaactttcaaaatattgtttcagtttaacacatcctatctcatggaaaatgtgaccatttatttaagtgcaacaagtgacagcgaagaacctcctgaaaccctttct

SEQ ID NO: 757131 - DNA, 120 bp, Artificial Sequence
  ENSG00000213949_27 (sequence is synthesized)
gataatgtagtaaacatttctatcccggtaaaatatgaagttggactacagttttacagctctgcaagtgaataccacatttcaattgctgccaatgagacagtccctgaagttattaat

SEQ ID NO: 757132 - DNA, 120 bp, Artificial Sequence
  ENSG00000213949_28 (sequence is synthesized)
tctactgaggacattggaaatgaaattaatatcttctacttgattagaaaaagtggatcttttccaatgccagagcttaagctgtcaatttcattccccaatatgacatcaaatggttac

SEQ ID NO: 757133 - DNA, 120 bp, Artificial Sequence
  ENSG00000213949_29 (sequence is synthesized)
cctgtgctgtacccaactggattgtcatcttctgagaatgcaaactgcagaccccatatctttgaggatcctttcagtatcaactctggaaagaaaatgactacatcaactgaccatctc

SEQ ID NO: 757134 - DNA, 120 bp, Artificial Sequence
  ENSG00000213949_30 (sequence is synthesized)
aaacgaggcacaattctggactgcaatacatgtaaatttgctaccatcacatgtaatctcacttcttctgacatcagccaagtcaatgtttcgcttatcttgtggaaaccaacttttata

SEQ ID NO: 757135 - DNA, 120 bp, Artificial Sequence
  ENSG00000213949_31 (sequence is synthesized)
aaatcatatttttccagcttaaatcttactataaggggagaacttcggagtgaaaatgcatctctggttttaagtagcagcaatcaaaaaagagagcttgctattcaaatatccaaagat

SEQ ID NO: 757136 - DNA, 120 bp, Artificial Sequence
  ENSG00000213949_32 (sequence is synthesized)
gggctaccgggcagagtgccattatgggtcatcctgctgagtgcttttgccggattgttgctgttaatgctgctcattttagcactgtggaagattggattcttcaaaagaccactgaaa

SEQ ID NO: 757137 - DNA, 120 bp, Artificial Sequence
  ENSG00000213949_33 (sequence is synthesized)
aagaaaatggagaaatgaaatattttatgaaagaaaataataacaattattcaataatctatcctcaggtttgcctcaaatatgtgacaagaaatgtataattcatgacatagtcatgta

SEQ ID NO: 757138 - DNA, 120 bp, Artificial Sequence
  ENSG00000213949_34 (sequence is synthesized)
actatgtaatccatcagggattcattacttggaaaatgacaggtcatgcattatccaaaaacaataccaaaaagacatattttataaaatgacaaaaaatattttacataattactcatt

SEQ ID NO: 757139 - DNA, 120 bp, Artificial Sequence
  ENSG00000213949_35 (sequence is synthesized)
tttgttgagtaagcaaaattacaaagtgtttttaaaaaaacctgtacaaatatgtttatgtattaaatcaccatccaaaatatttaaggaatatataaaaagatttttatgatcatagaa

SEQ ID NO: 757140 - DNA, 120 bp, Artificial Sequence
  ENSG00000213949_36 (sequence is synthesized)
acatctattttcaaaacaatataaattaagcttttccccttgattcctgttggatatccatgttcagcatgacagtcagcactcgtaaatgccaagaaaagaattacctgaaaaagatca

SEQ ID NO: 757141 - DNA, 120 bp, Artificial Sequence
  ENSG00000213949_37 (sequence is synthesized)
tttctccctattcaaatgagaatattttcccttggtagaatccatatacaatatggattgaaaattaagtcaccaagaatacatttagcatctttgtgttgggttctatacctaaaaatt

SEQ ID NO: 757142 - DNA, 120 bp, Artificial Sequence
  ENSG00000213949_38 (sequence is synthesized)
ttccctccctgcccaaggtgattggaaagtactgcaattgagctaaaattttatctaggatggaaaatcaggatagactcgtttaaaaacaagtatattaaatgggttaaattaagcttt

SEQ ID NO: 757143 - DNA, 120 bp, Artificial Sequence
  ENSG00000213949_39 (sequence is synthesized)
tacagaacatgcttaattttgatattgagctctaaatgcaaaactcttttatactgaaaaaacacttaaagtagttttgtgtggcatcacagtgatttgtcatgaaaagccatatatggg

SEQ ID NO: 757144 - DNA, 120 bp, Artificial Sequence
  ENSG00000213949_40 (sequence is synthesized)
ggacatgctaaaatggcttctgaatgaaatacgacagcagagaaagatgccactgaaatgctgaaattatctttgctgagcagcttttgaatgctaagggttccagtatgtgacccaaag

SEQ ID NO: 757145 - DNA, 120 bp, Artificial Sequence
  ENSG00000213949_41 (sequence is synthesized)
aaagagttgtctcaactccttggtacagggttcattcaaacccccaagctgtgagagtgtgtttatttttaattttttaaaaggtatttaatttccaaccacacttcttatttttttgaa

SEQ ID NO: 757146 - DNA, 120 bp, Artificial Sequence
  ENSG00000213949_42 (sequence is synthesized)
aagacaattttccatttcagtattacattttaccaagaagtcactgctttttaggtgtgttgcatcaatatttaaataaaatcccagaaatgtattttaaagaatttcaggtttgaaaac

SEQ ID NO: 757147 - DNA, 120 bp, Artificial Sequence
  ENSG00000213949_43 (sequence is synthesized)
tcaaaccaacaggaagatatcacacctttgtatgtgcttctttgttcttgaagtagtcattatggttcattggaatctactgtagcataagctcctaggttgctccatttcttaggaaaa

SEQ ID NO: 757148 - DNA, 120 bp, Artificial Sequence
  ENSG00000213949_44 (sequence is synthesized)
tgacatttctgcaacaacatttctccatctgatttaccagaacctgtaacaagaccagaacatgtattcatccagaaactcctgggctctgctttgttcaaagaggagcaaatccacata

SEQ ID NO: 757149 - DNA, 120 bp, Artificial Sequence
  ENSG00000213949_45 (sequence is synthesized)
gaaattaaatgttataaatttatttttttaaactaatttccaaagaatttagctgaagactcagagtcagcctacctcttgactctccacatccgcatctaagatcctgaaggccaaagg

SEQ ID NO: 757150 - DNA, 120 bp, Artificial Sequence
  ENSG00000213949_46 (sequence is synthesized)
aatgcgcctgtgggatgccaaagccatcagtagctggaagaaagaatacctctttctagaggtttggtgtcctcttgctggcctgtcattatttggaaatacgcgcttttggaatttcct

SEQ ID NO: 757151 - DNA, 120 bp, Artificial Sequence
  ENSG00000213949_47 (sequence is synthesized)
tcattttcgctatttccaggttcagaaatcatacctaccacttgttctttctttgcccagtaaaactcagggtttctcttattcagagttaccatgttgcacacccccagtgctcagcct

SEQ ID NO: 757152 - DNA, 120 bp, Artificial Sequence
  ENSG00000213949_48 (sequence is synthesized)
gcccagaagcccttctctgatctcagcaagatcttagtagtaaagctaacggatccattgaaattcatactcagcatctgtgactactagacaaagcccatttactgaaccataagtgtg

SEQ ID NO: 757153 - DNA, 120 bp, Artificial Sequence
  ENSG00000213949_49 (sequence is synthesized)
cacttttaaactaaattgttaactgaaagggaaaaaatagaaatgagggcattttgaagtttttagaaaagagaggaagagctgttggccagatcaaagagatacttataagcccggcac

SEQ ID NO: 757154 - DNA, 120 bp, Artificial Sequence
  ENSG00000213949_50 (sequence is synthesized)
aatttttaacataagtcattcctggctattaagtaaaatatttcatgaaccagaagtcctgtttctctaatattataatttgttgaggtttgtgtgtgtgtgtgtgtgcatgtgcagaca

SEQ ID NO: 757155 - DNA, 120 bp, Artificial Sequence
  ENSG00000213949_51 (sequence is synthesized)
catgtacacatataaattgaatacaaaaatagctctataacaccaaaaaacagagtttacagaaaataaacacaaaagctatatctgcaagacaagtttgattcatctagtttcatatag

SEQ ID NO: 757156 - DNA, 120 bp, Artificial Sequence
  ENSG00000213949_52 (sequence is synthesized)
tttcatatagtttcatttttattaatatttaggtttaacttatagttctgcaattatttaaaaaacaagtacagagcgtttgattaaaaaaagtcaacaaatgtttcaaaacagctttgt

SEQ ID NO: 757157 - DNA, 120 bp, Artificial Sequence
  ENSG00000213949_53 (sequence is synthesized)
tataaaacatatttaatgattaagaaatgtactagactctatcatttacttttaaaacatttaattagaaaaacaggtgatatttaagactatttataaacttattggccaaattgccaa

SEQ ID NO: 757158 - DNA, 120 bp, Artificial Sequence
  ENSG00000213949_54 (sequence is synthesized)
attgccaaaaagtttctttttctctaactttggtattctaaataattgattattgctcccattgtaaactgaaccatgtatgcactctcttttctgaccaaactacaatggtatattggt

SEQ ID NO: 757159 - DNA, 120 bp, Artificial Sequence
  ENSG00000213949_55 (sequence is synthesized)
aaattatttaacaacacactgtccaggagggaaaaaaaaaacagtctctgatttgtatcatttgccaatttccatggtccaaatattctctctccattttcaaactaccaaagtgaccct

SEQ ID NO: 757160 - DNA, 120 bp, Artificial Sequence
  ENSG00000213949_56 (sequence is synthesized)
ccctaatcagcttacaaaattcctggaaatgtatctgccacctcttaccaaccagtgtgagctgacttcagcacaccactgagacagattacacgatagacagatagatagatagataga

SEQ ID NO: 757161 - DNA, 120 bp, Artificial Sequence
  ENSG00000213949_57 (sequence is synthesized)
tagatagatagatagatagatagatattgatagagaacatgttgtgtctatatacatatccaatgacacacagtataatcatgttttaaattatgccaaaagtactgattatatcaagcc

SEQ ID NO: 757162 - DNA, 120 bp, Artificial Sequence
  ENSG00000213949_58 (sequence is synthesized)
cagtaaacataatgctacacagcacccattctttaattttgatttctaaaattataaccttcctttgatattaataaaatgttatgaacttgcaggagaaggaaggagttgaaagaagga

SEQ ID NO: 757163 - DNA, 120 bp, Artificial Sequence
  ENSG00000213949_59 (sequence is synthesized)
aaatataaagggtgatccacagtgaaaatcagacctacacaagccacaaaaaaattgtctcattttcccaaggaattcaaagtcctgtgatacacattacaaaagatgacactttgtaaa

SEQ ID NO: 757164 - DNA, 120 bp, Artificial Sequence
  ENSG00000213949_60 (sequence is synthesized)
tattttgaacttctatgatccaatttcaacttcattggtccaatttgtcaaactattttcctctgagcactagattcatgggcaatttaatctctgaatattttctgtgtcataagtgtg

SEQ ID NO: 757165 - DNA, 120 bp, Artificial Sequence
  ENSG00000213949_61 (sequence is synthesized)
gtcataagtgtgcttgaaaagaggcttgtagtaaacagatatttttacaaaatttgatgcttctgcaaccataataattttatctataaatgcgtatatacatatatatatatatatata

SEQ ID NO: 757166 - DNA, 120 bp, Artificial Sequence
  ENSG00000213949_62 (sequence is synthesized)
cacatgcagatatttacatatatagatattctcttttccttttataaaatcaaagtctaggctcaattggaaaatggaaatatttgcaccaaaagaaaaaagtgccattgttgtgatcaa

SEQ ID NO: 757167 - DNA, 120 bp, Artificial Sequence
  ENSG00000213949_63 (sequence is synthesized)
tggagtaaagctggggtatagtagaggctggggaatccctgcccatgttctctccaaggccacagcttgcacaccgtgaatggtggccccactggctccatggagtgtgccttcacgcgg

SEQ ID NO: 757168 - DNA, 120 bp, Artificial Sequence
  ENSG00000213949_64 (sequence is synthesized)
gggaatgtccttgtccaacacgctgtaatctactccatgggaactgactgtcctgcttttcacaacattgagaaacaggcccagagcctgtctcatgtgccaggtgcagtcacattattg

SEQ ID NO: 757169 - DNA, 120 bp, Artificial Sequence
  ENSG00000213949_65 (sequence is synthesized)
ttaaaataaagtggcttctgacaaatcagtttttcaaaatagcatcctatgtacttttcatttcttccaacaaccctcaggcccccttttgccagttttctcccccaggggagattttca

SEQ ID NO: 757170 - DNA, 120 bp, Artificial Sequence
  ENSG00000213949_66 (sequence is synthesized)
agactactggagaaaaatctgttaataaaacatttgctctgagtaccagcttcagtgactcaatcatttatacaggatttcagtgttttgttctgcagcggtgttctaaagggttcacat

SEQ ID NO: 757171 - DNA, 120 bp, Artificial Sequence
  ENSG00000213949_67 (sequence is synthesized)
agtataatggaggagggacaaagcagaatatacttccaagctggaacatctttaagacatttacaaactgttatgggacactatcagcaactacgcctggggaagctagcaggatttagc

SEQ ID NO: 757172 - DNA, 120 bp, Artificial Sequence
  ENSG00000213949_68 (sequence is synthesized)
tcttcaatggccctccaaatgcacccaacaatcgccaacctcacccatggaaatcatctaaaaaatgaaaagaagggccttaaagtcctcacatggatgctgtatttataactaaaatgt

SEQ ID NO: 757173 - DNA, 120 bp, Artificial Sequence
  ENSG00000213949_69 (sequence is synthesized)
acagtttaattctaaatagcaggcttttaaatgcaaacagcttccaggtgagtcctctggctgccaatcagactgctgattctaaaccattctcacacagaatttctgaaaccaacacca

SEQ ID NO: 757174 - DNA, 120 bp, Artificial Sequence
  ENSG00000213949_70 (sequence is synthesized)
ggtattaattgttaactgcagtgaaaggaaaccaaggcacattacaaaaggctaaatgctgctgtttctaagtggaagcactgttgaacaacactcttaggtggaataagaaaattaggg

SEQ ID NO: 757175 - DNA, 120 bp, Artificial Sequence
  ENSG00000213949_71 (sequence is synthesized)
ttaaactgtaacattgtaatcggacgaacaaatcagcatctttgatcctcaggttaaaatttaatcttaaatttagaaattcaaagtaacagcctttaaccattaaccttgaggaaaatg

SEQ ID NO: 757176 - DNA, 120 bp, Artificial Sequence
  ENSG00000213949_72 (sequence is synthesized)
tgaagtagcatctggagtctcttaagccccagccctgttgtcccctacagcatctccacccaggaagtccagttcctaactaatgggaatggatccttttcccattataaagggccgatg

SEQ ID NO: 757177 - DNA, 120 bp, Artificial Sequence
  ENSG00000213949_73 (sequence is synthesized)
cttaacccttgaacccactactgttcttatgccccaagatctgcaccttacatcaggcacccgggaatgcttctcattgaaattttaccataccaaaaaatatgtaagggtgactcatca

SEQ ID NO: 757178 - DNA, 120 bp, Artificial Sequence
  ENSG00000213949_74 (sequence is synthesized)
ctcctaactttggactccttgctttgagatcggtatttttttctctctctttacatatagcaaaagctttccccagtagctgatgaatttagaactttatacaagactccctagcatttt

SEQ ID NO: 757179 - DNA, 120 bp, Artificial Sequence
  ENSG00000213949_75 (sequence is synthesized)
cctcctcccacaggctggagaatttcagtgctatgagactgggcagtaggagccagagccaatttgcaggatctcttttccttctgccttccagttggcttctcttctcagctgcgtggt

SEQ ID NO: 757180 - DNA, 120 bp, Artificial Sequence
  ENSG00000213949_76 (sequence is synthesized)
ggggatgatttggggtttcctcagcaaggccattctctgccttgtgcccatagcagggccttgggtggtgacatgttatctttgttggtgagcagacactcagagatcctttaattatct

SEQ ID NO: 757181 - DNA, 120 bp, Artificial Sequence
  ENSG00000213949_77 (sequence is synthesized)
gacacaccagggaaatcttggcaatcaactaaggacctgtgacactcataactatgtttacatttggctttagcatatttcaggtaatatctttatgaaaaaaagatgaagtatggaatt

SEQ ID NO: 757182 - DNA, 120 bp, Artificial Sequence
  ENSG00000213949_78 (sequence is synthesized)
gtaggaactcttttgcaatagactgagatccaatgtttaaatctttttatttcagtttgatctgtgcctttagattggggacaaaattttaaaaacaaatcttccaaatgacaccacaat

SEQ ID NO: 757183 - DNA, 120 bp, Artificial Sequence
  ENSG00000213949_79 (sequence is synthesized)
gaaagccagttgtggtcttgaaaaatctctctattgcattacttatcctcacccttgttttttaagaggtagagagagattactgggaagcagtgagccaacataattgtcctttcctct

SEQ ID NO: 757184 - DNA, 120 bp, Artificial Sequence
  ENSG00000213949_80 (sequence is synthesized)
acagaatagctgtgcagaaggggaccaccacacttaggaccagtgccaggtgacaatctttccgtcatgctgctgcagcattttgcaccttgagagacaggaaaaaaaatgggggtgagg

SEQ ID NO: 757185 - DNA, 120 bp, Artificial Sequence
  ENSG00000213949_81 (sequence is synthesized)
gagtggaagatgatgaaactatttctcttttatgtctacatccttactcctcaaaatactttaagctcactcagaccccatataccctgcccacaatactaacacatgtactttgcataa

SEQ ID NO: 757186 - DNA, 120 bp, Artificial Sequence
  ENSG00000213949_82 (sequence is synthesized)
gtaaattgttgattaaataagagcaaaactatattcttatgtgtagattaaccaaggctaatttcctggagtttaatacactttggattcaagtaaaaacaatcacttaatgcagcaaca

SEQ ID NO: 757187 - DNA, 120 bp, Artificial Sequence
  ENSG00000213949_83 (sequence is synthesized)
tctcagaccctcttcactctagaaccgttttatacaagagaactcaacatttactgttttatttctgatattgcctgccattactcaggatgcaagagatgctctgcattccttattagg

SEQ ID NO: 757188 - DNA, 120 bp, Artificial Sequence
  ENSG00000213949_84 (sequence is synthesized)
aaaaattggcctgtaaggagaatggtatactgcgtattactactgtgagactgtaaaattgttaatggacagtgtaaagaattgtattcattttattagcaagaaaaatattgcatacaa

SEQ ID NO: 757189 - DNA, 120 bp, Artificial Sequence
  ENSG00000213949_85 (sequence is synthesized)
gaactactgccctgaaatatccatcactccaatgaactgttctgcctgatctaacataaagttatatttcattgctcatttttttttgcctcactaaaatgactaacttaagggaatgtg

SEQ ID NO: 757190 - DNA, 120 bp, Artificial Sequence
  ENSG00000213949_86 (sequence is synthesized)
catttctacaagactttaattggataaactcattagaagaaaatgtttcgattgcattcaggaacaaagaagcataacctttgttgactcttgtaatttattatatgcttcatttaaacc

SEQ ID NO: 757191 - DNA, 120 bp, Artificial Sequence
  ENSG00000213949_87 (sequence is synthesized)
cattttgtaaagaaatcaggtaacagtcatttaatctgatataattagaaatagctgagagagtaaaaaagcattttgaatgtcctatgtatggcatatcctgtacaccaattgaaggtc

SEQ ID NO: 757192 - DNA, 120 bp, Artificial Sequence
  ENSG00000213949_88 (sequence is synthesized)
agagctttggtatttttgtataattctgtcttatctggtgcatcagctgtgtattttacgtcaaggtaaatgagcatcctgttttatatgttaaattttaaaaatgactttttcaaagaa

SEQ ID NO: 757193 - DNA, 120 bp, Artificial Sequence
  ENSG00000213949_89 (sequence is synthesized)
gccacacctacattaaatttggaacataatatgtgcacatatatatacatacatgtgtcttcatgtgtctgtgtatatttatgtctctcttaatattttgatatctatgtatatataatt

SEQ ID NO: 757194 - DNA, 120 bp, Artificial Sequence
  ENSG00000213949_90 (sequence is synthesized)
gttggtggaggggtatgtgtaaaataataatgaaagctaacacttactgaatatttcctatgtcctaggcacaatcttaagcactttatacttattactaatttaatcatcatttattac

SEQ ID NO: 757195 - DNA, 120 bp, Artificial Sequence
  ENSG00000213949_91 (sequence is synthesized)
tcatttgatatcccattttatagatgaagaaaccaaaacaaagacagataagtaatttgaccaaagtgtatcagtgtccaagaacaatctcattctctggccccagagccagtgttcatt

SEQ ID NO: 757196 - DNA, 120 bp, Artificial Sequence
  ENSG00000213949_92 (sequence is synthesized)
actcgttatatcatttgtatgtgttttctaatacgaggaagtatgtatatgtgtgtatgcacatatatacatgtgtttacataatatataatttaaatgataaccaaaatcaagagaata

SEQ ID NO: 757197 - DNA, 120 bp, Artificial Sequence
  ENSG00000213949_93 (sequence is synthesized)
aatcagtgtttaacaaacaatatgatcatcaagtacttagtatggaaagactattaaagaagaaaacaaaagattttagatttactctcagctgtgtgaccctaatcacttatctttact

SEQ ID NO: 757198 - DNA, 120 bp, Artificial Sequence
  ENSG00000213949_94 (sequence is synthesized)
aagtcctcatctgtgataaataagcatcacctgggggcagatatgtggttaaaaacagaaattcctgcaccccaagttggaacccctaaatccatatttctaagggaagcccagtaacct

SEQ ID NO: 757199 - DNA, 120 bp, Artificial Sequence
  ENSG00000213949_95 (sequence is synthesized)
ttgtattttaacaattaaactgagggattcttatcaatattgtcatagaattttgaaaaacataaatcagtgtgattgtcaagtctagtcgcacatcagaatcaacttgggaactttcaa

SEQ ID NO: 757200 - DNA, 120 bp, Artificial Sequence
  ENSG00000213949_96 (sequence is synthesized)
ccataccaatcatctctgatctccttcttcaccccaattaaaaaaatgattaaaaattatactcttacatgcttttatttagttgccaggataagcttctctttcaaacacttagaaatg

SEQ ID NO: 757201 - DNA, 120 bp, Artificial Sequence
  ENSG00000213949_97 (sequence is synthesized)
tctttaaatagtcaagattttaatggtttgtctgaatgtgccgtgtattttctagtgacagcgaagaacctcctgaaaccctttctgataatgtagtaaacatttctatcccggtaaaat

SEQ ID NO: 757202 - DNA, 120 bp, Artificial Sequence
  ENSG00000213949_98 (sequence is synthesized)
atgaagttggactacagttttacaggtaggagaaaactacatttttatgtggatgcctttctattaacccagtggttctgaaagtgtggtccctgcctggccaagggcatcagcatcacc

SEQ ID NO: 757203 - DNA, 120 bp, Artificial Sequence
  ENSG00000213949_99 (sequence is synthesized)
tggaaacttgttaggcaaattctctggccccaccagaaacctaccaaatcagaaactcggaggatggggttaaacaagccttccaggtaattctcatgcatcctaatgtttgagaaccat

SEQ ID NO: 757204 - DNA, 120 bp, Artificial Sequence
  ENSG00000213949_100 (sequence is synthesized)
tatactaaataacccaaagtgttaggtgttagtgataccggattgcatttgctgtccagtcttaattcccgaatgcaagttgaagacccagaagtccttcgcaaaacacgatattttctt

SEQ ID NO: 757205 - DNA, 120 bp, Artificial Sequence
  ENSG00000213949_101 (sequence is synthesized)
agaggccgccagcatatttcttggtcatcgttctcatcctgtggaagctgatcagtcttctcaatctggacacacaagattaaagcatttctcattgataagagctgtttatttcttcca

SEQ ID NO: 757206 - DNA, 120 bp, Artificial Sequence
  ENSG00000213949_102 (sequence is synthesized)
ccattcataaaccattctttctcttaagaacttcttatctatcccaacacaaaccatgttgacaaactttccctctataatttcccctgcttaagcagaactccaagcttttgccaaata

SEQ ID NO: 757207 - DNA, 120 bp, Artificial Sequence
  ENSG00000213949_103 (sequence is synthesized)
aacatgtgcaatatacttaaaaggataagaatcagtggcaagtaggtttattctaaaagtcttatcattttattaattttttaataatagtggctaacatttattgagcctttgtgttct

SEQ ID NO: 757208 - DNA, 120 bp, Artificial Sequence
  ENSG00000213949_104 (sequence is synthesized)
gtcttatgtgatcctcatgataacactatggttcaaatacaactactatctccattttccagttgaagaatttgaggttcagagaggctaatttacccaaggttatatattcaggaagtg

SEQ ID NO: 757209 - DNA, 120 bp, Artificial Sequence
  ENSG00000213949_105 (sequence is synthesized)
ttagtttaaaccatttcacatgcttttttttttcttttaatttaaaaactgttttaaattgacacgtaataattgtacatatttataaggcgcttggagacgttgtgatgcaagtaatat

SEQ ID NO: 757210 - DNA, 120 bp, Artificial Sequence
  ENSG00000213949_106 (sequence is synthesized)
atagcaactaaacagggtaattggaacatccattgtctcaaacatttatcttttttttgtattgggaacattcaatatcttctttctggcttaataatttattatctatggcactctctc

SEQ ID NO: 757211 - DNA, 120 bp, Artificial Sequence
  ENSG00000213949_107 (sequence is synthesized)
tttactaaatggagactacaaaaatggcatgattataggacatacatgtagattgtgctaatatttctcagcctttaaattctgtctccacttttctgtatttttctgtatccacttcta

SEQ ID NO: 757212 - DNA, 120 bp, Artificial Sequence
  ENSG00000213949_108 (sequence is synthesized)
ttggtgcactgacttttccccaagagttttccatttacttaaaatcaaattttggcaaacacttataaatattttttgtcttcccttgactgaagtgctgcttaaaaacatactatttta

SEQ ID NO: 757213 - DNA, 120 bp, Artificial Sequence
  ENSG00000213949_109 (sequence is synthesized)
ctctaccaagttcatccaaagaacatgatgaagctgtgtagagaagattgaacttttaagtttagcagtaaatataggactttaaattatgaaatggtaaaaatttttaatctatttaga

SEQ ID NO: 757214 - DNA, 120 bp, Artificial Sequence
  ENSG00000213949_110 (sequence is synthesized)
attcagcattacattttagtttcatttttcactaggtataaatggtattagtgaatttacagaaacttttcacttgttaaccatgaaattttaacttttaaaactcatattctagcattt

SEQ ID NO: 757215 - DNA, 120 bp, Artificial Sequence
  ENSG00000213949_111 (sequence is synthesized)
tggggtcaaataagcatcagtgactattgaactaaattacataatccttctcactctcctcaaagatttaattttacgtttcaaggtaaatgaattcccctatgatttgaaatccctaca

SEQ ID NO: 757216 - DNA, 120 bp, Artificial Sequence
  ENSG00000213949_112 (sequence is synthesized)
agtatttttgtggaattacatgatatggagaaagaaaataatgaggccaaataaaagttaaactttgttatgttttatttttcttctaattaattttttaagctctgcaagtgaatacca

SEQ ID NO: 757217 - DNA, 88 bp, Artificial Sequence
  ENSG00000213949_113 (sequence is synthesized)
aatcttgctctgttgcccaggctggagcggaatggcatgatcccagcctatggtgacctctgggtcccgagtagctaggattaaaagc

SEQ ID NO: 757218 - DNA, 64 bp, Artificial Sequence
  ENSG00000213949_114 (sequence is synthesized)
ggccagattgttctctcttaatgggctgataagtaaccaagtaaaacatattgtacttttaccc

SEQ ID NO: 757219 - DNA, 120 bp, Artificial Sequence
  ENSG00000213949_115 (sequence is synthesized)
gctgataagtaaccaagtaaaacatattgtacttttaccccatgctagaggcagcaagcccaagctgcagaatgcccaattacacaatcctctattagccaccaaagagaagatactttt

SEQ ID NO: 757220 - DNA, 120 bp, Artificial Sequence
  ENSG00000213949_116 (sequence is synthesized)
aaatttgtattacattatttaaatagaaaaaataaagacagaagatcctttaaaaagcaaactggataaatagtacttcagaattctatatattatttgttacaactgcatgtaaaccta

SEQ ID NO: 757221 - DNA, 120 bp, Artificial Sequence
  ENSG00000213949_117 (sequence is synthesized)
taaacctataattacctcaaaatgaaaagtttagtttttaaacaaagcctattattgtatgattaaggtggataattgagctgcttcttatttttattatagtaaaatatacataaaata

SEQ ID NO: 757222 - DNA, 120 bp, Artificial Sequence
  ENSG00000213949_118 (sequence is synthesized)
tattttaactgctttaaaattgtaattcagtggcattaagtacatttacaaggttgtgcaatattgtgaaccactgtctgtttcagaacttttgttactacatccagtggaaattctgta

SEQ ID NO: 757223 - DNA, 120 bp, Artificial Sequence
  ENSG00000213949_119 (sequence is synthesized)
tctgttactcttattcctcccttccctctgctcctgggaactacagatctgttttctgttcctattaacatgccgctttaaataatatttcatataaatgaaatcagacaataaaaaggt

SEQ ID NO: 757224 - DNA, 120 bp, Artificial Sequence
  ENSG00000213949_120 (sequence is synthesized)
cagtatttataatatatgacttctctctgtccaaaaaggaaatttttgggtatgttttctacagtgtgctgagattttcttttctgtttcagaaattatttcattagcttactcacaagt

SEQ ID NO: 757225 - DNA, 120 bp, Artificial Sequence
  ENSG00000213949_121 (sequence is synthesized)
gagggtatatgacattttgccaacataaagtctaatacatgtaagatttctttcaaaatagaaaagcattcagaaaaggcaggacaaataccttgtgttttttttcacccaaaataatat

SEQ ID NO: 757226 - DNA, 120 bp, Artificial Sequence
  ENSG00000213949_122 (sequence is synthesized)
tctaaatctgaaatgaagttttcaaaatgtttctttgtgggggtcacaaattgagaagagactgagtgtattttttcataaactgtgtggattgcaagttgtaaggctatgaaaaatctt

SEQ ID NO: 757227 - DNA, 120 bp, Artificial Sequence
  ENSG00000213949_123 (sequence is synthesized)
atgaaggaagcagaggcagaggctctgttagaaaaatcccatgcttatcaataaggatcaggaaactgtaagaactcaagctgtcaaacatctgtctcaggacatagtcctaccccatct

SEQ ID NO: 757228 - DNA, 120 bp, Artificial Sequence
  ENSG00000213949_124 (sequence is synthesized)
ttctattacccaaactgccttatgccaatacaggcattgcaagtgaatttggtggtgaaaatacagctgggattatgttcccctgcctcctccacccacagtttgctgaattctattcct

SEQ ID NO: 757229 - DNA, 120 bp, Artificial Sequence
  ENSG00000213949_125 (sequence is synthesized)
gccatacagcttccaaaggagaaggaaagatgtgaggcaatgtcatggcatcaagacagatcatacctgtttcccattacctcactagatcctggcccttttcccaagaagtgaattatg

SEQ ID NO: 757230 - DNA, 120 bp, Artificial Sequence
  ENSG00000213949_126 (sequence is synthesized)
agagctgacagaattcattcttcataaatccatgcaaagggctatgccatccattttagcctttttttcctcttttttttttctctttatttgagacagagtttctctcttattgcccag

SEQ ID NO: 757231 - DNA, 120 bp, Artificial Sequence
  ENSG00000213949_127 (sequence is synthesized)
accaccgcgcccagcccttttcttccatcttattcttttctttttcaggaaacactattaagcttaaatatttataattattttccttcttttaaaattaggctttacttggctctggct

SEQ ID NO: 757232 - DNA, 120 bp, Artificial Sequence
  ENSG00000213949_128 (sequence is synthesized)
ctctttttcttttcttctttcttgtctttagacacccaagcctcaattagtaactacgctaactggtagttactgtccctgagattatttcagctaatatttttagttatcaagtataag

SEQ ID NO: 757233 - DNA, 120 bp, Artificial Sequence
  ENSG00000213949_129 (sequence is synthesized)
tcatcaaagagagttaactaaataatctcacaactcctagcctcaaacataatttttaactcatttttaaaggaggccttttatcaagttacattcacagctctgcaaattacacacaca

SEQ ID NO: 757234 - DNA, 120 bp, Artificial Sequence
  ENSG00000213949_130 (sequence is synthesized)
cacacacacacacaaacacacacgtactaacactctcattctactcccttctttatatttcttagcagagtggcatgaaataaaacagccttcattttgcacattcttcttttccatttt

SEQ ID NO: 757235 - DNA, 120 bp, Artificial Sequence
  ENSG00000213949_131 (sequence is synthesized)
atgtatgtataaacatggcctgaaagattcattttaaaacaatattgtggttagtaatacaaacatgtaacacattacatgttcgaaaaaatattttagattctattatgtataataata

SEQ ID NO: 757236 - DNA, 120 bp, Artificial Sequence
  ENSG00000213949_132 (sequence is synthesized)
aaaaaccctcaaagaaagatgaaggaatgagaatgtgaggaatattcataaaggataatatgcctgaggaatagtgttcctttagcacttgtaagaataaacatactgtataaaaacttt

SEQ ID NO: 757237 - DNA, 120 bp, Artificial Sequence
  ENSG00000213949_133 (sequence is synthesized)
tgttcctttttaacatttttgaaagaaagtcaaacctactttacagtaaaatacttggtaagtgagttagaaaaatgatctttttctcagtgagaagtgctattctgtggcattttgaaa

SEQ ID NO: 757238 - DNA, 120 bp, Artificial Sequence
  ENSG00000213949_134 (sequence is synthesized)
aataatcttacttctgctccactgaagaaatctggttattaaaagagttattccttttataaaatcaaaatctgcatgtggcaatttttattcattgatatggctctcttctcaaaacac

SEQ ID NO: 757239 - DNA, 120 bp, Artificial Sequence
  ENSG00000213949_135 (sequence is synthesized)
aaagaacaaatctaacttttcactcaaaaattaatcttaaagacacaatttatgctcttcctgtaagcagcctgagatgatctcttaaaatggtttactattcacttgacccagaacaac

SEQ ID NO: 757240 - DNA, 120 bp, Artificial Sequence
  ENSG00000213949_136 (sequence is synthesized)
ccaaaaaatcattcaaatcaagagattgaaatcttcgtgttcactttaagaacatccatgaagctacccaggcaatcaagggttatgtatatctgaaaagccaccaagtatctgaaagat

SEQ ID NO: 757241 - DNA, 120 bp, Artificial Sequence
  ENSG00000213949_137 (sequence is synthesized)
gtgactttacagaagcagtgtgtgccgttccatcattgcaatggtggagctggtagatgtgtccaaagccaaaccgtggagctggacagagggtttatggccccaaaagagtgctgaaag

SEQ ID NO: 757242 - DNA, 120 bp, Artificial Sequence
  ENSG00000213949_138 (sequence is synthesized)
tttgttgcacatgcatacaaatgtaaaaagcagtgctgatcttaaaggtttgtatgtagagtctcttgatcattgtgtacatctaggtgggcgaagcacccaagatacactggctctgtt

SEQ ID NO: 757243 - DNA, 120 bp, Artificial Sequence
  ENSG00000213949_139 (sequence is synthesized)
tacagggctcatggtcagattaacccatacgtgacctccacccccactatcgcacccaccgcactgaaatgatgcttactgaaatagaacaaatttttctaagccagaggaggaggttgc

SEQ ID NO: 757244 - DNA, 120 bp, Artificial Sequence
  ENSG00000213949_140 (sequence is synthesized)
atagaagaaaaaggtattccagaagaaaccgaagaaacaaaaataatgacccaggaataatttcaatataaaatatatgcaaataaaatcaaaagtagaaaaaagacaatcaaaatttta

SEQ ID NO: 757245 - DNA, 76 bp, Artificial Sequence
  ENSG00000213949_141 (sequence is synthesized)
aaataaaatcaaaagtagaaaaaagacaatcaaaattttaaagagcatggaagctcaattaaaatagaggagagaa

SEQ ID NO: 757246 - DNA, 72 bp, Artificial Sequence
  ENSG00000213949_142 (sequence is synthesized)
ctccaggaaagatcagatacgtgaaaaatgattcaagctctgtgttgaataaagtcacattaaaatcacaga

SEQ ID NO: 757247 - DNA, 120 bp, Artificial Sequence
  ENSG00000213949_143 (sequence is synthesized)
cagaaaggtactgttgttagacaatgtttaacacctattaaaacatacacaaatttaaataatagtgatgatacacaaagcctgggacagtttcatgaaattgtctttcatatggcggtt

SEQ ID NO: 757248 - DNA, 120 bp, Artificial Sequence
  ENSG00000213949_144 (sequence is synthesized)
catagaacaaagtagtacaaattttctggaaacaattttctagacactataagaaccattaaaaacgtgatccagtgatctattccttgaaatgtactgtcaaaaaatccagaagaggga

SEQ ID NO: 757249 - DNA, 120 bp, Artificial Sequence
  ENSG00000213949_145 (sequence is synthesized)
caaatttaaatgctccaaggtgtctttgaaatctgaagcataataccaaaaatattaaaaccacctgaattctagtgttttatcgggaaatggccatgtaatataaatgcaatgtcttta

SEQ ID NO: 757250 - DNA, 120 bp, Artificial Sequence
  ENSG00000213949_146 (sequence is synthesized)
tgctttaaccaagagaaatcatcttcaattatttaaaattacaattttaaaagctagtagcagcacagaaaaggtttacattttctatgattccaattatatgaaaagtgttaatttctg

SEQ ID NO: 757251 - DNA, 120 bp, Artificial Sequence
  ENSG00000213949_147 (sequence is synthesized)
tagtgcagacacatatatccaaatgaaatacaattgatttattacaaattggggtggggatgtgcaattttttatgtgtgtcatcattgttatatcatttgtgattttaaataatgaaaa

SEQ ID NO: 757252 - DNA, 120 bp, Artificial Sequence
  ENSG00000213949_148 (sequence is synthesized)
actcagattgggggaaaataacttctcaggagaaagcagttgtggtagatagagagcatattaaaagcttccaccaaaacaaattcttacgtgcattgaagaaaaaatattattttcaaa

SEQ ID NO: 757253 - DNA, 120 bp, Artificial Sequence
  ENSG00000213949_149 (sequence is synthesized)
atataaccatataaaaatgattatcttggccatttaaaaagagtcttaatttattacatgaagcctttaagggtccaggtggtatacctggaatctttcttttgttaggttacactgtaa

SEQ ID NO: 757254 - DNA, 80 bp, Artificial Sequence
  ENSG00000213965_0 (sequence is synthesized)
agcatcgtcctggcggctggctggtcgcgcccggagaccgccaccccgccgtcgcgcccgccgccggccgagggcttccg

SEQ ID NO: 757255 - DNA, 120 bp, Artificial Sequence
  ENSG00000213965_1 (sequence is synthesized)
ggcttccggctgctgctgctgcagcgctccccgcaccaaggcttcatgccgggcgcgcacgtcttctccggcggagtgctggatgcggccgaccgctcggcggactggctgggcctcttc

SEQ ID NO: 757256 - DNA, 120 bp, Artificial Sequence
  ENSG00000213965_2 (sequence is synthesized)
gcgccgcaccacgggccgccgcgcttcggcctgggcccggcgccattcagccgcaccgctttcccgtcgctgcccgacaccgatgaccacaagaccgacaacactgggacgctgcctgag

SEQ ID NO: 757257 - DNA, 120 bp, Artificial Sequence
  ENSG00000213965_3 (sequence is synthesized)
gacgtagccttccgcatctgcgccgtgcgggaggcctttgaggaggcgggcgtgctgctgctgcggcccaggacttccccaccaggcccagcacccgggcctggcctcgccctggagcca

SEQ ID NO: 757258 - DNA, 120 bp, Artificial Sequence
  ENSG00000213965_4 (sequence is synthesized)
ccgccgggcctggcctcctggcgcgaccgcgtgcgccaggacccgcgccacttcctgcggctgtgcgcccacctcgactgcacacccgacatctgggcgctgcacaactggagcgcctgg

SEQ ID NO: 757259 - DNA, 120 bp, Artificial Sequence
  ENSG00000213965_5 (sequence is synthesized)
ctcacccctttcttgcggggcaccactcgccgctttgacacggccttcttcctgtgctgcctgcgcgagccgccgcccgtctaccccgacttggcggaggtggtgggctaccagtggtca

SEQ ID NO: 757260 - DNA, 120 bp, Artificial Sequence
  ENSG00000213965_6 (sequence is synthesized)
tctccatcagaggcaactgaaagtttcttatcaaaagaaatttggttgccacccccacagttctacgaagtgagaagacttgcaaactttgcctctctctctgacttgcacaaattttgt

SEQ ID NO: 757261 - DNA, 120 bp, Artificial Sequence
  ENSG00000213965_7 (sequence is synthesized)
ttgggtcgtgcattagaaggactggaaaggtggctgccgatcatcttgttaactgctgatgggatggtccatcttttaccaggtgatgagctatatttagaagattcagactttttggaa

SEQ ID NO: 757262 - DNA, 120 bp, Artificial Sequence
  ENSG00000213965_8 (sequence is synthesized)
aatcttatgtctactgaaaaaaagactgaggaaatcatgaaggaaggcaagcagtttcaccggatagtgacataccatcgccacctttatgatatccacgtgactgttcagccaaagtat

SEQ ID NO: 757263 - DNA, 120 bp, Artificial Sequence
  ENSG00000213965_9 (sequence is synthesized)
aaacacgtttatcctaagaactctgtagtaagaaaaagccatttgtagggtgcttaagcttgtttgtaaaatggcctacttgaagtcctcatgaataatgagggttgactttcatttgct

SEQ ID NO: 757264 - DNA, 120 bp, Artificial Sequence
  ENSG00000213965_10 (sequence is synthesized)
gaataatgagggttgactttcatttgcttgaaacttaaggaagtttgtgcctataaaagttactgcaattcagtatttctttatttttttcgagacagagtctcaatctgtcgcccaggc

SEQ ID NO: 757265 - DNA, 68 bp, Artificial Sequence
  ENSG00000213965_11 (sequence is synthesized)
cgggtgtttcttatatcaggtgttttagggagctcgcttgcttattccattctttaatccttacagtg

SEQ ID NO: 757266 - DNA, 120 bp, Artificial Sequence
  ENSG00000213965_12 (sequence is synthesized)
ggagctcgcttgcttattccattctttaatccttacagtgtgccacacgtataaagtttataacgtattaatgatctcattacccaaaaccagaacataatttcacaagggttcctactt

SEQ ID NO: 757267 - DNA, 120 bp, Artificial Sequence
  ENSG00000213965_13 (sequence is synthesized)
ctgtattgttttattatctcaaaaatttaaataacatgttctgctgtttattgttcttgttatccactgtattagcaccttccctgatgtgctttggaggttgatcaatgaatttctgag

SEQ ID NO: 757268 - DNA, 120 bp, Artificial Sequence
  ENSG00000213965_14 (sequence is synthesized)
actttctgctggaattactttaagggtgtcttattagatgatgaaaagttggctgagacacccttcaagtgaccatgtcattgttttcttgctatgtctttagcttaatgattaagatac

SEQ ID NO: 757269 - DNA, 120 bp, Artificial Sequence
  ENSG00000213965_15 (sequence is synthesized)
ttgttttcttgctatgtctttagcttaatgattaagatacaattctttttaaaatcaaatggtattagttattatgtttcccaaattagaaatcgattttagttaacattttattttatt

SEQ ID NO: 757270 - DNA, 120 bp, Artificial Sequence
  ENSG00000213965_16 (sequence is synthesized)
aggcttgagccaccacgcctggcctagttagcattttaaagaaacacaaagccataacaaaaaccatcattgtttgtattccacactgttaatgaatgtaaagaggttagaaatgtagtg

SEQ ID NO: 757271 - DNA, 120 bp, Artificial Sequence
  ENSG00000213965_17 (sequence is synthesized)
tttgattaatgatgtttatttttactgtatttaatatgagtaatttttcatcatctttcaagaggaataatgtttattgattaaaggtgagaaatgatagttaagacaccaattccatgt

SEQ ID NO: 757272 - DNA, 120 bp, Artificial Sequence
  ENSG00000213965_18 (sequence is synthesized)
ccagatctttgactgtatcatgcattgtacaattgatttcatattttatgaaatgccttaattttcctactataacataaagacaatgatgaataaagtttatgtgtatgattaaatcca

SEQ ID NO: 757273 - DNA, 120 bp, Artificial Sequence
  ENSG00000213967_0 (sequence is synthesized)
ctttgtctctatctgcggccggagctccaggtctcgtcctcactactctgtgtcttctgcttttaggggcgcagcctctgtggccctgtgacctgccccctggaagcctagaaatgggac

SEQ ID NO: 757274 - DNA, 120 bp, Artificial Sequence
  ENSG00000213967_1 (sequence is synthesized)
tagaattctctctggaggagtggcagtgcctggacactgcacagaagaatttatataggaatgtgatgttagagaactacagaaacctggccttcctgggtattgctgtctctaagccag

SEQ ID NO: 757275 - DNA, 120 bp, Artificial Sequence
  ENSG00000213967_2 (sequence is synthesized)
tgggtattgctgtctctaagccagacctcatcatctgtctggagaaagaaaaagagccctggaatatgaagcgagatgagatggtggatgaacccccaggtatatgtcctcattttgctc

SEQ ID NO: 757276 - DNA, 120 bp, Artificial Sequence
  ENSG00000213967_3 (sequence is synthesized)
aagacatttggccagagcagggcgtggaagattcttttcaaaaagtaatactaagaagatttgaaaaatgtggacatgagaatttacagttaagaaaaggttgtaaaagtgtggatgagt

SEQ ID NO: 757277 - DNA, 120 bp, Artificial Sequence
  ENSG00000213967_4 (sequence is synthesized)
gtaaggtacacaaagaaggttataatggacttaaccagtgtttcacaactacccagggcaaagcttctcaatgtggtaaatatttgaaagtcttttataaatttataaatttaaacagat

SEQ ID NO: 757278 - DNA, 120 bp, Artificial Sequence
  ENSG00000213967_5 (sequence is synthesized)
ataagataagacatactagaaagaaacctttcaaatgtaaaaattgtgtcaaatcattttgcatgttttcacacaaaacccagcataaaagcatatatactacagagaagtcctacaaat

SEQ ID NO: 757279 - DNA, 120 bp, Artificial Sequence
  ENSG00000213967_6 (sequence is synthesized)
gtaaagaatgtggaaaaacctttaattggtcctcaacccttactaatcataagaaaactcatactgaagaaaagccctacaaatgtgaagaatatggcaaagcttttaatcaatcctcaa

SEQ ID NO: 757280 - DNA, 120 bp, Artificial Sequence
  ENSG00000213967_7 (sequence is synthesized)
attatactacacataaggtaactcatactggagagaagccttacaagtgtgaagaatgtggcaaagcatttagccaatcctcaacactaaccatacataagaggatacatactggagaga

SEQ ID NO: 757281 - DNA, 83 bp, Artificial Sequence
  ENSG00000213967_8 (sequence is synthesized)
atacatactgatttagccaaccctcagcactaaccatacataagaggatgcacattggagagaaaccctacaaatgtgaagaa

SEQ ID NO: 757282 - DNA, 85 bp, Artificial Sequence
  ENSG00000213967_9 (sequence is synthesized)
ctagacataagaggctgcaccaaagcttttagccaattcggacaccttactacacataggataattcatactggagagaaaccct

SEQ ID NO: 757283 - DNA, 68 bp, Artificial Sequence
  ENSG00000213967_10 (sequence is synthesized)
acaaatgtgaagaatgtggcaaagcatttatatggccctcaaccctaactaaacataagaggatcgat

SEQ ID NO: 757284 - DNA, 90 bp, Artificial Sequence
  ENSG00000213967_11 (sequence is synthesized)
gagagaaaccttacaagtgtgaagaatgcggcaaagcgtttatatggtcctcaaaccttactgaacataagaaaattcatactagtaaag

SEQ ID NO: 757285 - DNA, 76 bp, Artificial Sequence
  ENSG00000213967_12 (sequence is synthesized)
gagagaaaccctacaaatgtgaagaatgtagtaaagcatttagccgatcctcagccctaactacacataagaggat

SEQ ID NO: 757286 - DNA, 74 bp, Artificial Sequence
  ENSG00000213967_13 (sequence is synthesized)
acaaatgtgaagaatgtggcaaagcatttatattgtcctcgaccctatctaaacataagaggcttttaatcaat

SEQ ID NO: 757287 - DNA, 67 bp, Artificial Sequence
  ENSG00000213967_14 (sequence is synthesized)
cttaggaaaagcgtttaatcgatcctcaaatcttagtacgcataagataattcatactggagagaaa

SEQ ID NO: 757288 - DNA, 78 bp, Artificial Sequence
  ENSG00000213967_15 (sequence is synthesized)
cgaatgtggcaaatcatttatctggtcctcaaccctttttaagcataagataattcacactggagagaaaccttacaa

SEQ ID NO: 757289 - DNA, 120 bp, Artificial Sequence
  ENSG00000213967_16 (sequence is synthesized)
ccttacaagtgtgaagaatgtgggaaagcttttaatcattctcaaatcttactacacataagacataagaggatgcacactggagagaaaccttacaaatgtgaggaatgtgggaaatct

SEQ ID NO: 757290 - DNA, 120 bp, Artificial Sequence
  ENSG00000213967_17 (sequence is synthesized)
tggagagaaaccttacaaatgtgaggaatgtgggaaatcttttaacctgtcttcaacttttattaaacataaggtaattcatactggagtaaaactctacaaatgtgaagaatgtggcaa

SEQ ID NO: 757291 - DNA, 120 bp, Artificial Sequence
  ENSG00000213967_18 (sequence is synthesized)
attcatgctggacagcaaccctacaaatgggaaaaaattggcaaagcctttaaccagtcctcacatcttactacagataagataactcatattggagagaaatcttacaagtgtgaataa

SEQ ID NO: 757292 - DNA, 120 bp, Artificial Sequence
  ENSG00000213967_19 (sequence is synthesized)
gaatgtgaagagacatgagacagtagtcaaatactcaggtaggtaagcatgaatgaagccgataacacagatgacaggttcaaaggtcaaaaagaatgccagactttaaaatgtgatatg

SEQ ID NO: 757293 - DNA, 120 bp, Artificial Sequence
  ENSG00000213967_20 (sequence is synthesized)
ggatgctctgcttcagtggaaagatttcctaaaaagcctttttttttcctctagctctgaagtaggagcatttttgtcccatacccttaaattatttctaaggactctacttcctattta

SEQ ID NO: 757294 - DNA, 120 bp, Artificial Sequence
  ENSG00000213967_21 (sequence is synthesized)
gtgattttcctttgagggtaccatgagaactaaactcctctttatggcttataaggtactgcatgatatacctgctcttccattgcttcgggggaatataaaaatatctcgagtattttt

SEQ ID NO: 757295 - DNA, 120 bp, Artificial Sequence
  ENSG00000213967_22 (sequence is synthesized)
ttcagaaatctcaggaacatcaatgacagaggttacttatttctctattttctgtttttaatattagcaatcctaactcaagtgatagctcattattgttttcatttgcagttgcctgtt

SEQ ID NO: 757296 - DNA, 120 bp, Artificial Sequence
  ENSG00000213967_23 (sequence is synthesized)
gttaggtgatattgaccactttttttatatacctattggtcatgtgtatatatttgctggcaaaatattttttgaatcttttgaccatttttctgttgggtttttattgttatacttgcc

SEQ ID NO: 757297 - DNA, 120 bp, Artificial Sequence
  ENSG00000213967_24 (sequence is synthesized)
tttgctttgaatttcctgtatattttgaatattaagcttttcttgtatatatggtttgctattgtgagcatgcaataaacattcaagtataggtatcattttcttataataaactatttt

SEQ ID NO: 757298 - DNA, 120 bp, Artificial Sequence
  ENSG00000213967_25 (sequence is synthesized)
tctttgagtagatacccaatgatgagacttttaaatcaaatggtagttctatttatagttgagactgagcatttttgtcatatgtgtgttggctatttgcatgtctttattgaaaaatgt

SEQ ID NO: 757299 - DNA, 120 bp, Artificial Sequence
  ENSG00000213967_26 (sequence is synthesized)
ttactaatgttatttgcccatttttcaatgggattctttattattatgatatttttgagttgtttgagttacttgtaaattctgaatgttagtttcattttggcacatagtttgcaaata

SEQ ID NO: 757300 - DNA, 120 bp, Artificial Sequence
  ENSG00000213967_27 (sequence is synthesized)
tgttcatttattctgtaggttgcctatttaccctgttgattattttttttgctgtgccaaagctttttagtcccgtttgtctatttttaataataatataataaataataatacaataat

SEQ ID NO: 757301 - DNA, 81 bp, Artificial Sequence
  ENSG00000213967_28 (sequence is synthesized)
tgagagaaaccttaaaaagggtaaagaatgtggcaaagcatttatatggtcctcaacgctaaacataagaggataaaagct

SEQ ID NO: 757302 - DNA, 89 bp, Artificial Sequence
  ENSG00000213967_29 (sequence is synthesized)
tttaatcattctcaaaaataaaccctacaaatgtgaaaaatgtggcaaagcatatggtccacacccctaagtagacataagaggatgca

SEQ ID NO: 757303 - DNA, 120 bp, Artificial Sequence
  ENSG00000213967_30 (sequence is synthesized)
gcatatggtccacacccctaagtagacataagaggatgcacactggagagaaaccttacaaatgtgaggaatgtggcaaagcctttaaatgttcctcaactgttactgaacataaagtaa

SEQ ID NO: 757304 - DNA, 88 bp, Artificial Sequence
  ENSG00000213967_31 (sequence is synthesized)
aaatgtgtcaaagcctttaagcagtcttcaatcctgagtaaccataagataattcaaactggaaagaaaccctgcaagtctgaagaat

SEQ ID NO: 757305 - DNA, 120 bp, Artificial Sequence
  ENSG00000213967_32 (sequence is synthesized)
ctgatctcctgccttgagcaaataaaagagccctggaatgtgaagagacatgagacagtagtcaaatactcagggtgaaactgacctcagagtgacttaggaagaatttcatttttggga

SEQ ID NO: 757306 - DNA, 120 bp, Artificial Sequence
  ENSG00000213967_33 (sequence is synthesized)
agagtttcaagaggattgttattcaaatacatttggtagaatttggctgtgcatttttctagtcctaagcttttctttgtcaagacatttttaattactgactcaatcatgctactcatt

SEQ ID NO: 757307 - DNA, 120 bp, Artificial Sequence
  ENSG00000213967_34 (sequence is synthesized)
attggtttgttcaggtactctatttctttctggctctatcttgggaggttgtatgtttccataaatttatttactctaagttttcaggtttgtgagtgtctagttgtttataatcatttc

SEQ ID NO: 757308 - DNA, 120 bp, Artificial Sequence
  ENSG00000213967_35 (sequence is synthesized)
tagtgatcttttgtattactgttgtatccattgtaatgtctattctttcatttctgattttgtttatttagatctctcttctgtttgtgatgaatctagctagcaatttatcaattttgt

SEQ ID NO: 757309 - DNA, 120 bp, Artificial Sequence
  ENSG00000213967_36 (sequence is synthesized)
agatgacctggatgagaggtccaacgtcaagaagaaagccagtctttaaagtgatttggaaagctgcattccaaaggaaaccgtttctggaaagcctgaaatttaaaaaaaaatatactc

SEQ ID NO: 757310 - DNA, 120 bp, Artificial Sequence
  ENSG00000213967_37 (sequence is synthesized)
tcagataggggcatcttctgcttatgcttataaaatctctaagaattctactctcccttcaatgatcttccttaacgtttacagtgacagccaaagtactgttcatggcatataaaagag

SEQ ID NO: 757311 - DNA, 120 bp, Artificial Sequence
  ENSG00000213967_38 (sequence is synthesized)
tgtacaatctgactttttttttcttgtttttgtggacagatagatatctgcatagttttgagacactctatgttaaaatttttttttgttttagaaggagtttcgcttttgtggcccatg

SEQ ID NO: 757312 - DNA, 87 bp, Artificial Sequence
  ENSG00000213967_39 (sequence is synthesized)
gcctcccaggttgaagtgattgtcctgcctcaggccacaactggctaattttttgtatttctcgtagagacggagtttcatcatgtt

SEQ ID NO: 757313 - DNA, 120 bp, Artificial Sequence
  ENSG00000213967_40 (sequence is synthesized)
cgtgcctggcctctctttttgcacaagagtagtggtttctgtttcattaggggtttttttttgtttgtttgtttttctgctcatttcatcctgttttttttcttgctttctttttttttt

SEQ ID NO: 757314 - DNA, 120 bp, Artificial Sequence
  ENSG00000213967_41 (sequence is synthesized)
tcttttttttttttgtttatttaatatggccgtttttacttcctgcagaaagggtatactcgccagcagttttgccatgagagtacactgagcaaaggagacagggtcatttataacctg

SEQ ID NO: 757315 - DNA, 120 bp, Artificial Sequence
  ENSG00000213967_42 (sequence is synthesized)
atgtgtccactctactgctgtgtccagtttccactggctggaacgggcatcctgttttcattactatagccttgaaatatagtttgggccatgcgtggtggctcacgcctgtaatcccag

SEQ ID NO: 757316 - DNA, 67 bp, Artificial Sequence
  ENSG00000213967_43 (sequence is synthesized)
ggtgggtgaatcacgaggtcacaaaaaattagctgggctcagtggtgggcacctgtaatcccagcta

SEQ ID NO: 757317 - DNA, 87 bp, Artificial Sequence
  ENSG00000213967_44 (sequence is synthesized)
ggagctactttagcctgggcggcagagcaagactctctctcgatgtatatatatatagtttgaaattataaagtataatgtccttct

SEQ ID NO: 757318 - DNA, 120 bp, Artificial Sequence
  ENSG00000213967_45 (sequence is synthesized)
tatatatatagtttgaaattataaagtataatgtccttctgctttgttctttttcctcaagattgctttggctattcaaaatttattgtggtttcgtgtacattttaggattgtaatttt

SEQ ID NO: 757319 - DNA, 120 bp, Artificial Sequence
  ENSG00000213967_46 (sequence is synthesized)
cattactgtgaaaaactggaattttgacagggagtttattgagtctagagatcaccttagataatatggcagtttcacaatacttattctttcaatagaaataaaatatttttaaattta

SEQ ID NO: 757320 - DNA, 120 bp, Artificial Sequence
  ENSG00000213967_47 (sequence is synthesized)
tcccaaagtgctgggattacagatgccagtaatttaaaatgcctgccttccatgaatgcacagttacagtcaaacattgcagttatctagacaaattatttgttaatgtacataaatgtt

SEQ ID NO: 757321 - DNA, 120 bp, Artificial Sequence
  ENSG00000213967_48 (sequence is synthesized)
gccaactagttgtaatgagtaaacatttctgttattgtgttgcagttttatattagtgttttttgtagtgtaagtttcctaacatcagtttattgtgcctattggttttttcttatatat

SEQ ID NO: 757322 - DNA, 120 bp, Artificial Sequence
  ENSG00000213973_0 (sequence is synthesized)
atgtctttttggtctgaaaaatgtacaagacttattctgtatgatttaaaaatagcactcaaaaatggatcgttgacattttgggatgtgaccatagaattcgctctggaggagtggcaa

SEQ ID NO: 757323 - DNA, 120 bp, Artificial Sequence
  ENSG00000213973_1 (sequence is synthesized)
tgcctggacatggctcagcagaatttatataggaatgttatgttagagaactacagaaacctggtcttcctgggtatcgctgtctctaagctagacttgataacttgtctgaagcaaggg

SEQ ID NO: 757324 - DNA, 120 bp, Artificial Sequence
  ENSG00000213973_2 (sequence is synthesized)
aaagagccttggaatatgaagagacatgagatggtaactaaacccccagttattagttctcattttacacaagacttttggccagatcagagcataaaagattctttccaagaaataata

SEQ ID NO: 757325 - DNA, 120 bp, Artificial Sequence
  ENSG00000213973_3 (sequence is synthesized)
ttgagaacatatgcaagatgtggacataagaatttacgattaagaaaagattgtgaaagtgtcaatgagggtaagatgcacgaagaagcttataataaacttaaccaatgttggacaact

SEQ ID NO: 757326 - DNA, 120 bp, Artificial Sequence
  ENSG00000213973_4 (sequence is synthesized)
acccagggaaaaatatttcagtgtaacaaatatgtgaaagtctttcataaatattcaaattcaaatagatataagataattcatactgggaagaaaccatataaatgtgaagaatgtggc

SEQ ID NO: 757327 - DNA, 89 bp, Artificial Sequence
  ENSG00000213973_5 (sequence is synthesized)
ctagacataaagcgaagaatgtggcaaagcttttaaccatttctcagcccttagaaaacatcagataattcatactggaaagaaaccct

SEQ ID NO: 757328 - DNA, 90 bp, Artificial Sequence
  ENSG00000213973_6 (sequence is synthesized)
gaagaatgtggcaaagcttttagccagtcctcaacccttagaaaacatgagaatgaagaatgcggcaaagcttttagcaatttgtcagcc

SEQ ID NO: 757329 - DNA, 120 bp, Artificial Sequence
  ENSG00000213973_7 (sequence is synthesized)
gaagaatgcggcaaagcttttagcaatttgtcagcccttagaaaacatgagataattcatactggacagaaaccctacaaatgtgaagaatgtggtaaagcttttaagtggtcctcaaaa

SEQ ID NO: 757330 - DNA, 77 bp, Artificial Sequence
  ENSG00000213973_8 (sequence is synthesized)
atgtgaagaatgtggtaaagcttttaagtggtcctcaaaacttactgtacataaggtaattcatactgccgtttctc

SEQ ID NO: 757331 - DNA, 120 bp, Artificial Sequence
  ENSG00000213973_9 (sequence is synthesized)
gaaaacataagataattcatactggaaagcaaccctacaaatgtgaagaatgcagcaaagcttttagcaatttttcagcccttagaaaacatgagataattcatactggagagaaaccct

SEQ ID NO: 757332 - DNA, 120 bp, Artificial Sequence
  ENSG00000213973_10 (sequence is synthesized)
gaaaccctacaaatgtgaagaatgtggtaaagcttttaagtggtcctcaaaacttactgtacataaggtaattcatatggaagagaaaccttgcaaatgtgaagaatgtggcaaagcttt

SEQ ID NO: 757333 - DNA, 87 bp, Artificial Sequence
  ENSG00000213973_11 (sequence is synthesized)
atgtgaagaatgtggcaaagcttttaacaattcctcaacccttatgaaacataagataattcatactgggaagaaaccacaatcttc

SEQ ID NO: 757334 - DNA, 72 bp, Artificial Sequence
  ENSG00000213973_12 (sequence is synthesized)
gtgaagaatgtggcaaagcttttagccagtcctcaacccttagaaaacataaagcttttaagtggtcctcac

SEQ ID NO: 757335 - DNA, 73 bp, Artificial Sequence
  ENSG00000213973_13 (sequence is synthesized)
aaccctacaaatgtgaagaatgtggtaaagcttttaagtggtcctcacaccttactagacataaaggctttta

SEQ ID NO: 757336 - DNA, 82 bp, Artificial Sequence
  ENSG00000213973_14 (sequence is synthesized)
aaagcttttaagtggtcctcaaaacttactgtacataaggtaattcatactgcagagaaaccctgcaaatgtgaagaatgtg

SEQ ID NO: 757337 - DNA, 89 bp, Artificial Sequence
  ENSG00000213973_15 (sequence is synthesized)
atactggaaagaaaccctatattcctcaacccttagaaaacatgagataattcatactggagagaaatcctacaaatgtgaagaatgtg

SEQ ID NO: 757338 - DNA, 120 bp, Artificial Sequence
  ENSG00000213973_16 (sequence is synthesized)
tttaacaattcctcaacccttagaaaacatgagataattcatactggagagaaatcctacaaatgtgaagaatgtgcccttagaaaacatgagataattcatactggaaagaaaccctac

SEQ ID NO: 757339 - DNA, 87 bp, Artificial Sequence
  ENSG00000213973_17 (sequence is synthesized)
aaccacagtcctcacaccttactagacataaagcagttcatactggggagaagccctacaaatgtggagaatgtggaaaagctttta

SEQ ID NO: 757340 - DNA, 120 bp, Artificial Sequence
  ENSG00000213973_18 (sequence is synthesized)
gagaagccctacaaatgtggagaatgtggaaaagcttttaacaattcctcaacccttaagaaacataagctaattcatactagggagaaatcgtacaaatgtgaagaatgtggcaaagct

SEQ ID NO: 757341 - DNA, 120 bp, Artificial Sequence
  ENSG00000213973_19 (sequence is synthesized)
tttagcaatttctcagcccttaggaaacataagataattcatactggggagaaaccatacaaatgtgaagaatgtgaatgtggcaaagcttttaacaattcctcaacccttatgaaacat

SEQ ID NO: 757342 - DNA, 120 bp, Artificial Sequence
  ENSG00000213973_20 (sequence is synthesized)
aagataattcatactggggagaaaccgtacaaatgtgaagaatgtggcaaaggttttaacaatttctcgacccttatgaaacataagataattcatactggggagaaaccgtacaaatgt

SEQ ID NO: 757343 - DNA, 82 bp, Artificial Sequence
  ENSG00000213973_21 (sequence is synthesized)
ctaaacataaatcgtggcaaagcttttagccatttctcacgccttactaaacataggataattcatactggaaagaaaccct

SEQ ID NO: 757344 - DNA, 81 bp, Artificial Sequence
  ENSG00000213973_22 (sequence is synthesized)
atgtgaagaacgtggcaaagcttttagccatttctcacgccttactaaacataggtgtggagagaaaccctacaaatgtga

SEQ ID NO: 757345 - DNA, 82 bp, Artificial Sequence
  ENSG00000213973_23 (sequence is synthesized)
tgtggcaaagcctttaaccagtcctcacaccttactcaacataaaacaattcatactggagggaaaactttcagcccttact

SEQ ID NO: 757346 - DNA, 120 bp, Artificial Sequence
  ENSG00000213973_24 (sequence is synthesized)
gccgttgtttctggttccagctggagctccggatctcgtttttactgctctgtgtccttagcctctgtggccctgtgacctgtaggtatttggagatccacagctaggacgccaggaccc

SEQ ID NO: 757347 - DNA, 120 bp, Artificial Sequence
  ENSG00000213973_25 (sequence is synthesized)
aaatattcaaattcaaatagatataagattagacacactaaaaagaaaactttcaaatgtatgaaatgtagcaaatcatttttcatgctttcacacttaattcaacataagagaattcat

SEQ ID NO: 757348 - DNA, 120 bp, Artificial Sequence
  ENSG00000213973_26 (sequence is synthesized)
actagagagaatatctacaaatgtgaagaacgtggcaaagcctttaaatggttctcaacccttattaaacataagataattcatactgaagacaaaccctacaaatataagaaatgtggc

SEQ ID NO: 757349 - DNA, 120 bp, Artificial Sequence
  ENSG00000213973_27 (sequence is synthesized)
actgaagacaaaccctacaaatataagaaatgtggcaaagcttttaacatctcttcaatgttcactaaatgtaagataattcatactggaaagaaaccctgcaaatgtgaagaatgtggc

SEQ ID NO: 757350 - DNA, 78 bp, Artificial Sequence
  ENSG00000213973_28 (sequence is synthesized)
aaaccatacaaatgtgaagaatgtggtaaagcttttaagtggtctcaaaacttatggaacataaggtaattcatactg

SEQ ID NO: 757351 - DNA, 88 bp, Artificial Sequence
  ENSG00000213973_29 (sequence is synthesized)
tggcaaagcttttaaccagtcctcaagccttaataggcagaaaacaattcatgctggagagaaaccccacaaatgtacaccttaaata

SEQ ID NO: 757352 - DNA, 120 bp, Artificial Sequence
  ENSG00000213973_30 (sequence is synthesized)
tggcaaagcctttaaccagtcctcacaccttaaatacacataaaataattgatactggaggaaaaccctacaaatataataaaggtgacaaagcttttaaccattgctcagctgttactc

SEQ ID NO: 757353 - DNA, 120 bp, Artificial Sequence
  ENSG00000213973_31 (sequence is synthesized)
aaaatgagagaattcctaaagaagataaactccacaaatgtgaataatatggcaaagcttttaactggtcctcaaatcttactgaatgtaagataattcatactgaagataaacccttca

SEQ ID NO: 757354 - DNA, 120 bp, Artificial Sequence
  ENSG00000213973_32 (sequence is synthesized)
aatgtgaggaatgtggcaaagcttttaatcagtcctcaaatcttactgaacataagataattcatagtagagacaaacactgcaaatatgaagaatgggcaaagcttttaaccagtcctc

SEQ ID NO: 757355 - DNA, 120 bp, Artificial Sequence
  ENSG00000213973_33 (sequence is synthesized)
aaactttactcaacataaaataatttatcttggagaggaacactacaaatttaaagaatttggcaaaacttttaactgcttctcaaaacttactgaacataagataattcatactggaga

SEQ ID NO: 757356 - DNA, 120 bp, Artificial Sequence
  ENSG00000213973_34 (sequence is synthesized)
gatactttacaaatgtgaagaatgtggcaaagcttctaacgggttctcagatcttactgaatataagataaattagagagaaacccgcctcatgtgaagagtgtggcaaaacttttaact

SEQ ID NO: 757357 - DNA, 120 bp, Artificial Sequence
  ENSG00000213973_35 (sequence is synthesized)
aattcatactgaagagaaaccctacaaatatgaaaactgtggcaaagcttttaactggttttcagaccttactcaacagaaaatagttgatactgaagacaaactctagaaatgtgaaga

SEQ ID NO: 757358 - DNA, 120 bp, Artificial Sequence
  ENSG00000213973_36 (sequence is synthesized)
aaatagttgatactgaagacaaactctagaaatgtgaagaatgtggcaatgcttttaatcagttaaactttattagacataagaaaattcgtactggagaaaaaccctacaaatgtgaag

SEQ ID NO: 757359 - DNA, 120 bp, Artificial Sequence
  ENSG00000213973_37 (sequence is synthesized)
cttttagccagtcctcaactcttgctaaacaacataattcaatgggagagaaaccctacaaatgtgaataatgccataagcattcttcaatttttttttttttttttttgaaacagagtt

SEQ ID NO: 757360 - DNA, 67 bp, Artificial Sequence
  ENSG00000213973_38 (sequence is synthesized)
cattcttcaatttttttttttttttttttgaaacagagtttcgccctagttgcccaggcttcaagcg

SEQ ID NO: 757361 - DNA, 120 bp, Artificial Sequence
  ENSG00000213973_39 (sequence is synthesized)
ggattaaaggcgtgagccaccgtgcccagcctaattcttcaattcttaataaacaatttatactgaagagaaaccctacaaacgtgaagaatgttgcaaagcttttaacgtcctcaaacc

SEQ ID NO: 757362 - DNA, 120 bp, Artificial Sequence
  ENSG00000213973_40 (sequence is synthesized)
aaccttactgaacataagataattcataatggaaactagccctacaaatatgaagaatgtggcaaacactgtaaccatttctcacatcttaccacacattaagataattcatactgaaga

SEQ ID NO: 757363 - DNA, 120 bp, Artificial Sequence
  ENSG00000213973_41 (sequence is synthesized)
gaaacccgacaaatgtgaagaatgtaacaaagtctttaactggtcttcaactcatactaaatataagagaattcatacagaagataaattttataaatatgaagaatgtgacaaaagctt

SEQ ID NO: 757364 - DNA, 85 bp, Artificial Sequence
  ENSG00000213973_42 (sequence is synthesized)
aatgtgacaaaagctttaaaaacatttcaacccttattacacataagataatttatgttgtttttttttttttttttgaaatgga

SEQ ID NO: 757365 - DNA, 80 bp, Artificial Sequence
  ENSG00000213973_43 (sequence is synthesized)
ttggagtgcaatggtgcaatctcagggcctcaacctcccaagcagctgggattgcaggcgcctgccaccacgcccagcta

SEQ ID NO: 757366 - DNA, 120 bp, Artificial Sequence
  ENSG00000213973_44 (sequence is synthesized)
ttacaagcatgagccattgagcccggtcgaatgtggcaaagtttttaataagttatcaaatcatactggagagaagctctacaaacctaaaagacatgacagtgctcttgagaacacctt

SEQ ID NO: 757367 - DNA, 120 bp, Artificial Sequence
  ENSG00000213973_45 (sequence is synthesized)
aaacttttctaaacataaaagaaatcatagtgtcaagaagccctagatgtgagtcatgtcacaaagcctttaaatggttgtcacacttgagtataagctaatttatcctagagaaaacta

SEQ ID NO: 757368 - DNA, 120 bp, Artificial Sequence
  ENSG00000213973_46 (sequence is synthesized)
tgaagaatgtggcaaaatatttaaccaatactcacaccttatcgcataggaaagcatttatacttgaaaaaaaatgtacacctatgaagaatgtggaaaagccattaatatctgctcaca

SEQ ID NO: 757369 - DNA, 120 bp, Artificial Sequence
  ENSG00000213973_47 (sequence is synthesized)
tcttaacatcacagagtttatacttaaaacaaatattaaaaatgcaattactgtgagaatatcttttagaaaatataaaccttagaatggtgaagagtatttcttttgatgacaaacatt

SEQ ID NO: 757370 - DNA, 120 bp, Artificial Sequence
  ENSG00000213973_48 (sequence is synthesized)
acaaatataaagacggttgtagtactatatttgtatcacagatcttattgtgcatattttgtgctagagaaaaaccctaaagttgctcaaactttgttcaatatcagggaatgtataata

SEQ ID NO: 757371 - DNA, 120 bp, Artificial Sequence
  ENSG00000213973_49 (sequence is synthesized)
gagaaaaaaacctgcaaatgtaataaatttggaaaaaagtttataaactacagcttagaaaacagagtaagttttttttgtagatgcagtaaatatgaaaaatattcaatccaaaattaa

SEQ ID NO: 757372 - DNA, 120 bp, Artificial Sequence
  ENSG00000213973_50 (sequence is synthesized)
ctctgtaaatgtcagagaattcacagtagaaatgataaggcactggcacttcagactacactaaatcagagtgttgagtaaaaaaaataatttcaatctaaaatttagataagttatttg

SEQ ID NO: 757373 - DNA, 120 bp, Artificial Sequence
  ENSG00000213973_51 (sequence is synthesized)
taacttaaaaaagaggaggtgattttttggagaattataattacatttgaagtatactttttgtatacttcaaatatcaaaaaaattaacatcacaatattgaaaaaaattacagactct

SEQ ID NO: 757374 - DNA, 120 bp, Artificial Sequence
  ENSG00000213973_52 (sequence is synthesized)
ctctgaaaagcaaataaggatgtaattcaactctcaagttacttcatgctcttcattcctactttatttacatgtgaaagcatgcgatcaattgttgctgcatcagagatatgaaagatt

SEQ ID NO: 757375 - DNA, 120 bp, Artificial Sequence
  ENSG00000213973_53 (sequence is synthesized)
cttttttattagatgggcattatttatgacctttttcataaaagagaaaggatattaaaatataaaatgcatgataaaaatctaaatggagaggctttttgtggttaacttaaaatattg

SEQ ID NO: 757376 - DNA, 120 bp, Artificial Sequence
  ENSG00000213973_54 (sequence is synthesized)
agtgatgtatgaggtaggtgttctgaggaatatatttttgtgcattatagtgagaaaaacattttaaaattttagttaaaattaaaattaaattagtgatgtattatattagttgtgctt

SEQ ID NO: 757377 - DNA, 120 bp, Artificial Sequence
  ENSG00000213973_55 (sequence is synthesized)
ttatgtaatgtagtacattcataaatttttagattatatgtaaacttaattttttaaacattttttgacatgttaagtctgttgtacattcaatgaagtgttattatgccactcgcttta

SEQ ID NO: 757378 - DNA, 120 bp, Artificial Sequence
  ENSG00000213973_56 (sequence is synthesized)
acctatcccaccttactcaagggtgtaggtaagagatggcaacagtttactatttggtaagagtggaataacatctctagtaatctctttttttcagtggctttaacctgcaaataaatt

SEQ ID NO: 757379 - DNA, 120 bp, Artificial Sequence
  ENSG00000213973_57 (sequence is synthesized)
aaagaatattgttctcgtaggttacatttttatacttttaatcttatttaaacttctttttttttttgccttgacaaatttaaacttatttttcttaacttttatgggtacatagtgtgt

SEQ ID NO: 757380 - DNA, 120 bp, Artificial Sequence
  ENSG00000213973_58 (sequence is synthesized)
agatatatttctgccatatatagcatattttgataccagcataaaatatgtaataatcacgtcagggtaaatgagggattcttcaccttcaacatttattccttgaattacaagcaatcc

SEQ ID NO: 757381 - DNA, 120 bp, Artificial Sequence
  ENSG00000213973_59 (sequence is synthesized)
agcaatccaaatctacacttttagtcactttgaaatataaaactaaattgttatctttattatagcgtcatttttgtggtcataataaaaatcatataggaatgtaaataaaatctatac

SEQ ID NO: 757382 - DNA, 120 bp, Artificial Sequence
  ENSG00000213977_0 (sequence is synthesized)
actctgctgccggcttctcggagcggcgctgggcgaccagagcagggtcgagatgtcctacatcccgggccagccggtcaccgccgtggtgcaaagagttgaaattcacaagctgcgtca

SEQ ID NO: 757383 - DNA, 120 bp, Artificial Sequence
  ENSG00000213977_1 (sequence is synthesized)
aggtgagaacttaatcctgggtttcagcattggaggtggaatcgaccaggatccttcccagaatcccttctctgaagacaagacggacaagggtatttatgtcacacgggtgtctgaagg

SEQ ID NO: 757384 - DNA, 120 bp, Artificial Sequence
  ENSG00000213977_2 (sequence is synthesized)
aggccctgctgaaatcgctgggctgcagattggagacaagatcatgcaggtgaacggctgggacatgaccatggtcacacacgaccaggcccgcaagcggctcaccaagcgctcggagga

SEQ ID NO: 757385 - DNA, 120 bp, Artificial Sequence
  ENSG00000213977_3 (sequence is synthesized)
ggtggtgcgtctgctggtgacgcggcagtcgctgcagaaggccgtgcagcagtccatgctgtcctagcagccaccaccatctgcgactcctgcctgccgcctctctgtacagtaacgcca

SEQ ID NO: 757386 - DNA, 120 bp, Artificial Sequence
  ENSG00000213977_4 (sequence is synthesized)
cttccacactctgtccccatctggcttctgctgaccgctgggccccagctcagaagggctatagctggtcccagaggcctggcctggccttccttcccttctcccatccctggcctgggg

SEQ ID NO: 757387 - DNA, 120 bp, Artificial Sequence
  ENSG00000213977_5 (sequence is synthesized)
accacaggctcaggtccgaccctgctgcttggccacagcagtggctgggcaagtgggaaccactatctcttgggagcccccaaaagctgggaaatgctggaggaaccaggcctttcccgc

SEQ ID NO: 757388 - DNA, 120 bp, Artificial Sequence
  ENSG00000213977_6 (sequence is synthesized)
ttttgcctggctgcagggttcggctccgcccctgccccccagccctcgtgtgtccacaccgcagtgcctctgcccctcgggggactggacacacatcctgccagaggcgctacgaagctt

SEQ ID NO: 757389 - DNA, 120 bp, Artificial Sequence
  ENSG00000213977_7 (sequence is synthesized)
tgcccagatgaagccaggtgggctccgcgttcactcccactctcccgaggggtgctggcctccccagggtttgccttcttacggatttagacgaggttcgaggctcacctatcagggcag

SEQ ID NO: 757390 - DNA, 120 bp, Artificial Sequence
  ENSG00000213977_8 (sequence is synthesized)
ctctcaggattgtcattttcctctttgcctgtgggtttaacttttgtatttttttaatcacaagtttgatacaaaatgtttttatcgtactctttggagatgcccattctacttttgaat

SEQ ID NO: 757391 - DNA, 120 bp, Artificial Sequence
  ENSG00000213977_9 (sequence is synthesized)
ttagcttttactaattcgcatctggaagctcagcaagtgcacaagccttactttggttaccgtggaaaccactgccgcccctccccgatgtggtgcgctcaataaaaatgctggaattca

SEQ ID NO: 757392 - DNA, 120 bp, Artificial Sequence
  ENSG00000213983_0 (sequence is synthesized)
aaaaaaaatatattaataaaaaagttcaaaaaaggggggggattgtcatctcctttggggtgcgatggcttcaaatccaaactgaggctctccgggtggtaaggatgtgcgaggaggcct

SEQ ID NO: 757393 - DNA, 120 bp, Artificial Sequence
  ENSG00000213983_1 (sequence is synthesized)
cttgaagaactccaggcctatcatgctgtctctccgctaaagcctgaggcccgaggtcagaggattcaggaaggctctgcagtcggcccaggagggcggggtcccgtggtggaggcgggg

SEQ ID NO: 757394 - DNA, 120 bp, Artificial Sequence
  ENSG00000213983_2 (sequence is synthesized)
agagggaaggaccgcacggagcaccaacccctgctcggccccgtaccaggaagcgctggggggcagaggagcggagttgaggcagaagccaggtgaggctggagtcctggggtaggcagg

SEQ ID NO: 757395 - DNA, 120 bp, Artificial Sequence
  ENSG00000213983_3 (sequence is synthesized)
ctgtcgctgccgctgccgctgcctgagatggaaatcgggggaggaagctcgcggaagaaacagcggagggtcgtggaaaaaaaagcaatggctgagctagggatggggtaccaggtaggg

SEQ ID NO: 757396 - DNA, 120 bp, Artificial Sequence
  ENSG00000213983_4 (sequence is synthesized)
ggaggaaacggtagagagaaataggtggggctcccgcgcatgctcaataggaaggggcgccggtggggtgcggacgcatgcgtagtgggcttctcgggcggtggggtgggcgcggaattt

SEQ ID NO: 757397 - DNA, 120 bp, Artificial Sequence
  ENSG00000213983_5 (sequence is synthesized)
ggagacccacttcgggaaaggtaaaatgcgggcgcaattttagggtacctgtgggacccgggctcttagggtcttgacacaggacgggcctgggccgaaagcccaggcacgcccgaccag

SEQ ID NO: 757398 - DNA, 120 bp, Artificial Sequence
  ENSG00000213983_6 (sequence is synthesized)
agagtgtttctccactcccggactctgccagtcaggatggtggtgccttcgctgaagcttcaggacctcatcgaagagattcgcggggccaagactcaggcccaggagcgggaggtgatc

SEQ ID NO: 757399 - DNA, 120 bp, Artificial Sequence
  ENSG00000213983_7 (sequence is synthesized)
caaaaggagtgtgcccacatccgggcctccttccgcgacggggacccagtgcacaggcaccggcagctggccaaactgctctacgtccacatgttgggctaccccgcccactttggacag

SEQ ID NO: 757400 - DNA, 120 bp, Artificial Sequence
  ENSG00000213983_8 (sequence is synthesized)
atggagtgcctgaaactgatcgcctcctccagattcacagacaagagggtgggctacctgggggccatgcttctattggatgagaggcacgatgcccacctgctcattaccaacagcatc

SEQ ID NO: 757401 - DNA, 120 bp, Artificial Sequence
  ENSG00000213983_9 (sequence is synthesized)
aagaatgacctgagccaggggattcagccagtacaaggcctggccttgtgcactttgagcaccatgggctctgctgagatgtgccgagacctggccccagaggtggagaaactgctcctg

SEQ ID NO: 757402 - DNA, 120 bp, Artificial Sequence
  ENSG00000213983_10 (sequence is synthesized)
cagcccagtccctacgtgcgcaagaaggctattctgactgcagtgcacatgatccggaaggtccctgaactctccagtgtcttcctcccaccctgtgcccaactgcttcatgagcgtcac

SEQ ID NO: 757403 - DNA, 120 bp, Artificial Sequence
  ENSG00000213983_11 (sequence is synthesized)
catggcatcctgctgggcaccatcacgctgatcacggagctctgcgaacgaagccctgcagccctcaggcacttccgaaaggtggtaccccagctggtacacatcctccggactctggtg

SEQ ID NO: 757404 - DNA, 120 bp, Artificial Sequence
  ENSG00000213983_12 (sequence is synthesized)
acaatgggatactccacagaacacagcatatctggagtcagcgaccccttcctgcaggtccagatacttcgtctgcttcggatcctgggccggaaccacgaggagagcagtgagaccatg

SEQ ID NO: 757405 - DNA, 120 bp, Artificial Sequence
  ENSG00000213983_13 (sequence is synthesized)
cggtcctgtttgagacagtactcaccatcatggatatccgctctgcagctggcctacgggttctagctgtcaacattcttggtcgcttcctactcaacagtgacaggaacattaggtatg

SEQ ID NO: 757406 - DNA, 120 bp, Artificial Sequence
  ENSG00000213983_14 (sequence is synthesized)
tagccctgacatcactgcttcgactggtgcagtctgatcacagtgctgtgcagcggcatcggcccactgtggtggaatgtctacgggaaactgatgcctccctcagccggagagccctgg

SEQ ID NO: 757407 - DNA, 120 bp, Artificial Sequence
  ENSG00000213983_15 (sequence is synthesized)
aactaagcctggctctggtaaatagctccaatgtgcgagccatgatgcaagagctgcaggcctttctggagtcctgccctcctgacctacgggctgactgtgcctcaggcatcctgctgg

SEQ ID NO: 757408 - DNA, 120 bp, Artificial Sequence
  ENSG00000213983_16 (sequence is synthesized)
ctgcagagaggtttgctccaaccaaacgctggcacatagacaccatcctgcatgtgctgacaacggcgggcacccatgtgcgggatgatgcagtggccaacctgacccagctgattgggg

SEQ ID NO: 757409 - DNA, 120 bp, Artificial Sequence
  ENSG00000213983_17 (sequence is synthesized)
gggcccaggagctacatgcctactctgtgcgccgcctctacaatgccctggcagaagacatttcccagcaaccactggtgcaggtggcagcctggtgcattggggagtatggggacctcc

SEQ ID NO: 757410 - DNA, 120 bp, Artificial Sequence
  ENSG00000213983_18 (sequence is synthesized)
tgctggcagggaactgcgaggagattgagccccttcaggtggacgaagaggaagtgctggcattgctggaaaaggtgctgcagtcccacatgtccctgccagccactcgaggatatgccc

SEQ ID NO: 757411 - DNA, 120 bp, Artificial Sequence
  ENSG00000213983_19 (sequence is synthesized)
tcacagccctcatgaagctcagcactcgcctctgtggggacaacaaccgcatccgccaggtggtgtccatctacgggagctgcttggacgtggagctgcagcagcgggctgtggagtatg

SEQ ID NO: 757412 - DNA, 120 bp, Artificial Sequence
  ENSG00000213983_20 (sequence is synthesized)
acacactcttccggaaatacgaccacatgagggctgccatcctggaaaaaatgcctcttgtggagcgagatggccctcaggctgatgaggaagcaaaggaaagcaaagaagcagcccagc

SEQ ID NO: 757413 - DNA, 120 bp, Artificial Sequence
  ENSG00000213983_21 (sequence is synthesized)
tttcagaagcagccccagtgcccacagagccccaggcctcacagctcctggatctgctagatctcctggatggggcttctggggatgtccagcatcctccccatctggacccctccccag

SEQ ID NO: 757414 - DNA, 120 bp, Artificial Sequence
  ENSG00000213983_22 (sequence is synthesized)
gaggtgccctggtacacctgcttgaccttccctgtgtacctccacccccagctcccatcccagatctcaaagtgtttgagcgtgagggagtacagctgaatctgtctttcattcgacccc

SEQ ID NO: 757415 - DNA, 120 bp, Artificial Sequence
  ENSG00000213983_23 (sequence is synthesized)
ctgaaaaccctgctttgctgttaatcaccatcactgccaccaacttctcagagggtgatgtcacccatttcatctgccaggctgctgtgcccaagagtctccagctgcagctgcaggccc

SEQ ID NO: 757416 - DNA, 120 bp, Artificial Sequence
  ENSG00000213983_24 (sequence is synthesized)
ccagtgggaacacagttccagctcggggtggccttcctatcacccagctcttcagaatcctcaatcctaacaaggcccccctgcggctaaagctgcgcctcacctacgaccactttcacc

SEQ ID NO: 757417 - DNA, 120 bp, Artificial Sequence
  ENSG00000213983_25 (sequence is synthesized)
agtcggtgcaggagatctttgaggtgaacaacttgcctgtggaatcgtggcagtaactgtctccactcacagcctgaaattctcctgtgtcccaaaccccagggggccccagcagcttcg

SEQ ID NO: 757418 - DNA, 120 bp, Artificial Sequence
  ENSG00000213983_26 (sequence is synthesized)
aacctacacctgagggctaccagcaggtggcgctctggctttgcactgcaaaaactggggaccagcccccttctcccacaaataaagcccaataaagcctgagaagtgaggaaagccata

SEQ ID NO: 757419 - DNA, 120 bp, Artificial Sequence
  ENSG00000213983_27 (sequence is synthesized)
agcctgggaggtcaaggctgcagtgagctttgggcgacagagtgagaccctgtatcaaaaaaaggagacctgaggagggccttgagcagatacatctcctctctcatccactcaggtggc

SEQ ID NO: 757420 - DNA, 120 bp, Artificial Sequence
  ENSG00000213983_28 (sequence is synthesized)
ctttgcttcaggtctatggacagaagaattgaaaatcggatgggaaccccagctcacaggagaagggtagtgcacacacacaggcacacacgcaatagactctcttgcccctggccccca

SEQ ID NO: 757421 - DNA, 120 bp, Artificial Sequence
  ENSG00000213983_29 (sequence is synthesized)
ctgacaacggtgaggcaggggccagtcagagagctgggcagaagtggtcaagattcaccacactgacttggccatgcccacaccttccaggcgggcacccatgtgcgggatgatgcagtg

SEQ ID NO: 757422 - DNA, 120 bp, Artificial Sequence
  ENSG00000213983_30 (sequence is synthesized)
ggagaggattagaacgaatgcccaaagttgtgccctccctccaggtggtaccccagctggtacacatcctccggactctggtgacaatgggatactccacagaacacagcatatctggag

SEQ ID NO: 757423 - DNA, 120 bp, Artificial Sequence
  ENSG00000213983_31 (sequence is synthesized)
tggttagctgtgttgcttggagaccccatcagccctgggtgcccctcacatgactcgtcactgtgcagtggccgtgtaattgcctctccatctcctctagacagtgaactccatgaagaa

SEQ ID NO: 757424 - DNA, 120 bp, Artificial Sequence
  ENSG00000213983_32 (sequence is synthesized)
gtcctgcttgctggtttctccctcctagccccatcatcttgcgccaatgtgttcccagtcctcaatggctgagcaggttgctcctttccgactgaccccaacttctgcctctcataggtt

SEQ ID NO: 757425 - DNA, 120 bp, Artificial Sequence
  ENSG00000213983_33 (sequence is synthesized)
atactccacagaacacagcatatctggagtcagcgaccccttcctgcaggtggggtgacctttcactgctgtatccctggatcagagagggcatagcagtaagaccatgaccagtggttt

SEQ ID NO: 757426 - DNA, 120 bp, Artificial Sequence
  ENSG00000213983_34 (sequence is synthesized)
aacagcatcaagaagtgagagggttctggcaatcacttggaatcagggagatgggagagtagggaccttggaaatcccaggggactgcctgttgtgggtattgaaaaggactgattttct

SEQ ID NO: 757427 - DNA, 120 bp, Artificial Sequence
  ENSG00000213983_35 (sequence is synthesized)
tctctcacctgtttatgccctggttttttaaattctacaatttcagagtcttcacagcctgcactgcaaacctctttccccattgctacccctactggtcatcagctggcctgaaccctt

SEQ ID NO: 757428 - DNA, 120 bp, Artificial Sequence
  ENSG00000213983_36 (sequence is synthesized)
cattctctggccagcctcctttagggcaggcatctcctcctctccgctcccatcctcctcaactcctagttcctcctacccactaacgcctgaatttcctaagcttctcctcttgttgaa

SEQ ID NO: 757429 - DNA, 120 bp, Artificial Sequence
  ENSG00000213983_37 (sequence is synthesized)
gcctctgtggggacaacaagtaagaaggggtcccagccccttgagagatggcctgtcactgggtccacccatttttgagtttctttccaggcatacatgcccagccctccctacccccta

SEQ ID NO: 757430 - DNA, 120 bp, Artificial Sequence
  ENSG00000213983_38 (sequence is synthesized)
tcagtaccaggactgatgagccatatatcccctaggtttgctccaaccaaacgctggcacatagacaccatcctgcatgtgctgacaacggcgggcacccatgtgcgggatgatgcagtg

SEQ ID NO: 757431 - DNA, 120 bp, Artificial Sequence
  ENSG00000213983_39 (sequence is synthesized)
ttttgtcctgactctggtacctcctggttatgtaactacagatgactaacttcccttatgctccatgtaccctgactgcctcttagagctgccttgagattaaagctcttgtgtttatga

SEQ ID NO: 757432 - DNA, 120 bp, Artificial Sequence
  ENSG00000213983_40 (sequence is synthesized)
accaacttctcagagggtgatgtcacccatttcatctgccaggctgctgtgcccaaggtttgtaaagatcagagttcagaggtggcctggggactccaggagaaaaggccactaagtgga

SEQ ID NO: 757433 - DNA, 120 bp, Artificial Sequence
  ENSG00000213983_41 (sequence is synthesized)
ggaggtgggtgggagacagtgtgagatgggattgagtcatctggagatcagcacttggggagttacaggaaaagggtgtggagccactgagtatagaggggctgcctgagccctacctac

SEQ ID NO: 757434 - DNA, 120 bp, Artificial Sequence
  ENSG00000213983_42 (sequence is synthesized)
ccaggacctgtgaggggagagggaatgcctaaaagtcaggaaaatacagtttgttaacaattttttttttaagcctgtcctaaactcccctggcctcacacacctctgttcccctcctag

SEQ ID NO: 757435 - DNA, 120 bp, Artificial Sequence
  ENSG00000213983_43 (sequence is synthesized)
gaccaagggacctgtggaggtgaggaggtgggggaaggctctagggagcgagccagaccctcacatgttggagttttctcctcagccccacgactccttatcctatgaacccctccaact

SEQ ID NO: 757436 - DNA, 120 bp, Artificial Sequence
  ENSG00000213983_44 (sequence is synthesized)
agacatttcccaggtaccattcccacctacctaggcccagggctgcccaaccactcccttgcccatcctgggccacctcctccctactagattccaatttttctctcaaggtcacagctg

SEQ ID NO: 757437 - DNA, 120 bp, Artificial Sequence
  ENSG00000213983_45 (sequence is synthesized)
ttttccatcttaattaaatagggtgggcagaaagcatcatccaccccttccacaagggagggaccctctcacatttccatcctgtttggttaggccatgtagttctgatgcttggccacc

SEQ ID NO: 757438 - DNA, 120 bp, Artificial Sequence
  ENSG00000213983_46 (sequence is synthesized)
agagggcagtgggagccaggtaacaaacttccctttccccactcctccaaccccccaccatctctgcactgcctaaagggatattgccaggtctggaagtgaggaggggacctcagacac

SEQ ID NO: 757439 - DNA, 120 bp, Artificial Sequence
  ENSG00000213983_47 (sequence is synthesized)
aagtgaggaggggacctcagacactggcccagcagtgtttctttctttctctctctctctttttttttttaaaatagagatggggggggtctcgctttgttgcccaggctggtcttgaac

SEQ ID NO: 757440 - DNA, 120 bp, Artificial Sequence
  ENSG00000213983_48 (sequence is synthesized)
ttacaggcttgagccaccatgcctggccagcccagcagtttcttatcccatgtagcaaccactggtgcaggtggcagcctggtgcattggggagtatggggacctcctgctggcagggaa

SEQ ID NO: 757441 - DNA, 120 bp, Artificial Sequence
  ENSG00000213983_49 (sequence is synthesized)
ttccctgctccgtgggcctttccttcttgccacatcctgcagtggcacactgccatagccacttacatactacactggcccagccgcatccgccaggtggtgtccatctacgggagctgc

SEQ ID NO: 757442 - DNA, 120 bp, Artificial Sequence
  ENSG00000213983_50 (sequence is synthesized)
aatgcccttttctaggtacaagggcctcatcctcacctgtgttcttccatatccacggtgagagcttcccacccactgttaattgaagctaagctggcttccaaccctccttgttcatct

SEQ ID NO: 757443 - DNA, 120 bp, Artificial Sequence
  ENSG00000213983_51 (sequence is synthesized)
gaaaatcagcaacaacatgtcattttaggaaatcagaagggtacttctgagccaccatgtgcccagggctccatattcctagtcctcatcctagatgcctcttgtgaaaggcccagagac

SEQ ID NO: 757444 - DNA, 120 bp, Artificial Sequence
  ENSG00000213983_52 (sequence is synthesized)
ggtgagcagtgatagaggggacaggagggcagggcagaggttcccagtgccctgtggccaagactcgagccagtttagagcagctggagtaaggggactaagggggacaggtccctgggg

SEQ ID NO: 757445 - DNA, 120 bp, Artificial Sequence
  ENSG00000213988_0 (sequence is synthesized)
catttgtctcttgctgcagctggtgctccaaatctggtcttagctgcttcgtgtcttcttctccagcctctgtggccctgtgacctgcaggtattgggagatccacagctgagggacccc

SEQ ID NO: 757446 - DNA, 74 bp, Artificial Sequence
  ENSG00000213988_1 (sequence is synthesized)
tgacctgcaggtattgggagatccacagctgagggacccccggaagcctagaaatgggaccattggaatttaga

SEQ ID NO: 757447 - DNA, 120 bp, Artificial Sequence
  ENSG00000213988_2 (sequence is synthesized)
ctacagacacctggtcttccttggtattgttgtcactaagccagacctgatcacctgtctggagcaaggaaaaaaacccttcactgtgaagagacatgagatgattgccaaatccccagt

SEQ ID NO: 757448 - DNA, 120 bp, Artificial Sequence
  ENSG00000213988_3 (sequence is synthesized)
tatgtgttttcattttgcccaagacctttgtccagagcagagcctaaaagattccttccaaaaagtgatagtgacaagatatgaaaaacgtgaatatggcaatttagagttaaaaaaagg

SEQ ID NO: 757449 - DNA, 120 bp, Artificial Sequence
  ENSG00000213988_4 (sequence is synthesized)
ttgtgaaagtgtggatgagggtaaagtacacaaaagaggttataatggacttaaccaatgtttgacagctacccagagcaaagtatttcaatgtgatacatatgtgaaagtctctcatat

SEQ ID NO: 757450 - DNA, 120 bp, Artificial Sequence
  ENSG00000213988_5 (sequence is synthesized)
attttcaaattcaaacagacataagataagagatactggaaaaaaacctttcaaatgtatagaatgtggcaaagctttcaaccagtcctcaacccttgctacacataagaaaattcatac

SEQ ID NO: 757451 - DNA, 90 bp, Artificial Sequence
  ENSG00000213988_6 (sequence is synthesized)
ttcaacaggtcctcacaccttacttggtacaaatgtgaagattgtggcaaagaattaaagtattcctctacccttactgcacataagaga

SEQ ID NO: 757452 - DNA, 89 bp, Artificial Sequence
  ENSG00000213988_7 (sequence is synthesized)
cccttactggtacaaatgtgaagattgtggcaaagaattaaagtattcctctacccttactgcacataagagaattcatactggagaga

SEQ ID NO: 757453 - DNA, 81 bp, Artificial Sequence
  ENSG00000213988_8 (sequence is synthesized)
atactggagagaaaccctacaagtgtgataaatgtggcagagcatttatttcatcctcgatcctttatgtacataagataa

SEQ ID NO: 757454 - DNA, 69 bp, Artificial Sequence
  ENSG00000213988_9 (sequence is synthesized)
aaatgtgaagaatgtggcaaagccttcaagctctcctcaatccttagtacacataagagaatgcgctcc

SEQ ID NO: 757455 - DNA, 120 bp, Artificial Sequence
  ENSG00000213988_10 (sequence is synthesized)
atactggagagaaaccctacaagtgtgataaatgtggcaaagcatttatttcatcctcactcctttataaacataagataagtcatagtgaaaagaaaccctacaaatgtgaagaatgtg

SEQ ID NO: 757456 - DNA, 120 bp, Artificial Sequence
  ENSG00000213988_11 (sequence is synthesized)
aaatgtgaagaatgtggcaaagccttcaagcgctcctcaacacttactatacataagataagtcatactgaagagaaaccctacaaatgtcaagaatgtgacaaagtcttcaaacgctcc

SEQ ID NO: 757457 - DNA, 79 bp, Artificial Sequence
  ENSG00000213988_12 (sequence is synthesized)
gcgctcctcaaaccttactacacataagataagtcatactgaagagaaactctacaaatgtcaagaatgtgacaaagcc

SEQ ID NO: 757458 - DNA, 120 bp, Artificial Sequence
  ENSG00000213988_13 (sequence is synthesized)
tgaagagaaactctacaaatgtcaagaatgtgacaaagccttcaagtactcctcagcccttagcacacataagataattcacagtggagagaatccctacaaatgtgaagaatgtggcaa

SEQ ID NO: 757459 - DNA, 84 bp, Artificial Sequence
  ENSG00000213988_14 (sequence is synthesized)
acagtggagagaagcgctcctcagtccttagtaaacataagataattcatactggagcgaaaccctacaaatgtgaagaatgtg

SEQ ID NO: 757460 - DNA, 120 bp, Artificial Sequence
  ENSG00000213988_15 (sequence is synthesized)
gtgaagaatgtggcaaagcttttaacttgtcctcagaccttaatacacataagaggattcatattggacagaaagcctacatagtgaagaacatggcaaatctttgaaatattcctcaac

SEQ ID NO: 757461 - DNA, 120 bp, Artificial Sequence
  ENSG00000213988_16 (sequence is synthesized)
taagataattcatactggagagaaaccgtataaatgtgatgactgttggaaagcctttgaccacccctctactcttactaaatatgagaatttatatgaaacataactcctacaaaaata

SEQ ID NO: 757462 - DNA, 120 bp, Artificial Sequence
  ENSG00000213988_17 (sequence is synthesized)
acataactcctacaaaaataaagaatgtgacaaatcattttaaggaagttctcaacccttactacacataattcatactggacggaaactctacaggtgtgaaaaatgcagcaaagccta

SEQ ID NO: 757463 - DNA, 120 bp, Artificial Sequence
  ENSG00000213988_18 (sequence is synthesized)
ctctacaggtgtgaaaaatgcagcaaagcctataacaagttctcaattctttttttttttttttaagaaggagtttcatgcttctcacccagcctggagtgcaatggcacgatctctgct

SEQ ID NO: 757464 - DNA, 89 bp, Artificial Sequence
  ENSG00000213988_19 (sequence is synthesized)
atttaacaggctggtctccaactgtgattcacacaccttggcctcctaaaatgctgggattacagtcatgagcatccatgcccagccac

SEQ ID NO: 757465 - DNA, 120 bp, Artificial Sequence
  ENSG00000213988_20 (sequence is synthesized)
aatgctgggattacagtcatgagcatccatgcccagccacaagttctcagttcttaagagacatggtgataattcatgctgaagaggaactttacaaacttgaaagatgtgacagtgctt

SEQ ID NO: 757466 - DNA, 120 bp, Artificial Sequence
  ENSG00000213988_21 (sequence is synthesized)
ttaccaccacctccaacttttctgtacataaagatgattatactagtgtgaaaccctagaaataatagaaaatttgacaaatcctttatatggttgcaagacttgattgtaggtaagata

SEQ ID NO: 757467 - DNA, 120 bp, Artificial Sequence
  ENSG00000213988_22 (sequence is synthesized)
attcatactggcaaaactcctacaagtgtgaagaatgtgggaaaactttttaatcagtgcatacaccttatttcacaggaaagctagtatccttgagaaaaattgcacaattataaaaaa

SEQ ID NO: 757468 - DNA, 120 bp, Artificial Sequence
  ENSG00000213988_23 (sequence is synthesized)
tatggaaaacccattaatgcctactcacatcttacccaacagaaggtggttcacagttaatgaaagcatttaaagtgcaattatgctcaagaaatctttcagaaaatagaagcctttaaa

SEQ ID NO: 757469 - DNA, 120 bp, Artificial Sequence
  ENSG00000213988_24 (sequence is synthesized)
gtgaagaagagtattctgaagacaaccattacacatataaagggggttgtattacctttacttgcatcacagatttcattgcacacattttgtactagaggaaaaccctgaagcagttgc

SEQ ID NO: 757470 - DNA, 120 bp, Artificial Sequence
  ENSG00000213988_25 (sequence is synthesized)
tccagctttgttcaacaacagggaatttatgttagagaagaatcctgcaaatgtagtgaatttggaaacaaattttttttcaaaaactacagcttagaaaacaccagagagttgatacta

SEQ ID NO: 757471 - DNA, 120 bp, Artificial Sequence
  ENSG00000213988_26 (sequence is synthesized)
aaatatatgtttgcagaaacagtaaatataaaaaatatttaattcaaaatgaattccatgtaaatatcagagaatttacagtagaataaggcactgatacttcagacattacactaaaac

SEQ ID NO: 757472 - DNA, 120 bp, Artificial Sequence
  ENSG00000213988_27 (sequence is synthesized)
agtgttgagtataaaaaagaatccacaacaaaaattgttagataaattatatatagctttaaaaggttttttgaagcattgtaattacattgaaagtatacttgctttcttgagaaaaaa

SEQ ID NO: 757473 - DNA, 120 bp, Artificial Sequence
  ENSG00000213988_28 (sequence is synthesized)
tttttgaaaagtgaataaggtaatagagctttcaaatttatgctgttactttatttctattcacatgtgaaagcatgtgatcaattgatgctgcatcagagatattacagattctttatt

SEQ ID NO: 757474 - DNA, 120 bp, Artificial Sequence
  ENSG00000213988_29 (sequence is synthesized)
gggcattccttataaccttttctattaaagagaaaggatattaaaatgtaagatgcatgatgaaaatataagtggacaggctgttcgtatttgacctatattaagtaatgtataaggtag

SEQ ID NO: 757475 - DNA, 120 bp, Artificial Sequence
  ENSG00000213988_30 (sequence is synthesized)
ctgttcgtatttgacctatattaagtaatgtataaggtagtgttcagagtaatacttttctacattatagtgagagaaattatgaattacagttaaaggtatattaaattactgtattat

SEQ ID NO: 757476 - DNA, 86 bp, Artificial Sequence
  ENSG00000213988_31 (sequence is synthesized)
ttatttttttttttgagatggagtccactttctcatccaggctggagtgcagcagcgcaatctctgtgtgatcattgcaacctttc

SEQ ID NO: 757477 - DNA, 120 bp, Artificial Sequence
  ENSG00000213988_32 (sequence is synthesized)
tctagtccacgctcgcagccatgccgtccaagggcccgctgcaatcggtgcaagtcttcggacgcaagaagacagccacagctgtggcgcactgcagacgcggcaatggtctcatcaagg

SEQ ID NO: 757478 - DNA, 120 bp, Artificial Sequence
  ENSG00000213988_33 (sequence is synthesized)
cgtgtccgtgtgaagggtggtgctcatgtggcccagatttatgctatccgtcagtccacctccaaagccctggtggcctattaccagaaatatgtggatgaggcttccaagaaggagatc

SEQ ID NO: 757479 - DNA, 120 bp, Artificial Sequence
  ENSG00000213988_34 (sequence is synthesized)
aaagacatcctcatccagtatgaccggaccctgctggtagctgatccccgtcgctgcaagtccaaaaagtttggaggtcctggtgcccgtgcttgctaccagaaatcctaccgataagcc

SEQ ID NO: 757480 - DNA, 120 bp, Artificial Sequence
  ENSG00000213988_35 (sequence is synthesized)
catcatgactatcaaaattcacctgtataataaacagtttttgagggattttaaagtttccaggaaaaaaaaagttcattagctttttatgaaggatttatccttttttttcagtgtgct

SEQ ID NO: 757481 - DNA, 120 bp, Artificial Sequence
  ENSG00000213988_36 (sequence is synthesized)
tcagctgtaaccacattgactaatagtgagtggaagtgcagtggataaaaagcaaatgtgtcttctctgtatcttttttcatttattggctgaagaacaggaggatgcggaagatggaag

SEQ ID NO: 757482 - DNA, 120 bp, Artificial Sequence
  ENSG00000213988_37 (sequence is synthesized)
aaaatataatctctgaaagataatgaagaagctctcctaaatagaagaaaacctcataggggatttttttttcatcattttactctctgcttctatgcgtttaaattttttttttttttt

SEQ ID NO: 757483 - DNA, 90 bp, Artificial Sequence
  ENSG00000213988_38 (sequence is synthesized)
tttttttgagacagtctcgctctgttgaccaggccagagtgcagcggcatgatcccgactaactgctcctcagccttctgagtagctggg

SEQ ID NO: 757484 - DNA, 120 bp, Artificial Sequence
  ENSG00000213988_39 (sequence is synthesized)
caggtgtgtgccaccacgcctgactaatttttgcatttttagttgtggtgcggtttcctcatgttggtgaggctggtctcgagctcctggcctcgtgatttgttcaccttggccttccaa

SEQ ID NO: 757485 - DNA, 120 bp, Artificial Sequence
  ENSG00000213988_40 (sequence is synthesized)
agtgctgggattacgtgcatgagcccctgcacctgatggagtctcattctgtcgctcaagctgaagggcagtgccgtgatcttgacccactgcaacctccgcctccaaggttcaagcaat

SEQ ID NO: 757486 - DNA, 75 bp, Artificial Sequence
  ENSG00000213988_41 (sequence is synthesized)
tctttcaccatgttgaccaggctgattagtttgtatatttctttcttcctttccttttttatttctagaagcatg

SEQ ID NO: 757487 - DNA, 120 bp, Artificial Sequence
  ENSG00000213988_42 (sequence is synthesized)
tatttctttcttcctttccttttttatttctagaagcatgttaattttaaaatataaattatgacatgtaaaagccttcatttctctgtctttgattactattatggctgatgaaaaaat

SEQ ID NO: 757488 - DNA, 120 bp, Artificial Sequence
  ENSG00000213988_43 (sequence is synthesized)
tcttagctgcttcgtgtcttcttctccagcctctgtggccctgtgacctgcaggtattgggagatccacagctgagggacccccggaagcctagaaatggccaggcgcggtggctcacgc

SEQ ID NO: 757489 - DNA, 120 bp, Artificial Sequence
  ENSG00000213988_44 (sequence is synthesized)
ctgtaatctcatctgctcggccaccctgtcccggccctgaagcgatgtaagcaagaagctgccctgctggaactgctccttcgggagactgctgattttggcattctttttcctttcatc

SEQ ID NO: 757490 - DNA, 120 bp, Artificial Sequence
  ENSG00000213988_45 (sequence is synthesized)
tttagtagagacagagtttctccatgttgaggctgcaagaattgcaggtcagcaagaattgctgcccaggggcagcacataatgggactagtaccaccgtcctgacggtgtgctgttgat

SEQ ID NO: 757491 - DNA, 120 bp, Artificial Sequence
  ENSG00000213988_46 (sequence is synthesized)
tagtaccaccgtcctgacggtgtgctgttgatgagcacgatgcaattcttcaccagggtcttggtacggactagctcgttattagatgtattgtagacaacatggacgatccttgtttta

SEQ ID NO: 757492 - DNA, 120 bp, Artificial Sequence
  ENSG00000213995_0 (sequence is synthesized)
catttggcccggggatggtcacacgcgcgggggccggaactgccgtcgccggcgcggtcgttgtcgcattgctctcggccgcactcgcgctgtacgggccgccactggacgcagttttag

SEQ ID NO: 757493 - DNA, 120 bp, Artificial Sequence
  ENSG00000213995_1 (sequence is synthesized)
aaagagcgttttcgctacgtaaagcacattcgataaaggatatggaaaatactttgcagctggtgagaaatatcatacctcctctgtcttccacaaagcacaaagggcaagatggaagaa

SEQ ID NO: 757494 - DNA, 120 bp, Artificial Sequence
  ENSG00000213995_2 (sequence is synthesized)
taggcgtagttggaggctgtcaggagtacactggagccccatattttgcagcaatctcagctctcaaagtgggcgcagacttgtcccacgtgttctgtgccagtgcggccgcacctgtga

SEQ ID NO: 757495 - DNA, 120 bp, Artificial Sequence
  ENSG00000213995_3 (sequence is synthesized)
ttaaggcctacagcccggagctgatcgtccacccagttcttgacagccccaatgctgttcatgaggtggagaagtggctgccccggctgcatgctcttgtcgtaggacctggcttgggta

SEQ ID NO: 757496 - DNA, 120 bp, Artificial Sequence
  ENSG00000213995_4 (sequence is synthesized)
gagatgatgcgcttctcagaaatgtccagggcattttggaagtgtcaaaggccagggacatccctgttgtcatcgacgcggatggcctgtggctggtcgctcagcagccggccctcatcc

SEQ ID NO: 757497 - DNA, 120 bp, Artificial Sequence
  ENSG00000213995_5 (sequence is synthesized)
atggctaccggaaggctgtgctcactcccaaccacgtggagttcagcagactgtatgacgctgtgctcagaggccctatggacagcgatgacagccatggatctgtgctaagactcagcc

SEQ ID NO: 757498 - DNA, 120 bp, Artificial Sequence
  ENSG00000213995_6 (sequence is synthesized)
aagccctgggcaacgtgacggtggtccagaaaggagagcgcgacatcctctccaacggccagcaggtgcttgtgtgcagccaggaaggcagcagccgcaggtgtggagggcaaggggacc

SEQ ID NO: 757499 - DNA, 120 bp, Artificial Sequence
  ENSG00000213995_7 (sequence is synthesized)
tcctgtcgggctccctgggcgtcctggtacactgggcgctccttgctggaccacagaaaacaaatgggggcatatcagacttgaaattgacaatttggggtcctgagattgaaacaggag

SEQ ID NO: 757500 - DNA, 120 bp, Artificial Sequence
  ENSG00000213995_8 (sequence is synthesized)
tcaaaaccagagcccagggtagctgcggcccccggaccacgacgcccacttccccacacctcctgctgtccccctctccgcaggtccagccctctcctggtggccgcgtttggcgcctgc

SEQ ID NO: 757501 - DNA, 120 bp, Artificial Sequence
  ENSG00000213995_9 (sequence is synthesized)
tctctcaccaggcagtgcaaccaccaagccttccagaagcacggtcgctccaccaccacctccgacatgatcgccgaggtgggggccgccttcagcaagctctttgaaacctgagcccgc

SEQ ID NO: 757502 - DNA, 120 bp, Artificial Sequence
  ENSG00000213995_10 (sequence is synthesized)
gcagaccagaagtaaacaggcaccttggacgggggagagcgtgtgtgtgatgggaaaatccggacccacgcgtgtgctgaaggcgtacggtgcttgccagattttcaacttgagcataaa

SEQ ID NO: 757503 - DNA, 120 bp, Artificial Sequence
  ENSG00000213995_11 (sequence is synthesized)
taagaatctggaatattgcagcttttggttaaacttaatgcatggttggagatgttatggcgacactaaacaaagtattcctgaactttccttagctccttggtagtaactgggaagaca

SEQ ID NO: 757504 - DNA, 120 bp, Artificial Sequence
  ENSG00000213995_12 (sequence is synthesized)
gaaatgaagaaaatcacatgagaatgaagaattctttagcagctcaacagagtttctcggcctgctcccagatcggcgaagtttctacttgttactctctctgccggcgcccttcgttcc

SEQ ID NO: 757505 - DNA, 120 bp, Artificial Sequence
  ENSG00000213995_13 (sequence is synthesized)
tcctctgcttcccttccctagtctttcctccggcagggagctgggcaggggtccccgggtgtctccctgagtcccgactgcactgactgggtccatcagagggctgcttcgttctccagc

SEQ ID NO: 757506 - DNA, 120 bp, Artificial Sequence
  ENSG00000213995_14 (sequence is synthesized)
tcatcttcttttaaagtggtgactagcttggtggtatctggctgctggtgtttggcttattgacatactccagggtaatcaatgatgactttgtttggaaacccttttggaggcaccatg

SEQ ID NO: 757507 - DNA, 120 bp, Artificial Sequence
  ENSG00000213995_15 (sequence is synthesized)
ggaacagaaggaaacatgagtgacgctgacccttgagtgtgtgggtggggagctctgagacgcctcctgtcccacgctctccggtgtccgtgtctacacaggggtccccatgatacccac

SEQ ID NO: 757508 - DNA, 120 bp, Artificial Sequence
  ENSG00000213995_16 (sequence is synthesized)
cggccccagcagggcagaccggaccggggacgggcacggtgaagggctgcagcctggggtctgacgtggcccctagtgctgtctcaggagaaggctctggaggacttgaggcatgctggg

SEQ ID NO: 757509 - DNA, 120 bp, Artificial Sequence
  ENSG00000213995_17 (sequence is synthesized)
cctggtgcagtgatggcgctaaggagacccggggaaagacagtatcgtggtcacgtatgcttaggaagcagcacagccgtgtccttagggatgttcgcgtccagtaaagacactggtaac

SEQ ID NO: 757510 - DNA, 120 bp, Artificial Sequence
  ENSG00000213995_18 (sequence is synthesized)
tgcggtttcagccaacactcttcatggcagtgtcgacctcgggttagcttctgttgtctttgtggatggttttcctggagcggcctgacgttgacgtgttctctggtcccatgtcttagc

SEQ ID NO: 757511 - DNA, 120 bp, Artificial Sequence
  ENSG00000213995_19 (sequence is synthesized)
ggggcatggtacggtttcgtgcctgacgcgtgcattagggtgttctcttatactttcagtagcatctttccacagcaagggccaaaccctcctggttcccttcagagtctttttggcctg

SEQ ID NO: 757512 - DNA, 120 bp, Artificial Sequence
  ENSG00000213995_20 (sequence is synthesized)
atgatgactcttgagtgataccctgtgatgcagacatgccccagatggattctactttctttaaaactagggactttcaagattaaaaaaaagattgtcactactaatttgacgcctaac

SEQ ID NO: 757513 - DNA, 120 bp, Artificial Sequence
  ENSG00000213995_21 (sequence is synthesized)
ttcagaagcttcactgtctacatgtgaacttttccagaaaaactgtgccatggacatttttcctctggggaattaacatctaaattctggtaactattaaaagacagatctggttaattt

SEQ ID NO: 757514 - DNA, 120 bp, Artificial Sequence
  ENSG00000213995_22 (sequence is synthesized)
atctagaaccgggtgtgattgagcgagttgggatcccactgccgacagccgcgcggaggcggtcgggaaaccggaaaacgcttccaatggctgtgtttccggcgacggcgcgggggcagc

SEQ ID NO: 757515 - DNA, 120 bp, Artificial Sequence
  ENSG00000213996_0 (sequence is synthesized)
agcctcggcccggactcgccgccaacgaggagccgagcgccctggagaacgcgtcggggctgagccggggtccagcagccgccgctatggacatcccgccgctggccggcaagatcgcgg

SEQ ID NO: 757516 - DNA, 120 bp, Artificial Sequence
  ENSG00000213996_1 (sequence is synthesized)
cgctgtcgctgagcgccctcccggtgtcctacgcgctcaaccacgtctcggcgctctcgcaccccctgtgggtggcattgatgagcgccctaatcctgggtctgcttttcgtggcggtct

SEQ ID NO: 757517 - DNA, 120 bp, Artificial Sequence
  ENSG00000213996_2 (sequence is synthesized)
acagcttgtcccatggcgaggtctcctatgacccactctatgctgtcttcgctgtcttcgccttcacctcggttgtggacctcatcatcgctcttcaggaagacagctatgtggtgggct

SEQ ID NO: 757518 - DNA, 120 bp, Artificial Sequence
  ENSG00000213996_3 (sequence is synthesized)
tcatggagttctacaccaaggagggagagccatacctgcgcacagcgcacggagtcttcatctgctactgggatggcactgttcactacctcctctacctggccatggccggcgccatct

SEQ ID NO: 757519 - DNA, 120 bp, Artificial Sequence
  ENSG00000213996_4 (sequence is synthesized)
gcagaaggaagagataccggaattttggactctactggctgggttccttcgccatgagcatcctggtgttccttacaggaaacattcttggcaaatacagctccgagatcaggcctgcct

SEQ ID NO: 757520 - DNA, 120 bp, Artificial Sequence
  ENSG00000213996_5 (sequence is synthesized)
tcttcctcaccatcccctacctgctggtgccatgctgggctggcatgaaggtcttcagccagccccgggcgctaacccgctgcaccgccaacatggtgcaagaggaacaaagaaagggac

SEQ ID NO: 757521 - DNA, 120 bp, Artificial Sequence
  ENSG00000213996_6 (sequence is synthesized)
tggtgcttgattgccccacagatgcctgctttgtctatatctaccagtatgagccatacctgcgggaccctgtggcctaccctaaggtgcagatgctgatgtacatgttttatgtcctgc

SEQ ID NO: 757522 - DNA, 120 bp, Artificial Sequence
  ENSG00000213996_7 (sequence is synthesized)
ctttctgcggcctggctgcctatgctctcaccttccctggttgctcctggcttccagactgggccttggtgtttgctggaggcatcggccaggcacagttctcgcacatgggggcttcca

SEQ ID NO: 757523 - DNA, 120 bp, Artificial Sequence
  ENSG00000213996_8 (sequence is synthesized)
tgcacctgcgcacacccttcacctaccgtgtgcctgaggacacctggggctgcttcttcgtgtgcaatctgctgtatgcgctgggcccccacctgctggcctaccgttgccttcagtggc

SEQ ID NO: 757524 - DNA, 120 bp, Artificial Sequence
  ENSG00000213996_9 (sequence is synthesized)
ccgcattcttccaccagccaccaccctccgaccccctagccctccacaagaagcagcattgagagagctgtggactcaggacccaggactctgtttacgtgcccagtcagccctacctgg

SEQ ID NO: 757525 - DNA, 120 bp, Artificial Sequence
  ENSG00000213996_10 (sequence is synthesized)
ggaagcgggggttgggtgttttagagacaggagggacatctccgggtgtctttagtcttggctatggtagtttcagtccagtgggtgggatggagaccaacgaccaagtgttcctgcaag

SEQ ID NO: 757526 - DNA, 120 bp, Artificial Sequence
  ENSG00000213996_11 (sequence is synthesized)
gagagcctcccacagctgtcaccatgctccaactcccacacaaacgcttctaccccttccagaacttacccatcatccccccatggatcctttcagtaaaaaccctttcaatttccaaaa

SEQ ID NO: 757527 - DNA, 120 bp, Artificial Sequence
  ENSG00000213996_12 (sequence is synthesized)
gaccagggagccccctaccgcactgcccgtctgagtctcccacctgcccccacagggagagccatacctgcgcacagcgcacggagtcttcatctgctactgggatggcactgttcacta

SEQ ID NO: 757528 - DNA, 120 bp, Artificial Sequence
  ENSG00000213996_13 (sequence is synthesized)
cctcctctacctggccatggccggcgccatctgcagaaggtgcaggaggcagggagagggtggcccctgaccctgggagagaagttgcatcctcagatggggtcccagggcagggtggag

SEQ ID NO: 757529 - DNA, 120 bp, Artificial Sequence
  ENSG00000213996_14 (sequence is synthesized)
ccagaagtgtctgtaggagaaatcaggacgcctctctagggctccagccaggggtggccaggagaaggttccagggaacgtctcaggtgtaggtggtggcctagcattgcttacatccac

SEQ ID NO: 757530 - DNA, 120 bp, Artificial Sequence
  ENSG00000213996_15 (sequence is synthesized)
cctgtgcctgggcagccacttctgttcttggacagagggtctcactgttatttccccgttcaactccctgttgtcccttccatcctgggcaaaactgaaagggacccggagctgggaaac

SEQ ID NO: 757531 - DNA, 120 bp, Artificial Sequence
  ENSG00000213996_16 (sequence is synthesized)
ctctgagattacggagtgactacctgctggtcacccctccatcccctgctcaggaagagataccggaattttggactctactggctgggttccttcgccatgagcatcctggtgttcctt

SEQ ID NO: 757532 - DNA, 120 bp, Artificial Sequence
  ENSG00000213996_17 (sequence is synthesized)
gccatccagatccttcctcagggcctccacctcaggggtctcaggagacccacctggggtagctgctcatctcacaggctggtgcccctctcctcccgcccctgcagatgctgatgtaca

SEQ ID NO: 757533 - DNA, 120 bp, Artificial Sequence
  ENSG00000213999_0 (sequence is synthesized)
atcttcgtgcagccgccgcgggtccgtgcgcccagcgtcccagggcccaggccgagcagacaaagatcattccactcagcctgggacgatggggaggaaaaaaatccagatctcccgcat

SEQ ID NO: 757534 - DNA, 120 bp, Artificial Sequence
  ENSG00000213999_1 (sequence is synthesized)
cctggaccaaaggaatcggcaggtgacgttcaccaagcggaagttcgggctgatgaagaaggcctatgagctgagcgtgctctgtgactgtgagatagccctcatcatcttcaacagcgc

SEQ ID NO: 757535 - DNA, 120 bp, Artificial Sequence
  ENSG00000213999_2 (sequence is synthesized)
caaccgcctcttccagtatgccagcacggacatggaccgtgtgctgctgaagtacacagagtacagcgagccccacgagagccgcaccaacactgacatcctcgagacgctgaagcggag

SEQ ID NO: 757536 - DNA, 120 bp, Artificial Sequence
  ENSG00000213999_3 (sequence is synthesized)
gggcattggcctcgatgggccagagctggagccggatgaagggcctgaggagccaggagagaagtttcggaggctggcaggcgaagggggtgatccggccttgccccgaccccggctgta

SEQ ID NO: 757537 - DNA, 120 bp, Artificial Sequence
  ENSG00000213999_4 (sequence is synthesized)
tcctgcagctcctgctatgcccagcccagatgtggtatacggggccttaccgccaccaggctgtgaccccagtgggcttggggaagcactgcccgcccagagccgcccatctcccttccg

SEQ ID NO: 757538 - DNA, 120 bp, Artificial Sequence
  ENSG00000213999_5 (sequence is synthesized)
gcggaggtcagacctgcctggtggcctggctgggccccgagggggactaaacacctccagaagcctctacagtggcctgcagaacccctgctccactgcaactcccggacccccactggg

SEQ ID NO: 757539 - DNA, 120 bp, Artificial Sequence
  ENSG00000213999_6 (sequence is synthesized)
gagcttccccttcctccccggaggccccccagaatatggcctgggagaccctccaccgccccctggcttgttgcagccccccaccctggccccctggcagccctcgaggggtgatgggcc

SEQ ID NO: 757540 - DNA, 120 bp, Artificial Sequence
  ENSG00000213999_7 (sequence is synthesized)
ccccgccgtgtcctcccagcccagtgggggccgaagcctgggcgaggagggtcccccaacccgcggcgcctccccgccgacccccccagtcagcatcaagtctgagcgcctctctccggc

SEQ ID NO: 757541 - DNA, 120 bp, Artificial Sequence
  ENSG00000213999_8 (sequence is synthesized)
ccccgggggccccggcgactttcctaagaccttcccctatcccttgctcctcgcccggtccctggcagagcctctgcggcctgggcccgccctgcgccggctgcccttggccgacggctg

SEQ ID NO: 757542 - DNA, 120 bp, Artificial Sequence
  ENSG00000213999_9 (sequence is synthesized)
gccccggtaggagatcacccggtggcaccagcccagagcgctcgccaggtacggcgagggcacgtggggaccccacctccctccaggcctcttcagagaagacccaacagtgacgccccc

SEQ ID NO: 757543 - DNA, 120 bp, Artificial Sequence
  ENSG00000213999_10 (sequence is synthesized)
ctccgcggtgggggcttggaggtgggcggctggactcaatccaccctggggggctcctttccttcttcctatttgtgtgtatatccacaaataaaacgcgcgtggcgtccgtggaccaga

SEQ ID NO: 757544 - DNA, 120 bp, Artificial Sequence
  ENSG00000213999_11 (sequence is synthesized)
gtcctcccagcccaggtaagtgccctgagacgacggcaagtcccagtcctccaaagccccggccgctgctgacccctggtggccatccctggtactgcgcacacttccggtacggatggg

SEQ ID NO: 757545 - DNA, 120 bp, Artificial Sequence
  ENSG00000213999_12 (sequence is synthesized)
cagctattttgaggccccaagagggaccgccaccccctcctttcccagggtcctcctgccaagcctttgcccacgctgtgccatcccctggcttccttcccttcctcgctgagctcacgg

SEQ ID NO: 757546 - DNA, 120 bp, Artificial Sequence
  ENSG00000213999_13 (sequence is synthesized)
aaggcacctgcggccgcgggcccctgatcttcgtgcagccgccgcgggtccgtgcgcccagcgtcccagggcccaggccgagcagcaatgcatgagagctggaagtggaagagcttacaa

SEQ ID NO: 757547 - DNA, 120 bp, Artificial Sequence
  ENSG00000213999_14 (sequence is synthesized)
tcactgtaaccttgaactcctgggctcacagaatcctcccgtctcaggctcccacatagccaggactacagacaaagatcattccactcagcctgggacgatggggaggaaaaaaatcca

SEQ ID NO: 757548 - DNA, 120 bp, Artificial Sequence
  ENSG00000213999_15 (sequence is synthesized)
cggccgcggtcgctatggaggagccggagatgcagctcaaggggaagaaagcgccgtgaagaacctggtggacagcagcgtctacttccgcagcgtggagggtctgctcaaacaggccat

SEQ ID NO: 757549 - DNA, 120 bp, Artificial Sequence
  ENSG00000213999_16 (sequence is synthesized)
cagcatccgggaccatatgaatgccagtgcccagggccacagcccggaggaaccacccccgccctcctcagcctgatcctggaagagactcggggccccccagcctccgccaacccagac

SEQ ID NO: 757550 - DNA, 120 bp, Artificial Sequence
  ENSG00000214013_0 (sequence is synthesized)
ataatcaagacaaatttgccaaataaatcattgtagaaacgctagtttgggcctgaaaaattccaggagcaagagtcaagatttgtcactccatgagaatctggaggggactcccttccc

SEQ ID NO: 757551 - DNA, 120 bp, Artificial Sequence
  ENSG00000214013_1 (sequence is synthesized)
agaaacttgacgatgaagtactggttgtaattttagaaagacacccaatcggcttttttaaaagatcgcccagggcccttgtcctgagagctgggagctggtcggagtgacagagaagcc

SEQ ID NO: 757552 - DNA, 120 bp, Artificial Sequence
  ENSG00000214013_2 (sequence is synthesized)
atggaagcagcagtgaaagaggaaataagtcttgaagatgaagctgtagataaaaacattttcagagactgtaacaagatcgcattttacaggcgtcagaaacagtggctttccaagaag

SEQ ID NO: 757553 - DNA, 120 bp, Artificial Sequence
  ENSG00000214013_3 (sequence is synthesized)
tccacctatcaggcattattggattcagtcacaacagatgaagacagcaccaggttccaaatcatcaatgaagcaagtaaggttcctctcctggctgaaatttatggtatagaaggaaac

SEQ ID NO: 757554 - DNA, 120 bp, Artificial Sequence
  ENSG00000214013_4 (sequence is synthesized)
attttcaggcttaaaattaatgaagagactcctctaaaacccagatttgaagttccggatgtcctcacaagcaagccaagcactgtaaggctgatttcatgctctggggacacaggcagt

SEQ ID NO: 757555 - DNA, 120 bp, Artificial Sequence
  ENSG00000214013_5 (sequence is synthesized)
ctgatattggcagatggaaaaggagacctgaagtgccatatcacagcaaacccattcaaggtagacttggtgtctgaagaagaggttgtgattagcataaattccctgggccaattatac

SEQ ID NO: 757556 - DNA, 120 bp, Artificial Sequence
  ENSG00000214013_6 (sequence is synthesized)
tttgagcatctacagattcttcacaaacaaagagctgctaaagaaaatgaggaggagacatcagtggacacctctcaggaaaatcaagaagatctgggcctgtgggaagagaaatttgga

SEQ ID NO: 757557 - DNA, 120 bp, Artificial Sequence
  ENSG00000214013_7 (sequence is synthesized)
aaatttgtggatatcaaagctaatggcccttcttctattggtttggatttctccttgcatggatttgagcatctttatgggatcccacaacatgcagaatcacaccaacttaaaaatact

SEQ ID NO: 757558 - DNA, 120 bp, Artificial Sequence
  ENSG00000214013_8 (sequence is synthesized)
ggtgatggagatgcttaccgtctttataacctggatgtctatggataccaaatatatgataaaatgggcatttatggttcagtaccttatctcctggcccacaaactgggcagaactata

SEQ ID NO: 757559 - DNA, 120 bp, Artificial Sequence
  ENSG00000214013_9 (sequence is synthesized)
ggtattttctggctgaatgcctcggaaacactggtggagatcaatacagagcctgcagtagagtacacactgacccagatgggcccagttgctgctaaacaaaaggtcagatctcgcact

SEQ ID NO: 757560 - DNA, 120 bp, Artificial Sequence
  ENSG00000214013_10 (sequence is synthesized)
catgtgcactggatgtcagagagtggcatcattgatgtttttctgctgacaggacctacaccttctgatgtcttcaaacagtactcacaccttacaggcacacaagccatgccccctctt

SEQ ID NO: 757561 - DNA, 120 bp, Artificial Sequence
  ENSG00000214013_11 (sequence is synthesized)
ttctctttgggataccaccagtgccgctggaactatgaagatgagcaggatgtaaaagcagtggatgcagggtttgatgagcatgacattccttatgatgccatgtggctggacatagag

SEQ ID NO: 757562 - DNA, 120 bp, Artificial Sequence
  ENSG00000214013_12 (sequence is synthesized)
cacactgagggcaagaggtacttcacctgggacaaaaacagattcccaaaccccaagaggatgcaagagctgctcaggagcaaaaagcgtaagcttgtggtcatcagtgatccccacatc

SEQ ID NO: 757563 - DNA, 120 bp, Artificial Sequence
  ENSG00000214013_13 (sequence is synthesized)
aagattgatcctgactactcagtatatgtgaaggccaaagatcagggcttctttgtgaagaatcaggaaggggaagactttgaaggggtgtgttggccaggtctctcctcttacctggat

SEQ ID NO: 757564 - DNA, 120 bp, Artificial Sequence
  ENSG00000214013_14 (sequence is synthesized)
ttcaccaatcccaaggtcagagagtggtattcaagtctttttgctttccctgtttatcagggatctacggacatcctcttcctttggaatgacatgaatgagccttctgtctttagaggg

SEQ ID NO: 757565 - DNA, 120 bp, Artificial Sequence
  ENSG00000214013_15 (sequence is synthesized)
ccagagcaaaccatgcagaagaatgccattcatcatggcaattgggagcacagagagctccacaacatctacggtttttatcatcaaatggctactgcagaaggactgataaaacgatct

SEQ ID NO: 757566 - DNA, 120 bp, Artificial Sequence
  ENSG00000214013_16 (sequence is synthesized)
aaagggaaggagagaccctttgttcttacacgttctttctttgctggatcacaaaagtatggtgccgtgtggacaggcgacaacacagcagaatggagcaacttgaaaatttctatccca

SEQ ID NO: 757567 - DNA, 120 bp, Artificial Sequence
  ENSG00000214013_17 (sequence is synthesized)
atgttactcactctcagcattactgggatctctttttgcggagctgacataggcgggttcattgggaatccagagacagagctgctagtgcgttggtaccaggctggagcctaccagccc

SEQ ID NO: 757568 - DNA, 120 bp, Artificial Sequence
  ENSG00000214013_18 (sequence is synthesized)
ttcttccgtggccatgccaccatgaacaccaagcgacgagagccctggctctttggggaggaacacacccgactcatccgagaagccatcagagagcgctatggcctcctgccatattgg

SEQ ID NO: 757569 - DNA, 120 bp, Artificial Sequence
  ENSG00000214013_19 (sequence is synthesized)
tattctctgttctaccatgcacacgtggcttcccaacctgtcatgaggcctctgtgggtagagttccctgatgaactaaagacttttgatatggaagatgaatacatgctggggagtgca

SEQ ID NO: 757570 - DNA, 120 bp, Artificial Sequence
  ENSG00000214013_20 (sequence is synthesized)
ttattggttcatccagtcacagaaccaaaagccaccacagttgatgtgtttcttccaggatcaaatgaggtctggtatgactataagacatttgctcattgggaaggagggtgtactgta

SEQ ID NO: 757571 - DNA, 120 bp, Artificial Sequence
  ENSG00000214013_21 (sequence is synthesized)
aagatcccagtagccttggacactattccagtgtttcagcgaggtggaagtgtgataccaataaagacaactgtaggaaaatccacaggctggatgactgaatcctcctatggactccgg

SEQ ID NO: 757572 - DNA, 120 bp, Artificial Sequence
  ENSG00000214013_22 (sequence is synthesized)
gttgctctaagcactaagggttcttcagtgggtgagttatatcttgatgatggccattcattccaatacctccaccagaagcaatttttgcacaggaagttttcattctgttccagtgtt

SEQ ID NO: 757573 - DNA, 120 bp, Artificial Sequence
  ENSG00000214013_23 (sequence is synthesized)
ctgatcaatagttttgctgaccagaggggtcattatcccagcaagtgtgtggtggagaagatcttggtcttaggcttcaggaaggagccatcttctgtgactacccactcatctgatggt

SEQ ID NO: 757574 - DNA, 120 bp, Artificial Sequence
  ENSG00000214013_24 (sequence is synthesized)
aaagatcagcctgtggcttttacgtattgtgccaaaacatccatcctgagcctggagaagctctcactcaacattgccactgactgggaggtccgcatcatatgacaaagaactgcccct

SEQ ID NO: 757575 - DNA, 120 bp, Artificial Sequence
  ENSG00000214013_25 (sequence is synthesized)
ggtgatgtgagcagggacctgcctgcccctttcaacctttcccctcaccttttttgagatttttgctgcaatctgtttgccttccctgaatcaaaataatctttcattcgtcaccattat

SEQ ID NO: 757576 - DNA, 120 bp, Artificial Sequence
  ENSG00000214013_26 (sequence is synthesized)
actaatgaacaatagatttcatgtttcaaaatttcagattttacatgttaagatgtactaacaatattccttgtatcaaacatctccttttctccctgatacatagccctgagacattta

SEQ ID NO: 757577 - DNA, 120 bp, Artificial Sequence
  ENSG00000214013_27 (sequence is synthesized)
tagcgttcaggagtcttctattgcttccattccttcagcagggctgcgtgggtctgttttaacgtgggccaagcctacctgggcagcccatttgccagggcttgcctcaggccatgcagc

SEQ ID NO: 757578 - DNA, 120 bp, Artificial Sequence
  ENSG00000214013_28 (sequence is synthesized)
attggcgctctggctgcagcagctgagttgctcaaggccagtgtccaagtggacagcagcctctggtactccccccagttatcttccacccacatggactgggcagagcagccctcttct

SEQ ID NO: 757579 - DNA, 120 bp, Artificial Sequence
  ENSG00000214013_29 (sequence is synthesized)
gtgtgcactgcatacgctgcagccgtgggagttattctcccctagagatcgacttggcagcacgaaggattcttttctctttcatgcttctcaggctcaatagtttctaattaatcttaa

SEQ ID NO: 757580 - DNA, 120 bp, Artificial Sequence
  ENSG00000214013_30 (sequence is synthesized)
aatccatgtcttttacattgtttttttaattaagtgctgtttactaaccaaataatatttataacatgagtaagctataattaataacaatgaaataaatacccatgtacccaccactgg

SEQ ID NO: 757581 - DNA, 120 bp, Artificial Sequence
  ENSG00000214013_31 (sequence is synthesized)
acttcagaagtagaactcatgactgggactaggatgaggcaagggagaccctggccttgggcacaaaatgtaagggatgccaaaaaaatacagtaatcaaagtaagtaatatttcaatcc

SEQ ID NO: 757582 - DNA, 120 bp, Artificial Sequence
  ENSG00000214013_32 (sequence is synthesized)
tcccaggctctaatatggcttggcatggggcagaacattacaacataccagtcgtgtcatggtgcccaaggctccacagacctcagtggctccctgctgcctgccacagcatctgtttta

SEQ ID NO: 757583 - DNA, 120 bp, Artificial Sequence
  ENSG00000214013_33 (sequence is synthesized)
gcagcctcgactcctcagcactcctcagcacacacctcttcttatcaggcttcctccacttagcaacttgctaacggccacctctgtgccttctgatccctgggcgccaatatcctcctg

SEQ ID NO: 757584 - DNA, 120 bp, Artificial Sequence
  ENSG00000214013_34 (sequence is synthesized)
cccttaccatccttccaggcccaacttaaatcccactttcccatgaagcctaactgcgtgaacacccctacccccatacccattagcagtgattttgcccttccccgtaatgctgtccca

SEQ ID NO: 757585 - DNA, 120 bp, Artificial Sequence
  ENSG00000214013_35 (sequence is synthesized)
cttataactgtgctctacttagcattctcagggatcataccttaatgttttcagtatgtctgcgttctcctactagattgtatgtccctcaagagcatgttctgtttctcttctgtctga

SEQ ID NO: 757586 - DNA, 120 bp, Artificial Sequence
  ENSG00000214013_36 (sequence is synthesized)
cagagcactattatacctgactttcagtaactgttagctgtgattagttagctggtggatttaattgattaaaaaattacgattgaatgtatttccatctgatttgcttttctggtacaa

SEQ ID NO: 757587 - DNA, 120 bp, Artificial Sequence
  ENSG00000214013_37 (sequence is synthesized)
gattcttcccaaaggcaatcaacattgtgcatttccttgtggacacatttcatagtatgagttgagatttgagctctgcaccatatgtaagctcacagagacctgcacagattctttgct

SEQ ID NO: 757588 - DNA, 120 bp, Artificial Sequence
  ENSG00000214013_38 (sequence is synthesized)
cctatttctgtaagttttgcagttgagaagaaaggagcaagcttatattagctgaagccatggtgcctatcttcaaatttcccttgccaacctaaaataaaacttagccagaagactggg

SEQ ID NO: 757589 - DNA, 120 bp, Artificial Sequence
  ENSG00000214013_39 (sequence is synthesized)
tgctcctccctaatataaatgatagtttttaatagcatttacagttgaataagaactatctttaggtcaacatttattgcacgtctagtcttccatttaaaatattattggaggaatgga

SEQ ID NO: 757590 - DNA, 120 bp, Artificial Sequence
  ENSG00000214013_40 (sequence is synthesized)
gcagtaactagtagagtaagttaatgaggaactgctctgttttgacccaaatctatattgaaacatttggctagagacaagtggagacagcctgggtgtttttaatggttttctgctctt

SEQ ID NO: 757591 - DNA, 120 bp, Artificial Sequence
  ENSG00000214013_41 (sequence is synthesized)
attgcttctcacactttacctacctcccatttctgaatttgtgtaccagagagcaacatggggctgagttggcctacaggtattgttacttttttgtggctaattcttaatatggtttca

SEQ ID NO: 757592 - DNA, 120 bp, Artificial Sequence
  ENSG00000214013_42 (sequence is synthesized)
taggaaactggattttatataagaaattttattcatttcaacagggttcctaaaaaagctctaaaatgaatgcatagtgtgtctttccttcaagatgtaaatgtcaaggaatgagttggc

SEQ ID NO: 757593 - DNA, 120 bp, Artificial Sequence
  ENSG00000214013_43 (sequence is synthesized)
aaatcagtttaaaaacacaaactacccaacagaaaaatgtaagtataatctttcagagtggcaatctggcaacaatataaaaaatattttaattttaataaaaatatgtgggggtctcac

SEQ ID NO: 757594 - DNA, 120 bp, Artificial Sequence
  ENSG00000214013_44 (sequence is synthesized)
tatgttgcccaggctagtcttgaactcccggactcaaacaatcctcctgccttgacctcccaaagggctggggctataggcatgagccactgtgcctggccttacctcctctgttggaac

SEQ ID NO: 757595 - DNA, 120 bp, Artificial Sequence
  ENSG00000214013_45 (sequence is synthesized)
agttggcaacattggaatgggatcttttgattacatggtaatttttttacttttgagcattgtattaggatcatatagaagaattttcttggttttaagaaaaatacaattctggagttt

SEQ ID NO: 757596 - DNA, 120 bp, Artificial Sequence
  ENSG00000214013_46 (sequence is synthesized)
ggtctgtgtgcagaattccttcactttgtcacatccttttcactatcaaggcatcaaaatgataagcagcagaaacacagtcaaagcacataaacactgggagttgaatagtttttagct

SEQ ID NO: 757597 - DNA, 120 bp, Artificial Sequence
  ENSG00000214013_47 (sequence is synthesized)
aattaaccactctgcctgaaagccttagtaatgagattcctaggatttccacctaccaaaccctcgaagggctactctagactaaaataacttctcaggccagtgggtagaaagccatca

SEQ ID NO: 757598 - DNA, 120 bp, Artificial Sequence
  ENSG00000214013_48 (sequence is synthesized)
gcagctccactggaaacaggctatcatattagccactgacaatggaggccatatagctagcattctaggagaaatagcagagacattggcatcttatatcagatctgcttgtctcatgac

SEQ ID NO: 757599 - DNA, 120 bp, Artificial Sequence
  ENSG00000214013_49 (sequence is synthesized)
attggcatcttatatcagatctgcttgtctcatgacaagccttgctaaaggctatagtgccacacgaagacttgccagaattagacagctgctgctgctttttttttttttttttttttt

SEQ ID NO: 757600 - DNA, 120 bp, Artificial Sequence
  ENSG00000214013_50 (sequence is synthesized)
ggagtgcaatggcacgatctcggctaactgcaacctctgctttccgggttcaagcgattcttctgcctcagcatcctgagtaaccgagattacaggcatgctccaccaggcccagctaat

SEQ ID NO: 757601 - DNA, 120 bp, Artificial Sequence
  ENSG00000214013_51 (sequence is synthesized)
caggctgacctcgaactcctgacctcatgtaatccacctgcctctgcctcccaaagtgcaacagctgcttcttgacagttgtttccacccaggccgacggtattagattgctgtccaatc

SEQ ID NO: 757602 - DNA, 120 bp, Artificial Sequence
  ENSG00000214013_52 (sequence is synthesized)
gtttccacccaggccgacggtattagattgctgtccaatcagagccagggaaaggggagcctgactatttacatgcaaggatacagagatcttatacctaattcacatcaattaaatctt

SEQ ID NO: 757603 - DNA, 120 bp, Artificial Sequence
  ENSG00000214013_53 (sequence is synthesized)
agtcaagcatttacttccaaggaaatcaagagacctggagtctagtttgcttctacagtgaactggctgagtgatcttggccatggcatttgacctctctgggctttgttaaagaaaaga

SEQ ID NO: 757604 - DNA, 62 bp, Artificial Sequence
  ENSG00000214013_54 (sequence is synthesized)
ccatggcatttgacctctctgggctttgttaaagaaaagagataatctctagttcacttgag

SEQ ID NO: 757605 - DNA, 61 bp, Artificial Sequence
  ENSG00000214013_55 (sequence is synthesized)
ggcacatgcctgtaatctcagctgaagattgcaccagtgcactccagcctggtgacagaga

SEQ ID NO: 757606 - DNA, 120 bp, Artificial Sequence
  ENSG00000214013_56 (sequence is synthesized)
ctccagcctggtgacagagagagactccatctaaaaaaaaaaaaagagagataatctctaaaattttgtgagttttctgatacttaactgtcaaaatacagcagatatctcaagtttcct

SEQ ID NO: 757607 - DNA, 120 bp, Artificial Sequence
  ENSG00000214013_57 (sequence is synthesized)
gcagatatctcaagtttcctcagttgtaaaatggacttagtgaaacttgcagagtttttctacaaatttaaaatatcttatgtgtacagaaagggaaaaatagtaacattaccagggaga

SEQ ID NO: 757608 - DNA, 120 bp, Artificial Sequence
  ENSG00000214013_58 (sequence is synthesized)
aacccagtaaacatcactttaggcaagtgatcaaagttgacatcacctgtaataaaacctatcaatatcatgtgcccccaaatatggtttgaggaggtagccatgtcacatctgtgacag

SEQ ID NO: 757609 - DNA, 120 bp, Artificial Sequence
  ENSG00000214013_59 (sequence is synthesized)
tcttcccctaaatccataacctcagtctaatcatgtgaaaaatatcagagaaacccaaatttagggtcattctacaaaaacctgacaagtactcttcaaaagtgtcacggtcatgagaga

SEQ ID NO: 757610 - DNA, 120 bp, Artificial Sequence
  ENSG00000214013_60 (sequence is synthesized)
caaagactgtggaatgatcagagactggaggacactatctttgcaactcttttgtaagtctttgcaagtcttttgtaagtctaaaattattttaaaataaaaagttttttaaaggtctct

SEQ ID NO: 757611 - DNA, 120 bp, Artificial Sequence
  ENSG00000214013_61 (sequence is synthesized)
gtgaagtggctagctcccagtaggcacttaatgaatgagaggtattataatgataagcaaagacattgcttccaatagtgttagtaatcaaagaaatgcttcttggtggaaaagacagag

SEQ ID NO: 757612 - DNA, 120 bp, Artificial Sequence
  ENSG00000214013_62 (sequence is synthesized)
ccattagttggcaatgctgtgcagcagaaaccattccagccacagatattacatgaccgtgggtgaaatatgttataaaaactagttctttatccttgaaggggcttctgggaattgaaa

SEQ ID NO: 757613 - DNA, 120 bp, Artificial Sequence
  ENSG00000214013_63 (sequence is synthesized)
tgtgcagttgtttatgtgttcattatctgccctttgttcatgggctcgagttggacttctccctgatagcattggtttccacagctgtgccattgaataaaccttgagtttggacctgtt

SEQ ID NO: 757614 - DNA, 120 bp, Artificial Sequence
  ENSG00000214013_64 (sequence is synthesized)
tcggcagcagctacggttgccggtcccgcactgaaaaacgacagtggtgacgggtgagctcccagaagcagaagaatgacaggcaacacctgaagccacgcagccgccgccatcttcaca

SEQ ID NO: 757615 - DNA, 120 bp, Artificial Sequence
  ENSG00000214013_65 (sequence is synthesized)
aaagatgaattggtgaggattccaaggaggatcagaatgatttttagtcttcacactttgactagtaaaagtctggtatgactataagacatttgctcattgggaaggagggtgtactgt

SEQ ID NO: 757616 - DNA, 120 bp, Artificial Sequence
  ENSG00000214013_66 (sequence is synthesized)
tgagggctctttactaaggttcccctgccaagtagaaacctgaggaaaaggttaaatgcaacaactgctgagtaaatgccctgccagatatttttgctgagaatttctcaagttgattcc

SEQ ID NO: 757617 - DNA, 120 bp, Artificial Sequence
  ENSG00000214013_67 (sequence is synthesized)
agcaaagtggtgggttcccattaagaggaactggctccctttccgacttagtcacagagttttattcgtgatctatcatcattccaaacacgtcgttgtctggtatgactataagacatt

SEQ ID NO: 757618 - DNA, 120 bp, Artificial Sequence
  ENSG00000214013_68 (sequence is synthesized)
aggatctcagcacaagacagcacctggctcaaaaggaagctgaggagcctgataaacaaggacaaattacctgggacatcagcaacgtagctcccaagactgagaactttgaggacctct

SEQ ID NO: 757619 - DNA, 120 bp, Artificial Sequence
  ENSG00000214013_69 (sequence is synthesized)
tgcctaccgaaagcatttcaccctcttccggttcgtcccgccttcttccggctctgctctaagggcgggattatccgggtcctggaaacgtcgcggagcttgtttgctgtgcggcgtagc

SEQ ID NO: 757620 - DNA, 120 bp, Artificial Sequence
  ENSG00000214013_70 (sequence is synthesized)
ggcccctctctcagacagtcgtctgtgcgccgtgagactttggacctactgcgcaggcgtcatcctgttggaacctggactcattgcgtacacgccctcaccgccgcccagtttcggttc

SEQ ID NO: 757621 - DNA, 120 bp, Artificial Sequence
  ENSG00000214013_71 (sequence is synthesized)
atatctctgagcacctctgtgaagttaccccttgcctcttcatctaagcctaatgaaaatgaagctttgcccaaccagccaccttctcagcagataaggcacaactaccgcttattagcc

SEQ ID NO: 757622 - DNA, 120 bp, Artificial Sequence
  ENSG00000214013_72 (sequence is synthesized)
agtactgtgtctgcagaaatggccaggaacaggcagctaatttgggaactggccagacaatcagaagcacacctggacaggccagttgtccttggggaacaggccagtgcccagcgtgag

SEQ ID NO: 757623 - DNA, 120 bp, Artificial Sequence
  ENSG00000214013_73 (sequence is synthesized)
gttgccagtattctttgtagaaaatcagtgcttgcaataaaccaactggctgcaactgtagaagggacaattagtgtcctacagcaatttaatgaactattagaccatcctctggatccc

SEQ ID NO: 757624 - DNA, 120 bp, Artificial Sequence
  ENSG00000214013_74 (sequence is synthesized)
gggaggtcttgatcacagctggtagaggtggccactcactgttctatgtcttttaggttaacagttctttacataacagtgaagagtcctggtgcctcaggaaaagcaagatcaacctac

SEQ ID NO: 757625 - DNA, 120 bp, Artificial Sequence
  ENSG00000214013_75 (sequence is synthesized)
caaggaagagttgatggagtcataattttcctacttaacacccactgcaaatttaaatatgtgttctagggctgtttgttaattctattatggtctttactaattgtgattcccagttct

SEQ ID NO: 757626 - DNA, 120 bp, Artificial Sequence
  ENSG00000214013_76 (sequence is synthesized)
gggtgaataaaaagtttttgttttaatgtaattgtgatcaacactatgcttgaagacatagacaaagctatttctaccaccatgatgtttacaaaatatctggtattttcgcctatatgg

SEQ ID NO: 757627 - DNA, 120 bp, Artificial Sequence
  ENSG00000214013_77 (sequence is synthesized)
ttttctgtctcccagccgttaaaggttttaggaccaggcaggcaccccgtgcaggatttggctctctacttccgctcgccccagcccttcatcccttctaagtcaatgtcagactttggg

SEQ ID NO: 757628 - DNA, 120 bp, Artificial Sequence
  ENSG00000214013_78 (sequence is synthesized)
gccagaaagtctggaaaagccctaagcctggctgcccaagtggcgtctagtagtgagttctccggtttgggtggtatttaagcaaaggctggaattcggcggtggtggagtacacgcgat

SEQ ID NO: 757629 - DNA, 120 bp, Artificial Sequence
  ENSG00000214013_79 (sequence is synthesized)
tcctagactgggtagtgtaacaaccttcaaaggccccttctagccctgaagagtacgatgctgcagtacaatctggctggagacctagcctccagcaaagacccggccggcacttcccac

SEQ ID NO: 757630 - DNA, 120 bp, Artificial Sequence
  ENSG00000214013_80 (sequence is synthesized)
atactgagaaaaggaaagaagttgaaagcatcttgaagaaaaattcagattggatatgggattggacaagttggccagaaaatattccccacaaggagttcctctttaaagcacctgaag

SEQ ID NO: 757631 - DNA, 120 bp, Artificial Sequence
  ENSG00000214013_81 (sequence is synthesized)
cacgtagctacccagcatggaatttaaagcctgatgaggaaagggggcattttctcagcagaatttccaaagggttttgctgctgtctcatctggtggccatgggattggggatctatat

SEQ ID NO: 757632 - DNA, 120 bp, Artificial Sequence
  ENSG00000214013_82 (sequence is synthesized)
tggaaggcatctgacaacttctaccagcaccttttgatgaataatttgaatccagctttgtgcgtatagtggggatttctatctgagcttgtgacacagctaactcaggagctgttatgg

SEQ ID NO: 757633 - DNA, 120 bp, Artificial Sequence
  ENSG00000214013_83 (sequence is synthesized)
tccttgggtggctgtttcacttgtttttatttgttctgtaaatactgctttcctaatttagtaaaatgaaagaatagacactaaaatcacactgacctatacttatacctatagaatcag

SEQ ID NO: 757634 - DNA, 120 bp, Artificial Sequence
  ENSG00000214013_84 (sequence is synthesized)
ttaataagggtatcagactgattaatatctactgtaacaatttggcagtgagttttctttggatattagtataaatatgtaagtatcgttttaatatattagtcatgatatagcatttta

SEQ ID NO: 757635 - DNA, 120 bp, Artificial Sequence
  ENSG00000214013_85 (sequence is synthesized)
aaaattatctgtaacctgaattctgttaaaacactttatattccaaaagaatgaatgacagtgatattaaaatcactacattaaagggtttgcccagaataaatattgtggccttactta

SEQ ID NO: 757636 - DNA, 120 bp, Artificial Sequence
  ENSG00000214021_0 (sequence is synthesized)
cgcatgcagggccccgacgcgccactgctcctgagcgcgagggagctggggcccgggcgccggggctcggcctcctggtaccgccaggagggcggcgcggtgtgcaactggctgcggaag

SEQ ID NO: 757637 - DNA, 120 bp, Artificial Sequence
  ENSG00000214021_1 (sequence is synthesized)
caactggctgcggaagccgcagccgctcgagccacgcaccagtttcccctcggcgcgccgctccgagttccgtccacccaggaggctgccatgggccggccctgcctccgcccagtccga

SEQ ID NO: 757638 - DNA, 120 bp, Artificial Sequence
  ENSG00000214021_2 (sequence is synthesized)
ggagggtcacgcaggcggcagatgccaggcgggcagccccgcccctgcgcgccgcctcagcggcgccttcaagacgctggtcccaggcacccacgcccagggcgcctcggatacccaccc

SEQ ID NO: 757639 - DNA, 120 bp, Artificial Sequence
  ENSG00000214021_3 (sequence is synthesized)
cctcggccccccgcacaccccggtcctcgacccctctccgcaggatggtttcccggtcctctggcgaggatcctccaaggcgtctcacatgaaccggctcagaaacgccaaaatctacgt

SEQ ID NO: 757640 - DNA, 120 bp, Artificial Sequence
  ENSG00000214021_4 (sequence is synthesized)
ggagagagctgtcaagcagaagaagatctttacaatccaaggctgctacccggtgatccggtgtctcttgcgccggaggggctgggtggagaagaagatggtccatcgctcaggccccac

SEQ ID NO: 757641 - DNA, 120 bp, Artificial Sequence
  ENSG00000214021_5 (sequence is synthesized)
cctgctgccaccccagaaggatctggatagctcagcgatgggtgacagtgacaccactgaggatgaggatgaagatgaggacgaggagttccagccatcacagctgttcgacttcgatga

SEQ ID NO: 757642 - DNA, 120 bp, Artificial Sequence
  ENSG00000214021_6 (sequence is synthesized)
tttactgaaatttgatgacctagatggaacacatgctctgatggtgggtctatgtctcaatctccggaatttgccgtggtttgatgaggttgatgccaactccttcttcccacgctgcta

SEQ ID NO: 757643 - DNA, 120 bp, Artificial Sequence
  ENSG00000214021_7 (sequence is synthesized)
ctgcctgggggctgaggatgacaaaaaagccttcatagaggacttctggctgactgctgcccgcaacgttctcaagctggtggtgaagtctgagtggaagtcataccctattcaggcagt

SEQ ID NO: 757644 - DNA, 120 bp, Artificial Sequence
  ENSG00000214021_8 (sequence is synthesized)
agaggaagaggcctcaggagacaagcagcccaagaaacaggagaaaaacccagtgttggtgtccccagagtttgtggatgaagctctgtgtgcgtgcgaggagtaccttagcaacttggc

SEQ ID NO: 757645 - DNA, 120 bp, Artificial Sequence
  ENSG00000214021_9 (sequence is synthesized)
ccacatggacatcgacaaggacctggaggccccgctgtacctcacccccgagggctggtccctcttcctccagcgctactaccaagtggtccacgaaggggcagaactcaggcacctcga

SEQ ID NO: 757646 - DNA, 120 bp, Artificial Sequence
  ENSG00000214021_10 (sequence is synthesized)
cactcaggtccagcgctgtgaggacatcctgcagcagctgcaggccgtggtaccccagatagacatggaaggggatcgcaacatctggatcgtgaagccaggagccaagtcccgcggacg

SEQ ID NO: 757647 - DNA, 120 bp, Artificial Sequence
  ENSG00000214021_11 (sequence is synthesized)
aggcatcatgtgcatggaccacctggaggagatgctgaagctggtgaacggcaaccccgtggtgatgaaggacggcaagtgggtggtgcagaagtatattgagcggcccctcctcatctt

SEQ ID NO: 757648 - DNA, 120 bp, Artificial Sequence
  ENSG00000214021_12 (sequence is synthesized)
tggcaccaagtttgacctcagacagtggttcctggtaactgactggaacccacttaccgtgtggttctaccgcgacagctatatccgcttttccacgcagcccttctccctgaagaacct

SEQ ID NO: 757649 - DNA, 120 bp, Artificial Sequence
  ENSG00000214021_13 (sequence is synthesized)
ggacaactcagtgcacctgtgcaacaactccatccagaagcacctggagaactcatgccatcggcatccactgcttccgccagacaacatgtggtctagccagaggttccaggcccacct

SEQ ID NO: 757650 - DNA, 120 bp, Artificial Sequence
  ENSG00000214021_14 (sequence is synthesized)
gcaggagatgggtgccccaaatgcttggtccaccatcatcgtgcctggcatgaaggatgctgtgatccacgcacttcagacctcccaggacaccgtgcagtgtcggaaggccagctttga

SEQ ID NO: 757651 - DNA, 120 bp, Artificial Sequence
  ENSG00000214021_15 (sequence is synthesized)
acttccagccctggctgattgagatcaacgccagccccacgatggcaccctccacagcagtcactgcccggctctgtgctggcgtgcaagctgacaccctgcgcgtggtcattgaccgga

SEQ ID NO: 757652 - DNA, 120 bp, Artificial Sequence
  ENSG00000214021_16 (sequence is synthesized)
tgctggaccgcaactgtgacacaggagcctttgagctcatctataagcagcctgctgtggaggtgcctcaatatgtgggcatccggctcctggtagagggcttcaccatcaagaagccca

SEQ ID NO: 757653 - DNA, 120 bp, Artificial Sequence
  ENSG00000214021_17 (sequence is synthesized)
tggcgatgtgtcatcggcggatgggggtccgcccagcagtccctctgctgacccagcgaggctctggggaagcccgtcaccacttccccagcctccacaccaaggcccagctgccttctc

SEQ ID NO: 757654 - DNA, 120 bp, Artificial Sequence
  ENSG00000214021_18 (sequence is synthesized)
cccatgtactccgacaccagggccaggtcctcagacgacagcacagcaagctggtgggcactaaggccctgtcgaccacaggcaaggccttgaggactctacccacggctaaggtcttca

SEQ ID NO: 757655 - DNA, 120 bp, Artificial Sequence
  ENSG00000214021_19 (sequence is synthesized)
tttccctcccaccgaaccttgatttcaaggtggcacccagcatcctgaagccaagaaaggctcctgctctcctgtgcctccgaggcccccagctggaagtgccttgttgcctctgccctt

SEQ ID NO: 757656 - DNA, 120 bp, Artificial Sequence
  ENSG00000214021_20 (sequence is synthesized)
tgaagtcggaacaattcctagcacctgtcggaaggtcaaggccaaaggcaaattcaaggccagactgtgacaaacccagggctgaggcctgccccatgaagaggctgagccccctgaaac

SEQ ID NO: 757657 - DNA, 120 bp, Artificial Sequence
  ENSG00000214021_21 (sequence is synthesized)
ccctgccccttgttggtacattccagaggcgcaggggcctgggggatatgaagctagggaagcccctgcttcgattccccactgcccttgtcctggatccaacaccaaataaaaagaaac

SEQ ID NO: 757658 - DNA, 120 bp, Artificial Sequence
  ENSG00000214021_22 (sequence is synthesized)
aagtgaagtatttggggcttgactccattgctgttggagggtcaagagtggatggggcgaggccgtgtaccccagggtccacagcaagagcctgaggccatcagcagctcctccgtgcag

SEQ ID NO: 757659 - DNA, 120 bp, Artificial Sequence
  ENSG00000214021_23 (sequence is synthesized)
cgaggcccagaattcccacctaaggacagacatggggcttcctatttagggactcccccagcatctccgatccaggggtggggagcgtgagccttcactttacagatgaagaaactgagt

SEQ ID NO: 757660 - DNA, 120 bp, Artificial Sequence
  ENSG00000214021_24 (sequence is synthesized)
ctgaaagaggaggcatggcttacccaagatcacgtggcagtgagtcgacgcagggacatattgccagaactgccgagcactgggagccccccaaccccagagaacaagccaagctagcag

SEQ ID NO: 757661 - DNA, 120 bp, Artificial Sequence
  ENSG00000214021_25 (sequence is synthesized)
aatgacacctaccgggcataggaacgttaatgccatgagacaggggaaggaattggccttgcctaaacctcagcccttctgcagagggcatgggtctatcccttcttcagcaaggggcca

SEQ ID NO: 757662 - DNA, 120 bp, Artificial Sequence
  ENSG00000214021_26 (sequence is synthesized)
aggtcacctaaaaatgaaacatccaataagccacacccacctgaagaaaagtgtggcactgcttagttgtagtgggttgaactgtggtcccctgaaaagagatgtctacttggaccctgt

SEQ ID NO: 757663 - DNA, 89 bp, Artificial Sequence
  ENSG00000214021_27 (sequence is synthesized)
actgtggtcccctgaaaagagatgtctacttggaccctgtgaatgtgaccttatgtgggaaaagagtctttgtagctgggtatagaggc

SEQ ID NO: 757664 - DNA, 84 bp, Artificial Sequence
  ENSG00000214021_28 (sequence is synthesized)
cgggaggcctaggtgggaggattacctgagcctgggaagatcaaaactgtggtgagctgtgatcacgccactgcgctctgagcc

SEQ ID NO: 757665 - DNA, 120 bp, Artificial Sequence
  ENSG00000214021_29 (sequence is synthesized)
aactgtggtgagctgtgatcacgccactgcgctctgagcctgggagacagagtgaaaccctaaatcaaaaaaaaaaaaaaaggtctttgcagatgtaaataaatttaagatcttaaatga

SEQ ID NO: 757666 - DNA, 120 bp, Artificial Sequence
  ENSG00000214021_30 (sequence is synthesized)
agttaatggaattttatcagcctttcccatttgtgtagtctgggcaggttaggatttccggggtggcttgaaggtggggccggaggcttgggagggacctatggatatctgcagggaggg

SEQ ID NO: 757667 - DNA, 120 bp, Artificial Sequence
  ENSG00000214021_31 (sequence is synthesized)
cgtgaccaaggctgcctggatgacggcgggggatggtggaatatatctccccctgccctctccacctgcatgtcccaggtccagccctgcccaagttctatcatttccccacagcgaagg

SEQ ID NO: 757668 - DNA, 120 bp, Artificial Sequence
  ENSG00000214021_32 (sequence is synthesized)
cctaggctggagtgcagtggcatggtcacggctcactgtagccttgacttcctgtgctcaagcaatccttcctcctcagcctcccaagtgtctgagaccacaggcatgtaccacagctga

SEQ ID NO: 757669 - DNA, 64 bp, Artificial Sequence
  ENSG00000214021_33 (sequence is synthesized)
ctcccaagtgtctgagaccacaggcatgtaccacagctgatttttaagttttttaatgtagaat

SEQ ID NO: 757670 - DNA, 120 bp, Artificial Sequence
  ENSG00000214021_34 (sequence is synthesized)
tggcccctccaacagatttgaccgagtgtgtaccttgtgccatgcactgttctgggcacttggggtatagcagtgaacaaaacaagatcccagctctcaagggcttacattctagcaggg

SEQ ID NO: 757671 - DNA, 120 bp, Artificial Sequence
  ENSG00000214021_35 (sequence is synthesized)
aacaagatcccagctctcaagggcttacattctagcagggagaaacaggcaagcaagaacacaagtgaaattatctaacaggttaaaagattatttgggccaggcgcagtggctcatgcc

SEQ ID NO: 757672 - DNA, 62 bp, Artificial Sequence
  ENSG00000214021_36 (sequence is synthesized)
gaccaatatagtagtcccagctactcgggaggccgtgacaggagaattgcttgaacctggga

SEQ ID NO: 757673 - DNA, 120 bp, Artificial Sequence
  ENSG00000214021_37 (sequence is synthesized)
gggattacaggcgtcagccaccgtgaccagcctgaaacaggagcaagttctaaactcaggctctagagtcagaaaaggtagagtcaggttctggatccaaaatggggcaagtcatgatca

SEQ ID NO: 757674 - DNA, 120 bp, Artificial Sequence
  ENSG00000214021_38 (sequence is synthesized)
gccttggggacatttagggcagagcctcgagtgacaggtcctgggacagtgggagccaagggcaagtgctagagttgcagtgaatttagagcaaagcctcagctaagtgacacatcccag

SEQ ID NO: 757675 - DNA, 120 bp, Artificial Sequence
  ENSG00000214021_39 (sequence is synthesized)
ggcagtaggggatctatctaggttcgtgctgggcctcaggtaagtgacaggccttaggacaatgggggctgtggcatgcgtcaggttacctgccttgatatgggatcgtgacaggcccct

SEQ ID NO: 757676 - DNA, 120 bp, Artificial Sequence
  ENSG00000214021_40 (sequence is synthesized)
tggcacccagcatcctgaagccaagaaaggtgggcctcgacctgtgactcacacccagtggacagtgctgagcacggggtcagggctggagggcacaggcagagggcagctcccaggctg

SEQ ID NO: 757677 - DNA, 120 bp, Artificial Sequence
  ENSG00000214021_41 (sequence is synthesized)
gctggcaccccaagggaagagctggtctccctcagaagccccttcctccacagacttctgatcatctccctcttctcccctcctttcacaccgaggctcctgctctcctgtgcctccgag

SEQ ID NO: 757678 - DNA, 120 bp, Artificial Sequence
  ENSG00000214021_42 (sequence is synthesized)
gggcattcgtgaaaatatatggaaagcccttgtcacaatgcctggcacatagtggtgctttatcattaggaactggaatgattaaattctgtcaaagacagttttaatgtaataggaagg

SEQ ID NO: 757679 - DNA, 120 bp, Artificial Sequence
  ENSG00000214021_43 (sequence is synthesized)
agtgccctgctcatcaagggtctgggtgaggccccaggtcataaggaagccctcgctcgactgccccggggcccatcgcagcccccaaccagccccgagcggtctgatggtgcccaggga

SEQ ID NO: 757680 - DNA, 120 bp, Artificial Sequence
  ENSG00000214021_44 (sequence is synthesized)
aattaggtgttccctcctccagggcacatggctatgttctagctttgcagtgaatgttaaaggtgctcacagtgaaactgggtgactaataggatatagcagctggtcactcaacaaccc

SEQ ID NO: 757681 - DNA, 120 bp, Artificial Sequence
  ENSG00000214021_45 (sequence is synthesized)
cacatgctctgatgtcccgcatggtccagaatgagatcccctacttcatctggaccactcggcgggatgtgctcgactgtcgcttcctctccaaggatcagatgataaaccactacgccc

SEQ ID NO: 757682 - DNA, 120 bp, Artificial Sequence
  ENSG00000214021_46 (sequence is synthesized)
aacctcaggctgacagagcagggctgaagctctggctcatattggagagaaacaggcctctcttcatgccctcatctgcctgccccagcagatttccctttccaccctcaatccttatcc

SEQ ID NO: 757683 - DNA, 120 bp, Artificial Sequence
  ENSG00000214021_47 (sequence is synthesized)
ttccctaatgtgccctcccttaataagcctcttagcttggtcaactctgacctccagaaaagcttgggtagcttggcttatattctagagcaggttctaaaagttggtcagtcccttgag

SEQ ID NO: 757684 - DNA, 120 bp, Artificial Sequence
  ENSG00000214021_48 (sequence is synthesized)
tttggaatccagaacagattccaggcttatatcaagttccatttgttgaattgggttccaaaaaaggctgcaggctttggatttctaaggcagactaggttccgattccacaatatgttc

SEQ ID NO: 757685 - DNA, 120 bp, Artificial Sequence
  ENSG00000214021_49 (sequence is synthesized)
taaattcaggttagaatttggatccagattctatgctagatttaaattacattcagaatctgaactaggacacagtctggttctcaggacagaataagtatcaaaagtaggtgatgaaca

SEQ ID NO: 757686 - DNA, 120 bp, Artificial Sequence
  ENSG00000214021_50 (sequence is synthesized)
gaagaaacaaatcagacaatgggtccaagccagattctgaaggcagaatatgatccaagtcaggtcagatttggggtctggttacacaactgaaacaggagcaagttctttttttttttt

SEQ ID NO: 757687 - DNA, 120 bp, Artificial Sequence
  ENSG00000214021_51 (sequence is synthesized)
ggcctcaggtaagtactgtggttacctccactctcccacccatttatcctccacccatccgcccttccacctatctgcccttctacctatctattcatccacgcacctactggttcatcc

SEQ ID NO: 757688 - DNA, 120 bp, Artificial Sequence
  ENSG00000214021_52 (sequence is synthesized)
acacatctgtgtatgattcacatctacccatctatccatccatccaccagccatccatccactcatccacccacgtattcacccactctctgatctaccgattcacccacccacccttcc

SEQ ID NO: 757689 - DNA, 120 bp, Artificial Sequence
  ENSG00000214021_53 (sequence is synthesized)
actcatccttccatcctcccacctgtcacccattgttaatctcgtcattcatctacctgatgtcagctccatactccccatccatctatccactccctgcctacctatccttccacagat

SEQ ID NO: 757690 - DNA, 120 bp, Artificial Sequence
  ENSG00000214021_54 (sequence is synthesized)
ccacctacccatctatctacctgctattccattctcccatctactacctatctgttcttcaggccatccactcatccattcttctgtcccaggtacttagacacttgtcttcccatccgt

SEQ ID NO: 757691 - DNA, 120 bp, Artificial Sequence
  ENSG00000214021_55 (sequence is synthesized)
ttgttagttgatccactcctcattcagccctcccatgggcctggcatgtagccgagcaccctggagagggcagactaagaagacatggtccgtccctgcctgtgaggagttcaggtctct

SEQ ID NO: 757692 - DNA, 120 bp, Artificial Sequence
  ENSG00000214021_56 (sequence is synthesized)
gaggaggaggaagcagtgaaactgggctttacacatggcctgagaacagcttaggcctgaacataaggaacagcttggagtggaggggacacagaggaaccctcactatcatgcatgcca

SEQ ID NO: 757693 - DNA, 120 bp, Artificial Sequence
  ENSG00000214021_57 (sequence is synthesized)
acccaaccactgcctgccctttcccttctggatttagctcgtgtctccaggctcctagtcctgtaatccagggacccatcagcgagggattcagggaagcagaggcagctctccaggaag

SEQ ID NO: 757694 - DNA, 120 bp, Artificial Sequence
  ENSG00000214021_58 (sequence is synthesized)
gaggaaaatccctgcctcttccagagagactcccccattgctgtctcttgtgtgtgtcatgcacaaggaaggcttggttgtgtgccaggataaggggcacaagggcctcgggtgtggcca

SEQ ID NO: 757695 - DNA, 120 bp, Artificial Sequence
  ENSG00000214021_59 (sequence is synthesized)
gagaccccatgcttaagcttttatggtataggtcaggctgcaggggtttgagggcctcagttgtatatcagaatcttcagagcactgcgatgttcaggggtgagtcaggtctgtagatgt

SEQ ID NO: 757696 - DNA, 120 bp, Artificial Sequence
  ENSG00000214021_60 (sequence is synthesized)
gcacggggtcttctgaagggtcagtttctgtaatcactttcaggtgtgtcagggccttgtgcagtaacagtgcacacagaagttagtgtttctgtgggctaagggttgtagctctgtatc

SEQ ID NO: 757697 - DNA, 120 bp, Artificial Sequence
  ENSG00000214021_61 (sequence is synthesized)
gattctgggagtgggtctggatttctggtgtgtggacttaagaagctgtgtcagacttgggggaggggcgttcatgtataactgggttcacataggccaagactcccaggtgcattttag

SEQ ID NO: 757698 - DNA, 120 bp, Artificial Sequence
  ENSG00000214021_62 (sequence is synthesized)
gaagaatggaggtctgaagaaaaatataaaaaacagtgaagtgggtactgttactacccccattttgcagatgtgaagagcacacagacactgggatggttaactgagactatgcacaaa

SEQ ID NO: 757699 - DNA, 120 bp, Artificial Sequence
  ENSG00000214021_63 (sequence is synthesized)
gcacttactactgcggcccccgtaactagcgccctcagagcagccctgagagataagagtggttctggccctagaagaatgtggtggggcccaggcctctgtcctttttgtccttcccag

SEQ ID NO: 757700 - DNA, 120 bp, Artificial Sequence
  ENSG00000214021_64 (sequence is synthesized)
tagggccccatctcaagttgaatagtgcagggtggcccagggctgcttccaggacttgcctgtcctccctgagtttggatgggagagacacaagggcctggacctcagttttctgttctc

SEQ ID NO: 757701 - DNA, 120 bp, Artificial Sequence
  ENSG00000214021_65 (sequence is synthesized)
agtgccctgctcatcaagggtctgggtgaggccccaggtcataaggaagccctcgctcgactgccccggggcccatcgcagcccccaaccagccccgagcggtctgatggtttcccggtc

SEQ ID NO: 757702 - DNA, 120 bp, Artificial Sequence
  ENSG00000214021_66 (sequence is synthesized)
tcgctctggcctacagcggctgcgaggacgacaagacgctggggtggagggactgggggtcgggagaagagcggctgagggtgggcatctggatgaaggcaggaggaagaaaagaggcgt

SEQ ID NO: 757703 - DNA, 120 bp, Artificial Sequence
  ENSG00000214021_67 (sequence is synthesized)
ggctatgggcggccagaaaagatcctaggccgagaccctaggcccagcctcagtgtaccccgcccctattccgcatctttctgcaggtttcccggtcctctggcgaggatcctccaaggc

SEQ ID NO: 757704 - DNA, 120 bp, Artificial Sequence
  ENSG00000214021_68 (sequence is synthesized)
cagcagtccctctgctgacccagcgaggctctggggaagccgaggtatcaggaagtttaaggaagttgcccaaggttgcacagctcagaaggggcacagctgggatgcagacccagcccg

SEQ ID NO: 757705 - DNA, 120 bp, Artificial Sequence
  ENSG00000214021_69 (sequence is synthesized)
gtctcaaaaaaaaaaaaaaaaaaaaaacccagccaaatgagtattgtctcctccaaagtagtcactctgcctcacagagtgacttatttcaaagatgacctgatttcaaagatgccagga

SEQ ID NO: 757706 - DNA, 120 bp, Artificial Sequence
  ENSG00000214021_70 (sequence is synthesized)
gacctgatttcaaagatgccaggacttaagcccaggttgctctctccagcgcccacgcttttcccactgcagtattctgcctttgccttcaagcagtcacctctcggggaaagaactaac

SEQ ID NO: 757707 - DNA, 120 bp, Artificial Sequence
  ENSG00000214021_71 (sequence is synthesized)
acatgtccagcacttaacagtttgccccataccgctacctgcccagctcctttagtgtttacaccaacctagcaaggtaggtgctattatccccattttccagccgaggtatcaggaagt

SEQ ID NO: 757708 - DNA, 120 bp, Artificial Sequence
  ENSG00000214021_72 (sequence is synthesized)
ttgagctcatctataagcagggcccagctcctaacatgcaggtgtcaccagagagaaatgcaccactgtgcccagcaccatagctctggctcagagagtttgcctgagaaagcagcagac

SEQ ID NO: 757709 - DNA, 120 bp, Artificial Sequence
  ENSG00000214021_73 (sequence is synthesized)
agaaaacaaaaggtgcgagttgctcccgaaggaactgacttcatgtgcaacagagctcggagaagtccaaggctaagcacactctccagaacagtggaggttgtgctgaaaggcaactgg

SEQ ID NO: 757710 - DNA, 120 bp, Artificial Sequence
  ENSG00000214021_74 (sequence is synthesized)
gaggcgacggagagcctgggaggtgcgggctacactggaggccagcaagtctgccagagagaaacagaaaaaaagacaggtgggaagagctctcctggggtcagaacaaagcttaatatc

SEQ ID NO: 757711 - DNA, 120 bp, Artificial Sequence
  ENSG00000214021_75 (sequence is synthesized)
ttctttgacaaagaacgtaacatcaaaatagccaactatgggtttagttcaacatttgcaaagagagacaacactgaaaagggaacgtttgatgggactctcccttatgcaggcccagaa

SEQ ID NO: 757712 - DNA, 120 bp, Artificial Sequence
  ENSG00000214021_76 (sequence is synthesized)
ctcttcttgggccatgggtaccaatgccctgccatcaacgtttggagccttggcatcatcgtatgcaaaatggtggctggggccctgccattttatgagcagaactgtaaggatatactg

SEQ ID NO: 757713 - DNA, 120 bp, Artificial Sequence
  ENSG00000214021_77 (sequence is synthesized)
tgtctcgtgcagcccctaccccttccccaagcctcccgctcgtttaccccgctgttctgctcaggaaccctcgaggactcccactgcctccgtgatagggtctgggccacttttcttggt

SEQ ID NO: 757714 - DNA, 120 bp, Artificial Sequence
  ENSG00000214021_78 (sequence is synthesized)
tcttggcatagcatagtcactaagagcatggactgtgccaccaaatggacagcacattacccaaagtgtgtgttgtgtggatgttaattctacaggaagtaaatagattttatgaaaaaa

SEQ ID NO: 757715 - DNA, 120 bp, Artificial Sequence; identical to SEQ ID NO: 705030
  ENSG00000214022_0 (sequence is synthesized)

SEQ ID NO: 757716 - DNA, 120 bp, Artificial Sequence
  ENSG00000214022_1 (sequence is synthesized)
ggcgccgcgtccctgcacagcccgccgcagaggtaaggctggcctctctgcagtcagaggtctgagctctgccatggggataggggtgtctttattactgcagttttctctaacacctgg

SEQ ID NO: 757717 - DNA, 120 bp, Artificial Sequence
  ENSG00000214022_2 (sequence is synthesized)
gggctaccggagtgtgggccgaagcaggcgctgcagccgcggaagtatccccaggaacatccccaagaggagctggaaaaagcctcatccccagctctgcagtctccaggggagctcagt

SEQ ID NO: 757718 - DNA, 120 bp, Artificial Sequence
  ENSG00000214022_3 (sequence is synthesized)
gtctgtttgtccagcttctcagagttgctgtgcagctcggatgtggcataggaaacagcagacacagggagagggcagcataaggcactgtagggagcagtggccacattttctgcagag

SEQ ID NO: 757719 - DNA, 120 bp, Artificial Sequence
  ENSG00000214022_4 (sequence is synthesized)
gaagaaccgatgctggaacgtcgttgcaggggccccctggccatgggcctggcccagccccgactcctttctgggccctcccaggagtcaccccagaccctggggaaggagtcccgcggg

SEQ ID NO: 757720 - DNA, 120 bp, Artificial Sequence
  ENSG00000214022_5 (sequence is synthesized)
ctgaggcaacaaggcacgtcagtggcccagtctggtgcccaagccccaggcagggcccatcgctgtgcccactgtcgaaggcacttccctggctgggtggctctgtggcttcacacccgc

SEQ ID NO: 757721 - DNA, 120 bp, Artificial Sequence
  ENSG00000214022_6 (sequence is synthesized)
cggtgccaggcccggctgcccttgccctgccctgagtgtggccgtcgctttcgccatgcccccttcttagcactgcaccgccaggtccatgctgctgccaccccagacctgggctttgcc

SEQ ID NO: 757722 - DNA, 120 bp, Artificial Sequence
  ENSG00000214022_7 (sequence is synthesized)
tgccacctctgtgggcagagcttccgaggctgggtggccctggttctgcatctgcgggcccattcagctgcaaagcggcccatcgcttgtcccaaatgcgagagacgcttctggcgacga

SEQ ID NO: 757723 - DNA, 120 bp, Artificial Sequence
  ENSG00000214022_8 (sequence is synthesized)
aagcagcttcgagctcatctgcggcggtgccaccctcccgccccggaggcccggcccttcatatgcggcaactgtggccggagctttgcccagtgggaccagctagttgcccacaagcgg

SEQ ID NO: 757724 - DNA, 120 bp, Artificial Sequence
  ENSG00000214022_9 (sequence is synthesized)
agctagttgcccacaagcgggtgcacgtagctgaggccctggaggaggccgcagccaaggctctggggccccggcccaggggccgccccgcggtgaccgccccccggcccggtggagatg

SEQ ID NO: 757725 - DNA, 120 bp, Artificial Sequence
  ENSG00000214022_10 (sequence is synthesized)
tgtgcctgttgtggcaagcgcttccggcacaagcccaacttgatcgctcaccgccgcgtgcacacgggcgagcggccccaccagtgccccgagtgcgggaagcgctttaccaataagccc

SEQ ID NO: 757726 - DNA, 120 bp, Artificial Sequence
  ENSG00000214022_11 (sequence is synthesized)
tatctgacttcgcaccggcgcatccacaccggcgagaagccctacccgtgcaaagagtgcggccgccgcttccggcacaaacccaacctgctgtctcacagcaagattcacaagcgatcc

SEQ ID NO: 757727 - DNA, 120 bp, Artificial Sequence
  ENSG00000214022_12 (sequence is synthesized)
gattcacaagcgatccgaggggtcggcccaggccgcccccggcccggggagcccccagctgccagccggcccccaggagtccgcggccgagcccaccccggcggtacctctgaaaccggc

SEQ ID NO: 757728 - DNA, 120 bp, Artificial Sequence
  ENSG00000214022_13 (sequence is synthesized)
acagctgcgacgactgcggcaggagcttccggctggagcgcttcctgcgggcccaccagcggcagcacaccggggagcggcccttcacctgcgccgagtgcgggaagaacttcggcaaga

SEQ ID NO: 757729 - DNA, 120 bp, Artificial Sequence
  ENSG00000214022_14 (sequence is synthesized)
agacgcacctggtggcgcactcgcgcgtgcactccggcgagcggcccttcgcctgcgaggagtgcggccgccgcttctcccagggcagccatctggcggcgcatcggcgcgaccacgccc

SEQ ID NO: 757730 - DNA, 120 bp, Artificial Sequence
  ENSG00000214022_15 (sequence is synthesized)
ccgatcggcccttcgtgtgtcccgactgcggcaaggccttccgccacaaaccctacctggcggcgcaccggcgcatccacaccggcgagaagccctacgtctgccccgactgcggcaaag

SEQ ID NO: 757731 - DNA, 120 bp, Artificial Sequence
  ENSG00000214022_16 (sequence is synthesized)
ccttcagccagaagtccaacctggtgtcgcaccggcgcatccacacgggcgagcggccctacgcctgtcccgactgcgaccgcagcttcagccagaagtccaacctcatcacccaccgca

SEQ ID NO: 757732 - DNA, 120 bp, Artificial Sequence
  ENSG00000214022_17 (sequence is synthesized)
agagccacatccgggacggcgccttctgctgtgccatctgtggccagaccttcgacgacgaggagagactcctggcccaccagaagaagcacgatgtctgagacggtgggcggggccgtg

SEQ ID NO: 757733 - DNA, 120 bp, Artificial Sequence
  ENSG00000214022_18 (sequence is synthesized)
ttggctgagagagggctggggtccttcgtggtgggagtcgcagtgggctgggggtgcctgcctagtgctggagtaggggacaatgggaatcctagaggggatggaagacgcggggagtga

SEQ ID NO: 757734 - DNA, 120 bp, Artificial Sequence
  ENSG00000214022_19 (sequence is synthesized)
gctgggtgggccctgctagcgagagaggtcaaccccggtggccagggaacccacttccaagcgcagggacgccggcctccagctggtgtgtgctaaggctccgtcctgactgccctgtgc

SEQ ID NO: 757735 - DNA, 120 bp, Artificial Sequence
  ENSG00000214022_20 (sequence is synthesized)
cctggaaaagcagcaatagcatccgccccttagagccctctggctagaggagccaccagtggaaaggaagaccctccatcctctggtattaacgccttaatgcccctgtcttttactgta

SEQ ID NO: 757736 - DNA, 120 bp, Artificial Sequence
  ENSG00000214022_21 (sequence is synthesized)
agttacttaagatcatttttggaagcaggcgtggtagagtcctgtaaatgaatgctctgggctagatacagcttggagaacctgctggccttgttagacagcacttgggcctttgccagc

SEQ ID NO: 757737 - DNA, 120 bp, Artificial Sequence
  ENSG00000214022_22 (sequence is synthesized)
agcaagaggtgaagcgaagccactcttacctctcccttcccctcccacctgccccctgcgtaggcacccagacttggagagacccgtctgctgttaatacttccatcctcttccttccca

SEQ ID NO: 757738 - DNA, 120 bp, Artificial Sequence
  ENSG00000214022_23 (sequence is synthesized)
aagagcagatcccaaggcatttactccttggtctgtctcgctttatctgtcgcccctcccagcgctgagagcctcccctggctgtcagcagcactgtgtccaggctcttgtctgaacacc

SEQ ID NO: 757739 - DNA, 120 bp, Artificial Sequence
  ENSG00000214022_24 (sequence is synthesized)
gcagcccctccttcgctccttccagagctcagcatgtcacggcaaggactgccgcattggtgatggagggccagctgaggggaagttgctggtgagtttccttttctccatttctagcat

SEQ ID NO: 757740 - DNA, 120 bp, Artificial Sequence
  ENSG00000214022_25 (sequence is synthesized)
atggacacctggcctctgcttgagcacttaggtgacaggaacttccgcacctcctgaggccctggatgattctaattgttagaaattctaattgttagaaatccttccttataatgaatg

SEQ ID NO: 757741 - DNA, 120 bp, Artificial Sequence
  ENSG00000214022_26 (sequence is synthesized)
aattctgctttcctataatttctacctattgggccttgttctgttctctggaactaaacagaacaaccatttacccctccttttcaaactagagaataaagatttggttttagaactggt

SEQ ID NO: 757742 - DNA, 120 bp, Artificial Sequence
  ENSG00000214022_27 (sequence is synthesized)
gtgaactcgaacctgccgctgtcgccgcggcggggcggggagcgagagtgggccgcggaggccggccttcgggctccatggacgggcgccgcgtccctgcacagcccgccgcagaggtac

SEQ ID NO: 757743 - DNA, 120 bp, Artificial Sequence
  ENSG00000214022_28 (sequence is synthesized)
ggccggggcaggggcgcggggccaccgcgggcccgcggggggccgctccacctgcggggcgcgtgaccgtgagtgtgcgcgaccgtgtgtaaggctggcctctctgcagtcagaggtctg

SEQ ID NO: 757744 - DNA, 120 bp, Artificial Sequence
  ENSG00000214022_29 (sequence is synthesized)
caaaccacgccacaacaggggtgcacgggcgtccccatcccggcggaaggaaatggccctttctcatatcctggggtcttccctgtgcacagtctgacactgggaatgagtgacctttgt

SEQ ID NO: 757745 - DNA, 120 bp, Artificial Sequence
  ENSG00000214022_30 (sequence is synthesized)
gttccctgagaagagagagtgcgctctagggaatttagaaggatgtgtctggagcttgtgagcaggcacagaagggcccttaggagcctaactgcttccttcctccttccgcggaggagg

SEQ ID NO: 757746 - DNA, 120 bp, Artificial Sequence
  ENSG00000214022_31 (sequence is synthesized)
agaggaagcccagcaacttctgctctttcttaatttctagaaaagagtgaagagaggccttttcaaagttcgcaggatcgggcctttttgtgctccactttggaacaaatcggaagctag

SEQ ID NO: 757747 - DNA, 120 bp, Artificial Sequence
  ENSG00000214022_32 (sequence is synthesized)
agagctgaacatggggcagcccctggcgaggttggggcaggaccgggcaggggactgagattgcagtctcatcttccctccccttctattgccccagtaatctccagcaccccgagggag

SEQ ID NO: 757748 - DNA, 120 bp, Artificial Sequence
  ENSG00000214022_33 (sequence is synthesized)
gcagagccggtgatcaggccccgagggcagcaggctgtgggtgttccttggattcagggagagccttccttcctgcaatgtcctaatttgtgtgggtggaagagggcaggcgggcagaat

SEQ ID NO: 757749 - DNA, 120 bp, Artificial Sequence
  ENSG00000214022_34 (sequence is synthesized)
ctttggccatcagggaaagcccagactctggccacagaatggagaattcgttccgtgaccttaccagggaagaaagtgaccccgaaagacagcagtgtgcttccttgttgaaggggcaca

SEQ ID NO: 757750 - DNA, 120 bp, Artificial Sequence
  ENSG00000214022_35 (sequence is synthesized)
ttcatttattaatccaatgtccattaaggtcactctgccaggcaggatgtggggcttatggctggtgcgtgtggctttgtggggggaggggttgtggctggtgaggacacaaagctgact

SEQ ID NO: 757751 - DNA, 120 bp, Artificial Sequence
  ENSG00000214022_36 (sequence is synthesized)
ttccccgagaagggctgttctcacttgtcctccagcctcctacggagactgcagttagtgatgctgaaagtgcctcccctgtggggctaggaatgaaaagctatagacacctttttctct

SEQ ID NO: 757752 - DNA, 120 bp, Artificial Sequence
  ENSG00000214026_0 (sequence is synthesized)
gcggcggccgtgcggggcgggcgcgctgctccttccgcctcgcggaccccggaagcgcgcgtggccgccatggcgcggaatgtggtgtaccccctgtaccggctgggtggcccacaactt

SEQ ID NO: 757753 - DNA, 120 bp, Artificial Sequence
  ENSG00000214026_1 (sequence is synthesized)
gggtggcccacaacttcgggtgttccgaaccaacttcttcattcagctggtgcggcccggtgtggcccagcccgaggacaccgtgcagttccggatccccatggaaatgacaagggtgga

SEQ ID NO: 757754 - DNA, 120 bp, Artificial Sequence
  ENSG00000214026_2 (sequence is synthesized)
gctgtgcggacacgggtgcagcatggctctaacaagagaagagatcacagaaacgtgaggatcaagaagccggactacaaggtcgcctacgtgcagctggcccatggacagaccttcacg

SEQ ID NO: 757755 - DNA, 120 bp, Artificial Sequence
  ENSG00000214026_3 (sequence is synthesized)
ttcccagatctgtttcccgagaaagacgagagccctgaaggcagcgctgccgacgacctctacagcatgctcgaggaggagaggcagcagaggcagagcagcgacccgcggcggggcggc

SEQ ID NO: 757756 - DNA, 120 bp, Artificial Sequence
  ENSG00000214026_4 (sequence is synthesized)
gtccccagctggttcgggctgtgacggggtggccagcagggacgcgccccaggtgggcagctgtggcagagcagtcccgacacctaaataaaagtcttgctgcaggagaaagagccggaa

SEQ ID NO: 757757 - DNA, 120 bp, Artificial Sequence
  ENSG00000214026_5 (sequence is synthesized)
cggggcggcatccccagctggttcgggccgtgacggggcggccagcagggacgcgccccaggtgggcagctgtggcagagcagtcccgacacctaaataaaagtcttgctgcaggagaaa

SEQ ID NO: 757758 - DNA, 120 bp, Artificial Sequence
  ENSG00000214026_6 (sequence is synthesized)
ctctgtttccggagcagctgcagcaaggggtggtcaacctgggggaccagggaccccagacccgcttggagtcctgtgggtggccgcattcccaggaaggctggatccggaggaccggcc

SEQ ID NO: 757759 - DNA, 120 bp, Artificial Sequence
  ENSG00000214026_7 (sequence is synthesized)
aacaggatcgctcaggatggacgtcttctactcaagaacctcaggcccagagtccccaggagggagcagccggcaacacggtttccgctgtggagacggggcgtcctggcttgagttcac

SEQ ID NO: 757760 - DNA, 120 bp, Artificial Sequence
  ENSG00000214026_8 (sequence is synthesized)
agtgccctgtgcgtggtggccagggcctgggctgcggtgtacgtgagtgcccgtctcatctccgtagccggctaagagtcctttcaaggccaagaattcttctctttgaccacatttcca

SEQ ID NO: 757761 - DNA, 120 bp, Artificial Sequence
  ENSG00000214026_9 (sequence is synthesized)
cccctccgcctgccctaggatgctctccatagtggacgctgcactttgccatggcatgccgggtggacaggactgctggggcccccgtgttccagcctctcctgcgcctccagatacggc

SEQ ID NO: 757762 - DNA, 120 bp, Artificial Sequence
  ENSG00000214026_10 (sequence is synthesized)
tgcttcctgggtctgggtgtctgaggggacgtccctcaaggttcccacccagctcagcctgtcaggagccgcaccctgcgaggcctgagaccacaccatgccgggtggggacacacgggc

SEQ ID NO: 757763 - DNA, 120 bp, Artificial Sequence
  ENSG00000214026_11 (sequence is synthesized)
cctgagtgacctgttgggcatctgcgttcaccaccccaccctgtctgagatcatccccagcaccagtccccccaaatcgcttcattatttctttgtaaatagggctttttctagtcaaaa

SEQ ID NO: 757764 - DNA, 120 bp, Artificial Sequence
  ENSG00000214026_12 (sequence is synthesized)
tcaggaacaccccacccaaggcctctgaccctcacttcctcctcatcttccctagacaggcagaggccagcgtgaaattcatgtgaagcctggggcagcgttggcctcacggagcccctc

SEQ ID NO: 757765 - DNA, 120 bp, Artificial Sequence
  ENSG00000214026_13 (sequence is synthesized)
ttaacttggtgctgggtgctcccaaggccagggccatgtgcagtgcctcagataaggccaccagagacccctcaagagcccctgtgctccccgtccaccaagacctgcacctaggctctc

SEQ ID NO: 757766 - DNA, 120 bp, Artificial Sequence
  ENSG00000214026_14 (sequence is synthesized)
agaccccacatcccccgagacccagcaggcctgagtttctcctgtgcccctcctccccccagctctgaggcccagatagagccagggtgtgccggcagtggcaggggcgggaacgggggt

SEQ ID NO: 757767 - DNA, 120 bp, Artificial Sequence
  ENSG00000214026_15 (sequence is synthesized)
gtccacccagctgaacgtgggagaatgcacgaaaccaactggctagagattctgcacgatcgtcacctggccccccagcccaggcagcgtgctggtctagtttgcggtggccacttggca

SEQ ID NO: 757768 - DNA, 120 bp, Artificial Sequence
  ENSG00000214026_16 (sequence is synthesized)
cctctccatctgcctctgctggcttttagtggagtgctggggtgtggtgcactcaactcacatttagtgtactgaatcagagtcttggcagcaccgtcttccaggagcctaagcctggta

SEQ ID NO: 757769 - DNA, 120 bp, Artificial Sequence
  ENSG00000214026_17 (sequence is synthesized)
cgtgaggccggatctcagggcctcagcgcagaggcaggctccacataaggtcatgctccgtcacggccttgggggtgttagtggtggcgctgggagcacgtgagcactggggcacatggg

SEQ ID NO: 757770 - DNA, 120 bp, Artificial Sequence
  ENSG00000214026_18 (sequence is synthesized)
gcacgtctcagcgtccggccgttttgtgattttgaagtttgaattctctgtgggcaaaggcagccatcacaggcctagtgggtttcaactccaacgcacaccagggtgtcagagcatggg

SEQ ID NO: 757771 - DNA, 120 bp, Artificial Sequence
  ENSG00000214026_19 (sequence is synthesized)
aggccccggcctctggagagcctgtccttggctgggtttcagcctcggaggcagagtgtgaggcccctgagggcaaaggtctttggtgccaaggcaggtctggctggccgggctgttggc

SEQ ID NO: 757772 - DNA, 120 bp, Artificial Sequence
  ENSG00000214026_20 (sequence is synthesized)
ggacatattctgaactctcagcagaagatgcccatggacagaccttcacgttcccagatctgtttcccgagaaagacgagagccctgaaggcagcgctgccgacgacctctacagcatgc

SEQ ID NO: 757773 - DNA, 120 bp, Artificial Sequence
  ENSG00000214029_0 (sequence is synthesized)
ccagcccgtcagccgcgcgccccgggaccctagagccggcgattcgtcgccggcgccgcagccgccactctgtgccggaccctgcgggccttcggcccagagcgcgtccgtgacgcacag

SEQ ID NO: 757774 - DNA, 120 bp, Artificial Sequence
  ENSG00000214029_1 (sequence is synthesized)
agcgcgtccgtgacgcacagaccaggcccctctgcggggcggcgcaggagctcctgggaaacgtagttcggcctcgcgtccccctcgggcgggaccgcggacgcctggaggcaggcactg

SEQ ID NO: 757775 - DNA, 120 bp, Artificial Sequence
  ENSG00000214029_2 (sequence is synthesized)
aggacggggagaacttcgggtgaaatgcatccctcctgtgactggattggagacacaagaacagaaacatcctgatctctctactctactgtgcaggcttatgtactcataaaatggcag

SEQ ID NO: 757776 - DNA, 120 bp, Artificial Sequence
  ENSG00000214029_3 (sequence is synthesized)
ttatggacctatcctccccatgggctttaactaaacaggactctgcctgtttccatctgagaaatgctgaagaggaaaggatgattgctgtatttctgacaacctggttacaggaaccaa

SEQ ID NO: 757777 - DNA, 120 bp, Artificial Sequence
  ENSG00000214029_4 (sequence is synthesized)
tgactttcaaagatgtagctgtggagttcactcaggaggagtggatgatgctggattctgctcaaagaagtctgtacagagatgtgatgttggaaaactatagaaatctcacctccgtgg

SEQ ID NO: 757778 - DNA, 120 bp, Artificial Sequence
  ENSG00000214029_5 (sequence is synthesized)
aatatcagttgtacaggcttactgtgatctccccattggatcaagaagagataaggaatatgaaaaagagaattccccaagccatctgtccagaccagaagattcaacctaaaaccaaag

SEQ ID NO: 757779 - DNA, 120 bp, Artificial Sequence
  ENSG00000214029_6 (sequence is synthesized)
aatcaactgtgcagaaaattttgtgggaggaaccatccaatgcagtgaaaatgataaaactcacaatgcataattggtcctccacattaagagaagactgggaatgccataagatcagaa

SEQ ID NO: 757780 - DNA, 120 bp, Artificial Sequence
  ENSG00000214029_7 (sequence is synthesized)
aacagcataagattccagggggacattggaggcaaatgatatatgccccaaagaaaacagtacctcaggagctattccgtgactatcatgaattagaggaaaactctaaacttggatcaa

SEQ ID NO: 757781 - DNA, 120 bp, Artificial Sequence
  ENSG00000214029_8 (sequence is synthesized)
aacttattttttcacagagcattttcaccagtaaacattgccaaaaatgttactcagagattggatgtttgaaacacaattcaatcataaacaattatgtgaaaaactctataagtgaga

SEQ ID NO: 757782 - DNA, 120 bp, Artificial Sequence
  ENSG00000214029_9 (sequence is synthesized)
agctctatgaaagtcatgaatgtgatacaactctatggcattttcagagaaatcaaacagtacaaaaagagtacacatattctaaacatggaatgcacttcacacataatatgtttcctg

SEQ ID NO: 757783 - DNA, 120 bp, Artificial Sequence
  ENSG00000214029_10 (sequence is synthesized)
tacctaacaatttgcatatggcacagaatgcctgtgaatgtaataaagatgaaacgctgtgtcatcaatcatcccttaagaaacaaggacaaactcatactgaaaagaaacatgaatgca

SEQ ID NO: 757784 - DNA, 120 bp, Artificial Sequence
  ENSG00000214029_11 (sequence is synthesized)
atcaatgtggaaaagccttcaaaaggatttctaatcttactttatacaagaaaagtcacatgggtgagaaacaatatgaatgtaaagaatgtggtaaagtgttcaatgattcctcaacct

SEQ ID NO: 757785 - DNA, 120 bp, Artificial Sequence
  ENSG00000214029_12 (sequence is synthesized)
cacactggagagaaaccctatgaatgtaatcaatgtggaaaagctttcagtcaaaaaacatcccttaaggctcacatgagaactcacactggagagaaaccttatgaatgtaatcagtgt

SEQ ID NO: 757786 - DNA, 120 bp, Artificial Sequence
  ENSG00000214029_13 (sequence is synthesized)
cttatgaatgtaatcagtgtggaaaatcctttggcacaagctcttaccttatagtgcacaagagaatacacactggagaaaaactctatgaatgcagtgagtgtggaaaagccttcaaca

SEQ ID NO: 757787 - DNA, 120 bp, Artificial Sequence
  ENSG00000214029_14 (sequence is synthesized)
cgagctctcaccttaaagttcataagaaaattcataccggagagaatgtttatgaatgcagtgactgtgggaaagttttcagtggggtctcatcccttagaatgcatataagaactcaca

SEQ ID NO: 757788 - DNA, 120 bp, Artificial Sequence
  ENSG00000214029_15 (sequence is synthesized)
ctggagagaaaccctatgaatgtaaggaatgtaggaaagccttcagtgtttcctcttcccttaggaggcatgtgagaattcacactggagagaaaccctatgaatgtattcaatgtggaa

SEQ ID NO: 757789 - DNA, 120 bp, Artificial Sequence
  ENSG00000214029_16 (sequence is synthesized)
aagccttcagtcagagctcttcacttattatacacaagagaattcatactgagagagaaaccctgtaagtgttatgaatgtggaattgctgttttcattgtcttaaggtggattccaagc

SEQ ID NO: 757790 - DNA, 120 bp, Artificial Sequence
  ENSG00000214029_17 (sequence is synthesized)
tccttgtctcagtctttgttctctaaaagaacgatttaaggttacaaatggctctttttttaatataacattttctgtaaatactaattatgactttttttgatccatggctgtttagaa

SEQ ID NO: 757791 - DNA, 120 bp, Artificial Sequence
  ENSG00000214029_18 (sequence is synthesized)
ttaggtatttttaatatgtgaggtaggtatattttcagttatctttttattgttggtttctaggttaattccattgtgttcagagaatctggactatattttactgctttgttggtgttt

SEQ ID NO: 757792 - DNA, 120 bp, Artificial Sequence
  ENSG00000214029_19 (sequence is synthesized)
ttataaaagttgttttctggcccagtgagactggtattgctagcagccaaccaaacatttgagctcatctttccttactaatgaattccatcttagccaagaacaataaggtctctggtt

SEQ ID NO: 757793 - DNA, 120 bp, Artificial Sequence
  ENSG00000214029_20 (sequence is synthesized)
atagaacgcttctttgacttcttgtagctaagggtagccatatcattcattcttgctgattcaaaaatagacatatcactgggatcagaactatctatcttgtcctctactttttgcact

SEQ ID NO: 757794 - DNA, 120 bp, Artificial Sequence
  ENSG00000214029_21 (sequence is synthesized)
tcatctttgtccctatgaattggccattcctgaagctgctgaaagagctatcttgtgatcatgaaaatgacagctgtagccaagggatgaagtagaagaaagagatccctgttcctcaaa

SEQ ID NO: 757795 - DNA, 120 bp, Artificial Sequence
  ENSG00000214029_22 (sequence is synthesized)
gaaatctttaaatagttgtaccagccctgcactacttgtatctggatatgttcctacatgagaaaaataaggttttttgtttgttttttgagatggagtctcggtatgttgcccaggctg

SEQ ID NO: 757796 - DNA, 120 bp, Artificial Sequence
  ENSG00000214029_23 (sequence is synthesized)
gtgcccggccaagaaaaatatgttaattgattttttctttttttttttcaatttttcagacagagtctctgtctctcaggctagaatgcagtggtgtggtcatggctcattgcaacctcg

SEQ ID NO: 757797 - DNA, 120 bp, Artificial Sequence
  ENSG00000214029_24 (sequence is synthesized)
acctcctgggctcaggtgatccaccacagtctcctcagtagttgggatcacaaatgcatgccaccatgcctggctaattttaaaaatatatattttgtagagacaggctcttcctacatt

SEQ ID NO: 757798 - DNA, 120 bp, Artificial Sequence
  ENSG00000214029_25 (sequence is synthesized)
cctgggctcaagcagtcctcctgcctttgcctcccaaagtgctaggattccaggcatgagttaccatgcctggctcttactgattttttttaaagcactacataaatacagtcaacgcag

SEQ ID NO: 757799 - DNA, 120 bp, Artificial Sequence
  ENSG00000214029_26 (sequence is synthesized)
cataaatacagtcaacgcagtcaccatattgtagaaaaacagaagtatatacagttaaatgttttatgttggatgtacacatttgaagaggaacatagaaaaaaagtatggaaaaggaat

SEQ ID NO: 757800 - DNA, 120 bp, Artificial Sequence
  ENSG00000214029_27 (sequence is synthesized)
gttgaccgagcttttatgcttaagcagcagatgaagatagaaccaagatcactgaaagcaagtgtttagaacagcaaaaagagtatcccaacatttcagcattggaactacagaaagttt

SEQ ID NO: 757801 - DNA, 120 bp, Artificial Sequence
  ENSG00000214029_28 (sequence is synthesized)
tcagacagaggggaagttaccaattttaaatgctaagtaaagcatgagattttgctgcttgatcttgcagatactgaccagattagttctaacaaaatatggaaggagtggcatacggtg

SEQ ID NO: 757802 - DNA, 120 bp, Artificial Sequence
  ENSG00000214029_29 (sequence is synthesized)
gaagaaagaaggcagtagctgctgttgtagttattcatgttagcctcagaggatggtgagacatccagatgaagaggttggtacgcaattctagaattgaggaggtgtctagatagagat

SEQ ID NO: 757803 - DNA, 120 bp, Artificial Sequence
  ENSG00000214029_30 (sequence is synthesized)
ataaattgtagtgacatcagtaaagagacaataacaggctttggaaggtgagtaagaatgaaaagggaaggtctgccacctaccctgaagacatacatttaaaggaactatagtagagag

SEQ ID NO: 757804 - DNA, 120 bp, Artificial Sequence
  ENSG00000214029_31 (sequence is synthesized)
aaaggaactatagtagagagataagaggaaaacaagaagagtggagtttcactgaaccaagacaaacaagtttcaaaaaggaaggtgaagttggccaggtgtggtggttcacgcctgtaa

SEQ ID NO: 757805 - DNA, 120 bp, Artificial Sequence
  ENSG00000214029_32 (sequence is synthesized)
aaaaaggaaggtgaaggtaaatgtttttagtgttacttagggatccaattagatgaagtctaaaaaggtaaacatatacagccaagtgaagatcatttgtgattgtagttggaaataaca

SEQ ID NO: 757806 - DNA, 120 bp, Artificial Sequence
  ENSG00000214029_33 (sequence is synthesized)
tagtggtacataatgaagatggttgctagattgggctgactttaggaatcaataaagggcaaagaagtaaagactggatgtagacaagtttgaataataggagaaagggtagtagctgga

SEQ ID NO: 757807 - DNA, 120 bp, Artificial Sequence
  ENSG00000214029_34 (sequence is synthesized)
gagatttggagtaaagagataatatgtttaaaatatgaaaaactagaacatgtttgaattctaatgtgatgaatgtagtatggtgaggtttaatatgcagcataataaagtttaatataa

SEQ ID NO: 757808 - DNA, 120 bp, Artificial Sequence
  ENSG00000214029_35 (sequence is synthesized)
gcttctgagaatggggtgtagatgtttagagcacaaacaaaagtattggtgtttgccatgaggcggagggatactcccaccattctttcaggagtagaaaaatgggtgggttggtttaaa

SEQ ID NO: 757809 - DNA, 120 bp, Artificial Sequence
  ENSG00000214029_36 (sequence is synthesized)
ttacttgtttatttatttacacctaactgtactaagcagtgatcagaatatgtgaactatataatgttttgtgtttcctaagaactgtgtggcagccactgctaattactaaccaaatat

SEQ ID NO: 757810 - DNA, 120 bp, Artificial Sequence
  ENSG00000214029_37 (sequence is synthesized)
atatattttttattctttatgaatagatcttcagttttgctaacagtagtattgtatttagctacaaaactacttatcccaacctctttgtagccttgatgccatttctactgttcctgg

SEQ ID NO: 757811 - DNA, 120 bp, Artificial Sequence
  ENSG00000214029_38 (sequence is synthesized)
ccagtaaaatatagatatatgattataggtttcatggtaagattatctgctaagaggaaggtggatgaaattctgcaaggaggttttagtgaagaagatctctatgtatttgaaagtcct

SEQ ID NO: 757812 - DNA, 120 bp, Artificial Sequence
  ENSG00000214029_39 (sequence is synthesized)
tccaagttatcaatagagccatcagtggagaagacagcaaagcaagtagcaaagtctatgtgattgaggagaggtcatttaaataaaagatagcaaggaagagagggagaaagtggtata

SEQ ID NO: 757813 - DNA, 120 bp, Artificial Sequence
  ENSG00000214029_40 (sequence is synthesized)
actagatggtatgaacttcaaaggaaggagtggttttctccaggctgcaatggttagaagcagtgttagggagtaaggaagatactgatcccacttccaacctgtggatatgtggaatac

SEQ ID NO: 757814 - DNA, 120 bp, Artificial Sequence
  ENSG00000214029_41 (sequence is synthesized)
atgagaataagcccccttgtgatgtgattgttgtcaggtaggtgttttttccttcccagggaacagccaagtttaaattaatgaaaggaaatgttcagggaaatagttgaggatattaag

SEQ ID NO: 757815 - DNA, 120 bp, Artificial Sequence
  ENSG00000214029_42 (sequence is synthesized)
ggagtttattaagggaatctcagagggcaccatgaaagagtctccagaagggcaggggtttagggtttctggctttggcctgaggaatacagaagattgtaatgacattattgatagagg

SEQ ID NO: 757816 - DNA, 120 bp, Artificial Sequence
  ENSG00000214029_43 (sequence is synthesized)
aaaaaagaccagatcaggggctatgaccagtgaaaacaaaatttagagggagtataggttaaatcccagcagtctgtaagaagatgatgggtatttaggtctactgggattcatttgtag

SEQ ID NO: 757817 - DNA, 120 bp, Artificial Sequence
  ENSG00000214029_44 (sequence is synthesized)
cttggaaaggagagcctgcagtcatgctgtgaaaccaagtggtttcaggtgttagcagccctggtgggtatagcactagccatcagtagttagaaaatggtcccaactggccgggtgcag

SEQ ID NO: 757818 - DNA, 63 bp, Artificial Sequence
  ENSG00000214029_45 (sequence is synthesized)
gttgtggtaagccgagatcgcaccactgcattccggcctaggtgacagagcaagactccgtct

SEQ ID NO: 757819 - DNA, 120 bp, Artificial Sequence
  ENSG00000214029_46 (sequence is synthesized)
aggtgacagagcaagactccgtctcaagaaaatcgtcccaactgcatgtggtccttgggtgagatcatcttaaggagtactcagcaagggattgtactttgcttggttaggactggaatt

SEQ ID NO: 757820 - DNA, 120 bp, Artificial Sequence
  ENSG00000214029_47 (sequence is synthesized)
aatttacactctaattttggcccagtgatcttggaacagattgagcatctcaaatctgaaaatctgaaattcagaatgctccaaaacctgaaaccttgtgcgccgatgtgactttcaaaa

SEQ ID NO: 757821 - DNA, 120 bp, Artificial Sequence
  ENSG00000214029_48 (sequence is synthesized)
gaaatgctcattggagcatttaaaattttggattttcagatttgtgatgctcaactagtaggtataatgcaaatattccaaaatccaaaacagttctggtcccaagtgttttgaataagg

SEQ ID NO: 757822 - DNA, 120 bp, Artificial Sequence
  ENSG00000214029_49 (sequence is synthesized)
aatactcatcctgtacaccaggaggtagactcaggcacagtctcgcccagcatctcacctggattttattgcaatagcctcctaactggtttctctgacttgaatcatactttcctttag

SEQ ID NO: 757823 - DNA, 120 bp, Artificial Sequence
  ENSG00000214029_50 (sequence is synthesized)
tatgttttctatgcagctgccatggtatcctattaaaaaacaaaacaaaacaaaacaaaaactttgtggtttttaataataaaactaatacatgcataggagaaaacaatgtaaataact

SEQ ID NO: 757824 - DNA, 120 bp, Artificial Sequence
  ENSG00000214029_51 (sequence is synthesized)
tctgccctacacagaaggaaaccctggattctactgccttaaaaaattaatatcgtaggtgaatgtgcattctgtcagactttatgtacatacaaacattttataaaaattgagttatac

SEQ ID NO: 757825 - DNA, 72 bp, Artificial Sequence
  ENSG00000214029_52 (sequence is synthesized)
agttataccttttatccttttcccaggctggagtgcagtggcacgttctcggctcacagcaacctctgcctc

SEQ ID NO: 757826 - DNA, 120 bp, Artificial Sequence
  ENSG00000214029_53 (sequence is synthesized)
gtgatccgcctgcctcagcctcccaaattgttgggattgtgaggccatcgcccccagcctatccaacatctttttaaacatctttccatgtcagtgcatgtagttctatttcatttgtaa

SEQ ID NO: 757827 - DNA, 120 bp, Artificial Sequence
  ENSG00000214029_54 (sequence is synthesized)
tctatttcatttgtaatagctgcttagtatttgattatatgcttgtaccataatgtatttgatccatttgcctccagagtttttataacaatactgcaatcaataatattgtttatatat

SEQ ID NO: 757828 - DNA, 120 bp, Artificial Sequence
  ENSG00000214029_55 (sequence is synthesized)
tgtgctttcctatcaactgttctctacacttcccagggtgatccatctaaagtactaacctgatcacataacatttcacgtttaatcttcttctggcctttttctccagttaagataaaa

SEQ ID NO: 757829 - DNA, 120 bp, Artificial Sequence
  ENSG00000214029_56 (sequence is synthesized)
tctttttacaagaccttgctcaaactcttgccttttcaggccttatctctggttattccctttatcttcactgtctccctaatttaacctgtcctatttatcctttaggtattgtgtcct

SEQ ID NO: 757830 - DNA, 120 bp, Artificial Sequence
  ENSG00000214029_57 (sequence is synthesized)
tcatctgctttaacaatacttgtcacactttcacactgtattgcctgtttgtgtattgtgccctctacactgtaagttttggtaaggtgggaactttgtctaaatttttcattgttttat

SEQ ID NO: 757831 - DNA, 120 bp, Artificial Sequence
  ENSG00000214029_58 (sequence is synthesized)
ttaaaagctatttaagtgattgtaaggtaaaagttgcaaggaggtgggtgcaatggcctgtgcctgtagtcctatctgctctggaggctgacgtgggaggattgcttgagcccaggagtt

SEQ ID NO: 757832 - DNA, 120 bp, Artificial Sequence
  ENSG00000214029_59 (sequence is synthesized)
tgagaccagcctgagtaacatgagactccattatagtaaaaatgcatggaattaatttttcttctaggtataggaaaatgttgcaccataacaggtgtgcagaaactaagactgttagga

SEQ ID NO: 757833 - DNA, 120 bp, Artificial Sequence
  ENSG00000214029_60 (sequence is synthesized)
caacagcagtttaatgttatttatattatgtccctctcctagtccttctcctctcttccctcatcccactcaccaccaccccattcactacacagacttattttttgtagagcaagtgtt

SEQ ID NO: 757834 - DNA, 120 bp, Artificial Sequence
  ENSG00000214029_61 (sequence is synthesized)
catattctgttccattatgtattataatatgaaaagggatgagttgaccaagtattggtgggtgtgtcgtatacttgctttagactaccaatggaagcgtaaattagtacaaacttactg

SEQ ID NO: 757835 - DNA, 70 bp, Artificial Sequence
  ENSG00000214029_62 (sequence is synthesized)
tagactaccaatggaagcgtaaattagtacaaacttactgggtagtagattgcttgagcccaggagtttg

SEQ ID NO: 757836 - DNA, 120 bp, Artificial Sequence
  ENSG00000214029_63 (sequence is synthesized)
aaaaaaaaaaattacccatggtgtcatgaatctgtggtcccagccactagggatgctggggtaggaggatcacttgagctgcagtggggttgagtctgcagtgagctgtgtgcaccactg

SEQ ID NO: 757837 - DNA, 120 bp, Artificial Sequence
  ENSG00000214029_64 (sequence is synthesized)
ggtgacagagtaagaccctgtctaaaaacaaaaacaaaccaaaaaaaacttgggacagtaaagcaataaatgtccaaagctggaatatttataacctttaaatatttaaaacccagcaat

SEQ ID NO: 757838 - DNA, 120 bp, Artificial Sequence
  ENSG00000214029_65 (sequence is synthesized)
aaacccagcaattttaaactgagattttataaaaggatttttcatgtataagtaacaatattcacctgtttcatgccctagtgaaaaactggaaaattcctaaattcccagtaacagtca

SEQ ID NO: 757839 - DNA, 120 bp, Artificial Sequence
  ENSG00000214029_66 (sequence is synthesized)
ataaaatggaatataatgcagtcattaaaatgtatttgtgtggattgacatgtggagatatatttgatacattatgaattttaaacagtcacaaaatatggtatgactttttaatgcatg

SEQ ID NO: 757840 - DNA, 120 bp, Artificial Sequence
  ENSG00000214029_67 (sequence is synthesized)
ttataaatatgtgtgtgtgcattgaaaatatggaaagacataacaccaaagttttatcaatggttatgtcataatttttttcttttgtctttttttaagatgtctagtttagtgaacaga

SEQ ID NO: 757841 - DNA, 120 bp, Artificial Sequence
  ENSG00000214029_68 (sequence is synthesized)
gctgtggtctatttcttaaaaataattctatcattaactttttaataaatactttttaaagcatgattttaatatcttcaaagttgtaaagtaaataatttgcttaggctgttgttggac

SEQ ID NO: 757842 - DNA, 80 bp, Artificial Sequence
  ENSG00000214029_69 (sequence is synthesized)
tgcttaggctgttgttggacacatagattcttttcatttttttaaataccagattaaaaaaattgaaaaatatatttttt

SEQ ID NO: 757843 - DNA, 68 bp, Artificial Sequence
  ENSG00000214029_70 (sequence is synthesized)
taaataaatataaatatatatatatacgatctctgctcaccgcaagctccacctcctgggttcatgcc

SEQ ID NO: 757844 - DNA, 120 bp, Artificial Sequence
  ENSG00000214029_71 (sequence is synthesized)
aagtgctggggaaaatatattttttaacttaccatttctatctcctactttttaaaggcaaactttttgaaagtgttgataaagggtgtggatactttttagacttcctcttactctagg

SEQ ID NO: 757845 - DNA, 120 bp, Artificial Sequence
  ENSG00000214029_72 (sequence is synthesized)
cagaattcaaaatatgaaggatacaaataagtttctctgataagaacagggaattgtgttagaaaaagcagtcagggctaggcgcagtggcgcacgcctgtaatcccagtgttttcggga

SEQ ID NO: 757846 - DNA, 120 bp, Artificial Sequence
  ENSG00000214029_73 (sequence is synthesized)
aaaaaaaaagaaggtctccatgagaaaataacatttaacttgaaatacgaagttaaagaaggagtagggagctccttcttctggctccatgggcagagggtggagggacagaggaagagc

SEQ ID NO: 757847 - DNA, 120 bp, Artificial Sequence
  ENSG00000214029_74 (sequence is synthesized)
tttctaaatagaacagcaagagcaaaaagactcatcaggatttgacatatttgtggaacagaaagtaagtccagtaaatggaaaactgttaggcaaaggggtaaggagaagagtatgtga

SEQ ID NO: 757848 - DNA, 120 bp, Artificial Sequence
  ENSG00000214029_75 (sequence is synthesized)
aaccagattgaaaggaggcaggggccagataaagaccttgctagctatgacatgagtttatactttatttgaagagttatgaggaactatttaagtttttcagagattgaaattatttgt

SEQ ID NO: 757849 - DNA, 120 bp, Artificial Sequence
  ENSG00000214029_76 (sequence is synthesized)
tttaaaaagatcacatttttgtataaaaaaatcttgagagactaggaagctatttgcaatagttcatgtatgaaatttgaatgccaaaaactaatttccttagcattcacttttttattt

SEQ ID NO: 757850 - DNA, 120 bp, Artificial Sequence
  ENSG00000214029_77 (sequence is synthesized)
atttttctttattttttaattttctgtaagttactgggtttcctttttaatttttccataagttgcattcactttttaaaagacaatgagatttgttttagcataaacaggaaattcatg

SEQ ID NO: 757851 - DNA, 120 bp, Artificial Sequence
  ENSG00000214029_78 (sequence is synthesized)
gctaatacatgtcatgacttaaattcacctctaacttaagaaatgcatgtcaaatacataaaattatattttctacctatgagcacagtttcatgggagttttgatttttctaaaatatt

SEQ ID NO: 757852 - DNA, 120 bp, Artificial Sequence
  ENSG00000214029_79 (sequence is synthesized)
ttttgatgcaatatccatttttttccatgcaattttgtcctttgtgatattgagggtgttcatgatgcagaatttattttaaaaaattatttctgtaatatttatttctccctttttttg

SEQ ID NO: 757853 - DNA, 120 bp, Artificial Sequence
  ENSG00000214029_80 (sequence is synthesized)
gtagtggcacaatctcagctcactgccacctcaaccttctgggctcatgtgatcctcctacctcagcctcctcagttgtggggaccacaggcatgtgctattacacctggataatttttt

SEQ ID NO: 757854 - DNA, 120 bp, Artificial Sequence
  ENSG00000214029_81 (sequence is synthesized)
aggcatgtgctattacacctggataatttttttatttgtattttttgtagaaatggggtctcactgcattgcccaggctggtatcaaactcctgggctcaagcaatctttctgccttggc

SEQ ID NO: 757855 - DNA, 120 bp, Artificial Sequence
  ENSG00000214029_82 (sequence is synthesized)
ctcccaaagtgctgggttacataatttatttttttttgttttgtttccttaaaagaattgttaacataccagataattttttacactttttgccactttttctatgtcctgccttttaaa

SEQ ID NO: 757856 - DNA, 120 bp, Artificial Sequence
  ENSG00000214029_83 (sequence is synthesized)
ggcagactttttgaatgagttgctaaggactcagactctttcttccaaatcaatcatacccaataggcaggttttgctacctctctttgctctgaaatttcttggatctcttcagaggga

SEQ ID NO: 757857 - DNA, 120 bp, Artificial Sequence
  ENSG00000214029_84 (sequence is synthesized)
tttaacaaatttcctgtcctttttctcttttctttttcttttgttggttttgttttgttttgttgagatggaatcttgctttgtcgcccaggctggaatacagtagcgtgatctcggctc

SEQ ID NO: 757858 - DNA, 70 bp, Artificial Sequence
  ENSG00000214029_85 (sequence is synthesized)
tgcctcagcctccatgagtagcttggattacaggcatgcaccgccacacccaactaattttttgtatttt

SEQ ID NO: 757859 - DNA, 90 bp, Artificial Sequence
  ENSG00000214029_86 (sequence is synthesized)
tgctgggatcatgctgggattacaggcacaagtcacttagccccctgccttacatacattgatgtatgatagaaaattcttttgggcaca

SEQ ID NO: 757860 - DNA, 120 bp, Artificial Sequence
  ENSG00000214029_87 (sequence is synthesized)
tacatacattgatgtatgatagaaaattcttttgggcacatcacagcaacaaaagttaacccagctttacctatttgtgagtatcttaagtctcccaaagcatttgattgttgctttcca

SEQ ID NO: 757861 - DNA, 120 bp, Artificial Sequence
  ENSG00000214029_88 (sequence is synthesized)
agaaaatacagaattgtggtcattctcccatgactattctttactaatattgattgcatctgttgttctgtcgcctttctgcattcatagtaacttctttttccaatgctgaagattagt

SEQ ID NO: 757862 - DNA, 120 bp, Artificial Sequence
  ENSG00000214029_89 (sequence is synthesized)
tttaataaccttttgggagacttcttttaaaaaacttttttttcctgaagaataatacataaaggcatgcagctttatgaatttccccaaatagaacacacttaaccagtccccagatca

SEQ ID NO: 757863 - DNA, 120 bp, Artificial Sequence
  ENSG00000214029_90 (sequence is synthesized)
tgagagccaaattaatacttttactacttttgcaatattcctagactcatcttttaaacgtctccctcctttcttgtgctattgtcgtgctatttacttcggtgtattttataatccacc

SEQ ID NO: 757864 - DNA, 120 bp, Artificial Sequence
  ENSG00000214029_91 (sequence is synthesized)
ttataatccaccagatattgttatgaaagtaaatatttatatcagagttgacaaactttgtctgaaggtcctgagagtaaataaatattctaggttttctttttttttgagacggagtct

SEQ ID NO: 757865 - DNA, 120 bp, Artificial Sequence
  ENSG00000214029_92 (sequence is synthesized)
gccaatattctaggttttgcaggccatatatggtaactgttgcatattcttatttttctaagcagctttttaaagatgttaaaatcattcttagctcaaaggccttgatttggtccatag

SEQ ID NO: 757866 - DNA, 120 bp, Artificial Sequence
  ENSG00000214029_93 (sequence is synthesized)
accataatttcccaacacctgacttgtatttatcaacatatttacccctccagtgttatttatttctgcatttccaagtttctaagatcatttcatactgcctgaaaaattatttctttt

SEQ ID NO: 757867 - DNA, 120 bp, Artificial Sequence
  ENSG00000214029_94 (sequence is synthesized)
agcataagaatgctaccgtaaatttcctctatttttattctgaaacatctttatttctgaaggatattttagctcagtatgaaaagaggttagcagtttttcacagtgtacatatgagcc

SEQ ID NO: 757868 - DNA, 120 bp, Artificial Sequence
  ENSG00000214029_95 (sequence is synthesized)
ccccgtcccccactgcaatagtttttcttaaagggacctgcctctcccttagttgagaatatttaagtgaacttgagaatatttaagtgaactggcttcaaccatatgtcaagtagtatg

SEQ ID NO: 757869 - DNA, 120 bp, Artificial Sequence
  ENSG00000214029_96 (sequence is synthesized)
tttgtgggctatcaatttatttctaggaaccctatgatcatttagccattgccacctatatggttaaaattctcattaacagtgcatcccttggactcttgtgcagattttacccaaccc

SEQ ID NO: 757870 - DNA, 120 bp, Artificial Sequence
  ENSG00000214029_97 (sequence is synthesized)
ctcccatgccaagatcctatgatctctactgaaattgggatcttactttcattatagaagttctgcatcatctacagtctagagagggtgggtaccacagagttgtccaaggatggtggt

SEQ ID NO: 757871 - DNA, 120 bp, Artificial Sequence
  ENSG00000214029_98 (sequence is synthesized)
aaactcctcaccaatgtatttcttaataccctgacgggaatgtcttttggcctttctctggctaagggaaaaaatgaacataataattcattgatagttacatctccctctaaagcagag

SEQ ID NO: 757872 - DNA, 120 bp, Artificial Sequence
  ENSG00000214029_99 (sequence is synthesized)
gtgtccaatcttttggcttccctgggctacaccagaagaagaattttcttgagccacaataactgatagctatcattagtgttcacgtattttatatgtggcccaagacaattcttccaa

SEQ ID NO: 757873 - DNA, 120 bp, Artificial Sequence
  ENSG00000214029_100 (sequence is synthesized)
tgtggcccagggatgccaaaagattggacactggattccatccagtatgacttttcagatatctaagaagattttgctacacttattacaatggtagttttcccacagtgtaattctctg

SEQ ID NO: 757874 - DNA, 120 bp, Artificial Sequence
  ENSG00000214029_101 (sequence is synthesized)
atataggtttgaaatattgcagaaattcactctacattcatttatacagttgctttttctcctacaagagtattaaaatttaagtattgcattgtaattgaaggcattcccaaatcactg

SEQ ID NO: 757875 - DNA, 120 bp, Artificial Sequence
  ENSG00000214029_102 (sequence is synthesized)
tgtttgtatcactttggttaattggagattgctccaaagtaaacgttctcaatgttggctgcactcaacaaaaactagagggcaaagatttgatgtagtcaggggttggccaagtttttc

SEQ ID NO: 757876 - DNA, 120 bp, Artificial Sequence
  ENSG00000214029_103 (sequence is synthesized)
tgtaaagggctagatagtaaatgtttaacctttatggctgtatattaaactcttcagttatagaggtaaggagccatagactatgtaaatgaatacctggcccatgggctgtagcttgat

SEQ ID NO: 757877 - DNA, 120 bp, Artificial Sequence
  ENSG00000214029_104 (sequence is synthesized)
gacctctgatatagttcatgaggtgcatccccacagagtaaacagtaggaaggaaagtggatgtggagcagataatgggagaaattgagtatactcttaaataaataaataatgaatttt

SEQ ID NO: 757878 - DNA, 120 bp, Artificial Sequence
  ENSG00000214029_105 (sequence is synthesized)
tcatatcctaattttgctgacagggtaacttgatttttaccctgatacaaaccattcctgcctgagaaaaccaaatcagatactagatacccatatgtaataaggcatgctgcttgagga

SEQ ID NO: 757879 - DNA, 120 bp, Artificial Sequence
  ENSG00000214029_106 (sequence is synthesized)
caccaaatcagatattaaatacccatatgtaataaggcatgctgcttgagaaaatcaaatcagatattagatacccatacgtagtaaggcatgctgcttgtattcgagtcagactgtaca

SEQ ID NO: 757880 - DNA, 120 bp, Artificial Sequence
  ENSG00000214029_107 (sequence is synthesized)
ctattgtaagataaatcagcctctctgaaacaactcttatggaaacttgagaagcttctaaatgtatgtaccaatatggcatgccaatggcaggtttgaggaaatacacttctgataatg

SEQ ID NO: 757881 - DNA, 120 bp, Artificial Sequence
  ENSG00000214029_108 (sequence is synthesized)
tatttagaactctagtacatgtaaataaggtgtttttgggctaaaacttttataaatttcacctcttacaaaattacttatatttatctaataacacctcctacaaatgtgccctcaatg

SEQ ID NO: 757882 - DNA, 120 bp, Artificial Sequence
  ENSG00000214029_109 (sequence is synthesized)
cagccattacattaatgctcactaaattcattcctattcatattctctacctctctttctacaaaataaaattgcttaccttcctgattaaggcaaactaaccctgatggtgtgaccttt

SEQ ID NO: 757883 - DNA, 120 bp, Artificial Sequence
  ENSG00000214029_110 (sequence is synthesized)
gtcagctgggcaggtggtaatgccagaacagttttaaatacctgcttacaaaagaacggttttcaccgtacatggaacaaaacaggaagaataccttggtaattttctgtgatgtatctt

SEQ ID NO: 757884 - DNA, 120 bp, Artificial Sequence
  ENSG00000214029_111 (sequence is synthesized)
atatttgtttcacactgaataacaaatgtctatagtcagattcaaggataactgtcagcattaccttaaatccaaactctgtctgaaagttaaaatcataaaacacctaaaaacactttg

SEQ ID NO: 757885 - DNA, 120 bp, Artificial Sequence
  ENSG00000214029_112 (sequence is synthesized)
ttatgtttgtatgtttcaacaagaaaaactactgtttattttttatgtcaatattgtagttacattttcagaatcacatgctgtgggaaaaaatcagcaagcagaaggtttataataaac

SEQ ID NO: 757886 - DNA, 120 bp, Artificial Sequence
  ENSG00000214029_113 (sequence is synthesized)
caaaagatttatttataacattttctgaattcacttaaaaaacaaaaaggaatcccccttccctcaaaatagaaccgtttcctacagattccatccagtatgacttttcagatatctaag

SEQ ID NO: 757887 - DNA, 120 bp, Artificial Sequence
  ENSG00000214029_114 (sequence is synthesized)
gagattttgctacacttattacaatggtagttttcccacagtgtaattctctgatataggtttgaaatattgcagaaagtcactctacattcatttatacagttgctttttctcctacaa

SEQ ID NO: 757888 - DNA, 120 bp, Artificial Sequence
  ENSG00000214029_115 (sequence is synthesized)
gagtattaaaatgtaagtattgcattgtaaatgaaggcattcccaaatcactgtgtttgtatcactttgcttaaatatgaattttctgatctccaaagtgcatcatctttgtaaagctca

SEQ ID NO: 757889 - DNA, 120 bp, Artificial Sequence
  ENSG00000214029_116 (sequence is synthesized)
tcccttgtccatgctttctgtcctggttgacagatgcggaatgagggctaatctctggctttctccaatctattggatatgtattctttcctggtaggaatttacacacgtaaagtaagg

SEQ ID NO: 757890 - DNA, 120 bp, Artificial Sequence
  ENSG00000214029_117 (sequence is synthesized)
gactcctaccaaatgaagtcttctcaacattaccagatggaagaatcttctcaacaatattgatttcaccttgttattgcaaaaaaataaaagagtggttattaatggcttttccacata

SEQ ID NO: 757891 - DNA, 120 bp, Artificial Sequence
  ENSG00000214029_118 (sequence is synthesized)
cccctcgggcgggaccgcggacgcctggaggcaggcactgaggacggtagagacggggtttcacggtgttgcccaggctggtctcgaactcttcagctcaggcaatccgcccgccttggc

SEQ ID NO: 757892 - DNA, 120 bp, Artificial Sequence
  ENSG00000214042_0 (sequence is synthesized)
tacccacctcaggtagcctagtgatatttgcaaaatcccaatggcccggtccttttctttactgatggtcgtgctggtactcagctacaaatccatctgctctctgggctgtgatctgcc

SEQ ID NO: 757893 - DNA, 120 bp, Artificial Sequence
  ENSG00000214042_1 (sequence is synthesized)
tcagacccacagcctgcgtaataggagggccttgatactcctggcacaaatgggaagaatctctcctttctcctgcttgaaggacagacatgaattcagattcccagaggaggagtttga

SEQ ID NO: 757894 - DNA, 120 bp, Artificial Sequence
  ENSG00000214042_2 (sequence is synthesized)
tggccaccagttccagaagactcaagccatctctgtcctccatgagatgatccagcagaccttcaatctcttcagcacagaggactcatctgctgcttgggaacagagcctcctagaaaa

SEQ ID NO: 757895 - DNA, 120 bp, Artificial Sequence
  ENSG00000214042_3 (sequence is synthesized)
accagcaactgaatgacctggaagcatgtgtgatacaggaggttggggtggaagagactcccctgatgaatgaggacttcatcctggctgtgaggaaatacttccaaagaatcactcttt

SEQ ID NO: 757896 - DNA, 120 bp, Artificial Sequence
  ENSG00000214042_4 (sequence is synthesized)
aggttgtcagagcagaaatcatgagatccttctctttttcaacaaacttgaaaaaaggattaaggaggaaggattgaaaactggttcatcatggaaatgattctcattgactaatgcatc

SEQ ID NO: 757897 - DNA, 120 bp, Artificial Sequence
  ENSG00000214042_5 (sequence is synthesized)
ttcatcatggaaatgattctcattgactaatgcatcatctcacactttcatgagttcttccatttcaaagactcacttctataaccaccacaagttgaatcaaaatttccaaatgttttc

SEQ ID NO: 757898 - DNA, 120 bp, Artificial Sequence
  ENSG00000214046_0 (sequence is synthesized)
ccctggggcttccgcttccggttctgacggacgcttcggccgtaacgatgatcggagacatcctgctgttcgggacgttgctgatgaatgccggggcggtgctgaactttaagctgaaaa

SEQ ID NO: 757899 - DNA, 120 bp, Artificial Sequence
  ENSG00000214046_1 (sequence is synthesized)
agaaggacacgcagggctttggggaggagtccagggagcccagcacaggtgacaacatccgggaattcttgctgagcctcagatactttcgaatcttcatcgccctgtggaacatcttca

SEQ ID NO: 757900 - DNA, 120 bp, Artificial Sequence
  ENSG00000214046_2 (sequence is synthesized)
tgatgttctgcatgattgtgctgttcggctcttgaatcccagcgatgaaaccaggaactcactttcccgggatgccgagtctccattcctccattcctgatgacttcaagaatgtttttg

SEQ ID NO: 757901 - DNA, 120 bp, Artificial Sequence
  ENSG00000214046_3 (sequence is synthesized)
accagaaaaccgacaaccttcccagaaagtccaagctcgtggtgggtggaaaagtgttcgccgaggtgtgcatggtttcccagccacgtccctgttttcaaagatagtttcactttggtc

SEQ ID NO: 757902 - DNA, 120 bp, Artificial Sequence
  ENSG00000214046_4 (sequence is synthesized)
tctgaattgaaatgctgtctactgaaagggtttcaggagcgtttatgtaaggggctgtgatgaaattgcattccccatagataaaagaaaaatcatttctatccagagatctgagcagaa

SEQ ID NO: 757903 - DNA, 120 bp, Artificial Sequence
  ENSG00000214046_5 (sequence is synthesized)
ggattggcttgttagtttaacacagccgtatttttggacattcagtgttacttgctgagtctgacagcctctgggcccggccaggggccctgttaacaaactgctttcacatcccaacag

SEQ ID NO: 757904 - DNA, 120 bp, Artificial Sequence
  ENSG00000214046_6 (sequence is synthesized)
ggtctgcttggccactcagtgcagctgcgattaaccctaaaggctttaaggaacgggccacctgtaacagagacaccagccttcctgtatagacactaaattgttagcaagagtgttgag

SEQ ID NO: 757905 - DNA, 120 bp, Artificial Sequence
  ENSG00000214046_7 (sequence is synthesized)
ctagttcctggtgaagtgtttccacagaagacatgtggagcagttgtggggatattaagggaaactttcctctgccttgacccctttgttaaataaaatgactttgggagccattcattg

SEQ ID NO: 757906 - DNA, 120 bp, Artificial Sequence
  ENSG00000214046_8 (sequence is synthesized)
tacagttgcaggaatgagagtgattttatgatgtggtacattgggaccatgttctaaaaccttgggtttctgagtctgctttttgagtaggtgattttgaggttgaaaaaccaggggcct

SEQ ID NO: 757907 - DNA, 120 bp, Artificial Sequence
  ENSG00000214046_9 (sequence is synthesized)
tcatctaggaaatacagcattttccagaagcttctttgaaagggaatcctggttttgttgccaaaatgaaacgcccggggttggcgctgaatcccacaactgtgtgatttgcttgttgag

SEQ ID NO: 757908 - DNA, 120 bp, Artificial Sequence
  ENSG00000214046_10 (sequence is synthesized)
ttttttgttgtctggtttttttgtttgtttgtttataccaataagaatgagcctgaatgttggtggtttttgaaatcctgacttggaggtaaacctggaggaaggaaaaaaagtaaatat

SEQ ID NO: 757909 - DNA, 120 bp, Artificial Sequence
  ENSG00000214046_11 (sequence is synthesized)
gagtagccttgaaaataaacctcatttctaaaaaggaccttttgtttatactttttttttttttttaaccaagaagtcaatttccaacctgagtccttttgaatttaccctgctggaaaa

SEQ ID NO: 757910 - DNA, 120 bp, Artificial Sequence
  ENSG00000214046_12 (sequence is synthesized)
acctaggattcattttggaggccatgagaaagaaaagagtcagtggtagagtttcctttttggatttagctcaataaatgatggtcaagaattgggcaagtggggctgcgcgcagtggct

SEQ ID NO: 757911 - DNA, 62 bp, Artificial Sequence
  ENSG00000214046_13 (sequence is synthesized)
gcacacgcctataatcccagctactcgggtggctgaggcacaagaattgcttatgagacaat

SEQ ID NO: 757912 - DNA, 120 bp, Artificial Sequence
  ENSG00000214046_14 (sequence is synthesized)
gtctcaaaaaaaaaaaaaaaaaaagaattgagtaagtggaattttgactggagctgctcctgaaagtattgaaagagtcattgctaatggtgggctcttgctagaccagggtcaagtcca

SEQ ID NO: 757913 - DNA, 120 bp, Artificial Sequence
  ENSG00000214046_15 (sequence is synthesized)
ctagaccagggtcaagtccacttttgctgcctctcaggttgtggaattctccttgatcacttctgcaattcatttccttgccaaatctcagccaagcatcaccccaaggtctgtaagtag

SEQ ID NO: 757914 - DNA, 120 bp, Artificial Sequence
  ENSG00000214046_16 (sequence is synthesized)
cagagatcggagctgctgggtctggctttgctgaggccggtgtcgctgtcagaacaggcacgccaagatcttggctgggtccctcacaggccagatgaatggtgtgaagaaaccttcctg

SEQ ID NO: 757915 - DNA, 120 bp, Artificial Sequence
  ENSG00000214046_17 (sequence is synthesized)
ccttattcagactggcgcggaggtctcaatgaggcgaggcatttgtccattatggggatgaatcgtgctctcagaagagaatcctgtcattgaggttttgtttcaatagtcctctttttc

SEQ ID NO: 757916 - DNA, 120 bp, Artificial Sequence
  ENSG00000214046_18 (sequence is synthesized)
tccagagaactgttgtctcattgttaataatagcagcgtggctttttcagatgctggttggtggctgctgtacattttaaaaatggaatctcatggttgtgtctcttaaggaagcttttc

SEQ ID NO: 757917 - DNA, 120 bp, Artificial Sequence
  ENSG00000214046_19 (sequence is synthesized)
aagaactttactggcaccagaggttatcagagtttgaagtttgggtgcctagtgtctcacagtgtttaagcactaatgttctgggtcagttaggtgtgagtacaaatcccatctcagctc

SEQ ID NO: 757918 - DNA, 120 bp, Artificial Sequence
  ENSG00000214046_20 (sequence is synthesized)
attctgagagggaccttggctaattgctttctcctctccaagcctcagtttccacatctctaaaatcggcctgcaagtagtgtgtgcctaaggttgttgtaagtttcaatgaactcgaat

SEQ ID NO: 757919 - DNA, 120 bp, Artificial Sequence
  ENSG00000214046_21 (sequence is synthesized)
gcggctgagtgcctgagagcacctgttgctgtgggtatcatcaccgtgtgtgttttctgtcttctcatccacttttctttgtgcagtctgcacacacaccattaaaggctgatgacagca

SEQ ID NO: 757920 - DNA, 120 bp, Artificial Sequence
  ENSG00000214046_22 (sequence is synthesized)
aactcaagcagattgcctttccatctagcactggggccataactctgatactactgttaacgaattgtgagatttgctgtaaatggatttaggaaaagacacgacgggagaatctggtgt

SEQ ID NO: 757921 - DNA, 120 bp, Artificial Sequence
  ENSG00000214046_23 (sequence is synthesized)
tcttggcctctgtgggtccatccctgtatgcttcccccagaaagagagaggacaaaaagttgtctgtcctgagtgattgagactccgaatgtggggttgctgtccagtctgcgtgccacc

SEQ ID NO: 757922 - DNA, 120 bp, Artificial Sequence
  ENSG00000214046_24 (sequence is synthesized)
ccagtggctgtttgcgaagatgcttccaggacataggagatctggggaggatggcatttcaccctcatcacaaggaccgtgatgtattcccaggaagactgttgccaaggctgttcggct

SEQ ID NO: 757923 - DNA, 120 bp, Artificial Sequence
  ENSG00000214046_25 (sequence is synthesized)
tcacggcttcctctgcagtgctcttgaatatcccggttcctgcttaggccacagcagtgagtccagggagaagcatccttctactccctcactgtccaggttggctgaagatgctctgca

SEQ ID NO: 757924 - DNA, 120 bp, Artificial Sequence
  ENSG00000214046_26 (sequence is synthesized)
cttgacctcctgacactaacttccttgccttttcccatggcaagagcaagtcatggactctgaactacttcctctcccttttttctatttattttattttattttatatttgtgatggag

SEQ ID NO: 757925 - DNA, 120 bp, Artificial Sequence
  ENSG00000214046_27 (sequence is synthesized)
attgtgtgagtccagcctgccctttcctttcactgtcgtctcttagtctccttctccagggtgacccacctgatggtcattctctgtcttttcagtcatcactcttgtatcctggtttct

SEQ ID NO: 757926 - DNA, 120 bp, Artificial Sequence
  ENSG00000214046_28 (sequence is synthesized)
tctctgtcttttcagtcatcactcttgtatcctggtttctgttttctttattttttgttttgtttgagatggaatcttgctctgtcgcctaaactggagtgcagtggtgcgatctgggct

SEQ ID NO: 757927 - DNA, 120 bp, Artificial Sequence
  ENSG00000214046_29 (sequence is synthesized)
gggaccccagaaagtgagtaggaattgctgcccagctaaccctacggcatcgagacctcacgcatgcgcggcacgcttcgaacgcgtgacccaatcccgcccccaggagaccccgctcct

SEQ ID NO: 757928 - DNA, 120 bp, Artificial Sequence
  ENSG00000214046_30 (sequence is synthesized)
cccattctggctctcggggcctccccagcgaggtggggcgctcgcgctcccctaagggggtctggcctgcagagggcgggaccctcccagccttgaccttcgattggcccagccctcgcc

SEQ ID NO: 757929 - DNA, 120 bp, Artificial Sequence
  ENSG00000214046_31 (sequence is synthesized)
aaccgacaaccttcccagaaagtccaagctcgtggggcttgcttctgacatgtctgatgagcgcattcctgctgttgctcctggctattacaaggtgtcgctgtggaagactattcctgt

SEQ ID NO: 757930 - DNA, 63 bp, Artificial Sequence
  ENSG00000214046_32 (sequence is synthesized)
gcccttcctctccctttctctttggggttcccttcacaaacaggtgaggcagctttttcaagg

SEQ ID NO: 757931 - DNA, 120 bp, Artificial Sequence
  ENSG00000214046_33 (sequence is synthesized)
gtttatcttcctcgccccccaccccccgagagaccttaaacccatactctccgttccttggttgtccctctgttcaccttcctggagagcttaagccccatcccccaagaaatagcccca

SEQ ID NO: 757932 - DNA, 120 bp, Artificial Sequence
  ENSG00000214046_34 (sequence is synthesized)
cacagggcttgagagggagagtgattgactggaaaccctggaagaagggtctagaacccaggtctctggagtcttcacgtactaaattgccttccctcggaggggtttctgttccttggc

SEQ ID NO: 757933 - DNA, 120 bp, Artificial Sequence
  ENSG00000214046_35 (sequence is synthesized)
tgcagtggtgcgatcatggctcactgcagactcgacctcctgagctaaagtgatccttccacctcagcccccttagtagctgggattacaggtgacaacatccgggaattcttgctgagc

SEQ ID NO: 757934 - DNA, 120 bp, Artificial Sequence
  ENSG00000214046_36 (sequence is synthesized)
cattgaggacgaaccatcacagcaagaggaattatctcgtgccgcatcttcgcataactgacaggatccctggcaaggatgtctcaatgcagaaagttggctaagtgaactgcagtatct

SEQ ID NO: 757935 - DNA, 120 bp, Artificial Sequence
  ENSG00000214046_37 (sequence is synthesized)
accctggacctaaaagaacttgctaatgttttcaagactacaattcagaggctgtctgatttaatctttgcatttacaaaaacacccttttacgtacattaaatgtggaataaaactaaa

SEQ ID NO: 757936 - DNA, 120 bp, Artificial Sequence
  ENSG00000214046_38 (sequence is synthesized)
ctggcagagaggatctgagagcatgtatgagacttgcctaggaacaaagaaggcttgtgaggagatcaaggaacttacatgaaattgtaggaacggccaggggcagtggctcaggcctgt

SEQ ID NO: 757937 - DNA, 120 bp, Artificial Sequence
  ENSG00000214046_39 (sequence is synthesized)
caactgtgtgatttgcttgttgagttttttgttgtctggtttttttgtttgtttgtttataccaataagaatgagcctgaattgtggtggtacaggcctgtaatcccagttactagggag

SEQ ID NO: 757938 - DNA, 60 bp, Artificial Sequence
  ENSG00000214046_40 (sequence is synthesized)
tgtattagaatctggccacacccctttgtgtgtgtattacttagaattgctttagcaacc

SEQ ID NO: 757939 - DNA, 120 bp, Artificial Sequence
  ENSG00000214046_41 (sequence is synthesized)
cccctttgtgtgtgtattacttagaattgctttagcaacctccatactataacttcaaagtggagtagtggcacagagaccatatggcctgcagaatggaaaatgtcacctgtttggcct

SEQ ID NO: 757940 - DNA, 120 bp, Artificial Sequence
  ENSG00000214046_42 (sequence is synthesized)
cttaccagaaaaatttgccaaccgctcaactagggtgtgatggagaatcccaaggtgtcccttccctcccaaagccactcagggaatcatctgtacccttgtggcctgcattttaacaaa

SEQ ID NO: 757941 - DNA, 120 bp, Artificial Sequence
  ENSG00000214046_43 (sequence is synthesized)
ttaacaaacatatacacaaacacattttttaaatttgctagaaatcttccctcccattttcaagtgtggttaatcaattgaccaaaacccagttttctttctttctttctttcttttttt

SEQ ID NO: 757942 - DNA, 120 bp, Artificial Sequence
  ENSG00000214046_44 (sequence is synthesized)
gggtaattagggggaccagaggctgggaagagagagccaggcaggacgcgggggcgcccctagtaactgtaattctccctctgcaggacgttgctgatgaatgccggggcggtgctgaac

SEQ ID NO: 757943 - DNA, 120 bp, Artificial Sequence
  ENSG00000214046_45 (sequence is synthesized)
cgtaacgatgatcggagacatcctgctgttcgggacgttgctgatgaatgccggggcggtgctgaactttaagctgtgacaacatccgggaattcttgctgagcctcagatactttcgaa

SEQ ID NO: 757944 - DNA, 120 bp, Artificial Sequence
  ENSG00000214050_0 (sequence is synthesized)
aacgtcagcgcttgaggcttgaagagggagacaagctaaaagaggatatccagttgtttcatgatggcatttgcacctccaaaaaacacagatggtcccaaaatgcagacaaagatgagc

SEQ ID NO: 757945 - DNA, 120 bp, Artificial Sequence
  ENSG00000214050_1 (sequence is synthesized)
acctggacacccctaaaccatcagctattgaatgaccgggtatttgaagaaagaagagccctgcttggcaaatggtttgacaaatggacagactctcaaagaagaagaatcctcacaggc

SEQ ID NO: 757946 - DNA, 120 bp, Artificial Sequence
  ENSG00000214050_2 (sequence is synthesized)
ctgttggagcgctgctcgctgtcccagcaaaagttctgctgtcgaaagcttcaagagaaaattccagcagaagccctggactttacaaccaagcttccaagggtgttatctttatacatc

SEQ ID NO: 757947 - DNA, 120 bp, Artificial Sequence
  ENSG00000214050_3 (sequence is synthesized)
ttttctttcctggaccctcggagcctttgtcgttgtgcacaggtgtgctggcattggaagaaccttgctgagctggaccagctctggatgctgaaatgtttacggtttaactggtacatc

SEQ ID NO: 757948 - DNA, 120 bp, Artificial Sequence
  ENSG00000214050_4 (sequence is synthesized)
aatttctctccaactccctttgagcaggggatctggaagaagcactatattcaaatggtgaaagaacttcatattaccaagcctaagacacccccaaaggatggatttgtaatcgctgac

SEQ ID NO: 757949 - DNA, 120 bp, Artificial Sequence
  ENSG00000214050_5 (sequence is synthesized)
tttcggtcctcttcctctttaagaaagaagaataactcaggggagaaagcacttccaccctggcgatcttctgataagcacccaacagatatcattcgttttaattacctagacaaccgt

SEQ ID NO: 757950 - DNA, 120 bp, Artificial Sequence
  ENSG00000214050_6 (sequence is synthesized)
gaccccatggagactgtccagcaaggaagaagaaaaagaaaccaaatgaccccagacttcagccgacagtcacatgataagaaaaataaattgcaggacagaactaggctaagaaaagca

SEQ ID NO: 757951 - DNA, 120 bp, Artificial Sequence
  ENSG00000214050_7 (sequence is synthesized)
caatcaatgatgtcgaggagaaatcccttcccactatgtccctaagtgccagctctcccctaaaagttccagctcatctcgcctggcctccccctgagtcagtgggactcccagacactg

SEQ ID NO: 757952 - DNA, 120 bp, Artificial Sequence
  ENSG00000214050_8 (sequence is synthesized)
ccaccacagctgaaattctcatgcagcatcctcacaggcaccctgggccccaagcatgactcatccaggttccagagccaaagtggactgaacatggaaagacttttattatagaaatga

SEQ ID NO: 757953 - DNA, 120 bp, Artificial Sequence
  ENSG00000214050_9 (sequence is synthesized)
caagatgctttgcacagtggagagctgaatttacttggctcccattagaaactctttcagcttaagtacttattgtggtagtgagtcctacggtatttcagtaaaaaggaattcatggca

SEQ ID NO: 757954 - DNA, 76 bp, Artificial Sequence
  ENSG00000214050_10 (sequence is synthesized)
tttgaagaaagaagagccctgcttggcaaatggatggggtgttgctcgggctggtttcaaattcctgggctcaaga

SEQ ID NO: 757955 - DNA, 120 bp, Artificial Sequence
  ENSG00000214050_11 (sequence is synthesized)
tttctgcccctgaagccaaccaacctcctctgctcagctctgaggagctcttatctgttcttttgatgggatgctacctgattcatgaatcgctaataaaagccaattagatctttaaac

SEQ ID NO: 757956 - DNA, 120 bp, Artificial Sequence
  ENSG00000214050_12 (sequence is synthesized)
aaaaagctgacctaatgaaactgtggcaacgtcagcgcttgaggcttgaagagggagacaagctaaaagaggtgttgtttttcttatggaaggatatccagttgtttcatgatggcattt

SEQ ID NO: 757957 - DNA, 120 bp, Artificial Sequence
  ENSG00000214050_13 (sequence is synthesized)
agaggcttcagtgtccccttcgcctccgcaggagaggagaggcagcagcatggcgagtgtcctgtcccgacgccttggaaagcggtccctcctgggagcccgggtgttgggacccagtgc

SEQ ID NO: 757958 - DNA, 120 bp, Artificial Sequence
  ENSG00000214050_14 (sequence is synthesized)
ctcggaggggccctcggctgccccaccctcggagccactgctagaaggggccgctccccagcctttcaccacctctgatgacaccccctgccaggagcagcccaaggaagtccttaaggc

SEQ ID NO: 757959 - DNA, 120 bp, Artificial Sequence
  ENSG00000214050_15 (sequence is synthesized)
tcccagcacctcgggccttcagcaggtggcctttcagcctgggcagaaggtttatgtgtggtacgggggtcaagagtgcacaggactggtggagcagcacagctggatggagggtcaggt

SEQ ID NO: 757960 - DNA, 120 bp, Artificial Sequence
  ENSG00000214050_16 (sequence is synthesized)
gaccgtctggctgctggagcagaagctgcaggtctgctgcagggtggaggaggtgtggctggcagagctgcagggcccctgtccccaggcaccacccctggagcccggagcccaggccct

SEQ ID NO: 757961 - DNA, 120 bp, Artificial Sequence
  ENSG00000214050_17 (sequence is synthesized)
tgcagccctgttgtacagagtcctcccgggaccgaggccaacttctctgcttcccgtgcggcctgcgacccatggaaggagagtggtgacatctcggacagcggcagcagcactaccagc

SEQ ID NO: 757962 - DNA, 120 bp, Artificial Sequence
  ENSG00000214050_18 (sequence is synthesized)
ggtcactggagtgggagcagtggtgtctccaccccctcgcccccccacccccaggccagccccaagtatttgggggatgcttttggttctccccaaactgatcatggctttgagaccgat

SEQ ID NO: 757963 - DNA, 120 bp, Artificial Sequence
  ENSG00000214050_19 (sequence is synthesized)
cctgaccctttcctgctggacgaaccagctccacgaaaaagaaagaactctgtgaaggtgatgtacaagtgcctgtggccaaactgtggcaaagttctgcgctccattgtgggcatcaaa

SEQ ID NO: 757964 - DNA, 120 bp, Artificial Sequence
  ENSG00000214050_20 (sequence is synthesized)
cgacacgtcaaagccctccatctgggggacacagtggactctgatcagttcaagcgggaggaggatttctactacacagaggtgcagctgaaggaggaatctgctgctgctgctgctgct

SEQ ID NO: 757965 - DNA, 120 bp, Artificial Sequence
  ENSG00000214050_21 (sequence is synthesized)
gctgccgcaggcaccccagtccctgggactcccacctccgagccagctcccacccccagcatgactggcctgcctctgtctgctcttccaccacctctgcacaaagcccagtcctccggc

SEQ ID NO: 757966 - DNA, 120 bp, Artificial Sequence
  ENSG00000214050_22 (sequence is synthesized)
ccagaacatcctggcccggagtcctccctgccctcaggggctctcagcaagtcagctcctgggtccttctggcacattcaggcagatcatgcataccaggctctgccatccttccagatc

SEQ ID NO: 757967 - DNA, 120 bp, Artificial Sequence
  ENSG00000214050_23 (sequence is synthesized)
ccagtctcaccacacatctacaccagtgtcagctgggctgctgccccctccgccgcctgctctctctctccggtccggagccggtcgctaagcttcagcgagccccagcagccagcacct

SEQ ID NO: 757968 - DNA, 120 bp, Artificial Sequence
  ENSG00000214050_24 (sequence is synthesized)
gcgatgaaatctcatctgatcgtcacttctccaccccgggcccagagtggtgccaggaaagcccgaggggaggctaagaagtgccgcaaggtgtatggcatcgagcaccgggaccagtgg

SEQ ID NO: 757969 - DNA, 120 bp, Artificial Sequence
  ENSG00000214050_25 (sequence is synthesized)
tgcacggcctgccggtggaagaaggcctgccagcgctttctggactgagctgtgctgcaggttctactctgttcctggccctgccggcagccactgacaagaggccagtgtgtcaccagc

SEQ ID NO: 757970 - DNA, 120 bp, Artificial Sequence
  ENSG00000214050_26 (sequence is synthesized)
cctcagcagaaaccgaaagagaaagaacggaaacacggagtttgggctctgttggctaaggtgtaacacttaaagcaattttctcccattgtgcgaacattttattttttaaaaaaaaga

SEQ ID NO: 757971 - DNA, 120 bp, Artificial Sequence
  ENSG00000214050_27 (sequence is synthesized)
aacaaaaatatttttccccctaaaataggagagagccaaaactgaccaaggctattcagcagtgaaccagtgaccaaagaattaattaccctccgtttcccacatccccactctctaggg

SEQ ID NO: 757972 - DNA, 120 bp, Artificial Sequence
  ENSG00000214050_28 (sequence is synthesized)
gattagcttgtgcgtgtcaaaagaaggaacagctcgttctgcttcctgctgagtcggtgaattctttgctttctaaactcttccagaaaggactgtgagcaagatgaatttacttttctt

SEQ ID NO: 757973 - DNA, 120 bp, Artificial Sequence
  ENSG00000214050_29 (sequence is synthesized)
tttaatcagaatcatggagtggtgatttaaattcgggtttctgacactgactggcagagaagccatgaccttgaagatacactttatttaatctctctgagcctctgttttctcatctgt

SEQ ID NO: 757974 - DNA, 120 bp, Artificial Sequence
  ENSG00000214050_30 (sequence is synthesized)
accaagcctaaggtgaattttagacagaaagccacaagcttgcaaacattggctctttgcaaattctagaactaagaataaaggatcagactggaagttggggaagggaggtagttcaaa

SEQ ID NO: 757975 - DNA, 120 bp, Artificial Sequence
  ENSG00000214050_31 (sequence is synthesized)
attaccaagcctaagaaagaagaataactcaggggagaaagcacttccaccctggcgatcttctgataagcacccaacagatatcattcgttttaattacctagacaaccgtgaccccat

SEQ ID NO: 757976 - DNA, 120 bp, Artificial Sequence
  ENSG00000214063_0 (sequence is synthesized)
gtgtccgcttgactgacagctgcgcggcgggagcgggcggcgcgagcgggaggcggcggcgcagagcttggggcttccttggtcgcacccaccacctgcctgcccactggtcagccttca

SEQ ID NO: 757977 - DNA, 120 bp, Artificial Sequence
  ENSG00000214063_1 (sequence is synthesized)
gggaccctgagcaccgcctggtctctttcctgtggccagcccagaactgaagcgctgcggcatggcgcgcgcctgcctccaggccgtcaagtacctcatgttcgccttcaacctgctctt

SEQ ID NO: 757978 - DNA, 120 bp, Artificial Sequence
  ENSG00000214063_2 (sequence is synthesized)
ctggctgggaggctgtggcgtgctgggtgtcggcatctggctggccgccacacaggggagcttcgccacgctgtcctcttccttcccgtccctgtcggctgccaacttgctcatcatcac

SEQ ID NO: 757979 - DNA, 120 bp, Artificial Sequence
  ENSG00000214063_3 (sequence is synthesized)
cggcgcctttgtcatggccatcggcttcgtgggctgcctgggtgccatcaaggagaacaagtgcctcctgctcactttcttcctgctgctgctgctggtgttcctgctggaggccaccat

SEQ ID NO: 757980 - DNA, 120 bp, Artificial Sequence
  ENSG00000214063_4 (sequence is synthesized)
cgccatcctcttcttcgcctacacggacaagattgacaggtatgcccagcaagacctgaagaaaggcttgcacctgtacggcacgcagggcaacgtgggcctcaccaacgcctggagcat

SEQ ID NO: 757981 - DNA, 120 bp, Artificial Sequence
  ENSG00000214063_5 (sequence is synthesized)
acaacgccacgcgggtacctgactcctgctgcttggagttcagtgagagctgtgggctgcacgcccccggcacctggtggaaggcgccgtgctacgagacggtgaaggtgtggcttcagg

SEQ ID NO: 757982 - DNA, 120 bp, Artificial Sequence
  ENSG00000214063_6 (sequence is synthesized)
agaacctgctggctgtgggcatctttgggctgtgcacggcgctggtgcagatcctgggcctgaccttcgccatgaccatgtactgccaagtggtcaaggcagacacctactgcgcgtagg

SEQ ID NO: 757983 - DNA, 120 bp, Artificial Sequence
  ENSG00000214063_7 (sequence is synthesized)
ccgcccaccgcccgcttctctgccaaaaggacgcccacggggagatggccgcacccacagctgcctttcccaccaccagcctcggtgctctgccccatgctgggaggagggagggaggga

SEQ ID NO: 757984 - DNA, 120 bp, Artificial Sequence
  ENSG00000214063_8 (sequence is synthesized)
caggtgcctggagcccccggaaccctgtttctggaaggccctagctcaggtggcttcagggcctccggaccccccctgggaggggtggccacgtgctggctgcggaacccagggcagggg

SEQ ID NO: 757985 - DNA, 120 bp, Artificial Sequence
  ENSG00000214063_9 (sequence is synthesized)
tgggaggggcctccagcactttttatatttacgtattctccaaagcagtgttcacacgggagccagcctgtggcccccagcctcctggaaaacaggttggcgctggaggagccgggtctt

SEQ ID NO: 757986 - DNA, 120 bp, Artificial Sequence
  ENSG00000214063_10 (sequence is synthesized)
ggcatcctggaggtggccccactggtcctggtgctccaggcggggccgtggacccctcacctacattccatagtgggcccgtggggctcctggtgcatcttaataaagtgtgagcagcaa

SEQ ID NO: 757987 - DNA, 120 bp, Artificial Sequence
  ENSG00000214063_11 (sequence is synthesized)
actgccccagcctcaggctctgtgcatctcccccgagcccccaccacatatgtgcggaggcccctgggggcccaggcctgtcctcagtcccgactgggctctacctgaggaccctgggga

SEQ ID NO: 757988 - DNA, 120 bp, Artificial Sequence
  ENSG00000214063_12 (sequence is synthesized)
tggacgcacatcctgctctgggcagaagggcaggacaggggccctgagtaacggtggcctggggtcagagccaggttcagctgcgaggctgctggtggctgtggagagcttggggcttcc

SEQ ID NO: 757989 - DNA, 120 bp, Artificial Sequence
  ENSG00000214063_13 (sequence is synthesized)
cgtgcggccagggtcccgtggccggaggtgtccgaccgggagcggctggagccggacgcgagcggggcgcgcgagttcgagcccagagccgacacgcagcaacaagtgggagcttggggc

SEQ ID NO: 757990 - DNA, 120 bp, Artificial Sequence
  ENSG00000214063_14 (sequence is synthesized)
gagcagggccgtaaagctgcggcggcggttcgcgtttctcgtgtccgcttgactgacagctgcgcggcgggagcgggcggcgcgagcgggaggcggcggcgcagaactgaagcgctgcgg

SEQ ID NO: 757991 - DNA, 120 bp, Artificial Sequence
  ENSG00000214063_15 (sequence is synthesized)
aaggaaaagggctcctagatggaaacacaggcttgctactgattaacatgcctggccgaggccgtgggccctgcggagggtgtgcagcctgctgaggtcctaaatcacgaggcttccgat

SEQ ID NO: 757992 - DNA, 120 bp, Artificial Sequence
  ENSG00000214063_16 (sequence is synthesized)
cactcctttgtctgggaagccctggatgggttggggcctcccttaggtcgcctcagccagtccactcccctccgtaccccttcctgggggcaagccccaagtctatcagcctccctggca

SEQ ID NO: 757993 - DNA, 120 bp, Artificial Sequence
  ENSG00000214063_17 (sequence is synthesized)
tcaggttggggcccagagacccctggaggcagtcggtgggggtctgtggcagccctactggggcttggagctcctcagttgaggaagctgctgtgtgtgggccccaccaggcctgcaggg

SEQ ID NO: 757994 - DNA, 120 bp, Artificial Sequence
  ENSG00000214063_18 (sequence is synthesized)
accgaagcccaaccccctttcccatgggtgacttgggaccagaaccctgggtacctcctgggggtgaaggactcctgtgtccttagcccagcaccctgtctgccccactcacgcccactc

SEQ ID NO: 757995 - DNA, 120 bp, Artificial Sequence
  ENSG00000214063_19 (sequence is synthesized)
tgcctgggccccccagctcctggacacatgctgtccatgcctgccctcctcttttgtgggtgtcactgacccccgcatggaggagcagcagggctggggtcaggctgagctttggggctg

SEQ ID NO: 757996 - DNA, 120 bp, Artificial Sequence
  ENSG00000214063_20 (sequence is synthesized)
ccgccaggcgggggaagcttgcatggtcagaggtggggcttgcagcctgtggtcttgctggagggggcatcagccacgctggctgccctgaggactgtgacgtgtgggcagaaggggcct

SEQ ID NO: 757997 - DNA, 120 bp, Artificial Sequence
  ENSG00000214063_21 (sequence is synthesized)
ctgcagcccagctgtggcccctgctgggacatcttcccaccatgaagacaggcacccagcgaggcacctgccagacactcagaggcccctggatggaggtgtcctgaaggcagctgacag

SEQ ID NO: 757998 - DNA, 120 bp, Artificial Sequence
  ENSG00000214063_22 (sequence is synthesized)
gggctggggcctcaggaacagggatttgtgcccacttgggggtgtctgggttgccccagggatgggggcaggggaggggagcccaggccagcccagggccccacactcaggggctgagca

SEQ ID NO: 757999 - DNA, 120 bp, Artificial Sequence
  ENSG00000214063_23 (sequence is synthesized)
ggacacaacagccacagtccctggacctggggccaagggttctgaggtgggggcggcgttctgggctctctgggagtgggggcctggcagaggtttcctggcagcaccaggtatccatga

SEQ ID NO: 758000 - DNA, 120 bp, Artificial Sequence
  ENSG00000214063_24 (sequence is synthesized)
gcgtgggcaggtgggcggggtcggcgggtgccccctcccctcctgcctcagcccgacctgagcttgccccccagttccgctgctgtggcgtctccaactacactgactggttcgaggtgt

SEQ ID NO: 758001 - DNA, 120 bp, Artificial Sequence
  ENSG00000214063_25 (sequence is synthesized)
cccaactgcagggctgggggctccatcctcactcccagggagcactgtgggcccggtgtggacagagtggccctgcatgtgccctcacgggcagccaggacagcgggtgtggatttacca

SEQ ID NO: 758002 - DNA, 120 bp, Artificial Sequence
  ENSG00000214063_26 (sequence is synthesized)
aaggagaacaagtgcctcctgctcactgtgagtgccggggcccaagcgatgctccgggtgggaccacgcagggtggggctccggtggcccccaggccttggctgccgcagtgacccccca

SEQ ID NO: 758003 - DNA, 120 bp, Artificial Sequence
  ENSG00000214063_27 (sequence is synthesized)
cccacccggagggtgcgccccaggttgtcccccgccctctgacgcagcgtcctgagccgtctgctcccagcgccccatccgggccgcgcaccgtggggttctcctctgtagagcggcctc

SEQ ID NO: 758004 - DNA, 120 bp, Artificial Sequence
  ENSG00000214063_28 (sequence is synthesized)
ttcttggtcactcactcatatattcagccatttgtttatactgggatgaagtcctggctattgaggttgcactccgagctagaacacactactttgttttgtgaatcacactgtccgtcc

SEQ ID NO: 758005 - DNA, 120 bp, Artificial Sequence
  ENSG00000214063_29 (sequence is synthesized)
ttggccctggggagcttctgccgtctgctgctgggtcccctgacgtgcccccatcaacagacttttcattttggggcacgtcctgacttcctggcactgcagggcgctccaggctccttc

SEQ ID NO: 758006 - DNA, 120 bp, Artificial Sequence
  ENSG00000214063_30 (sequence is synthesized)
attccctgccctggcccaggaatcagccccttctccagggtgctctgggtcctcactgaatattggggaccgaggccagggtgctgggtgggctcagcgctcatagcccctggctttcag

SEQ ID NO: 758007 - DNA, 120 bp, Artificial Sequence
  ENSG00000214063_31 (sequence is synthesized)
ctcacagagcatggctgcacgtgtcccgatacgtggaggcacctgtgtccctgtcctctgtccccccaggacccatggtcctcccccagcctggggaggaagcccagaggtgggggccct

SEQ ID NO: 758008 - DNA, 120 bp, Artificial Sequence
  ENSG00000214063_32 (sequence is synthesized)
cttggtgggctaggaggcgcgggggacacaagaccaggcgcaggaggggcccagcttaggggccggcgagggggtctggatgagggaggcggggtacagtgggaggggccctgctgaccc

SEQ ID NO: 758009 - DNA, 120 bp, Artificial Sequence
  ENSG00000214063_33 (sequence is synthesized)
gggtgccagcccagggtgtcgggaaagactggcctgccctggacacccccccgggctgccgtgggatctagcaggactctgggtggttctggctcaggctggcaggcggcatggctttgg

SEQ ID NO: 758010 - DNA, 120 bp, Artificial Sequence
  ENSG00000214063_34 (sequence is synthesized)
tcccgggtcccggctctgctggctgctcgccgtcccgagctcccgacgctcagacgcgcctctgagcacggggagaggggacccgggagggaggtcggggagggagtcgtggaagaggtg

SEQ ID NO: 758011 - DNA, 120 bp, Artificial Sequence
  ENSG00000214063_35 (sequence is synthesized)
ctttttgagctgaacctggaagaccccggcacaggggatccctgggcagactcccggaggctgcactggcaggaccccctgaaggcctcagctctggcttgccctggagctcagggccta

SEQ ID NO: 758012 - DNA, 120 bp, Artificial Sequence
  ENSG00000214063_36 (sequence is synthesized)
cggacgacgagggacgaggagcccgtgtctctcggatggagtgcgggggggctggcaccagcacccttcttgctgtgcccctggggtggggagcttggggcttccttggtcgcacccacc

SEQ ID NO: 758013 - DNA, 80 bp, Artificial Sequence
  ENSG00000214063_37 (sequence is synthesized)
agatgtttgggttccgccgccggggtccgagcggatccgcgcgacccgctgccaccgcgggggccagagcgggagcagga

SEQ ID NO: 758014 - DNA, 80 bp, Artificial Sequence
  ENSG00000214063_38 (sequence is synthesized)
gcgggtgcggggcgctgagcggcggccccggcacacccgggcgcgatgcgccgctccagcacggacgagtccacgtaccg

SEQ ID NO: 758015 - DNA, 120 bp, Artificial Sequence
  ENSG00000214063_39 (sequence is synthesized)
acgtaccggcgcagcccctctccggagggcaaggagccggacttcgcgcgcggcggccccttccggcgctacagcagcctatacgggcgcgcgggcggcggggacgccgggggctccttc

SEQ ID NO: 758016 - DNA, 120 bp, Artificial Sequence
  ENSG00000214063_40 (sequence is synthesized)
ttcggcctgcacgcgaaccccggccccaaggcggcccaggcgcgctacacgtcgcccaagggcaacaagtacgtggttttctacctggacctctccttcatcttcctcctagaactgaag

SEQ ID NO: 758017 - DNA, 120 bp, Artificial Sequence
  ENSG00000214063_41 (sequence is synthesized)
agaggcgtggggtaggctgcagggcacagctgggggcctctgtccccatctccggctgtgggaggtgtgtgcgcatccggcgtgatgacacccaggagtgcaggcacatctgcgcacggg

SEQ ID NO: 758018 - DNA, 120 bp, Artificial Sequence
  ENSG00000214063_42 (sequence is synthesized)
tgtggcccggggccctggccactgttgggtcttccaggccacactggggctggggggtgatttgcagagcggtgtgggggtcactcaagagaacgtgctgtaccttgtcaggggcctccc

SEQ ID NO: 758019 - DNA, 120 bp, Artificial Sequence
  ENSG00000214063_43 (sequence is synthesized)
ctgacgggacactggccctggtgagtgcaggcacagccccgcacacacgtacacacgcatgcgcagcctttcacgggcttgcggtctccgtgactcattcctgaccaccccacccccact

SEQ ID NO: 758020 - DNA, 120 bp, Artificial Sequence
  ENSG00000214063_44 (sequence is synthesized)
gtggccccttccccagcttcttgttgggggcctggtctctcagctccctgggaccggctgctgggacgatcccagcccccacctcgcctcggggatggacttacaggcagggatatgttt

SEQ ID NO: 758021 - DNA, 120 bp, Artificial Sequence
  ENSG00000214078_0 (sequence is synthesized)
cgaaggaggtggtggctgcgttgggctccgggaagccgttcgggctggggctgtcggccgcggggcggaggcactcgcgcggggggtaattcggggtctgggttctggtgccgcgcagct

SEQ ID NO: 758022 - DNA, 120 bp, Artificial Sequence
  ENSG00000214078_1 (sequence is synthesized)
ttccccggattgacttggcctctacttcttgttaaggaaattcatctcttgttttatcaggtgtgtgtggtttcagcgcagcatggctgtggtcatccgtttgcaaggtctcccaattgt

SEQ ID NO: 758023 - DNA, 120 bp, Artificial Sequence
  ENSG00000214078_2 (sequence is synthesized)
ggcggggaccatggacattcgccacttcttctctggattgaccattcctgatgggggcgtgcatattgtagggggtgaactggatggcccactgcgtgaccttggttcagctgtccattt

SEQ ID NO: 758024 - DNA, 120 bp, Artificial Sequence
  ENSG00000214078_3 (sequence is synthesized)
cctgtgaccatctcattgacaaggacatcggctccaagtctgacccactctgcgtccttttacaggatgtgggagggggcagctgggctgagcttggccggactgaacgggtgcggaact

SEQ ID NO: 758025 - DNA, 120 bp, Artificial Sequence
  ENSG00000214078_4 (sequence is synthesized)
gctcaagccctgagttctccaagactctacagcttgagtaccgctttgagacagtccagaagctacgctttggaatctatgacatagacaacaagacgccagagctgagggatgatgact

SEQ ID NO: 758026 - DNA, 120 bp, Artificial Sequence
  ENSG00000214078_5 (sequence is synthesized)
tcctagggggtgctgagtgttccctaggacagattgtgtccagccaggtactgactctccccttgatgctgaagcctggaaaacctgctgggcgggggaccatcacggtctcagctcagg

SEQ ID NO: 758027 - DNA, 120 bp, Artificial Sequence
  ENSG00000214078_6 (sequence is synthesized)
aattaaaggacaatcgtgtagtaaccatggaggtagaggccagaaacctagataagaaggacttcctgggaaaatcagatccatttctggagttcttccgccagggtgatgggaaatggc

SEQ ID NO: 758028 - DNA, 120 bp, Artificial Sequence
  ENSG00000214078_7 (sequence is synthesized)
acctggtgtacagatctgaggtcatcaagaacaacctgaaccctacatggaagcgtttctcagtccccgttcagcatttctgtggtgggaaccccagcacacccatccaggtgcaatgct

SEQ ID NO: 758029 - DNA, 120 bp, Artificial Sequence
  ENSG00000214078_8 (sequence is synthesized)
cagcagaaaaagaaaagctacaagaactctggaactatccgtgtcaagatttgtcgggtagaaacagagtactcctttctggactatgtgatgggaggctgtcagatcaacttcactgtg

SEQ ID NO: 758030 - DNA, 120 bp, Artificial Sequence
  ENSG00000214078_9 (sequence is synthesized)
ggcgtggacttcactggctccaatggagacccctcctcacctgactccctacactacctgagtccaacaggggtcaatgagtacctgatggcactgtggagtgtgggcagcgtggttcag

SEQ ID NO: 758031 - DNA, 120 bp, Artificial Sequence
  ENSG00000214078_10 (sequence is synthesized)
gactatgactcagacaagctgttccctgcatttggatttggggcccaggttccccctgactggcaggtctcgcatgaatttgccttgaatttcaaccccagtaacccctactgtgcaggc

SEQ ID NO: 758032 - DNA, 120 bp, Artificial Sequence
  ENSG00000214078_11 (sequence is synthesized)
atccagggcattgtggatgcctaccgccaagccctgccccaagttcgcctctatggccctaccaactttgcacccatcatcaaccatgtggccaggtttgcagcccaggctgcacatcag

SEQ ID NO: 758033 - DNA, 120 bp, Artificial Sequence
  ENSG00000214078_12 (sequence is synthesized)
gggactgcctcgcaatacttcatgctgttgctgctgactgatggtgctgtgacggatgtggaagccacacgtgaggctgtggtgcgtgcctcgaacctgcccatgtcagtgatcattgtg

SEQ ID NO: 758034 - DNA, 120 bp, Artificial Sequence
  ENSG00000214078_13 (sequence is synthesized)
ggtgtgggtggtgctgactttgaggccatggagcagctggacgctgatggtggacccctgcatacacgttctgggcaggctgctgcccgcgacattgtgcagtttgtaccctaccgccgg

SEQ ID NO: 758035 - DNA, 120 bp, Artificial Sequence
  ENSG00000214078_14 (sequence is synthesized)
ttccagaatgcccctcgggaggcattggcacagaccgtgctcgcagaagtgcccacacaactggtctcatacttcagggcccagggttgggccccgctcaagccacttccaccctcagcc

SEQ ID NO: 758036 - DNA, 120 bp, Artificial Sequence
  ENSG00000214078_15 (sequence is synthesized)
aaggatcctgcacaggccccccaggcctaggttcccttggaggctgtggcaagtcctcaatcctgtgtcccagaggtccctctgggccacaacccaacccttctcactctcctcagtgct

SEQ ID NO: 758037 - DNA, 120 bp, Artificial Sequence
  ENSG00000214078_16 (sequence is synthesized)
agcactttgtattttttgatacttttatacttgtttctgcttttgctgctcttgatcccacctttgctcctgacaaccctcattcaataaagaccagtgaagaccaatgctttgccacca

SEQ ID NO: 758038 - DNA, 120 bp, Artificial Sequence
  ENSG00000214078_17 (sequence is synthesized)
caaatattccattcagcattacaaagatggatgttcttcagttcctagaaggaatcccagtggatgaaaatgctgtacatgttcttgttgataacaatgggcaaggtctaggacaggcat

SEQ ID NO: 758039 - DNA, 120 bp, Artificial Sequence
  ENSG00000214078_18 (sequence is synthesized)
tgaatgaatgaaatgcacccaggttccgagatctcctgggctgggatggggtgatttcaggactggtgtagtcctgagaggtccaggattttacggtatttcttgctctcctctgcaggc

SEQ ID NO: 758040 - DNA, 120 bp, Artificial Sequence
  ENSG00000214078_19 (sequence is synthesized)
actcgtgagtacctgcttctctgggctatacccgctccctgcagatgcttcagcctctgagcttacagtcccctcactgccttttgcccaatacactgtcctcccacagagacaagctgt

SEQ ID NO: 758041 - DNA, 120 bp, Artificial Sequence
  ENSG00000214078_20 (sequence is synthesized)
ctctctttctgccactcctgttttcagtttcagggtcctgattttgggggatgtggtaaatttacttgctacttggcactcagctttaagaggagatgcagggttggattcctgcaggca

SEQ ID NO: 758042 - DNA, 120 bp, Artificial Sequence
  ENSG00000214078_21 (sequence is synthesized)
cgtagacagcaagtgctcaggactccatagctcctataggaatcttggcacacgccagtgtcctttttcattcttagcagaggtcatggggaaagaacctcattttcattcttgtctcca

SEQ ID NO: 758043 - DNA, 120 bp, Artificial Sequence
  ENSG00000214078_22 (sequence is synthesized)
ggaggtggtggctgcgttgggctccgggaagccgttcgggctggggctgtcggccgcggggcggaggcactcgcgcggggggtgtgtgtggtttcagcgcagcatggctgtggtcatccg

SEQ ID NO: 758044 - DNA, 120 bp, Artificial Sequence
  ENSG00000214078_23 (sequence is synthesized)
tgagcctgcgtaccgaagtggggacgaggccatagcgaggactcccccgtggtctgagagggggcaggccagagctggctggctcagcggcctgcgagctaacggggactgcagtaaaaa

SEQ ID NO: 758045 - DNA, 120 bp, Artificial Sequence
  ENSG00000214078_24 (sequence is synthesized)
aagcagaggttataactacatctctgtgcctggagtctaaaagttggttttaattggttgcccacaggattgacttggcctctacttcttgttaaggaaattcatctcttgttttatcag

SEQ ID NO: 758046 - DNA, 120 bp, Artificial Sequence
  ENSG00000214087_0 (sequence is synthesized)
gaagcacggaatgtgtctcctgctgggggccacgggcgtcgggaagacgctgctggtgaaacggctgcaggaggtgagctcccgggatgggaaaggcgacctgggggagccgcccccgac

SEQ ID NO: 758047 - DNA, 120 bp, Artificial Sequence
  ENSG00000214087_1 (sequence is synthesized)
acggcccacggtgggcaccaatcttactgacatcgtggcacagagaaagatcaccatccgggagcttggggggtgcatgggccccatctggtccagttactatggaaactgccgttctct

SEQ ID NO: 758048 - DNA, 120 bp, Artificial Sequence
  ENSG00000214087_2 (sequence is synthesized)
cctgtttgtgatggacgcctctgaccccacccagctctctgcatcctgtgtgcagctcttaggtctcctttctgcagaacaacttgcagaagcatcggtgctgatactcttcaataaaat

SEQ ID NO: 758049 - DNA, 120 bp, Artificial Sequence
  ENSG00000214087_3 (sequence is synthesized)
cgacctaccctgttacatgtccacggaggagatgaagtcattaatcaggcttccagacatcattgcttgtgccaagcagaacatcaccacggcagaaatcagcgcccgtgaaggcactgg

SEQ ID NO: 758050 - DNA, 120 bp, Artificial Sequence
  ENSG00000214087_4 (sequence is synthesized)
ggcagagggcagtatggctttgctgccaatagtttcttctcacaggggcagaataacccaaagtaaccctacatgatggggctctgtgctgagatgcaatgatgtgtaaactgaggcatg

SEQ ID NO: 758051 - DNA, 84 bp, Artificial Sequence
  ENSG00000214087_5 (sequence is synthesized)
gctctgtgctgagatgcaatgatgtgtaaactgaggcatgtggagatggaagttgacatctggcctctgaaaaaagtgtcccca

SEQ ID NO: 758052 - DNA, 120 bp, Artificial Sequence
  ENSG00000214087_6 (sequence is synthesized)
gcgggtcaggtcgtgacttaaggccagccttcgggagcgggggacggcccgagctgaggataattggcgcgggatgagggggcctgccgccctccacgggcacttcctctcccctcgcaa

SEQ ID NO: 758053 - DNA, 120 bp, Artificial Sequence
  ENSG00000214087_7 (sequence is synthesized)
cggcttcctgtggctggtcgcccccacagcgagtccagctactgatgggcgtcggtccctgctcgccgttcctgcgttagggagaatgggtctgcggggttcaggccaccgtgtaaggtg

SEQ ID NO: 758054 - DNA, 120 bp, Artificial Sequence
  ENSG00000214087_8 (sequence is synthesized)
tctgtgacgtccagtccccaaccttgctgtgtgtagaaaggggtttgggttatttagtgactatactactcatggaaataggtcttagctagtgttgcttcctgctgggcaccctgtctg

SEQ ID NO: 758055 - DNA, 120 bp, Artificial Sequence
  ENSG00000214087_9 (sequence is synthesized)
gtttctggtgcttgcgctcccaggcccccggtaggagctcacagagggcttgctgagggcagggctgctgctccgcagagaacagacttggccctctgtgtcactccccggtacgtctgt

SEQ ID NO: 758056 - DNA, 120 bp, Artificial Sequence
  ENSG00000214087_10 (sequence is synthesized)
gtttatgttggacttatacgtacctctggttggtctcatcttgataaggcctgtgccgcggataccagtatggagaactgatggccacatgaggacagagacgagtgacaccaggtcgtc

SEQ ID NO: 758057 - DNA, 65 bp, Artificial Sequence
  ENSG00000214087_11 (sequence is synthesized)
cttctgcttgttcccaaagctttgtttaaagctactttgggcaatcacgaggtcaggagatggag

SEQ ID NO: 758058 - DNA, 67 bp, Artificial Sequence
  ENSG00000214087_12 (sequence is synthesized)
aaattagccaggcgtggtggcgggtgaaccctggaggcggagtttcagtgagccgagatcgtgccac

SEQ ID NO: 758059 - DNA, 120 bp, Artificial Sequence
  ENSG00000214087_13 (sequence is synthesized)
cgtgccactgcactcggagcgagacttcgtctcaaaaaataaattaattaattaaaaaatgcagttttgctctcccagtgccaggtctgtgaggcccaggggaggaagtttggcagcggg

SEQ ID NO: 758060 - DNA, 120 bp, Artificial Sequence
  ENSG00000214087_14 (sequence is synthesized)
ccacgggcgtcgggaagacgctgctggtgaaacggctgcaggatatccttccgcgcggggacgggaccggggcgcggggggcacccggagtggggcggggactcaccctttagctgctcg

SEQ ID NO: 758061 - DNA, 120 bp, Artificial Sequence
  ENSG00000214087_15 (sequence is synthesized)
gtcttccgctctcccgctaacgctgcgcgctaattggacgcgcccttggaacaatgagccctaagaaccaatgagaagtccgaaggtgagaactatccaatgagagtggccggtgggcgg

SEQ ID NO: 758062 - DNA, 120 bp, Artificial Sequence
  ENSG00000214097_0 (sequence is synthesized)
aggcagaatgtagactgagcgctcctgctactgctgcctgttgctgagaggaagaccgcagaaaattctggattcaaacatttattgctttttttgttttgctttgtttttgttttcttt

SEQ ID NO: 758063 - DNA, 120 bp, Artificial Sequence
  ENSG00000214097_1 (sequence is synthesized)
ccttttgccttcagaagatgaacaatgaaaccacaaccctgatatccttgaaggaggcaatgaaaagagtagaccacaaactccaagcgttagaaacacagttcaaagaactagacttca

SEQ ID NO: 758064 - DNA, 120 bp, Artificial Sequence
  ENSG00000214097_2 (sequence is synthesized)
ccaaggataacctgatgcagaaattcgaacatcatagtaaggctttggcaagccaagcagcccaagatgagatgtggacagcagttcgggcactccagctcacttcaatggaattgaata

SEQ ID NO: 758065 - DNA, 120 bp, Artificial Sequence
  ENSG00000214097_3 (sequence is synthesized)
ttttatacagctacgtcattgaagtacttatctgcttgcatactcgtgtgcttgagaagctgccagacctggtgagaggtcttccaaccttagcctctgtactcagaagaaaagttaaga

SEQ ID NO: 758066 - DNA, 120 bp, Artificial Sequence
  ENSG00000214097_4 (sequence is synthesized)
acaagcgcgttagagttgtatgggagtccatactggaggagtgtgggctgcaagaaggagacatcacagcactttgtaccttctttattgcacgtggtaacaaggcagaacactatactg

SEQ ID NO: 758067 - DNA, 120 bp, Artificial Sequence
  ENSG00000214097_5 (sequence is synthesized)
ctaaagtgaggcagatgtacatcagggatgtcacgttcctaattactaacatggtaaagaaccaggctctgcaggacagtttgctgagggctgtgcaggtaattgagaaggggaaagcag

SEQ ID NO: 758068 - DNA, 120 bp, Artificial Sequence
  ENSG00000214097_6 (sequence is synthesized)
ttaggacccctgaaaagcaaaagtcatccctcgaagagttgataccatctgtcaaaaactaacctgttaccctatgacccagtgattccacctacagtaatttatcttggaaacagcaaa

SEQ ID NO: 758069 - DNA, 120 bp, Artificial Sequence
  ENSG00000214097_7 (sequence is synthesized)
aatgaagaagctctttgtgtaatgatatgaagtgatcaccaaatgtattgttgttttcaaatgtttatttccaatatacattgctaagtggaaaaaaggtgacaaatatatatatataaa

SEQ ID NO: 758070 - DNA, 120 bp, Artificial Sequence
  ENSG00000214097_8 (sequence is synthesized)
tatatatataacacatattagtttacatatccataaacttcttctgcagagatacacaagacagtgataacattagttgtcaggaaagaaagctaagaggctaggggtcaaagacaagag

SEQ ID NO: 758071 - DNA, 120 bp, Artificial Sequence
  ENSG00000214097_9 (sequence is synthesized)
gaagtcttttcactgttaatccattttttacattttcaattttgaaccatgtgaatgtattacctatttaaaaaataaacaaggccggacatggtggctcatgcctataatccaagcacc

SEQ ID NO: 758072 - DNA, 120 bp, Artificial Sequence
  ENSG00000214097_10 (sequence is synthesized)
ttaggaggccaaggtaggaggatcacttgagctcaggggtttcagaccagcctgggcaacacagtgatagcaataggaggcaggtaaattcctaggcagacagggaggggtccctggtga

SEQ ID NO: 758073 - DNA, 120 bp, Artificial Sequence
  ENSG00000214097_11 (sequence is synthesized)
aactcaaccttcaagccaaggacagtctaaagcctgaaaaccaagctatgagttctggataaatccatgagccagactgagagctcccattctcgtctggcaccctctctcctgattggt

SEQ ID NO: 758074 - DNA, 120 bp, Artificial Sequence
  ENSG00000214097_12 (sequence is synthesized)
ccttacccttcacctattttatacatacctacccttccgcgattggtcctctacactatcgtgcctatttctgaatggtgctttgtcaagcatagccacagaccaatcagcatgcacttg

SEQ ID NO: 758075 - DNA, 120 bp, Artificial Sequence
  ENSG00000214097_13 (sequence is synthesized)
cccatttctagcccacaaaaacccatagactcaggctcgtggccagcaacccaccttcgggtcccctctcactgccaagagccgttctgtcactcaataaattctactttgccttactca

SEQ ID NO: 758076 - DNA, 120 bp, Artificial Sequence
  ENSG00000214102_0 (sequence is synthesized)
aatttcttttcaatattagcttattcccaaattggctaatgggtatttttaaagccatgctaaattaaaggaattcaattttctcactagtatttggtaacacatgggagactatgtgtc

SEQ ID NO: 758077 - DNA, 120 bp, Artificial Sequence
  ENSG00000214102_1 (sequence is synthesized)
atatccagaagagttctgtacatgaactgcatttaattgctccgagagtcactggagctttctttaatcagaatggaaatcaggataagctgaggtcttatagattggtggtacttaagg

SEQ ID NO: 758078 - DNA, 120 bp, Artificial Sequence
  ENSG00000214102_2 (sequence is synthesized)
cagaaaattaacaccgtgttttgtagctgttagttggtagagggaaattcaggctaccgtcgcgaaacctgcaggttaagttattttctcctccctgcttctgtaggttcacagcgttcc

SEQ ID NO: 758079 - DNA, 120 bp, Artificial Sequence
  ENSG00000214102_3 (sequence is synthesized)
cttctgatagagctttttgtctgtgttgtaaagctctttggctgagatggatgacaaagatattgacaaagaactaaggcagaaattaaacttttcctattgtgaggagactgagattga

SEQ ID NO: 758080 - DNA, 120 bp, Artificial Sequence
  ENSG00000214102_4 (sequence is synthesized)
agggcagaagaaagtagaagaaagcagggaggcttcgagccaaaccccagagaagggtgaagtgcaggattcagaggcaaagggtacaccaccttggactccccttagcaacgtgcatga

SEQ ID NO: 758081 - DNA, 120 bp, Artificial Sequence
  ENSG00000214102_5 (sequence is synthesized)
gctcgacacatcttcggaaaaagacaaagaaagtccagatcagattttgaggactccagtgtcacaccctctcaaatgtcctgagacaccagcccaaccagacagcaggagcaagctgct

SEQ ID NO: 758082 - DNA, 120 bp, Artificial Sequence
  ENSG00000214102_6 (sequence is synthesized)
gcccagtgacagcccctctactcccaaaaccatgctgagccggttggtgatttctccaacagggaagcttccttccagaggccctaagcatttgaagctcacacctgctcccctcaagga

SEQ ID NO: 758083 - DNA, 120 bp, Artificial Sequence
  ENSG00000214102_7 (sequence is synthesized)
tgagatgacctcattggctctggtcaatattaatcccttcactccagagtcctataaaaaattatttcttcaatctggtggcaagaggaaaataagaggagatcttgaggaagctggtcc

SEQ ID NO: 758084 - DNA, 120 bp, Artificial Sequence
  ENSG00000214102_8 (sequence is synthesized)
agaggaaggcaagggagggctgcctgccaagagatgtgttttacgagaaaccaacatggcttcccgctatgaaaaagaattcttggaggttgaaaaaattggggttggcgaatttggtac

SEQ ID NO: 758085 - DNA, 120 bp, Artificial Sequence
  ENSG00000214102_9 (sequence is synthesized)
agtctacaagtgcattaagaggctggatggatgtgtttatgcaataaagcgctctatgaaaacttttacagaattatcaaatgagaattcggctttgcatgaagtttatgctcacgcagt

SEQ ID NO: 758086 - DNA, 120 bp, Artificial Sequence
  ENSG00000214102_10 (sequence is synthesized)
gcttgggcatcacccccatgtggtacgttactattcctcatgggcagaagatgaccacatgatcattcagaatgaatactgcaatggtgggagtttgcaagctgctatatctgaaaacac

SEQ ID NO: 758087 - DNA, 120 bp, Artificial Sequence
  ENSG00000214102_11 (sequence is synthesized)
taagtctggcaatcattttgaagagccaaaactcaaggacatccttctacagatttcccttggccttaattacatccacaactctagcatggtacacctggacatcaaacctagtaatat

SEQ ID NO: 758088 - DNA, 120 bp, Artificial Sequence
  ENSG00000214102_12 (sequence is synthesized)
gctgattggtttctctctgccaatgtgatgtataaaattggtgacctgggccacgcaacatcaataaacaaacccaaagtggaagaaggagatagtcgcttcctggctaatgagattttg

SEQ ID NO: 758089 - DNA, 120 bp, Artificial Sequence
  ENSG00000214102_13 (sequence is synthesized)
caagaggattaccggcaccttcccaaagcagacatatttgccttgggattaacaattgcagtggctgcaggagcagagtcattgcccaccaatggtgctgcatggcaccatatccgcaag

SEQ ID NO: 758090 - DNA, 120 bp, Artificial Sequence
  ENSG00000214102_14 (sequence is synthesized)
ggtaactttccggacgttcctcaggagctctcagaaagcttttccagtctgctcaagaacatgatccaacctgatgccgaacagagaccttctgcagcagctctggccagaaatacagtt

SEQ ID NO: 758091 - DNA, 120 bp, Artificial Sequence
  ENSG00000214102_15 (sequence is synthesized)
ctccggccttccctgggaaaaacagaagagctccaacagcagctgaatttggaaaagttcaagactgccacactggaaagggaactgagagaagcccagcaggcccagtcaccccaggga

SEQ ID NO: 758092 - DNA, 120 bp, Artificial Sequence
  ENSG00000214102_16 (sequence is synthesized)
tatacccatcatggtgacactggggtctctgggacccacacaggatcaagaagcacaaaacgcctggtgggaggaaagagtgcaaggtcttcaagctttacctcaggagagcgtgagcct

SEQ ID NO: 758093 - DNA, 120 bp, Artificial Sequence
  ENSG00000214102_17 (sequence is synthesized)
ctgcattaaaggaagaaaaggaaaacagcccttggtttggcctatggattacgaggttgctgttgctgattccccaccaaagatcccagggactcgttgtacatagaaaggaatagaatt

SEQ ID NO: 758094 - DNA, 120 bp, Artificial Sequence
  ENSG00000214102_18 (sequence is synthesized)
tagtttagagttgaagtcacagcttacagaaaatgtgcctggatttccacagcgcttcccaggttatatgatgctgttcctaagagagaattcccagcttctttgaggaagtgggtctcc

SEQ ID NO: 758095 - DNA, 120 bp, Artificial Sequence
  ENSG00000214102_19 (sequence is synthesized)
taatgtataccctttctgatattgtatttattaaataaatggtttcaccattatgtgaggtgggtaaaagttagactgcatgcaacttggacatctctgagctggttgttaacttgcaga

SEQ ID NO: 758096 - DNA, 120 bp, Artificial Sequence
  ENSG00000214102_20 (sequence is synthesized)
acaaaaatgctgtggggagaggcttcagggaaaacttgatgtgcctgtggttgttctccatctatttgccctgcctctcttgctgttctggttggtttgatattctgggtctcaccaatt

SEQ ID NO: 758097 - DNA, 120 bp, Artificial Sequence
  ENSG00000214102_21 (sequence is synthesized)
tctcttgatttttgtgagaatttggctttgtttcctgttttttaaaatcatattttatctaaatcctttttctgtacacatttttaaaggaagagaatactgtatttttaaataaaggtt

SEQ ID NO: 758098 - DNA, 120 bp, Artificial Sequence
  ENSG00000214102_22 (sequence is synthesized)
tttatcttgtccaaagcctaattacaggtaaaatatcctttgtaaaatgtaactaacaaagaatgagaaatttatgtcggagaacattttatgaataaaagggtaagagaattgagtggg

SEQ ID NO: 758099 - DNA, 120 bp, Artificial Sequence
  ENSG00000214102_23 (sequence is synthesized)
tcagtagtaacaggtcttggtggcaagtctcagcttcacagttccaacagttaatgatggtcaggatctgctagaaaattatgttggtcataaaggtatttgataagctctgtttgtgtc

SEQ ID NO: 758100 - DNA, 120 bp, Artificial Sequence
  ENSG00000214102_24 (sequence is synthesized)
atcttagtgaatgcaacctgttaatgataatggctttttcgctgcttgattttcttcttttcctcatttttaaaagctaattaagtttttttaattgaataaaccctaatactattcttt

SEQ ID NO: 758101 - DNA, 120 bp, Artificial Sequence
  ENSG00000214107_0 (sequence is synthesized)
cagtgttgcaactgggcctggcatgtttcagtgtggtgtccagcagtgtctcccactccttgtgaagtctgaggttgcaaaaggactgtgatcatatgaagatcatccaggagtacaact

SEQ ID NO: 758102 - DNA, 120 bp, Artificial Sequence
  ENSG00000214107_1 (sequence is synthesized)
cgaaattctcagaaaacaggaccttgatgtgagaggagcaggttcaggtaaacaaagggcgaggacccgagcgagcttaaggagtggggtgcagcgtctggtcagcggagggtgaattct

SEQ ID NO: 758103 - DNA, 120 bp, Artificial Sequence
  ENSG00000214107_2 (sequence is synthesized)
caggactggtcgggagtcaaggtgccacatctcctgcctttctgctcactttcctgcctgttttgcctgaccacagccatcatgcctcggggtcagaagagtaagctccgtgctcgtgag

SEQ ID NO: 758104 - DNA, 120 bp, Artificial Sequence
  ENSG00000214107_3 (sequence is synthesized)
aaacgccgcaaggcgcgagaggagacccagggtctcaaggttgctcacgccactgcagcagagaaagaggagtgcccctcctcctctcctgttttaggggatactcccacaagctcccct

SEQ ID NO: 758105 - DNA, 120 bp, Artificial Sequence
  ENSG00000214107_4 (sequence is synthesized)
gctgctggcattccccagaagcctcagggagctccacccaccaccactgctgctgcagctgtgtcatgtaccgaatctgacgaaggtgccaaatgccaaggtgaggaaaatgcaagtttc

SEQ ID NO: 758106 - DNA, 120 bp, Artificial Sequence
  ENSG00000214107_5 (sequence is synthesized)
tcccaggccacaacatccactgagagctcagtcaaagatcctgtagcctgggaggcaggaatgctgatgcacttcattctacgtaagtataaaatgagagagcccattatgaaggcagat

SEQ ID NO: 758107 - DNA, 120 bp, Artificial Sequence
  ENSG00000214107_6 (sequence is synthesized)
atgctgaaggttgttgatgaaaagtacaaggatcacttcactgagatcctcaatggagcctctcgccgcttggagctcgtctttggccttgatttgaaggaagacaaccctagtggccac

SEQ ID NO: 758108 - DNA, 120 bp, Artificial Sequence
  ENSG00000214107_7 (sequence is synthesized)
cccaggaatgggcttctgatgcctctcctgggtgtgatcttcttaaagggcaactctgccaccgaggaagagatctggaaattcatgaatgtgttgggagcctatgatggagaggagcac

SEQ ID NO: 758109 - DNA, 120 bp, Artificial Sequence
  ENSG00000214107_8 (sequence is synthesized)
ttaatctatggggaaccccgtaagttcatcacccaagatctggtgcaggaaaaatatctgaagtacgagcaggtgcccaacagtgatcccccacgctatcaattcctatggggtccgaga

SEQ ID NO: 758110 - DNA, 120 bp, Artificial Sequence
  ENSG00000214107_9 (sequence is synthesized)
gcctatgctgaaaccaccaagatgaaagtcctcgagtttttggccaagatgaatggtgccactccccgtgacttcccatcccattatgaagaggctttgagagatgaggaagagagagcc

SEQ ID NO: 758111 - DNA, 120 bp, Artificial Sequence
  ENSG00000214107_10 (sequence is synthesized)
caagtccgatccagtgttagagccaggcgtcgcactactgccacgacttttagagcgcgttctagagccccattcagcaggtcctcccaccccatgtgagaactcaggcagattgttcac

SEQ ID NO: 758112 - DNA, 120 bp, Artificial Sequence
  ENSG00000214107_11 (sequence is synthesized)
tttgtttttgtggcaagatgccaaccttttgaagtagtgagcagccaagatatggctagagagatcatcatatatatctcctttgtgttcctgttaaacattagtatctttcaagtgttt

SEQ ID NO: 758113 - DNA, 120 bp, Artificial Sequence
  ENSG00000214107_12 (sequence is synthesized)
ttcttttaatagaatgtttatttagagttgggatctatgtctatgagcgacatggatcacacatttattggtgctgccagctttaagcatatgagttttgatattctatatttttcaaat

SEQ ID NO: 758114 - DNA, 120 bp, Artificial Sequence
  ENSG00000214107_13 (sequence is synthesized)
ccttgaatcttttttgggttgaagaagaagaaagcatagctttagaatagagattttctcagaaatgtgtgaaagaacctcacacaacataattggagtcttaaaatagaggaagagtaa

SEQ ID NO: 758115 - DNA, 120 bp, Artificial Sequence
  ENSG00000214107_14 (sequence is synthesized)
gcaaagcatgtcaagtttttgttttctgcattcagttttgtttttgtaaaatccaaagatacatacctggttgtttttagccttttcaagaatgcagataaaataaatagtaataaatta

SEQ ID NO: 758116 - DNA, 120 bp, Artificial Sequence
  ENSG00000214113_0 (sequence is synthesized)
gcgcccgcccccgaagcggcgcgggacgcctggcgccgtccgcgatccgcagggctgcccgcttaggcttaggcccggcccgctggcaaagccgagccgcagcattttatttcgttcgtg

SEQ ID NO: 758117 - DNA, 120 bp, Artificial Sequence
  ENSG00000214113_1 (sequence is synthesized)
gtttccgcacaggctggagtttcgtgggttgggtcgtacttgggacctcggcgaagaggacccgtttatttttttttctttccaaaatggcagcctccagtcgcgcacaagtgttatctc

SEQ ID NO: 758118 - DNA, 120 bp, Artificial Sequence
  ENSG00000214113_2 (sequence is synthesized)
tgtaccgggcgatgctgagagagagcaagcgtttcagcgcctacaattacagaacatatgctgtcaggaggataagagatgccttcagagaaaataaaaatgtaaaggatcctgtagaaa

SEQ ID NO: 758119 - DNA, 120 bp, Artificial Sequence
  ENSG00000214113_3 (sequence is synthesized)
ttcaaaccctagtgaataaagccaagagagaccttggagtaattcgtcgacaggtccacattggccaactgtattcaactgacaagctgatcattgagaatcgagacatgcccaggacct

SEQ ID NO: 758120 - DNA, 120 bp, Artificial Sequence
  ENSG00000214113_4 (sequence is synthesized)
agcaagccggggaccagccaccagtggcggccagggaccaccttcagcatccactctctgtttgagatgggggctcccaaaaccagcttacaatagccttttgcgctgcctgtcctgtgg

SEQ ID NO: 758121 - DNA, 120 bp, Artificial Sequence
  ENSG00000214113_5 (sequence is synthesized)
gagctgataaaccaagtcacatttgcattctgttgcaggcttagtgaaaaaggactgctgtctttccttggttcaagtgttagaatggagagctggagttcgttcagaatagtgctgtgt

SEQ ID NO: 758122 - DNA, 120 bp, Artificial Sequence
  ENSG00000214113_6 (sequence is synthesized)
gttaccacgtctcccctgcaccccattcctaccttgtagctcatgaccattgtgtatagcatttctacactttgtttcttggtccttggcaataaaaagaatgatctccctgagcctttg

SEQ ID NO: 758123 - DNA, 120 bp, Artificial Sequence
  ENSG00000214113_7 (sequence is synthesized)
accccagataaacccctcccaattaatgcattttcatttcctactgatacaaggcctggagagggctgttgggggccctcagggagggttcaactctgagacgagaactgccttggtgaa

SEQ ID NO: 758124 - DNA, 120 bp, Artificial Sequence
  ENSG00000214113_8 (sequence is synthesized)
ggcaagttcaagcaccacttgagactgggggcagcatggagtagggcagggctacggggatacacggtgcaccctgcaacttatacctgagcccagtacaacaaaggtgacgggtgtgta

SEQ ID NO: 758125 - DNA, 120 bp, Artificial Sequence
  ENSG00000214113_9 (sequence is synthesized)
ggtacacacccagagatggagcactgcagatcagcaacctcagccccacctgggaatttgctggaaatgcaggctcaagcccctccccacacctggtgaatgagagagccccagcctgac

SEQ ID NO: 758126 - DNA, 120 bp, Artificial Sequence
  ENSG00000214113_10 (sequence is synthesized)
ccaagcccagggcgactcccataccctgaagcctggggcatgctgggcagcaccggtgcccaaatctggctggtggacagaagcacctggagagttggagagctttttaaaaagacatct

SEQ ID NO: 758127 - DNA, 120 bp, Artificial Sequence
  ENSG00000214113_11 (sequence is synthesized)
ctcagcacttccctctctgcagattctgactcagtaagtgaggggtgaggcacagtcatttttctctattctgaagctctcccactgttttcaatgtttaaccaactggggacccctgct

SEQ ID NO: 758128 - DNA, 120 bp, Artificial Sequence
  ENSG00000214113_12 (sequence is synthesized)
ctttaagtatattacaggtaataaagatattgtttgtatgcttttattcttggaaacagattcattccaaacatagaaagaacatattaaataacttgcttgtcatctggggagtttacg

SEQ ID NO: 758129 - DNA, 120 bp, Artificial Sequence
  ENSG00000214113_13 (sequence is synthesized)
agggaccagacctggcagagcggtttcttgtttccctttgcatacagtgctcagtggatttggtatctgtgggttaaggtttggaacaggctcctataaatagcaccggtcctggaatag

SEQ ID NO: 758130 - DNA, 120 bp, Artificial Sequence
  ENSG00000214113_14 (sequence is synthesized)
ctgcagcactgtcaccccctcattttaactccgacggtcatgggagtgagtacgcactgtctgagcccgtgttcttctcaccctcatatgagaactcatgtcttccagtcgcttttagag

SEQ ID NO: 758131 - DNA, 120 bp, Artificial Sequence
  ENSG00000214113_15 (sequence is synthesized)
agagagcatagatttgctgcaatgatgcgttcaaatagatgtaacgtgtagccattctatttggcagtacaacttttgatttcaggataaagtctttttttttgagatggagtctcgctc

SEQ ID NO: 758132 - DNA, 89 bp, Artificial Sequence
  ENSG00000214113_16 (sequence is synthesized)
ggccccccaaagtgctggtattacaggcatgaaccaccaccccctgccaatttcaggataaagtcctgagcatctgtgaaaataatgaa

SEQ ID NO: 758133 - DNA, 120 bp, Artificial Sequence
  ENSG00000214113_17 (sequence is synthesized)
atttcaggataaagtcctgagcatctgtgaaaataatgaagctcttagcaagtcccagatctcttaccctctaaccagttcctgcctgggagctgcagtgttagagcatatgcaaagccc

SEQ ID NO: 758134 - DNA, 120 bp, Artificial Sequence
  ENSG00000214113_18 (sequence is synthesized)
taattgggggagagctgttcggtggacagtgaacggaggtgatgtggcaagtataatcactcccttcagctgactgtcacggggcagagccgcccagcccagccctgtgtgtggctctgg

SEQ ID NO: 758135 - DNA, 120 bp, Artificial Sequence
  ENSG00000214113_19 (sequence is synthesized)
ctcaggttttccaccttgcatcagtgcagtggagttcgtggtcactcagcagtgaatgcatccaaccacgctactaacgcacggcactgctgatttatacttaatttaagcaactgctac

SEQ ID NO: 758136 - DNA, 120 bp, Artificial Sequence
  ENSG00000214113_20 (sequence is synthesized)
ttggaaccgaagtccagatttgaacctccgtgctgaaggcatcaaattgccggcaagataacagctccagaggagacttctcccactcccccaggttttacgcaatgaggcagtccaccc

SEQ ID NO: 758137 - DNA, 120 bp, Artificial Sequence
  ENSG00000214113_21 (sequence is synthesized)
aaacttaacgtgggctgcaggctgtaacagcaggttgcttttgtgttcattaaactgcatgaatgggtttgaacatgcccaaagccttgctaatgcagacttaattttgtaaaattaact

SEQ ID NO: 758138 - DNA, 120 bp, Artificial Sequence
  ENSG00000214113_22 (sequence is synthesized)
atgcctttggaatctgcagaaagatacaaatccgaattctgtggcaggaaacgccacaaacaggccttggtcctccacctttcaggtgtatatctggcaggcagagcctggcactgggta

SEQ ID NO: 758139 - DNA, 120 bp, Artificial Sequence
  ENSG00000214113_23 (sequence is synthesized)
ctccccaactgagatgacccaatattgatgctagagcttcgaataaagtggcattcccatgggggtgacccctggtgtttctctagggaagtattccacctccttgactatgcaccaact

SEQ ID NO: 758140 - DNA, 120 bp, Artificial Sequence
  ENSG00000214113_24 (sequence is synthesized)
gaggggaatgtgggcaactccaacatccatcatggccagcctcacagaactctctagaacttgtgcctgctttgaagataggatccgggctggggtctggagatcactttgcagcactaa

SEQ ID NO: 758141 - DNA, 120 bp, Artificial Sequence
  ENSG00000214113_25 (sequence is synthesized)
tattgagcaaatgagaactactatcattagttaacttcccaggcagaactcattggccgagcaaggctatatcctagactttcagagacagctctgggctgggctggctgtcatgacata

SEQ ID NO: 758142 - DNA, 120 bp, Artificial Sequence
  ENSG00000214113_26 (sequence is synthesized)
atagctgggagatcttgcacggccaagtacagggctgtgttgttctgatggctgttggaatctggattttggaactgaaagaattggctagattgctttaggtatactccgtcctgctgc

SEQ ID NO: 758143 - DNA, 120 bp, Artificial Sequence
  ENSG00000214113_27 (sequence is synthesized)
taactaagtagcagtgacctttaactcccttcatccacagcctctcccgttaatctcaagccccaccatacaacccaccatcatccaggagcaaaagggacaggcagagggtgaagccta

SEQ ID NO: 758144 - DNA, 120 bp, Artificial Sequence
  ENSG00000214113_28 (sequence is synthesized)
caaagatgacaaacatcagagctcacctagtccaaccctcaaatcttcaggtgttaaaacaaagagcctgaacatctgcagatcacgtacagagtcagggcctttcccctaaaccccttt

SEQ ID NO: 758145 - DNA, 120 bp, Artificial Sequence
  ENSG00000214113_29 (sequence is synthesized)
gcagggaaatctgagaagaaaatgacaagtcttatgaatgttacaaagagggaaatatgagtgctgccagagccgatgggacgggccagggaagggctccccaggggatatttacacgtg

SEQ ID NO: 758146 - DNA, 120 bp, Artificial Sequence
  ENSG00000214113_30 (sequence is synthesized)
caaattaatgatgaggattggctgtgtgaaggtggggagaggagctctctaggcaggaggaacagcacatgcaaagcccttaattgggggagagggtagttccatgcaaagaactaaagg

SEQ ID NO: 758147 - DNA, 120 bp, Artificial Sequence
  ENSG00000214113_31 (sequence is synthesized)
gagtctgggatggtggcagccaaggaagagggctctttccacatcgtggacggccttggagcctcagcctaaggatggtgagcaactcgggagtttttaggcaagatgaggtttttgttt

SEQ ID NO: 758148 - DNA, 80 bp, Artificial Sequence
  ENSG00000214113_32 (sequence is synthesized)
acaggcgcacgccaccatgcccagctaagttttatattttttagtagacacaggccagatgatccgcctgcctcggcctc

SEQ ID NO: 758149 - DNA, 120 bp, Artificial Sequence
  ENSG00000214113_33 (sequence is synthesized)
gattacaggcgtgagccaccgcccccgaccgaagtttgtattttttaaaaggtcacattgtctgcttttgaggggatacactgggagagatgcagggagaccagcttttcggaggagtgg

SEQ ID NO: 758150 - DNA, 120 bp, Artificial Sequence
  ENSG00000214113_34 (sequence is synthesized)
gatgcagggagaccagcttttcggaggagtgggggattgggtgtggcattccaggcaagcgatggtgacttcaccaagaggcaacagctgaacagaagcagagtcagcatcaccctgaga

SEQ ID NO: 758151 - DNA, 120 bp, Artificial Sequence
  ENSG00000214113_35 (sequence is synthesized)
actggctggggtgggccgccattgaaggaggacaggaaacctggagcagagctgccccagctgagcacagcccgagctccccagcccacctgccgatgcgcgagaaagtccacagagtcc

SEQ ID NO: 758152 - DNA, 120 bp, Artificial Sequence
  ENSG00000214113_36 (sequence is synthesized)
cctagcctggtctagcttaggtcagtcatattcagccacccctcagacatgtgctaaataattaactgttacattagtcactgagtttggaggtagattattatgaagtaacagcaaact

SEQ ID NO: 758153 - DNA, 120 bp, Artificial Sequence
  ENSG00000214113_37 (sequence is synthesized)
aatacagagagcatctctgtattaatgtattaatgtattactttctcagggccacatagcaaaccaaagagtaggcagacaaacggccaaaactgcaggtctcctgtatggggacatttc

SEQ ID NO: 758154 - DNA, 120 bp, Artificial Sequence
  ENSG00000214113_38 (sequence is synthesized)
cacaaatatcttcagaatactggtcactccctttagagaacaagtcctggagaaacagtcgaaacagtcatcacgtgtcctacagatggaagggctggccaaccagaaagaaaagaaaaa

SEQ ID NO: 758155 - DNA, 120 bp, Artificial Sequence
  ENSG00000214113_39 (sequence is synthesized)
gtcgagtcagcagaacttggtgattgattggatgaggagaccaggcctgagggctgcagggagtctaggaggagtctcaggagcagggcctgaggaactaagaaggggctctggctgaga

SEQ ID NO: 758156 - DNA, 120 bp, Artificial Sequence
  ENSG00000214113_40 (sequence is synthesized)
ccagacaggagcagccactgtctggaattttgtccccactgctgacttcgaacaacctcaacttcaaacagaaagcccagactcgatgaatttatcttttcttcaaagtagagaaagggt

SEQ ID NO: 758157 - DNA, 120 bp, Artificial Sequence
  ENSG00000214113_41 (sequence is synthesized)
agctcttttcttcccaggaaattgtttatccatttaataatttttaaaaatcactggagttgggtgtggtggctcatacctggtaatctcagcactttgagaggccgaagtgggcagatc

SEQ ID NO: 758158 - DNA, 84 bp, Artificial Sequence
  ENSG00000214113_42 (sequence is synthesized)
tgaaaccctgtctatacaactgttgtcctagctactctggagcctgaggtgggaggatcacttgagcctggaaggcggaggttg

SEQ ID NO: 758159 - DNA, 73 bp, Artificial Sequence
  ENSG00000214113_43 (sequence is synthesized)
tgtggtggcatgcaactgttgtcctagctactctggagcctgaggtgggaggatcacttgagcctggaaggtg

SEQ ID NO: 758160 - DNA, 120 bp, Artificial Sequence
  ENSG00000214113_44 (sequence is synthesized)
ataaaacaactcgaaagacccttataaagattttacccgtaactctgtagagcaaataacttcctgctttaggcaaagctctttgtgtgtaagttcgattggaagaggagggctggtggg

SEQ ID NO: 758161 - DNA, 120 bp, Artificial Sequence
  ENSG00000214113_45 (sequence is synthesized)
gggagattctctactttggtcatgagattaacattaaaagtttgaggaaggttgctctatatattggctgcctgtttctaagactgaaaataaaagcacagtaaaatatcaacaagtata

SEQ ID NO: 758162 - DNA, 120 bp, Artificial Sequence
  ENSG00000214113_46 (sequence is synthesized)
cagaaaatatacatttgtagaaaattagcttttttttttttttttgctaagtacttcatataaactagtatttgctttctagattaaagaatatctcctccaggtgtggtggctcacacc

SEQ ID NO: 758163 - DNA, 77 bp, Artificial Sequence
  ENSG00000214113_47 (sequence is synthesized)
caggcgtggcgaattgcttgaagccagaggcagaggttgcaatgagccgggatcacgccactgaactccagcctggg

SEQ ID NO: 758164 - DNA, 120 bp, Artificial Sequence
  ENSG00000214113_48 (sequence is synthesized)
aaaaaaaaaaaaaaaaaaaaaatatctcagatattgaagcgaacctataaataacagcagaagctgaagaaaagataacggatcaaaaagcagaaggagaaagcttccctgtccccaagg

SEQ ID NO: 758165 - DNA, 120 bp, Artificial Sequence
  ENSG00000214113_49 (sequence is synthesized)
aagcttccctgtccccaaggacctgcccacagtcgtggatgagaagtcccttgataagtagggtctgaacccacgtgatcaaatgttagctctgtgaacctgtgccagtggctgtgtgtc

SEQ ID NO: 758166 - DNA, 120 bp, Artificial Sequence
  ENSG00000214113_50 (sequence is synthesized)
agtagcccagggtgattcagaagctccatgaagcagccatctttcctggatctctggaatgtacacatttgctgagatcacaaagatgaagctggcagaacccgagtggatattcattat

SEQ ID NO: 758167 - DNA, 120 bp, Artificial Sequence
  ENSG00000214113_51 (sequence is synthesized)
tacgaacagaagaacagccaacaggagccgtgccatgtgcaaccccgagttgacagatgcctccccgcttcttctgtgtttgccagttgttacaaaatgatctagagaaaaactggaact

SEQ ID NO: 758168 - DNA, 120 bp, Artificial Sequence
  ENSG00000214113_52 (sequence is synthesized)
tgatggagaaagcaatggcttacgattcagcaggctttcttggagagtttacctaaagtctatgtggacggtggctcagctcacctctgagaacaatacgatcttcacttttcaatcttt

SEQ ID NO: 758169 - DNA, 120 bp, Artificial Sequence
  ENSG00000214113_53 (sequence is synthesized)
ctgcagctctaattagtgccacagggaaccatggatgaaaatggcttctcgtgttgatatccatttggggaataggatggatgcagctgcttttgctcaagggcagagttttgacttcaa

SEQ ID NO: 758170 - DNA, 120 bp, Artificial Sequence
  ENSG00000214113_54 (sequence is synthesized)
agaccctgaagagaacccagaaggaaaactctcagaggtcaatggactatattctttacctgggggatcgttgacaccacagcagtaaaagcgaagtcagtgtcgtgctgtcttgaaatt

SEQ ID NO: 758171 - DNA, 120 bp, Artificial Sequence
  ENSG00000214113_55 (sequence is synthesized)
agatgacaagaatgactgacaccaatagagctggaactgcacttggagcctgagtagccggtctcaggctaaccacacctgtgctgaccacagcgtggcccgtgttgttcatgaggcatt

SEQ ID NO: 758172 - DNA, 120 bp, Artificial Sequence
  ENSG00000214113_56 (sequence is synthesized)
ctggctgtacctccacagggatgcaagacttccagtgagaggctgcttctgcaagaaaatacctgcctagaaatggtccgctttctcttcctaataaagtgataagctttcttagtccaa

SEQ ID NO: 758173 - DNA, 120 bp, Artificial Sequence
  ENSG00000214113_57 (sequence is synthesized)
ctgataggccacagctgctgctggctctgcagccttggcagagttgcaaataggttaaacggagatgggagttctagttctcttttgcttcagccagcttccttttctggctaaatctga

SEQ ID NO: 758174 - DNA, 120 bp, Artificial Sequence
  ENSG00000214113_58 (sequence is synthesized)
tcggggaacagcagccggagcctggggaagccctgcacaagttggccttgaggaaaccacctgacagacgtttgctcttcctcacagagctggtccacattggccaactgtattcaactg

SEQ ID NO: 758175 - DNA, 120 bp, Artificial Sequence
  ENSG00000214113_59 (sequence is synthesized)
ctttccaaaatggcagcctccagtcgcgcacaagtgttatctctgtaccgggcgatgctgagagagagcaagcgtttcagcgcctacaattacaggtccacattggccaactgtattcaa

SEQ ID NO: 758176 - DNA, 120 bp, Artificial Sequence
  ENSG00000214113_60 (sequence is synthesized)
agtcgcgcacaagtgttatctctgtaccgggcgatgctgagagagagcaagcgtttcagcgcctacaattacagcagtcctttctttccctggccatgctcacaaagctgggacctacat

SEQ ID NO: 758177 - DNA, 120 bp, Artificial Sequence
  ENSG00000214113_61 (sequence is synthesized)
gcccctgagtactttgcccaggatgtcttgtctttggaactccactcctccccagcttggcaaaacccttggtgtgctcttcttttaaaacaggatggagtctcactctgtcgcccaggc

SEQ ID NO: 758178 - DNA, 79 bp, Artificial Sequence
  ENSG00000214113_62 (sequence is synthesized)
gctggagtgcagtggcgtgatctcagcaacctccacctcccaggttcaaggcgcgtgccaccatggcctatatattttt

SEQ ID NO: 758179 - DNA, 120 bp, Artificial Sequence
  ENSG00000214113_63 (sequence is synthesized)
gtttcaccgtgttggtcaggctggtctcagacttgtgacctcgtgatccacccgtctcgacctcccgaagtgctggaattataggcgtaagccactgcacccatcctcacctgcactctt

SEQ ID NO: 758180 - DNA, 120 bp, Artificial Sequence
  ENSG00000214113_64 (sequence is synthesized)
ataggcgtaagccactgcacccatcctcacctgcactcttactggccccttaactgggtcccctcgccacaactctccacctcttcttcgccttgacctgaagacaaggtccacattggc

SEQ ID NO: 758181 - DNA, 120 bp, Artificial Sequence
  ENSG00000214113_65 (sequence is synthesized)
gaaccactgtgcccggcagacaattataatttttatgtagttacatttcacttcattgtctttgaattttgtgtcatgctgaattcccactccaagacaataaaaattctcttgcatttc

SEQ ID NO: 758182 - DNA, 120 bp, Artificial Sequence
  ENSG00000214113_66 (sequence is synthesized)
gccaccagatttgatggtgtatgaattatatctccataaagctgttaagagacatcaggaagagaccagagtttcttctgtgcggagccctctgccacaggaaaggaaggaagtctaccc

SEQ ID NO: 758183 - DNA, 120 bp, Artificial Sequence
  ENSG00000214113_67 (sequence is synthesized)
acaacacctgggattgttgaaatggaagtaatcgattactagaagccattaattgaaagctgtgtgccaggcattgtagtaagacattataaataccatctaacttatgtaaaattgaca

SEQ ID NO: 758184 - DNA, 120 bp, Artificial Sequence
  ENSG00000214113_68 (sequence is synthesized)
ttatcccattctgtaggtaaggaaactgagactacagggttaggtgaaacccaaggtttcggagccagtgattggcagagcaggtgtttaaaccaggtttgtcttgggacaaaccccagg

SEQ ID NO: 758185 - DNA, 120 bp, Artificial Sequence
  ENSG00000214113_69 (sequence is synthesized)
ctcttaagtactacattatcgtgtcttcccgcttctccaccctcaacccagccccagtcaaaaaggcagcaggaaaggggacaagttatcatttagaagaatactgatttggttttaaaa

SEQ ID NO: 758186 - DNA, 120 bp, Artificial Sequence
  ENSG00000214113_70 (sequence is synthesized)
gtattgaatagaatgaccaaatgatctagtgattccatttctcagtatataccccagagaactgaaagcagggactcaaaaggatacttgcccaccagtgttcagagcagtattattcac

SEQ ID NO: 758187 - DNA, 120 bp, Artificial Sequence
  ENSG00000214114_0 (sequence is synthesized)
agtcgcggtctccggcgccagctacgccgctgccgctgtcactatggcccattacaaagccgccgactcgaagcgtgagcagttccggaggtacttggagaagtcgggggtgctggacac

SEQ ID NO: 758188 - DNA, 120 bp, Artificial Sequence
  ENSG00000214114_1 (sequence is synthesized)
gctgaccaaggtgttggtagccttatatgaagaaccagagaaacctaacagtgctttggattttttaaagcatcacttaggagctgctactccagaaaatccagaaatagagctgcttcg

SEQ ID NO: 758189 - DNA, 120 bp, Artificial Sequence
  ENSG00000214114_2 (sequence is synthesized)
cctagaactggccgaaatgaaagagaagtatgaagctattgtagaagaaaataaaaaactgaaagcaaagcttgctcagtatgaaccacctcaggaggagaagcgtgctgaataggattc

SEQ ID NO: 758190 - DNA, 120 bp, Artificial Sequence
  ENSG00000214114_3 (sequence is synthesized)
ttctcagtttgaaagacaatgaaaaatggttttgtatgacttgaatagtttgtatagtatataatcttttctgaacagatgctatagaactcttttaatatgtttaattcacctatcaca

SEQ ID NO: 758191 - DNA, 120 bp, Artificial Sequence
  ENSG00000214114_4 (sequence is synthesized)
ctctgttaaaaacacatagaatcatcaataaaaactcaatataactttctttgggtcttaaagcaggagaatccaaagtaaatcctgaacaaaacctaaacacagccatctaactcatta

SEQ ID NO: 758192 - DNA, 120 bp, Artificial Sequence
  ENSG00000214114_5 (sequence is synthesized)
ccttaaaagacattctgtttattagtctgattaggaatgatggcactggttgtattttagccaagacagtttagcatggagctattccttggtgcagttcaggatatgaacacaggtaca

SEQ ID NO: 758193 - DNA, 120 bp, Artificial Sequence
  ENSG00000214114_6 (sequence is synthesized)
gtcattctttgaaggtgacactgttctgtatattccctataggcagctggagagatctgtgtgacacaagatgcttttgtacgggttcccatgaatcttctgctcttgtttgtgtgacat

SEQ ID NO: 758194 - DNA, 120 bp, Artificial Sequence
  ENSG00000214114_7 (sequence is synthesized)
ggaacaaataacttctttgccaccactttgccttagataactgtgtgtgtgtgtgccagtttgaactctgacaccacattttccttctatgcaatcatgcctgtctgataatcttgcatt

SEQ ID NO: 758195 - DNA, 120 bp, Artificial Sequence
  ENSG00000214114_8 (sequence is synthesized)
gctttcctctgagctttagtgggtcctagttgcacactggcctttctgtgctgtttttcaatttgcctaataatagcagttaccctgattgtaatttatgtaactttaaacaggatcaca

SEQ ID NO: 758196 - DNA, 120 bp, Artificial Sequence
  ENSG00000214114_9 (sequence is synthesized)
ctgtaccccctgcctgccttatttgcttactgagcacaggacagaggcaatatacaactctgggttcacacacaagctgagatgagaagaggaatgagccatatattggggaaaatcata

SEQ ID NO: 758197 - DNA, 120 bp, Artificial Sequence
  ENSG00000214114_10 (sequence is synthesized)
aattatatagtgcttttctccctcaaagtatttttctagccttgaattcattttatcttcattatccctgtgaagtaggtgggacaagtataaggggaagaggggtgctgaatttttagg

SEQ ID NO: 758198 - DNA, 120 bp, Artificial Sequence
  ENSG00000214114_11 (sequence is synthesized)
ccaaagactgatattaatacaaatcactcactaactgtagagccttgggcattatcagtgaactactctgagatttactgtcttcatctgtttaatgagtagaatgtccgtgatgcctac

SEQ ID NO: 758199 - DNA, 120 bp, Artificial Sequence
  ENSG00000214114_12 (sequence is synthesized)
ctcacagggttgttgtgagggtcaaatgagaatgtatgtgaaagatttgtaaatggtaaagcactatattcttgtttgttagtcctttttcctttctttgggtagacctacagtcagatg

SEQ ID NO: 758200 - DNA, 120 bp, Artificial Sequence
  ENSG00000214114_13 (sequence is synthesized)
ttttgttttatggatcacttattttccttactggtagactgtcgttttatagacatattcctatttcatatattctctccctgttgttagagaacctatctttgtttttggtcaaaacac

SEQ ID NO: 758201 - DNA, 120 bp, Artificial Sequence
  ENSG00000214114_14 (sequence is synthesized)
acatagaaaacaaaatgatccaatgaaaactggtttaactagcaaaagccttggcacctgttggagactatgaccaagccaataaaaagggcatttaaatcagccctgttagtaggaatg

SEQ ID NO: 758202 - DNA, 120 bp, Artificial Sequence
  ENSG00000214114_15 (sequence is synthesized)
tggctatggctggtgcctcttctagtcacaagtttgtttttggagggggtccagaagatcattcccttgcatagatttctcttttaccaatttgagtgcctcctacatgggcagcagtgg

SEQ ID NO: 758203 - DNA, 120 bp, Artificial Sequence
  ENSG00000214114_16 (sequence is synthesized)
actaagtgctgggtgtgataaagaggaatgacttaattatgagactgtatataatcaaatacagtgtgggttaggacctgtggcagaccattataataaagcatggccccgtgagggttt

SEQ ID NO: 758204 - DNA, 120 bp, Artificial Sequence
  ENSG00000214114_17 (sequence is synthesized)
tgaaagagagagagacttggcttccttagttggtatgatagtttcttggtagatacaggttgaaaattttttgtggcagccaatcctcatgggctttttactcatttgattagtattaat

SEQ ID NO: 758205 - DNA, 120 bp, Artificial Sequence
  ENSG00000214114_18 (sequence is synthesized)
atttatgtcagtaagccaggtgactgtgactgtctttggtaccatcctttttgaacagaaaggcaacatgtgggttggataatcacacttttaggtgaaactgacttgcttaaactgtaa

SEQ ID NO: 758206 - DNA, 120 bp, Artificial Sequence
  ENSG00000214114_19 (sequence is synthesized)
cagtcagtgctatttaagaattcaggataagcttagcctctagaggtcctcttcaacatttctgtcaaggatttggatgaatacaacaagatgctccatggaagagaaaatggataaatg

SEQ ID NO: 758207 - DNA, 120 bp, Artificial Sequence
  ENSG00000214114_20 (sequence is synthesized)
gatcccaccagttaagctcctattatgcttcagctgctttgtctataaaatatcgacttcacatcttgcctatctcacaagttggttgtaagaatcaaattaaatataatggatgtaaaa

SEQ ID NO: 758208 - DNA, 120 bp, Artificial Sequence
  ENSG00000214114_21 (sequence is synthesized)
cggcgtggctgggggcatgcgggcggtagcaagccgctggtcggctctgggtgggagtggggtcgcgcgcgcaggtttgggcgggagggccccgaggtagtgaggcggaggcggggttgc

SEQ ID NO: 758209 - DNA, 120 bp, Artificial Sequence
  ENSG00000214114_22 (sequence is synthesized)
cggactcccagcgccttcttcctgctcggctcccgggctctggccactgacccccggtgtctcttcaggccgccgactcgaagcgtgagcagttccggaggtacttggagaagtcggggg

SEQ ID NO: 758210 - DNA, 120 bp, Artificial Sequence
  ENSG00000214128_0 (sequence is synthesized)
agagttgctttccagctcctgcaggtgggagtcgactcacctgcagcaggcactcggcacaactccgcaggaccggctcacctgcaccgggcactcagcacagcctccagcatgcagcgc

SEQ ID NO: 758211 - DNA, 120 bp, Artificial Sequence
  ENSG00000214128_1 (sequence is synthesized)
ctccccgctgccacccgggccaccctgatcctcagcctggcctttgcctccctccactcggcttgctcggcagaagcaagcagcagcaacagctcaagcttgaccgctcaccacccagac

SEQ ID NO: 758212 - DNA, 120 bp, Artificial Sequence
  ENSG00000214128_2 (sequence is synthesized)
cctgggaccctggagcagtgcctcaacgtggacttctgcccacaagcagcccggtgctgccgcacaggagtggacgagtacggctggatcgcggcagctgttggctggagcctctggttc

SEQ ID NO: 758213 - DNA, 120 bp, Artificial Sequence
  ENSG00000214128_3 (sequence is synthesized)
ctcaccctcatcctgctctgtgtggacaaactgatgaagctgactccagatgagcccaaggacttgcaagcgtgagacccaggctcggtgcacaaaatggtgatcgccaccaatttgtgg

SEQ ID NO: 758214 - DNA, 120 bp, Artificial Sequence
  ENSG00000214128_4 (sequence is synthesized)
ctaatggggaaggggagtaaggctaacatggtttctattatttaagtcattttcacctttaagcttcagttacttttacaagggaaagaagaaagagcgggagaaccaaataaggcaagc

SEQ ID NO: 758215 - DNA, 120 bp, Artificial Sequence
  ENSG00000214128_5 (sequence is synthesized)
cagtgctgcccttgcatgtcactcccaagggcccctgggctgtgcccaggtaactcctctctcaagatagtccctctgtaatgtatcctgttttaacctttcttctaggcaccaagggag

SEQ ID NO: 758216 - DNA, 120 bp, Artificial Sequence
  ENSG00000214128_6 (sequence is synthesized)
gtgcacaagaaactataagacttagtctcatcatcaacattttcagaagcaagtgcataaccttctcaccaaaaccaggttatctgcttctgtccctggcttgagtcctgggcttaactg

SEQ ID NO: 758217 - DNA, 63 bp, Artificial Sequence
  ENSG00000214128_7 (sequence is synthesized)
tatctgcttctgtccctggcttgagtcctgggcttaactgtcatttcagaatctgagaatcag

SEQ ID NO: 758218 - DNA, 69 bp, Artificial Sequence
  ENSG00000214128_8 (sequence is synthesized)
cagcctgggcggcagagcaagactctgtatcagaaaaaaaaaaaaaaaaaagaatgtgaggatcacagg

SEQ ID NO: 758219 - DNA, 90 bp, Artificial Sequence
  ENSG00000214128_9 (sequence is synthesized)
tttgatggcaagaccttgtttctgtttaaaaactttttaaagttaaaaataaaaatgtgagaatccccttgacactcccaccatcttcac

SEQ ID NO: 758220 - DNA, 120 bp, Artificial Sequence
  ENSG00000214128_10 (sequence is synthesized)
aaaaatgtgagaatccccttgacactcccaccatcttcacccccacctcaggtccttctccagctctccttctggcttcatcctgtcttccacggctctcctgtcccacctattctccct

SEQ ID NO: 758221 - DNA, 120 bp, Artificial Sequence
  ENSG00000214128_11 (sequence is synthesized)
gccggtgcccaagttttagccttcactgccttcccctagaacacgccagggatattgcattctgtcctcactgtcttgaggatcttcctccccggctcatcactccccatgggcagctgc

SEQ ID NO: 758222 - DNA, 120 bp, Artificial Sequence
  ENSG00000214128_12 (sequence is synthesized)
cagggtaggcgctgtcaccttctgttgacaacagtcagtagctcctaaggactaaaactgttcagcccagcattcagctctttggaggagtccatctgtcccccagcacatccaggagta

SEQ ID NO: 758223 - DNA, 120 bp, Artificial Sequence
  ENSG00000214128_13 (sequence is synthesized)
aggattccgactggtccactcctcatcctggtgtcttcagcttctctgctgccatgttctttgctgggatggctgcttcccaactccacctccagaatcaaggatattcctccaagccca

SEQ ID NO: 758224 - DNA, 120 bp, Artificial Sequence
  ENSG00000214128_14 (sequence is synthesized)
gctcgaatgcttgatctgcctggagccttcctggtcatccttgggtgacctggagctggtgctgttagagcacttctgctctgccctgatgtgcagttgttgtgaatgggccactccata

SEQ ID NO: 758225 - DNA, 120 bp, Artificial Sequence
  ENSG00000214128_15 (sequence is synthesized)
gtttatccttcctcacacccctggggcatagtaccctattcaagtttgtccaatgagtgcatgggtgaattaatgaatgaatgaacaaatgagtctttgccctagacaacttaaggtcct

SEQ ID NO: 758226 - DNA, 120 bp, Artificial Sequence
  ENSG00000214128_16 (sequence is synthesized)
accagcctctgaaggagccaatggtttggtcactgctctctcagcaaattacagtcactgtcacttagcatggagagtggacgttgcacatcactgtgaaaccttgcagaggaggagagg

SEQ ID NO: 758227 - DNA, 120 bp, Artificial Sequence
  ENSG00000214128_17 (sequence is synthesized)
gcaggttcatcagaagaaagaaaggacaaaatgactccttatgaagcattttgtgccttctgtgagaaaacatgtatttagatcagataaactctagtcaaaatacaaaaaggaaaaatg

SEQ ID NO: 758228 - DNA, 120 bp, Artificial Sequence
  ENSG00000214128_18 (sequence is synthesized)
aaagacctctgaaataggaacaatctcttgaagaggcaaatgactcaaaactgctcagtggctctttcagaaaatctaagtaaagttccctgacaacagaaactgaagagattgcctggt

SEQ ID NO: 758229 - DNA, 120 bp, Artificial Sequence
  ENSG00000214128_19 (sequence is synthesized)
tcatcttgtagtcttccaaaacagcagataatttctgaatctcagatgttgaatcagtgcaacgggatggatttcttgttcctaagtgttaaatgatcacatacataaaagagtctgagc

SEQ ID NO: 758230 - DNA, 89 bp, Artificial Sequence
  ENSG00000214128_20 (sequence is synthesized)
gaccctgtctctacaaaaaaaaaaaaaagattagccaggcgtggtggtgcacactgacggatcacttgagctagagagttcaaagctgc

SEQ ID NO: 758231 - DNA, 86 bp, Artificial Sequence
  ENSG00000214128_21 (sequence is synthesized)
ggaaaaaaaaaaaaaaaaagcgtctgcataattcctggtgcattttgtggatatacaatatgagtatgtgttccatgttttcagaa

SEQ ID NO: 758232 - DNA, 120 bp, Artificial Sequence
  ENSG00000214128_22 (sequence is synthesized)
gtggatatacaatatgagtatgtgttccatgttttcagaaattcaaaggaagcgtttccacaatatgtgacggtttatttcccaagagatgaaaagattcattaaggtgcatgctttgat

SEQ ID NO: 758233 - DNA, 120 bp, Artificial Sequence
  ENSG00000214128_23 (sequence is synthesized)
ttaacatctgcaaacatttaaaaaatataacagtgtgtgacgtagcagtgagagtactatctttttttaaaaagggaaattaagatttatttctggccaatgtgaacagaaataagtcac

SEQ ID NO: 758234 - DNA, 120 bp, Artificial Sequence
  ENSG00000214128_24 (sequence is synthesized)
tttatctcactgagcaccaattttacacgtggaaaatagaagaattggaccaaatcagcagtttcaagctgagttgcaaaagttcatggaaccatttcagtcgcttcatggaatcggggt

SEQ ID NO: 758235 - DNA, 120 bp, Artificial Sequence
  ENSG00000214128_25 (sequence is synthesized)
aggcatgaggcccgttgttctttcaacctgagccgcatggctcttgtgtctttaaaccttgtggtaggatttttttttttttctgctttaataagtgaagggtcagggcaccagttggtg

SEQ ID NO: 758236 - DNA, 120 bp, Artificial Sequence
  ENSG00000214128_26 (sequence is synthesized)
tctgagatgccctccagtctggggaaccccgtagatgcttagactactttgaactgaagtatgtgcagtctgccatctcacattaaaatgtaggcattttgtcaattgcttttctttcat

SEQ ID NO: 758237 - DNA, 120 bp, Artificial Sequence
  ENSG00000214128_27 (sequence is synthesized)
ctgcacaagaggaaggagagaacgaatcaatacaaccactcttttccttgagactgcaaagaaaatggttctatagtttgatggttctacttcccagatgctacctctcagatttattct

SEQ ID NO: 758238 - DNA, 120 bp, Artificial Sequence
  ENSG00000214128_28 (sequence is synthesized)
ctctcagatttattctcaacagaaaattttttgattacagcagaccagatctttatctgtcaataagttaaaaaagataatctgggctggatgtggtggctcactcctgtaattccagca

SEQ ID NO: 758239 - DNA, 66 bp, Artificial Sequence
  ENSG00000214128_29 (sequence is synthesized)
ccagcctgggcaacatggcgaaaccccacctctacaaaaaaatacaaaaaaattatttgggaattt

SEQ ID NO: 758240 - DNA, 120 bp, Artificial Sequence
  ENSG00000214128_30 (sequence is synthesized)
aaaaaataaagaaaagaaaatctgaaagggaaagcaggcatcaacttccagggatctaataacttcctaacttaaagcaacagaacttacctaacttttggacttttcattttaaaactt

SEQ ID NO: 758241 - DNA, 120 bp, Artificial Sequence
  ENSG00000214128_31 (sequence is synthesized)
tgcctctagcagtggacactgtcctcaacacagctacagtttatgtaacacagagtccatattatatggggcatgtctgtatcaaaatgtcatatgtagaaataaagtattaaatattaa

SEQ ID NO: 758242 - DNA, 120 bp, Artificial Sequence
  ENSG00000214128_32 (sequence is synthesized)
gggaaacaaaggcctccccgctttccgttgattggtgtcaagtgggcaagggcctgcctggccttcctgtgcaccagtgtggtttgtcccagaactatttgcagagcaggtctgaaaggc

SEQ ID NO: 758243 - DNA, 120 bp, Artificial Sequence
  ENSG00000214128_33 (sequence is synthesized)
tttcttggctctgatccccatctaggtgcacaatctttgacacagattgctttaatgacccatcccaggtcagcagctaacaatgccctaggttcaaatgcttgaagaagtttggaggtg

SEQ ID NO: 758244 - DNA, 120 bp, Artificial Sequence
  ENSG00000214128_34 (sequence is synthesized)
gaaaggccataagaaatcatctagtccaacttccacccaatgcaacagcttggttttggcgtccttggcatacatatttcttcttcttctatgcacgtttttcctcttcttgcctacttc

SEQ ID NO: 758245 - DNA, 120 bp, Artificial Sequence
  ENSG00000214128_35 (sequence is synthesized)
tgcctcagaagcggatacttggcaaatctgcgaggcgaggccgatcagctgtggaagttctgcacggtgctctgtttctgggagagccggaggagctcctcgcggattgctttgatgaga

SEQ ID NO: 758246 - DNA, 120 bp, Artificial Sequence
  ENSG00000214128_36 (sequence is synthesized)
gaggccgaggagtggccaggctggaggtcttccgtggagctggtggggtaacccagcccagggccctgcagtccccggtgggggaggttcccggaaggagctgagggctccctgcctgaa

SEQ ID NO: 758247 - DNA, 120 bp, Artificial Sequence
  ENSG00000214140_0 (sequence is synthesized)
cgcctgtggccttctgcagacttggcctgggaggggatggggcagctgcgccatgtgcaccacccttttcctgctcagcaccctggccatgctctggcgccgccgatttgccaaccgagt

SEQ ID NO: 758248 - DNA, 120 bp, Artificial Sequence
  ENSG00000214140_1 (sequence is synthesized)
ccaaccagagcccagcgacgtggatggggcagctaggggcagcagcttggatgcggaccctcagtcctcaggcagggagaaagaacctctgaagtaagccctcacctctgcaggtggggc

SEQ ID NO: 758249 - DNA, 120 bp, Artificial Sequence
  ENSG00000214140_2 (sequence is synthesized)
aggcaggtcctggttcgtcccctagcccaggaggatgctgtgggagctgcagcagcggcaagagggagaatggggggaagcagcactagagaaggtagacgcctccctctcagcccggga

SEQ ID NO: 758250 - DNA, 120 bp, Artificial Sequence
  ENSG00000214140_3 (sequence is synthesized)
cctgccagtctccccttcccccaggccctgggtgtgggctcctgagcaggacctggctgggcctggcagaaagagcagacgtgctcgctgctctcggacgggcttccttccctctgagtt

SEQ ID NO: 758251 - DNA, 120 bp, Artificial Sequence
  ENSG00000214140_4 (sequence is synthesized)
cctgaggctcctctgagggactgctgagcctgagaaagcctaggatgagggacttgctgggtccaccaggctaattctggggcagccagcagcccaggcaagaggcaggaataagtaagg

SEQ ID NO: 758252 - DNA, 120 bp, Artificial Sequence
  ENSG00000214140_5 (sequence is synthesized)
gtgggagctgcagcagcggcaagagggagaatggggggaagcagcactagagaagttcccagagctcatcctgtcactggctgctctgctgaaattatcaataagaaatgccagttggat

SEQ ID NO: 758253 - DNA, 120 bp, Artificial Sequence
  ENSG00000214140_6 (sequence is synthesized)
ctgtgacatgtctgcctgcagctggatgggagcaacggacagcttgtcctccgaatgtgttttctgtatgtgtgcaagcgcgtgtgttccaaacgggcagtagcgtgtgggaaggaaaaa

SEQ ID NO: 758254 - DNA, 120 bp, Artificial Sequence
  ENSG00000214140_7 (sequence is synthesized)
gcctgacacttgtttttatcaatttgctgatgctcagtcccggcggctgcctcctttgcccccagctgctctgccatttctctcttttcaatcctgcatgatcctgagcagagataaaag

SEQ ID NO: 758255 - DNA, 120 bp, Artificial Sequence
  ENSG00000214140_8 (sequence is synthesized)
cagatttccgcttctgctcccagatccaggagcagaccctgcaggcagctgctcctgatgtctcacagctattagtcttcaaaaaccccccgtgcctctgtgcacacgcgtctctcctcc

SEQ ID NO: 758256 - DNA, 120 bp, Artificial Sequence
  ENSG00000214140_9 (sequence is synthesized)
ccagccagcccccctcccagcccagcggcgatgtctctgcctggctggcccgtgcccttgacttccaggcagtagaagatggagttctctagacagcagcacttcagccgccactctgcc

SEQ ID NO: 758257 - DNA, 120 bp, Artificial Sequence
  ENSG00000214140_10 (sequence is synthesized)
ggtgggggaggaggtgcaccccgctggggagggcctgctggtacctcggggagcctggctggggtgtgtgcgaaggcagttctgtgggagcctctcaaagtagggcaggcaggaggcagg

SEQ ID NO: 758258 - DNA, 120 bp, Artificial Sequence
  ENSG00000214140_11 (sequence is synthesized)
gggaaagtcacactagggaaggagcctgcagaggcaaagccagagcgccagcctgacccaggccgtgagcccgtgatcgcctgtctcagctcctgtcagcctgtctctctctttggaggc

SEQ ID NO: 758259 - DNA, 120 bp, Artificial Sequence
  ENSG00000214140_12 (sequence is synthesized)
atcggccttcctggtgacaggcctgtcaggctgagggccagagggcactgttcccgggacccagtctgtgttccccgatcctatctgcatttattctctatttgccatgttcctgtcacc

SEQ ID NO: 758260 - DNA, 120 bp, Artificial Sequence
  ENSG00000214140_13 (sequence is synthesized)
tcatccttgctgccatttccgagttgctcatctccttccactggtctgaggaattgtcaggccaaggtcatggagctggctcacggcccagacgcacttccccagggcagcgcccctcca

SEQ ID NO: 758261 - DNA, 120 bp, Artificial Sequence
  ENSG00000214140_14 (sequence is synthesized)
cgccactgttccgagaacctgcgcaggaggtggtggctgctccagggatccatccagaggaagggcgggaaaaagagaggaaggggctgctggcggccagcggggctgtggctgcctggg

SEQ ID NO: 758262 - DNA, 120 bp, Artificial Sequence
  ENSG00000214140_15 (sequence is synthesized)
cttggaggttgcctgggcagctggggtgccatgtgggccgggtgggggggctgtctcccccagggagcaggctggctttggtgggagcagattgtgtttacaccttccccgcacacccag

SEQ ID NO: 758263 - DNA, 120 bp, Artificial Sequence
  ENSG00000214140_16 (sequence is synthesized)
cccacgctcgcctcttattcccggggcctctcccacccctgggctctctgcgcagtctgcacatttgcagctcctgctgcagaaagttacctctctcagcctagagctccccacagaagg

SEQ ID NO: 758264 - DNA, 120 bp, Artificial Sequence
  ENSG00000214140_17 (sequence is synthesized)
ctcctgggacccgggtgccccttccttggcccactggctcccatcacagggcttagtgtgaagctcagggcaagggtggacctttaaatgggggaattaaatcctgactatgacactgtc

SEQ ID NO: 758265 - DNA, 120 bp, Artificial Sequence
  ENSG00000214140_18 (sequence is synthesized)
ctgttgcctccttcagccaggggcagggccctggggagaggacaggatggcagccagcagcccagctggagatgcggagcctgtccttcagctcctacttaatggaagcctcgcagatgc

SEQ ID NO: 758266 - DNA, 120 bp, Artificial Sequence
  ENSG00000214140_19 (sequence is synthesized)
aagatggctccagcaggcccagcatcacttcttctcagtgtcccaaagccagaagagaggctgttgtttttaaaagcaggaaaactttcctaaacttggccagaattgcatcacagaccc

SEQ ID NO: 758267 - DNA, 120 bp, Artificial Sequence
  ENSG00000214140_20 (sequence is synthesized)
ggggctggggaggggcttgtcccgctgaagcagactcttgcccagcagctgaacgaagcctaggttcaccagacggaggaagagactggccactaacagtgcctgacacacagatgtgct

SEQ ID NO: 758268 - DNA, 120 bp, Artificial Sequence
  ENSG00000214140_21 (sequence is synthesized)
tcctgtgatatcgctgctgccaccgttccaaatgtaagcagttggctgtctgggatactacctaccttcttttgtgttcttattaataaaattaaagattgctttctgggtagagaaatt

SEQ ID NO: 758269 - DNA, 120 bp, Artificial Sequence
  ENSG00000214140_22 (sequence is synthesized)
atagacagggccgactgccggccaggaggagggtggggtggggaaagccctcggccctcggagctgagggtgagacccaggcatgtggtcccgccgacctgctgcccagcagcccggatc

SEQ ID NO: 758270 - DNA, 120 bp, Artificial Sequence
  ENSG00000214140_23 (sequence is synthesized)
ccccggggctgccctggtggccaaggcaggtggagctagcggtcgaggtttctggactgaggcccctcccccagtgcggtcatcccacccagaacttcgctctgcccctgcccattctag

SEQ ID NO: 758271 - DNA, 120 bp, Artificial Sequence
  ENSG00000214140_24 (sequence is synthesized)
acaagagtccaagagcaaggtgtccagagtcagagctcctgggtttgaaccttgttccaccagcacatcctacctctgtggcctgggtaagtttctgaacacctctgtgcctcagtttct

SEQ ID NO: 758272 - DNA, 120 bp, Artificial Sequence
  ENSG00000214140_25 (sequence is synthesized)
ttagctgtaggatggagatcctactggtatctgtctcttagagttgtaagggttgattagataacgtgtggaagatgcttagcatgttgggtaagtgtcccatatatgtgagctggcaca

SEQ ID NO: 758273 - DNA, 120 bp, Artificial Sequence
  ENSG00000214140_26 (sequence is synthesized)
atccggtttgaactgtaaattactgaacagtggtagattcaggacggctagagttcctcacatcctcactctctggtccttcctgccgtctctccacatacacagagctgggcgaccggt

SEQ ID NO: 758274 - DNA, 120 bp, Artificial Sequence
  ENSG00000214140_27 (sequence is synthesized)
agttctgcaacagatcagaggatggcagagggtggcattgctggggtggggaagccccctgtaagcctgtactggagaagaccaccactgcctctctgtgcccagaaccatgtcccaacc

SEQ ID NO: 758275 - DNA, 120 bp, Artificial Sequence
  ENSG00000214140_28 (sequence is synthesized)
tccagtggtgacctcgacctggacagcgccactcccagctggctctgcttccggaatgaacctcagctccttgacaagacgggaggcgctgccctgctgtggtaccttcctccgtgtgaa

SEQ ID NO: 758276 - DNA, 120 bp, Artificial Sequence
  ENSG00000214140_29 (sequence is synthesized)
tgctgggggagcctgagtgacggggaaaggctgcttggagctgcagggcggctgagggcagcaaccaggagcagggaggtgctgctcctgcaactgaggctcagagcggctgccagtctc

SEQ ID NO: 758277 - DNA, 120 bp, Artificial Sequence
  ENSG00000214140_30 (sequence is synthesized)
tcctggagactggagcatgaccagggaactaatgaggcggtgggggtgtggtgggagccagggaagtagccactgcagctgtggctgtccactgtcaccctggggtgtagatgtcacctt

SEQ ID NO: 758278 - DNA, 120 bp, Artificial Sequence
  ENSG00000214140_31 (sequence is synthesized)
ggggagtacccacccattccaagtgtgcggttgtgtgtgtgtgtggtttgtgtgtgtgtgtgtgtgtgtgcgcgcagtcctgggcaagggcaaacagtacaggtggtgggccaagactag

SEQ ID NO: 758279 - DNA, 120 bp, Artificial Sequence
  ENSG00000214140_32 (sequence is synthesized)
atgggtagggcacagtgcccactatgagacaggcacaatggcgagagagcaaaccctgctggttcctcaggctcccgtagcctctctgtggggggcctcactgttaggaagaagcccaag

SEQ ID NO: 758280 - DNA, 120 bp, Artificial Sequence
  ENSG00000214140_33 (sequence is synthesized)
acctagagctagaggaagataatgcttctttgtgaacctcagaagaacagtttggttcgcacggaagcttatgttaacataatgatgatactaatcgtatgattaataaccactaacatg

SEQ ID NO: 758281 - DNA, 120 bp, Artificial Sequence
  ENSG00000214140_34 (sequence is synthesized)
cattgggcgcttactatgtgctaggcactgtgccagctgctgtattttacgcactgtttcatttatgcggcaggaactgttatcatttatccaataaggaaagtgaggttcacagaactt

SEQ ID NO: 758282 - DNA, 120 bp, Artificial Sequence
  ENSG00000214140_35 (sequence is synthesized)
gctcaaggtcactcatagctggcagtgaagccaggacctgagcctgggaaatctgacaccaaagcttgggatagagggggcccaagtctcgagttgggggccgtgaggaaattttgattg

SEQ ID NO: 758283 - DNA, 120 bp, Artificial Sequence
  ENSG00000214140_36 (sequence is synthesized)
tgacctgtctacaaggcacaaggaatggagctgtggtcccgcccagcctgcctttgcaagtgggctggtgttggccagggtcattgccaccaatctgtcttcaggaactcacattcaagg

SEQ ID NO: 758284 - DNA, 120 bp, Artificial Sequence
  ENSG00000214140_37 (sequence is synthesized)
gcagaccagactctaggccctgagaggctggttcttgcctgccaggtgagggggagaggagagctgcccctttaggacccctcagtcttcctcaggaaggatgtggtggcctctggcagg

SEQ ID NO: 758285 - DNA, 120 bp, Artificial Sequence
  ENSG00000214140_38 (sequence is synthesized)
ggtcccagtgcttgcggcgtcgcgagtgtgcgcgtgcggacccttcccgcggcggggaactgactcaaagtccaacactcccgagctttcgcggcgaggccgaccgccagcccgcccgtg

SEQ ID NO: 758286 - DNA, 80 bp, Artificial Sequence
  ENSG00000214140_39 (sequence is synthesized)
cgtgggggcgaacaggagcccctccggcggccgccgtggacctagctgggctcccctcgcccgggcctctccccgcgccc

SEQ ID NO: 758287 - DNA, 120 bp, Artificial Sequence
  ENSG00000214140_40 (sequence is synthesized)
agcgcacctccgacctcgggcgccagaggcctgcgccccctctccttccgcccagcacctccatgccctcggtgcacgaacgcggcggcggcggccagaagtcccccgtggcttatgaat

SEQ ID NO: 758288 - DNA, 120 bp, Artificial Sequence
  ENSG00000214160_0 (sequence is synthesized)
acacaagcggcgcaccgttaagatggcggctgggctgcggaaacgcggccggtccggttccgcggcccaggcagagggactctgcaagcaatggctgcagcgcgcctggcaagagcggcg

SEQ ID NO: 758289 - DNA, 120 bp, Artificial Sequence
  ENSG00000214160_1 (sequence is synthesized)
cctgctgctgcgggagccgcgctacacgctgctggtggccgcctgcctctgcctggcggaggtgggcatcaccttctgggtcattcacagggtggcatacacagagattgactggaaggc

SEQ ID NO: 758290 - DNA, 120 bp, Artificial Sequence
  ENSG00000214160_2 (sequence is synthesized)
ctacatggccgaggtagaaggcgtcatcaatggtacctatgactatacccaactgcagggtgacaccggaccacttgtgtacccagctggtttcgtgtacatctttatggggttgtacta

SEQ ID NO: 758291 - DNA, 120 bp, Artificial Sequence
  ENSG00000214160_3 (sequence is synthesized)
tgccaccagccgaggcactgacatccgcatggcccagaacatctttgctgtgctctacctggctaccttgctgcttgtcttcttgatctatcaccagacctgcaaggtacctcccttcgt

SEQ ID NO: 758292 - DNA, 120 bp, Artificial Sequence
  ENSG00000214160_4 (sequence is synthesized)
ctttttcttcatgtgctgcgcctcttaccgtgtccactccatctttgtgctgcggctcttcaatgacccagtggccatggtgctgctcttcctcagtatcaacctcctgctggcccagcg

SEQ ID NO: 758293 - DNA, 120 bp, Artificial Sequence
  ENSG00000214160_5 (sequence is synthesized)
ctggggctggggttgctgctttttcagcctggcagtctctgtgaagatgaatgtgctgctcttcgcccctgggttactgtttcttctcctcacacagtttggcttccgtggggccctccc

SEQ ID NO: 758294 - DNA, 120 bp, Artificial Sequence
  ENSG00000214160_6 (sequence is synthesized)
cactggacagtgaactggcgcttcctcccagaggcgctcttcctgcatcgagccttccacctggccctgttgactgcccacctcaccctgctcctgctgtttgccctctgcaggtggcac

SEQ ID NO: 758295 - DNA, 120 bp, Artificial Sequence
  ENSG00000214160_7 (sequence is synthesized)
aggacaggggaaagtatcttgtcgctgctgagggatccctccaaaaggaaggttccaccccagccccttacacccaaccagatcgtttctaccctcttcacctccaacttcattggcatc

SEQ ID NO: 758296 - DNA, 120 bp, Artificial Sequence
  ENSG00000214160_8 (sequence is synthesized)
tgcttcagccgctccctccactaccagttctacgtctggtatttccacacactgccctacctcctgtgggccatgcctgcacgctggctcacacacctgctcaggttgttggtgctgggg

SEQ ID NO: 758297 - DNA, 120 bp, Artificial Sequence
  ENSG00000214160_9 (sequence is synthesized)
ctcatcgagctctcctggaacacatacccttccacatcctgcagctctgctgccctgcacatatgccatgccgtcatcctgctgcagctctggctgggcccgcagcctttccccaagagc

SEQ ID NO: 758298 - DNA, 120 bp, Artificial Sequence
  ENSG00000214160_10 (sequence is synthesized)
acccaacacagcaagaaagcccactgaagtccacccctttccctcaggacctgagtctaccctcaggacctggggttggttggactctgcccttccaaataaaccttgctaagtccaact

SEQ ID NO: 758299 - DNA, 120 bp, Artificial Sequence
  ENSG00000214160_11 (sequence is synthesized)
ctgtgcaacctacatggaggtgggggcagccgatgcctggtccaggctgtgagggacacgtatggagcagataaagaattcactcaagcagtcctaagaggcactttattgcataggatt

SEQ ID NO: 758300 - DNA, 120 bp, Artificial Sequence
  ENSG00000214160_12 (sequence is synthesized)
ttcgaagaatcctccggctgggaaaactatcgtccagaccctgaatcctccggctgtactgccaagtcatttcctagggccgcactcaaggtgtcagactcacgtgggctcatcactgcg

SEQ ID NO: 758301 - DNA, 120 bp, Artificial Sequence
  ENSG00000214160_13 (sequence is synthesized)
tcctctcatattttcaatatgaatgacttttatcaggaaatctgaaaattagtgaaaggttcatttttctcagcatccggaaggctcgaagggcaggcaggaggggcgcgaacaggggct

SEQ ID NO: 758302 - DNA, 120 bp, Artificial Sequence
  ENSG00000214160_14 (sequence is synthesized)
atgccctctttccatcctgtcttcctcccagacagcattccttgttggaattagtccttcacattctaaatactcagtatatgctcattcgcatctagtaggcatagagactatgtatct

SEQ ID NO: 758303 - DNA, 120 bp, Artificial Sequence
  ENSG00000214160_15 (sequence is synthesized)
gcctcctgcctactccaggctcttccctccaacagttgtgagtgtaggtcccatcttggagtttgttggcgtggcggcgggggggaggttgctgtggtgatggtggggggtatgtctttg

SEQ ID NO: 758304 - DNA, 120 bp, Artificial Sequence
  ENSG00000214160_16 (sequence is synthesized)
cagatgttcccagcgcaggcgaaggagaatgctggcttcagcggttgtgggggaggtaggcaggaatgttgcttttctggacattcgttctaaattagcgcctgtgtacccagggctggg

SEQ ID NO: 758305 - DNA, 120 bp, Artificial Sequence
  ENSG00000214160_17 (sequence is synthesized)
tataaactgaggagtaagacattgtccctgctcctatggagcgtggagtgcatcagaggagacaaatgcagaaaaattacattttagtggagtaaatgaagactggctactcggatcggc

SEQ ID NO: 758306 - DNA, 120 bp, Artificial Sequence
  ENSG00000214160_18 (sequence is synthesized)
aaaggaaggttccaccccagccccttacacccaaccatatcctttaaattgtgggaaggtaagtcttgccctctctaggtgctgacagagtcctggtcaggtatcccttgacagctggtg

SEQ ID NO: 758307 - DNA, 120 bp, Artificial Sequence
  ENSG00000214160_19 (sequence is synthesized)
acctgggcgaggaaaggggaccccaatcatagaagtcctattctgcaccactgtgctgagcacttcacatattgaaggatatttgattcttaattctaaatacgagctactcttatgagt

SEQ ID NO: 758308 - DNA, 120 bp, Artificial Sequence
  ENSG00000214160_20 (sequence is synthesized)
acttctccctggtactatcataagagatttacatatgttctaatattgaaagctcacaagagaccccgagacagggaggtacacttacatttactattctcattttacagatggaaaaat

SEQ ID NO: 758309 - DNA, 120 bp, Artificial Sequence
  ENSG00000214160_21 (sequence is synthesized)
taagacttcatgaggttaagtaacttaccaaggtcacacagccagtaagttaggggttcaaacccacaagaccttatggccctaggtattactctctccatattccatatttggttgagg

SEQ ID NO: 758310 - DNA, 120 bp, Artificial Sequence
  ENSG00000214160_22 (sequence is synthesized)
gcatgcatcaaggaatggcagagccagagggctatgtgacctaaaaactattgcccctctgttttgggatagtcccccccacacacactcctgcccttggccttgaccaccgcatacaga

SEQ ID NO: 758311 - DNA, 120 bp, Artificial Sequence
  ENSG00000214160_23 (sequence is synthesized)
aaggagaagccacttgtcttgattgaggggctctatccctgagactccctcaaagccaagagacagggttttggagttgattctgagctagggagccactatcgctaggctgtagtttcc

SEQ ID NO: 758312 - DNA, 120 bp, Artificial Sequence
  ENSG00000214160_24 (sequence is synthesized)
ttccatagctgtaaaatagggtattaaatttgatggtctctgagagcctttttgctttttttaattttaagttttgagatgggctcttgctgggttgcccaggctggtctcaaactcctg

SEQ ID NO: 758313 - DNA, 120 bp, Artificial Sequence
  ENSG00000214160_25 (sequence is synthesized)
ttcctttctggtcccctctcgttttctgcatttccatctcttcccaatttcctgcagcagagggagtaaaggagtagccaagacagcatgggtcactcagggctccacaaagcgagtcca

SEQ ID NO: 758314 - DNA, 120 bp, Artificial Sequence
  ENSG00000214193_0 (sequence is synthesized)
agtactcggccgtcagagggagctgccaggctctggagggcgccccggaaaccatggaagtcctcgtcctggccggataccgcgcgcagaaggaggacgagctgagtctggcgcccgggg

SEQ ID NO: 758315 - DNA, 120 bp, Artificial Sequence
  ENSG00000214193_1 (sequence is synthesized)
acgtggtccggcaggtgcgctgggtgcccgcgcggggctggcttcgcggagagtttgggggccgctatggcctcttccccgagcgcctggtgcaggagatcccagagaccctgcggggct

SEQ ID NO: 758316 - DNA, 120 bp, Artificial Sequence
  ENSG00000214193_2 (sequence is synthesized)
ccggagaggcgcggaggccgcgctgtgcgcgccgccgaggtcatcctgccaaacacccgaggccccaaagatggtgcaaagtgaacttcagctacagcccagagcaggcggacgagctga

SEQ ID NO: 758317 - DNA, 120 bp, Artificial Sequence
  ENSG00000214193_3 (sequence is synthesized)
agctgcaagctggggagatcgtggaaatgataaaggagattgaggacggctggtggctggggaagaagaacgggcagctgggagccttcccatccaactttgtggaattgctggacagtg

SEQ ID NO: 758318 - DNA, 120 bp, Artificial Sequence
  ENSG00000214193_4 (sequence is synthesized)
ggcccccaagccttggtaacccagacatgccttcagtcagccctggtccccagcggcctcccaagctgagcagcctggcctatgacagccctccagactacctgcagacagtctcccacc

SEQ ID NO: 758319 - DNA, 120 bp, Artificial Sequence
  ENSG00000214193_5 (sequence is synthesized)
ctgaggtctacagggtcctgtttgactaccagcctgaggccccagacgagttggcgctgcggaggggggacgtggtaaaagtactcagcaagaccacagaggataagggctggtgggaag

SEQ ID NO: 758320 - DNA, 120 bp, Artificial Sequence
  ENSG00000214193_6 (sequence is synthesized)
gagagtgtcaaggacgaagaggagtttttccagacaactttgtactcccaccacccccaatcaagaagctggtcccacggaaagtggtatctcgggaatcagctcctattaaggaaccaa

SEQ ID NO: 758321 - DNA, 120 bp, Artificial Sequence
  ENSG00000214193_7 (sequence is synthesized)
aaaagttgatgcccaaaacatccctccccacagtcaagaagctagcaacagccaccactgggcccagcaaagccaagacatctcggacacccagcagggacagtcagaagctcacctccc

SEQ ID NO: 758322 - DNA, 120 bp, Artificial Sequence
  ENSG00000214193_8 (sequence is synthesized)
gagactcaggccccaatggtggcttccaaagtgggggttcgtatcaccctggccgaaagcgatccaaaacccagactccccagcaacgctctgtgtccagtcaggaggaagagcacagca

SEQ ID NO: 758323 - DNA, 120 bp, Artificial Sequence
  ENSG00000214193_9 (sequence is synthesized)
gcccggtaaaggccccctctgtgaagagaacccccatgccggacaagactgccaccccagagaggcccccagctccagagaacgcccccagctccaagaagatcccggctcctgacaaag

SEQ ID NO: 758324 - DNA, 120 bp, Artificial Sequence
  ENSG00000214193_10 (sequence is synthesized)
ctctaggggacaaggcctctatcccagggaactccacctcggggaagatcccagctcctgacaaagtccccaccccagagaagatggtgactccggaggacaaggcttctatcccagaga

SEQ ID NO: 758325 - DNA, 120 bp, Artificial Sequence
  ENSG00000214193_11 (sequence is synthesized)
actccatcatcccagaggagaccctgactgtggacaaaccctccactccagagagggtcttttcagtggaagagtcccctgccctagaagccccacctatggataaagtccctaatccaa

SEQ ID NO: 758326 - DNA, 120 bp, Artificial Sequence
  ENSG00000214193_12 (sequence is synthesized)
agatggcccctctgggggatgaggcccccactctagaaaaggtcttgaccccagagctttctgaagaagaggtgtccaccagagatgacattcaattccatcacttctcttcggaggaag

SEQ ID NO: 758327 - DNA, 120 bp, Artificial Sequence
  ENSG00000214193_13 (sequence is synthesized)
ccctgcagaaggtcaagtactttgtagccaaagaggatccatcatcccaggaggaggcccacacgccagaggcacccccaccccagcctccttcctcagagaggtgcctgggagagatga

SEQ ID NO: 758328 - DNA, 120 bp, Artificial Sequence
  ENSG00000214193_14 (sequence is synthesized)
aatgtaccctagttagaggggacagctccccacgccaggctgagttgaagtctgggccagcatccaggcctgcccttgagaagccccacccccacgaagaggctacaacccttccagagg

SEQ ID NO: 758329 - DNA, 120 bp, Artificial Sequence
  ENSG00000214193_15 (sequence is synthesized)
aggcaccttccaatgacgagaggacccctgaagaggaggcgccccccaacgagcagaggcctctgagagaggaggtgctccccaaagagggagtggcttccaaagaggaggtgaccctga

SEQ ID NO: 758330 - DNA, 120 bp, Artificial Sequence
  ENSG00000214193_16 (sequence is synthesized)
aagaggaattgccccctaaagaggaagtggctccaaaagaggaggtgccccccatagaaagagcctttgcccaaaaaacacgtcctatcaagccgcctccagactcccaagagacgctcg

SEQ ID NO: 758331 - DNA, 120 bp, Artificial Sequence
  ENSG00000214193_17 (sequence is synthesized)
cgctcccctcgctggtcccgcaaaactacacggaaaacaagaatgaaggagttgatgtaacgtcgctgaggggcgaggtggagtctctaaggagggcgctggagctgatggaggtgcagc

SEQ ID NO: 758332 - DNA, 120 bp, Artificial Sequence
  ENSG00000214193_18 (sequence is synthesized)
tggagaggaagctgaccgacatctgggaggagctgaagagcgagaaggagcagcgccggcggctggaggtccaggtgatgcaggggacccagaagtcccagaccccgcgcgtcatccaca

SEQ ID NO: 758333 - DNA, 120 bp, Artificial Sequence
  ENSG00000214193_19 (sequence is synthesized)
cgcagacgcagacctactgagggtgggcctgggaagggaccgcggcctgacctggctggggccacccacgtccttgcacacgactttgggaaacgcgagaaagtaaactctgcctagcac

SEQ ID NO: 758334 - DNA, 120 bp, Artificial Sequence
  ENSG00000214193_20 (sequence is synthesized)
ggcgccacgccggtctggtcgctgggggcggggcctgcgcgggggcagggcctgggcctccgcattcctgacggtccctcccaggcacatctggccaacatgtggctcccattaccgttc

SEQ ID NO: 758335 - DNA, 120 bp, Artificial Sequence
  ENSG00000214193_21 (sequence is synthesized)
gagtttttccagacaactttgtactcccaccacccccaattaaggatgctcaacctttacttcttttcggcatagatcaagaagctggtcccacggaaagtggtatctcgggaatcaggt

SEQ ID NO: 758336 - DNA, 120 bp, Artificial Sequence
  ENSG00000214193_22 (sequence is synthesized)
aatggcgggcaggaggggcccaggcggggtcgggctcttgacgcccggcctagattccggaatccagctgtgcgccggggaggagccgggcgggccttctcgccagctcggacccctccc

SEQ ID NO: 758337 - DNA, 120 bp, Artificial Sequence
  ENSG00000214193_23 (sequence is synthesized)
agctggcctccctgtccgctcagagggactcctgccctctcgcttgaacgcacctcggcgcagacgtgaagtccaccgtccagcccaagcacgcatgcttacaccggggctagcagcacc

SEQ ID NO: 758338 - DNA, 120 bp, Artificial Sequence
  ENSG00000214193_24 (sequence is synthesized)
ttagcctcgaggtcagggtcctgaggcctggtgtgtgtgtcattgcagtgtatgaacccagggcactgtggggacagggcgacgtgtgtccaggcgtttgccgcaggtccggctgcccgg

SEQ ID NO: 758339 - DNA, 120 bp, Artificial Sequence
  ENSG00000214193_25 (sequence is synthesized)
tgcgccagatctcccgcaggatccgttcgcgctcctccagccgctgcgcccgctccagctcctccgccgacgtgaagacgttgacgttgaggggcccgtccggctctgcggacagctcgg

SEQ ID NO: 758340 - DNA, 120 bp, Artificial Sequence
  ENSG00000214193_26 (sequence is synthesized)
ggcccggcagcgtgtcgtcggggcccagccgagtcaccgtgtcctcctcgtcctcgtcgtcgtcctcgggctccagggtgctgctgcgggggtcccggcgctgagccgggccccggggcc

SEQ ID NO: 758341 - DNA, 120 bp, Artificial Sequence
  ENSG00000214193_27 (sequence is synthesized)
gcgggcggggcgcccacgagatgctgatgacgagcaggcagagggaaaccgccggggaggccgcggcagggacccgcccccaggccactaacagcaacaacagagaggctggagctctgc

SEQ ID NO: 758342 - DNA, 120 bp, Artificial Sequence
  ENSG00000214193_28 (sequence is synthesized)
ctgcgtgcgggccaagggctaaaccttggacaggttctttcacttactccgcctgacaaccctgcgacgtgataccattatccccacttcgcagatcaaataaacggagtcttggagaga

SEQ ID NO: 758343 - DNA, 120 bp, Artificial Sequence
  ENSG00000214193_29 (sequence is synthesized)
tcctggaggccctggggaaggtccctgaaacctttggccaatgtggctgtccccatggtccacatgccctccccaccccctgcctagctgcttgactgcctgctgctccccagcccacca

SEQ ID NO: 758344 - DNA, 120 bp, Artificial Sequence
  ENSG00000214193_30 (sequence is synthesized)
gcctgtccgtgggtcagcccagccacccgcttcggatctctgcacgtgtgtcacctgctgttctggccctcatcccaactatccacctgcccatctcctccctacctcctcgctgcctat

SEQ ID NO: 758345 - DNA, 120 bp, Artificial Sequence
  ENSG00000214193_31 (sequence is synthesized)
gagtactgctaagatgaaacacaggaaggacaggccttgatggaaggttggggggccgagagatccagagcctatgggaggggacttgtgagtgctggcatattcaggacccagtgcaaa

SEQ ID NO: 758346 - DNA, 120 bp, Artificial Sequence
  ENSG00000214193_32 (sequence is synthesized)
cccaagcacagctctgctcccggccccagtggccaaactgaaggcttgccctggctattctgccgttgacatgggcctcaccctaccacggggataggtcttggatggagggaagaggga

SEQ ID NO: 758347 - DNA, 120 bp, Artificial Sequence
  ENSG00000214193_33 (sequence is synthesized)
gactcaccgggggcctcctgagtcctttgagtgtccccatgaccccagcacctgggacagctgctggaaagagggtactggcaaaaatttgctaaatggacaatcataggcccagtgtgg

SEQ ID NO: 758348 - DNA, 73 bp, Artificial Sequence
  ENSG00000214193_34 (sequence is synthesized)
tgtgcagatcactgttctacagaaaactacaaaaattagctggacacggtagcacacacctatagttcctgct

SEQ ID NO: 758349 - DNA, 76 bp, Artificial Sequence
  ENSG00000214193_35 (sequence is synthesized)
ggcaacatggcgaaaccccatttctacagaaaactacaaaaattagctggacacggtagcacacacctatagttcc

SEQ ID NO: 758350 - DNA, 120 bp, Artificial Sequence
  ENSG00000214193_36 (sequence is synthesized)
cagcctggatgacagaggaagaccctgtctcaaaacaaacaaaacaacagcaacaacaagaaaacaataatagggacattgagtaccctttctggcacctggcactctgccaaatgctat

SEQ ID NO: 758351 - DNA, 120 bp, Artificial Sequence
  ENSG00000214193_37 (sequence is synthesized)
gcacactccgcccttcagtcttcccaggaaccctgtgcagtttgtagcgtggctcacatttgccaagaaggaagtgaggctcagcgaggttaagcagtgcctgtggagtcacatggctgc

SEQ ID NO: 758352 - DNA, 120 bp, Artificial Sequence
  ENSG00000214193_38 (sequence is synthesized)
aagtagtggcctggactggactgcagagcccatgctccccaccgctttccatggggcaactctaggccatcattctccacccctcagacccaaagctgccttttcataatgcttgctgtt

SEQ ID NO: 758353 - DNA, 120 bp, Artificial Sequence
  ENSG00000214193_39 (sequence is synthesized)
gctccctttatgctcctgaaatgaaatttatggctaatatgccagcctttacatctaattaaaaatcatccaatggtttttttgtccttattaatatataagaaataaaaggtaatgata

SEQ ID NO: 758354 - DNA, 120 bp, Artificial Sequence
  ENSG00000214193_40 (sequence is synthesized)
atgtgtttgtgaagtgcccagttgctggggaggtcacagctctgtgtacagactgatgctcgggtgtggtggtgtcaacgtctgaaacgatgaatttggtaaagttctgaacacaatgaa

SEQ ID NO: 758355 - DNA, 120 bp, Artificial Sequence
  ENSG00000214193_41 (sequence is synthesized)
actttaccaaaaccgtcaggatttgaatctgctgctctctgatcctaaagcctgagctagaaaccaccgctccccctcctaggaggccccttccaggggcttgccgtggccaagccaggc

SEQ ID NO: 758356 - DNA, 120 bp, Artificial Sequence
  ENSG00000214193_42 (sequence is synthesized)
atgcgttttgaataaggaatgcgcgcgcgcttgctctgtgtgtgaggctgggtgcaggcctgtgggcttctgcttttctgctggctgtgaagtgaatgcgggcaggtgtgctgtatcgtc

SEQ ID NO: 758357 - DNA, 120 bp, Artificial Sequence
  ENSG00000214193_43 (sequence is synthesized)
ggcaggagcctgggggtcgctgggggcaggagtaacagagggagagactgagtcactgagaatgcagctttctttcatttggtcacttcacctcttcatcgaccccagagagggagtggg

SEQ ID NO: 758358 - DNA, 120 bp, Artificial Sequence
  ENSG00000214193_44 (sequence is synthesized)
gaccctgcatgctgccccctccccgcccccggggtcttctggcaggactggggaagggagcctctcagggggtggcggtccacgcccagtagcacctgggagctgtgggggccgaggcag

SEQ ID NO: 758359 - DNA, 120 bp, Artificial Sequence
  ENSG00000214193_45 (sequence is synthesized)
tccgaaggtgtggggtagctctgagctcatgtgcaggtccggtaccccgagcgccttgcagcgggagccggggcccatcagtaatagtgcatgcggcccagggtgcccgtggccgtgggg

SEQ ID NO: 758360 - DNA, 120 bp, Artificial Sequence
  ENSG00000214193_46 (sequence is synthesized)
aagtagaggccgaagctctcggggttggctgcggggcacagggcgggggtcacggagaggcccggacgggtgggggttgtcccacttccgaaagaccccaggttctaggtgtgggggcga

SEQ ID NO: 758361 - DNA, 120 bp, Artificial Sequence
  ENSG00000214193_47 (sequence is synthesized)
ggcctgtaacccctactcgaagggcattagggaaccgccagcgggcaagagggcggggagcggggcggaggggacggacaaggcgctggggagggaaggggatggtggtcagggaagggt

SEQ ID NO: 758362 - DNA, 120 bp, Artificial Sequence
  ENSG00000214193_48 (sequence is synthesized)
tcaggcccccagtcttccggcgcccgccctcaccgcggatgtgcgcgtaggcagccaggctgttgctgagcaactccatgtcccttcgcggggcatccatgctgctctggggggcagctc

SEQ ID NO: 758363 - DNA, 120 bp, Artificial Sequence
  ENSG00000214193_49 (sequence is synthesized)
ccctaccagcctgcgaggtcagcaaagtcagatccttctcccagcctggagcccaccccgaccccttccgcgggcagctcctctcccgggagccgcgggcccaggttccaccctggagag

SEQ ID NO: 758364 - DNA, 120 bp, Artificial Sequence
  ENSG00000214193_50 (sequence is synthesized)
ctggagagagcgcttccctaacttcgtggcggcccggggccctgtcggggggaacccctctcccgggcgcggacgcccctccagtcctgggagcagcgccggggaccgcgggaggccccg

SEQ ID NO: 758365 - DNA, 120 bp, Artificial Sequence
  ENSG00000214193_51 (sequence is synthesized)
tgaggtccccagctgaggcccggttccgccgtcccggggcgggatggaggatagggacgctgagcctccacgccccaggcgggctccgggaagggaagctgcctctctcctcgcccggcc

SEQ ID NO: 758366 - DNA, 80 bp, Artificial Sequence
  ENSG00000214193_52 (sequence is synthesized)
ctcaccgtcagcgccccgcttcccggctgcccggccccagcgcgtcccgcggccgcatacactgggtccggccgcccccg

SEQ ID NO: 758367 - DNA, 120 bp, Artificial Sequence
  ENSG00000214193_53 (sequence is synthesized)
ctcgggtcccgccgcccctccggccccgctgggctcccaggccgcggcagcacgggcgggacacggaccgagggaccagccggcggaaagtttcctccgaggaaagaggagggacggggc

SEQ ID NO: 758368 - DNA, 120 bp, Artificial Sequence
  ENSG00000214193_54 (sequence is synthesized)
gcgggcggggaggcggggaggaaaagggctgggagaggaaggggagaggagcgggcagccgggaggagggagagcccggcccgcgggccgtccgtcccccacaggaaaccgccggggagg

SEQ ID NO: 758369 - DNA, 120 bp, Artificial Sequence
  ENSG00000214193_55 (sequence is synthesized)
agggcccaggcttgaatgtgtcccctggccgagctctggtctagtcacgcagggttaatgattgttggactccagctttgagccagggcccggccagcagtctcgcagaccccagcgtgg

SEQ ID NO: 758370 - DNA, 120 bp, Artificial Sequence
  ENSG00000214193_56 (sequence is synthesized)
ggcctctgtgcctgcgagctcctgcgctcttgtgcaccaagcagcttgtggcggcttgtggcagatcccaccccatcccgtcccccaccccaaggctaaacctgcctgtgctcacacacg

SEQ ID NO: 758371 - DNA, 120 bp, Artificial Sequence
  ENSG00000214193_57 (sequence is synthesized)
catttcccacctgggcttgtgcatgcaatgtggtgtgtgatcagtgtgtgtggcggggggcttccttctgccctgtctccacggggcccccccatcatggacctcccctcccttgctgga

SEQ ID NO: 758372 - DNA, 120 bp, Artificial Sequence
  ENSG00000214193_58 (sequence is synthesized)
gctagaatgagggggaggccgccttggcgggagccttagagaggaggaggaaagggggagaggaaattgcagacatagctgaaggcgctgcctgaggcctgtgggccagcgaccctctcc

SEQ ID NO: 758373 - DNA, 120 bp, Artificial Sequence
  ENSG00000214193_59 (sequence is synthesized)
ctgtccgggctgcagacccctactcccccagtcccgagactgggttcaagtagagggcagatctagatgggggaggactaggactgactcctatggggatggaaaagggactcctgggtg

SEQ ID NO: 758374 - DNA, 120 bp, Artificial Sequence
  ENSG00000214193_60 (sequence is synthesized)
tctttgtgactgtttagtgtgttctgtgaatgtgcgggcaggtatttttgcccacatctgtatatttgtctattaatgtgatgtatttgagtattgttgtgggggcgggtatgtctgtat

SEQ ID NO: 758375 - DNA, 120 bp, Artificial Sequence
  ENSG00000214193_61 (sequence is synthesized)
ataaatctgtgcagccactagtcaacaaatactgtgtatgcctagcacttcctagtctagtccacagcatctgtgggtttaaccaactttgcatcaaaaatattcaaaaccaaaattgca

SEQ ID NO: 758376 - DNA, 120 bp, Artificial Sequence
  ENSG00000214194_0 (sequence is synthesized)
attcctgtaatggctgcttcctagaaggtcgtgtcacgtggaacctcttaatctcagcatccggagctccaggaagggaaaatttcaagtcagatagaattctatatataccatttcttt

SEQ ID NO: 758377 - DNA, 120 bp, Artificial Sequence
  ENSG00000214194_1 (sequence is synthesized)
ggaaccttcagccctcaagattccaacatcatgacctcagtttcaacacagttgtccttagtcctcatgtcactgcttttggtgctgcctgttgtggaagcagtagaagccggtgatgca

SEQ ID NO: 758378 - DNA, 120 bp, Artificial Sequence
  ENSG00000214194_2 (sequence is synthesized)
atcgcccttttgttaggtgtggttctcagcattacaggcatttgtgcctgcttgggggtatatgcacgaaaaagaaatggacagatgtgactttgaaaggcctactgagtcaaacctcac

SEQ ID NO: 758379 - DNA, 120 bp, Artificial Sequence
  ENSG00000214194_3 (sequence is synthesized)
cctgaaaacctttgcgctttagaggctaaacctgagatttggtgtgtgaaaggttccaagaatcagtaaataagggagtttcacatttttcattgtttccatgaaatggcaacaaacata

SEQ ID NO: 758380 - DNA, 120 bp, Artificial Sequence
  ENSG00000214194_4 (sequence is synthesized)
aaaatgcagcctataatttgctagttaggtagtcaaagaagtaagatggctgaaatttacataagtaatatttcataatcttagaattctctcaaagcatgtgaaataggaagaaggaag

SEQ ID NO: 758381 - DNA, 120 bp, Artificial Sequence
  ENSG00000214194_5 (sequence is synthesized)
ttcttgcccagaatcttaggaaatcaccactgttcggttataatcactgcctcctgaatcgttgaggagtcttttaaattagatttttgttttgttgtctcccaagttaatattatattt

SEQ ID NO: 758382 - DNA, 120 bp, Artificial Sequence
  ENSG00000214194_6 (sequence is synthesized)
agatatcagagagtcaggcaaaaaggaaaacttttatctctagggaaaaaacatttagaaaaatgtattcagtgtatctaatactgaaatgcggaaaaaaatttaatgttaaaaaaaaac

SEQ ID NO: 758383 - DNA, 120 bp, Artificial Sequence
  ENSG00000214194_7 (sequence is synthesized)
tatagacattgacatggaaaagagatttaatgttttgaaaaaaaactttatattaactgagtaacatcctcctgatgagaagtactatattaaatataaacccattatgttataagttaa

SEQ ID NO: 758384 - DNA, 120 bp, Artificial Sequence
  ENSG00000214194_8 (sequence is synthesized)
ctcgccattcctgtaatggctgcttcctagaaggtaatgtacgaactcgtctccaaaggatacttaggttgcaccagtgtatttgtaaaacaggagcaaatttggaccttgccgggccaa

SEQ ID NO: 758385 - DNA, 120 bp, Artificial Sequence
  ENSG00000214194_9 (sequence is synthesized)
ggtaagtcttattaattccccacaacttcgcagagttatatgttgtgtgacttttgccaaatttgtctgcatttcttggatgggagagaccctaagaaaatgtacaatttttacccacta

SEQ ID NO: 758386 - DNA, 120 bp, Artificial Sequence
  ENSG00000214194_10 (sequence is synthesized)
tatcgtggaaaattcctgggtttagagtgttatcacgagatagggagatgaacctcaaattactgtctttaacgtccctctgtttttccacctataagatgaggagatggattggaaatg

SEQ ID NO: 758387 - DNA, 120 bp, Artificial Sequence
  ENSG00000214194_11 (sequence is synthesized)
ctagaaggtaatgtacgaactcgtctccaaaggatacttaggttgcaccagtgtatttgtaaaacaggagcaaatttggaccttgccgggccaaagtacgaattctttttcaaatcttaa

SEQ ID NO: 758388 - DNA, 120 bp, Artificial Sequence
  ENSG00000214194_12 (sequence is synthesized)
tatcaagtcctgaaatgaaattatctctgttctgtttctttttaccttttcttgtgtgggtgaactgaccaacttttaagtctagttccctgttggacagacttttctcaactcattacc

SEQ ID NO: 758389 - DNA, 120 bp, Artificial Sequence
  ENSG00000214194_13 (sequence is synthesized)
tatccccctaccgtccatatggcctccacgctctgcactgactctagctgcctctttaaaataataatagtaataataattaatttttaaatccttctctccgccccctccccacccccc

SEQ ID NO: 758390 - DNA, 120 bp, Artificial Sequence
  ENSG00000214212_0 (sequence is synthesized)
ctcctttccccgatctggcctcacaggaggagttggcggggagccttgggcccctctggcctcagccggatttcccagccaaacgcagagagagatgccctggaccatcttgctctttgc

SEQ ID NO: 758391 - DNA, 120 bp, Artificial Sequence
  ENSG00000214212_1 (sequence is synthesized)
agctggctccttggcgatcccagcaccatccatccggctggtgcccccgtacccaagcagccaagaggaccccatccacatcgcatgcatggcccctgggaacttcccgggggcgaattt

SEQ ID NO: 758392 - DNA, 120 bp, Artificial Sequence
  ENSG00000214212_2 (sequence is synthesized)
cacactgtatcgaggggggcaggtggtccagctcctgcaggcccccacggaccagcgcggggtgacatttaacctgagcggcggcagcagcaaggctccagggggacccttccactgcca

SEQ ID NO: 758393 - DNA, 120 bp, Artificial Sequence
  ENSG00000214212_3 (sequence is synthesized)
gtatggagtgttaggtgagctcaaccagtcccagctgtcagacctcagcgagcccgtgaacgtctccttcccagtgcccacttggatcttggtgctctccctgagcctggctggtgccct

SEQ ID NO: 758394 - DNA, 120 bp, Artificial Sequence
  ENSG00000214212_4 (sequence is synthesized)
cttcctccttgctgggctggtggctgttgccctggtggtcagaaaagttaaactcagaaatttacagaagaaaagagatcgagaatcctgctgggcccagattaacttcgacagcacaga

SEQ ID NO: 758395 - DNA, 120 bp, Artificial Sequence
  ENSG00000214212_5 (sequence is synthesized)
gataactccctgtttaccgtctccgcgaaaacgatgccagaagaagacccggccaccttggatgatcactcaggcaccactgccacccccagcaactccaggacccggaagaggcccact

SEQ ID NO: 758396 - DNA, 120 bp, Artificial Sequence
  ENSG00000214212_6 (sequence is synthesized)
tccacgtcctcctcgcctgagacccccgaattcagcactttccgggcctgccagtgaggctgaggactgggggacccctctgtctccaggcattcgggggcctgaggtccctccagctac

SEQ ID NO: 758397 - DNA, 120 bp, Artificial Sequence
  ENSG00000214212_7 (sequence is synthesized)
ttctgggggggctctgtcagccactttctcagggaattggacagaggaaaggaaggggaaccctggccttgggattttcatcacagaggagtgggagaggggacacaggcatgggcctgg

SEQ ID NO: 758398 - DNA, 120 bp, Artificial Sequence
  ENSG00000214212_8 (sequence is synthesized)
cactatacagacaacaggaagttcccctctcgaccttcggctcctcaggaccaccagagaaggagatgtcaggaccccttcttgtcccccagctgggccataagacgtcccaggtctctg

SEQ ID NO: 758399 - DNA, 120 bp, Artificial Sequence
  ENSG00000214212_9 (sequence is synthesized)
cacacccgtggaattcctcccttccccagtgggtttttgagcatagggtgcccttgggtgtgttgtgtgtctgcctgctggcttgcttaagttattaattataacacgggtcaaggtgtt

SEQ ID NO: 758400 - DNA, 120 bp, Artificial Sequence
  ENSG00000214212_10 (sequence is synthesized)
ttggcgggaccgacgtggtggagtggacccaaaaatagcgtctaggcgtggccctgtacgcgacccgtagggctcgcctataaaagggctggggcggggcggagatacctgtggcgtcgt

SEQ ID NO: 758401 - DNA, 120 bp, Artificial Sequence
  ENSG00000214212_11 (sequence is synthesized)
agtggggaaaggattacacctccaaatgccatcaggcctcatcacacaccaatcaaatttcttctgtgactgcttgttccctttagggtcaaaacacaccctcgccacctcttcccctgg

SEQ ID NO: 758402 - DNA, 120 bp, Artificial Sequence
  ENSG00000214216_0 (sequence is synthesized)
tcacattcccccacagtcacattgcgctctgtgattctgaggaatacagtgtgccagcatccgatccagtctcctttcacctgcaggtgttccagaaacttcaaaatgcgtctggaagaa

SEQ ID NO: 758403 - DNA, 120 bp, Artificial Sequence
  ENSG00000214216_1 (sequence is synthesized)
ctgaaaagattgcagaatcctctagaacaagttaatgatggaaaatattcatttgaaaatcaccagctggccatggatgcagagaataatattgaaaagtatcccctcaatctacagccc

SEQ ID NO: 758404 - DNA, 120 bp, Artificial Sequence
  ENSG00000214216_2 (sequence is synthesized)
ttggaatcaaaggtgaaaatcattcagcgagcatggcgagagtacctgcagcggcaggagcccctggggaagaggagcccgtccccaccctctgtctcctcagagaagctgagcagctct

SEQ ID NO: 758405 - DNA, 120 bp, Artificial Sequence
  ENSG00000214216_3 (sequence is synthesized)
gcccctgttgggaagattcatccttacatctcttggaggttgcagtcacctggggacaagttgcctggtggaaggaaggtgattcttctctaccttgaccagcttgccagacccactggg

SEQ ID NO: 758406 - DNA, 120 bp, Artificial Sequence
  ENSG00000214216_4 (sequence is synthesized)
ttcatacatactctcaaggagccccagatagaaagacttggttttctcaccctccagtgaatggacctcaagtttatggagggaataggatgatccctggcctacactgactaagcctgt

SEQ ID NO: 758407 - DNA, 120 bp, Artificial Sequence
  ENSG00000214216_5 (sequence is synthesized)
catcaagaaatgagcttcctctaacaaccatgagtccatttggaacttctgtgttaaaagccttcagtccaagtcaaatgttgtcagtgagctgtgtccctggggagttctttatgccct

SEQ ID NO: 758408 - DNA, 120 bp, Artificial Sequence
  ENSG00000214216_6 (sequence is synthesized)
gcctcttgcttgatcttttccaggttgttgaacctcagccctctttctctgggtttaatctattgctgttactgcctagacaattttctatcttctcatatctgatcaactgactgtctt

SEQ ID NO: 758409 - DNA, 120 bp, Artificial Sequence
  ENSG00000214216_7 (sequence is synthesized)
caagtcccttccttccttctactaacctctaacacaaccttaatggaggccaacaagcccttacctaacttctggacattgccagctgctctgcagccccacgcccataactgcaattat

SEQ ID NO: 758410 - DNA, 120 bp, Artificial Sequence
  ENSG00000214216_8 (sequence is synthesized)
tgcctatctcaactatctaccccaggcatgcactacacaggaaatcagctcactaatctggttgagttcctgtgtggagctgataatgatgcttttgcatgcttctgctctgattgtttt

SEQ ID NO: 758411 - DNA, 120 bp, Artificial Sequence
  ENSG00000214216_9 (sequence is synthesized)
ggctaggcctagtggttaatgtggttctttgaacatttctgccttaaaatatataacaaaagtaacgtttaagtatgagtgctcaaattcattatcttaataaaagctgagcacttgtta

SEQ ID NO: 758412 - DNA, 120 bp, Artificial Sequence
  ENSG00000214216_10 (sequence is synthesized)
tgtgccaggcactctgctattatcttgtttaatcctatcaatgatcatacaaagaaagacactattattatctccattttacaggtgatgaaaaagagacttaaagagataactaccttt

SEQ ID NO: 758413 - DNA, 120 bp, Artificial Sequence
  ENSG00000214216_11 (sequence is synthesized)
tcttgggccacccattgggttggagctccatattttattcttccactatattacttgaaaagaaggctgcatttagacacggtcaagcaatcagttcatgcatttctaagactgctttac

SEQ ID NO: 758414 - DNA, 120 bp, Artificial Sequence
  ENSG00000214216_12 (sequence is synthesized)
gtcagcatgaacaccttctccgacagcagcacacccgtgagtgtcatgtttctttttctatgtcctgacttgacattcaactgaaagcctagactttggttctaagagagaaatcttggg

SEQ ID NO: 758415 - DNA, 120 bp, Artificial Sequence
  ENSG00000214216_13 (sequence is synthesized)
atgtgagcaggtggtttgtgacagtgaagatctatgtagcttatttgctacccaggaacccatggtgagagttttgtcacctcaaaataaagacacaattcataagcacaaagtgaactt

SEQ ID NO: 758416 - DNA, 120 bp, Artificial Sequence
  ENSG00000214216_14 (sequence is synthesized)
tatcaagtctggagaaaatagattgcatttatgtgttctcatttctctattatggaggtatcttttttgcttttctttataatagcatatttcttttagtatgtgctgtgtgtttctttt

SEQ ID NO: 758417 - DNA, 120 bp, Artificial Sequence
  ENSG00000214216_15 (sequence is synthesized)
tagaagataagattggttataaggagtagaaagagaacttttaccagaagaattgaaagtggtcacacactcaggggttgcaacttaaatgtctccaggggccaggtaagtcaccctcat

SEQ ID NO: 758418 - DNA, 120 bp, Artificial Sequence
  ENSG00000214216_16 (sequence is synthesized)
gactgaggtggctgagctgtgcccctggctacacggagaacatagacctcacctgaagggcagcgcacttggctcctgacaatgtgacaccatgtggcgatacaggcaggcatggccaaa

SEQ ID NO: 758419 - DNA, 120 bp, Artificial Sequence
  ENSG00000214216_17 (sequence is synthesized)
tgtgattttctttcttcaggacatgtcagaaatctgcatttttaagtgttagcagccagtaagaaaatttaaaaggtaaagtaagcatgcctacagaccacaattgacctacaggccacc

SEQ ID NO: 758420 - DNA, 120 bp, Artificial Sequence
  ENSG00000214216_18 (sequence is synthesized)
agtttaagaaatctgagatagagagttaaggaataagggaatctgctggaagtctttatttttaaaaaacaccaaaagtgggaagaaatcagtgatgagggatttatgaaccaggatttt

SEQ ID NO: 758421 - DNA, 120 bp, Artificial Sequence
  ENSG00000214216_19 (sequence is synthesized)
gtggatttaagcattgtgataatttgtaaccagtcactgaaatgctgaaaagttagagaaatgaagtaattacacaagtatattacttccaaaaatttttcttttacttttggttatcat

SEQ ID NO: 758422 - DNA, 120 bp, Artificial Sequence
  ENSG00000214216_20 (sequence is synthesized)
gtttattctgtggtaaaaaggtttcccaacactcaacgcaatgtattctttttgggatcaggtaaaagttactgtatttgaaatgttttcagatggttgcattgcatattcttcaataaa

SEQ ID NO: 758423 - DNA, 120 bp, Artificial Sequence
  ENSG00000214216_21 (sequence is synthesized)
gaacaatatagacattcttgcctctgtaatgcatggagtctagtgggaggataaatattaagcaaatatcggcataaagaagtgtattcacaaattatggtaacaagctaggaaggatat

SEQ ID NO: 758424 - DNA, 120 bp, Artificial Sequence
  ENSG00000214216_22 (sequence is synthesized)
ctaaacagtacattataattgggagagagaacagaaattataattgggagagagatttagattaggggacagagagagcttctgtgagagagtggaataagccgagacctaagctgacat

SEQ ID NO: 758425 - DNA, 120 bp, Artificial Sequence
  ENSG00000214216_23 (sequence is synthesized)
ccaggggcatgcctgcagcccagaaagcagatgacagtggtggaggaagaactgaaaagattgcagaatcctctagaacaagttaatgatggaaaatattcatttgaaaacattcagcga

SEQ ID NO: 758426 - DNA, 120 bp, Artificial Sequence
  ENSG00000214226_0 (sequence is synthesized)
ggagtaacagtggggcgtttgagaggatggagggttgaatgccaaaacttcgtaatcgtagaaaattctggaaagccgccggcggggcaaggccacgaggatcctcctcgcagcaccgcg

SEQ ID NO: 758427 - DNA, 120 bp, Artificial Sequence
  ENSG00000214226_1 (sequence is synthesized)
gcggggcccaggggccgcgctcacgcccgccgctcggcgcagacacgagtgcccccgacttgagccgaacctctagccgatgccggcgccgccgccgccggggatgcgtaagccgactgg

SEQ ID NO: 758428 - DNA, 120 bp, Artificial Sequence
  ENSG00000214226_2 (sequence is synthesized)
ctgggaagcgagggggggaggcggcctgcgcggcaccgcccgacctggccgcggcgggctgagccccaggttccggaggaatgctcgctccccgctggagtcctaccagcccaacacgga

SEQ ID NO: 758429 - DNA, 120 bp, Artificial Sequence
  ENSG00000214226_3 (sequence is synthesized)
cctgagccgcgaccacgcgggctgcagcctgcagcacatcagctacccggagaacgcggacgcggaagcaccgctgctcagcacccccgaagaaacacggaatccagagaggcacaggca

SEQ ID NO: 758430 - DNA, 120 bp, Artificial Sequence
  ENSG00000214226_4 (sequence is synthesized)
ccgccccggcgcgcacagctgcactcagcggcttccttcctactacatacatacataggagtgggagccgaggaccacttgttgcttgcggacttcctctagcataaaagatggaaagaa

SEQ ID NO: 758431 - DNA, 120 bp, Artificial Sequence
  ENSG00000214226_5 (sequence is synthesized)
aacacacaccgaagcaagggaccaaaggaacagaaaagaaacgcagagatcataggaaaactgcaaagaaatacttgataatatcttccaaacgattagagaagacataacattcattaa

SEQ ID NO: 758432 - DNA, 120 bp, Artificial Sequence
  ENSG00000214226_6 (sequence is synthesized)
gaatacacatatagatgtatatatacgtatgaagaaaacctgcttgatatcacacagtcaggagtcaactgagttggggctttgaacttaggtttatctgatgccaaagtttgtgatgct

SEQ ID NO: 758433 - DNA, 120 bp, Artificial Sequence
  ENSG00000214226_7 (sequence is synthesized)
cttcaaccatttagggtaccgcagagtgtggattttgaatcacctgcatcagcatcattttaaaatatagattctgtggtcctgaccaggtctctgaagtcagaatatgaagtggagcta

SEQ ID NO: 758434 - DNA, 120 bp, Artificial Sequence
  ENSG00000214226_8 (sequence is synthesized)
ttgatatgtgaaggttcccagcaggaggatgaaaatttacaggaattcggaggaaaatatttcagtggtcattactaaaacgctcagagtcagatacattcagcatcataccgtaagtcc

SEQ ID NO: 758435 - DNA, 120 bp, Artificial Sequence
  ENSG00000214226_9 (sequence is synthesized)
cgttagtcaaagcataaacaagcgcagggcctggcatggcttccttcaagttggctgactcagtctgggaggattcactcagcaagaggcagaggaaccaaggcaggatgaagacattgc

SEQ ID NO: 758436 - DNA, 120 bp, Artificial Sequence
  ENSG00000214226_10 (sequence is synthesized)
ctgtgctcgtgctgtctcttaccttactgactgtcttctcagagacctccccgattttgacagagaagcaggccaaacagctcctaagatctcggcgacaggatagaccaagcaaacccg

SEQ ID NO: 758437 - DNA, 120 bp, Artificial Sequence
  ENSG00000214226_11 (sequence is synthesized)
gattccccgatgagccaatgcgggaatacatgcaccacctgctcgccctggagcatcgcgctgaggagcagttcctggagcactggctgaaccctcactgcaaaccccactgtgacagga

SEQ ID NO: 758438 - DNA, 120 bp, Artificial Sequence
  ENSG00000214226_12 (sequence is synthesized)
acaggattcatcctgtgtaaggggatcaggaccagcctcgcaagcattttaatagacaacaagctggataatgtcgaagcaagacaaggctgcttctttcacttgtttttaaattgcaga

SEQ ID NO: 758439 - DNA, 120 bp, Artificial Sequence
  ENSG00000214226_13 (sequence is synthesized)
aatggatgtcttcagacctcgtgaactgtgggcatatcaaagattgccttggaaatggcaaatatatatactgcttcattttactaacctgcatagatcactaaaaccaatagcttaaag

SEQ ID NO: 758440 - DNA, 120 bp, Artificial Sequence
  ENSG00000214226_14 (sequence is synthesized)
catagacacctcccaaaggtcttcccatcagtttgcaagagtgggaacaaccagaatcttacctggggttgatggagctggaactcccagaccaggagttggggcaggctgcctgcccta

SEQ ID NO: 758441 - DNA, 120 bp, Artificial Sequence
  ENSG00000214226_15 (sequence is synthesized)
aggaatttggggaatccttgttcagagtagtgaagcataccacttggggttgctgagttgttttgtcctctatttttttcctcttcttttctgccctaataaacattggtattaaattta

SEQ ID NO: 758442 - DNA, 120 bp, Artificial Sequence
  ENSG00000214226_16 (sequence is synthesized)
cattactctagaaagttccttcatatgaaaatatggaatgcctcatgaatttatatgccgttcttgtgcagtagtatttatagaaaaaaaaaaggtttaacaaggcttgttttctctaaa

SEQ ID NO: 758443 - DNA, 120 bp, Artificial Sequence
  ENSG00000214226_17 (sequence is synthesized)
aaattacctggtcacaatagctctcttttttagtgtgctgaaggaggcagctgaattatacataaagttgagatggtcatttataagattcactagaacagggttctgcaaactgcaaat

SEQ ID NO: 758444 - DNA, 120 bp, Artificial Sequence
  ENSG00000214226_18 (sequence is synthesized)
ctgcctgtcctcccatcctgccctgtctagggagccagagccacaccacgcatattgatcccttggctgtcactgtgggtgaagccttcttcagtgtggtttgttttgacaggaatacat

SEQ ID NO: 758445 - DNA, 120 bp, Artificial Sequence
  ENSG00000214237_0 (sequence is synthesized)
atggatatggaggtcttgggccaggaacaaagctccgaacagctggatttagaggagatctcaaggaaaatttcattccttgacaaatggagggaaatctttagttatcacaggttggga

SEQ ID NO: 758446 - DNA, 120 bp, Artificial Sequence
  ENSG00000214237_1 (sequence is synthesized)
accaataattcaactcctcagaatcatgaaggcaaccatacatctgctgatgaaaatgaagatggaacaggactatctcagcccaaaggacaaggacatttgccatcaagtggcctttgt

SEQ ID NO: 758447 - DNA, 120 bp, Artificial Sequence
  ENSG00000214237_2 (sequence is synthesized)
tctattcccaacccctctatcatctcttcaaaattgggtggctttcctatctccctagcaatggccacgaagctgcggcagatcctgtttggaaacacagtccatgtctttagctataac

SEQ ID NO: 758448 - DNA, 120 bp, Artificial Sequence
  ENSG00000214237_3 (sequence is synthesized)
tggaaaaaggcctatttcaggttccatgatccttcttctgaactagctttcactctggaagtgggaaagggaggggcccgaagcattcagatggctgtgcaaggatccatcatcaaatac

SEQ ID NO: 758449 - DNA, 120 bp, Artificial Sequence
  ENSG00000214237_4 (sequence is synthesized)
ttgttgtttaccaggaaaggaaaagactgtaaccttggcaacttatgtgaaataagcaagaaggagcaggagcaagccttggccgcggcgcttgctggcatcctgtgggctgcaggagca

SEQ ID NO: 758450 - DNA, 120 bp, Artificial Sequence
  ENSG00000214237_5 (sequence is synthesized)
gctcagaaggccaccatctgtcttgtcactgaggacatttacgttgcgtcgactccggactactctgtggacaatttcactgagcgactccagctgtttgaatttttagagaaagaagcc

SEQ ID NO: 758451 - DNA, 120 bp, Artificial Sequence
  ENSG00000214237_6 (sequence is synthesized)
gctgagaaattcatctacgatcacttactatgtttcagaggggaaggaagccatggtgtcatcctgtttctgtacagcctgatcttctctagaacatttgaaaggcttcaaatggaccta

SEQ ID NO: 758452 - DNA, 120 bp, Artificial Sequence
  ENSG00000214237_7 (sequence is synthesized)
gatgtcaccaccactcagctgctacaaccaaatgctggaggctttctgtgcaggcaggcagttctgaacatgattttaactggaagagcaagtcccaatgtcttcaatggctgtgaggaa

SEQ ID NO: 758453 - DNA, 120 bp, Artificial Sequence
  ENSG00000214237_8 (sequence is synthesized)
gaaacactacatggagtcctgacccgcagtgatgttggctatttgcagtggggtaaggatgcctcggaagatgacagactctcacaggtgggcagcatgctgaagactcccaaattacct

SEQ ID NO: 758454 - DNA, 120 bp, Artificial Sequence
  ENSG00000214237_9 (sequence is synthesized)
atttggctgtgcaacatcaatggaaattacagcatccttttttgcacaaacaggcagctcttatcagactggaaaatggaacgtctctttgatctgtacttttacagtggccaaccctca

SEQ ID NO: 758455 - DNA, 120 bp, Artificial Sequence
  ENSG00000214237_10 (sequence is synthesized)
cagaaaaagcttgtgcgtcttacaatagatactcactcccatcactgggaaagagaccaacaggaagagaaacatggaccaagacgacggttttcaccagtggagatggcaatcagaacc

SEQ ID NO: 758456 - DNA, 120 bp, Artificial Sequence
  ENSG00000214237_11 (sequence is synthesized)
aagtggagcgaggccaccatcaactggaatgggaccgttcccttcttctaaagggaaactaggctgtgcaatgaagtctgaagtgtcagaactgctgggatgcaaaagcctaatgtgggg

SEQ ID NO: 758457 - DNA, 120 bp, Artificial Sequence
  ENSG00000214237_12 (sequence is synthesized)
gagaccaatcgtttccatatttctcattcacaagccccaccaaaaaatatatatatataccattagcagttttttcattttttaagtctctggtaaatccctagctgtcagcattgtagg

SEQ ID NO: 758458 - DNA, 120 bp, Artificial Sequence
  ENSG00000214237_13 (sequence is synthesized)
agaaacacaggcccccacaccagggcctgcatggtgcctcctccgtagtcacatagactggtttctttcttttattcaaaagagaaaatgaagcctctctcttgcatgtttttccaaagt

SEQ ID NO: 758459 - DNA, 120 bp, Artificial Sequence
  ENSG00000214237_14 (sequence is synthesized)
tgtcttttcttggtataactctccatgaggattacggaagcaggctgctagctttcatttggggatgaagtcattggtaatgcatcatcggatttttagttatggcaagaactcaagcct

SEQ ID NO: 758460 - DNA, 120 bp, Artificial Sequence
  ENSG00000214237_15 (sequence is synthesized)
tctcaaggacttcctggtatggacggcattcctttccaaggatacagttcatatgcccacattagcaagttcttgtcattaaaatagtaaatgggcttcttggggtttgaagcaggggtt

SEQ ID NO: 758461 - DNA, 120 bp, Artificial Sequence
  ENSG00000214237_16 (sequence is synthesized)
attcctggtaggctgacagctatagcagttgacatgtgggtttcagtagccacaaggagacattctttttattagcagtatgtttgtttcttttcttcaatgctggatataaatacacaa

SEQ ID NO: 758462 - DNA, 120 bp, Artificial Sequence
  ENSG00000214237_17 (sequence is synthesized)
ctggccttcaagcctctggatggagccttaacttgtatcttatatagatacttaatcgctgtcctttcaagcaacgaagatagataatatgtaatccttgccagggcccccagccctcag

SEQ ID NO: 758463 - DNA, 120 bp, Artificial Sequence
  ENSG00000214237_18 (sequence is synthesized)
tgattctgctgcctacactgtggtatagaccagaagttagagcaactatctgcattttacttgacaaggaaatgtttttaatgaaaaactttaataaaaatgtattcttggcttctgcaa

SEQ ID NO: 758464 - DNA, 120 bp, Artificial Sequence
  ENSG00000214253_0 (sequence is synthesized)
gttctccgcccctgccactgggccatggagactgtggcacagtagactgtagtgtgaggctcgcgggggcagtggccatggaggccgtgctgaacgagctggtgtctgtggaggacctgc

SEQ ID NO: 758465 - DNA, 120 bp, Artificial Sequence
  ENSG00000214253_1 (sequence is synthesized)
tgaagtttgaaaagaaatttcagtctgagaaggcagcaggctcggtgtccaagagcacgcagtttgagtacgcctggtgcctggtgcggagcaagtacaatgatgacatccgtaaaggca

SEQ ID NO: 758466 - DNA, 120 bp, Artificial Sequence
  ENSG00000214253_2 (sequence is synthesized)
tcgtgctgctcgaggagctgctgcccaaagggagcaaggaggaacagcgggattacgtcttctacctggccgtggggaactaccggctcaaggaatacgagaaggccttaaagtacgtcc

SEQ ID NO: 758467 - DNA, 120 bp, Artificial Sequence
  ENSG00000214253_3 (sequence is synthesized)
accaggccaaggaactggagcggctcattgacaaggccatgaagaaagatggactcgtgggcatggccatcgtgggaggcatggccctgggtgtggcgggactggccggactcatcggac

SEQ ID NO: 758468 - DNA, 120 bp, Artificial Sequence
  ENSG00000214253_4 (sequence is synthesized)
ttgctgtgtccaagtccaaatcctgaaggagacgcgggagcccacggagaacgctccaggagggcctgtccatcctcgctgtcctttccctgttctccccctgccccccgtctctatcct

SEQ ID NO: 758469 - DNA, 120 bp, Artificial Sequence
  ENSG00000214253_5 (sequence is synthesized)
ctgtggccttcagctaatttctgctcccctgagattcgtccttcagccccatcatgtgctttgggatgagtgtaaataaaacggggctgtggcttgggaacccccgtgtctgcgttgagg

SEQ ID NO: 758470 - DNA, 120 bp, Artificial Sequence
  ENSG00000214253_6 (sequence is synthesized)
ggaggggtgggttctgaacgctgggcacagggggcggagacgtcactcctggtcctctcctgcccctgccctccaggttggcacggggttctttgtccaccccgcagcccagagcccaca

SEQ ID NO: 758471 - DNA, 120 bp, Artificial Sequence
  ENSG00000214253_7 (sequence is synthesized)
aacgaaaccgacacccggaagcctagtcgcccggaggttctgagcgttctgttcggacctcctaccgttactctttcattcactcaagaaatgatttcttgagttcccggcctttgtcag

SEQ ID NO: 758472 - DNA, 120 bp, Artificial Sequence
  ENSG00000214253_8 (sequence is synthesized)
agagatgaacgaggcacggtccgtgtccagctaaaggacagtaggactggaagagcgttgttttccaaggtacaggatgccgcgcctcctaggagccgaagggacgggaggccgcgtaga

SEQ ID NO: 758473 - DNA, 120 bp, Artificial Sequence
  ENSG00000214253_9 (sequence is synthesized)
ggaggggaccgtccccgagcctcgccgagcctgcggtgtagacacctctggtgtctagtggttgaggatctgttgaccgggcatggtgggtagaaggaacgctccgagcagaagaaaagt

SEQ ID NO: 758474 - DNA, 120 bp, Artificial Sequence
  ENSG00000214253_10 (sequence is synthesized)
gtggcacagtagactgtagtgtgaggctcgcgggggcagtggccatggaggccgtgctgaacgagctggtgtctgtggaggacctgctggtgaggcctggcccggacagagggaaaggga

SEQ ID NO: 758475 - DNA, 120 bp, Artificial Sequence
  ENSG00000214253_11 (sequence is synthesized)
cgcccctgccactgggccatggagactgtggcacagtagactgtagtgtgaggctcgcgggggcagtggccatggaggccgtgctgaacgagctggtgtctgtggaggacctgctgagct

SEQ ID NO: 758476 - DNA, 120 bp, Artificial Sequence
  ENSG00000214253_12 (sequence is synthesized)
ggagcccgaccgtggttagactgacgggatctgggatcatgcaggagctgtgagctcagggcgctcctccagcggtggaggaatacagtgaccatcataaggtgtcacctattactgcgt

SEQ ID NO: 758477 - DNA, 120 bp, Artificial Sequence
  ENSG00000214274_0 (sequence is synthesized)
gtcctgccaaagaaagcagcagcgaataagtacgtggcagatggtgctgtcgaccagtgtcaagaccaagtttcatgggttcctggacgctcagccaggggtagtctctgaagggccgcc

SEQ ID NO: 758478 - DNA, 120 bp, Artificial Sequence
  ENSG00000214274_1 (sequence is synthesized)
tggcaattgggagcagaagccagtttcccgccatctgctctccgtggaggcagtgctctcgcggctgctgcccgttggggtccagctgaggaaggagcgcggatcccaggctcgttcttt

SEQ ID NO: 758479 - DNA, 120 bp, Artificial Sequence
  ENSG00000214274_2 (sequence is synthesized)
gcctgggctgcccctgcggcccctggggcgggtgctgctgcggcgccagctccaagggcggatccaggcgggaggggcctcctcggagaagcggggcgcggtcccaactacgcagaggct

SEQ ID NO: 758480 - DNA, 120 bp, Artificial Sequence
  ENSG00000214274_3 (sequence is synthesized)
ggcacgccgaccctccacacctcaccacgcccccatctccgtccgtgtacacacactcacacaaggacgccaaccccacctagatgcaaagcaggattcaaaagaacatctttgcgtttt

SEQ ID NO: 758481 - DNA, 120 bp, Artificial Sequence
  ENSG00000214274_4 (sequence is synthesized)
ctaccggctccccatcatcgtactagggaggaagaagcgggtgagaaacaaaacttctttccattgtcctgcccgtttctgcggacttgttctgaggccgaggagcctgtgttggaagag

SEQ ID NO: 758482 - DNA, 120 bp, Artificial Sequence
  ENSG00000214274_5 (sequence is synthesized)
tgttgttggtcttcgtgctgggtctgggtctgaccccaccgaccctggctcaggataactccaggtacacacacttcctgacccagcactatgatgccaaaccacagggccgggatgaca

SEQ ID NO: 758483 - DNA, 120 bp, Artificial Sequence
  ENSG00000214274_6 (sequence is synthesized)
gatactgtgaaagcatcatgaggagacggggcctgacctcaccctgcaaagacatcaacacatttattcatggcaacaagcgcagcatcaaggccatctgtgaaaacaagaatggaaacc

SEQ ID NO: 758484 - DNA, 120 bp, Artificial Sequence
  ENSG00000214274_7 (sequence is synthesized)
ctcacagagaaaacctaagaataagcaagtcttctttccaggtcaccacttgcaagctacatggaggttccccctggcctccatgccagtaccgagccacagcggggttcagaaacgttg

SEQ ID NO: 758485 - DNA, 120 bp, Artificial Sequence
  ENSG00000214274_8 (sequence is synthesized)
ttgttgcttgtgaaaatggcttacctgtccacttggatcagtcaattttccgtcgtccgtaaccagcgggcccctggtcaagtgctggctctgctgtccttgccttccatttcccctctg

SEQ ID NO: 758486 - DNA, 120 bp, Artificial Sequence
  ENSG00000214274_9 (sequence is synthesized)
cacccagaacagtggtggcaacattcattgccaagggcccaaagaaagagctacctggaccttttgttttctgtttgacaacatgtttaataaataaaaatgtcttgatatcagtaagaa

SEQ ID NO: 758487 - DNA, 120 bp, Artificial Sequence
  ENSG00000214274_10 (sequence is synthesized)
tccaggttcacacaactggaacccatctccaggaacaaacagctggaacccatctcccgttgaagggaaactgccagatttttgtaagattcttcctcctgggagcctgtgttggaagag

SEQ ID NO: 758488 - DNA, 120 bp, Artificial Sequence
  ENSG00000214274_11 (sequence is synthesized)
gttctgaggccgagattcccagatgtaaggtattaaaagtagtttgtaaactttctgtgacgtatgctgagtctatccaaactgtcgggaattggagcctcccgggaaccaaacactccc

SEQ ID NO: 758489 - DNA, 120 bp, Artificial Sequence
  ENSG00000214279_0 (sequence is synthesized)
ttgccccagctaagcagcgagagcttgctgaagcccagagggctgtgggaccatgagggcagctctctggaccctgggactcgggccccttcttctgaatctctgggcagtccccattgg

SEQ ID NO: 758490 - DNA, 120 bp, Artificial Sequence
  ENSG00000214279_1 (sequence is synthesized)
tggaccaggtgctctgaggctggcgtacagacacagcacgtgcgacggagtggtgttggtccgacaccacggggcatggggatacgtgtgcaaccaggagtggacgctggcagaggcctc

SEQ ID NO: 758491 - DNA, 120 bp, Artificial Sequence
  ENSG00000214279_2 (sequence is synthesized)
tgtcgtgtgcaggcagctgggctgcggccctgccgtgggcgcccccaagtatgtcccgctgcctggagagatggcccagccctggcttcacaacgtgtcctgccggggcaacgagtcctc

SEQ ID NO: 758492 - DNA, 120 bp, Artificial Sequence
  ENSG00000214279_3 (sequence is synthesized)
cctctgggagtgcagccttggctcatggtgccagagcccgtgcccccacgcatgggtggtggtcgcgctgtgctccaacggcactttccgggagctccggctggtgaagggccgcagtcc

SEQ ID NO: 758493 - DNA, 120 bp, Artificial Sequence
  ENSG00000214279_4 (sequence is synthesized)
ctgcgcgggactccccgagatcagaaacgtgaatggggtggaccgcctctgtgtcctgcatgtggaggaggccatggtgttctgccgggagctggggtgcggccctgtgctccaggcccc

SEQ ID NO: 758494 - DNA, 120 bp, Artificial Sequence
  ENSG00000214279_5 (sequence is synthesized)
ccgccgggacgtgggcgtcgtcaggaagtacctggcctgcaggggtaccgagcccaccatccgcagctgcagactggacaacaacttccgcagcggctgcgacctgcggctggacgcaga

SEQ ID NO: 758495 - DNA, 120 bp, Artificial Sequence
  ENSG00000214279_6 (sequence is synthesized)
ggtggtctgctcaggacacaccgaggcccgactggtgggcggcgagcacccctgcgccgggcgcctggaggtgacctggggcaccgtctgtgatgcggccctggacctggccacggccca

SEQ ID NO: 758496 - DNA, 120 bp, Artificial Sequence
  ENSG00000214279_7 (sequence is synthesized)
cgtggtgtgccgggagctgcagtgtggggcggtcgtgtccacgcccgagggcgcccgcttcggccggggctcggggccggtgtggacggaggccttccgctgtgcgggcaacgagtcgct

SEQ ID NO: 758497 - DNA, 120 bp, Artificial Sequence
  ENSG00000214279_8 (sequence is synthesized)
gctgttccactgcccacgggggcgtgggagccagtgtgggcatggtcacgacgcggggctcaggtgctcagagttcaggatggtcaacggcagcagcagctgtgagggccgcgtggagtt

SEQ ID NO: 758498 - DNA, 120 bp, Artificial Sequence
  ENSG00000214279_9 (sequence is synthesized)
ccaggtgcaggggtcctgggcacccctctgtgccacccactgggacatagcagatgccaccgtcctctgccaccagctcaactgtggcaacgcggtggccgcacctggaggaggccattt

SEQ ID NO: 758499 - DNA, 120 bp, Artificial Sequence
  ENSG00000214279_10 (sequence is synthesized)
tggggacggggacgctgccatctggcctgatgcctttcactgtgaggggacagagtcctacttgtggaattgcccagtaagcaccctgggggccccggcctgtgccccgggaaacacagc

SEQ ID NO: 758500 - DNA, 120 bp, Artificial Sequence
  ENSG00000214279_11 (sequence is synthesized)
ctccgcggtctgctcaggtctggcccacgccctgcgactgagggaaggacagagccgctgtgacggccgcgtggaggtctccctggatggcgtgtggggccgcgtcctggacgatgcctg

SEQ ID NO: 758501 - DNA, 120 bp, Artificial Sequence
  ENSG00000214279_12 (sequence is synthesized)
ggacctgcgcggcgcgggcgtggtgtgccggcaactcgggtgcagaggggcccagcaagcctatgacgcacctgcccccagccgcggatccgtccaggtggcgctgagccgcgtgcgctg

SEQ ID NO: 758502 - DNA, 120 bp, Artificial Sequence
  ENSG00000214279_13 (sequence is synthesized)
tctgggcaccgaaacccgcctgactcagtgcaacgtgtccgcgaccctgcaggagcccgcggggacctcgcgggacgccggcgtggtgtgctccggtgaggtcggaaccgcgtcccccat

SEQ ID NO: 758503 - DNA, 120 bp, Artificial Sequence
  ENSG00000214279_14 (sequence is synthesized)
ccatggcccgtcgccacgggatcccgggcgccctgactctgtctctccacagggagcctcagggtgcggctggccgcggggccggggcgctgcacgggggcgcgtggggcaccgtgtgtg

SEQ ID NO: 758504 - DNA, 120 bp, Artificial Sequence
  ENSG00000214279_15 (sequence is synthesized)
tgcctgggacctgcgggacgcgcacgtggtctgcaggcagctgggctgtggccgcgccctgagcgccctgggggccgcacacttcggagccggggcagggcgcatctggctggacgagct

SEQ ID NO: 758505 - DNA, 120 bp, Artificial Sequence
  ENSG00000214279_16 (sequence is synthesized)
gggctgccagggccacgagtctgcgctgtggcagtgcccgtcggcgggctgggggcggcacgactggaggcacaaggaggacgccggcgtcttctgctcagagtcggtggctctgaggct

SEQ ID NO: 758506 - DNA, 120 bp, Artificial Sequence
  ENSG00000214279_17 (sequence is synthesized)
gcgaggtgggacctgctgctgtgctgggtggctggacgtgttctacaatgggacctggggcgccatgtgcagcaatgccctgaaggacctctccttgtccatcatctgcaagcagctggg

SEQ ID NO: 758507 - DNA, 120 bp, Artificial Sequence
  ENSG00000214279_18 (sequence is synthesized)
gaacaggcccttcccctctgcgggcaccgggaccgcctgggtggacaacatcgagtgccgcaggctgcccaactccactctgtggcaatgcccttcccacccatggcacccgcactcttg

SEQ ID NO: 758508 - DNA, 120 bp, Artificial Sequence
  ENSG00000214279_19 (sequence is synthesized)
cgaccttcgagagcaggattgtcagaggacaggccacaggctgctggggagcccctcaactgctcctcctggctcggctgcccagaggagggcgcactgcgcgtgcgcgggggcgaggac

SEQ ID NO: 758509 - DNA, 120 bp, Artificial Sequence
  ENSG00000214279_20 (sequence is synthesized)
cgctgctccgggcgcgtggagctctggcacgcgggctcctggggcaccgtgtgcgacgatggctgggacctggcggacgcggaggtcgtgtgccgccagctgggctgtggtcgggccgtc

SEQ ID NO: 758510 - DNA, 120 bp, Artificial Sequence
  ENSG00000214279_21 (sequence is synthesized)
ctttggccctggctccgggcccgtgtggctggacgaggtggggtgccggggcagcgaggcgtccctgtggggctgccctgcggagcggtggggacgcggagaccgcgcgcacgaggagga

SEQ ID NO: 758511 - DNA, 120 bp, Artificial Sequence
  ENSG00000214279_22 (sequence is synthesized)
gaccgcgcgcacgaggaggacgcgggcgtgcgctgctgggagcctggcccaggccccccactgcctgcagctcccttccggacattctgggtggtcagtgtcgtcctgggatcccttctt

SEQ ID NO: 758512 - DNA, 120 bp, Artificial Sequence
  ENSG00000214279_23 (sequence is synthesized)
ggtcttctccttctgggcctcatggcttttctgattctgcctcgagtcacacaagccatgcagaggggtctgggaagatccgaggtatctcctggagaagccatctatgatgtcattggg

SEQ ID NO: 758513 - DNA, 120 bp, Artificial Sequence
  ENSG00000214279_24 (sequence is synthesized)
gaaatgccgccagcaggactgtacgaggaaatcatggaggccgaggctgtgctccaagatgaggaggacggaagtgtggtgaaggtggacacagaagccgcagtttcaggggaggtgtct

SEQ ID NO: 758514 - DNA, 120 bp, Artificial Sequence
  ENSG00000214279_25 (sequence is synthesized)
aacctcctggagggacagtctatacgtgcggagggaggacacagcagacctgtttctcagggatatgacgaggctgcgtttcctctggaggagatgacgttgtaaagcaacctgaggatg

SEQ ID NO: 758515 - DNA, 120 bp, Artificial Sequence
  ENSG00000214279_26 (sequence is synthesized)
agatacaccagctggctgtcgaaatcacagctcttcattttcttgtacaattgtagtggatttcgtgagaacaccttggatgcctttctcttgcaatgtcctccatgtccatgtaaaatc

SEQ ID NO: 758516 - DNA, 120 bp, Artificial Sequence
  ENSG00000214279_27 (sequence is synthesized)
cagtccttccaggccctgcctggctctaaacctcatccccttcgagggccatctgctgtggacagttgtgctgtgtaaccttcagatttcccacacattacagcaaatgcaaatacacat

SEQ ID NO: 758517 - DNA, 120 bp, Artificial Sequence
  ENSG00000214279_28 (sequence is synthesized)
agaaatcagtggttccatttgtggtttagagacacatggtgccatcttcatcttccgctccacagctcgcttctggcacccagcagtgggttgcagagctccccatgccagaaccttcct

SEQ ID NO: 758518 - DNA, 120 bp, Artificial Sequence
  ENSG00000214279_29 (sequence is synthesized)
cttttttcttaaaaactcttcttaattgaatccaaagtatcttttaaatgttctacttgtgtaatcatgtcatctgtgaatattcagatttatcttctccttccaatccgtgtacattta

SEQ ID NO: 758519 - DNA, 120 bp, Artificial Sequence
  ENSG00000214279_30 (sequence is synthesized)
atctctttttctgtgccttatttcgggggctgggacccttcagtccagtgttgaagagaggcagccagtggaggtcttgtctcattcaaggactcagagcaaatgtgttccacatttaat

SEQ ID NO: 758520 - DNA, 120 bp, Artificial Sequence
  ENSG00000214279_31 (sequence is synthesized)
ttcactatgaaatataatatttgatgttcagttttgtagatgctatttatcagatcaaggaaagcccagtctatacctaatttgttaagggttttgctttttatcataagtgttgacttt

SEQ ID NO: 758521 - DNA, 120 bp, Artificial Sequence
  ENSG00000214279_32 (sequence is synthesized)
tatcaaattcttttttgtatctattaagatgatagatgattgattttcatatgttaaattaaccatgggttaaacaaacttacctttatcatgatatattattctttttgtatttcacag

SEQ ID NO: 758522 - DNA, 120 bp, Artificial Sequence
  ENSG00000214279_33 (sequence is synthesized)
gaattagtttggtaatatgttgggtcaatgtttaaaaaagaaaatgatgtgtaatttttttcttttattgtagtatttctgtttaatttttggtatgaggattattcaggtctcataaga

SEQ ID NO: 758523 - DNA, 120 bp, Artificial Sequence
  ENSG00000214279_34 (sequence is synthesized)
ttccacatcttggctattgtcaatagtgctgcggtgaacctgggcgtgcagtgaacctgggtgctgcagtgaacctgggcgtgcagtgaacctgggcgtgcagtgaacctgggtgctgca

SEQ ID NO: 758524 - DNA, 120 bp, Artificial Sequence
  ENSG00000214279_35 (sequence is synthesized)
gtgaacctgggcgtgcagtgaacctgggcgtgcagatgtttctgctgggctgatttcatttcctctgggtctatacacagcagtgggattgctggattgtgtagtagctctagtttaaat

SEQ ID NO: 758525 - DNA, 120 bp, Artificial Sequence
  ENSG00000214279_36 (sequence is synthesized)
tttctgaagaagctctatactgtttctataactgatctcagtgctgggaccccttgagcttagccccctccttctgagactgcccatggtgcccaggcagggcactccctggcctgactg

SEQ ID NO: 758526 - DNA, 120 bp, Artificial Sequence
  ENSG00000214279_37 (sequence is synthesized)
gggtgcctgggaagaggtttatctgtcctgacaggtcacttacaggggatgccattcaatcagagcctgggcctgggggtcactaggatccacagccttccttgtgaagcttctctgggc

SEQ ID NO: 758527 - DNA, 120 bp, Artificial Sequence
  ENSG00000214279_38 (sequence is synthesized)
cgtgcgctgctggggtgagtggggggcggtgggaagtcggtcatggggccggcagagggcgctgggatggagtcagtcttgagtgtcacttcggtgggcaggagagctcgcccaggtgtt

SEQ ID NO: 758528 - DNA, 120 bp, Artificial Sequence
  ENSG00000214279_39 (sequence is synthesized)
agtgggttggtttccaccctgggatttttctgggataggctgatttgctgtggaggcctgtttgggacatgcactccctggggtttccccctaatcttttttgggaattcccttttgttt

SEQ ID NO: 758529 - DNA, 120 bp, Artificial Sequence
  ENSG00000214279_40 (sequence is synthesized)
attccaatccttgttcatttcgggtatgtgtcacctgggtgttggcaggttcagttgttccctgcacctcattctctttgcagaaaacaaacagttaaccacagtgatgaccttagcaaa

SEQ ID NO: 758530 - DNA, 120 bp, Artificial Sequence
  ENSG00000214279_41 (sequence is synthesized)
atgttttaccaaggaagggggctgtcccttgaaagcagacacccccagtggacactagccattttggggtgctctgcacagctgaaaccagcagatgcccccccagcacttccgactcgc

SEQ ID NO: 758531 - DNA, 120 bp, Artificial Sequence
  ENSG00000214279_42 (sequence is synthesized)
aggtcctccatgagggagagggtgtggctgggcccttggagccaccctgtcctgctgagggtgtgcaggtcccccccaccacccagctggctcaagacctctcctttctcagagcctggc

SEQ ID NO: 758532 - DNA, 120 bp, Artificial Sequence
  ENSG00000214279_43 (sequence is synthesized)
ggtggtctgctcaggtgaggctgccacctgatgttcccagtgacccttgggatgatgctgggcccggacctggggagggcagggagaaggggggtgggcgttcccacggatgggcccccc

SEQ ID NO: 758533 - DNA, 120 bp, Artificial Sequence
  ENSG00000214279_44 (sequence is synthesized)
tgtcctgcatgagacattgggcgcagaggtgggaaagggcctcagctctcacgctggttctcagcagagtggagctgagtttctggtggccccacagaggtgtcctggctcagaacccgc

SEQ ID NO: 758534 - DNA, 120 bp, Artificial Sequence
  ENSG00000214279_45 (sequence is synthesized)
aggccatctaggggtcctggctgccgctgcaagtctgagctgcctcagctgtgatctctgcatgtctaacatggatcggggttgggtagaggtcacttcttcccagccctgcctcaactg

SEQ ID NO: 758535 - DNA, 120 bp, Artificial Sequence
  ENSG00000214279_46 (sequence is synthesized)
tgtgtgagctgcactggcctcacagctcctggccttgttgtgcatatgaggagcagctgaaatgaggtggatagtctgcctgctgcggtaccccagagagggtggtgctcagtggaccaa

SEQ ID NO: 758536 - DNA, 120 bp, Artificial Sequence
  ENSG00000214279_47 (sequence is synthesized)
ggggtgccctgacctcgcctctgggattgcagagggtgttgctgtcatggcctcggacaggcagaggctgtgaaatacgtgagcacctgcagcaggtgaccctgaccctgaccttggtga

SEQ ID NO: 758537 - DNA, 120 bp, Artificial Sequence
  ENSG00000214279_48 (sequence is synthesized)
tgcggccaaggacgtctgctctgctctgggtgccgggtggaagggcctgtggctgcaagttcctgcctgtgcttggtagaccctctgcctagatgcaggtgatggctcctggctgaagcc

SEQ ID NO: 758538 - DNA, 120 bp, Artificial Sequence
  ENSG00000214279_49 (sequence is synthesized)
ggcatggtcacgacgcggggctcaggtgctcaggtgaagtcctgtgtgtgggctctgaaggctcagccctgccttgttctctgtcaaatcccttcgtgccctaaaggtgcctctggccag

SEQ ID NO: 758539 - DNA, 120 bp, Artificial Sequence
  ENSG00000214279_50 (sequence is synthesized)
taggtgtgggtgcttttgatgtttgcttctgttggttgaaagaagcgcagggaagagactgggtgtagagtgatgtaccccaaggctgcagctaagatcaaattcttctggagagctgtg

SEQ ID NO: 758540 - DNA, 120 bp, Artificial Sequence
  ENSG00000214279_51 (sequence is synthesized)
tgagctggatgctgatgcagaggagggtgggggagctggtgagaccaaggctgggctctgtgcccatcccactgggtgtgaaggaaggaaatgaccacagacagccatgttctgggtcgg

SEQ ID NO: 758541 - DNA, 120 bp, Artificial Sequence
  ENSG00000214279_52 (sequence is synthesized)
gggcccactgggaagcatcatgtggtttgctggcaagggacggtggccagggatgggagggcactgggagtctggctatgttgccgtggtccctccatcccagcccacagcatcctgcct

SEQ ID NO: 758542 - DNA, 120 bp, Artificial Sequence
  ENSG00000214279_53 (sequence is synthesized)
ctttgctgcctggctggggttcctgcctggagttgctgtcctcccttgcctgtggccacatccacactgagggcctgtgtgtgaccatgctcaccttgcctcaggtctgggaagatccga

SEQ ID NO: 758543 - DNA, 120 bp, Artificial Sequence
  ENSG00000214279_54 (sequence is synthesized)
tgagcccagggccctgtgtgactgcccggtcacctgcccctgaagctggccctggctcagcccatcactgtcctccctgaaaaaggagctgccgagtgaccatgcggccagctgggtcca

SEQ ID NO: 758544 - DNA, 120 bp, Artificial Sequence
  ENSG00000214279_55 (sequence is synthesized)
cagcctccagagtagctaggattacagaaagaaagaacaaaaaagagaaggagagtaaattcttgtttccaagttagacaagagagttatgattaaatgccaccttgggtccacaagtct

SEQ ID NO: 758545 - DNA, 120 bp, Artificial Sequence
  ENSG00000214279_56 (sequence is synthesized)
atgccaccttgggtccacaagtcttccataagaaaaacaatgaaaggatttctggatgattctattatgacatcacaacttgcagcagaggcagatgtaatgaggcaatacttgacattg

SEQ ID NO: 758546 - DNA, 120 bp, Artificial Sequence
  ENSG00000214279_57 (sequence is synthesized)
tacttgacattgttttcagggcatttgctcgtgtcctcggtctcttgccttggcacctgggtggcttgccacccacagcaattgtgactttgaaaggccattccaccgttctatcaatcc

SEQ ID NO: 758547 - DNA, 120 bp, Artificial Sequence
  ENSG00000214279_58 (sequence is synthesized)
atgatgggcaacgtggtaagaccagtgaattccacgaacatgagcccactgctgcacttctatggccgtaaagatagacaagagaagcacttctagaatggcaggataagaagctctgaa

SEQ ID NO: 758548 - DNA, 120 bp, Artificial Sequence
  ENSG00000214279_59 (sequence is synthesized)
aatctgttcctccagaactgcaatgtgaacaccagctaaagtgttgaaaaatgaatggagcctcagagacctttgggacatcatcaagggtatctaacaggtacaatgggaatcacagaa

SEQ ID NO: 758549 - DNA, 120 bp, Artificial Sequence
  ENSG00000214279_60 (sequence is synthesized)
agagagaaaataaggggacaaaaatactatttgaagaaataatgggtgtaaattccccaaatttgatgaaaaagatccatctacatatccaaaagcttaataaatgaatattcatttatt

SEQ ID NO: 758550 - DNA, 120 bp, Artificial Sequence
  ENSG00000214285_0 (sequence is synthesized)
atgattagctcagtaaaactcaatctcatcctagttctgtcgctgtccacaatgcatgtgttttggtgttatccagttccatcttctaaggtgtctggaaaatctgattactttctcatt

SEQ ID NO: 758551 - DNA, 120 bp, Artificial Sequence
  ENSG00000214285_1 (sequence is synthesized)
aggagcaaagaactagcttttctaaagccaattttggagaagatgtttgtgaaaaggtcctttcgcaatggagttggcacagggatgaaaaaaacttcctttcaaagagcaaaatcatga

SEQ ID NO: 758552 - DNA, 120 bp, Artificial Sequence
  ENSG00000214290_0 (sequence is synthesized)
ccaccgacccagctcctgctgaccacgatgtcggaaaaaccgaaggtgtatcaaggtgtccgagtgaagatcacagtgaaggagctgctgcagcaaagacgggcacaccaggcggcctcc

SEQ ID NO: 758553 - DNA, 120 bp, Artificial Sequence
  ENSG00000214290_1 (sequence is synthesized)
gggggaacccggtccggaggcagcagtgtccacctttcagacccagttgcaccatcttctgcaggactgtattttgagcctgaaccaatttcttccacgcccaattatttgcaacgggga

SEQ ID NO: 758554 - DNA, 120 bp, Artificial Sequence
  ENSG00000214290_2 (sequence is synthesized)
gaattttccagttgtgtttcatgtgaagaaaactcaagctgcctcgaccagatctttgattcctaccttcagacagagatgcacccggagcctttgctcaattccacacaaagtgctcca

SEQ ID NO: 758555 - DNA, 120 bp, Artificial Sequence
  ENSG00000214290_3 (sequence is synthesized)
caccatttcccagacagcttccaggccacccctttctgctttaaccagagcctgatcccaggatcaccttcaaattcctccattctctctggctccttagactacagttactcgccagtg

SEQ ID NO: 758556 - DNA, 120 bp, Artificial Sequence
  ENSG00000214290_4 (sequence is synthesized)
gctccagagaattacaattcccctgcttctctggacaccagaacctgtggctaccccccagaagaccattcctaccaacacttgtcctcacacgcccagtacagctgcttctcctcggcc

SEQ ID NO: 758557 - DNA, 120 bp, Artificial Sequence
  ENSG00000214290_5 (sequence is synthesized)
accacctccatctgctactgcgcatcgtgtgaggcagaggacttggatgctctccaggcagcagagtacttctacccgagcacagactgtgtggactttgccccctcagcagccgccacc

SEQ ID NO: 758558 - DNA, 120 bp, Artificial Sequence
  ENSG00000214290_6 (sequence is synthesized)
agtgatttctataagagggaaacaaactgtgacatctgctatagttaatagaaattacagtaattcagaacatggcatgggtatatctatttttctaccacgtctagatgacactgcaaa

SEQ ID NO: 758559 - DNA, 120 bp, Artificial Sequence
  ENSG00000214290_7 (sequence is synthesized)
atatgcaacttggtaacacaatatcccaagcacagtttacatgtcactatttccaattttctgatgctaagcattcatatgaagtcctcagacccggtcacagcgccactcctactttgt

SEQ ID NO: 758560 - DNA, 120 bp, Artificial Sequence
  ENSG00000214290_8 (sequence is synthesized)
ccaccgacccagctcctgctgaccacgatgtcggatggagcgcggaaaaggcggagaaaagggacgagggagagcgggcagaaggcaaagacagaagggagcgagggagggagttcctcg

SEQ ID NO: 758561 - DNA, 120 bp, Artificial Sequence
  ENSG00000214290_9 (sequence is synthesized)
tcccacgtatccactgttgtgtcctgagacacgcggtgcggaccctgcgcgcccagaagctgctacggggggagctagaggctcacagtgagcctgggacgggggcagagcgcaccgact

SEQ ID NO: 758562 - DNA, 120 bp, Artificial Sequence
  ENSG00000214290_10 (sequence is synthesized)
gcactgagccgagctgtggcggtccctgcgcggaccccgaggggcgcccgctgcccgcggagtccggagccgatcggggaacggggtggtggggctgcgaaaaaccgaaggtgtatcaag

SEQ ID NO: 758563 - DNA, 120 bp, Artificial Sequence
  ENSG00000214290_11 (sequence is synthesized)
actatctccaggcgtccaggctgaacgcgcggtcaccctcggccgccgcacccagcgcacttcccggcgcgattcctggacgcacactgcagggtagtggtcagggccggagccgccccg

SEQ ID NO: 758564 - DNA, 120 bp, Artificial Sequence
  ENSG00000214290_12 (sequence is synthesized)
gactcctgcggccacctccaccttgaaagctcgcccggctcggcttggcctaacagccagtccccaacctactcactgcggcttttcggggcccggggctgaggctgcccctgctcccag

SEQ ID NO: 758565 - DNA, 120 bp, Artificial Sequence
  ENSG00000214290_13 (sequence is synthesized)
gcttttcggggcccggggctgaggctgcccctgctcccagcgctcaggggtccctcccagcgaacccctcttgagcgcgcccgccacctcccgcgagccggggcagtccgaccgggcccc

SEQ ID NO: 758566 - DNA, 120 bp, Artificial Sequence
  ENSG00000214290_14 (sequence is synthesized)
gcggagtgcagggtcatcgggagccccggacggctttccccagctcgcgctgcgcggactcgccccggagcctcagtgcgcctcggagaaacgcctgccccagaaagggaggggaaaaac

SEQ ID NO: 758567 - DNA, 120 bp, Artificial Sequence
  ENSG00000214290_15 (sequence is synthesized)
ggcctggcccctttactaggtcagtctggcaggtacctcgccggcccaggacggggctggccaaacctcaccgcttgctcccgggctggcttccagaccaagggcacgcagaggtcggag

SEQ ID NO: 758568 - DNA, 71 bp, Artificial Sequence
  ENSG00000214300_0 (sequence is synthesized)
aacacactcttctggatcccagcagtgtccagaagaagaccaaggacagaacagagactagcttcggtgag

SEQ ID NO: 758569 - DNA, 120 bp, Artificial Sequence
  ENSG00000214300_1 (sequence is synthesized)
gaagaagaccaaggacagaacagagactagcttcggtgagattggacagattttgggaaagatcatgacgagccatcaaccgcagccccaggaagagcagagcccccagcggagcacctc

SEQ ID NO: 758570 - DNA, 65 bp, Artificial Sequence
  ENSG00000214300_2 (sequence is synthesized)
gaggtggtggatgatgaagtgtcaaaaggaagagggagtgtttggatgaatctgatgatgagcca

SEQ ID NO: 758571 - DNA, 72 bp, Artificial Sequence
  ENSG00000214300_3 (sequence is synthesized)
cctggggtagatcccagccccccgcgtaggtcccttggctgcaaaaggaagagggagtgtttggatgaatct

SEQ ID NO: 758572 - DNA, 64 bp, Artificial Sequence
  ENSG00000214300_4 (sequence is synthesized)
tgcttgcccctggggtagatcccagccccccgcgtaggtcccttggctgcaaaaggaagaggga

SEQ ID NO: 758573 - DNA, 67 bp, Artificial Sequence
  ENSG00000214300_5 (sequence is synthesized)
tctggccaatgacatggaggaggacgacgaggcccccaaacaaaagatcttctacttcctgtacggg

SEQ ID NO: 758574 - DNA, 120 bp, Artificial Sequence
  ENSG00000214300_6 (sequence is synthesized)
gccctaagcattggttccagttatgccgtcccatgaacccgagggccaggaagaactgctctcagatagccttgttccagaagcgtcggttccagttcttctgttccatgcgctgcaggg

SEQ ID NO: 758575 - DNA, 68 bp, Artificial Sequence
  ENSG00000214300_7 (sequence is synthesized)
aagcgtcggttccagttcttctgttccatgcgctgcagggcttgggtttccccggaggagttggacac

SEQ ID NO: 758576 - DNA, 76 bp, Artificial Sequence
  ENSG00000214300_8 (sequence is synthesized)
tggattttcagcaggaactttattccagtgctaatggcagacatcaggaaggaggagaggaagagctgaatacagt

SEQ ID NO: 758577 - DNA, 83 bp, Artificial Sequence
  ENSG00000214300_9 (sequence is synthesized)
catctagaagaacctggaccattcttgacagagctgaatacagtgatcacgttgtcctccaaggagcaggggtggggtggggt

SEQ ID NO: 758578 - DNA, 120 bp, Artificial Sequence
  ENSG00000214300_10 (sequence is synthesized)
catttgaaggcacagtgcaggggctcagattggcacagaattctttgtgaaatatgagtgccacagactgtaacagatagcttcatgcacactatgcattttattggtttgtttggaaaa

SEQ ID NO: 758579 - DNA, 120 bp, Artificial Sequence
  ENSG00000214300_11 (sequence is synthesized)
tctttgtatctattactacatatgctgctgaagggagcagactttttatctatgatacttagttaatgtatatattacatttatagctatgtggtagttcccctaaattcttgtaaaaat

SEQ ID NO: 758580 - DNA, 69 bp, Artificial Sequence
  ENSG00000214300_12 (sequence is synthesized)
tcctgccactgcactccagccggggaggttctttatgattgatgcacttgagttaccgatttgggtcga

SEQ ID NO: 758581 - DNA, 120 bp, Artificial Sequence
  ENSG00000214300_13 (sequence is synthesized)
atcttgtgcagctaaccatgttgagcacagagcatgagacttcgtcatgaggaggtaggattatggattaggcttctggactcgtggtttgtgatgttgtcacattagaaacagatctag

SEQ ID NO: 758582 - DNA, 80 bp, Artificial Sequence
  ENSG00000214300_14 (sequence is synthesized)
ctcgtggtttgtgatgttgtcacattagaaacagatctagcacagttacaagtttagatctgaagtgacacaaaagaccc

SEQ ID NO: 758583 - DNA, 75 bp, Artificial Sequence
  ENSG00000214300_15 (sequence is synthesized)
ctccctgggaagacccacccaaagtcctttggagtcagggtcaccaaagcgtgagtttcacagttgaacacgatg

SEQ ID NO: 758584 - DNA, 72 bp, Artificial Sequence
  ENSG00000214300_16 (sequence is synthesized)
ggtatagaatgaaaggcaggagataaaatcgcacttctcaattgctctgaactctactccttgaggtgtgac

SEQ ID NO: 758585 - DNA, 120 bp, Artificial Sequence
  ENSG00000214309_0 (sequence is synthesized)
atatctgggtacacgggaaccgcagaggacaaactctcacccgcgttttcgatttctgcgctttcttcgagtgaggcaagacctagcagaggcccaagcccgtccctccctgccaggagc

SEQ ID NO: 758586 - DNA, 120 bp, Artificial Sequence
  ENSG00000214309_1 (sequence is synthesized)
agcctcatgcggaccgagccgctgtgcggggcatcccctctgctggtgcccggcgacccctactctgtggtggttctgctgcagggctacgcggagccagagggtgtgggcgatgccgtg

SEQ ID NO: 758587 - DNA, 120 bp, Artificial Sequence
  ENSG00000214309_2 (sequence is synthesized)
ggcgatgccgtgcgcgccgacggctccgtgaccctggtcctaccccagacccggggcccggcctccagccaccgagagtccccgcgcgggagtggcggcgcagaggccgccctggaggag

SEQ ID NO: 758588 - DNA, 120 bp, Artificial Sequence
  ENSG00000214309_3 (sequence is synthesized)
cccatcctggtggacaccgggggcccctgggctcgggaggcgctgctgggggcgctggcggggcagggcgtggccccgggagacgtgacgctagtggtggggacccacgggcactcggat

SEQ ID NO: 758589 - DNA, 120 bp, Artificial Sequence
  ENSG00000214309_4 (sequence is synthesized)
cacatcgggaacttggggctgttcccaggcgcggctctgctggtctcgcacgacttctgccttcccggaggccgctacctgccccacgggctgggtgaggggcagcccctgcgcctgggc

SEQ ID NO: 758590 - DNA, 120 bp, Artificial Sequence
  ENSG00000214309_5 (sequence is synthesized)
gggccacgggggccagcgcgacgtgagcgtggtggtggccggcacggctctgggcaccgtggtggtggcgggagatgtgtttgagcgagatggggacgaggattcgtggcaggcactgag

SEQ ID NO: 758591 - DNA, 120 bp, Artificial Sequence
  ENSG00000214309_6 (sequence is synthesized)
tgaagaccccgcagcccaggagcggagccggaagagggtcctggtcgttgccgacgtggtcgtacctggtcacgggcccccctttcgagtgttaagggaagcctcgcagcccgagacgga

SEQ ID NO: 758592 - DNA, 120 bp, Artificial Sequence
  ENSG00000214309_7 (sequence is synthesized)
gggtggagggaacagccagcaggagccggtggtcggagacgaggagcccgccctgcactaatcagcctcgagagggactgcactcttgtcagggaagccctaacagcgaagagctgctgg

SEQ ID NO: 758593 - DNA, 120 bp, Artificial Sequence
  ENSG00000214309_8 (sequence is synthesized)
agacagagtcagagcagtcaagggtgggagcttccagcccttccaggaggccagttttctagtgaagacagagtgcacctgacactgccatcacatcgtcagtatcactgcctgtctctg

SEQ ID NO: 758594 - DNA, 120 bp, Artificial Sequence
  ENSG00000214309_9 (sequence is synthesized)
ccaccaaactaagatcaaaggaggggctcagctccctgtgcattctccctgggcctcagtaaaatgggagaaggttcgtgggaggggcctccaaaataaaaatggaaactgcattgaaaa

SEQ ID NO: 758595 - DNA, 120 bp, Artificial Sequence
  ENSG00000214309_10 (sequence is synthesized)
ggcaactgagcatgaaccctcctcaaagctaatggcgcttcaaaattctgcagtgcaaagaagttgctggggttgcggagcggagaaccgccaggaggctggagcccagccaggcagcct

SEQ ID NO: 758596 - DNA, 120 bp, Artificial Sequence
  ENSG00000214309_11 (sequence is synthesized)
cctcgggcacacggtgaaggcgccggaactacagctacctccgcggcgccgcttcggccgccatatctgggtacacgggaaccgcagaggacaaactctcacccgcgttttcgatttctg

SEQ ID NO: 758597 - DNA, 120 bp, Artificial Sequence
  ENSG00000214324_0 (sequence is synthesized)
agtggtctcctgccgccacctggaccggggacagtaacgcctagggagccccaagacctcttgagagagcatttcagctctgttgacaaacctcaaccacttgagggacttcgctggaaa

SEQ ID NO: 758598 - DNA, 120 bp, Artificial Sequence
  ENSG00000214324_1 (sequence is synthesized)
gaaacgttctagaaagaccaagtggataccaggagccccgtgaggtgcgtgtggcctcagcttgcagaggagtgcacttgccagacacttcggggctttgaagagcacagctcatctaag

SEQ ID NO: 758599 - DNA, 120 bp, Artificial Sequence
  ENSG00000214324_2 (sequence is synthesized)
atgggcacaggtgcatcagagaaacaagcagagcagaaggtccgccgtgccttcgaggcctccgaggaagcccacgggactctggcagcctcaaccccctgggtggccatgggctctgcc

SEQ ID NO: 758600 - DNA, 120 bp, Artificial Sequence
  ENSG00000214324_3 (sequence is synthesized)
tatggttcctgtacctgcttgggagcccagcctgtaactgacctggccctctggcctgtcatctactcctgcatgggattttccccacaagcttacccagccttctgggcttacccgtgg

SEQ ID NO: 758601 - DNA, 120 bp, Artificial Sequence
  ENSG00000214324_4 (sequence is synthesized)
gtgctctatggtgggtatctctggatgggttatccccctccagctgccttggtgccttcagtgtggctgtattggaggggcgcctccagctttgaccccctcataggaagtccgtatctg

SEQ ID NO: 758602 - DNA, 120 bp, Artificial Sequence
  ENSG00000214324_5 (sequence is synthesized)
gctgccttggcccccaacctatttcctttccccatgaaattcccacccacctactccttggcttctcccactctgggcggggccacctccagccactgtccccaggtgggatgctggact

SEQ ID NO: 758603 - DNA, 120 bp, Artificial Sequence
  ENSG00000214324_6 (sequence is synthesized)
ccagccagctcagcccccagggctgccgtagaggggccatccagaggagctccctacttgaagacatgcaaagcccctccctcagaatgggcctccaggttcggtatttgggcacctttg

SEQ ID NO: 758604 - DNA, 120 bp, Artificial Sequence
  ENSG00000214324_7 (sequence is synthesized)
gacccgggctgctcccgctcctcctcccggtcaccctgcagggcccgccgccgcctctttgagtgctaatcagccctctagacccagacccacccaacaatcagagacatgtctggtgga

SEQ ID NO: 758605 - DNA, 120 bp, Artificial Sequence
  ENSG00000214324_8 (sequence is synthesized)
gcccagccagctgtggactttaagtttttggaagagtctcagatgtaggttgtttactattcttcagtacagagtacacctcctggactcatgcaaggcccctctatttgctatttctct

SEQ ID NO: 758606 - DNA, 120 bp, Artificial Sequence
  ENSG00000214324_9 (sequence is synthesized)
ttactttgtttttctgtttgcccttcaaccctgatactggcaccttttctcctccccagactgtcctgggcccgccctctagtagatttgctgtgagtcctcaaacatgcatgcatgcaa

SEQ ID NO: 758607 - DNA, 120 bp, Artificial Sequence
  ENSG00000214324_10 (sequence is synthesized)
ccttgtaaaatgagcttatttaagctcaatccaacctgtagaagcgctcagttagaataggcctccaggtttggtatttgggcacctgtgccaccctccagcccaggactctctctgccc

SEQ ID NO: 758608 - DNA, 120 bp, Artificial Sequence
  ENSG00000214324_11 (sequence is synthesized)
ctcctcagcaaagaccctcagcaggatccccgcatccctggccaccctgtggggcctgctgctgtctcttccagcattggtgtgtcctccagggaaccacacactcaagcactttggaac

SEQ ID NO: 758609 - DNA, 120 bp, Artificial Sequence
  ENSG00000214324_12 (sequence is synthesized)
ccatggaatccagtgagcacgtgctgtgggctctgcctagaagcttccaaaacctgtttgttccagtggacacagagtaggaaatgctgactcgttcagagcgctagtgcccttgggtcc

SEQ ID NO: 758610 - DNA, 120 bp, Artificial Sequence
  ENSG00000214324_13 (sequence is synthesized)
ttgcgggtgtgctcttctcactcctcaccccatcagcaccttctggggtaatgcacacaccagtaaaatgtacagtgcatgcttttaaaaatttttaaataaatgatactatgctataaa

SEQ ID NO: 758611 - DNA, 80 bp, Artificial Sequence
  ENSG00000214336_0 (sequence is synthesized)
cgcgggtgaaggcggagccgcagggttggcccccaaagggatgctctcgcccgagcggcgagaccagccccgctcgcccc

SEQ ID NO: 758612 - DNA, 120 bp, Artificial Sequence
  ENSG00000214336_1 (sequence is synthesized)
ggcgagaccagccccgctcgcccctcgccgcggccgcgccgcagccgcccacggccgccgacatggccctctactgcggcgacaacttcggagtgtattcgcagcccggcctgcccccgc

SEQ ID NO: 758613 - DNA, 80 bp, Artificial Sequence
  ENSG00000214336_2 (sequence is synthesized)
ccgactacgccgcgccgccggccgccgccgccaacccctacctgtggctcaacgggcccggcgtgggaggcccgccctcc

SEQ ID NO: 758614 - DNA, 80 bp, Artificial Sequence
  ENSG00000214336_3 (sequence is synthesized)
cccccggggccgcggccgggccctttctgcagccaccgcctgccgccggcaccttcggctgctctcagcggcccttcgcg

SEQ ID NO: 758615 - DNA, 120 bp, Artificial Sequence
  ENSG00000214336_4 (sequence is synthesized)
gccgcgcccgcctcgcccgccgcgcccgcggggcccggggagctgggctggctgtccatggccagccgcgaggacctgatgaagatggtgcggccgccctactcgtattcggcgctcatc

SEQ ID NO: 758616 - DNA, 120 bp, Artificial Sequence
  ENSG00000214336_5 (sequence is synthesized)
actcgtattcggcgctcatcgccatggccattcagagcgcgcccgagcgcaaactcactctcagccacatctaccagttcgtcgccgatagcttccccttctaccagcgcagcaaggccg

SEQ ID NO: 758617 - DNA, 120 bp, Artificial Sequence
  ENSG00000214336_6 (sequence is synthesized)
gctggcagaactccatccgccacaacctgtcgctcaacgactgcttcaagaaggtgccccgcgacgaggacgacccaggaaagggtaattattggactcttgatccgaactgcgagaaaa

SEQ ID NO: 758618 - DNA, 120 bp, Artificial Sequence
  ENSG00000214336_7 (sequence is synthesized)
tgtttgacaatgggaacttccgtcggaagcgaaagcgccgctctgaggccagcaatggctccacagtggctgctgggacatcaaagtccgaagaagggctctcctcaggattggggtctg

SEQ ID NO: 758619 - DNA, 120 bp, Artificial Sequence
  ENSG00000214336_8 (sequence is synthesized)
gagtgggtgggaagccagaagaagagagcccctccactctgctgaggccttcccactccccagagcctccggagggcaccaagagtactgcctcatctcctggaggacccatgctcacct

SEQ ID NO: 758620 - DNA, 120 bp, Artificial Sequence
  ENSG00000214336_9 (sequence is synthesized)
ccaccccttgtctcaacactttcttcagcagcctcagctccttgagtgtcagcagcagtgtgagtacccagcgggctctccctggcagccgccacctagggatccagggggcccagctgc

SEQ ID NO: 758621 - DNA, 120 bp, Artificial Sequence
  ENSG00000214336_10 (sequence is synthesized)
cctccagcggcgtgttctccccgacctccatctcagaggcctcagcagacaccttgcaactgagcaatagcaccagcaatagcaccggccagagatcttcctattacagccctttccctg

SEQ ID NO: 758622 - DNA, 120 bp, Artificial Sequence
  ENSG00000214336_11 (sequence is synthesized)
gagagggctccgaggtgtagagcagactctcagacttgagtatgcacacctgaggcgtgcacacatgctgattagaatgcagattccaagtcagtaggtctggggtaggacctgagttct

SEQ ID NO: 758623 - DNA, 120 bp, Artificial Sequence
  ENSG00000214336_12 (sequence is synthesized)
gcgtttctgtcgagttcctgggtgatctcgtggtcctttgaccacacttggagtaatgagggtgtagtagataactcttgctacaacccagcgagcttttacaggtttctctgcatgtgg

SEQ ID NO: 758624 - DNA, 120 bp, Artificial Sequence
  ENSG00000214336_13 (sequence is synthesized)
gcctctccagagagaaatccgtttcactgtcttctgtgataggtagcctgtgagccccgtgagggcggggaccatgtctattttgtttatcactgtatgccaggattgcaagctcaagtg

SEQ ID NO: 758625 - DNA, 120 bp, Artificial Sequence
  ENSG00000214336_14 (sequence is synthesized)
tgtacagatggctaaaaaaacacaagccaacgaagttactgggtgagaaaactaacatcagttggcaactgaagcagtagagggtagttgggactgactagtagaaggctgctgggaaca

SEQ ID NO: 758626 - DNA, 120 bp, Artificial Sequence
  ENSG00000214336_15 (sequence is synthesized)
tagttgggactgactagtagaaggctgctgggaacagctggttctttctctcctctggcagcattctgattttgtttttttggttttttttgacacagtctggctctgtcgcccaggctg

SEQ ID NO: 758627 - DNA, 74 bp, Artificial Sequence
  ENSG00000214336_16 (sequence is synthesized)
attctgatttttatagaagagccagatatctgaatttttataggaaacctccaactttgtgtcatttgcctctg

SEQ ID NO: 758628 - DNA, 120 bp, Artificial Sequence
  ENSG00000214336_17 (sequence is synthesized)
tttttataggaaacctccaactttgtgtcatttgcctctgaagatttttttttggttgtttatcatactgtcctaggcaacaccacaaatccttgagctatgcataggcagctcacaaat

SEQ ID NO: 758629 - DNA, 120 bp, Artificial Sequence
  ENSG00000214336_18 (sequence is synthesized)
cacctctgtctggtacatggtatattctaatggcaataaaatggcacaagcagccttgtgtgccaggcactgttctcggcacttgtcatgtattcatttaatcctctcagaaaccttggg

SEQ ID NO: 758630 - DNA, 120 bp, Artificial Sequence
  ENSG00000214336_19 (sequence is synthesized)
tggtgggtattgttactaccccccattttccatgtaagggaagtgaaacttcaggatgttaggtcactttgtctattttagtcatcactgtataccaggattgcaagctcaaatgtgcac

SEQ ID NO: 758631 - DNA, 120 bp, Artificial Sequence
  ENSG00000214336_20 (sequence is synthesized)
aggtggctaaaaaaaagttgtgaccactttccaaggtgagactgatagtaaactggagccaggatcagacccagacaatctggttccagagctggtgcttgtaacttctgtattctactt

SEQ ID NO: 758632 - DNA, 120 bp, Artificial Sequence
  ENSG00000214336_21 (sequence is synthesized)
cctgcaaaaccaagaaaccagcctccatagccagttataagtatatagagggaaggaatggagctagatctcatttgaccaaagattctagttgaaaataaaagtcatctggtgtgttcc

SEQ ID NO: 758633 - DNA, 120 bp, Artificial Sequence
  ENSG00000214338_0 (sequence is synthesized)
ccgtgttcgagcggttttgggatcctctgccaagtacgggataagagaatagagcaaggagtttgagcgctgctgccaatcttccatctcgggcgtggctctggcctttttgtctcttta

SEQ ID NO: 758634 - DNA, 120 bp, Artificial Sequence
  ENSG00000214338_1 (sequence is synthesized)
tcccgccactccccacccccgtcccccgtccccctccccgccttcttctctttcctcttgaaagtaacctctctttggttacttctaccctatcgtcccttgcaatcccgccttctctcc

SEQ ID NO: 758635 - DNA, 120 bp, Artificial Sequence
  ENSG00000214338_2 (sequence is synthesized)
tgcccagttcggtgaggtcagctcatgaacatctctgcacttcctggggagcgtctggcccagcttggtacctcgcgtgttagcctgctgagagctgcagctccagcccagccgcggacc

SEQ ID NO: 758636 - DNA, 120 bp, Artificial Sequence
  ENSG00000214338_3 (sequence is synthesized)
gccgggaagtcacccgctctgggggcagctgaatcttgacgttaccgccattgtttggagaaatcgagtgggtgtggaactgcggcgagcgagcccaaagtcatgctcagccggaaagtc

SEQ ID NO: 758637 - DNA, 120 bp, Artificial Sequence
  ENSG00000214338_4 (sequence is synthesized)
gcatacaataatatgaagttgaactttcctcggcgcagaaaggcacaataataaaccctgagatccccggaatatcagaaggaaagtgctgttgatttgttcagctacttggaaacctcg

SEQ ID NO: 758638 - DNA, 120 bp, Artificial Sequence
  ENSG00000214338_5 (sequence is synthesized)
cctctgctgagaagtgagcaagttctggatttctaaagggttggggatgaatgatgggcttaggaaggaaggttggcggcggtgaagagggaagaggatgatctagtaatgggctcttcc

SEQ ID NO: 758639 - DNA, 120 bp, Artificial Sequence
  ENSG00000214338_6 (sequence is synthesized)
aaatcgcatctggtaggttcatagccatgagtcagccaccaatcgggggcgctgcccctgccacagcagcagcttctcccgccgctgcagccactgaggctcgtctgcacccggagggca

SEQ ID NO: 758640 - DNA, 120 bp, Artificial Sequence
  ENSG00000214338_7 (sequence is synthesized)
gcagcagaaagcagcagcgagctcagtcacccgctagaccgagggacagttcgctgcgacagacaatcgcggccacccggtccccagtgggggccggcactaaactcaattctgttcggc

SEQ ID NO: 758641 - DNA, 120 bp, Artificial Sequence
  ENSG00000214338_8 (sequence is synthesized)
agcagcagctgcagcagcagcaacagcagggtaacaagaccgggagccgcacggggccgcccgccagcatccgaggaggcggaggtggggccgagaaggcgacgcccctggcgcccaaag

SEQ ID NO: 758642 - DNA, 120 bp, Artificial Sequence
  ENSG00000214338_9 (sequence is synthesized)
gggccgctccgggagctgtccagcctgtggctggtgctgaagcggcccccgccgcgaccctggccgctttgggcggcaggaggcccggaccgcccgaggagccgcctcgggagctagagt

SEQ ID NO: 758643 - DNA, 120 bp, Artificial Sequence
  ENSG00000214338_10 (sequence is synthesized)
ccgtgccctcgaaactcggggaaccccctccgctcggagaagggggaggagggggcggggaaggaggaggagccggcggcggctccggggaaagggaggggggcgctccgcagccgccgc

SEQ ID NO: 758644 - DNA, 120 bp, Artificial Sequence
  ENSG00000214338_11 (sequence is synthesized)
cgcccaggggctggcgagggaaaggcgtacgcgctcagcagaggggcggcagcggcggggagggggcctccccttctccatcctcctcttctgcgggcaaaaccccaggaaccggcagca

SEQ ID NO: 758645 - DNA, 120 bp, Artificial Sequence
  ENSG00000214338_12 (sequence is synthesized)
gaaactccggaagcggcgttgcggggggcggcagcggtggtggagggagctactggaaagaaggatgtctgcagtctgagctcatccagttccatctcaagaaggagcgggcggcagcgg

SEQ ID NO: 758646 - DNA, 120 bp, Artificial Sequence
  ENSG00000214338_13 (sequence is synthesized)
cggcggccgcggctcagatgcacgctaagaacggcggcggcagcagtagccgcagctccccggtgtctggcccccctgccgtttgcgagaccctggccgtcgcctccgcctccccaatgg

SEQ ID NO: 758647 - DNA, 120 bp, Artificial Sequence
  ENSG00000214338_14 (sequence is synthesized)
cggcggcggcggagggcccccagcagagcgcagagggcagcgcgagcggcgggggcatgcaggcggcagcgcccccttcgtcgcagccgcacccgcagcagctccaagagcaggaagaaa

SEQ ID NO: 758648 - DNA, 120 bp, Artificial Sequence
  ENSG00000214338_15 (sequence is synthesized)
tgcaagaggagatggagaagctgcgagaggaaaacgagactctcaagaacgagatcgatgagctgagaaccgagatggacgagatgagggacactttcttcgaggaggatgcctgtcaac

SEQ ID NO: 758649 - DNA, 120 bp, Artificial Sequence
  ENSG00000214338_16 (sequence is synthesized)
gggagctgttgcgcagcctggagcaggacctcaaggttgcaaaggatgtatctgtgagacttcaccatgaattagaaaatgtggaagaaaagagaacaacaacagaagatgaaaatgaga

SEQ ID NO: 758650 - DNA, 120 bp, Artificial Sequence
  ENSG00000214338_17 (sequence is synthesized)
aactgaggcaacagctcatagaagttgaaattgcaaagcaagctttacagaatgaactggaaaaaatgaaagagttatccttaaaaagaagaggaagcaaagatttgccaaaatctgaaa

SEQ ID NO: 758651 - DNA, 120 bp, Artificial Sequence
  ENSG00000214338_18 (sequence is synthesized)
aaaaggctcaacagactcccacagaggaggacaatgaagatctgaagtgccagctgcagtttgttaaggaagaagccgctttgatgagaaagaaaatggccaagattgataaagaaaagg

SEQ ID NO: 758652 - DNA, 120 bp, Artificial Sequence
  ENSG00000214338_19 (sequence is synthesized)
acagatttgaacacgagctccagaagtacagatccttttatggggatctggacagtcctttgcccaaaggagaagccggaggccctcccagcactagggaggccgagctcaagctacggc

SEQ ID NO: 758653 - DNA, 120 bp, Artificial Sequence
  ENSG00000214338_20 (sequence is synthesized)
taaggctggtggaggaagaagccaacatcctgggcaggaaaatcgtcgaactggaggtggagaacagaggcctgaaggcggaactggacgaccttaggggcgatgacttcaacggctcgg

SEQ ID NO: 758654 - DNA, 120 bp, Artificial Sequence
  ENSG00000214338_21 (sequence is synthesized)
ccaacccgctcatgagggagcagagcgaatccctgtcggagctgcggcagcacctgcagctggtggaagacgagacggagctgctgcggaggaacgtggccgacctggaggagcagaaca

SEQ ID NO: 758655 - DNA, 120 bp, Artificial Sequence
  ENSG00000214338_22 (sequence is synthesized)
agcgcatcacggcggagctcaacaagtacaagtacaagtccggcggccacgacagcgcgcggcaccacgacaacgccaagaccgaggccctgcaggaggagctgaaggcggcgcgcctgc

SEQ ID NO: 758656 - DNA, 120 bp, Artificial Sequence
  ENSG00000214338_23 (sequence is synthesized)
agatcaacgagctcagcggcaaggtcatgcagctgcagtacgagaaccgcgtgcttatgtccaacatgcagcgctacgacctggcctcgcacctgggcatccgcggcagcccccgcgaca

SEQ ID NO: 758657 - DNA, 120 bp, Artificial Sequence
  ENSG00000214338_24 (sequence is synthesized)
gcgacgccgagagcgacgcgggcaagaaggagagcgacgacgactcgcggcctccgcaccgcaagcgcgaagggcccatcggcggcgagagcgactcggaggaggtgcgcaacatccgct

SEQ ID NO: 758658 - DNA, 120 bp, Artificial Sequence
  ENSG00000214338_25 (sequence is synthesized)
gcctcacgcccactcgctccttctacccggcgcccgggccctggcccaagagcttctccgatcggcagcagatgaaggacatccgctcggaggccgagcgcctgggcaagaccatcgacc

SEQ ID NO: 758659 - DNA, 120 bp, Artificial Sequence
  ENSG00000214338_26 (sequence is synthesized)
ggctcatcgccgacacgagcaccatcatcaccgaggcgcgcatctacgtggccaacggggacctgttcggactcatggacgaggaggacgacggcagccgcatccgggagcacgagctgc

SEQ ID NO: 758660 - DNA, 120 bp, Artificial Sequence
  ENSG00000214338_27 (sequence is synthesized)
tctaccgcatcaacgctcagatgaaggccttccgcaaggagctgcagaccttcatcgaccgcctcgaggtgcccaagtctgcggacgaccgcggcgccgaggagcccatttccgtgagtc

SEQ ID NO: 758661 - DNA, 120 bp, Artificial Sequence
  ENSG00000214338_28 (sequence is synthesized)
agatgttccagcctatcattttacttattctcattcttgtattattttcatcactttcttacacaacaatatttaaacttgtcttcctttttacactgttttttgtactgtaaatctttc

SEQ ID NO: 758662 - DNA, 120 bp, Artificial Sequence
  ENSG00000214338_29 (sequence is synthesized)
atcatttaccattcattgtagtattttcagtttgtttattttgttcacccttcaagacaagaagtaaaagaagtataatttctgtagtaaccaatgctataaaaacactgaagactgctt

SEQ ID NO: 758663 - DNA, 120 bp, Artificial Sequence
  ENSG00000214338_30 (sequence is synthesized)
atttctttaaaaagatacaactcatcttaccaagaccaaattcaataagaagcccaaacactaaaatatttcaggtaagaaagtgtgacatttttctgtatgaattgttttaatttttac

SEQ ID NO: 758664 - DNA, 120 bp, Artificial Sequence
  ENSG00000214338_31 (sequence is synthesized)
ttctttttttcatcctgtttgtctcctcttgataaataattggcatactgaatataaaaatggactacatgtctcataattatttctcagtagttcactattattattcaaaagctggac

SEQ ID NO: 758665 - DNA, 120 bp, Artificial Sequence
  ENSG00000214338_32 (sequence is synthesized)
ggacattcacaatttggtcacatttccaaaaagtatatacatttgtaaagtatctttgccaggttgcatcaaactaacaagataattttgacatccaataaatatctgaaaaaaaatatg

SEQ ID NO: 758666 - DNA, 120 bp, Artificial Sequence
  ENSG00000214338_33 (sequence is synthesized)
aagctagtgacggatttatcttggaaatacacatactggaaattgatcttaccaccatgagggaagatgcaccagccttctgggttctgtctcagaattgctatataggaggaaatgggc

SEQ ID NO: 758667 - DNA, 120 bp, Artificial Sequence
  ENSG00000214338_34 (sequence is synthesized)
actttaaaaagtacaacttttgcctatgatatgcgatgtaagaagatggctaagaatgaaaatattttctatctagcaattacacttaaaactaaagtgattcataagactacaaaactg

SEQ ID NO: 758668 - DNA, 120 bp, Artificial Sequence
  ENSG00000214357_0 (sequence is synthesized)
ctcgcccgtgcagctgcgatgccccggagcgtcgaccccggtcctggtccctggcccgccgcgtaattagcctccgcgcgcccagagcgcgccgccgccaacgccgcgcccgacgcagcg

SEQ ID NO: 758669 - DNA, 120 bp, Artificial Sequence
  ENSG00000214357_1 (sequence is synthesized)
aattagcctccgcgcgcccagagcgcgccgccgccaacgccgcgcccgacgcagcgatgggcaacacggtgcaccggaccctgccagacccgagcccaccggcgcgcctcctggccaccc

SEQ ID NO: 758670 - DNA, 120 bp, Artificial Sequence
  ENSG00000214357_2 (sequence is synthesized)
ccggtcctgggcgaggcgccgcgcttccacgcgcaggccaaaggcaagaacgtgcggctggacggccactcgcgccgggccacacggcgcaacagcttctgcaatggcgtcacgttcacg

SEQ ID NO: 758671 - DNA, 120 bp, Artificial Sequence
  ENSG00000214357_3 (sequence is synthesized)
cagcggcccatccggctgtacgagcaggtgcggctgcgcctggtggccgtgcgccctggctggagcggcgcgctgcgcttcggcttcaccgcgcacgatccgtcgctcatgagcgcccag

SEQ ID NO: 758672 - DNA, 120 bp, Artificial Sequence
  ENSG00000214357_4 (sequence is synthesized)
gacatccccaagtacgcctgcccggacctggtcacgcggccgggctactgggccaaggcactgcccgagaacctggcgctgcgcgacacggtgctggcctactgggccgaccgccacggc

SEQ ID NO: 758673 - DNA, 120 bp, Artificial Sequence
  ENSG00000214357_5 (sequence is synthesized)
cgcgtgttctacagcgtgaacgacggcgagccggtgctcttccactgcggcgtggccgtgggcggcccgctctgggcgctcattgatgtctacggcatcaccgacgaggtgcagcttctg

SEQ ID NO: 758674 - DNA, 120 bp, Artificial Sequence
  ENSG00000214357_6 (sequence is synthesized)
gagagcgccttcgctgacacgctgacgcccgcgcgcctcagccaggcccgcttcagcgcctgcctgccgcccagcagccacgacgcggccaacttcgacaacaacgagctcgagaacaac

SEQ ID NO: 758675 - DNA, 120 bp, Artificial Sequence
  ENSG00000214357_7 (sequence is synthesized)
gacaacaacgagctcgagaacaaccaggtggtggccaagctgggccacctggcgctgggccgcgccccgggcccaccgccagccgacgccgcggccgccgccattccgtgcgggccccgt

SEQ ID NO: 758676 - DNA, 120 bp, Artificial Sequence
  ENSG00000214357_8 (sequence is synthesized)
ccggcgctactggaggccgacctgcgcttccacgcaacacgcgggcccgacgtgagcctgtcggccgaccgcaaagtggcctgcgcaccgcggcccgacggcggccgcacgctggtcttc

SEQ ID NO: 758677 - DNA, 120 bp, Artificial Sequence
  ENSG00000214357_9 (sequence is synthesized)
cttctccgagcgcccgctgcggcccggcgagagcctcttcgtggaggtgggccgtccggggctggcggcgcccggcgcgctggccttcggcatcacgtcgtgcgacccgggcgtgctacg

SEQ ID NO: 758678 - DNA, 120 bp, Artificial Sequence
  ENSG00000214357_10 (sequence is synthesized)
aacgagctgcccgccgacccagacgcgctgctcgaccgcaaagagtactgggtggtggcgcgcgccgggcccgtgccgagcggcggcgacgcgctcagcttcacgctgcggcccggcggc

SEQ ID NO: 758679 - DNA, 120 bp, Artificial Sequence
  ENSG00000214357_11 (sequence is synthesized)
gacgtgctcctgggcatcaacgggcgtccgcgcggccgcctgctgtgcgtcgacaccacgcaggcgctctgggccttcttcgccgtgcgcggcggcgtcgcgggccagctgcgtctcctc

SEQ ID NO: 758680 - DNA, 120 bp, Artificial Sequence
  ENSG00000214357_12 (sequence is synthesized)
ggtaccctgcagtccagccctgcgaccacgactccatcagggtccctcagcggctcccaggacgatagtgattcagatatgaccttcagtgtcaaccagtcctcctcggcatctgagtca

SEQ ID NO: 758681 - DNA, 120 bp, Artificial Sequence
  ENSG00000214357_13 (sequence is synthesized)
tccctggtgacggcccccagctccccgctgagccccccggtgtcccccgtgttctccccaccggagccggcaggcatcaagaatggcgagtgcacggtgtgcttcgatggcgaggtggac

SEQ ID NO: 758682 - DNA, 120 bp, Artificial Sequence
  ENSG00000214357_14 (sequence is synthesized)
acggtcatctacacgtgtggacacatgtgcctgtgccacagctgcggcctgcggctcaagcgacaggcccgggcctgctgccccatctgccggcggcccatcaaggacgtcattaagatc

SEQ ID NO: 758683 - DNA, 120 bp, Artificial Sequence
  ENSG00000214357_15 (sequence is synthesized)
tacaggccatagcctagcctgcccacgggccttggccggtgcaaggtcacctttctgaaggccccctgggctgggcaaccacatggctgccagggagtccacgggcagcggccatctctc

SEQ ID NO: 758684 - DNA, 120 bp, Artificial Sequence
  ENSG00000214357_16 (sequence is synthesized)
cagtggtgggcaaggtgtgacagtcgtggagcgaggcccacagggcctcagcccaggcaggggttgcttctggctccaaagtgctttgcccccaaaaggccgtcccaagagcaagctcag

SEQ ID NO: 758685 - DNA, 120 bp, Artificial Sequence
  ENSG00000214357_17 (sequence is synthesized)
gaactgcctggcagatcaccctgtcccttggtgacctttcaactgggaaacagcgtcctctgtctgtgcaatgcttcttgctggggttgggttgagtgtgagagaaggggaggggaggga

SEQ ID NO: 758686 - DNA, 120 bp, Artificial Sequence
  ENSG00000214357_18 (sequence is synthesized)
tgtgtgagagagagagagagagaatgaacgtgtagcgattttaccaggggtcccggctccgggaggagacgtgcaatccggagccccgacattggcatgactagaagttgttcactttct

SEQ ID NO: 758687 - DNA, 120 bp, Artificial Sequence
  ENSG00000214357_19 (sequence is synthesized)
ctagaagttgttcactttctggggatgggacataagctggttttgaatgtatgaagctgaccctcacagaactccctggggtggtgtagaaaagagatgctcagattttctaaggggagg

SEQ ID NO: 758688 - DNA, 120 bp, Artificial Sequence
  ENSG00000214357_20 (sequence is synthesized)
caaaaataactcattgtttacagctccaaagcatgaactccttgaggggaaggtgggtgaagaacaattcacttcttcatttcttactgggtcttagagctgggtgtgatgggcaccgag

SEQ ID NO: 758689 - DNA, 120 bp, Artificial Sequence
  ENSG00000214357_21 (sequence is synthesized)
gccaacccctctggattgtgtcatcttttcaccccttcacccccagactgtctaataatacacacatcataccttgtctccgtctctggaggcaagtctctgtaatgcccttccctatct

SEQ ID NO: 758690 - DNA, 120 bp, Artificial Sequence
  ENSG00000214357_22 (sequence is synthesized)
ccaaggagaagaccagcagtaagttctgtttttctgtgggagagaaagaatcctagaggcaggtgacccacctggagctggaaagcccactccacgatgcagacagctctctaccttcct

SEQ ID NO: 758691 - DNA, 120 bp, Artificial Sequence
  ENSG00000214357_23 (sequence is synthesized)
gtggtggcccctgggcctggcattcccaggggacctgctggcaggaggaggaacgagggctttataactttggttataacttttggtctttgttctgattctcagtgtatcttcctccgc

SEQ ID NO: 758692 - DNA, 120 bp, Artificial Sequence
  ENSG00000214357_24 (sequence is synthesized)
tggttactaaagtgttcactgataagtatgttaactaatgatcgagacagtaacgaaaaatgctggcactgggattctctcccttcccagacctacctgctggtatttcctgggaccttg

SEQ ID NO: 758693 - DNA, 120 bp, Artificial Sequence
  ENSG00000214357_25 (sequence is synthesized)
accctgccccaccccctcagccgtgcccatctctgcagactcccagatcacatctgggctgatgggctggcccaggcctgtccctcccttcttgcccccagttctgggctccacctctgc

SEQ ID NO: 758694 - DNA, 120 bp, Artificial Sequence
  ENSG00000214357_26 (sequence is synthesized)
ctagaacctgacaactccaggagttcttgggaggaccagtacaacgttctaaaaagcctgagacgccttacaaaaagcaagtatcatttggagtacaattcctaatctgttcatgtcctg

SEQ ID NO: 758695 - DNA, 120 bp, Artificial Sequence
  ENSG00000214357_27 (sequence is synthesized)
ctgaaggagggaaggagggagaggaaggcaggggagttgatgcattcatataacaaacactgctgggtgtctgggtgcccagagcaaagctgggccaggccttcaccagatcaagcccca

SEQ ID NO: 758696 - DNA, 120 bp, Artificial Sequence
  ENSG00000214357_28 (sequence is synthesized)
cagaccagctggtgcccatgcgctgctggtggtttggggcctcctgttcctcctctagctgggagtaatcacagttgtctgacctgattccaacttaaggtccccactctcttgccccat

SEQ ID NO: 758697 - DNA, 120 bp, Artificial Sequence
  ENSG00000214357_29 (sequence is synthesized)
caagaatccctgattatttacttttccctagaaaatctggggaaattcccacattttaattttgcagcagaatcttttgagcagcttttggaaccacagtgtttgccaagataagagttt

SEQ ID NO: 758698 - DNA, 120 bp, Artificial Sequence
  ENSG00000214357_30 (sequence is synthesized)
gagaatccagcagccctgggtgcctggctgaatttggtttcctgcatgtgctgggtgtgggcggggccacgcacaggccctgcatgggaggactcctcaccccaggcctgtggtgctgca

SEQ ID NO: 758699 - DNA, 120 bp, Artificial Sequence
  ENSG00000214357_31 (sequence is synthesized)
gacaaccgtctcctgtctacactgcgacccagccacaagctgtggggtctcagtggcctgggggaaagcagctccactctcctgcccttcctggctgcccctttgggttccagccggggt

SEQ ID NO: 758700 - DNA, 120 bp, Artificial Sequence
  ENSG00000214357_32 (sequence is synthesized)
cacgtccagcctccactgggaaaccagtgactgaggcctggacccagaggtggaccaggcatctcctggccacctgtgacctgggaagaagcgagtcagtggcccgttcaacctgctctg

SEQ ID NO: 758701 - DNA, 120 bp, Artificial Sequence
  ENSG00000214357_33 (sequence is synthesized)
cagctgctataaatagcctccctgtttccaagaggaggtaaggaagtgtttatcttctaaaaaccagacgtttcctgatgctctgagcgttactcagtgctacagaggagatgcacacgt

SEQ ID NO: 758702 - DNA, 120 bp, Artificial Sequence
  ENSG00000214357_34 (sequence is synthesized)
ccccactatgttctgtcttgagaaggggacaagagaaagaggaaaaggagccactgtactttattttgcacctacagcgtgccttggcactgggctagagaggcaccttcctgcgtgaat

SEQ ID NO: 758703 - DNA, 120 bp, Artificial Sequence
  ENSG00000214357_35 (sequence is synthesized)
cctgtgcggcaggtcttattgccataataagtcacatcaaagacactgctggtcataaaacactgttttacataccatagggaaaaacgctgccaatcttaactaagatgctacaactgt

SEQ ID NO: 758704 - DNA, 120 bp, Artificial Sequence
  ENSG00000214357_36 (sequence is synthesized)
acagttccttccaatcagagatgttcacgtgtgaaaaaaaaactgtgctacttacaatctatgaaagctggtgttatcccacttggcaggtaaggaaactgaggtcctgtgagtgaagtg

SEQ ID NO: 758705 - DNA, 120 bp, Artificial Sequence
  ENSG00000214357_37 (sequence is synthesized)
acctcatgatcacacaacaggagatggcagggctgggattcaaacccgggagtgtctgctgccacatcccacactcccactgcctggctccaagtcccaggaagctcgagactgtgagtt

SEQ ID NO: 758706 - DNA, 120 bp, Artificial Sequence
  ENSG00000214357_38 (sequence is synthesized)
ttctcccttgaaactcacctggagagagtccgggcacctgtgcctatgtggagggttccagccccagccaggcccctccgctgcccacaccctgggaggagaagcggcctcccttccagg

SEQ ID NO: 758707 - DNA, 120 bp, Artificial Sequence
  ENSG00000214357_39 (sequence is synthesized)
ctcatctgctcactgcccgcattctcctggcagagctgaggtctgagagatctggactccaacccaagggccctctcttgttattcaggggtgtccacagttaggaagggacctggggcc

SEQ ID NO: 758708 - DNA, 120 bp, Artificial Sequence
  ENSG00000214357_40 (sequence is synthesized)
ttgtcccaccaccttcctaggccccgtgatcaccaccccctcaagcggggccccagccccctgagcaccccctcacgtgacccagccctcggctgttccaggctcactgcccatggtgtg

SEQ ID NO: 758709 - DNA, 120 bp, Artificial Sequence
  ENSG00000214357_41 (sequence is synthesized)
ctcttctgggccacagcagccagggctccagggcgaggacaggggacacctgaaaacaccccgttgttcatggtcttgtgcccattcattcggagactcctgaaaaactgggctgtttgc

SEQ ID NO: 758710 - DNA, 120 bp, Artificial Sequence
  ENSG00000214357_42 (sequence is synthesized)
aaagcaaatccagctccttgtcctagcaggttctcagaacggggagtcccctgggatggagctgctcccctcacggcagcaccacgtttccagtccctcgatgccactaatcagcatgga

SEQ ID NO: 758711 - DNA, 120 bp, Artificial Sequence
  ENSG00000214357_43 (sequence is synthesized)
ctgtgttcaggacacagggtgaacttttctctgacccccggtgctggtcctgtgccagcacgtagtagttactcagtagaggtttgctgagtaaaccagaaatcagattatgagtgttca

SEQ ID NO: 758712 - DNA, 120 bp, Artificial Sequence
  ENSG00000214357_44 (sequence is synthesized)
ggggtttgataaaacagcaccacataacgcacacaaagatactccagaaacatttgctgagtacctagtacgtgtgaggtgctgtgaggatagagcagagaggactgtgccccagctgtg

SEQ ID NO: 758713 - DNA, 120 bp, Artificial Sequence
  ENSG00000214357_45 (sequence is synthesized)
atgctggcagaggtgacactaagagggaaatgagatatttggggcagaatccactgggctctcttggccatccgctgccttgggtctgttgaggtgggtgcccaaaggctgccttcttga

SEQ ID NO: 758714 - DNA, 120 bp, Artificial Sequence
  ENSG00000214357_46 (sequence is synthesized)
ccagaacctgctgtgcgcttcacagaacctcctcttcattggaaatgctgggcacattgcagtcagtgagctgctgccaaaacggcgttaagtagaacccccagaggccccgccggttgg

SEQ ID NO: 758715 - DNA, 120 bp, Artificial Sequence
  ENSG00000214357_47 (sequence is synthesized)
tgatcaccctcaggtcctgccagggagacacagtgaggaggttggctaattgctgctttcaggccctggaaatcagtcgccaaggcccaggagaaccccggtgagtccgtccagttgagg

SEQ ID NO: 758716 - DNA, 120 bp, Artificial Sequence
  ENSG00000214357_48 (sequence is synthesized)
cagaggcaataacctcccattgctcggccctgcgcctgccccagtcctggcagggggcaccggctcaggaacatgcggcctcctggcatttctcggtatttaactgtctcgctgtcttat

SEQ ID NO: 758717 - DNA, 120 bp, Artificial Sequence
  ENSG00000214357_49 (sequence is synthesized)
ccgagtccctaatgaaacgacttgtgtgacaatctgtctgtgccttacgaaagtgtctgtgcactttttatcctttttaaaagcaacttttaaaagtggatggggaggggggctagcata

SEQ ID NO: 758718 - DNA, 120 bp, Artificial Sequence
  ENSG00000214357_50 (sequence is synthesized)
cgtggtagggttctagaaatctgtggtcatcgctgaaatcctttttgcatcatgttttttgatgttggagtgatgaagtgtacatcccccaccccacacaccactacctgtgtacagacc

SEQ ID NO: 758719 - DNA, 120 bp, Artificial Sequence
  ENSG00000214357_51 (sequence is synthesized)
ttttaaaacatgtcttctttttctgattcaatactgtgacctctccgatacagtctaatccttggggatctgtaatcaaggttttaaaacctgggaagtgggttgggaagggtttgcact

SEQ ID NO: 758720 - DNA, 120 bp, Artificial Sequence
  ENSG00000214357_52 (sequence is synthesized)
ggtcttgagtgttgtgcttttctgtgttgtgtgttttgatttttgtctttttatctgttttatattgacataattttcctgtttaaaaaaatacaactttggcttgttaaaaaaaaaaaa

SEQ ID NO: 758721 - DNA, 120 bp, Artificial Sequence
  ENSG00000214360_0 (sequence is synthesized)
gatgagactgaagcaaggatcgtttctgtggtacctctatctggacaaaatatactgcttattatccgtgagaaacgtgaaggctttggcagaatattttcatattctggacgtgcacgg

SEQ ID NO: 758722 - DNA, 120 bp, Artificial Sequence
  ENSG00000214360_1 (sequence is synthesized)
caagaacaccttgaatgatgtgctgttctatcacttccttcatcatgtgactgacttgaaaaaggcacagatcaacattgtgtttgacatgctggactggaacgctgtgggcgagatcga

SEQ ID NO: 758723 - DNA, 120 bp, Artificial Sequence
  ENSG00000214360_2 (sequence is synthesized)
acctgaaaggggatctgagaattggtgcaaaaaacttcgaaatgtacagatttctcttcaatattcaaaaacaggaactcaaagatctcttccgtgactttgacattacaggtgacaatc

SEQ ID NO: 758724 - DNA, 120 bp, Artificial Sequence
  ENSG00000214360_3 (sequence is synthesized)
gtcttaattatcaggaatttaagctgtatacaatcatctacactgacaaattacagaagaggcagaaaacagaggagaaagaaaaaggagagagaaagagaagtctctactcaaaatgtc

SEQ ID NO: 758725 - DNA, 120 bp, Artificial Sequence
  ENSG00000214360_4 (sequence is synthesized)
acatcaagtagatacaagctgaaagagtcttggaaaaaaatgggatctgaaagtacagaacatgaacattgatgaagactgttaacatgtctaaaaataaattcagagcatcaaagtaga

SEQ ID NO: 758726 - DNA, 120 bp, Artificial Sequence
  ENSG00000214367_0 (sequence is synthesized)
ctcccgtgaggcagtgcgaggcgcgcggggcacggagggcggtggcggcgggctcctgcgagaagcaagcggaacttcctgaggaggaatcattatagattctaaaaatatattttccct

SEQ ID NO: 758727 - DNA, 120 bp, Artificial Sequence
  ENSG00000214367_1 (sequence is synthesized)
tctctgtggacttggtataaaacgtagctttttttctgcttggatttattttctaaaaatcaacaccgtaaacccatatcagatacaacaaaattggggtagttaaaaccatgagttgtg

SEQ ID NO: 758728 - DNA, 120 bp, Artificial Sequence
  ENSG00000214367_2 (sequence is synthesized)
gaaatgagtttgtggaaacattaaaaaaaattggttatcccaaagctgataatcttaatggagaagactttgactggttgtttgagggcgttgaagatgaatcgtttctgaagtggtttt

SEQ ID NO: 758729 - DNA, 120 bp, Artificial Sequence
  ENSG00000214367_3 (sequence is synthesized)
gtgggaatgtgaatgaacagaacgtgttgtctgaaagagaattggaagcttttagcattcttcagaaatcaggcaagcctattctagaaggggcggcattggatgaagctcttaaaacgt

SEQ ID NO: 758730 - DNA, 120 bp, Artificial Sequence
  ENSG00000214367_4 (sequence is synthesized)
gtaaaacttctgatttgaagacacctagactggatgataaagagctggagaaattagaggatgaggttcaaactctactgaaattaaagaacctaaaaattcagcgacgtaataaatgtc

SEQ ID NO: 758731 - DNA, 120 bp, Artificial Sequence
  ENSG00000214367_5 (sequence is synthesized)
aattgatggcttcagtaactagccacaaatctctgaggttaaatgctaaagaagaagaagccactaaaaagctgaagcagagtcaaggaattctaaatgcaatgatcactaagatcagta

SEQ ID NO: 758732 - DNA, 120 bp, Artificial Sequence
  ENSG00000214367_6 (sequence is synthesized)
atgaacttcaggctcttactgatgaagttacacaattgatgatgttcttcagacattctaatttaggtcaagggacaaatccactggtatttttatcgcaattttccttggaaaaatacc

SEQ ID NO: 758733 - DNA, 120 bp, Artificial Sequence
  ENSG00000214367_7 (sequence is synthesized)
taagtcaggaagagcaaagcacagcagcattaactttgtataccaaaaaacagttctttcagggtatacatgaagtagttgaaagttcaaatgaagacaattttcaacttttagatatac

SEQ ID NO: 758734 - DNA, 120 bp, Artificial Sequence
  ENSG00000214367_8 (sequence is synthesized)
agacaccatctatttgtgataatcaagaaatccttgaggagagacgactagagatggctagactgcagctcgcatacatttgtgctcaacatcagttaattcacttaaaagcaagtaatt

SEQ ID NO: 758735 - DNA, 120 bp, Artificial Sequence
  ENSG00000214367_9 (sequence is synthesized)
cgagcatgaagtcaagtataaaatgggcagaggagagtcttcacagcctaaccagcaaggctgtggacaaagaaaatttggatgctaaaatttctagcttgaccagtgagattatgaaac

SEQ ID NO: 758736 - DNA, 120 bp, Artificial Sequence
  ENSG00000214367_10 (sequence is synthesized)
ttgaaaaagaggtcactcaaataaaagacagaagtttacctgctgtggtaagagagaatgcccagttattgaatatgccagtggtaaagggagattttgatctgcagattgctaaacaag

SEQ ID NO: 758737 - DNA, 120 bp, Artificial Sequence
  ENSG00000214367_11 (sequence is synthesized)
attattatacagcaagacaagagttagttttaaatcaattaataaaacaaaaggcatcatttgaacttctacagttatcatatgaaattgaattaagaaagcatcgggacatatatcgtc

SEQ ID NO: 758738 - DNA, 120 bp, Artificial Sequence
  ENSG00000214367_12 (sequence is synthesized)
aacttgaaaatttggttcaagaacttagtcaaagtaacatgatgctctacaagcaattagaaatgttaacagatccatcagtttctcaacagataaatccaaggaataccattgatacta

SEQ ID NO: 758739 - DNA, 120 bp, Artificial Sequence
  ENSG00000214367_13 (sequence is synthesized)
aggattattctactcataggctttaccaagttttggagggagagaataagaaaaaagaattgtttctaactcatggaaaccttgaggaagtggctgagaaattgaaacagaatatttctt

SEQ ID NO: 758740 - DNA, 120 bp, Artificial Sequence
  ENSG00000214367_14 (sequence is synthesized)
tagtacaagatcagttggcagtatctgctcaagaacattctttctttctgtccaaacggaataaggatgtggacatgctttgtgatactttgtatcaaggaggaaatcagcttttgctta

SEQ ID NO: 758741 - DNA, 120 bp, Artificial Sequence
  ENSG00000214367_15 (sequence is synthesized)
gtgatcaggagttaacagagcagtttcataaagttgaatctcaactgaataagctaaatcatctcctcactgatattcttgctgatgtgaagacaaaaagaaaaactttggcaaataata

SEQ ID NO: 758742 - DNA, 120 bp, Artificial Sequence
  ENSG00000214367_16 (sequence is synthesized)
aattacatcaaatggaaagagaattctatgtatattttttaaaagatgaagattatctgaaagatattgtggagaatttagaaactcaatcaaagattaaggctgttagtcttgaagatt

SEQ ID NO: 758743 - DNA, 120 bp, Artificial Sequence
  ENSG00000214367_17 (sequence is synthesized)
gaaaattactgaaaactgaatctttattacgtgtcctcttttatttattagaagactgtgtataataaacactactaaatttttaaaatttgaggtcaatggaacatttaatttgatgaa

SEQ ID NO: 758744 - DNA, 120 bp, Artificial Sequence
  ENSG00000214367_18 (sequence is synthesized)
ttgaactattatattaatttgtcttttttctcatgtagtacattcagaataccagtgctttttatgacttgagcatgtgtttagtggtacttagtcctggtaattttttacttacaggga

SEQ ID NO: 758745 - DNA, 120 bp, Artificial Sequence
  ENSG00000214367_19 (sequence is synthesized)
tacttacagggaaaaagcattattacataatgcaaatattttttaatatagttatctctctcctttttagaaatagaaattttctgccgttaaatttttttttgagatagagtctcactc

SEQ ID NO: 758746 - DNA, 86 bp, Artificial Sequence
  ENSG00000214367_20 (sequence is synthesized)
cctctcccggcctcccaaagtgccggaattacaggcatgagccaccacgctcagccgctattaaatattttaaaatgtgtagaact

SEQ ID NO: 758747 - DNA, 120 bp, Artificial Sequence
  ENSG00000214367_21 (sequence is synthesized)
acgctcagccgctattaaatattttaaaatgtgtagaacttctagtcagcatttttaaatctgtagaccttaatatgtgaaatagccaagtcccctcatgtttgactgtcaaataaaatt

SEQ ID NO: 758748 - DNA, 120 bp, Artificial Sequence
  ENSG00000214367_22 (sequence is synthesized)
tgcctgcattcattttagagtctgaattctggggactcaaaagtttctacaagacagctgagcagtgctttgactttaatgtgacttacacatcataaatgactttcaaatgaaatttga

SEQ ID NO: 758749 - DNA, 120 bp, Artificial Sequence
  ENSG00000214367_23 (sequence is synthesized)
atttcaaaattctgtaaaagtggttgctcaaaagatgtatgatactattttaatcagtttaagagcaaaaatgtctaattgtatttaacaatggtatttgggcagccagaaaatatttta

SEQ ID NO: 758750 - DNA, 120 bp, Artificial Sequence
  ENSG00000214367_24 (sequence is synthesized)
agcgttgctctaaaataatttgaagtagctcatctgttattacatcagatgcttcttgagtgcccaatttatacatggcctgtggtaaataccatgtgagctttgtaggaatacctttaa

SEQ ID NO: 758751 - DNA, 120 bp, Artificial Sequence
  ENSG00000214367_25 (sequence is synthesized)
gaatattcctcacctgttcgtaatatggaatgccaatctaaaaactacatgttttgggtggtctttatggaattttttagctataaccatcagaaaacaggcatacctagatgacagatg

SEQ ID NO: 758752 - DNA, 120 bp, Artificial Sequence
  ENSG00000214367_26 (sequence is synthesized)
aaccttcttgatttttgaaacccattgaacaaaaatattttgccaattattgtgtttatgttatttaaaattttatgtaaaccttaattttgtagcagtaaattttgtttaagattttgc

SEQ ID NO: 758753 - DNA, 120 bp, Artificial Sequence
  ENSG00000214367_27 (sequence is synthesized)
tatcagctccctatcacctgagcaactttttttttgttgtatatgtttttttctattctatttcggaatagagaatttacttaaaatttttattttctccaaaaatgtggaaaatatgtc

SEQ ID NO: 758754 - DNA, 120 bp, Artificial Sequence
  ENSG00000214367_28 (sequence is synthesized)
acctggtttcctggtttatggtagcatattctgtttaaattagtgtcacatatttagatgtgtggccagacgcttgatttattagttaatttttgagacagagtctaactgtgtcactca

SEQ ID NO: 758755 - DNA, 67 bp, Artificial Sequence
  ENSG00000214367_29 (sequence is synthesized)
tccatagtgctggcattacaggtgtaagccaccatgcccctgcccagatgcttgatttatactgtcc

SEQ ID NO: 758756 - DNA, 120 bp, Artificial Sequence
  ENSG00000214367_30 (sequence is synthesized)
gccaccatgcccctgcccagatgcttgatttatactgtccccacccaaaccttgacttgctcagcccagggggccagcagggcagatcaaggcacggatggtagttgtgtgtctgccgta

SEQ ID NO: 758757 - DNA, 120 bp, Artificial Sequence
  ENSG00000214367_31 (sequence is synthesized)
ggcagatcaaggcacggatggtagttgtgtgtctgccgtaattacccaagttacttataatcgttgtgttactaggtaggtttatttgaagatttatttatttatttatttattttttat

SEQ ID NO: 758758 - DNA, 77 bp, Artificial Sequence
  ENSG00000214367_32 (sequence is synthesized)
accaaagtgcagggatcacaggcatgagcttccgcgctcagcctatttgaagatttaataacatttttcaaacctca

SEQ ID NO: 758759 - DNA, 120 bp, Artificial Sequence
  ENSG00000214367_33 (sequence is synthesized)
tcagcctatttgaagatttaataacatttttcaaacctcaggatgtatttgagtagattgcttctaaattggtcacctagaaaataagttatctatttactatgatacctggattaagcc

SEQ ID NO: 758760 - DNA, 120 bp, Artificial Sequence
  ENSG00000214367_34 (sequence is synthesized)
tctagctattttgcttttttctttctatctatattattggatgattgatgcctattttctgtggttatgaatatagacattttaaatgaaagttggtatataaatttttgaaaataattg

SEQ ID NO: 758761 - DNA, 120 bp, Artificial Sequence
  ENSG00000214367_35 (sequence is synthesized)
tatttcctgttttatagtcttaggattaatatatgggatttatcttatgttaatcttacatttaggattttgtgaaaatggaaaattatgaggcattggtaggctttgatctctgtaata

SEQ ID NO: 758762 - DNA, 120 bp, Artificial Sequence
  ENSG00000214367_36 (sequence is synthesized)
caccgctctccagtgttgctcagaagattatgtctgctatgcattcaggtgatttagtggattctaagacttggggaaagagtacagagagtaagtaatttttatgaacctttctttctc

SEQ ID NO: 758763 - DNA, 120 bp, Artificial Sequence
  ENSG00000214367_37 (sequence is synthesized)
ttgatactttgaatgttaattgttctaaagactaagaattgaaaatggaatgcatgtagacagatgaagcccagctcccgccccttttacactcattcagtgcagactgagcttctgctt

SEQ ID NO: 758764 - DNA, 120 bp, Artificial Sequence
  ENSG00000214367_38 (sequence is synthesized)
gctaactttcgtgttcccttaaccttcattgctttaaaaatgtaacactctcttccttattccaggtatttctgtcaaacattcccttagaatctggatcaggtattttagtattttcaa

SEQ ID NO: 758765 - DNA, 120 bp, Artificial Sequence
  ENSG00000214367_39 (sequence is synthesized)
aagagatgctttaatcttggttctcaggtcatcaaacctgtacatagtatttgctattttgtgtggtgaacaagagatatgtttttgacaatatgtgtattgtgctgctatagaaatgta

SEQ ID NO: 758766 - DNA, 120 bp, Artificial Sequence
  ENSG00000214367_40 (sequence is synthesized)
gtattgtgctgctatagaaatgtaaactcttaggtggcaaggattattggatcagtgtatatggatttatgatgtggtataatagtaaaagcagtggggccgggtgcggtggctcacgcc

SEQ ID NO: 758767 - DNA, 120 bp, Artificial Sequence
  ENSG00000214367_41 (sequence is synthesized)
gtcgccttgtgcgcttgcgcgcgtccaggcgctcccgtgaggcagtgcgaggcgcgcggggcacggagggcggtggcggcgggctcctgcgagaagcaagcggaacttcctgagcgtgct

SEQ ID NO: 758768 - DNA, 120 bp, Artificial Sequence
  ENSG00000214367_42 (sequence is synthesized)
taggtgtcacagctgggtgaccctccgaaggaaggttttgccgctggcgcgtctggtgtatcgcggccttggggccgcggatccctggggcttgccgctgcctctggggttcgcgcggcc

SEQ ID NO: 758769 - DNA, 120 bp, Artificial Sequence
  ENSG00000214367_43 (sequence is synthesized)
ctggcgtcggggctgcctcagcgctggctgaaggccggcccgaagcacccttaattgtggccgcgcgcttccctgctgctcctgctgttctccgcgtcgcggtggtggactctggaggtg

SEQ ID NO: 758770 - DNA, 120 bp, Artificial Sequence
  ENSG00000214367_44 (sequence is synthesized)
gcggccgggggccgagcgccgcctgctcagctccaccccatagtccagcctcgccgactccgcctcttttgacactacgcctgcgcaaacagtcatcccccacgaccacgccgtcgcctt

SEQ ID NO: 758771 - DNA, 120 bp, Artificial Sequence
  ENSG00000214367_45 (sequence is synthesized)
gtgcgcttgcgcgcgtccaggcgctcccgtgaggcagtgcgaggcgcgcggggcacggagggcggtggcggcgggctcctgcgagaagcaagcggaacttcctgaggtgactgacgcggg

SEQ ID NO: 758772 - DNA, 120 bp, Artificial Sequence
  ENSG00000214367_46 (sequence is synthesized)
cctcggttctgggcgcaggggtgtggggctggaggagtggccgcgatccccgtctgcacccaggtgcctcttttttttcctgcgctcctgggggctccttccaggtgctccagcagctgc

SEQ ID NO: 758773 - DNA, 120 bp, Artificial Sequence
  ENSG00000214367_47 (sequence is synthesized)
ccggggatcagggcccggtccgctgggcgaggagctggggcgggggctgtgcggggcctgtcacccccgtcttctgcagctcggtgtcgacggcgattcggtgggcttgtgcgtttgttt

SEQ ID NO: 758774 - DNA, 120 bp, Artificial Sequence
  ENSG00000214367_48 (sequence is synthesized)
tgttaagtattcagtacaacttgaagacaggaagactcaatcaccagaaaaaaaggatcttaaatctttaagaagtcagacatcaagaggttctgccaagctgtctcctcagtccttcag

SEQ ID NO: 758775 - DNA, 120 bp, Artificial Sequence
  ENSG00000214367_49 (sequence is synthesized)
tgtcaggctcacagatcagctgtctgctgaccaaaaacagaagagcatcagctcattgactctttcaagttgtttaattccacagtataatcaagaggcttcagttctacagaaaaaggg

SEQ ID NO: 758776 - DNA, 120 bp, Artificial Sequence
  ENSG00000214367_50 (sequence is synthesized)
gcataaaagaaagcatttcctaatggagaatataaataatgaaaataaaggaagcattaatcttaaaagaaaacatattacatataataatttgtcagagaaaacaagtaaacaaatggc

SEQ ID NO: 758777 - DNA, 120 bp, Artificial Sequence
  ENSG00000214367_51 (sequence is synthesized)
attggaagaagatactgatgacgccgaaggctacctaaattctgggaactcaggagcattgaaaaaacatttttgtgatattaggcatttggatgattgggcaaaaagccagctgattga

SEQ ID NO: 758778 - DNA, 120 bp, Artificial Sequence
  ENSG00000214367_52 (sequence is synthesized)
aatgctcaaacaggcagcagccctggtgataactgtgatgtatactgatggttccacccagctaggagctgaccagacccccgtttcttctgttagaggaattgtggtgttagtaaaacg

SEQ ID NO: 758779 - DNA, 120 bp, Artificial Sequence
  ENSG00000214367_53 (sequence is synthesized)
ccaagcagagggtggccatggctgtccagatgccccggcctgtggtcctgttctggagggctttgtgtcagatgatccatgcatctacattcaaatagagcactctgctatctgggacca

SEQ ID NO: 758780 - DNA, 120 bp, Artificial Sequence
  ENSG00000214367_54 (sequence is synthesized)
agaacaggaggcacatcaacaatttgcccggaacgtgctatttcaaacaatgaaatgtaaatgtcctgttatttgttttaatgctaaggattttgtgagaatagtgctgcagttttttgg

SEQ ID NO: 758781 - DNA, 120 bp, Artificial Sequence
  ENSG00000214367_55 (sequence is synthesized)
caatgatggcagttggaagcatgttgctgattttatagggctagatcccagaattgctgcatggcttatagatcctagtgatgccacaccctcttttgaagatttagtagaaaaatactg

SEQ ID NO: 758782 - DNA, 120 bp, Artificial Sequence
  ENSG00000214367_56 (sequence is synthesized)
tgaaaaatccattacagttaaagtgaacagcacatatggaaattcctcaagaaatattgtggattatggtttatggcaactatttcgtactttggagcttcctctgataccaattttggc

SEQ ID NO: 758783 - DNA, 120 bp, Artificial Sequence
  ENSG00000214367_57 (sequence is synthesized)
agtgatggaaagccatgccattcaggtgaacaaagaggagatggagaagacgtcagcacttcttggggctcgtctcaaggaattggagcaagaagctcattttgttgcaggagaacggtt

SEQ ID NO: 758784 - DNA, 120 bp, Artificial Sequence
  ENSG00000214367_58 (sequence is synthesized)
tcttataacgagcaataaccagcttcgagagatcctctttggcaagttaaagctgcacctgctgagtcaaaggaacagtctccccagaacggggttgcagaaatacccgtctacatcaga

SEQ ID NO: 758785 - DNA, 120 bp, Artificial Sequence
  ENSG00000214367_59 (sequence is synthesized)
agcagtgttaaatgctctgcgagaccttcatccattacccaagataattttggaatacaggcaggttcacaagatcaagtcaacctttgtagatggattactagcttgcatgaaaaaggg

SEQ ID NO: 758786 - DNA, 120 bp, Artificial Sequence
  ENSG00000214367_60 (sequence is synthesized)
ctccatttcctctacatggaatcagactggaactgtgactggaagactttcagccaagcatcctaatatccaaggtatctccaagcacccaattcagattactacacctaagaattttaa

SEQ ID NO: 758787 - DNA, 120 bp, Artificial Sequence
  ENSG00000214367_61 (sequence is synthesized)
aggtaaagaagacaagattctcacgatctccccgagggccatgtttgtttcatccaaaggccacacctttctagcagcagacttttcacagattgaattgcgcattcttacacatttatc

SEQ ID NO: 758788 - DNA, 120 bp, Artificial Sequence
  ENSG00000214367_62 (sequence is synthesized)
tggagatccggaacttctgaagttattccaggaatctgaaagagatgatgtattttctactctgacttcacagtgggtctcaccctgtcgcccagactggagagcagtggtgcaatcttg

SEQ ID NO: 758789 - DNA, 85 bp, Artificial Sequence
  ENSG00000214367_63 (sequence is synthesized)
gatgtgcccgtggaacaggtgacacacgcagacagagagcaaaccaagaaggtggtgtacgcggtggtctatggagcagggaagg

SEQ ID NO: 758790 - DNA, 120 bp, Artificial Sequence
  ENSG00000214367_64 (sequence is synthesized)
aagaaggtggtgtacgcggtggtctatggagcagggaaggagcggctggctgcttgccttggagttcctattcaggaagctgcccagtttttggagagttttttgcagaagtacaagaaa

SEQ ID NO: 758791 - DNA, 120 bp, Artificial Sequence
  ENSG00000214367_65 (sequence is synthesized)
atcaaggacttcgcccgagcagctattgcccagtgtcaccagacaggctgtgtggtgtccatcatgggcagaaggagacccctgccaaggattcacgctcatgaccagcaactccgggca

SEQ ID NO: 758792 - DNA, 120 bp, Artificial Sequence
  ENSG00000214367_66 (sequence is synthesized)
caagcagagcgacaggcagtgaacttcgtggtgcaagacagctcagagccagcacctctgtgtggaggtaccgtgagagctgtggcgatggtgcagaatgctgagtgcaccatgaaccgt

SEQ ID NO: 758793 - DNA, 120 bp, Artificial Sequence
  ENSG00000214367_67 (sequence is synthesized)
gtgccatgggacctcaagacagtaccacgcgccccataggctccgctgctgacctctgcaagctggccatgatccatgtcttcactgcagtggctgcttcccacaccttgacggccagtt

SEQ ID NO: 758794 - DNA, 120 bp, Artificial Sequence
  ENSG00000214367_68 (sequence is synthesized)
tctgcaggtaaattatagcttctcccaggatatgagcagcttgtgctagtttccgtcttggcaggaactgaaagccaaatggtggtcctgcctctaagatactgcaagtctagaaaagtt

SEQ ID NO: 758795 - DNA, 120 bp, Artificial Sequence
  ENSG00000214367_69 (sequence is synthesized)
ggctcacacctgtaatcccagcatttgggaggccgagtcgggtggatcacttgagctcagaagtttgtgaacaacatatgtgttgcctgggcaacataatgaaacctgtctctacaaaat

SEQ ID NO: 758796 - DNA, 70 bp, Artificial Sequence
  ENSG00000214367_70 (sequence is synthesized)
aagtttgtgaacaacatatgtgttgcctgggcaacataatgaaacctgtctctacaaaataaaagctggc

SEQ ID NO: 758797 - DNA, 120 bp, Artificial Sequence
  ENSG00000214367_71 (sequence is synthesized)
tgcttcccacaccttgacggccaggtcagtgggtggtggtctcccagggcttggatgggagggttagtattctgtgggaagaccccctcggggctcgtgattctgatgatcaccatctct

SEQ ID NO: 758798 - DNA, 120 bp, Artificial Sequence
  ENSG00000214367_72 (sequence is synthesized)
gcttatcgggcccccgtcccctcctgaggctctcagcccatggaaggccctgggggctactcacagcaggcatgcagacaacaaccagccatccaccagcgtggggtgcagatgaggcct

SEQ ID NO: 758799 - DNA, 120 bp, Artificial Sequence
  ENSG00000214367_73 (sequence is synthesized)
ctccagacagaaatgctgtctcccccagacccctcctcctcggggtgtctgcacagcacaggggcaccccttgaggctgcccaccccagaggcaggcgaacccctcagccccttgagcag

SEQ ID NO: 758800 - DNA, 83 bp, Artificial Sequence
  ENSG00000214367_74 (sequence is synthesized)
gaaagcagtgatatgctcacaaatgtcactgaaatgtttataacatcagggcttttggtgtttttttgttttgttttttgttg

SEQ ID NO: 758801 - DNA, 120 bp, Artificial Sequence
  ENSG00000214367_75 (sequence is synthesized)
ttttgttggtgttttttttttttttttgctactagcaaagcagtttttattttaaatttgcaagcctgggccaatagtttgtggttggtttctctttctacaaaataaggtataagtgag

SEQ ID NO: 758802 - DNA, 120 bp, Artificial Sequence
  ENSG00000214367_76 (sequence is synthesized)
tttctctttctacaaaataaggtataagtgagtgagatataattgagtaatgaaattgcattgaaataattgagagtattgccgaatattagcacaaaagctcttataaacacatcttga

SEQ ID NO: 758803 - DNA, 120 bp, Artificial Sequence
  ENSG00000214367_77 (sequence is synthesized)
ttaagatacatttgcacttaacgttttgatccattcatattgaggcatctgttgcttatatactttattatagtagaagtcactaataaactggtaagaatttttgagtgtgaattacat

SEQ ID NO: 758804 - DNA, 120 bp, Artificial Sequence
  ENSG00000214367_78 (sequence is synthesized)
gcctagcaattgatagtgtaagacactatcataatcacattattccatatttttttgaataatagagggtgcatacttgacagaggtggaaatatactccccttcaaaaaccggtaagaa

SEQ ID NO: 758805 - DNA, 120 bp, Artificial Sequence
  ENSG00000214367_79 (sequence is synthesized)
taatgaaatgcctctggcagctataatatgaggctctgatgaaaaatttacgacagtcagtccatctcatataagctcttattgttgttctaaaatacattgttaatgcctgggacgatc

SEQ ID NO: 758806 - DNA, 120 bp, Artificial Sequence
  ENSG00000214367_80 (sequence is synthesized)
acttgagcccaggagttcgagtccagcctaggcaacatagcaagatctcatctctgaaaataaaataccccgttaaaattctggcttttgtttgttaaggttattgagaaggtaatagaa

SEQ ID NO: 758807 - DNA, 120 bp, Artificial Sequence
  ENSG00000214367_81 (sequence is synthesized)
aaagatatgatactacttttctctcttggatttgtaaaaatagtggaattttcataaggattttgtattttctattgctgtataacattattaatacaaacttattggcttaaaaaacac

SEQ ID NO: 758808 - DNA, 120 bp, Artificial Sequence
  ENSG00000214367_82 (sequence is synthesized)
gtgaggcagtgcgaggcgcgcggggcacggagggcggtggcggcgggctcctgcgagaagcaagcggaacttcctgagctcggtgtcgacggcgattcggtgggcttgtgcgtttgtttt

SEQ ID NO: 758809 - DNA, 120 bp, Artificial Sequence
  ENSG00000214376_0 (sequence is synthesized)
atctggccctaaagaacctgcggcagccagaggcggaggaagagagaaggctgcataggagctgcagcgcggtgcggccagcacacaccccggcccgcgaggccccgggctcgcccatga

SEQ ID NO: 758810 - DNA, 120 bp, Artificial Sequence
  ENSG00000214376_1 (sequence is synthesized)
ggcctctgcccagcgggaggaggaagacccgaggcatctccctaggactcttcgccctctgcctggccgcagcccgctgtctgcagagtcagggtgtgtccctatacattcctcaggcca

SEQ ID NO: 758811 - DNA, 120 bp, Artificial Sequence
  ENSG00000214376_2 (sequence is synthesized)
ccatcaatgccactgtcaaagaagacatcctgctctcagttgagtactcctgtcatggagtgcccaccatcgaatggacatattcatccaattggggaacgcagaagatcgtggagtgga

SEQ ID NO: 758812 - DNA, 120 bp, Artificial Sequence
  ENSG00000214376_3 (sequence is synthesized)
aaccagggactcaggccaacatctctcaaagccacaaggacagagtctgcacctttgacaacggctccatccagctcttcagcgtgggagtgagggattccggctactatgtcatcaccg

SEQ ID NO: 758813 - DNA, 120 bp, Artificial Sequence
  ENSG00000214376_4 (sequence is synthesized)
tgacggagcgcctggggagcagccagtttggcaccatcgtgctgcacgtctctgagatcctctatgaagacctgcactttgtcgctgtcatccttgcttttctcgctgctgtggccgcag

SEQ ID NO: 758814 - DNA, 120 bp, Artificial Sequence
  ENSG00000214376_5 (sequence is synthesized)
tattaatcagcctcatgtgggtttgtaataagtgtgcatataaatttcagaggaagagaagacacaaactcaaagaaagcacaactgaggagattgagctggaagatgttgagtgttagc

SEQ ID NO: 758815 - DNA, 120 bp, Artificial Sequence
  ENSG00000214376_6 (sequence is synthesized)
caaggctgggcctgactgcattcctacctcaagaggaaaccattctccaacaaaaagagcaagcacagctattatacccattgtgtgtggtcctgttgcagcccgctcctaacaggacag

SEQ ID NO: 758816 - DNA, 120 bp, Artificial Sequence
  ENSG00000214376_7 (sequence is synthesized)
tgggagattaacaacattgactgcatggagttgaggactgtggatgggacaaagctagtattaggactcgcgctaagttcaaggagaagagtgattgaggctttgaaccaggagcttcgc

SEQ ID NO: 758817 - DNA, 120 bp, Artificial Sequence
  ENSG00000214376_8 (sequence is synthesized)
ttggctgcagcatcagggccgtgctgacacataaccaatgggtgagtgcaggcgttggctgcttgctcacgacacttgctctggtgtgcaggatggcctgttgtcagagtccctgtatca

SEQ ID NO: 758818 - DNA, 120 bp, Artificial Sequence
  ENSG00000214376_9 (sequence is synthesized)
gaggccagaggatttccagatggatgtgcagccagcattagaacatgctttctgtgctcctgtctgctctgcaactgctgtgccaaccagccccccatctggtatcccacaagcaagcac

SEQ ID NO: 758819 - DNA, 120 bp, Artificial Sequence
  ENSG00000214376_10 (sequence is synthesized)
tgctgtgggagctattgtgagaaaacctgaggcttttagacaatctgctgcctcagagcagaggtggaaagagactgggggtgggggttggtgctgttgtgctgcagagtttttcattgg

SEQ ID NO: 758820 - DNA, 120 bp, Artificial Sequence
  ENSG00000214376_11 (sequence is synthesized)
tgaggcccggtggctgggagttttatgggagaggagctcaatggactcctgagaggccagctttggatacaaggaatagagaaaattatctttctcttcctccctcattccaacgttaat

SEQ ID NO: 758821 - DNA, 120 bp, Artificial Sequence
  ENSG00000214376_12 (sequence is synthesized)
tctccattatgggcagcacctggcctcctgacgagctggatgccacctgtgtgaaagctgagcttgcatagtgggtgatgcagctggaaaatcagtcatctcgggctttgcatctgtccc

SEQ ID NO: 758822 - DNA, 120 bp, Artificial Sequence
  ENSG00000214376_13 (sequence is synthesized)
cctcagtcactaacacttcacgtctcaagtcaggcccttgccctctcctacctgggctgaggaacgcttggcccttgcctacctcacagtcagagtatcaagagaagcccacagtatgca

SEQ ID NO: 758823 - DNA, 120 bp, Artificial Sequence
  ENSG00000214376_14 (sequence is synthesized)
cagagttctctgagcaacttacgaaatgcatgaggcttcttcaaggatctggaaagctatactggaaaacgctattctgagtattagaaattgataaaatcctctgaggtcttggggctc

SEQ ID NO: 758824 - DNA, 120 bp, Artificial Sequence
  ENSG00000214376_15 (sequence is synthesized)
caggtgagattggggactggaccacagctggccttggccattattccctcaggttgttggtcaccatgttcacctgtaagtttctccatcccaacttccatttgacaagctctaaaagca

SEQ ID NO: 758825 - DNA, 120 bp, Artificial Sequence
  ENSG00000214376_16 (sequence is synthesized)
ggcatggatttattttccattctcttatctctccaatattcatagctacagaccaaaggtaccatccgatgatgatgtgttcctagtcctcagttgcaaattcacccatgcaaaggttaa

SEQ ID NO: 758826 - DNA, 120 bp, Artificial Sequence
  ENSG00000214376_17 (sequence is synthesized)
gaagtcttagaacattcctttctcttcttcctcctttcaggcctccaatgtccatatcttctctatttcctatgtggcagaggagttgcttggataagttacagccctttccctcaatat

SEQ ID NO: 758827 - DNA, 120 bp, Artificial Sequence
  ENSG00000214376_18 (sequence is synthesized)
tgaatccagagttttgggaagggatctctcagaatattcagacaggaactctcagtatccagagcaggactcccaaggcactgcttgattcaaaaggcgacagcagttggtctacacaac

SEQ ID NO: 758828 - DNA, 120 bp, Artificial Sequence
  ENSG00000214376_19 (sequence is synthesized)
ggatgtgtagctctagcacctgacaggtagaagataccctcaaggcgcctcctgtagacacacgggtaaactcacacactatgtcctatccccacgcagcagtcggaggaaccaggctct

SEQ ID NO: 758829 - DNA, 120 bp, Artificial Sequence
  ENSG00000214376_20 (sequence is synthesized)
gggccaggacagtttccagtgctgtgaagaaacgaggtgagcagtatccaaggggctcaaggataatctgctgatttctttcttgtctttcacacagagaggccaccagcaggaaagcag

SEQ ID NO: 758830 - DNA, 120 bp, Artificial Sequence
  ENSG00000214376_21 (sequence is synthesized)
tgggagttgggtagctgctggggccagcatgtcctcttccacactacctgcctttcagaactctgctcttccgcttgtcccgaagtcagggctggcaatcttcataatcaaaggggagtt

SEQ ID NO: 758831 - DNA, 120 bp, Artificial Sequence
  ENSG00000214376_22 (sequence is synthesized)
ggaaaagaacacccactaagaggcctccatggcagatgtcaattaaattgcccccccgcccaaatctcatgacagtttattcacatcagtagtgtgggaagttacaatgttttttttaaa

SEQ ID NO: 758832 - DNA, 120 bp, Artificial Sequence
  ENSG00000214376_23 (sequence is synthesized)
aaaagcttctttccttggctttccatttctttgaaaaaagggtttcttttgaatttttaaagctctgccatactgaacattcctgtggaaaggtttaaaatgcagagcctgaggtttttg

SEQ ID NO: 758833 - DNA, 120 bp, Artificial Sequence
  ENSG00000214376_24 (sequence is synthesized)
tttgcttttcagaaaaataaaaatcttagagattagctagtgtaaatgttaagctataaattatatttcaaactgtgaaaaaaaaaagttttaaagaatgaatgaaataaaacctgaaaa

SEQ ID NO: 758834 - DNA, 120 bp, Artificial Sequence
  ENSG00000214376_25 (sequence is synthesized)
aattataaagtagataacatagtaactggcacagaaagtcttaaatatagttcttttccctatatgtatgttagctttcagatgtacctaatttttcaaaccacccaagcatcaacattc

SEQ ID NO: 758835 - DNA, 120 bp, Artificial Sequence
  ENSG00000214376_26 (sequence is synthesized)
ctattaggaaaaggctcatgttcttgttgctgtaaatatttggtcattcacttattcatttactcagcaaacatttattgaccaaccactatgtgccaggcattgtactgggttcaggga

SEQ ID NO: 758836 - DNA, 120 bp, Artificial Sequence
  ENSG00000214376_27 (sequence is synthesized)
ccatagggataaagaaaacacgattcccaccctccaaggtctggcctggaatttgacctctgttttcttctttatttcagtcgtcttaaactctgcactttgttctgtgttaaagaataa

SEQ ID NO: 758837 - DNA, 120 bp, Artificial Sequence
  ENSG00000214376_28 (sequence is synthesized)
ctatgtcacacactgagggcttgagtgagaaggagtgatccagagagtcatgagaagagtccttgggcatcagaagggctccccatatactgggagagaacctctgtagtccaccttgct

SEQ ID NO: 758838 - DNA, 120 bp, Artificial Sequence
  ENSG00000214376_29 (sequence is synthesized)
acaaaggtgtcagatttcatgttgaaataaaagggagcattctaaatagtcttcaaaatggaaaaaggttgctctgtgtgtagagagctctatctccagggagccttgtgtcttgttcag

SEQ ID NO: 758839 - DNA, 120 bp, Artificial Sequence
  ENSG00000214376_30 (sequence is synthesized)
ttatcttgttctcacgaagaaagcactatgtggcttgatttccaactcattgacttgtctttgctttacagaaagcacaactgaggagattgagctggaagatgttgagtgttagccaag

SEQ ID NO: 758840 - DNA, 120 bp, Artificial Sequence
  ENSG00000214402_0 (sequence is synthesized)
aggcccaggtccccatccaggccaactttgatgccagccaggtgtgcccagccctgtttcctcctcatctccaatgagtcctcccggctttggtgctgcaccccgggtccctgtccacac

SEQ ID NO: 758841 - DNA, 120 bp, Artificial Sequence
  ENSG00000214402_1 (sequence is synthesized)
cctctttgatccaggctcagcagggctaggggcaggggaaacccccacctcacccgctccgtctgactggagtaggggttggctggggaagactgcagcctccatcctaccttttcagtt

SEQ ID NO: 758842 - DNA, 120 bp, Artificial Sequence
  ENSG00000214402_2 (sequence is synthesized)
gcatcccccaacaatccccagggcccaaaatagggacaagttggttgcctgtgcctcactgtcccccacccaccccacaaagacctgtgaccttgccacagccccacccatccagccgta

SEQ ID NO: 758843 - DNA, 120 bp, Artificial Sequence
  ENSG00000214402_3 (sequence is synthesized)
ccccctgggtgccagctgcagacaggccggtgctgggctggtgggggccagttgctcatgtactgaggcccccctccctcagttctgcatcggggtcgagatgtgtacagcagcccctgc

SEQ ID NO: 758844 - DNA, 120 bp, Artificial Sequence
  ENSG00000214402_4 (sequence is synthesized)
cgtggccaggaagcagctgtgtcggggcagaatgtggtgggctcaggcccagggcacaggggcggcctcccagccttccctgcacttgccctgcagttccagggcacctggtacatggtc

SEQ ID NO: 758845 - DNA, 120 bp, Artificial Sequence
  ENSG00000214402_5 (sequence is synthesized)
ggggtggtgtcagatgaccaggacttcctggactccaaggacaccatgaagatggctgtggtcttagtgacccccttggggaatggtgacctggccctcaagtttggataccccacgccc

SEQ ID NO: 758846 - DNA, 120 bp, Artificial Sequence
  ENSG00000214402_6 (sequence is synthesized)
catggcgggtgccagaaaatggacacgaccttcaccgagggtgctgtaccggggcagttcagcaacccagccatggccctgagtgacatccgagtggccttctccgactaccagcacttt

SEQ ID NO: 758847 - DNA, 120 bp, Artificial Sequence
  ENSG00000214402_7 (sequence is synthesized)
cggaaccagtggctgcagctctacggtgggcgggctgcggggcggagacccagacacccccgcttcgggtctgggatgtcacccctgtgcctgcaccagccctttctgcacgcggaaggt

SEQ ID NO: 758848 - DNA, 120 bp, Artificial Sequence
  ENSG00000214402_8 (sequence is synthesized)
ggaaccgctggctcctggtgtctgtggccgcgggtcccggcccctccctgcccctctctccctctcttcgcccctccagccccttccctttagcttacccgccctccccaccttcagctc

SEQ ID NO: 758849 - DNA, 120 bp, Artificial Sequence
  ENSG00000214402_9 (sequence is synthesized)
gagcgcccgagctgtttcccgaaggcgcccagaagatgcagctactggcgccccaagtgggcctgagccccagccagggcgtcctgctgccgaagtcgggtgagcggtgccggcagccct

SEQ ID NO: 758850 - DNA, 120 bp, Artificial Sequence
  ENSG00000214402_10 (sequence is synthesized)
gctgggagggccaggccccgggtcacacccctgctggaagggccaggccctggtcactccactgatctcagattcgggacagaagtgcccggggcagacccagcctgtctgggtcggggg

SEQ ID NO: 758851 - DNA, 120 bp, Artificial Sequence
  ENSG00000214402_11 (sequence is synthesized)
agggcgagacgttgcccaggccggtgttcccaggaggagatcgccttggggcaggtcgggggcctccgtcccagggaagggggcgcggggtggcgcctcaggctcgatctctctgcagac

SEQ ID NO: 758852 - DNA, 120 bp, Artificial Sequence
  ENSG00000214402_12 (sequence is synthesized)
cagtgtgcgggcgcgctctcccgggtgagtagaccatggccatgcggagccgcggaccatgggccctcccagctcggtgggctgcaccgcggggccctctaccttcggggcagctaggga

SEQ ID NO: 758853 - DNA, 120 bp, Artificial Sequence
  ENSG00000214402_13 (sequence is synthesized)
cgacagcgggggtgatggggcacccgggcggatccgagccgcagcagcctggggaaccgcggggctgcgcgtcgggagggggcggaggcaggggacgccgcccacctgctccttgttttg

SEQ ID NO: 758854 - DNA, 120 bp, Artificial Sequence
  ENSG00000214402_14 (sequence is synthesized)
cagtgaggggtccagcccctgagtgcccgcaggggtcagctgctccgtgcgcccagccctgcccaaagagccccctccctccacaccctggccccaagcgcaataaacaccctgaatgcc

SEQ ID NO: 758855 - DNA, 120 bp, Artificial Sequence
  ENSG00000214402_15 (sequence is synthesized)
gtgtgtgtgtctgtgtgtgcgtgtgtatgcatgtgtgtctttgtagatgtgtacctctgagtgtgtatgtgtgtatcactgtatgcgtctgtgtgtctgtgtgtctgtgtatctgtgtct

SEQ ID NO: 758856 - DNA, 120 bp, Artificial Sequence
  ENSG00000214402_16 (sequence is synthesized)
ggctgtgtgtgtctatctctgtgtgtgtcttgtgtgcgtgtctatgtgtgtgtctgtcagtgtgtctgtgtctgtgtctatctccgtgtgtgtgcatgtgtgtatgtgtgtgtcttctgt

SEQ ID NO: 758857 - DNA, 120 bp, Artificial Sequence
  ENSG00000214402_17 (sequence is synthesized)
gtgtctgtgtctggaagggggacctggaggccctgcattctaggctgtgtgcctgtgaacaggtacttaatacccaccccacccccagcaggagtgtccccacctctaaggtcatcctaa

SEQ ID NO: 758858 - DNA, 120 bp, Artificial Sequence
  ENSG00000214402_18 (sequence is synthesized)
agtcccatgtcctctaaggattgtgagggtgaacaggggaccctgggctcagagacagcaaggtaggctctaggcctgggcgctgggcaggggtggccactcaggggattggggctcttt

SEQ ID NO: 758859 - DNA, 120 bp, Artificial Sequence
  ENSG00000214402_19 (sequence is synthesized)
cgccccagaggcctggctgttccggagaccaacgaagcgctcccaactctgacccagggcctgtccacggagagtggagggcgaggaggacaggaggagccgcataaaactctgccctgc

SEQ ID NO: 758860 - DNA, 120 bp, Artificial Sequence
  ENSG00000214402_20 (sequence is synthesized)
ctggagtctatgtaggacagtgttgtcttttacagacaagtctcgaagaatttgaaggaaaatagcctactagctgtaatgtacctagttcagcaaaataataataaaaatactggttgc

SEQ ID NO: 758861 - DNA, 120 bp, Artificial Sequence
  ENSG00000214402_21 (sequence is synthesized)
ttgaggtcagaccacgggtcctcgacggctctgtgcggcagagccccagatggcagccacacggagtccagagggacccaggccctggaggaagcactgcctgaggcctggtgttgagaa

SEQ ID NO: 758862 - DNA, 120 bp, Artificial Sequence
  ENSG00000214402_22 (sequence is synthesized)
gtccctcactgtctcccacccaccccacacagtcgtgtgcccctgccccacagccccacacgtcgagccataccccctcagctgccactgccaccaggccggtgctgagctgggggtcag

SEQ ID NO: 758863 - DNA, 120 bp, Artificial Sequence
  ENSG00000214402_23 (sequence is synthesized)
tgactcagctaatcccttaggcaggtgccctgcacccccaacgccaccctgtcaccccctcagcagtaaaggcctgaggctcgaggccccagaggagctttggacctgttgggtatcttg

SEQ ID NO: 758864 - DNA, 120 bp, Artificial Sequence
  ENSG00000214402_24 (sequence is synthesized)
aggtgtgggattaacgcactgagattgggcagagataagggtttcaggggacaaaaagaaacatttgtttgaaacatgccagagtgtctccaccccgcatcaggacagactgacagagtg

SEQ ID NO: 758865 - DNA, 120 bp, Artificial Sequence
  ENSG00000214402_25 (sequence is synthesized)
ggctggggacaggctaccccatatcccttctggctccctgtgcgccccctgccctctgacctgggcctccagatcacagccttgtccactcaccagagccctggcaccacggccacacca

SEQ ID NO: 758866 - DNA, 120 bp, Artificial Sequence
  ENSG00000214402_26 (sequence is synthesized)
tgcccggccagtgccctgcccaaccctgctcccttccagattcccacccaggcagccattctcaggtacacaatgtgcaggactcactgtgacctgcccaccaggcccccccgaggcaga

SEQ ID NO: 758867 - DNA, 120 bp, Artificial Sequence
  ENSG00000214402_27 (sequence is synthesized)
ccctgcagaggcaccaagcattttgaggctcggaggtgagggtgagcttctgggtggccttcccggagaagggggcttagggctgtgcctgagctcaaggtaggggggattccaacatcc

SEQ ID NO: 758868 - DNA, 120 bp, Artificial Sequence
  ENSG00000214402_28 (sequence is synthesized)
cagaggggctgcagaaggccgaagaggcaggatgggtgagctgcaggccccctagcccagaggcccgtcagaactaccctcagctgccaggcatccggccccaccccggaggaaaggcaa

SEQ ID NO: 758869 - DNA, 120 bp, Artificial Sequence
  ENSG00000214402_29 (sequence is synthesized)
cggatggctggggttgggtggagggagccaggccagagcgctgcagggtgcaacttgatcagaagcctgtcacagtgggtgcagtcccaggccagccgccccagggcacctcaggggcgt

SEQ ID NO: 758870 - DNA, 120 bp, Artificial Sequence
  ENSG00000214402_30 (sequence is synthesized)
aaagcctacagaggagccacctcagctctgccctgctcccgtgtccggaggagatgccatcttgctgcatgatgcttcgggctctgctgatcagttccctccttgccctgctctgggcat

SEQ ID NO: 758871 - DNA, 120 bp, Artificial Sequence
  ENSG00000214413_0 (sequence is synthesized)
ggggcaacagctgagccgtctgggaagggatgcatctatatggcagaagtgaagtcaatgttccgggaagttcttccaaagcaagggccactgtttgtggaagatataatgacaatggtg

SEQ ID NO: 758872 - DNA, 120 bp, Artificial Sequence
  ENSG00000214413_1 (sequence is synthesized)
cttaaaatctctgactctggaaaaactagagaaaatgcatcaagcagcacagaatacaattcgccaacaagaaatggcagaaaaggatcaacggcaaataacccactgaatgataactga

SEQ ID NO: 758873 - DNA, 120 bp, Artificial Sequence
  ENSG00000214413_2 (sequence is synthesized)
gcactttagggaacaacctgccttatctactatttaacaataactagaaaatatgcttctgtgtgctgaaagtagtatgtgttatcaataaaattgatagtattcatagaaatacaaaaa

SEQ ID NO: 758874 - DNA, 120 bp, Artificial Sequence
  ENSG00000214413_3 (sequence is synthesized)
agggtgacgtagatttttttccttcgccagtctcaccgttacccggggcaacagctgagccgtctgggaagggatgcatctgaaaaaacactatatccaacaactcagatatggcagaag

SEQ ID NO: 758875 - DNA, 120 bp, Artificial Sequence
  ENSG00000214413_4 (sequence is synthesized)
taaacactctggtttgtattgaacataaacagttaaactatgaaccaagttttatggggtttaagtcatgtttttagaattgcaaattaaattatttgttcaccattcctattgctatct

SEQ ID NO: 758876 - DNA, 120 bp, Artificial Sequence
  ENSG00000214413_5 (sequence is synthesized)
tttatagataacattcttgggatcttttatagcattcttgggcacaagggattaaatacaacttttatatacagaggatctttacatgtttattaaatctgaatttgaagatacattcca

SEQ ID NO: 758877 - DNA, 120 bp, Artificial Sequence
  ENSG00000214413_6 (sequence is synthesized)
gccagtctcaccgttacccggggcaacagctgagccgtctgggaagggatgcatctggcttctcaaatttaataactatggaatcttatcagaaagtccattaacatctcaaagaacaac

SEQ ID NO: 758878 - DNA, 120 bp, Artificial Sequence
  ENSG00000214413_7 (sequence is synthesized)
gtggttattgtatcaatcaccatcctttataccaggatttgcatatccttcaagatgcctgaagacaatcggaggggtatacaagcaagcgaggaaaaaacactatatccaacaactcag

SEQ ID NO: 758879 - DNA, 120 bp, Artificial Sequence
  ENSG00000214413_8 (sequence is synthesized)
ggcttttacattacgtaattaaaaaacaaaattttttaaccaattttatgtgccatgtcacgtttaatgctatcttgtgtgaccagatcccaccagtaatgacaaaactgtcttaaacct

SEQ ID NO: 758880 - DNA, 75 bp, Artificial Sequence
  ENSG00000214413_9 (sequence is synthesized)
cccaccagtaatgacaaaactgtcttaaacctcacgagagcaatggcaccatctcgactcactgcaacctctgcc

SEQ ID NO: 758881 - DNA, 90 bp, Artificial Sequence
  ENSG00000214413_10 (sequence is synthesized)
gggattacacgcatgcgccaccatgcctggctactcatgttggtcaagctggtcatgaactcccaacctcaagtgatccgcccacctcgg

SEQ ID NO: 758882 - DNA, 120 bp, Artificial Sequence
  ENSG00000214413_11 (sequence is synthesized)
gcatgagccaccgtgcccagcccttaaatctcatttttaagaaaccctcacctattctgtagtcagctaagcttttaattacattaattttaagcacttgagaataaaatgactgcattt

SEQ ID NO: 758883 - DNA, 120 bp, Artificial Sequence
  ENSG00000214413_12 (sequence is synthesized)
taattttaagcacttgagaataaaatgactgcatttatcatccaagtgtcaaacaattaaaaacctaaaaatggtaactatatataagctgaggtaatatgggcttgataaagcccatga

SEQ ID NO: 758884 - DNA, 120 bp, Artificial Sequence
  ENSG00000214413_13 (sequence is synthesized)
ggtaaatatgaacactaaacttggttttaattctaacagactatatctaaacctgtaagcagtatactcctaacagtaccctcataaattctgaatataattcttgtttgctgcagtcaa

SEQ ID NO: 758885 - DNA, 120 bp, Artificial Sequence
  ENSG00000214413_14 (sequence is synthesized)
tatttggcagtttaaattagcacagacgttgaggccttgctgagttattaggctatgtaaaagaggttaaaaatatgatcattctttattgttaattggtaatattttctcatacattag

SEQ ID NO: 758886 - DNA, 120 bp, Artificial Sequence
  ENSG00000214413_15 (sequence is synthesized)
gtaaatgtcaagctttgggtctctggagtataactttttgtaacattagccattatttggtaacagaatttaaggatgatggaatgatggaaggtattacatatttctaaaacttaatta

SEQ ID NO: 758887 - DNA, 120 bp, Artificial Sequence
  ENSG00000214413_16 (sequence is synthesized)
ggggcaacagctgagccgtctgggaagggatgcatcttttcttctgtatgcttgagtcaagaactctaagtcatcttggtaataccgggttggatgcttaaagctgcagcaaaaagacca

SEQ ID NO: 758888 - DNA, 120 bp, Artificial Sequence
  ENSG00000214413_17 (sequence is synthesized)
cacttaaaattttgtagggaaaaaaagttttcaagggaacactaagattaaattgactaggttcaaatatgcttccttatgagattcaaaatttactgtgtgaaattaaagtttaagaga

SEQ ID NO: 758889 - DNA, 120 bp, Artificial Sequence
  ENSG00000214413_18 (sequence is synthesized)
tctctttttaccatcaccccaccacttaccattttgccatatctttcttgagtgattatatccacctccgtagcttgtactactgtacagttgactctgggccttcagtcctttttacct

SEQ ID NO: 758890 - DNA, 120 bp, Artificial Sequence
  ENSG00000214413_19 (sequence is synthesized)
tcctcttggacttccacactctgtgaatctaaaccgaactcatggtctttactattccttctcaaccttctcatctgtgtttccggaaaaaacactatatccaacaactcagatatggca

SEQ ID NO: 758891 - DNA, 120 bp, Artificial Sequence
  ENSG00000214413_20 (sequence is synthesized)
cactgtattctgtgagcattataagtttggttctattaatgtaagaataatttcattttctgtaatttaatgttttctcttaaggtatgccttgacaatctgcatcattttttaatttgg

SEQ ID NO: 758892 - DNA, 120 bp, Artificial Sequence
  ENSG00000214413_21 (sequence is synthesized)
catagtattccgttctatggatgttccatgatttatttaacctttgatctgctggtgaacatttagtcagcttcatctattgctgaacattttgctattcaacacaatgctttaatgaac

SEQ ID NO: 758893 - DNA, 120 bp, Artificial Sequence
  ENSG00000214413_22 (sequence is synthesized)
actcttatttttacacatttgtgttctttagaaccaattactatgagtcaaaattgtgcatatttagttttagtagatacagtactgcaaaatattcctctaaaaaagcttaacaacagt

SEQ ID NO: 758894 - DNA, 120 bp, Artificial Sequence
  ENSG00000214413_23 (sequence is synthesized)
gctaatttccctataccgtccctacctgtggatactatcagacttttaacttttttgcagtttaaaaagacattacacatgcactcatacacacaaaagcagtctttgcttaaatgtcac

SEQ ID NO: 758895 - DNA, 120 bp, Artificial Sequence
  ENSG00000214413_24 (sequence is synthesized)
cttcttaatgaggtcatcatgattttcttcttaaaactgaaataccacccccctcagcattccttaatcccctttacgttattttctatagttcttaccaccttctggcatgctgttgtt

SEQ ID NO: 758896 - DNA, 120 bp, Artificial Sequence
  ENSG00000214413_25 (sequence is synthesized)
tctctccttattctagactgtaggctccaaaaaggcaaaagtttgggtttttgtcctgttaattatgaacaatgcttggcagatgataaaaaaactcacatatttattgaattaaatggc

SEQ ID NO: 758897 - DNA, 120 bp, Artificial Sequence
  ENSG00000214413_26 (sequence is synthesized)
catggcaattgtagaatacacatgaatttcagccatagctgttatgtttctcccttggcccatctgtccctggtttaaatacatctcacctgacaagaaagttctcttaaaagtagccac

SEQ ID NO: 758898 - DNA, 120 bp, Artificial Sequence
  ENSG00000214413_27 (sequence is synthesized)
aactgcttacagtgcattactctaagcaaatcacccatgtctggctattagcaggccgtgtgggagaaggaaatactgtctgtataccaacgtgatcagcagtaggctgcatatacaaca

SEQ ID NO: 758899 - DNA, 120 bp, Artificial Sequence
  ENSG00000214413_28 (sequence is synthesized)
gtggttctataagattataatgaagctgaaaaattcctattgcttaatgatgtcataccccgttgtaatgctcatgatattgtggcagaacactttactttgtctatgttaagatacaca

SEQ ID NO: 758900 - DNA, 120 bp, Artificial Sequence
  ENSG00000214413_29 (sequence is synthesized)
aataccattgtgttacagttgtctactgtattcagtacagtaacatgtacaagtttatagcctaggcccagtacactctaccatatagcctaggtttatattaggctataccatctaggt

SEQ ID NO: 758901 - DNA, 120 bp, Artificial Sequence
  ENSG00000214413_30 (sequence is synthesized)
ttgtgtaagaggctataccatctaggtttgtgttagtacactcttaggatgtttgcaccatgacagaaccacctaatgatgcatttctcagaacatatcccatcattaagaaacacatga

SEQ ID NO: 758902 - DNA, 120 bp, Artificial Sequence
  ENSG00000214413_31 (sequence is synthesized)
ctgtactccttcctactctggactcccagggcagctgattatcaacaaagtgtagcccagccagtgctggccatccaaccttgcttattttagcccttcccttcctgtttctttcttgcc

SEQ ID NO: 758903 - DNA, 120 bp, Artificial Sequence
  ENSG00000214413_32 (sequence is synthesized)
aatgcctaagggggcctagaaacaagaaccaaccctattaaaacagacattctatccaggcaagtgactggcactaatctcccccacactaggtgcagcccactccctaccatccctttg

SEQ ID NO: 758904 - DNA, 120 bp, Artificial Sequence
  ENSG00000214413_33 (sequence is synthesized)
gctccacaccctttacagtaacaatggcagcttagtcaaacagagaactgaggtttggtagagcaccaagtttcattgtttttgtcaggccagattttggatgtgaaagagttatcagac

SEQ ID NO: 758905 - DNA, 120 bp, Artificial Sequence
  ENSG00000214413_34 (sequence is synthesized)
taagagaaaacaaaggatagtgacagttcagagtagctggagttgcttacactatataacagctaagagttgtttatctaccactttagcattttggtgatacatataaaaatccttagc

SEQ ID NO: 758906 - DNA, 120 bp, Artificial Sequence
  ENSG00000214413_35 (sequence is synthesized)
tcctatgtatttccttcacatttatcaacatctataatgtcctccctttcagtggcgtatcatgtcaggtttgcttcaaataaagaaatgtgatcataatgaatattttcactgtgatgt

SEQ ID NO: 758907 - DNA, 120 bp, Artificial Sequence
  ENSG00000214413_36 (sequence is synthesized)
atttaatggagaggctaggtggtggttttgatagttcaattcaaggctaatcagggggtctgcaatgctagtaaccttcatcctaacctggaaaaaaaaaaaaaggcagtgatcactagg

SEQ ID NO: 758908 - DNA, 120 bp, Artificial Sequence
  ENSG00000214413_37 (sequence is synthesized)
taccactggcaggcctaaaaagaaaagaatatggtaggagaagctgtgcagtctaaggaaattgtgtattgtatttatttcacattccatttagtgatgagttgctttattcctggtcca

SEQ ID NO: 758909 - DNA, 120 bp, Artificial Sequence
  ENSG00000214413_38 (sequence is synthesized)
ttacttatttcatcatctctccctgctagagcagtataggggtgaagtttgatgacaaagttctggaaagcagatagaggttttcaggaacttagacgttccagagtaagaatctgagca

SEQ ID NO: 758910 - DNA, 120 bp, Artificial Sequence
  ENSG00000214413_39 (sequence is synthesized)
aagcttttattaggaatgtcaaagtagtggagcgggaataacaaaaaccagaagaagcttcacttgattataattaatttgcagtggttggtaaaggcaggcaccaagccagattcacca

SEQ ID NO: 758911 - DNA, 120 bp, Artificial Sequence
  ENSG00000214413_40 (sequence is synthesized)
ctttataaataataaatctgtgggggtgatgttgtgaaagatgcatggtaaggttgcatcagcaaggtgaatcactgagtgggtgggaccgtctagaaaagcatctgtgtttggaaaggg

SEQ ID NO: 758912 - DNA, 120 bp, Artificial Sequence
  ENSG00000214413_41 (sequence is synthesized)
atcattctacagcttagtccagaacaccttgaacacacagcatagcagaatcttgactgtaatacttggagcaaatgtcactggcaaaaatggcatatatgctgggatgttcataacaaa

SEQ ID NO: 758913 - DNA, 120 bp, Artificial Sequence
  ENSG00000214413_42 (sequence is synthesized)
tagttaaatattgttggtcctttcgcatatagaatctcggtattagaggaaaatagtaaactgaaactctatttctgttctgcaagagccaatttcacctattgtattacttcgttacca

SEQ ID NO: 758914 - DNA, 120 bp, Artificial Sequence
  ENSG00000214413_43 (sequence is synthesized)
attgcagctgtgtagtcagtcatccataggattctttttgttagacacaaagtagaaaccagctgttggccgttgagacaagtaggaatcttaggaaatgttagcctgccagttcctact

SEQ ID NO: 758915 - DNA, 120 bp, Artificial Sequence
  ENSG00000214413_44 (sequence is synthesized)
tttcctaactacctgcctcaccacccccatcaaatggtggtcatgttttttgtcacccaccattcaggggagatgctatcaacgaaccacgctggctacacacaaataccttttcctcag

SEQ ID NO: 758916 - DNA, 120 bp, Artificial Sequence
  ENSG00000214413_45 (sequence is synthesized)
atgatattaatcatctttgccttaaaaactgaagctctaccaagttttcactatgagagaaaaaaaattacaacacctagccttgtagttaacaccacaactgactaatggaagttgaca

SEQ ID NO: 758917 - DNA, 120 bp, Artificial Sequence
  ENSG00000214413_46 (sequence is synthesized)
agatctaaatgcttatacaaactatcccaaggtcacaggaaattaatggcaatattatacaaggttagggtagttcactttctataggaatttggattttacttcttaaactacaatgga

SEQ ID NO: 758918 - DNA, 120 bp, Artificial Sequence
  ENSG00000214413_47 (sequence is synthesized)
aatgtctcaggcagtctgctttgggaatgtattcttgaataatactgatttctcattgaaggaaaaaacactatatccaacaactcagatatggcagaagtgaagtcaatgttccgggaa

SEQ ID NO: 758919 - DNA, 120 bp, Artificial Sequence
  ENSG00000214413_48 (sequence is synthesized)
gttcttccaaagcaaggtatgtacatcacaaatattgaggtcattgattattacaggactaaagaagtcataggcagtgtcacatagcaggcttaatagctaaacatctgcagctattgt

SEQ ID NO: 758920 - DNA, 120 bp, Artificial Sequence
  ENSG00000214413_49 (sequence is synthesized)
gttccgtattatctcatttactgtcttttactatatgctttttcatgacatccagtaaaaggataacaaatgaaacattgtttcttatacctaaaattgcctattaattagctaattcct

SEQ ID NO: 758921 - DNA, 120 bp, Artificial Sequence
  ENSG00000214413_50 (sequence is synthesized)
aaaattcctaattacaatatgaattttttttaagagacaggttgtcactctgccacccaggcttgggtacagctggcacaaccgtagctcaccgcagccttgaactactgggctcctgcc

SEQ ID NO: 758922 - DNA, 120 bp, Artificial Sequence
  ENSG00000214413_51 (sequence is synthesized)
ctagcctactgatttgctagtactacaggcatgtgctaccatgcctggctaatttgttcttatttttgtagagaagggatctcaatgtgttgcctaggctggtctcaaacccctgggctc

SEQ ID NO: 758923 - DNA, 120 bp, Artificial Sequence
  ENSG00000214413_52 (sequence is synthesized)
aaacaaacaatccaacccctttggcatcccaaagtgctgggataacaggtaagagctaccatgccctactcaatatgaaacttcagtgaaagaaataatggaatttactatgttaaataa

SEQ ID NO: 758924 - DNA, 120 bp, Artificial Sequence
  ENSG00000214413_53 (sequence is synthesized)
ggtctgaaagtggagaaagagaaacctgaagcaacagtaagaaaagccgaaggtttaaaccttcagtcatttgaatatttacgttaaatatcatattttgctatatttttttgcactatg

SEQ ID NO: 758925 - DNA, 120 bp, Artificial Sequence
  ENSG00000214413_54 (sequence is synthesized)
tatatatatattctgccaaatcttattttaagattaaacttctgacacaaaaagttgtgtcttatggtagcatagattcttgggtagaacgctcaaaacttgtcttcctcagaagcaccc

SEQ ID NO: 758926 - DNA, 120 bp, Artificial Sequence
  ENSG00000214413_55 (sequence is synthesized)
tactagtaagaaatgcgcttatagaatgacaatgatctttctggttccagagcaaaactcaatttaggtacaagagtttttcagtgacaagagattaattttttagaccttcattctagc

SEQ ID NO: 758927 - DNA, 120 bp, Artificial Sequence
  ENSG00000214413_56 (sequence is synthesized)
tgcaaatccaactacaaacaactgggttatctttcttgaattaattcttatttcttgttaaacttagggccactgtttgtggaagatataatgacaatggtgctgtgtaaacccaaactt

SEQ ID NO: 758928 - DNA, 120 bp, Artificial Sequence
  ENSG00000214413_57 (sequence is synthesized)
gatgcaaacctaccttctcgacttaatttctgcttccttagtacttacacgccagccaaaatgaactactcttgtttctttgctgttaattactgaaatctgttgtagcagtcacctttt

SEQ ID NO: 758929 - DNA, 120 bp, Artificial Sequence
  ENSG00000214413_58 (sequence is synthesized)
acttccgaattgggtcatggcggaagggtgttaatagcctggccgcccgtgccccagggaatgcttatttttgaccttagttgcaaagtgagtttcttctgtatgcttgagtcaagaact

SEQ ID NO: 758930 - DNA, 120 bp, Artificial Sequence
  ENSG00000214413_59 (sequence is synthesized)
aacccagccagaggcagcccggccgggaggaccccagcggggaatgggcggggacctcggggcggagctcctaactccggcaaaacggagctcttgaccacgcctccgcaagttcctatt

SEQ ID NO: 758931 - DNA, 120 bp, Artificial Sequence
  ENSG00000214413_60 (sequence is synthesized)
atatgtagtgtctgctgataatgcattccctgagaaaatggacctgtggataaaccatcatgcttcatctcatttcctgtctcctctttcaccatttttctttcttttcttttctttttt

SEQ ID NO: 758932 - DNA, 120 bp, Artificial Sequence
  ENSG00000214413_61 (sequence is synthesized)
ctgtcacctaagctagaatgcagtggcgtgatcatatctcactgcaacctaaaactcaggctcaagcagtaccctcacctcagcctcccgagtagctgagactaacaggcacactccatc

SEQ ID NO: 758933 - DNA, 120 bp, Artificial Sequence
  ENSG00000214413_62 (sequence is synthesized)
catcatgcccgaataatttttgttaattttttgtagagatgaggtcttgctttgttgtctaggctggtcttgaactgggctcaagcgatcctcccactttggccttccaaagtgctggga

SEQ ID NO: 758934 - DNA, 120 bp, Artificial Sequence
  ENSG00000214413_63 (sequence is synthesized)
gcatctctctagcctggtagaatcttactatgacaaaaatgctccagaaaataaacatctcttaggagctacacacagagacaaggaaacactggtaactcaagaaagactaagggcttc

SEQ ID NO: 758935 - DNA, 120 bp, Artificial Sequence
  ENSG00000214413_64 (sequence is synthesized)
gctaattattaagtaagtagtgcttctgcaagtcaagagactgttctcagctttcaacaatactgaaggaatacctaattgagtagtctgctggtcatttaaaattatttcttgatgata

SEQ ID NO: 758936 - DNA, 120 bp, Artificial Sequence
  ENSG00000214413_65 (sequence is synthesized)
ggtcactacgtgattgttagcatataacgtaagttcaaagattgaaaaaaattttcccattttcatctcagtgtttacatctacaaaaatgaagaatagggctgggcacagtggctcacg

SEQ ID NO: 758937 - DNA, 90 bp, Artificial Sequence
  ENSG00000214413_66 (sequence is synthesized)
gaagaagaatagaattgtagcaataagtaaatttcagccatgtatatacgtgaactaattgagaaaataaagctgtcttcttattaacag

SEQ ID NO: 758938 - DNA, 120 bp, Artificial Sequence
  ENSG00000214414_0 (sequence is synthesized)
atggcttctgctatcacgcagtgttctaccagtgagctcacctgctcgatctgcacagactatttgacagaccctgtcaccatttgttgtgggcacagattttgtagtccctgtctctgc

SEQ ID NO: 758939 - DNA, 120 bp, Artificial Sequence
  ENSG00000214414_1 (sequence is synthesized)
ctcttgtgggaagatacactaactcctaattgctgccctgtgtgcagggaaatatcacagcaaatgtacttcaaacgcattatttttgctgagaaacaagttattcctacaagagaatca

SEQ ID NO: 758940 - DNA, 120 bp, Artificial Sequence
  ENSG00000214414_2 (sequence is synthesized)
gtcccctgccagttatcaagctctgccatgctgatctgtaggagacaccaggaaatcaagaacctcatctgtgaaactgataggagcctgctgtgttttctatgctctcaatccccaagg

SEQ ID NO: 758941 - DNA, 120 bp, Artificial Sequence
  ENSG00000214414_3 (sequence is synthesized)
catgctactcacaaacactatatgacaagggaggctgatgaatactataggaagaaactcctgattcaaatgaagtccatctggaaaaaaaaacagaaaaatcaaagaaatctaaacaga

SEQ ID NO: 758942 - DNA, 120 bp, Artificial Sequence
  ENSG00000214414_4 (sequence is synthesized)
gagaccaacataatcggaacatgggaagtttttataaatttgcggagcatgatgatcagtgctgaatatcctaaggtgtgtcaatacctccgtgaagaagagcaaaagcacgtagagagc

SEQ ID NO: 758943 - DNA, 120 bp, Artificial Sequence
  ENSG00000214414_5 (sequence is synthesized)
ctcaagagaagtcaaactagaatggctaagatgggtatactcctgagagaaatgtatgagaaactgaaggaaatgagctgtaaagcagatgtgaacctgcctcaggatttgggagacgta

SEQ ID NO: 758944 - DNA, 120 bp, Artificial Sequence
  ENSG00000214414_6 (sequence is synthesized)
atgaaaaggaatgagtttctgaggctggccatgcctcagcctgtgaacccacagctcagtgcatggaccatcactggggtgtcagaaaggcttaacttcttcagagtgtatatcaccttg

SEQ ID NO: 758945 - DNA, 120 bp, Artificial Sequence
  ENSG00000214414_7 (sequence is synthesized)
gatcgtaagatatgcagtaatcacaagcttctgttcgaagacctaaggcatttgcagtgcagccttgatgatacagacatgtcctgtaatccaacaagtacacagtatacttcttcatgg

SEQ ID NO: 758946 - DNA, 120 bp, Artificial Sequence
  ENSG00000214414_8 (sequence is synthesized)
ggagctcagatcctcagctctggcaaacattactgggaggtggatgtgaaagactcttgtaattgggttataggactttgcagagaagcctggacaaagaggaatgacatgcgacttgac

SEQ ID NO: 758947 - DNA, 120 bp, Artificial Sequence
  ENSG00000214414_9 (sequence is synthesized)
tctgagggtatctttctactcctgtgtctcaaagtggatgaccatttcagtctcttctctacctccccactgttacctcactatattccaaggccccaaggctggctaggggtgttcctg

SEQ ID NO: 758948 - DNA, 120 bp, Artificial Sequence
  ENSG00000214414_10 (sequence is synthesized)
gattatgaatgtgggatagtgagctttgttaatgttgcccaaagttccctcatttgtagtttcctctcacgcatcttctattttcctctcagacctttcatttgccacggatctaaataa

SEQ ID NO: 758949 - DNA, 120 bp, Artificial Sequence
  ENSG00000214415_0 (sequence is synthesized)
agaatcttagagcattagggaatggactgctaggtacttcagcagagcattactcttgcctcctatgtccaaaccacagctgtgctcaacatttgaaaaatctgaacatataaactgaca

SEQ ID NO: 758950 - DNA, 120 bp, Artificial Sequence
  ENSG00000214415_1 (sequence is synthesized)
agtatctaccaccacaagatgggaagtggaattagttcagagagcaaggagtcagccaaaagatcaaaagaactggagaaaaagcttcaggaggatgctgagcgagatgcaagaaccgta

SEQ ID NO: 758951 - DNA, 120 bp, Artificial Sequence
  ENSG00000214415_2 (sequence is synthesized)
aagctgctactattaggagcaggagaatctgggaaaagtactattgttaaacaaatgaagatcatccataagaatggttacagtgagcaagaatgcatggagttcaaagcagtaatttac

SEQ ID NO: 758952 - DNA, 120 bp, Artificial Sequence
  ENSG00000214415_3 (sequence is synthesized)
agtaatacattgcaatccatcctagctattgtgaaagccatgactacccttggaattgattatgtaaatcccagaagtgcagaggaccaacgacaactttatgcaatggcaaataccctg

SEQ ID NO: 758953 - DNA, 120 bp, Artificial Sequence
  ENSG00000214415_4 (sequence is synthesized)
gaagatggtggcatgacacctcaactggctgaggtaataaaacggctgtggagagatccaggaattcaggcctgctttgaaagggcatctgaatatcagctcaatgactcagcagcttac

SEQ ID NO: 758954 - DNA, 120 bp, Artificial Sequence
  ENSG00000214415_5 (sequence is synthesized)
gtgccaaatgaacaagatgttctccattctcgagtgaaaacgactggaatcattgaaactcaattctcctttaaagacttgcacttcaggatgtttgatgtaggtggacagagatctgag

SEQ ID NO: 758955 - DNA, 120 bp, Artificial Sequence
  ENSG00000214415_6 (sequence is synthesized)
agaaagaagtggattcactgctttgaaggagttacatgcattatattttgtgctgcacttagtgcctatgacatggtcctcgtggaagacgaagaagtgaatagaatgcatgaaagcctt

SEQ ID NO: 758956 - DNA, 120 bp, Artificial Sequence
  ENSG00000214415_7 (sequence is synthesized)
cacctgttcaacagtatctgtaatcacaagtatttttcaacaacctccattgtcctgttcctcaacaaaaaagatatctttcaagaaaaggtaaccaaggtgcatcttagtatctgcttt

SEQ ID NO: 758957 - DNA, 120 bp, Artificial Sequence
  ENSG00000214415_8 (sequence is synthesized)
ccagaatacactgggccaaatacatttgaagatgcaggaaactacatcaagaaccagtttctagacctgaatttaaaaaaagaagataaggaaatttattcccacatgacctgtgctact

SEQ ID NO: 758958 - DNA, 120 bp, Artificial Sequence
  ENSG00000214415_9 (sequence is synthesized)
gacacccaaaatgtcaagtttgtgtttgacgcagttacagatataataatcaaagagaatctaaaagactgtgggcttttctaatcaactattttctcttccactcttgctcatgtatgc

SEQ ID NO: 758959 - DNA, 120 bp, Artificial Sequence
  ENSG00000214435_0 (sequence is synthesized)
acaggagctggctgcgggagcccgccgtcctgagtcgcaggccgaggagacagtgagtgcgcgccctgagtcgcaggccgaggagacagtgagtgcgcgccctgagtcgcaggccgagga

SEQ ID NO: 758960 - DNA, 120 bp, Artificial Sequence
  ENSG00000214435_1 (sequence is synthesized)
gacatggctgcacttcgtgacgctgagatacagaaggacgtgcagacctactacgggcaggtgctgaagagatcggcagacctccagaccaacggctgtgtcaccacagccaggccggtc

SEQ ID NO: 758961 - DNA, 120 bp, Artificial Sequence
  ENSG00000214435_2 (sequence is synthesized)
cccaagcacatccgggaagccttgcaaaatgtacacgaagaagtagccctaagatattatggctgtggtctggtgatccctgagcatctagaaaactgctggattttggatctgggtagt

SEQ ID NO: 758962 - DNA, 120 bp, Artificial Sequence
  ENSG00000214435_3 (sequence is synthesized)
ggaagtggcagagattgctatgtacttagccagctggttggtgaaaaaggacacgtgactggaatagacatgaccaaaggccaggtggaagtggctgaaaagtatcttgactatcacatg

SEQ ID NO: 758963 - DNA, 120 bp, Artificial Sequence
  ENSG00000214435_4 (sequence is synthesized)
gaaaaatatggcttccaggcatctaatgtgacttttattcatggctacattgagaagttgggagaggctggaatcaagaatgagagccatgatattgttgtatcaaactgtgttattaac

SEQ ID NO: 758964 - DNA, 120 bp, Artificial Sequence
  ENSG00000214435_5 (sequence is synthesized)
cttgtgcctgataaacaacaagtgcttcaggaggcatatcgggtgctgaagcatggtggggagttatatttcagtgacgtctatacgagccttgaactgccagaagaaatcaggacacac

SEQ ID NO: 758965 - DNA, 120 bp, Artificial Sequence
  ENSG00000214435_6 (sequence is synthesized)
aaagttttatggggtgagtgtctgggtggtgctttatactggaaggaacttgctgtccttgctcaaaaaattgggttctgccctccacgtttggtcactgccaatctcattacaattcaa

SEQ ID NO: 758966 - DNA, 120 bp, Artificial Sequence
  ENSG00000214435_7 (sequence is synthesized)
aacaaggaactggaaagagttatcggtgactgtcgttttgtttctgcaacatttcgcctcttcaaacactctaagacaggaccaaccaagagatgccaagttatttacaatggaggaatt

SEQ ID NO: 758967 - DNA, 120 bp, Artificial Sequence
  ENSG00000214435_8 (sequence is synthesized)
acaggacatgaaaaagaactaatgtttgatgccaattttacatttaaggaaggtgaaattgttgaagtggatgaagaaacagcagctatcttgaagaattcaagatttgctcaagatttt

SEQ ID NO: 758968 - DNA, 120 bp, Artificial Sequence
  ENSG00000214435_9 (sequence is synthesized)
ctgatcagaccaattggagagaagttgccaacatctggaggctgttctgctttggagttaaaggatataatcacagatccatttaagcttgcagaagagtctgacagtatgaagtccaga

SEQ ID NO: 758969 - DNA, 120 bp, Artificial Sequence
  ENSG00000214435_10 (sequence is synthesized)
aatctatagccaaccaggggaccacagtagtgggcaagagtgatctgcatgttttttaacctgcttttccccatagcacagaccataagaaacaacaaatggggccgggcacagtggctc

SEQ ID NO: 758970 - DNA, 71 bp, Artificial Sequence
  ENSG00000214435_11 (sequence is synthesized)
ccaaatggcagagagccaccatattccaaatcactgaaaaaaataaatgaattatttttatttatttattt

SEQ ID NO: 758971 - DNA, 63 bp, Artificial Sequence
  ENSG00000214435_12 (sequence is synthesized)
aaaataaatgaatgaagtgcagtggccccatctcaactcactgcaagctccacctcctgggtt

SEQ ID NO: 758972 - DNA, 86 bp, Artificial Sequence
  ENSG00000214435_13 (sequence is synthesized)
taaatgaattatttttaagaggcattgattaaagattcacagcaaatcactagttaagcagattttttttctatttcctacttcaa

SEQ ID NO: 758973 - DNA, 120 bp, Artificial Sequence
  ENSG00000214435_14 (sequence is synthesized)
tcactagttaagcagattttttttctatttcctacttcaaagttctggtgccacatagtggtcagaaatggaacagagaagctgtcttaagccttgttcaagaagcaggaaaggcatcag

SEQ ID NO: 758974 - DNA, 120 bp, Artificial Sequence
  ENSG00000214435_15 (sequence is synthesized)
aagaagtaacagttggcagagggtctcaggaaaaacatcttccttctgatcttttgcatagcaccttttggaattttcatcatgtttgcttattaaacaaagctcctactgccatcatac

SEQ ID NO: 758975 - DNA, 120 bp, Artificial Sequence
  ENSG00000214435_16 (sequence is synthesized)
taatcatgcaaaaagattgccaaatcatgtttggtaggaggacttttgaggtagcttttgaacaaatgtttttttcttttttctttttttttgcaataaagaaaacaaattaatcataaa

SEQ ID NO: 758976 - DNA, 120 bp, Artificial Sequence
  ENSG00000214447_0 (sequence is synthesized)
agttgctaggcaaccacagctgcgggcgtggtctgcgcggggttgccctcctgttctggtttatcaggggatccccaaagaaagcaaggggaccaaggccgggactgctggggtgaaggt

SEQ ID NO: 758977 - DNA, 120 bp, Artificial Sequence
  ENSG00000214447_1 (sequence is synthesized)
ccgggaggctgagtaaggggacggaagggcacaggccatggaaaggaatgacatcatcaacttcaaggctttggagaaagagctgcaggctgcactcactgctgatgagaagtacaaacg

SEQ ID NO: 758978 - DNA, 120 bp, Artificial Sequence
  ENSG00000214447_2 (sequence is synthesized)
ggagaatgctgccaagttacgggcagtggaacagagggtggcttcctatgaggagttcaggggtattgtccttgcatcacatctgaagccactggagcggaaggataagatgggaggaaa

SEQ ID NO: 758979 - DNA, 120 bp, Artificial Sequence
  ENSG00000214447_3 (sequence is synthesized)
gagaactgtgccctggaactgtcacactattcagggaaggaccttccaggatgtggccactgaaatctccccggagaaagcccccctccagcccgagacgtctgctgacttctatcgtga

SEQ ID NO: 758980 - DNA, 120 bp, Artificial Sequence
  ENSG00000214447_4 (sequence is synthesized)
ttggcgacgacacttgccaagtgggccagagcgctaccaggctctactgcagcttgggggtccaaggctcggctgcctcttccagacagatgtgggatttggacttcttggggagctgct

SEQ ID NO: 758981 - DNA, 120 bp, Artificial Sequence
  ENSG00000214447_5 (sequence is synthesized)
ggtggcactggctgatcacgtggggccggctgaccgggcagcggtgctggggatcctatgcagcctggcgagcactgggcgcttcaccctgaacctaagcctgctgagccgggcagagag

SEQ ID NO: 758982 - DNA, 120 bp, Artificial Sequence
  ENSG00000214447_6 (sequence is synthesized)
agagagctgcaagggcttgtttcagaagctgcaagccatgggcaaccccagatccgtgaaggaggggctcagctgggaggagcagggtctggaggagcagtctggtgggctccaggagga

SEQ ID NO: 758983 - DNA, 120 bp, Artificial Sequence
  ENSG00000214447_7 (sequence is synthesized)
tcccagtggtcactggaggcagttttttggttgttgtcttgggggttctgcaggaccataataagaaacccacacctggttcccttctcaacttggaattttcagagcaaaaacaggaat

SEQ ID NO: 758984 - DNA, 120 bp, Artificial Sequence
  ENSG00000214447_8 (sequence is synthesized)
caagtcttccccacttctccagtccctcagtgtctcgctgttttgaactgtgtgtatccatggacagtcaagagctcaggaagttgagagcggttttgtttcccacccttagagtctgcc

SEQ ID NO: 758985 - DNA, 120 bp, Artificial Sequence
  ENSG00000214447_9 (sequence is synthesized)
aagcctctagcccactggccttgagagatgagtgtgtgcccaaccaaatgctggctataccagttacagcctccactcataaaagggaaaaagcaaaatctttatggtaaacaaacactg

SEQ ID NO: 758986 - DNA, 120 bp, Artificial Sequence
  ENSG00000214447_10 (sequence is synthesized)
atctccacagctcttaacaagaatgtttatagccccaaaccaatgaatggacatgtaatcaacaaatgatcaaatactacatcatttgaggtgttgaattttcccctagagactcagttc

SEQ ID NO: 758987 - DNA, 120 bp, Artificial Sequence
  ENSG00000214447_11 (sequence is synthesized)
ttgtgcaggttgggcctgggaaagtcccaagccatcagctcaggtccagccagcctcccggatggccagatatgcaggagggtgggtttccttcatcccccaggttgatgaaagactttt

SEQ ID NO: 758988 - DNA, 120 bp, Artificial Sequence
  ENSG00000214447_12 (sequence is synthesized)
ccaccaggctggcagggcagggcctggagcactgaggcagagatctccctgcccgagcacctcggcccgcccttctcattccggtttcctttgacccattcttgggtgagcgccagtgtt

SEQ ID NO: 758989 - DNA, 120 bp, Artificial Sequence
  ENSG00000214447_13 (sequence is synthesized)
ctagaaaggggagtaaaggccaggttctagaatggctttccccccccaccctgagatcaggtctggaatgttagaagggcatcttgtacatccactgggaataaattgccttgcacttgg

SEQ ID NO: 758990 - DNA, 120 bp, Artificial Sequence; identical to SEQ ID NO: 539785
  ENSG00000214447_14 (sequence is synthesized)

SEQ ID NO: 758991 - DNA, 120 bp, Artificial Sequence; identical to SEQ ID NO: 539786
  ENSG00000214447_15 (sequence is synthesized)

SEQ ID NO: 758992 - DNA, 120 bp, Artificial Sequence; identical to SEQ ID NO: 539787
  ENSG00000214447_16 (sequence is synthesized)

SEQ ID NO: 758993 - DNA, 120 bp, Artificial Sequence; identical to SEQ ID NO: 539788
  ENSG00000214447_17 (sequence is synthesized)

SEQ ID NO: 758994 - DNA, 120 bp, Artificial Sequence; identical to SEQ ID NO: 539789
  ENSG00000214447_18 (sequence is synthesized)

SEQ ID NO: 758995 - DNA, 120 bp, Artificial Sequence; identical to SEQ ID NO: 539790
  ENSG00000214447_19 (sequence is synthesized)

SEQ ID NO: 758996 - DNA, 120 bp, Artificial Sequence; identical to SEQ ID NO: 539791
  ENSG00000214447_20 (sequence is synthesized)

SEQ ID NO: 758997 - DNA, 120 bp, Artificial Sequence; identical to SEQ ID NO: 539792
  ENSG00000214447_21 (sequence is synthesized)

SEQ ID NO: 758998 - DNA, 120 bp, Artificial Sequence; identical to SEQ ID NO: 539793
  ENSG00000214447_22 (sequence is synthesized)

SEQ ID NO: 758999 - DNA, 120 bp, Artificial Sequence; identical to SEQ ID NO: 539794
  ENSG00000214447_23 (sequence is synthesized)

SEQ ID NO: 759000 - DNA, 120 bp, Artificial Sequence; identical to SEQ ID NO: 539795
  ENSG00000214447_24 (sequence is synthesized)

SEQ ID NO: 759001 - DNA, 120 bp, Artificial Sequence; identical to SEQ ID NO: 539796
  ENSG00000214447_25 (sequence is synthesized)

SEQ ID NO: 759002 - DNA, 120 bp, Artificial Sequence; identical to SEQ ID NO: 539797
  ENSG00000214447_26 (sequence is synthesized)

SEQ ID NO: 759003 - DNA, 120 bp, Artificial Sequence; identical to SEQ ID NO: 539798
  ENSG00000214447_27 (sequence is synthesized)

SEQ ID NO: 759004 - DNA, 120 bp, Artificial Sequence
  ENSG00000214456_0 (sequence is synthesized)
gtggagactcgagcctggggtcggcggagacagctggtgtctgaagccgctcgcgcccagggtgaccctgtttgcagcacgatgtctgaagaagaggcggctcagatccccagatccagt

SEQ ID NO: 759005 - DNA, 120 bp, Artificial Sequence
  ENSG00000214456_1 (sequence is synthesized)
gtgtgggagcaggaccagcagaacgtggtgcagcgtgtggtggctctgcccctggtcagggccacgtgcaccgcggtctgcgatgtttacagtgcagccaaggacaggcacccgctgctg

SEQ ID NO: 759006 - DNA, 120 bp, Artificial Sequence
  ENSG00000214456_2 (sequence is synthesized)
ggctccgcctgccgcctggctgagaactgcgtgtgcggcctgaccacccgtgccctggaccacgcccagccgctgctcgagcacctgcagccccagctggccactatgaacagcctcgcc

SEQ ID NO: 759007 - DNA, 120 bp, Artificial Sequence
  ENSG00000214456_3 (sequence is synthesized)
tgcaggggcctggacaagctggaagagaagcttccctttctccagcaaccttcggagacggtggtgacctcagccaaggacgtggtggccagcagtgtcacgggtgtggtggacctggcc

SEQ ID NO: 759008 - DNA, 120 bp, Artificial Sequence
  ENSG00000214456_4 (sequence is synthesized)
cggaggggccggcgctggagcgtggagctgaagcgctccgtgagccatgctgtggatgttgtactggaaaaatcagaggagctggtggatcacttcctgcccatgacggaggaagagctc

SEQ ID NO: 759009 - DNA, 120 bp, Artificial Sequence
  ENSG00000214456_5 (sequence is synthesized)
gcggcactggcggctgaggctgaaggccctgaagtgggttcggtggaggatcagaggagacagcagggctactttgtgcgcctcggctccctgtcagcacggatccgccacctggcctac

SEQ ID NO: 759010 - DNA, 120 bp, Artificial Sequence
  ENSG00000214456_6 (sequence is synthesized)
gagcactctgtggggaaactgaggcagagcaaacaccgtgcccaggacaccctggcccagctgcaggagacgctggagctgatagaccacatgcagtgtggggtgacccccaccgccccg

SEQ ID NO: 759011 - DNA, 120 bp, Artificial Sequence
  ENSG00000214456_7 (sequence is synthesized)
gcctgccctgggaaggtgcacgagctgtggggggaatggggccagcgccctccggagagccgccgccggagccaggcagagctggagacgctggtgctgtcccgcagcctgacccaggag

SEQ ID NO: 759012 - DNA, 120 bp, Artificial Sequence
  ENSG00000214456_8 (sequence is synthesized)
ctgcagggcacggtagaggctctggagtccagcgtgcggggcctgcccgccggcgcccaggagaaggtggctgaggtgcggcgcagtgtggatgccctgcagaccgccttcgctgatgcc

SEQ ID NO: 759013 - DNA, 120 bp, Artificial Sequence
  ENSG00000214456_9 (sequence is synthesized)
cgctgcttcagggacgtgccagcggccgcgctggccgagggccggggtcgcgtggcccacgcgcacgcctgcgtggacgagctgctggagctggtggtgcaggccgtgccgctgccctgg

SEQ ID NO: 759014 - DNA, 120 bp, Artificial Sequence
  ENSG00000214456_10 (sequence is synthesized)
acgaggtcatcgggggccctgacccccgctgggcgcacctggactggccggcccagcagagagcctgggaggcagagcacagggacgggagtgggaatggggatggggacaggatgggtg

SEQ ID NO: 759015 - DNA, 120 bp, Artificial Sequence
  ENSG00000214456_11 (sequence is synthesized)
ttgccggggacatctgcgagcaggaacccgagacccccagctgcccggtcaagcacaccctgatgcccgagctggacttctgacccatgggccagtggaggcggggaggaaaggccacct

SEQ ID NO: 759016 - DNA, 120 bp, Artificial Sequence
  ENSG00000214456_12 (sequence is synthesized)
gcacaccccgatccctgctgccccctggtggccacacgtaagctcgaggccttggccttgacccttctttggaatcaggcccaactccggatctctgaccacctttttggtattggactc

SEQ ID NO: 759017 - DNA, 120 bp, Artificial Sequence
  ENSG00000214456_13 (sequence is synthesized)
tcccattttttccttgaacacatggacaaagaggcccgggggagcagggcctcgaaccctattcaggccaacttgagccacaagctgggttcttcacctatgtcctgctccctggctcca

SEQ ID NO: 759018 - DNA, 61 bp, Artificial Sequence
  ENSG00000214456_14 (sequence is synthesized)
caagctgggttcttcacctatgtcctgctccctggctccatgaagcgaatccaaatctttc

SEQ ID NO: 759019 - DNA, 69 bp, Artificial Sequence
  ENSG00000214456_15 (sequence is synthesized)
ggttgtgaggctgacgcagaagaattgcttaaacccgagaggcgcggagcttgcagtgagcagagatcg

SEQ ID NO: 759020 - DNA, 79 bp, Artificial Sequence
  ENSG00000214456_16 (sequence is synthesized)
caaaaaataatagtaacagcctcccgaagaaatacacattttgcccaatgccttctgtttggggctttgaaaagtgagc

SEQ ID NO: 759021 - DNA, 120 bp, Artificial Sequence
  ENSG00000214456_17 (sequence is synthesized)
cctcccgaagaaatacacattttgcccaatgccttctgtttggggctttgaaaagtgagccctgactgggtgtggtggttgacacctgttatcacagcactttgggaggccaaggtggga

SEQ ID NO: 759022 - DNA, 86 bp, Artificial Sequence
  ENSG00000214456_18 (sequence is synthesized)
ctgtttttaaaaaatacttcctagggaaacacacattttgccctatttggaactttgaaaagtgagccctcctctgcccatgggcc

SEQ ID NO: 759023 - DNA, 120 bp, Artificial Sequence
  ENSG00000214456_19 (sequence is synthesized)
ttggaactttgaaaagtgagccctcctctgcccatgggccgtgctgctcagcctgccatactcgcttgctttgctgtttgggatttgcctccagaataaaggtcctttttgttgttgaaa

SEQ ID NO: 759024 - DNA, 120 bp, Artificial Sequence
  ENSG00000214456_20 (sequence is synthesized)
gtgtgggagcaggaccagcaggtgagggctgcccctcccatggagcagggacagaaggtattgtgtgggacagtcccttctaggagcgtttcaggccaggtatcccgccccactcctctc

SEQ ID NO: 759025 - DNA, 120 bp, Artificial Sequence
  ENSG00000214456_21 (sequence is synthesized)
cttgctgggaaaacctgagtcataaaatattttggtccatggaggggatggtctatttcctagtgggggcttaatgaggccctgggaggggagtgtctctcaaagacacccagctggctt

SEQ ID NO: 759026 - DNA, 120 bp, Artificial Sequence
  ENSG00000214456_22 (sequence is synthesized)
ccacgtccaccatcatggcgccctcagtaacaacaatagtaagagcagcaatcactgtatcagtcacagttccaaccgtttcatgtatattggctccttgaacacccatcacaaccctag

SEQ ID NO: 759027 - DNA, 120 bp, Artificial Sequence
  ENSG00000214456_23 (sequence is synthesized)
taacccatttcatagatggggaaacaaaggcaccgaacagttcagtggcttgcccaagttcacacaacttgcaggcagctgaaccagaagtgaacagaggccactgtgctccaggggcag

SEQ ID NO: 759028 - DNA, 120 bp, Artificial Sequence
  ENSG00000214456_24 (sequence is synthesized)
tgctctgaacccccagactctaacatctcctccctcgagcagacagatcgcagtggacccttcaacaacatgggtttgaactgcacaggtcaggctgggtgcggtggctcagacgcctgt

SEQ ID NO: 759029 - DNA, 120 bp, Artificial Sequence
  ENSG00000214456_25 (sequence is synthesized)
gtatatgtgtatatatacatgtatatatgtatatgtgtgtatatgtgtatatatgtatatgtatgtgtgtatacatatgtattgctagtaagggcagttaactccctcaacaccctctgt

SEQ ID NO: 759030 - DNA, 120 bp, Artificial Sequence
  ENSG00000214456_26 (sequence is synthesized)
cctccagtgggggcaggccagattagaggcgggagggagggagggatggtgacaaccaggcttttagttaactcaagaaaaaacagccaggttaaaataactgcaacgtgtgtgtgtgtg

SEQ ID NO: 759031 - DNA, 120 bp, Artificial Sequence
  ENSG00000214456_27 (sequence is synthesized)
ttatcacccattttataggggaaactgaggcacggagccaggtagaagtccagggatctttgagtcccagccccagggaactagggtggcagaaatggagctggagtcccacggtgcctg

SEQ ID NO: 759032 - DNA, 120 bp, Artificial Sequence
  ENSG00000214456_28 (sequence is synthesized)
ggacaccctctgtgtacagagctctggacatgcattgtctgagctccacagaatgccccattatgcagatgaagaaactgaggccccaagaggtttgagagttgctcaagtcacagagcc

SEQ ID NO: 759033 - DNA, 69 bp, Artificial Sequence
  ENSG00000214456_29 (sequence is synthesized)
gctactcgggagcctgaggcaggagaaccgcttgaaccctgaaacaagaacgagactccatctcaaaaa

SEQ ID NO: 759034 - DNA, 78 bp, Artificial Sequence
  ENSG00000214456_30 (sequence is synthesized)
agtatgcagacctttttcaaccaaatgcagataaaaaaaatatagtatttggccaggtgcagtggctcatgcctataa

SEQ ID NO: 759035 - DNA, 120 bp, Artificial Sequence
  ENSG00000214456_31 (sequence is synthesized)
gcagtggctcatgcctataatcccagcatattaggagactgaagcgggaggatcgcttgagccaggagttcaagaccagcatgggcaacacagcaagacccaatctctataaaataaaat

SEQ ID NO: 759036 - DNA, 120 bp, Artificial Sequence
  ENSG00000214456_32 (sequence is synthesized)
ataaaataaaataaaattagctgggcacagtggtgtgcacctgtaatcccaggtacttggaaactgaggttggaggattgcttgaggctaggaggcttaggctgcagtgagccgtgcttg

SEQ ID NO: 759037 - DNA, 120 bp, Artificial Sequence
  ENSG00000214456_33 (sequence is synthesized)
cagtgagccgtgcttgaatcactgccctctagcctggccaacagagcaagaccttgtctctattgaaaacaaaaaaattgtgaccaggtgcaatggctcaggcctgtaatcctagcactt

SEQ ID NO: 759038 - DNA, 85 bp, Artificial Sequence
  ENSG00000214456_34 (sequence is synthesized)
gggtggatcacctgaggtcgggagttcgacaccagcctggtcaacatagtgaaaccctgtttctactaaaaataaaaataaaaac

SEQ ID NO: 759039 - DNA, 120 bp, Artificial Sequence
  ENSG00000214491_0 (sequence is synthesized)
atgagtggacaagtgggtgacctgagcccatcgcaggagaagtcgctggcccagttccgggagaacatccaagatgtgctatctgcgctgcccaatcctgatgactacttcctcctgcgc

SEQ ID NO: 759040 - DNA, 120 bp, Artificial Sequence
  ENSG00000214491_1 (sequence is synthesized)
tggctccaagctcggagctttgacctgcagaaatcagaggacatgctgaggaagcatatggagttccggaagcaacaagacctggccaacatccttgcctggcagcccccagaggtggtc

SEQ ID NO: 759041 - DNA, 120 bp, Artificial Sequence
  ENSG00000214491_2 (sequence is synthesized)
aggctgtacaacgctaacggcatatgcggccacgacggtgagggcagccctgtctggtaccacattgtgggaagcctggaccccaaaggcctcttgctctcagcctccaaacaggagttg

SEQ ID NO: 759042 - DNA, 120 bp, Artificial Sequence
  ENSG00000214491_3 (sequence is synthesized)
ctcagggacagcttccggagctgcgagctgctcctgcgggagtgtgagctgcagagtcagaagctggggaagagggtggagaaaatcatagctatttttggtctcgaagggctgggcctg

SEQ ID NO: 759043 - DNA, 120 bp, Artificial Sequence
  ENSG00000214491_4 (sequence is synthesized)
agggatctgtggaagccaggaatagagcttctccaggagtttttctcagcacttgaagcaaattaccctgagatcttgaagagtttaattgttgtgagagcccccaagctattcgccgta

SEQ ID NO: 759044 - DNA, 120 bp, Artificial Sequence
  ENSG00000214491_5 (sequence is synthesized)
gccttcaacctggtcaagtcttacatgagtgaagagacacgcaggaaggtggtgattctcggagacaactggaagcaggagctgacaaaattcatcagccccgaccagctgcccgtggag

SEQ ID NO: 759045 - DNA, 120 bp, Artificial Sequence
  ENSG00000214491_6 (sequence is synthesized)
tttggggggaccatgactgaccccgatggcaaccccaagtgcctgaccaagatcaactacgggggtgaggtgcccaagagctactacctgtgcaagcaggtgaggctgcagtatgagcac

SEQ ID NO: 759046 - DNA, 120 bp, Artificial Sequence
  ENSG00000214491_7 (sequence is synthesized)
acgaggtccgtgggccgcggctcctccctgcaggtggagaacgagatcctgttcccgggctgtgtgctcaggtggcagtttgcttcagatggtggggacattggctttggggttttcctg

SEQ ID NO: 759047 - DNA, 120 bp, Artificial Sequence
  ENSG00000214491_8 (sequence is synthesized)
aagaccaagatgggggagcggcagagggctagggagatgacagaggtgctgcccagccagcgctacaatgcccacatggtgcctgaagatgggattctcacctgcctccaggccggcagc

SEQ ID NO: 759048 - DNA, 120 bp, Artificial Sequence
  ENSG00000214491_9 (sequence is synthesized)
tatgtcctgaggttttacaacacctacagcctggttcattctaaacgcatcagctacaccgtggaggtactgctcccagaccaaaccttcatggagaagatggagaaattctaggtgaac

SEQ ID NO: 759049 - DNA, 120 bp, Artificial Sequence
  ENSG00000214491_10 (sequence is synthesized)
ctcatggtccccacaccctcctctttgatctctgaatccacaatgagttcacagccttccctggccagaccctgttcaacctctcaggaacagggattctacaacagcaggtcacagcct

SEQ ID NO: 759050 - DNA, 120 bp, Artificial Sequence
  ENSG00000214491_11 (sequence is synthesized)
atgcatcacagctggcccactcctcaggaacggctgggacagtgtcctagtggtggcccgatggtcacagcaaagcaacacagacactccatccccactatgacctgctgtgacctcaag

SEQ ID NO: 759051 - DNA, 120 bp, Artificial Sequence
  ENSG00000214491_12 (sequence is synthesized)
tgacctgctgtgacctcaagctcagcaaaaaccccaggcttttttctatcaaccaataccaagaaataagttactcttctaaaatatagtattaggccaggcatggtggctcatacctgt

SEQ ID NO: 759052 - DNA, 120 bp, Artificial Sequence
  ENSG00000214491_13 (sequence is synthesized)
tgaaatatagtatagctgacagatcaggaaataattaccattgaaaagatagtttattactcacagttcccaagaggaggggccgctgtgccatagggggaagaggaggggtccccaggg

SEQ ID NO: 759053 - DNA, 120 bp, Artificial Sequence
  ENSG00000214491_14 (sequence is synthesized)
aggcatcagggccgaacatgacgcacatgagacagaaaaactctggacaaagcaactttacttttatgatggtttctgcaggaaggaactggtgaggcagggtaagcaggcttgagattt

SEQ ID NO: 759054 - DNA, 120 bp, Artificial Sequence
  ENSG00000214491_15 (sequence is synthesized)
gctagtttgaataatttcagcaggctccgtggaataagggctgtcactagctgtctggtatcttgccctggggtgattacagcaggtggatagtggcctggagtgtgagaatctgataaa

SEQ ID NO: 759055 - DNA, 120 bp, Artificial Sequence
  ENSG00000214491_16 (sequence is synthesized)
ggaggtagttggaatatggtttatatcagttggtttgcattcgaaaagtgcatttgtgggcaagttgctgtatctctaggagaggcaggccctccaggattagcaaaacctcagatgtta

SEQ ID NO: 759056 - DNA, 120 bp, Artificial Sequence
  ENSG00000214491_17 (sequence is synthesized)
aagcatgcagaaaataaaagacatggttcaaatagttccctaacaagcagttgtgcaatgctgctctgaatggaaatccaacctcacagtttcccatctagaaagaattttaaactctct

SEQ ID NO: 759057 - DNA, 120 bp, Artificial Sequence
  ENSG00000214491_18 (sequence is synthesized)
attctgtcttccacatacacgttccctcccactgttatagcatctgagaatctgcttgagctctggatcttcatccaatctcctgattaagatttcaaactggccaggtgcagtggctca

SEQ ID NO: 759058 - DNA, 64 bp, Artificial Sequence
  ENSG00000214491_19 (sequence is synthesized)
attggaaacatacacaaattagttgggtgtggtggcggcgagtgcctgcagtcccagctacttg

SEQ ID NO: 759059 - DNA, 74 bp, Artificial Sequence
  ENSG00000214491_20 (sequence is synthesized)
tggcgaaaccccgtctctacgaaacatacacaaattagttgggtgtggtggcggcggtggaacccaggaggcgg

SEQ ID NO: 759060 - DNA, 120 bp, Artificial Sequence
  ENSG00000214491_21 (sequence is synthesized)
caagaccctgtcttaaaaaaaaaaaattcagactgagcctcacagtgggacactaggtcggtgtcagcccacagtcctactagagtgctgtcctgcgatcaggcctctttgggtctggct

SEQ ID NO: 759061 - DNA, 120 bp, Artificial Sequence
  ENSG00000214491_22 (sequence is synthesized)
ttgggtctggctatgctgtcagctgagattctgcccaggatcctgtcactcacatgttgtcccagcttgttctcaatgtggcagccccaaatgacagccaaagttcttccctaattgcct

SEQ ID NO: 759062 - DNA, 120 bp, Artificial Sequence
  ENSG00000214491_23 (sequence is synthesized)
actttacaggaatcctgtccaaaaatggaaacacgggcattcagcagcccttgctctccctcagcccctcccctgacagccactgatctgttcttcatccctacacttttgattttttcc

SEQ ID NO: 759063 - DNA, 120 bp, Artificial Sequence
  ENSG00000214491_24 (sequence is synthesized)
agagtgtcatataaatggaatcgtgcaatatttagccttttgattctggctttctttagtcagcataatgcctctgagattcattcactttgttgcatgtgttaatatttagttgctttt

SEQ ID NO: 759064 - DNA, 120 bp, Artificial Sequence
  ENSG00000214491_25 (sequence is synthesized)
cgttgctgagtaatataccactgtatggatggaccacactgtgtttatcccttcccctgttaaaggctggttgagtcgcttccagtttgggggcgattatgaataaagctgttgtaagca

SEQ ID NO: 759065 - DNA, 120 bp, Artificial Sequence
  ENSG00000214510_0 (sequence is synthesized)
agttgtgacagactcctggaacagcagctcttctcaaggctagttgtgacatccaaagtgacaagagcaggcccatattcagccacctcatccaggccttatcaaagaagagtcttatat

SEQ ID NO: 759066 - DNA, 120 bp, Artificial Sequence
  ENSG00000214510_1 (sequence is synthesized)
gagatcaaatggctgcctttccccacaagattatatttttcctggtatgctctactttgacacatgtggctttctcaggaattttcaataaacgtgacttcactaggtggcctaagcccc

SEQ ID NO: 759067 - DNA, 120 bp, Artificial Sequence
  ENSG00000214510_2 (sequence is synthesized)
ctggaccctgattacaatgcagactgccccaatgtgacagcacctgtttgtgcctcaaatggccacactttccagaatgagtgtttcttttgtgttgaacagagggaatttcattatcgt

SEQ ID NO: 759068 - DNA, 120 bp, Artificial Sequence
  ENSG00000214510_3 (sequence is synthesized)
ataaaatttgaaaaatatggaaaatgtgattaatgggtaccagagtaactacacttgcttattctttttctacttaattcagaatagtatttcttttagagtgtgagaatgtaaattaaa

SEQ ID NO: 759069 - DNA, 120 bp, Artificial Sequence
  ENSG00000214510_4 (sequence is synthesized)
taacatccctatgctgtacttaaatgtcgaacaaaatgagagacaaaaatgaaggaatcaaactgacaagaaccaaatatcacatttgttacaaataaacaacaaaagagctgatattca

SEQ ID NO: 759070 - DNA, 120 bp, Artificial Sequence
  ENSG00000214510_5 (sequence is synthesized)
acaaaagagtgctaactactctaggagagattaaagcctgtgaaatagaacttttccagataatggcgagtttttaggcttgctcatgctgaagcttaatataagctaataagtagagaa

SEQ ID NO: 759071 - DNA, 120 bp, Artificial Sequence
  ENSG00000214510_6 (sequence is synthesized)
attaggaggcttggatattgcaaactttattggttggggtgttacccaggctaatagaaaaaaaattatatcctagaaagacagaacaggtgcgacttctgagaagaaaggttagagaag

SEQ ID NO: 759072 - DNA, 120 bp, Artificial Sequence
  ENSG00000214510_7 (sequence is synthesized)
actagaaaggctgggaccaccttgaatttggcacacacacacacacacccacacgcacacacaaaatcaccaaatgatctggaatgtgctatgcgatgagtcagcctccactgctgtacg

SEQ ID NO: 759073 - DNA, 120 bp, Artificial Sequence
  ENSG00000214510_8 (sequence is synthesized)
tggctttctcaggtggaacaatataatcacaaggattcttatcagagggaggcaggagggcccaagtcagagaagatgtgacaatggaagcagaagttagaatggtgcagtaaaagggcc

SEQ ID NO: 759074 - DNA, 120 bp, Artificial Sequence
  ENSG00000214511_0 (sequence is synthesized)
gatgggagaggaaaaacaaattatttttaatgattcacggcaaccacatttatatcctattgttactagagaaaaaaatgtcttcagataaccagtggtcagcagatgaggatgaaggcc

SEQ ID NO: 759075 - DNA, 120 bp, Artificial Sequence
  ENSG00000214511_1 (sequence is synthesized)
ctaatcaggaaatctagagactccccctttgtccctataggtatagcaggctttgtgactgtggtgtcctgtggtctttacaagctaaagtacagaagagatcagaaaatgtcaattcat

SEQ ID NO: 759076 - DNA, 120 bp, Artificial Sequence
  ENSG00000214511_2 (sequence is synthesized)
cttattcacatgagagttgctgcccaaggatttgttgttggagctgtgactctaggtgttctctattctatgtataaggattacattagaccacgattcttcagtgagtccaaaaaatga

SEQ ID NO: 759077 - DNA, 120 bp, Artificial Sequence
  ENSG00000214513_0 (sequence is synthesized)
cccagacaaccggtcttgctcgctgccttttgcagaatcttctcacttctcccgagctcccttccttgcgtccgtccgggcaacggccgcgtcatgcctagccccaggccgcgaggcagc

SEQ ID NO: 759078 - DNA, 120 bp, Artificial Sequence
  ENSG00000214513_1 (sequence is synthesized)
ccgccacccgctccctcgggctctcgggtccgacctccgcgctctggccgctctccggcgcccaggtcccctactggcccgaacacgccccgcgctcccggacgcttcgagtcccctttc

SEQ ID NO: 759079 - DNA, 120 bp, Artificial Sequence
  ENSG00000214513_2 (sequence is synthesized)
tttctcggtcgaggccatcctggcgaggcccgacccctgcgcgccggcggcctcccagccgtcgggctccgcctgcgtccacccggccttctggaccgctgcttccctgtgcgccaccgg

SEQ ID NO: 759080 - DNA, 120 bp, Artificial Sequence
  ENSG00000214513_3 (sequence is synthesized)
ctgccctgggcttgcccgacatcgtggctgcccgcctacctgagcgtaggtttttaccctgtgccagggccgcgcgtggctcccgtctgcggcctgctgggcttcggcgtcacagggttg

SEQ ID NO: 759081 - DNA, 120 bp, Artificial Sequence
  ENSG00000214513_4 (sequence is synthesized)
gagctggctcactgctcaggactctgggccttcccagactgggccccaacggaggacctacaggacactgagagacagcaaaagagagtccgaactatgtttaacttggagcagctggaa

SEQ ID NO: 759082 - DNA, 120 bp, Artificial Sequence
  ENSG00000214513_5 (sequence is synthesized)
gagttggagaaagtgtttgcaaaacagcacaatctggtggggaagaagagagcccagctggcagctcggctcaaacttacagagaaccaggtgagagtctggttccagaaccgcagggtc

SEQ ID NO: 759083 - DNA, 120 bp, Artificial Sequence
  ENSG00000214513_6 (sequence is synthesized)
aagtatcagaagcagcaaaagctgagggcagcagttacatctgccgaggctgcctccctggatgagccttccagcagctccatcgccagtatccagagtgatgatgccgagtcaggagtg

SEQ ID NO: 759084 - DNA, 120 bp, Artificial Sequence
  ENSG00000214513_7 (sequence is synthesized)
gacggctgaagactgggacagaggccctagccaggctgcctggactagttcctcctgggggtacccactggagctccctgcctcacacctcaacgaaaagcctcctcaaccagaagaatc

SEQ ID NO: 759085 - DNA, 120 bp, Artificial Sequence
  ENSG00000214513_8 (sequence is synthesized)
tgagctgtcaagcagggacccccttttctatactgattcctggaaactggaataatgtaatgattggaggcacagactctggccttcagctatgtccttggccaacctatggaacttccg

SEQ ID NO: 759086 - DNA, 120 bp, Artificial Sequence
  ENSG00000214513_9 (sequence is synthesized)
agccttttttctttatctgtataatgggtgcattcataacttagatcacccaggggtgagaagatgtctgtaaagcaataatgtgccatgcacagtgcaaagtgtgtggttactgttaag

SEQ ID NO: 759087 - DNA, 120 bp, Artificial Sequence
  ENSG00000214513_10 (sequence is synthesized)
gaaaaaaaaaagtttttttcttctgctgtcaccccacaacaatcaacacagaacacttctgtgaccaaacgtataggggtgtaccccacattccaacctccagttcagcaaattctgaca

SEQ ID NO: 759088 - DNA, 120 bp, Artificial Sequence
  ENSG00000214513_11 (sequence is synthesized)
tgatctacctgcaggtagtgtctgaccccacagattcagggctcattccacatggcagcccctcctttcttttttttttgagacagactgcagtggcgcgatcttggctcaccgccacct

SEQ ID NO: 759089 - DNA, 75 bp, Artificial Sequence
  ENSG00000214513_12 (sequence is synthesized)
ccggcccaaccctgccctttttgttttttatggagtcttaaggtctaccagtcatcagtcaactcattagcatat

SEQ ID NO: 759090 - DNA, 120 bp, Artificial Sequence
  ENSG00000214513_13 (sequence is synthesized)
tcttaaggtctaccagtcatcagtcaactcattagcatatgaaaagacatcacttcagagattctagggattttaggagttctatgccaggaaatcgagatgaagaccaaatatatattt

SEQ ID NO: 759091 - DNA, 120 bp, Artificial Sequence
  ENSG00000214513_14 (sequence is synthesized)
cataatatcacagctcccctcacctgggggagtaatacctgtaccagcaattaatattttcctggcctggctgtggagaaggaacctctttgaataagcatctgggcatagaagactctt

SEQ ID NO: 759092 - DNA, 120 bp, Artificial Sequence
  ENSG00000214513_15 (sequence is synthesized)
caccatcagaaggagttgagagcaaagaagagaaggtagactgtttagcccacttcacaaagtttcccaacgttttcttgttttgtctgaactgttaccattctcagaagaagctcaggc

SEQ ID NO: 759093 - DNA, 120 bp, Artificial Sequence
  ENSG00000214513_16 (sequence is synthesized)
gagtgcagtggtgcaatcatagctcacggcagcctcaacctcctgggctctagtgatcctcccaccttagcctcctaagcagctgggactacaggcgcgtgacaccacgcctggctaatt

SEQ ID NO: 759094 - DNA, 120 bp, Artificial Sequence
  ENSG00000214513_17 (sequence is synthesized)
agctgggactacaggcgcgtgacaccacgcctggctaatttttaacattttttgtagagacaacgtccacttgttgcccaggctggtcttgaattccaggcttcaagtggttctcctgcc

SEQ ID NO: 759095 - DNA, 120 bp, Artificial Sequence
  ENSG00000214513_18 (sequence is synthesized)
ttggcctcccaaagccccatctttttatagaataatttgtgtatgccaaggctggcattttgtcataaactctgctgtgttttcacaggacagttataatttccccctttcatgactctg

SEQ ID NO: 759096 - DNA, 120 bp, Artificial Sequence
  ENSG00000214517_0 (sequence is synthesized)
gctacgggtagctgggtgctgtccaaaggcgacagggcgtcgttaggggagcgagtcgtgaccggttgggccacactcaacgtgggacgaagcttcgcctactgtttgactacgtgcgtg

SEQ ID NO: 759097 - DNA, 120 bp, Artificial Sequence
  ENSG00000214517_1 (sequence is synthesized)
cagcctcccctcgatgtcggccctcgaaaagagcatgcacctcggccgccttccctctcgcccacctctacccggcagcgggggcagtcagagcggagccaagatgcgaatgggccctgg

SEQ ID NO: 759098 - DNA, 120 bp, Artificial Sequence
  ENSG00000214517_2 (sequence is synthesized)
aagaaagcgggacttttcccctgttccttggagtcagtattttgagtccatggaagatgtagaagtagagaatgaaactggcaaggatacttttcgagtctacaagagtggttcagaggg

SEQ ID NO: 759099 - DNA, 120 bp, Artificial Sequence
  ENSG00000214517_3 (sequence is synthesized)
tccagtcctgctccttctgcatggaggaggtcattctgccctttcttgggctgtgttcacggcagcgattattagtagagttcagtgtaggattgtagctttggatctgcgaagtcatgg

SEQ ID NO: 759100 - DNA, 120 bp, Artificial Sequence
  ENSG00000214517_4 (sequence is synthesized)
tgaaacaaaggtcaagaatcctgaagatctgtctgcagaaacaatggcaaaagacgttggcaatgtggttgaagccatgtatggggaccttcctcctccaattatgctgattggacatag

SEQ ID NO: 759101 - DNA, 120 bp, Artificial Sequence
  ENSG00000214517_5 (sequence is synthesized)
catgggtggtgctattgcagtccacacagcatcatccaacctggtaccaagcctcttgggtctgtgcatgattgatgttgtagaaggtacagctatggatgcacttaatagcatgcagaa

SEQ ID NO: 759102 - DNA, 120 bp, Artificial Sequence
  ENSG00000214517_6 (sequence is synthesized)
tttcttacggggtcgtcctaaaaccttcaagtctctggagaatgctattgaatggagtgtgaagagtggccagattcgaaatctggagtctgcccgtgtctcaatggttggccaagtcaa

SEQ ID NO: 759103 - DNA, 120 bp, Artificial Sequence
  ENSG00000214517_7 (sequence is synthesized)
acagtgtgaaggaattacaagtccagaaggctcaaaatctatagtggaaggaatcatagaggaagaagaagaagatgaggaaggaagtgagtctataagcaagaggaaaaaggaagatga

SEQ ID NO: 759104 - DNA, 120 bp, Artificial Sequence
  ENSG00000214517_8 (sequence is synthesized)
catggagaccaagaaagaccatccatacacctggagaattgaactggcaaaaacagaaaaatactgggacggctggttccgaggcttatccaatctctttcttagttgtcccattcctaa

SEQ ID NO: 759105 - DNA, 120 bp, Artificial Sequence
  ENSG00000214517_9 (sequence is synthesized)
attgctgctcttggctggtgttgatagattggataaagatctgaccattggccagatgcaagggaagttccagatgcaggtcctaccccagtgtggccatgcagtccatgaggatgcccc

SEQ ID NO: 759106 - DNA, 120 bp, Artificial Sequence
  ENSG00000214517_10 (sequence is synthesized)
ctgttagtgacctgctgtccacccctcctcaacatcgagctctgttgtaaatacgtcgcaccagaggccactgtgatgccactgtctcctctccatcccgcccagccatgtgacactggc

SEQ ID NO: 759107 - DNA, 120 bp, Artificial Sequence
  ENSG00000214517_11 (sequence is synthesized)
tcccggtagacgggcaccccgagatgtaccaaccttttcatgtattctgccaaaagcattgttttccagggcccttgaccaacatcggcttccccagtccagggctcccctgctcctttc

SEQ ID NO: 759108 - DNA, 120 bp, Artificial Sequence
  ENSG00000214517_12 (sequence is synthesized)
ccttccctgtactggggtagctcctgcctgctctccctgcgttgcctagggtaaagcctccagatttgccatactgagcccctcttcctagcatcaggcgatacatctgagttcaaatgt

SEQ ID NO: 759109 - DNA, 120 bp, Artificial Sequence
  ENSG00000214517_13 (sequence is synthesized)
cttcccaggctcagggacctccattccttgagattgtcttggcatggcccagccctgcctcatgggatggacaatgcatggggtggtctttatttttccctttcaaataaaacactagtc

SEQ ID NO: 759110 - DNA, 120 bp, Artificial Sequence
  ENSG00000214517_14 (sequence is synthesized)
aggtaccgttttatcccagtcgtactcttccaggtttggaagacccagagaggccaagatcccatccttagccatagcgagcggtggtggtggatagcatcacaagaaacgagcctgaaa

SEQ ID NO: 759111 - DNA, 120 bp, Artificial Sequence
  ENSG00000214517_15 (sequence is synthesized)
atcaggtccagccggtccaagcacatggcctcccatctgggagagcccactgtcccactcccacatgtctgggcacctgccctgggctgaggccaggctgctccaggggcctcctgcgcc

SEQ ID NO: 759112 - DNA, 120 bp, Artificial Sequence
  ENSG00000214517_16 (sequence is synthesized)
ctcacctgccacagagcaacccaggttaaatacagcccatgcacaaagccacaggccaaagcctatggaattgtttttaatcatcaaatttaaccattttcataactggttcctggaggt

SEQ ID NO: 759113 - DNA, 120 bp, Artificial Sequence
  ENSG00000214517_17 (sequence is synthesized)
gtgcagtgcccccttgcctcttcaaacctacagcttctctttgccatttgtggatttcacatcactccacacagaaacattacagcctggcatccccagtctttgccttcttccagctgc

SEQ ID NO: 759114 - DNA, 120 bp, Artificial Sequence
  ENSG00000214517_18 (sequence is synthesized)
ctcgacacagcactgtggcctgtccctattgcccaggcacgccatttccaagggcaggaaggggcagtgtcctgaagcccatcttttctgtgactgtcttaggtgatgtgtagccccctc

SEQ ID NO: 759115 - DNA, 120 bp, Artificial Sequence
  ENSG00000214517_19 (sequence is synthesized)
cacctttccactcaacaacctcccacccctgtcctgctgcatggtccggagtctgggacctactttgttttttgttatttatgaccttgtttaaagaaaataaatatctcccaaccttta

SEQ ID NO: 759116 - DNA, 120 bp, Artificial Sequence
  ENSG00000214517_20 (sequence is synthesized)
tttcaggctcaggcagaatctgttctagacctttcttccctacttactctccctggacaatttcatggcttccatttatatattgatgactcccaaagctaaacatccacctcacccctc

SEQ ID NO: 759117 - DNA, 120 bp, Artificial Sequence
  ENSG00000214517_21 (sequence is synthesized)
tctcctgagatccagtcctagcctatgtagcaaacctgctggatatctcatgggcctctcaaactgttcttttagctatcctcaagctttccacagcaaaaggagctatattctctcata

SEQ ID NO: 759118 - DNA, 120 bp, Artificial Sequence
  ENSG00000214517_22 (sequence is synthesized)
atagttgttcaaaggctctcacatataaaactctggtcccagaccttcatggctttgccttcctttaactacattgtatcctgaggcctagaataggactatgagctgggactgtgtgat

SEQ ID NO: 759119 - DNA, 120 bp, Artificial Sequence
  ENSG00000214517_23 (sequence is synthesized)
tttttttccatggcactgatgttggtaattatgggcttagacacttatttaagtagatgcttataaatgtctaagcccgtaattaccaacatgagtgccatgaaattgaatctaagacac

SEQ ID NO: 759120 - DNA, 120 bp, Artificial Sequence
  ENSG00000214517_24 (sequence is synthesized)
ttaagttcaattcaagaaacctttcctaggcaccctttctgtgcaagacctatgcatgatgctgggcagacagaagaatcagatatggcccctgagactgcctgaaggcagttgacatgg

SEQ ID NO: 759121 - DNA, 120 bp, Artificial Sequence
  ENSG00000214517_25 (sequence is synthesized)
actgggatagcatttgaaatcattgttgatcaccagccttggaatcagacaatcctgggtttgaatcactgttaatagttttgcggtatgagtgaattcctaacttatttaattttgagt

SEQ ID NO: 759122 - DNA, 120 bp, Artificial Sequence
  ENSG00000214517_26 (sequence is synthesized)
ttcttcatctgtgaaatggagataatgatatatctcagtacagttacatgaagtttaaatgaaaaaaatgcgggtagtctaacaaatgatgcctttcattatattcaggaagtaatcacg

SEQ ID NO: 759123 - DNA, 120 bp, Artificial Sequence
  ENSG00000214517_27 (sequence is synthesized)
attccttatgagatgtcctcctgtttcctcaatatggattatatcaagaccaccttctggtttaaagaaagcctcctatgagtatagagagtaaatggcgaggataaggaacattccaca

SEQ ID NO: 759124 - DNA, 120 bp, Artificial Sequence
  ENSG00000214517_28 (sequence is synthesized)
gaacaaagggaaatggctaaggctgcatagattccaaaccacagctttgccagcactgtgttcaaaccaactgacttagttatgaaatcctggaaaactaccacctattcatagtacccc

SEQ ID NO: 759125 - DNA, 120 bp, Artificial Sequence
  ENSG00000214517_29 (sequence is synthesized)
ttgggtaaataatttaggctctctgaacctaaggctcctaatctgtgcaatgggagagaagagtttggaaatattcccacctcatagaataatcatgaggattacccatgaacatgttat

SEQ ID NO: 759126 - DNA, 120 bp, Artificial Sequence
  ENSG00000214517_30 (sequence is synthesized)
tttatgtgtacctggcacagtgttgttggtgtatgtgagttctctctgattatacctactcttccaaagaggaaggacaaatgcgtccctagtcatcagagctgatctaacagaaagaac

SEQ ID NO: 759127 - DNA, 120 bp, Artificial Sequence
  ENSG00000214517_31 (sequence is synthesized)
agggagattggagttgtaagttttggatctagtcatttgttcatcattcattcgctaaagacttaagcatctactcagtgccctaccctgtgttaggtcttattagggatatagagcaag

SEQ ID NO: 759128 - DNA, 120 bp, Artificial Sequence
  ENSG00000214517_32 (sequence is synthesized)
taataacaccattgtcccctgttcttatggaaatgacacactcctggggaggcaagcaccagtggcatgtaaaatgtaaacttacttgaaacttacaagagggccatgtgctgctctgtg

SEQ ID NO: 759129 - DNA, 120 bp, Artificial Sequence
  ENSG00000214517_33 (sequence is synthesized)
tttggatccaagtgcattaacaactttaggagctagaagggagaggtgactaggcttgagcacccagagagaggcagcttactgcaggaggaggggcacaggatggactttactaaatgg

SEQ ID NO: 759130 - DNA, 120 bp, Artificial Sequence
  ENSG00000214517_34 (sequence is synthesized)
gatcatcttattcctccactaattaatgaagtggccttgggcaggttacttcactaatcatggcctcagtttcatcatctcagaaaagaatttcagtatttttgtgcttaattgtatagg

SEQ ID NO: 759131 - DNA, 120 bp, Artificial Sequence
  ENSG00000214517_35 (sequence is synthesized)
gtagattttgagaatcaactttaaaaatggatagaagaatacactgaaaacttttgaatcctgcgtaactggggtaagaaccacaggatgtaatgaccagaagaactttcaagcccattc

SEQ ID NO: 759132 - DNA, 120 bp, Artificial Sequence
  ENSG00000214517_36 (sequence is synthesized)
cttctttatcagtcatcgctgttcattctcaatcattgtcgcattagttacgagcttacagtgttctgtaagacagtatgagaaagtgcttagtacaatgcctggcacatgcttaagtgc

SEQ ID NO: 759133 - DNA, 120 bp, Artificial Sequence
  ENSG00000214517_37 (sequence is synthesized)
tcagatggtaacttattattgtaataatacattttgaatccttaacatagcttacaaaatccttaatggtttggcccctgcttacctctccagccttattgttaaccactctcataagca

SEQ ID NO: 759134 - DNA, 120 bp, Artificial Sequence
  ENSG00000214517_38 (sequence is synthesized)
ccatgccaagcttcttgtattccaagccatttcaagccttccttccttcctggttccctcttggattgtgaagttccctttcttatgctcttacagccccatgtagccagttttatcata

SEQ ID NO: 759135 - DNA, 120 bp, Artificial Sequence
  ENSG00000214517_39 (sequence is synthesized)
ggaatgacatgctgcattaaaatgttggtttttgtgttttactcccctactggactgtaaatcccctgaggacaagaactgtttcttctatgtgtctctggcccacagtaaatgtacact

SEQ ID NO: 759136 - DNA, 120 bp, Artificial Sequence
  ENSG00000214517_40 (sequence is synthesized)
aaataggacagaaggaaaaagtgaagggaaatgattggcgcaaggttacaattacttgtattaccatcctcagcaagacttgataattgggtccagagtattgaggtgaggttggaaatg

SEQ ID NO: 759137 - DNA, 120 bp, Artificial Sequence
  ENSG00000214517_41 (sequence is synthesized)
gggaggtaggtcctgggctcctggaatgacctatgaggctgcataagagagggctcttttagtcgctgaagttgccttgctttgattcctctccagggaagttccagatgcaggtcctac

SEQ ID NO: 759138 - DNA, 120 bp, Artificial Sequence
  ENSG00000214517_42 (sequence is synthesized)
accaggctctgtcatgtctctggaccagtactgtccaatagaaatagagtgcaaaccacgtatgtcattttaaatttcttagtagacactttaaatagataaaaagaaacaataaattaa

SEQ ID NO: 759139 - DNA, 120 bp, Artificial Sequence
  ENSG00000214517_43 (sequence is synthesized)
acttataaaaccatgtagccaggtgagtaatagtggcaatctctatagtaagaaacactggtgatcactactttttattaggtctcacataatctgtagaattatttatttgattccaat

SEQ ID NO: 759140 - DNA, 120 bp, Artificial Sequence
  ENSG00000214517_44 (sequence is synthesized)
caaggcctatcttatggttttatgcctaaaagggcaatttcagtagaaatatcaggcagtcaaaatgcaagactttgaataacctgtgagactgcccacttttcaattcctaaatatttt

SEQ ID NO: 759141 - DNA, 120 bp, Artificial Sequence
  ENSG00000214517_45 (sequence is synthesized)
gagacctcaaatttgtctaatcagtagtaaagcattttacatggcatatatgcagatagttgagtgattttaaaattttatttccagtgatgttttctcttaataagtaaacctatgtgt

SEQ ID NO: 759142 - DNA, 120 bp, Artificial Sequence
  ENSG00000214517_46 (sequence is synthesized)
aggagagtgtgtatgtgcatgtgtattaactgtcacatagatagctggaactttcctgccccttataatccaggtgaaattgccttgaacctcctaatccacaggctatagaaattcaaa

SEQ ID NO: 759143 - DNA, 120 bp, Artificial Sequence
  ENSG00000214517_47 (sequence is synthesized)
gcatatgtttctttgttacactgttttttttttttttatcacatctatactgtatactacatgtgaaacttggcacaagtttcatataaaacacctacttaacaaaacatttgtgaactt

SEQ ID NO: 759144 - DNA, 120 bp, Artificial Sequence
  ENSG00000214517_48 (sequence is synthesized)
acacttcactgaaggtttggcagagaagacagaaagggagaagttatcattcttaaaaatctaccgctgacttttgaatttatcccagtctctttttatcttgcttgttctctctccttt

SEQ ID NO: 759145 - DNA, 120 bp, Artificial Sequence
  ENSG00000214517_49 (sequence is synthesized)
tccttctctgtctttgtcaagggcaaaataacagattgttctctatcatacagagcaaaccttggcactagctgttgcccaggcccttgggatttttttaccttcagagcttgtcaatgt

SEQ ID NO: 759146 - DNA, 120 bp, Artificial Sequence
  ENSG00000214517_50 (sequence is synthesized)
gttttttccatcaagttctctctaaaggaagtatggtaccagctgttgatataataataatttttctaccaaagaatataataaaaagagatgcaatttttaagagaaaaacaacaatga

SEQ ID NO: 759147 - DNA, 120 bp, Artificial Sequence
  ENSG00000214517_51 (sequence is synthesized)
taattggttggttcagatggtttctgtcagctaattaaaaagtgaggccttttatcattctgtttgagccttgttctactataagcagggttcagcagaaaagcaccatgttttggagtt

SEQ ID NO: 759148 - DNA, 120 bp, Artificial Sequence
  ENSG00000214517_52 (sequence is synthesized)
agttgagcctggatttgcatcccagccttaaccacttatgagttaggtgatgctggacaattttcttaactcttcagggctacttcataggattgttatgaagattatataagattatgc

SEQ ID NO: 759149 - DNA, 120 bp, Artificial Sequence
  ENSG00000214517_53 (sequence is synthesized)
caataaaactcatgcctgaggaagtggttgctccctttctatgggtcagtattggtgcaagaactggaaaccagcccttggagaatagttatacattggccatgattttccacagccctg

SEQ ID NO: 759150 - DNA, 120 bp, Artificial Sequence
  ENSG00000214517_54 (sequence is synthesized)
gaaatgcacaattctatcctcctaccaggatgattgttaagttttagctaacatttgattataaaaggccgtaagtatgagtatctctgagataatttgtgtattggaaagaggtgtgta

SEQ ID NO: 759151 - DNA, 120 bp, Artificial Sequence
  ENSG00000214517_55 (sequence is synthesized)
ggagcctatgcagatgcagttccaccagctctccaacttctccctggcagctgcttatggtattggttttgtgtatatgtgctgaggagctactgacactctgctatttcatcccagggc

SEQ ID NO: 759152 - DNA, 120 bp, Artificial Sequence
  ENSG00000214517_56 (sequence is synthesized)
cctgtggttaagatcttaagctctacttctccaatacccccaaaagccagagatggaagagggatgattagggtagaaactgctccctaaaccacaggcacagttaggaattaatatggg

SEQ ID NO: 759153 - DNA, 120 bp, Artificial Sequence
  ENSG00000214517_57 (sequence is synthesized)
ctcctcctgtgagaaaacaccattctgtaactctgagggcacacataagcccttcacgtcattcctcttgagctctatggagctatccctggcaaggatagtggggaggagtcttctagc

SEQ ID NO: 759154 - DNA, 120 bp, Artificial Sequence
  ENSG00000214517_58 (sequence is synthesized)
tctgctagggagggcctaggtccttttaatttcaagccactcagacctgtgggtgggatgagggcaccgtagagcctaaccatctaacagtagctcacagcccaaggctaagccccatca

SEQ ID NO: 759155 - DNA, 120 bp, Artificial Sequence
  ENSG00000214517_59 (sequence is synthesized)
ctaacctttatatggcctggaatatctctcccatttccaggtagctgaagctgttgccactttcctgatccggcacaggtttgcagaacccatcggtggattccagtgtgtgtttcctgg

SEQ ID NO: 759156 - DNA, 120 bp, Artificial Sequence
  ENSG00000214517_60 (sequence is synthesized)
ctttatttctctgcgagcatcactaaattctgctgtcatcaagagcagatatatagtagttgactcagtaagtgtaaatgctcagaataagttaaatatgtggttacagtttttgtttaa

SEQ ID NO: 759157 - DNA, 120 bp, Artificial Sequence
  ENSG00000214518_0 (sequence is synthesized)
atgaccggctcctgctgcggctccaccttctcctccctgagctacgggggaggctgctgccagccctgctgctgccgcgacccctgctgctgccgccccgtgacctgccagaccaccgtg

SEQ ID NO: 759158 - DNA, 120 bp, Artificial Sequence
  ENSG00000214518_1 (sequence is synthesized)
acgcgccccatctgcgagccctgccgccgcccggtgtgctgcgacccctgctccctgcaggaaggctgctgccgccccatcacctgctgcccctcgtcgtgcacggctgtggtgtgcagg

SEQ ID NO: 759159 - DNA, 120 bp, Artificial Sequence
  ENSG00000214518_2 (sequence is synthesized)
ccctgctgctgggccaccacctgctgccagcctgtgtctgtgcagtccccctgcggccagccgtccccctgcggccagccgaccccttgcagcaccacctgcaggacctcctcctgctga

SEQ ID NO: 759160 - DNA, 120 bp, Artificial Sequence
  ENSG00000214518_3 (sequence is synthesized)
aggacctcctcctgctgagccaccacctgctgccagcctgtgtctgtgcagtccccctgcggccagccgaccccttgcagcaccacctgcaggacctcctcctgctgagcagcccgttat

SEQ ID NO: 759161 - DNA, 120 bp, Artificial Sequence
  ENSG00000214518_4 (sequence is synthesized)
cacgaagggcccctcagaagatggccaggtccatcccgctgcccctcagggcttcaccgcagagcaatacacgtttccttgagaagcccatttctcatctcttcatactagctcacacta

SEQ ID NO: 759162 - DNA, 120 bp, Artificial Sequence
  ENSG00000214518_5 (sequence is synthesized)
tgcattgaagacaccttttcagaccaaccacagatgagaaatacttttcctaggactccagtctaactcctatatcatgttgtctgctttctaataaactcaatactcctaccatagaaa

SEQ ID NO: 759163 - DNA, 120 bp, Artificial Sequence
  ENSG00000214530_0 (sequence is synthesized)
acgtgggggcgcctgagcgaagataaccgtaataaatagtaacctaacggtccagtcatcgttctgtggtcctttcttttatgattcacaaggaatgaccctcttcatcgcctctcctaa

SEQ ID NO: 759164 - DNA, 120 bp, Artificial Sequence
  ENSG00000214530_1 (sequence is synthesized)
ttcagtcctcacaacagtccttttacaaatgggacaacaggttagaggaagtcaggcagatttccagcatcatagagagtaaaggaccagggaaggatcaggattcaaggactgcaccca

SEQ ID NO: 759165 - DNA, 120 bp, Artificial Sequence
  ENSG00000214530_2 (sequence is synthesized)
ggctctgcttccagcttgctgtgtgactttgggtaattttgttcccttagggaactgagctttctcatttgtaaatgcaaacaggctgttgggaggatcaaatgagatccaggggtgaaa

SEQ ID NO: 759166 - DNA, 120 bp, Artificial Sequence
  ENSG00000214530_3 (sequence is synthesized)
acagcttagtttactttcaggaatttacccacgcggtatataaaggcaaaatattattatagtcaggtgattgtagattgaggaacccatttcctcattctgcaaattgcaaacctgagg

SEQ ID NO: 759167 - DNA, 120 bp, Artificial Sequence
  ENSG00000214530_4 (sequence is synthesized)
gcccaaagagggacaggggcttgccccaggtctcagcaggctgtgagcaagagctaaagcctaatcctcctgcctttgggcctggagcccttccttgtaccccaggggtcagtgtctttg

SEQ ID NO: 759168 - DNA, 120 bp, Artificial Sequence
  ENSG00000214530_5 (sequence is synthesized)
ttggatacaggcttagattgactgactgtaccctgagaacctaggggagtccctgttcccaattcttctcctacccccaccttggcctgatggaggaagaccctgctgtgttgagatgag

SEQ ID NO: 759169 - DNA, 120 bp, Artificial Sequence
  ENSG00000214530_6 (sequence is synthesized)
caccagagccaagaagctgaggaggatctggagaattctggaggaagaggagagtgttgctggagctgtacagaccctgcttctcaggtcccaggaaggtggcgtcagcatctgcagccg

SEQ ID NO: 759170 - DNA, 120 bp, Artificial Sequence
  ENSG00000214530_7 (sequence is synthesized)
cgtcgacgttgtcggagcctccgcggaggacccaggagagccggactaggaccagggccctgggcctccccacactccccatggagaagctggcggcctctacagagccccaagggcctc

SEQ ID NO: 759171 - DNA, 120 bp, Artificial Sequence
  ENSG00000214530_8 (sequence is synthesized)
agactttcgcagcttccggtcagagtgtgaggctgaggtgggctggaacctgacctatagcagggctggggtgtctgtctgggtgcaggctgtggagatggatcggacgctgcacaagat

SEQ ID NO: 759172 - DNA, 120 bp, Artificial Sequence
  ENSG00000214530_9 (sequence is synthesized)
caagtgccggatggagtgctgtgatgtgccagccgagacactctacgacgtcctacacgacattgagtaccgcaagaaatgggacagcaacgtcattgagacttttgacatcgcccgctt

SEQ ID NO: 759173 - DNA, 120 bp, Artificial Sequence
  ENSG00000214530_10 (sequence is synthesized)
gacagtcaacgctgacgtgggctattactcctggaggtgtcccaagcccctgaagaaccgtgatgtcatcaccctccgctcctggctccccatgggcgctgattacatcattatgaacta

SEQ ID NO: 759174 - DNA, 120 bp, Artificial Sequence
  ENSG00000214530_11 (sequence is synthesized)
ctcagtcaaacatcccaaatacccacctcggaaagacttggtccgagctgtgtccatccagacgggctacctcatccagagcacagggcccaagagctgcgtcatcacctacctggccca

SEQ ID NO: 759175 - DNA, 120 bp, Artificial Sequence
  ENSG00000214530_12 (sequence is synthesized)
ggtggaccccaaaggctccttacccaagtgggtggtgaataaatcttctcagttcctggctcccaaggccatgaagaagatgtacaaggcgtgcctcaagtaccccgagtggaaacagaa

SEQ ID NO: 759176 - DNA, 120 bp, Artificial Sequence
  ENSG00000214530_13 (sequence is synthesized)
gcacctgcctcacttcaagccgtggctgcacccggagcagagcccgttgccgagcctggcgctgtcggagctgtcggtgcagcatgcggactcactggagaacatcgacgagagcgcggt

SEQ ID NO: 759177 - DNA, 120 bp, Artificial Sequence
  ENSG00000214530_14 (sequence is synthesized)
ggccgagagcagagaggagcggatgggcggcgcgggcggcgagggcagcgacgacgacacctcgctcacctgagcgccgcaccgcttcagggacggagacaggaccgggcgagccctggg

SEQ ID NO: 759178 - DNA, 120 bp, Artificial Sequence
  ENSG00000214530_15 (sequence is synthesized)
gcggcggccgctcctgcactttctcccctcccccacccggcacctggtggcaccgggccaggcccaggcgggtgctgcagcctggctggacagagccccaataaacgatcccacagcctc

SEQ ID NO: 759179 - DNA, 120 bp, Artificial Sequence
  ENSG00000214530_16 (sequence is synthesized)
ggttgggtgtgtgtaggcttggtgtgcctctagcttggtgggggatgcaagctgtgggcatctctgagctgctgtggggctgtcatccctgcgagtcccaggaaggtggcgtcagcatct

SEQ ID NO: 759180 - DNA, 120 bp, Artificial Sequence
  ENSG00000214530_17 (sequence is synthesized)
ccttgttgccctgcacaacctgtgaatttgctccatcaaaactggcaggcagggttacccctgaggagggggtgggggagaaggggtaggggtgggaccctatcatctcccagaggggag

SEQ ID NO: 759181 - DNA, 120 bp, Artificial Sequence
  ENSG00000214530_18 (sequence is synthesized)
cacagagccaggctacagggcaggcttggggtttgggaccctgggaacgcatatcccccaggggaccagatggggcaggggctcgtgaagactctggtttaagggcctcaatagctgccc

SEQ ID NO: 759182 - DNA, 80 bp, Artificial Sequence
  ENSG00000214530_19 (sequence is synthesized)
cacctccgcagcctggaaaatcccgagccgcggccgccgagcccccgagcccccgagcccccagcctagccgggaggggc

SEQ ID NO: 759183 - DNA, 80 bp, Artificial Sequence
  ENSG00000214530_20 (sequence is synthesized)
cggcgctggcaccccggccccggcgggccccggcggagcggcgggcaaaggtcccaggaaggtggcgtcagcatctgcag

SEQ ID NO: 759184 - DNA, 120 bp, Artificial Sequence
  ENSG00000214530_21 (sequence is synthesized)
ctctctccgggctagacacctggctgtatatctgggcccagagagagtctccttccagggaccgggaggagacacagtctgctgggccaagccccatcacacagatgggccaaccgaggc

SEQ ID NO: 759185 - DNA, 120 bp, Artificial Sequence
  ENSG00000214530_22 (sequence is synthesized)
ctggagagcaggagtgactcaccctgcctctctcagctggaacccaggcttctgcatgcccctgcctgttccagggatctgggctgctgccaggcccttctaggagagtggtctccctca

SEQ ID NO: 759186 - DNA, 120 bp, Artificial Sequence
  ENSG00000214530_23 (sequence is synthesized)
cttacccaagtgggtggtgaataaatcttctcagttcctggctcccaaggtgagtggccttgggattttggggaggggtgttgaagactggaaagaggactatggaatgaggtgggtgga

SEQ ID NO: 759187 - DNA, 120 bp, Artificial Sequence
  ENSG00000214530_24 (sequence is synthesized)
ggtgaataaatcttctcagttcctggctcccaagccgtggctgcacccggagcagagcccgttgccgagcctggcgctgtcggagctgtcggtgcagcatgcggactcactggagaacat

SEQ ID NO: 759188 - DNA, 120 bp, Artificial Sequence
  ENSG00000214530_25 (sequence is synthesized)
agagctaagcctgaggacttcggtctgaggtggaagggagtgagggtaaaggcttgtaggacttgcctcacacacctcctcctcatggggaagacagtggcctccctggaagctctgggc

SEQ ID NO: 759189 - DNA, 120 bp, Artificial Sequence
  ENSG00000214534_0 (sequence is synthesized)
gcttttcttagtgcctaaagtgtctgcaagtggaaatccagaggaagacagagagaaactgagttcctgacaatgcattcactaaagaaagtgacttttgaagatgtagctattgacttc

SEQ ID NO: 759190 - DNA, 120 bp, Artificial Sequence
  ENSG00000214534_1 (sequence is synthesized)
acccaggaagagtgggccatgatggacacatccaagagaaagctgtacagagatgtgatgctggaaaatatcagtcacctggtgtccctcgggtaccagataagcaaatcctatataatt

SEQ ID NO: 759191 - DNA, 120 bp, Artificial Sequence
  ENSG00000214534_2 (sequence is synthesized)
ttgcagctggagcaaggaaaagagctgtggcaggaaggaagagaatttcttcaagaccagaatccagacagggaaagtgcccttaagaaaacacacatgatatccatgcatcctatcatc

SEQ ID NO: 759192 - DNA, 120 bp, Artificial Sequence
  ENSG00000214534_3 (sequence is synthesized)
agaaaagatgcacccaccagtatgacaatggagaactctctcattctggaggatccttttgaatgtaatgattcgggagaagattgcactcacagttccacaataattcagtgtttgtta

SEQ ID NO: 759193 - DNA, 120 bp, Artificial Sequence
  ENSG00000214534_4 (sequence is synthesized)
actcatagtggaaagaaaccctatgtcagcaaacagtgtggaaaatcccttagtaatcttttgtcccctaaaccacataaacaaattcatactaaaggtaaatcatatcaatgtaatcta

SEQ ID NO: 759194 - DNA, 120 bp, Artificial Sequence
  ENSG00000214534_5 (sequence is synthesized)
tgtgaaaaggcctatactaattgctttcaccttagacggcccaagatgactcacactggagagaggccatatacatgtcatctatgtagaaaagccttcactcagtgttctcaccttaga

SEQ ID NO: 759195 - DNA, 120 bp, Artificial Sequence
  ENSG00000214534_6 (sequence is synthesized)
agacatgagaaaactcacacaggagagagaccatataagtgtcatcaatgtgggaaagcctttattcaatcctttaaccttcgaagacatgagagaactcaccttggagaaaagtggtat

SEQ ID NO: 759196 - DNA, 120 bp, Artificial Sequence
  ENSG00000214534_7 (sequence is synthesized)
gaatgtgataacagtgggaaagcctttagtcaaagctctggctttagaggaaacaaaataattcacactggagagaaaccacatgcttgtcttctatgtgggaaggccttcagtctgtct

SEQ ID NO: 759197 - DNA, 120 bp, Artificial Sequence
  ENSG00000214534_8 (sequence is synthesized)
tccgaccttagatgacatgagagaacacacactggagaaaagccatatgaatgccatttatgtgggaaagccttcagtcaatgtactaatcttaaataacatcagaaaattcacgctgga

SEQ ID NO: 759198 - DNA, 120 bp, Artificial Sequence
  ENSG00000214534_9 (sequence is synthesized)
gagaaaattataaacatcttcagaacatattctgactttagatgacacggtgttaggaatgacgaaggtaaggaatgtggaagagacttcagctgtagttgtagcatctgaacatgccaa

SEQ ID NO: 759199 - DNA, 120 bp, Artificial Sequence
  ENSG00000214534_10 (sequence is synthesized)
aggactaacattttgaagaaatactgtaatcaacatggaagatacttcagttacctttattcttcagtccacatcaataaattcatatggaagagaaattgtatgacatgtatgtaccaa

SEQ ID NO: 759200 - DNA, 120 bp, Artificial Sequence
  ENSG00000214534_11 (sequence is synthesized)
agacttgttagtgatctgagcataaatgacatgagagagctgaaactgtcaacataatcaactaaaagtcttcagcaacagctttaacttaaaacatgtgggactttcaagtagagaatc

SEQ ID NO: 759201 - DNA, 120 bp, Artificial Sequence
  ENSG00000214534_12 (sequence is synthesized)
tctaactctgcattcagtgttaaaatgtttttatttgcaatttattgtcaaataacatgagaaaactttacttggatgaaccctttatttgtattttctgtgaataaacattcagccaag

SEQ ID NO: 759202 - DNA, 120 bp, Artificial Sequence
  ENSG00000214534_13 (sequence is synthesized)
caccaggcctgatgttcacaagaaaacacagtgataaaatgctgctaaaatggaaaataagagaggaaagccttcataagctaaataagaagggaaagtctttccaagggcaatgaattc

SEQ ID NO: 759203 - DNA, 120 bp, Artificial Sequence
  ENSG00000214534_14 (sequence is synthesized)
gtggcacatgtgagatttctcactggacaaaacatggttagcatcttgaaaggagaaaattctttagtggtaattcatttcttagttgacactaagtttctcacattgaggagctatcaa

SEQ ID NO: 759204 - DNA, 120 bp, Artificial Sequence
  ENSG00000214534_15 (sequence is synthesized)
acttgaaaatcactgtgaagaaacctgatagatttcttatcagaaaagtgagtcaagaaggtggacctctagaaaaaactcttaacacatactttagcaaaataattcagaaatttgaga

SEQ ID NO: 759205 - DNA, 120 bp, Artificial Sequence
  ENSG00000214534_16 (sequence is synthesized)
aaatatctattcataaaaatgtggcatgtagatgcataatagcaaagtgaccagggaaaaaattgaatgcagaattatataagaaatctcattaaacttttccaaaagatcaatacttac

SEQ ID NO: 759206 - DNA, 120 bp, Artificial Sequence
  ENSG00000214534_17 (sequence is synthesized)
aaatattgaaagaatacaatctgttgttgaaaaaacttagtatgttggcaaagcccttgtttcatttatgcagccctaacaaatcgatttgcatctgcaccccttgggtgagattcttgg

SEQ ID NO: 759207 - DNA, 120 bp, Artificial Sequence
  ENSG00000214534_18 (sequence is synthesized)
tcgagattctaccccaacttctgagtctccccagtcttcaacagctctttcctcacagctcacctccctttacttcaacgtccactaaaatcacttgtttccatccaaccctcgagttga

SEQ ID NO: 759208 - DNA, 120 bp, Artificial Sequence
  ENSG00000214534_19 (sequence is synthesized)
cacaccagggatcttcagccccacttgctagatttctcagtgtgtcattgcatagatttagcagggaaatggaggctgtatcaaagacacttagtatatgcatttgggtgtccccagccc

SEQ ID NO: 759209 - DNA, 120 bp, Artificial Sequence
  ENSG00000214534_20 (sequence is synthesized)
tttcctctgtctctgagcagttacctgggatcagagaataagggagctcttctcttctatccctcagaaggctcttgaaattttgtccctggagcctctctaactggaagtagaagttca

SEQ ID NO: 759210 - DNA, 120 bp, Artificial Sequence
  ENSG00000214534_21 (sequence is synthesized)
tctcataacaccccacattttattcaggtaagtcctgagttattacacagagatagacacagctgtgctccttttactgcagtccagaagataaaacaccagcatgataaaacagccgaa

SEQ ID NO: 759211 - DNA, 120 bp, Artificial Sequence
  ENSG00000214534_22 (sequence is synthesized)
cctgtcagctaccttgcaagtctttcctatatttgattcaatgtacttttcccgaagcaaaatgaaagttctcacagaggggccctcctctgccttgtcctcagaattggaaaatgtatt

SEQ ID NO: 759212 - DNA, 120 bp, Artificial Sequence
  ENSG00000214534_23 (sequence is synthesized)
gtccgtgaaggagcctcaccactgaacctaaaactcaagagaaaatgtttcctgaatatcaagtgggatgacttgaaattttgccaaacaggcacaatcttaatacgatcggccttacta

SEQ ID NO: 759213 - DNA, 120 bp, Artificial Sequence
  ENSG00000214534_24 (sequence is synthesized)
aggctaaatggccttatccatggttgaaattgacacatcattatactttaaaaactccacaaatgattgattttactctgcagccagggtttatgtcaactgtgaggataatgagcaaga

SEQ ID NO: 759214 - DNA, 120 bp, Artificial Sequence
  ENSG00000214534_25 (sequence is synthesized)
aattcaagcccttggcaaactggttggagaggcaaggactgtgtccaggcagacagagctcatataattatttattgtttaatctatttaattaaatatgtaatttacccacaaactgta

SEQ ID NO: 759215 - DNA, 120 bp, Artificial Sequence
  ENSG00000214534_26 (sequence is synthesized)
gctgacattatatgtactcctgagccacattaagatgtactatttgtgctgtgaaattctatgggatttgacaaatgcatggtggcagatctccagccattattaaagcgtaacacagaa

SEQ ID NO: 759216 - DNA, 120 bp, Artificial Sequence
  ENSG00000214534_27 (sequence is synthesized)
tgcttctcttattcaagctcgtcttccctccacatagagggaatcaatcgacttttgtatactgatttttgtatttgcttctttatttccatcttctttaattaaagcacaagatatcgt

SEQ ID NO: 759217 - DNA, 120 bp, Artificial Sequence; identical to SEQ ID NO: 664654
  ENSG00000214562_0 (sequence is synthesized)

SEQ ID NO: 759218 - DNA, 120 bp, Artificial Sequence; identical to SEQ ID NO: 664655
  ENSG00000214562_1 (sequence is synthesized)

SEQ ID NO: 759219 - DNA, 120 bp, Artificial Sequence; identical to SEQ ID NO: 664656
  ENSG00000214562_2 (sequence is synthesized)

SEQ ID NO: 759220 - DNA, 120 bp, Artificial Sequence; identical to SEQ ID NO: 664657
  ENSG00000214562_3 (sequence is synthesized)

SEQ ID NO: 759221 - DNA, 120 bp, Artificial Sequence
  ENSG00000214562_4 (sequence is synthesized)
cttccagttggaagggaaactcaggttcttgcctaatggccgaagcccttcacagaatgtcccccacccctaacagctgcccactgcccctccccctctgcagaatgtctggggtcctat

SEQ ID NO: 759222 - DNA, 120 bp, Artificial Sequence
  ENSG00000214562_5 (sequence is synthesized)
gttccaggaacctgtttactttcaaattttcctgtttcagttggactcaggagcatctggtgagccaggtcactctctgggtcttacccttggcttttctcattgtggaaactgccagac

SEQ ID NO: 759223 - DNA, 120 bp, Artificial Sequence
  ENSG00000214562_6 (sequence is synthesized)
agcggtagtcagtgcccagcctgaggggatggcttcaaatggagcatacccagcgctgggaccgggcgtgaccgcgaaccctggcacctccctgtctgtgttcacggctctgcccttcac

SEQ ID NO: 759224 - DNA, 120 bp, Artificial Sequence
  ENSG00000214562_7 (sequence is synthesized)
cacacccgctcccggcccagcacacgggccgctccttgtgactgcaggggctcctccaggcggccctctggtgctgtctaacttccccagcacacctctggtgacagaacaggatggctg

SEQ ID NO: 759225 - DNA, 120 bp, Artificial Sequence
  ENSG00000214562_8 (sequence is synthesized)
cggcccgagtggggccggggcttccaacgtctttgtccagatgaggacagaggtggggcctgtgaaggccgctcaggcgcagaccttggtcttaactcagacccccctcgtctggcaggc

SEQ ID NO: 759226 - DNA, 120 bp, Artificial Sequence
  ENSG00000214562_9 (sequence is synthesized)
tccaggcgccctctgcggaggtgttgtgtgtccacctcccctactcctggcagctgctcctgtggtgcctgttatggctgcccaggtggttgggggcacccaggcctgtgagggaggctg

SEQ ID NO: 759227 - DNA, 120 bp, Artificial Sequence
  ENSG00000214562_10 (sequence is synthesized)
gtcccagggccttcctcttccaccaccaccaccaccggctgcccagctgccccccattgtgtcccaagggaatgctgggccatggccacaaggggctcacggagagggcagcctggcttc

SEQ ID NO: 759228 - DNA, 120 bp, Artificial Sequence
  ENSG00000214562_11 (sequence is synthesized)
ctcccaggccaaggccccgccagatgactcctgtaaccccaggagtgtctatgagaacttccgactctggcagcactacaagcccctggcccggaggcaccttccccagagtcctgacac

SEQ ID NO: 759229 - DNA, 120 bp, Artificial Sequence
  ENSG00000214562_12 (sequence is synthesized)
cgaagcgctttcgtgcttcctcatcccagttctccgatccctggcccggcggaagcccaccatgaccctggaggagggactgtggcgggccatgcgggaatggcagcacacgagcaactt

SEQ ID NO: 759230 - DNA, 120 bp, Artificial Sequence
  ENSG00000214562_13 (sequence is synthesized)
ctgaggaggagatgcagattcagaaatcgcaatggatgaaggggccccagtgcctgcctcctccagccacaccgaggcttgaacctcgaggacccccggcccctgaggtggtcaagcagc

SEQ ID NO: 759231 - DNA, 120 bp, Artificial Sequence
  ENSG00000214562_14 (sequence is synthesized)
cagtgtaccttcccagcaaggccggccccaaggccccgactgcctgcctgccaccacccaggccccagaggccagtgaccaaggcccgccggccaccaccccggccccaccggcgagcag

SEQ ID NO: 759232 - DNA, 120 bp, Artificial Sequence
  ENSG00000214562_15 (sequence is synthesized)
agaccaaggcccgcctgccaccacccaggccccagagaccagcagagaccaaggtccctgaggagatccccccagaagtggtgcaggagtatgtggacatcatggaggagctgctggggc

SEQ ID NO: 759233 - DNA, 120 bp, Artificial Sequence
  ENSG00000214562_16 (sequence is synthesized)
cttctctcggggccacgggggagcccgagaaacaacgggaagagggcgaagtgaagcagccacaggaagaggactggacgcccccagacccgggcctcctgagctacactgacaagctgt

SEQ ID NO: 759234 - DNA, 120 bp, Artificial Sequence
  ENSG00000214562_17 (sequence is synthesized)
gttcccagaaagacttcgtcaccaaggtggaggccgtcattcatccccaattcctggaagaattgctttccccagatccacagatggatttcttggccctaagccaggagctggagcagg

SEQ ID NO: 759235 - DNA, 120 bp, Artificial Sequence
  ENSG00000214562_18 (sequence is synthesized)
aggaaggactcacccttgcccagctagtggagaagcgcctcctacccttgaaggagaaacagcatgcgagggcagcccctagtcgtggcacagcccggttggactcaagttcttctaagt

SEQ ID NO: 759236 - DNA, 120 bp, Artificial Sequence
  ENSG00000214562_19 (sequence is synthesized)
ttgcagctggccaaggagcagagagagacgtccctgacccccaacaaggggttggcatggaaacctgcccaccccagacgactgcccgggactctcagggacgaggcagagcacacactg

SEQ ID NO: 759237 - DNA, 120 bp, Artificial Sequence
  ENSG00000214562_20 (sequence is synthesized)
gcatggccaggtccaaagactctgttgtgcttttgggatgtcaggattcccctgggctgagggctgcccggccaacctctcctccccaggaccacagacccacctgccctggcgtgggta

SEQ ID NO: 759238 - DNA, 120 bp, Artificial Sequence
  ENSG00000214562_21 (sequence is synthesized)
ccaaggatgccttggatctccctggagggtctcctgtcagggagtcacatgggctggctcaggggtcaagtgaggaggaggaactccccagcctggccttcctcttgggttcccagcaca

SEQ ID NO: 759239 - DNA, 120 bp, Artificial Sequence
  ENSG00000214562_22 (sequence is synthesized)
agcttctgccctggtggctaccccagagccctgtccctgcctcgggccttctcagcccagaaaagtggggaccccagggaactcatcagtccccatctgctgagagaagaggcctcaacc

SEQ ID NO: 759240 - DNA, 120 bp, Artificial Sequence
  ENSG00000214562_23 (sequence is synthesized)
tagcaccttctcctgccaacaaggccaagaagcgacctctctttggaagcctgtcccctgctgaaaagacaccccacccagggcctgggctcagggtctctggggagcaatccctgactt

SEQ ID NO: 759241 - DNA, 120 bp, Artificial Sequence
  ENSG00000214562_24 (sequence is synthesized)
gggggctgggtggcccctcacagtctcaaaagagaaagggtgaccccttggtctccaggaaggagaagaagcagcgttgtagccagtaggggcttctgagcaggctctctggggccgatc

SEQ ID NO: 759242 - DNA, 120 bp, Artificial Sequence
  ENSG00000214562_25 (sequence is synthesized)
cccaaggatggggctctggcatccgatgccccaaagcggtcaaaagcttcttctcccccagtgctgatcttgctgggccttagctttggagggtaggggagggaggggagggagagggtg

SEQ ID NO: 759243 - DNA, 120 bp, Artificial Sequence
  ENSG00000214562_26 (sequence is synthesized)
gcctgaatggggagggcaggaagggagggtctggggggaaggggctggggagtgggggtgggaagcagtgtgttgggggcctcgtgtgtaagtgtgaataaatgtagttgtcttggaaaa

SEQ ID NO: 759244 - DNA, 120 bp, Artificial Sequence
  ENSG00000214562_27 (sequence is synthesized)
gaaggactcacccttgcccagggagccccttcagatgctccagggactgacagatgctgaggaagccctgatccctcccaccacccactcacaaggccctgcctgctttagggaggcttc

SEQ ID NO: 759245 - DNA, 120 bp, Artificial Sequence
  ENSG00000214562_28 (sequence is synthesized)
ttggggccccctcatcgttatcagcatccctggaaaatcctgggattggagagagctggctggctcttgttctgctcggtgggagctgaggagaaggcagccgcctgcaacatggacatg

SEQ ID NO: 759246 - DNA, 120 bp, Artificial Sequence
  ENSG00000214562_29 (sequence is synthesized)
gggagaggaggctgctcctgcttaaccctcatcaggaagagcgcgggcactgggctgaggggagacgttgaggtgaccatccacacaggtgtgtttgggatacgatgatgggtggggagc

SEQ ID NO: 759247 - DNA, 120 bp, Artificial Sequence
  ENSG00000214562_30 (sequence is synthesized)
aggggaagtccttctgcctgtttctgggcaggagagagtcttgtccaactagctaaagcagatgctccttgctgtggccacagggactggcctcggggccctcaaggtcctgcatggagc

SEQ ID NO: 759248 - DNA, 120 bp, Artificial Sequence
  ENSG00000214562_31 (sequence is synthesized)
cccccacagctatgattcccttcccatatgatgactgaactcatgtggaattgatgtagacacagatttacattggtttctaaaacagttccctcccaacacaccatcaccaatgggaac

SEQ ID NO: 759249 - DNA, 120 bp, Artificial Sequence
  ENSG00000214562_32 (sequence is synthesized)
cagggtgggggtttctgctggttccagggcccggaggagctggggcccaggccaagaggggccgagggtcagccgcccttctgccaggcacagaccccaagggcagagcaggggctgcct

SEQ ID NO: 759250 - DNA, 120 bp, Artificial Sequence
  ENSG00000214562_33 (sequence is synthesized)
gggatgtggcattggctgtctgggaagtgccctgggagttgggggctaggtgttcgccaaagggagacttccagagtctatgagtgagatgaggactgcatcaggagagggaccgaggct

SEQ ID NO: 759251 - DNA, 120 bp, Artificial Sequence
  ENSG00000214562_34 (sequence is synthesized)
ggggaggatgctctgctctttcccaggttgtcctgtcttcccaatctctgctgaactgccctcaccccatgggccaactctgccccccttacccctaacccacctcttagaatctcagat

SEQ ID NO: 759252 - DNA, 120 bp, Artificial Sequence
  ENSG00000214562_35 (sequence is synthesized)
cccagcgtggacaggacccggcacccaccctggttccctcctggccaacaccttcttctccacggtctgagttctgattcctcccccagggcgcttattggctcaggacccctgtgactg

SEQ ID NO: 759253 - DNA, 120 bp, Artificial Sequence
  ENSG00000214562_36 (sequence is synthesized)
ccagggcactggtcccagcactgcctgcgtgcagagctgtggtcacggccctgggggctggcccagcagcagaggctggtggggcaaagctgtctggtacacggtggcctggcccctcgg

SEQ ID NO: 759254 - DNA, 120 bp, Artificial Sequence
  ENSG00000214562_37 (sequence is synthesized)
ccaagtgacaaagggagccatgtttgggtcctctctggccccatctgcccacagaacacagcagtcagcctgacagatgcccctctgccccgtcccttctgctcgatgtgggcagtgtcg

SEQ ID NO: 759255 - DNA, 120 bp, Artificial Sequence
  ENSG00000214562_38 (sequence is synthesized)
gaggcctgctgtcttctgtggcctttgggaaggagagtttatcttggcagggcttccccagctcagtgcacgtcaggccctcggggaaaatgtggggagcgaagagtcactggtgggtga

SEQ ID NO: 759256 - DNA, 120 bp, Artificial Sequence
  ENSG00000214562_39 (sequence is synthesized)
tgtgggcagctcccgtgactcctctacattcacggccatcctcaggagataaggtagcactgcccctttgcagggtttaggaatgttaagtgagccgtgtttgaagggaacatggtccat

SEQ ID NO: 759257 - DNA, 120 bp, Artificial Sequence
  ENSG00000214562_40 (sequence is synthesized)
actctggcgtgtgtgggtgcccagccaacttcctcacctaagggtgaaagtgacaccttggggctcctgctggttaccccactggctgttgtctatcccactgtccctgtccttgtcttg

SEQ ID NO: 759258 - DNA, 120 bp, Artificial Sequence
  ENSG00000214562_41 (sequence is synthesized)
gctgagccattcctaggaagcagaacttgtgcttcctccacctctgtgtcccacctgagccctacaatctgcccctaaatgggcacagtggggctgactggggggctctggtagactgaa

SEQ ID NO: 759259 - DNA, 120 bp, Artificial Sequence
  ENSG00000214562_42 (sequence is synthesized)
catacgtcccccgcccagttcctgtgctgaagccctaacccccaacgtgatggtatttggaaatggggcctttgggagttattcagggttagaagagaccatgagggtggggccctaatg

SEQ ID NO: 759260 - DNA, 120 bp, Artificial Sequence
  ENSG00000214562_43 (sequence is synthesized)
atgggattagggccctggtaagaagcagagaccccagagctctctctctccctgacacgaggacacactgagaaggcggccatctgcaagccagagagagagccctcaccagaaccttgc

SEQ ID NO: 759261 - DNA, 120 bp, Artificial Sequence
  ENSG00000214562_44 (sequence is synthesized)
ccactgggatgctaacctcggacttccagcctccagactgtgacaaatacatttctttttttaatatgtgccaccacccccaagtctatggccctttgtccgagcagccctatgtgacta

SEQ ID NO: 759262 - DNA, 120 bp, Artificial Sequence
  ENSG00000214562_45 (sequence is synthesized)
ggacaaagtccataatctcaagaacttccttcatgactggtatctggaaaccgtgcatcagagccacgggaaagaaaggctcagccctttacaactgtcagcacacctccaccccaagtg

SEQ ID NO: 759263 - DNA, 120 bp, Artificial Sequence
  ENSG00000214562_46 (sequence is synthesized)
cagtgtatcacacatgaaccaggagagcctgggacacagtgaaaaggaatctgtaaatacccatgatgtcatcgcatccacacttggggaagccatgcagcttgctcacagcaggtgctg

SEQ ID NO: 759264 - DNA, 120 bp, Artificial Sequence
  ENSG00000214562_47 (sequence is synthesized)
ggggtgtgctgaggctcttggtcggcttggcctccctgctcacacacccaggtcactctctgggaaccagtgcggctggggtggcccctggcaggtttgcctccagagacccctcccttc

SEQ ID NO: 759265 - DNA, 120 bp, Artificial Sequence
  ENSG00000214562_48 (sequence is synthesized)
accattggatgacagatccccgaagaagccatagcctcctgggaaactccatctgacaacgtgagcaaggcttgcccccgttagtgaacatgctgtgctttctgacagctatgaggatgg

SEQ ID NO: 759266 - DNA, 120 bp, Artificial Sequence
  ENSG00000214562_49 (sequence is synthesized)
acttgatccaggtggctgcccttttgtagctcactttgattctaacttcagcgttgcatgatgccctatgaatggaatatacaatgtgtgtctttcacatctgtcttctttcacttagaa

SEQ ID NO: 759267 - DNA, 120 bp, Artificial Sequence
  ENSG00000214562_50 (sequence is synthesized)
taatatttccaatggcatctacatttttagtatgtatcattacatcaaacctttttgttgctgaataatattccattaatggatatactaaaatttatccatttatcagttaagaacgtt

SEQ ID NO: 759268 - DNA, 120 bp, Artificial Sequence
  ENSG00000214562_51 (sequence is synthesized)
tgggtttttttcactttttggctattgtgaataacacttctaagaacatttgtgtacaaggtttcctggggatgtatgtttccatttctcatggctacatacctaagagtgaaattggtg

SEQ ID NO: 759269 - DNA, 120 bp, Artificial Sequence
  ENSG00000214562_52 (sequence is synthesized)
gaccatatggaaactctgtgtttaaccatttcagaaggtgccagactgttcccagtgtacatgaaccattttatatacccactagctgtgtgagggtcccagcgtctctccatattcgag

SEQ ID NO: 759270 - DNA, 120 bp, Artificial Sequence
  ENSG00000214562_53 (sequence is synthesized)
ccaacatttattatcaactctctttttgataaagtcatcctagtggttctgaagttgcatctcatcgtagtttgcatttgtgtttctctgatgttgaacctctttcacgtacctattcgc

SEQ ID NO: 759271 - DNA, 120 bp, Artificial Sequence
  ENSG00000214562_54 (sequence is synthesized)
cacttgtatatcttctttggagcaatgtgtactcaacatttagtaatttttaactggtttgtgttttgtcattgagttataagaattctttatatattccagataaaaatgctttacaag

SEQ ID NO: 759272 - DNA, 120 bp, Artificial Sequence
  ENSG00000214562_55 (sequence is synthesized)
cacaaggcccacctgattgtctaatcccccccgctggggatgctcggcttcttggggagccactctggagtgggaagatgcaggttcagagggagtaggatggacaggagccagggaggg

SEQ ID NO: 759273 - DNA, 120 bp, Artificial Sequence
  ENSG00000214562_56 (sequence is synthesized)
tctctttgacataaagcccagctgcctcaggcttccctacctgccgcctaagtgccctggtctccaccaccctgggccccgctcacacctggggcagtgcccgtaagtgccccctttcct

SEQ ID NO: 759274 - DNA, 120 bp, Artificial Sequence
  ENSG00000214575_0 (sequence is synthesized)
agccggctgatgtcactggcagcgggaagcatcagcagcctgatcacatgctggcccagtctgtaatgcagacgggataggggtgtgtgtgtgaggggagggggcctgtatggcaactgc

SEQ ID NO: 759275 - DNA, 120 bp, Artificial Sequence
  ENSG00000214575_1 (sequence is synthesized)
tcttgccccagcgtccccaaaagtgcagaggcagcggctgcagcatccagccagcttggatgtctggcctacttccaggactctgaagaaacagttacaagcaggatgcttttcccaacc

SEQ ID NO: 759276 - DNA, 120 bp, Artificial Sequence
  ENSG00000214575_2 (sequence is synthesized)
tctgcgcaagaatcttcccgtggcctcccagatgcaaatgacttgtgccttggcctgcagtccctcagtctgacaggctgggaccgaccctggagcacccaggactcagattcctcagcc

SEQ ID NO: 759277 - DNA, 120 bp, Artificial Sequence
  ENSG00000214575_3 (sequence is synthesized)
cagagcagcacacactcggtactgagcatgctccataacccactgggaaatgtcctaggaaaaccccccttgagcttcctgcctctggatccccttgggtctgacttggtggacaagttt

SEQ ID NO: 759278 - DNA, 120 bp, Artificial Sequence
  ENSG00000214575_4 (sequence is synthesized)
ccagcaccctcagttagaggatcacgcctggacacccggcccatcctggactctcgatctagcagcccctctgactcagacaccagtggcttcagctctggatcagatcatctctcagat

SEQ ID NO: 759279 - DNA, 120 bp, Artificial Sequence
  ENSG00000214575_5 (sequence is synthesized)
ttgatttcaagccttcgcatttctccacctctgcccttcctgtctctgtcagggggtggtcccagagaccctttaaagatgggggtagggtctcggatggaccaagagcaagctgctctt

SEQ ID NO: 759280 - DNA, 120 bp, Artificial Sequence
  ENSG00000214575_6 (sequence is synthesized)
gctgcagtcactccctccccaaccagtgcttcaaagagatggccaggagcttctgtgtggccatcctgggacctcctcgaagctcccaaagaccccttcagcatagagagagaggccagg

SEQ ID NO: 759281 - DNA, 120 bp, Artificial Sequence
  ENSG00000214575_7 (sequence is synthesized)
ctgcaccgacaagctgcagctgtgaatgaagccacctgtacctggagtggccagcttcctccccggaactataagaaccccatctactcttgcaaggtgtttctaggaggtgttccttgg

SEQ ID NO: 759282 - DNA, 120 bp, Artificial Sequence
  ENSG00000214575_8 (sequence is synthesized)
gatattacagaagctggattagttaacaccttccgtgtttttggctctttgagtgtggagtggcctggtaaggatggcaagcatccccggtgtcctcccaaaggtaatatgcctaaaggg

SEQ ID NO: 759283 - DNA, 120 bp, Artificial Sequence
  ENSG00000214575_9 (sequence is synthesized)
tatgtgtatctggtcttcgaactagagaagtctgtccgatccttgcttcaggcttgctctcatgacccgctgagcccagatggcctgagtgaatattatttcaagatgtccagccgaagg

SEQ ID NO: 759284 - DNA, 120 bp, Artificial Sequence
  ENSG00000214575_10 (sequence is synthesized)
gagcccatctcagaggcttgaccccagcaggacggtgtttgtcggtgctctgcatggaatgctaaatgctgaggccctggcagccatcttgaacgacctatttggtggagtggtgtatgc

SEQ ID NO: 759285 - DNA, 120 bp, Artificial Sequence
  ENSG00000214575_11 (sequence is synthesized)
cgggattgacacagataagcacaagtatcccattggttctggtcgtgtgactttcaataaccaacggagttacctgaaagcagtcagcgctgcttttgtggagatcaaaaccaccaagtt

SEQ ID NO: 759286 - DNA, 120 bp, Artificial Sequence
  ENSG00000214575_12 (sequence is synthesized)
cacaaagaaggttcagattgacccctacctagaagattctctgtgtcatatctgcagttctcagcctggtcctttcttctgtcgagatcaggtctgcttcaaatacttctgccggagctg

SEQ ID NO: 759287 - DNA, 120 bp, Artificial Sequence
  ENSG00000214575_13 (sequence is synthesized)
ctggcactggcggcacagcatggagggcctgcgccaccacagccccctgatgcggaaccagaagaaccgagattccagctagaggagctggccttgcccagtggcctgtggcgcccaaag

SEQ ID NO: 759288 - DNA, 120 bp, Artificial Sequence
  ENSG00000214575_14 (sequence is synthesized)
ctggcaggtcaggcaagcagcctgcaccaccctgccactggcgaccagggagctggcttcccaaggacaagggaaaattgtagtcacctttgcacttgctgaatctgtctttgtttctgc

SEQ ID NO: 759289 - DNA, 120 bp, Artificial Sequence
  ENSG00000214575_15 (sequence is synthesized)
actaattaatgcacattgagttttgtcaggttttgttttcagggggtgtaccaagggcaaggaccctctggcttaccctccaagcgactctgtagttttcccagattttagttcctcatt

SEQ ID NO: 759290 - DNA, 120 bp, Artificial Sequence
  ENSG00000214575_16 (sequence is synthesized)
ttgcagatgaaaagcggggaaaaaaaaaaaaaaaaaaaaaactacgtgtccagaaggtattgaggtattgacacggatgcctacacctaggtttatttattaaaagcgcttttttacatt

SEQ ID NO: 759291 - DNA, 120 bp, Artificial Sequence
  ENSG00000214575_17 (sequence is synthesized)
ccttgcaatactgatggtgatgatgcgcaggtctcattggtttcattcttgcagttgccatacagtgcctttccatttatttaacccccacctgaacggcataaactgagtgttcagctg

SEQ ID NO: 759292 - DNA, 120 bp, Artificial Sequence
  ENSG00000214575_18 (sequence is synthesized)
gtgttttttactgtaaacaataaggagactttgctcttcatttaaaccaaaatcatatttcatattttacgctcgagggtttttaccggttcctttttacactccttaaaacagttttta

SEQ ID NO: 759293 - DNA, 120 bp, Artificial Sequence
  ENSG00000214575_19 (sequence is synthesized)
agtcgtttggaacaagatattttttctttcctggcagcttttaacattatagcaaatttgtgtctgggggactgctggtcactgtttctcacagttgcaaatcaaggcatttgcaaccaa

SEQ ID NO: 759294 - DNA, 120 bp, Artificial Sequence
  ENSG00000214575_20 (sequence is synthesized)
atggcattgtcactggaagaagaagcaggaaggataaaagattgctgggacaaccaggaagcacctgctctctccacgtgtagtaatgccaatatctttcgaaggataaatgccatattg

SEQ ID NO: 759295 - DNA, 120 bp, Artificial Sequence
  ENSG00000214575_21 (sequence is synthesized)
gataattctctggatttcagtagagtctgcactacacctataaaccgaggaattcatgatcatttgccagacttccaggactctgaagaaacagttacaagcaggatgcttttcccaacc

SEQ ID NO: 759296 - DNA, 120 bp, Artificial Sequence
  ENSG00000214575_22 (sequence is synthesized)
ctggaccggataaacggtgtttgagcggctgctgtatatagttttaaatggtttattgcacctccttaagttgcacttatgtgggggggtggggttgatagaagtttttaatcacaaagt

SEQ ID NO: 759297 - DNA, 120 bp, Artificial Sequence
  ENSG00000214575_23 (sequence is synthesized)
cacaggacttttttcttttgtaactgagctaaaaagggctgcttttcggtgggggcagatgaaggctcacaggagccctttctcttagagggggcaagtacccttcccttatatctttaa

SEQ ID NO: 759298 - DNA, 120 bp, Artificial Sequence
  ENSG00000214575_24 (sequence is synthesized)
ggcaagtacccttcccttatatctttaatttgaggaatgtatgagataacagttgcagttgactgaaatgccactggaatttgaaaacttgacttttttttctttccttttttttttttt

SEQ ID NO: 759299 - DNA, 120 bp, Artificial Sequence
  ENSG00000214575_25 (sequence is synthesized)
cacaaaaactacttgcccctcctagggaagctgtgtgccaaagaaccagtgtcataacccctccctcctgctgagctgacgttgcattgttgcatatcccagctactctgtgggttttgt

SEQ ID NO: 759300 - DNA, 120 bp, Artificial Sequence
  ENSG00000214575_26 (sequence is synthesized)
gaagctgtgtgtgaagtctctacctcattgtagtatatgcaggcaagactgcactctcctacagatgtgtggagtaagctgtggtgtagtttttttggcacataataaacacgttgcagc

SEQ ID NO: 759301 - DNA, 120 bp, Artificial Sequence
  ENSG00000214575_27 (sequence is synthesized)
cggggctgcgcgcggcccgctgcaaaaatagtgcccacgtgcgtgcgcgtctctcgcccgccggctggccggtcagcccgtcagccccgcagggccacaccggccccatggcgttcccgc

SEQ ID NO: 759302 - DNA, 120 bp, Artificial Sequence
  ENSG00000214575_28 (sequence is synthesized)
tctgtggagagccccacgacggcggcggtcgcggcacctttaaggtggagggctcaagcccctcgtgcggcttcccaatcctgggcaggtcacgtggcttcacaccttcgcttggcgccg

SEQ ID NO: 759303 - DNA, 120 bp, Artificial Sequence
  ENSG00000214575_29 (sequence is synthesized)
tacacctataaaccgaggaattcatgatcatttgccagatgcagtcgtgattggcactgtaaagggtctccaatttgatgtactgtttaaggaacttctgcagaccccaatttgaacagt

SEQ ID NO: 759304 - DNA, 120 bp, Artificial Sequence
  ENSG00000214575_30 (sequence is synthesized)
cggtggggcctccgagccgcactgcggcctccaggcggcctcgagcgtctgtccagacgggagctgaccggacataaaggagcaccggcgcccggaacgtttctttctcacactgccgtc

SEQ ID NO: 759305 - DNA, 120 bp, Artificial Sequence
  ENSG00000214575_31 (sequence is synthesized)
gcacgggagacccgaagccgctggcgctggaagctcacgccccctgcgggtctctttagcacccggcgcgcggtgggggcgcccgggcgggacggggcggggctgctgacggcgtagacc

SEQ ID NO: 759306 - DNA, 120 bp, Artificial Sequence
  ENSG00000214575_32 (sequence is synthesized)
acaattctctaatagttttcctgctgtctgcagaataaaggccccttacaaaccgggcccaggcttccctccggcggtatcaggtcgcatcatcctcagtcctggtcagagggagccgct

SEQ ID NO: 759307 - DNA, 120 bp, Artificial Sequence
  ENSG00000214575_33 (sequence is synthesized)
cggtgccgtcctccctctctgcctttgcttgatcttccgcctggaatgccatctccgactctgcgtttgcctggggtttccggtccgcccctgcgccaggtgccctaggacgcctgccct

SEQ ID NO: 759308 - DNA, 120 bp, Artificial Sequence
  ENSG00000214575_34 (sequence is synthesized)
ccctatttctgtgaaactttctatctcagtgtgtcaggagcgccggaagcggtttctccggagaactccggtccaaagaggaccagtgatgtctttggaactttctggaacttcctgact

SEQ ID NO: 759309 - DNA, 120 bp, Artificial Sequence
  ENSG00000214575_35 (sequence is synthesized)
ctcgcggccccctctgcagcgcacggagcagagggtctaaagaagaagaagcaggaaggataaaagattgctgggacaaccaggaagcacctgctctctccacgtgtagtaatgccaata

SEQ ID NO: 759310 - DNA, 120 bp, Artificial Sequence
  ENSG00000214575_36 (sequence is synthesized)
atgggcgggagagggttaggcttgcaggccgcggaggtggcgtaggcggggagcgacccgagcccactctgggctgtgctgttcggaccctcagcctggcgagcattcgtgatgagttcc

SEQ ID NO: 759311 - DNA, 120 bp, Artificial Sequence
  ENSG00000214575_37 (sequence is synthesized)
attttcccttctaggctatgcctgagtgcctgtggacacagggtgtactgcaggaagttctgaacagctatttctgtggcagcattattctctcgaccctgccatgggaggtcccaggtg

SEQ ID NO: 759312 - DNA, 120 bp, Artificial Sequence
  ENSG00000214575_38 (sequence is synthesized)
ggcatgcttcccgtatctgcttgcttctccttgcaacaggggagaacaagcaggtggagtgctaccagctgagtccaggtttgagcagcctgcctgacttccaggactctgaagaaacag

SEQ ID NO: 759313 - DNA, 120 bp, Artificial Sequence
  ENSG00000214575_39 (sequence is synthesized)
acacgagcaggcagtcggctgctttggctctgctgtcggcggagaggacttcagtcgtgcgtgagggctgcttggccaccattgctggagaccggagggcgctgccttgcaacccagact

SEQ ID NO: 759314 - DNA, 120 bp, Artificial Sequence
  ENSG00000214575_40 (sequence is synthesized)
ctcgccctggagagatcactggaagagaaggagcgcggacacgaggctctactgacgaagcgatcgccgccgctcgcaggggcttgtaaatcgtgccctctttcgttaagagggaaactg

SEQ ID NO: 759315 - DNA, 120 bp, Artificial Sequence
  ENSG00000214575_41 (sequence is synthesized)
aggcccagggcagacagtgactcggcaagggtcacttaggcattcgtgatgagttcccctgaggtaacaggagaatccccagagggcaggtctaaaggcttccttttctccccaaatgcc

SEQ ID NO: 759316 - DNA, 120 bp, Artificial Sequence
  ENSG00000214575_42 (sequence is synthesized)
gacccatgtgttcctatagaagcaccagttgactgttgtgtgcccaagttttagattgagctctttagccttggttgttctgaagacttatacttctgattggactaccgaatgcgtgta

SEQ ID NO: 759317 - DNA, 120 bp, Artificial Sequence
  ENSG00000214575_43 (sequence is synthesized)
tctatctgagaagaacaactaacaaactatggttattcaactttgggtatttggcagacattttcttgaaaatcaaccaacattgccaagtaattcttcctgttgactcctgattttcgg

SEQ ID NO: 759318 - DNA, 120 bp, Artificial Sequence
  ENSG00000214575_44 (sequence is synthesized)
atagatagcatttttggcattcggctttctaggaatctgaccaaagaaaacacaaaatatgaagaagctacatcttaatttttatttatggttctgaaaacttggaaagtatatatataa

SEQ ID NO: 759319 - DNA, 120 bp, Artificial Sequence
  ENSG00000214575_45 (sequence is synthesized)
caggaagagtatgggtcagtgagatgtaccttgttccctaaatagaatatgataaatgcattttaaatggttataaagactggcaatatggaaaagttgaatgaggagagaaggagcatt

SEQ ID NO: 759320 - DNA, 120 bp, Artificial Sequence
  ENSG00000214575_46 (sequence is synthesized)
ggagcatttgtttaaattatagtataactagaactaatcaaaattgctcaggaagaaagtctaaaagaatatatatcaaatgctaaatgtctattggatgtttttaataatttctataat

SEQ ID NO: 759321 - DNA, 120 bp, Artificial Sequence
  ENSG00000214575_47 (sequence is synthesized)
gtgggaggagcacttgagcccaggagtttcaagttcagcctgggcaacacagcgagacctcctctctgcaggttataaatctttgcatcttagccttcatgaagttgccttcctgaaatt

SEQ ID NO: 759322 - DNA, 120 bp, Artificial Sequence
  ENSG00000214575_48 (sequence is synthesized)
gagaatcagcttagaaatctacagttgtgaaaagggccttgtgtgtcactggatttaacagttctcaatggcaccactctagagagcttgggaaaacaaccttgtaggattgtgtatttt

SEQ ID NO: 759323 - DNA, 120 bp, Artificial Sequence
  ENSG00000214575_49 (sequence is synthesized)
ggtcgtcttcacagtttgcagagggtaccaatcttcaagaacttgaggctgacgtgaggctcaagtttgtccctttaaggtcatcctgcagagttggtaaaactgtaaatgctcttggtc

SEQ ID NO: 759324 - DNA, 120 bp, Artificial Sequence
  ENSG00000214575_50 (sequence is synthesized)
attctcatgctcacttggattttagtaggccaaacaaaatgacattgggcctcttcttgttttgttttgatgtgaccagcttatgagatattaagtgccagtttcattacttggtctgtt

SEQ ID NO: 759325 - DNA, 120 bp, Artificial Sequence
  ENSG00000214575_51 (sequence is synthesized)
tttgttttccgcaagataattgaggataatagaactgatgaggcaggctccccttaaaaaactcaatctgtcaaccaatatttcattgcttcttatgttgggcattggctgtggagagtg

SEQ ID NO: 759326 - DNA, 120 bp, Artificial Sequence
  ENSG00000214575_52 (sequence is synthesized)
agggagaccggagtgaagaatggtacctacatttctgctttgggcatctggtggatggtggtgttatttaccgagatagggaataccaaaagaatagtttttgtgtaagggttcatgatt

SEQ ID NO: 759327 - DNA, 120 bp, Artificial Sequence
  ENSG00000214575_53 (sequence is synthesized)
ttttatatatatatataggagttcttttttcattcggtaatgtcttacccatcttctcatgccagttaataaagttgtatgtactaataatgaccacatagagttgtataacttaatcag

SEQ ID NO: 759328 - DNA, 120 bp, Artificial Sequence
  ENSG00000214575_54 (sequence is synthesized)
tttgggtggttttaccactgttggtacttacctctcttgtattcaataattagtgtttgcagatacaaattagcagctactgtatgccatgcaaaatgctttacatatgtcatcaaaaag

SEQ ID NO: 759329 - DNA, 120 bp, Artificial Sequence
  ENSG00000214575_55 (sequence is synthesized)
ttggtatcctttttccatttcacaaatggggaaactgagggatagaggttaagtaactgtgatatcacacagccaataaatggcagaatgaaaatttttaaacagctgtattgacataaa

SEQ ID NO: 759330 - DNA, 120 bp, Artificial Sequence
  ENSG00000214575_56 (sequence is synthesized)
atctacataccctaaagttcacctttaatgtacagttcattggtttttagtccagttgactcttggacagtgtgggagttaggaggaccaacccccacagtcaaatatctatgtataact

SEQ ID NO: 759331 - DNA, 120 bp, Artificial Sequence
  ENSG00000214575_57 (sequence is synthesized)
ttgactcccccaaaacttgactaatagcctgctgttgaccggaagccttaccgataacataaacagttgatcacatgttttgtatgttacatgtattttataccgtattcttacgataaa

SEQ ID NO: 759332 - DNA, 120 bp, Artificial Sequence
  ENSG00000214575_58 (sequence is synthesized)
gtaggctagagaaaaaatgttactagaaaatcataagagaaaatatatttactgttcattaagtggaagtgaatcataaagatcttcatatttactgttttcacattgagcaggccgagg

SEQ ID NO: 759333 - DNA, 120 bp, Artificial Sequence
  ENSG00000214575_59 (sequence is synthesized)
aagaggaaggattgattggtcttgctctctcaggggtggcaaaggtggaaggatgtggagcggatgtaaggagaagcaggcacagtcagtgtaactttacagaaataatttctgtctgac

SEQ ID NO: 759334 - DNA, 120 bp, Artificial Sequence
  ENSG00000214575_60 (sequence is synthesized)
tttttgctttttcatttctgtaaaaatgtttctatgtggtaccaatcctaattccaccatttgcgttagtttcagtgcctgtgtaatagaagggtctgtattgtaaaagaagtcaaaagc

SEQ ID NO: 759335 - DNA, 120 bp, Artificial Sequence
  ENSG00000214575_61 (sequence is synthesized)
agccttgaataatcggaacccttttgccagatcatctaatgtcaatatgttttctggcattgctacttcaacatcgtcttccatgtctggcactggtttggagcactcatctctatcaga

SEQ ID NO: 759336 - DNA, 120 bp, Artificial Sequence
  ENSG00000214575_62 (sequence is synthesized)
ttgtatgtaactcatttgggaaaggggagttgtgggtggagttgcctgtgtgtgtccaaggggaaggagggtacaatatctatgggatgcctgtcccctggaatgcaggctgggagatgg

SEQ ID NO: 759337 - DNA, 120 bp, Artificial Sequence
  ENSG00000214575_63 (sequence is synthesized)
gatgaggggaggagtggagattattgtggacatttgtagagttctcatccttaacaggatagaggatgctttgaagacccattgagcaatacattgcaggacctgagctcaggactctca

SEQ ID NO: 759338 - DNA, 120 bp, Artificial Sequence
  ENSG00000214575_64 (sequence is synthesized)
taatgtcaatatgttttctggcattgctacttcaacatcgtcttccatgtctggcactggtttggagcactcatctctatcagattgtcttctgctaattcctctggtatgttaactctt

SEQ ID NO: 759339 - DNA, 120 bp, Artificial Sequence
  ENSG00000214575_65 (sequence is synthesized)
ggatttctccaaggtccatgtcttggaaatcttcactcccaacctttttttgtcatatctacagtttctttcatgatttcctgtattggctctgtggtaaatctgtgaagtcatgtacaa

SEQ ID NO: 759340 - DNA, 120 bp, Artificial Sequence
  ENSG00000214595_0 (sequence is synthesized)
gatatagactgtcaatttcggatccaaagacggcgatggcagagctcacccgggttgcctgtcaaatcaaggctatcgcagaataaatcccgccgcctgccgcgaagccccggcgcaccg

SEQ ID NO: 759341 - DNA, 120 bp, Artificial Sequence
  ENSG00000214595_1 (sequence is synthesized)
caaacttcagtgagcgaactgggtgatcgctgttgggatatgcagattcctgatgtaaaaggcggggtggcccccccgagagcctctcccgggggccggagcccgcaggtgcagtgaggc

SEQ ID NO: 759342 - DNA, 80 bp, Artificial Sequence
  ENSG00000214595_2 (sequence is synthesized)
gagggagcccggcgcccggcggggtctggcggccgcacaccggcggcggcggcttgtctgcggcggctgcagcggatgat

SEQ ID NO: 759343 - DNA, 120 bp, Artificial Sequence
  ENSG00000214595_3 (sequence is synthesized)
cggatgatggtggcggccggcccgctgggctgtgcctgtgtgtcgccgcggaaatcagcgccctgcgccgcgcgctgagcccctgcaggtccgccgcagccccagcctcggcgaggacgg

SEQ ID NO: 759344 - DNA, 120 bp, Artificial Sequence
  ENSG00000214595_4 (sequence is synthesized)
ggcgcgcgggggggcggggggcgcgcggggtcggcttatcatggcggatcggacggcgccccgctgccagctccggctggagtgggtgtacgggtaccggggtcaccagtgccgcaacaa

SEQ ID NO: 759345 - DNA, 120 bp, Artificial Sequence
  ENSG00000214595_5 (sequence is synthesized)
cctgtactacacggcaggcaaggaggtggtctactttgtggctggggtcggggtggtttacaacacccgcgagcacagccaaaaattcttcctgggacacaacgacgacattatcagcct

SEQ ID NO: 759346 - DNA, 120 bp, Artificial Sequence
  ENSG00000214595_6 (sequence is synthesized)
tgccttacacccagacaaaactctcgttgcaactggccaagtcgggaaggagccatatatatgcatatgggattcctataatgtccagactgtgtctcttcttaaagatgtccatacaca

SEQ ID NO: 759347 - DNA, 120 bp, Artificial Sequence
  ENSG00000214595_7 (sequence is synthesized)
tggagttgcctgcctggcttttgactcagatggacagcgtttagcctctgtggggttggatgccaaaaacacagtctgcatttgggactggaggaagggaaaacttctggcgtcagccac

SEQ ID NO: 759348 - DNA, 120 bp, Artificial Sequence
  ENSG00000214595_8 (sequence is synthesized)
cggccattctgacaggatttttgatatttcctgggatccatatcagccaaacagagtggttagctgtggagtaaaacacataaagttttggacactgtgtggaaatgccctgactgcaaa

SEQ ID NO: 759349 - DNA, 120 bp, Artificial Sequence
  ENSG00000214595_9 (sequence is synthesized)
aagagggatatttggcaaaacaggggatcttcagaccatcctttgccttgcatgtgccaaagaagacatcacctactctggtgctttaaatggtgacatctatgtctggaaagggctcaa

SEQ ID NO: 759350 - DNA, 120 bp, Artificial Sequence
  ENSG00000214595_10 (sequence is synthesized)
tttagtccgcaccattcaaggagcacatagtgctggaatctttagcatgtatgcttgtgaagaaggctttgccactggtgggcgagatgggtgtatacgactgtgggacactgatttcaa

SEQ ID NO: 759351 - DNA, 120 bp, Artificial Sequence
  ENSG00000214595_11 (sequence is synthesized)
accaataaccaaaattgatctcagggagacagaacaaggatacaaaggcctctctatccggagcgtgtgctggaaagcagaccgccttctagcagggacccaggacagtgagatatttga

SEQ ID NO: 759352 - DNA, 120 bp, Artificial Sequence
  ENSG00000214595_12 (sequence is synthesized)
agtgattgtgcgagagcgagacaagccgatgttgatcctacagggccactgcgagggtgagctctgggctctggccctgcaccccaagaagcctctggctgtgacaggcagcgatgaccg

SEQ ID NO: 759353 - DNA, 120 bp, Artificial Sequence
  ENSG00000214595_13 (sequence is synthesized)
ctctgtcaggctgtggagcctggctgatcatgccttgatcgcccgctgtaacatggaagaggcggttcgcagtgtagctttcagccccgacggatctcagctggccctgggcatgaagga

SEQ ID NO: 759354 - DNA, 120 bp, Artificial Sequence
  ENSG00000214595_14 (sequence is synthesized)
cggctctttcattgttctccgagtcagagatatgacagaagtagttcacatcaaagatcgaaaagaagtcattcatgaaatgaaattttctccagatggttcttaccttgcagtgggatc

SEQ ID NO: 759355 - DNA, 120 bp, Artificial Sequence
  ENSG00000214595_15 (sequence is synthesized)
caatgatggcccagtagatgtctatgctgttgcccagaggtataagaaaattggagaatgcagcaagtcccttagtttcatcacgcatattgactggtccttggatagtaaatacttaca

SEQ ID NO: 759356 - DNA, 120 bp, Artificial Sequence
  ENSG00000214595_16 (sequence is synthesized)
aactaatgacggtgcaggagaacgattgttctacagaatgccatctgggaagcctttaacaagtaaagaagaaattaaagggattccttgggcctcctggacatgcgtgaaaggccctga

SEQ ID NO: 759357 - DNA, 120 bp, Artificial Sequence
  ENSG00000214595_17 (sequence is synthesized)
agtgagtggaatttggcccaaatacactgaggttactgacatcaactcagtggatgcgaattacaacagctcagtgctggtgtctggagatgattttggactggttaaattgtttaaatt

SEQ ID NO: 759358 - DNA, 120 bp, Artificial Sequence
  ENSG00000214595_18 (sequence is synthesized)
tccttgtctcaagagaggagccaaatttagaaagtatgtgggccattctgcacatgtcacaaatgtccgctggtcccatgactttcagtgggtgttgagcacaggaggggctgatcactc

SEQ ID NO: 759359 - DNA, 120 bp, Artificial Sequence
  ENSG00000214595_19 (sequence is synthesized)
agttttccagtggaggtttattccagaaggtgtcagcaacggcatgctggaaactgcaccccaagaaggtggagctgattcctacagtgaagaatctgattcagatttatctgatgtgcc

SEQ ID NO: 759360 - DNA, 120 bp, Artificial Sequence
  ENSG00000214595_20 (sequence is synthesized)
cgaactggactctgatattgagcaagaagctcaaatcaattatgatcgccaggtttacaaagaagatctacctcagctaaagcaacaaagtaaagagaaaaaccacgcagtgcccttcct

SEQ ID NO: 759361 - DNA, 120 bp, Artificial Sequence
  ENSG00000214595_21 (sequence is synthesized)
caaacgagaaaaggctcctgaggacagcttgaaactccagttcatacacggttatagaggctacgactgtagaaacaatctgttctacacacaagctggagaagtagtctaccacattgc

SEQ ID NO: 759362 - DNA, 120 bp, Artificial Sequence
  ENSG00000214595_22 (sequence is synthesized)
tgcagttgctgtcgtgtataatcggcagcagcactcccagaggctgtacctggggcacgatgacgacattctcagcctgaccatccatccagtgaaggactatgtggctactgggcaggt

SEQ ID NO: 759363 - DNA, 120 bp, Artificial Sequence
  ENSG00000214595_23 (sequence is synthesized)
tggaagagatgctgctattcatgtgtgggacacacaaactctaaaatgtttgtcgctgttgaaaggacaacatcagagaggagtgtgtgcacttgatttttcagccgatggaaaatgtct

SEQ ID NO: 759364 - DNA, 120 bp, Artificial Sequence
  ENSG00000214595_24 (sequence is synthesized)
ggtgtcggttggtttagacgattttcacagtattgtattttgggactggaaaaagggagaaaagatagccacaacaagaggacataaagataagatatttgtggtaaagtgtaacccaca

SEQ ID NO: 759365 - DNA, 120 bp, Artificial Sequence
  ENSG00000214595_25 (sequence is synthesized)
ccatgttgacaaactggttacagttgggataaaacacatcaaattctggcaacaagcaggtgggggcttcacttctaaaagaggaacttttggaagcgttggaaaattggaaacaatgat

SEQ ID NO: 759366 - DNA, 120 bp, Artificial Sequence
  ENSG00000214595_26 (sequence is synthesized)
gtgtgtttcttacggacgaatggaagatctagtgttctcaggagcagctactggagatatttttatttggaaagacattctactactgaagacagtgaaagctcatgatgggcctgtgtt

SEQ ID NO: 759367 - DNA, 120 bp, Artificial Sequence
  ENSG00000214595_27 (sequence is synthesized)
tgctatgtatgcactggataagggctttgtaacaggtggaaaggacggcatcgtggagctctgggatgatatgtttgaaagatgtttgaagacttatgccattaaaagatcagcattgtc

SEQ ID NO: 759368 - DNA, 120 bp, Artificial Sequence
  ENSG00000214595_28 (sequence is synthesized)
gactagctcaaaaggcttgcttttggaagataacccttcaattcgtgccatcactttgggacatggacatatcctggtgggaacaaaaaatggagagattctggaaattgataagagtgg

SEQ ID NO: 759369 - DNA, 120 bp, Artificial Sequence
  ENSG00000214595_29 (sequence is synthesized)
cccaatgacactgcttgttcaggggcacatggaaggagaagtgtgggggttggcagctcaccctctcctgcccatctgtgcaacagtgagcgatgataaaacacttcgcatctgggaact

SEQ ID NO: 759370 - DNA, 120 bp, Artificial Sequence
  ENSG00000214595_30 (sequence is synthesized)
atctgcccagcaccgtatgctggcagtacggaaactcaaaaaaggtggaagatgctgtgccttttcccctgatgggaaagccttagcggttggcttgaacgatgggagtttcctggtggt

SEQ ID NO: 759371 - DNA, 120 bp, Artificial Sequence
  ENSG00000214595_31 (sequence is synthesized)
aaatgctgacactgttgaagacatggtctctttccatcacagaaaagaaatgatctctgatattaagttttcaaaagatacgggaaaataccttgccgtggcatcccatgataactttgt

SEQ ID NO: 759372 - DNA, 120 bp, Artificial Sequence
  ENSG00000214595_32 (sequence is synthesized)
ggatatttacaacgtacttacaagcaaaagggttggcatctgtaaaggtgcttctagttatattacacacattgactgggactctagaggaaaattattgcaagtgaattcaggtgccag

SEQ ID NO: 759373 - DNA, 120 bp, Artificial Sequence
  ENSG00000214595_33 (sequence is synthesized)
agaacaacttttttttgaagctccaagaggcaaacggcatataataagaccttcagagatcgagaagatagagtgggacacatggacctgtgtcctggggcccacctgtgagggaatctg

SEQ ID NO: 759374 - DNA, 120 bp, Artificial Sequence
  ENSG00000214595_34 (sequence is synthesized)
cttaccaaagactgttcccttttagccaccggagatgattttggtttcgttaagcttttttcatatcctgtcaagggacagcacgcaagattcaagaagtatgtggggcacagtgcacat

SEQ ID NO: 759375 - DNA, 120 bp, Artificial Sequence
  ENSG00000214595_35 (sequence is synthesized)
gtcactaacgtgaggtggctgcacaatgactctgtgctgctcacggtgggcggcgccgacacagccctgatgatctggaccagggagtttgtggggacccaggagagcaagctggtggac

SEQ ID NO: 759376 - DNA, 120 bp, Artificial Sequence
  ENSG00000214595_36 (sequence is synthesized)
agcgaggagtcagacaccgacgtggaagaggatggaggctatgacagcgatgttgctagagaaaaggccattgactacaccaccaagatttatgctgtgagcatcagggaaatggaaggc

SEQ ID NO: 759377 - DNA, 120 bp, Artificial Sequence
  ENSG00000214595_37 (sequence is synthesized)
accaagccacaccagcagctgaaggaagtttccgtggaagaaagaccacccgttagccgagcagctccccagcctgagaaactgcagaagaacaatatcaccaaaaaaaagaaactggtt

SEQ ID NO: 759378 - DNA, 120 bp, Artificial Sequence
  ENSG00000214595_38 (sequence is synthesized)
gaggagctggctctagaccacgtgtttggctacagaggtttcgactgtcgaaataacctgcattaccttaatgatggcgctgacatcatcttccacacagcagcggctggcatcgttcag

SEQ ID NO: 759379 - DNA, 120 bp, Artificial Sequence
  ENSG00000214595_39 (sequence is synthesized)
aacctctccacagggagccagagcttctatctggagcacacagatgacatcctctgtctcacagtgaaccagcaccccaagtacagaaacgtggtggccaccagccagatagggacaaca

SEQ ID NO: 759380 - DNA, 120 bp, Artificial Sequence
  ENSG00000214595_40 (sequence is synthesized)
ccttccatccacatatgggacgccatgaccaaacacaccctctccatgctgcggtgcttccactccaagggggtgaattacatcaacttcagtgcaactggaaagctcctggtgtcggtg

SEQ ID NO: 759381 - DNA, 120 bp, Artificial Sequence
  ENSG00000214595_41 (sequence is synthesized)
ggagtggaccctgagcacaccatcactgtctggcgatggcaggaaggtgccaaggttgccagccgagggggtcacctggagcgcatatttgtggtggaatttcgccccgactcagacacg

SEQ ID NO: 759382 - DNA, 120 bp, Artificial Sequence
  ENSG00000214595_42 (sequence is synthesized)
cagtttgtatctgtcggggtcaaacatatgaagttctggaccctggcaggcagcgccttgctttacaagaaaggggtcatcgggtccctgggagctgccaaaatgcagacgatgctctcc

SEQ ID NO: 759383 - DNA, 120 bp, Artificial Sequence
  ENSG00000214595_43 (sequence is synthesized)
gtggccttcggtgctaacaatctcactttcacgggtgccatcaatggagatgtctacgtctggaaggaccacttcctcatccggctggtggccaaggctcacacaggccccgtgttcaca

SEQ ID NO: 759384 - DNA, 120 bp, Artificial Sequence
  ENSG00000214595_44 (sequence is synthesized)
atgtacacaacccttcgggatggactcatagtgaccggcggaaaagagaggccgaccaaagaaggaggtgctgtaaaattgtgggaccaggagatgaagcgctgccgggcctttcagctg

SEQ ID NO: 759385 - DNA, 120 bp, Artificial Sequence
  ENSG00000214595_45 (sequence is synthesized)
gagaccgggcagctggtggagtgtgtgcgctccgtgtgccgtggaaaaggaaaaatcttagtgggaaccaaagacggagaaataattgaagttggtgaaaaaaatgctgcttctaacatc

SEQ ID NO: 759386 - DNA, 120 bp, Artificial Sequence
  ENSG00000214595_46 (sequence is synthesized)
ctgattgatggtcacatggaaggggagatctggggcctggccactcacccttccaaggacctcttcatctctgccagcaacgatggcacagcccggatctgggacctggctgacaagaag

SEQ ID NO: 759387 - DNA, 120 bp, Artificial Sequence
  ENSG00000214595_47 (sequence is synthesized)
ctgttaaacaaggtgagcttgggccatgcggccaggtgtgcagcctacagccctgatggggagatggtggccattggcatgaagaatggagagtttgtcatcttgttggtgaacagcctg

SEQ ID NO: 759388 - DNA, 120 bp, Artificial Sequence
  ENSG00000214595_48 (sequence is synthesized)
aaagtttgggggaaaaaacgagaccggaaatctgctatccaagatatcagaatcagcccagacaaccgattcttagccgttggttcttctgaacacacagttgacttctatgacctcact

SEQ ID NO: 759389 - DNA, 120 bp, Artificial Sequence
  ENSG00000214595_49 (sequence is synthesized)
cagggcacaaatctgaaccgcattggctactgcaaagatatcccaagctttgtcattcagatggatttttctgcggatggcaaatacattcaggtgtcaacaggtgcctataagcgccag

SEQ ID NO: 759390 - DNA, 120 bp, Artificial Sequence
  ENSG00000214595_50 (sequence is synthesized)
gtgcatgaggtccccctggggaagcaggtaactgaagccgtggtcattgagaagatcacctgggcctcctggacaagcgtcctgggagatgaagtcattggaatctggccacgaaatgca

SEQ ID NO: 759391 - DNA, 120 bp, Artificial Sequence
  ENSG00000214595_51 (sequence is synthesized)
gacaaggctgatgtcaactgcgcatgtgtgacccacgctggcctgaacattgtcacaggagatgactttgggctggtgaagctctttgattttccatgcacagaaaaatttgccaaacat

SEQ ID NO: 759392 - DNA, 120 bp, Artificial Sequence
  ENSG00000214595_52 (sequence is synthesized)
aagcgatacttcggtcactcggctcacgtgacgaacatccgtttctcttatgatgacaagtatgtggtcagcactggaggagacgactgcagtgtatttgtgtggcgatgtctgtaaaat

SEQ ID NO: 759393 - DNA, 120 bp, Artificial Sequence
  ENSG00000214595_53 (sequence is synthesized)
gccagaagcctcttatgttattgctgctgctgctaccagccagcaactgcagaggccatgctgaggtgcctccttgccaccagccgttgggaaatgcctaccatgctgccccggatgcac

SEQ ID NO: 759394 - DNA, 120 bp, Artificial Sequence
  ENSG00000214595_54 (sequence is synthesized)
aagctcaaaacgctgcagaagttacacaactgctcccataatctggactctccaaaaccgtgatgccacgaaggaaggtcaagttttaaaatgttaaagactgcttgcctctgttcctga

SEQ ID NO: 759395 - DNA, 120 bp, Artificial Sequence
  ENSG00000214595_55 (sequence is synthesized)
gactaaacagtatacatactaactacattgacaaagaaatcctatctgataatgtagcccgctgacgaattttgaagcctcggttaccctaaccaatatgtagcttttaatttgcatcaa
